United States Patent Application Publication US 2007/0009899 A1 - sequence listing, part 4

SEQ ID NO: 12036 - DNA, 1577 bp, Canis familiaris
gggcaccctgtccaggtcccctacaaattcccccacacacgcacgccagtgccctcggtggggtcatttgggcacacagagcaggggccggccgctcaccccggagggacggagcccctcgcctcacctcctgggcctgtctggctggctgcacaagcttgctaacagctgacacagaccccagggttgaaagaagctaccagggacacataacatggcagccagcgggaagaccagcaagtctgcatcaaaccatgtgatcttcaagaagatttcccgggacaagtcggtgaccatctacttggggaagagagactatatagaccatgttgaacaagtagagcctgtggatggtatcgtgttggtggatcccgagcttgtgaagggaaagaaagtgtatgtctctctgacctgcgccttccgctacggccaggaagacatcgacgtgattggcctgagcttccgcagggacctatacttctctcaggtccaggtgttcccacccgtagaggctgcaggcgcccccacgaagctgcaggagagcctgatgaagaagctggggggcaacacgtaccccttcctgctcacgttccctgattacttaccctgctcggtgatgctgcagccagctccgcaagacatggggaagtgctgtggggtcgactttgaggtcaaggcattcgccagagacagcacagaggatgaagaggacaaagtgcccaagaagagctccgtgcgtttactgatccggaaagtacagcatgcgccatcgaagatgggtccccagccccgagctgaggccgcctggcagttcttcatgtccgacaagcccttgcacctggctgtctccctcagcaaagagatctatttccatggggagcccattactgtgactgtgactgtgaccaataacacagagaagactgtgaagaagattaaagcattagtggaacaagtggccaacgtggttctctactcgagtgattattataccaagccagtggcccaggaggaaacacaagaaaaagtgccaccgaacagcactctgaccacgacgctgacgctggtgcccttgctggccaacaaccgtgaaagaaggggcatcgccctggatgggaagattaagcatgaggacacgaaccttgcttcgagcaccataataaaggagggcatagaccggactgtcctgggcatcctggtgtcttaccatatcaaggtgaagctcacggtgtcaggctttctgggagagctcacctccagtgaagtggcaactgaggtgcctttccgcctcatgcacccccagcccgaggacccagctacggcaaaggaaagttttcaggatgcaaatttggttttcgaggagtttgctcgccaaaatctgaaagactttgctgaggaggggaagaaagaccgggaggccatggatgagtgaagaggtcggtcgacctggacgctgggaaacagtagttcacgcaggataagccaaacgctacagttagccctttagttaggctaaataccaaagtgtgagtcttcttcatagaaataaagtttgtctgttcagctgtgaaaaaaaa

SEQ ID NO: 12037 - DNA, 1032 bp, Canis familiaris
atgaacatacacaggtctacccccatcacaatagcaagatatgggagatcgcggaacaaaacccaggatttcgaagagttgtcgtctataaggtccgccgagcccagccagagtttcagcccgaacctcggctccccgagcccgcccgagactccgaacttgtcgcattgcgtttcttgcatcgggaaatacttattgttggaacctctggagggagaccacgtttttcgtgccgtgcatctgcacagtggggaggagctggtgtgcaaggtgttcgatatcagctgctaccaggaatccctggccccgtgcttttgcctgtctgcccacagcaacatcaaccaaatcaccgaaattatcctgggggagaccaaagcctatgtgttctttgagcgaagctatggggacatgcattcatttgtccgcacctgcaagaagctgagggaggaggaggcggccagactgttctatcagattgcatcggccgtggcccactgccacgacggggggctggtgctacgggacctgaagctgcggaagttcatctttaaggacgaagaaaggactcgggtcaagctggaaagcctggaagatgcctacatcctgcggggggatgacgactccctctccgacaagcacggctgccccgcttacgtaagccctgagatcttgaacaccagtggcagctactcgggcaaagcagccgacgtgtggagcctgggcgtgatgctctacaccatgttggtggggcggtaccctttccatgacattgagcccagttccctcttcagcaagatccggcgtggccagttcaacattccagagactctgtcacccaaggccaagtgcctcatccgaagcatcctgcggcgggagccctcagagaggctgacctcgcaggaaattctggaccatccttggttttctacagattttagcgtctcgaattcaggatatggtgctaaggaagtgtctgatcagctggtgccggatgtcaacatggaagagaacttggaccctttctttaactga

SEQ ID NO: 12038 - DNA, 4643 bp, Canis familiaris
ggcacgaggcaggatgtagagtgctgttcaggttctccagcggagtccccgaaggggccagcttcattgaaagcttctgcacagtgagaggaggagttacagtacctgactcggggctgctctgaatccagtgctgctcagccgggaagatactttccaagcgttatgaaggcggagaaggatcccgaagacgaggaaaatatccttagagatccaagctaagtgtagcccagcatgaacaggaagatttgtaaagagagggacggattcaccggctaggagtttgtctgagggcgtgctttgtgagccgcagagatttgtaacttaatgccaagtagtttgctgctagcaaccagaaaccaaatcctgtctatgatgaactgttggttttcttgtgctcccaagaacagacatgcagcagattggaacaaatatgatgaccgattgatgaaagccgcggagaggggagatgtagaaaaagtttcctcaatccttgctaaaaagggcatcaatccaggcaaactagatgtggaaggcagatctgccttccatgttgtggcctcaaaggggaatcttgaatgtttgaatgccatccttatacatggagttgatattacaaccagtgacactgcaggaagaaatgctcttcacttggctgcaaagtatgggcatgcattgtgtctacaaaaacttctacagtacaattgtcccactgaacatgcagacctgcagggaagaaccgcacttcatgacgcagcaatggcagactgtccttccagcatacagctgctttgtgaccatggggcctccgtgaatgccaaagatgtggatgggcggacaccgctggttctggctactcagatgtgtaggccagcaatctgtcaactgctgatagatcgaggggcagagattaattccagagacaaacaaaacagaactgctctcatgcttggttgcgagtatggttgtaaggatgctgtagaagtcttacttaaaaatggtgctgatgtaagcctgctggatgccttgggccatgatagttcttactatgcaagaattggtgacaatctggacattctaactttattgaagactgcgtcagaaaataccaacaaagggagagaactttggaagaaaggaccatctttacagcagcgaaatttgccgtacatgctagatgaagtaaatgtgaagtcaagtcagagggagcatcgaaacattcaggagctggagattgaaaatgaagatttgaaagacaggttgagaaaaattcagcaagaacagagaatattactggataaagtcaatggtttacaactacagctgaatgaggaagtgatggttgctgatgatctggaaagtgagaaagaaaagctgaagtctcttttggtggctaaagaaaagcaacatgaagaaagcctaagaactattgagtctctgaaaaacagatttaaatattttgagtgtacttccccaggggtgccagcccacatgcaaagcaggtctatgttaagaccactggagctatcattacccaatcaaacctcatattctgaaaatgacctcttaaagaaagagttagaagcaatgagaactttctgcgaatcagccaaacaagaccgcctcaagctccagaacgagctggcgcacaaggtggctgagtgcaaagctttaggactagaatgtgaacgcatcaaggaggactctgatgagcagataaagcagttagaagacgcattgaaagatgtgcagaagagaatgtatgagtcggaaggtaaagtaaaacaaatgcagacacactttcttgcccttaaagagcacctgaccagtgaagcagctatagggaatcacagactaatggaggagctgaaggatcagttgaaggacatgaaagcgaaatatgagggtgcatcagcagaagtgggaaaactgcgaaaccaaatcaaacaaaatgagctgctagtagaacagtttaggagagatgaaggcaagctggtggaagagaataagcgattgcagaaggaactcagtatgtgtgaaacggagcgagacaagaaaggaaggagggttgctgaggtggaaggccaggtaaaggaactcttagcaaagctgaccttgtcagttccaactgaaaaatttgagagcatgaagagcttattatcaagcgaagtaaatgagaaggtgaaaaaaattggagagacagaaagagagtatgaaaaatcacttactgaaatcagacagttaaggagagagcttgagaattgtaaggccaaacttgctcagcatgtcaagccagaggagcatgagcagctcaagagcagactggagcaaagagcaggagaacttgcaaagaaggtcacggaactcacgtcgaaaaatcaggtgttgcaaagggacgttgaaaaggtttatctggataataagctcctcaatcagcaagtacataatttaacaagtgaaataaaaagtcattatgttcccctacaagtgagtgaagaaatgaaaaagtcacatgatgtcaccgtcgaggaactgaagaaacagcttttagatgtcacgcaaaaatgcgcagacaagcagctggaaatggagaaattgctgttggaaaatgacagtttaagtaagaacgttagccgcctagaaactgtatttgtgcctcctgagaaacaccaaaaagaggtcacagctctgaaatccagcgtcgctgacctcaaacgacagctgttggaactgaacaagaagtgtggggaagaccgagagaaaataaacgccctcgtgtcggaaaacactagcttgaaaaagaccctgagtaatcagtatgtgccggctaagacccacgaggaggttaagaccgcgctgagtggcacgctggataagaccaatagagaattactagatgcgaagaagaaatgggaagatctcaatcaggaatttgtaaaaacaaaagatgagaatgaaatcctcaaaagaaacctggaaaacactcagagccaaataaaagccgagtacatcagcctccgtgagcatgaagagaagatgagtgccataaatcagaacatgaagagtgtacaggataacagtgcagaaatactggccaactacagaaagggccaagaggagattgtgacactacacgcagaaattgaagcccagaaaaaggaacttgacaccatccaagaatgcattaagctcaaatatgctcctattatcagcttcgaagagtgcgagagaaaatttaaagccacagagaaagaactaaaagaacagttatcggagcagatgcaaaaatatcacgtcagggaagaagaggccaagaagtacaagcaagagaatgacaagttgaagaaggagattttcactcttcagaaggatttaaaagataagaatgttctcatcgagaactctcatgacatggaaagagcactcaacagaaaagcagaagagctcaacaaacagttgaaagacctgttgcagaagtacagtgagataaagactgagaaggagaagctggttgacgacaatgccagacagacttctgagcttcttgcagcccagacccttctgcaaaagcaacatgttccattggaacaagttgagaccctgaaaaaatctcttaacagcacaattgagcatctcaaggaagaactgaagaataagcaaaagtgttatgagaaagagcagcagacagtggccaaactgcatcagatgctagagaaccaaaagaactcttcagtgcccctgggagagcatctgcgggttaaggaagcctttgagaaggaagtgggcatgataaaggccagcctgagggaaaaggaagaagaaagccaaaacaaaaccgaagaggtctccaaactgcagtctgaggttcaggacacaaaacaagcattacaaaaactagagacaagagaggtagttgatttgtctaaatataaagcaacaaaaagtgatctggagacccagatttccaacctgaatgaaaaactggccaatctgaatcggaagtatgaagaagcctgcgaggaggtgctgcgtgcccaaaggaagcaactgtctgccaaagatgagaaggaattgctacatttcagcattgagcaagaaatcaaggatcagcaggagcggtgtgataagtccttaacaacaatcacagagttacagaaaagaatacaggaatctgccaaacagatcgaagcgaaagataataagataacagaactgcttaatgatgtggaaagactcaaacaggcactcagtggcctttcacagctcacttccccgagcgggagtcccagcaagaggcagagccagctgattgacaccctgcagcaccaagtgaagtctctacagcagcagctggctgacactgacagacagcaccaagaggtgattgcgatttatcggacacaccttctgagtgctgcacagggtcacatggatgaagatgtgcaggcggccttactccagatcatacagatgaggcaggggctcgtgtgctagcaggcagtgctgactggctggtgtgtgctttggctgatggtgccaagcattccccttgcaactccatggcctttctgggccttgtgctagtataattgaaataaaatatattttgtttcatcaaaaaaaaaaaaaaaaaaaaaaaaaaa

SEQ ID NO: 12039 - DNA, 504 bp, Canis familiaris
cgctccaggggttgctgctgtggctgctgctgagtgtgggtggggtgtgggcatccagggggccattgcggccgctgtgccggcccatcaacgccaccctggctgctgagaacgaagcctgcccggtctgtatcaccttcaccaccaccatctgtgccggctactgccccagcatggtacgagtgctgccagccgccctgccacctgtgccccagccagtgtgcacctaccatgagctgcactttgcttccatccggctccccggatgcccgcctggcgtggaccccatggtctccttccccgtggccctcagctgtcgctgtgggccctgccgtctcagcaactccgactgtgggggtcccagagctcaatccttggcctgtgaccgccccctgctcccgggcctcctgttcctctaaggatcccctcctgccccaactcctggagccagcagatgctccttccctcccctcccaataaaggcttctcaaactgcaaaaaaaa

SEQ ID NO: 12040 - DNA, 864 bp, Canis familiaris
ctcactgtctgccagctcccagcactcctgtcaccatgtggttcctggccctgtgcctggcaatgtccctggggtggactggtgctgaaccccacttccagccccggatcataggaggcagggaatgtttgaagaattctcagccctggcaggtggctgtgtaccataatggtgaatttgcttgtgggggtgtcctggttaatccagagtgggtgctcacagctgcccactgtgcaaacagtaattgtgaggtctggctgggtcgccacaacctgtcggagtcggaagatgaaggccagttagtccaagtcagaaaaagcttcatacatccactctacaaaacgaaggtccctagagccgtcatccgtccaggggaagatagaagccatgacctcatgctgctgcacctggaagagcccgccaagataacaaaagctgtgagggtgatggacctgcccaaaaaggaacctccattggggagtacctgctatgtctctggatggggcagcactgatccagaaacgatttttcacccagggagtctccagtgtgtggacctcaaactcctgtccaataatcaatgtgcaaaagtatacactcaaaaggtgacaaagttcatgctgtgtgctggtgtcttggagggtaaaaaagatacctgcaaaggtgactcaggaggccctctgatatgtgatggtgaattggtaggtatcacatcatggggggctactccatgtggcaagcctcaaatgccatccttgtataccagggtgatgcctcatctgatgtggatcaaggacaccatgaaagccaacacctgaatgtccctttcctactctctactcctagtaaaattgagtatacatc

SEQ ID NO: 12041 - DNA, 157 bp, Canis familiaris
ggtgcggcttctggcgagagacatctataaccgggaggagttcgtgcgcttcgacagcgacgtgggggagtaccgggcggtcacggagctcgggcggccggacgctgagtactggaacgggcagaaggagctcttggagcagaggcgggccgagctg

SEQ ID NO: 12042 - DNA, 5352 bp, Canis familiaris
gccctgggtggccaagctcaggcctcagcagcactcttaggactgagccgcccacggggcagccgccaggaccgcagccatgaacgggacggagggcccgaacttctacgtgcccttctccaacaagacgggtgtggtgcgcagccccttcgagtacccacagtactacctggctgagccatggcagttctccatgctggctgcctacatgtttctgctgatcgtgctcggcttccccatcaacttcctcacgctctacgtcacagtccagcacaagaagctgcgtacacctctcaactacatcctgctcaacctggctgtggctgacctcttcatggtcttcggtggcttcaccaccaccctctacacctctctgcatggatactttgtcttcgggcccacaggatgcaatgtggagggcttctttgccacactgggcggtatgagctggggtctcagtggtgggatggggcgggggggatacgggagccaggaggagtggagggatctggagagacagcccgtacttggggatggtgtctaagagggctgctccccactatgttcaccagcagtgtctacttgatcaacacacactgttagtgatgataagctaggctgtttattgagggcaggcattggacactgtcgctctcttcctttacatcaaggaatctgagcatgagagaagtcaatggccttgctggggccacactgtggtggggagtttccaccccacatcgctctggcccctcgggcatgttctgtttcccttggagcacctgtgctggtcagacccatgccgggcactgggataggggtggacaggttggatccctgagctcagggctctcagcccaggatggcacacagatgatcagttctccagccactggactctgcctgtgttgggcaatgtgctcagtctctccccactggcatccatctgaccctgcagagaagggtctgtctatatgtggtacccctgtctcacccctgtctcgtggcctgaagctgggtgatctgtgttcattgagggtgacaaacacccagtgatggctggagattccctgggaatggggctgagacagcgccctggacatgtgaagcaaagagaagacaaggcgacagagcagtcctttggctgatgctaggctctgcagccaccccgggctctctcctgcttgcctgagaggctgtgtgtcccagagaaggggggccagtcctggatctgagccggaagacccaggccctggtcactgccctgccacatccctgaatgtgtttcttcccttctcctggcctcactttcctcagctgctaaacaggatctattgtctctccagcaccctcatcacttttccaaagaaactattcgaaatcatctttttttttctttttaaaagactttatttatttattcatgagagacacagagagaggcagaggcagaggtagagggagaagcaggctccctgtggggagatgatgtgggactcgatccaggacccgggatcacgccctgaactgaaggcagatgctcaagcactgagccacccaggcgtccctcgaaagcatctttcaaagctacagatcaccacacaatgtaatgccttcctatggaaggagtttcttcagaggggaagaacttccccacacaaaaaggctggaagacagggatgagaaggtaccatgtacaggtgggcacttccatgcaaggttggcaccagtttacaattattattttggagtaataattattagcgttcactttgtctctcagaaacatcctggtttggttgatagagtctatggccaacctccccattgagttttggggtaatgtttgaatacccccattctttttttttaagattttatttatttattcatgagagacacagagggagagaggcagagacacaggcagaggaagaagcaggctccatgcagggagcccaatgtgggactcaatccccagaccctaggatcacaacctgagtcaaaggcagatgctctactgctgaaccacccaggcacccccaaatttccccattcttttctgcttcttcctctgggcaaatgattccccagcttcctggctctgagatgcgggacccatagacccaggttatttcattccccaagtggaagaggccactgcttaagagggagggaggatgtccaactccaacaggcactctgcctgtcaccccggtctactccgcacattctccttcgcagactggttcttcacccctcttcccagagtccaagccatctccatcccaagtcctggccccagccctgccccaggctgccttcctggccgcccttctcccacccaggagtgctccctccttaggcagtggggtccaggtaggtggtgtgttgactgatcagtccctgactgccttgcaggtgaaattgccctgtggtctttggtggtcctggccattgagcggtacgtggtggtgtgtaagcccatgagcaacttccgttttggggagaaccatgccatcatgggcgtcgccttcacctgggtcatggcactggcctgtgcagcaccccccctcgctggctggtccaggtaatggcactgagcaaaagagaagggtccccgtccccgggggggaggtctctgtagggtccctcacccaggactcaaacctggtgctgtctggttctgggcatcgagcttatatgtcccctactctaaacggccaccctgacagctctcccaagggaggagtttagggcaagggaagagagaatcagaccctaatgttgctatgggggctggtcccatctcctgagccccatgtcaaggagaatccaagacgccccaacacttcaccttggctgtgcccctaatcctcaactaagccagggccagattccaatcctctttgccccataggcagttccctctgaccttgggcctcagcacccagggagggcgagcctgcctagtgcaggtggtgacattgtagctgctgggctgggaactaggtcctgtccagcctctagtccatcattcccaaatggggctcagatgggagataggaggacagtggtttgggaaactggactggtgaccctgtgggttcctggaggcctggtgtccctctggttccaggaaatctctcttcccctccctcctctctcagcctgcaaggtcaatttttgttcctgttgaatctgagccgaccccctccagactctttccctatgttttccagtcctgcccagtcccatccacacaggcacagccaatgaacaccattgtcatcatcctctgaaatgactgaaacatcctgacctcttgtttctaggaaatgtgcaaagatcccttagttactctgtgtgcccatctttggcttagaaaatacttataccctgttagtaagaacttggtttgtacgaactgcctccgatacagaatttgggagtttttccttctctcaccaacctctgccttgcagagcctgaggcctagtctctggccattgggagcagcgtgtctggtgaggaaacacaacgcaggtcagcagtgtataggctctgctaggtgagagactgggccatcttgtgataccacagcctccgtacaaccaaagcacattgttttcacaaagggcatttgaatctctcatctccgttgatttactcctcacagtcatgtagccaagcagatattttatcatacccattttacagagagggaaagcaggcacagagcaagaccagccacacagcaggtgtgttgcagagccagggctctggtcgactgcagcctgttcccaggtccttcacgcgtgggtctcccttacaccctctcctgtctcactcccctctggtgctcaggtacatcccagagggcatgcagtgctcatgtgggatcgactactacacactcaagccagaaatcaacaatgagtccttcgtcatctacatgttcgtggtccacttcgccatccccatgattgtcatattcttctgctatggacagctcgtcttcacagtcaaggaggtatgatccttgtgctgggtgctggggacacatgtgctggttgggttgagcccggctcctgtcccaaaggagtctggatagcaggccctatatccttgcaggcagctgcccagcagcaggaatcggccaccacccagaaggctgaaaaggaggtcacccgcatggtcatcatcatggtcatcgctttcctgatctgctgggtgccctatgccagtgtggcattctacatcttcacccaccagggctccgactttggccccatcttcatgaccctcccagcgttcttcgccaagtcctcctccatctacaaccctgtcatctatatcatgatgaacaagcaggtgcctgctggcgggacaggcgggtccaggggccccaggcttcaggcactgcctgtggaggacaagccgtgttctcagtcattccactggcaaaaccaggcagggaaactggcatcccccagggcatcggtcatatgggagaaatgcagattcctgctgaatcagagctgaatcagaagctcgcggtaggcccaggaatttgcatttctaacaagccctccaggtgtctctgagactggctcaaggatgagatgcgccaggccagatggttctggaggcccactttaaaagtcagatagactaagtcctaagcctgggaatgggatgccattttccacaaagctgaacaaggagctaagtcttaatctgagggatgaagggataaagtagttctttaacatcaaccagtgacttctctgcagaatacatgatccagtggggaaaacatggtctctggagctaggcatatcaggttcaaatctcagttcttattttctagctttgtgacccttgggcaagtcacttcccttctctggccttcagtgccttcatgcctagagagggcaaaatcccaaactctagggctaaataagatacttacagacagcccttggcacacagagggcatcacggaatgtcagcagtagcaacacccccttgggttcagtccctggcatctctgggcgggggggccacatgtgctttactaagttccctccaggaagccaggcttgagagggcagtggaaccctgtgagtgccagaagcagggaaggggttggaggcaaattttgccaaccaccccagtttgctacacacacttttagtggaccctgaccctgactcatatcccttgccttccagttccggaactgcatgatcaccaccctctgctgtggcaagaacccactgggtgacgacgaggcctctgccagcgcctccaagacggagaccagccaggtggcaccggcctaagccc

SEQ ID NO: 12043 - DNA, 328 bp, Canis familiaris
ctccgtagccttctccagggcggtgttcgccgagttcctggccacgctgctcttcgtcttcttcggcctcggctcagccctcaactggccgcaggccctgccgtccgtgctgcagatcgccatggccttcggcctgggcatcggcaccctggtgcaggccctgggccacgtgagcggggcccacatcaacccggccgtgacggtggcctgcctggtgggctgccacgtgtcctttctccgggctgccttctacgtggccgcgcagctgctgggggccgtggcaggggctgctctgctccacgagatcacgccaccgcacgttcgaggg

SEQ ID NO: 12044 - DNA, 162 bp, Canis familiaris
gctgctcatggctgtggtttcaatgtttactctacccgtagtgtatgttaagcaccaggcacagtttgaccaatatctgggtcttgtgaggactcacataaatactgttgtggcgaagtttcaggaccagcccgggccgtcgaccacgcgtgccctatagta

SEQ ID NO: 12045 - DNA, 295 bp, Canis familiaris
atgcgcgcggccgcggaggccgtcctgaagcaggacctggtagagaaggtgtctactctgctccagcatgaccagctcacccaggaaatgaagaaagggtccatcttcaagggcttccaggagccagacatccattttcttccatcctacaagttcgacattggtaaggactcctacgacaccacctccaagcaaaggaccccatcctacacggaccgggtcatgtacagaagccgccacaagggtgacatctgtccagtcaggtattcttcctgccctggcatcaagacgtctg

SEQ ID NO: 12046 - DNA, 370 bp, Canis familiaris
cagtaccaggagccctggcagtatgtggacgacgtctggctgatgttcaacaatgcctggctctataaccgcaagacatcccgggtctacaagttctgcagcaaacttgcagaggtcttcgagcaagaaatcgaccccgtcatgcagtcccttgggtattgctgcggacgcaagtatgagttttccccacagactttgtgctgctacgggaagcagctgtgtacaattcctcgtgatgctgcctactacagctatcagaataggtatcatttctgtgagaagtgtttcacagagatccagggggagaatgttaccctgggtgacgacccttcacagccccagacgacaatttcaaaggatcaatttgaaa

SEQ ID NO: 12047 - DNA, 1566 bp, Canis familiaris
ggctccccagtatttattgccttcaggtcctctacaaagaaaagtgtgcagtacgacgatgtaccagaatacgaagacagattgagcctctcagaaaactacactttgtctatcagtaatgcaaggatcagtgatgaaaagagatttgtgtgcatgctagtaaccgaggacaacgtgtttgaggcacctacaatagtcaaggtgttcaagcaaccatccaaacctgaaattgtaagcaaagcaccttttctcgaaacagagcagctaaaaaagttgggagactgcatttcaaaagacagttatccagacggcaacatcacatggtacaggaatggaaaagtgctgcaaccccttgaaggagtggtagtcttaatttttaaaaagcaaatggacccggtaactcagctgtataccatgacttcatccctggagtacaaggcaaccaaggctgacatacaaatgcaatttacctgctctgtgacgtattatggaccatctggccagaaaacagttcagtctgaacaagcaatctttgatatttactatcctactgagcaagtgacaatacaagtgctgccatcaaaaactgccatcaaagaaggagatattatcactcttaagtgcttgggaaatggtaaccctcctcctgaagaatttttgttttacctaccaggacagcctgaaggaataagaagctcaaatacttacacgttgacagatgtgaggcgaaatgcaacaggagactacaagtgctccctgatagacaaaaaaagcatgattgcttcaacagctatcacagttcactatttggatttgtccttaaacccaagtggagaagtgaccaagcagattggcgatgccttgcctgtgtcatgcacaatatctgctagcaggaacgcaactgtggtatggatgaaagacaacatcaggcttcgatctagcccatcattttccagtctccagtatcaggatgctggaaactatgtctgtgaaactgctctgcaagaggtcgaaggcctaaagaaaagagagtcattgacactcatagtagaaggaaaacctcaaatcaaaatgacaaagaaaactgatcccagtggactgtctaaaacaataatctgccatgtggaaggttttccgaagccggctatacaatggacaattaccggcagtggaagcgtcataaaccaaacagaggaatctccttatataaatggcaggtattatagtacaattatcaattcccctgaagagaatgttacattaacttgcacagcagaaaaccagctggagagaacagtaaactccttgaatgtctctgctataagtattccagaacacgatgaggcagacgaaataagtgatgaaaacagagaacaggtgaaccaccgggcaaccctgatcgtggggatcgtccttcgtctcctccatggtgccctagttgctggtgttgtctactggctgtacgtgaagaaatcaaagactgcatcaaaacacgtaaacaaggaccttggtaatctggaagaaaacaaaaagttagaacaaaacaatcacaggacagaagcctaa

SEQ ID NO: 12048 - DNA, 1651 bp, Canis familiaris
actacacttcaagagaaacataatcttgtttctgaggagaccgcaagaccacaatgtggctgctattaacagcggcgagtgtgatatctacacttggaaccacacatggtttatttggaaaattacatcccacaaaccctgaagtgaccatgaatataagtcagatgatcacctactggggatacccagctgaggaatatgaagttgtgaccgaagacggttatatccttgggatcgacagaattccttatgggaggaaaaattcagagaatataggccggagacctgttgcatttttgcaacacggtttgctcgcatcagccacaaactggatctccaacctgcccaacaacagcctggccttcatcctggccgacgccgggtacgacgtgtggctggggaacagcaggggcaacacctgggccaggaggaatctgtactactcgcccgactccgtcgaattctgggctttcagctttgacgagatggctaaatatgaccttcccgccaccattgacttcatcttgaagaaaacgggacaggacaagctacactacgttggccattcccagggcaccaccattggtttcatcgccttttccaccaatcccaagctggcgaaacggatcaaaaccttctatgcattagctcccgttgccaccgtgaagtacaccgaaaccctgttaaacaaactcatgctcgtcccttcgttcctcttcaagcttatatttggaaacaaaatattctacccacaccacttctttgatcaatttctcgccaccgaggtatgctcccgcgagacggtggatctcctctgcagcaacgccctgtttatcatttgtggatttgacactatgaacttgaacatgagtcgcttggatgtgtatctgtcacataatccagcaggaacatcggttcagaacgtgctccactggtcccaggctgttaagtctgggaagttccaagcttttgactggggaagcccagttcagaacatgatgcactatcatcagagcatgcctccctactacaacctgacagacatgcatgtgccaatcgcagtgtggaacggtggcaacgacttgctggccgaccctcacgatgttgaccttttgctttccaagctccccaatctcatttaccacaggaagattcctccttacaatcacttggactttatctgggccatggatgcccctcaagcggtttacaatgaaattgtttccatgatgggaacagataataagtagttctagatttaaggaattattcttttattgttccaaaatacgttcttctctcacacgtggttttctatcatgtttgagacacggtgattgttcccatggttttgatttcagaaatgtgttagcatcaacaatctttccattggtaatttttgaatttaaaatgatttttaaatttggggcatctgggtggctcagtcggctaagtcgtctgccttcggcttaagtcatgatctcggggtcctaggatggagccttgtgtctgggctccctgcccggggcgggggtctgcttctcctcctgctgctcccccctgctcgtgcgtgcacacgcgctctctctctctctctctcaaataaataaataaataaataaatacttaataaaataaaaaaaaaaaaaaa

SEQ ID NO: 12049 - DNA, 4702 bp, Canis familiaris
ccacacccccaccctgggccgcgtggcaaagagacctgtgggaggacgtcagaagggggatcagccctgtgacccctcaccccgggcctgggcccgcgccccggactttccgagagggccctgagagagttctgggggcctcgccgctcatcgcaccccgcttctgctcccagaagccggcgatgagcgcgtgcgccctcctggcgggtgggctccccgacccccggctctgcgcccccgcgcggtgggctcggtccccgcccggcgtccccggggccccgccctggccccagccccggctccggctcctgctgctgctgctcctcctgccgccctccgccctctccgccgtcttcacagtcggggtgctgggcccctgggcctgcgaccccatcttcgcccgcgcccgcccggacctggccgcccgcctggccgccgcccgcctgaaccgcgacgcagccctggaagacgggccccgcttcgaggtgacgctgctgcccgagccatgccggacgccgggctccctgggggccgtgtcctccgcgctgggccgcgtctcgggcctcgtggggccggtgaaccccgcagcctgccggccggctgagctactagcccaggaggcgggggtggcgctggtgccctggagctgcccggggacgcgggcggggggcaccacagcccccgccgggacgccggcggccgatgctctgtacgccctgctccgcgccttccgctgggcgcgcgtggccctaatcaccgcgccccaggacctgtgggtggaggcgggacgcgcgctgtcggcggcgctcagggcccggggtctgcccgtggcgctggtgaccaccatggagccctcggacctgtctggggcccgggaggccctgaggagggtccaggacgggcccagagtcagagcggtgatcatggtgatgcactcggtgctgctgggcggcgaggagcagcgctgtctgctgcaggctgcggaagagctgggcctggccgatggctccctggtcttcctgcccttcgacacgctccactacgccttgtccccgggcccagaggccttggccgtgctcgccaacagctcacagctgaggagggcccacgatgcggtgctcatcctgacgcgtcactgtcccccagggggcagcgtgatggacaacctgcgcagggcccaggagcaccaggagctgccctcggacctagatctgcagcaggtgtccccgttcttcggcaccatctacgacgcggtcctcctgctggcggggggcgtcgcacgggcacgggcggccgcagggggcggctgggtgtcgggagccacggtagcccaccacatcccggatgcccaggtccccggcttctgtgggaccctgggaggagcccaggagccaccgtttgtgctgctggacacggacgcggcgggggaccggctcttcgccacatacatgctggaccccacccggggctccctcctctcagctgggacccccgtgcatttccctagagggggaggaacacctgggtccgacccctcatgctggttcgagccaggtgtcatctgcaacggaggagtggagcccggcctcgtctttctcggcttcctcctggtggttgggatggggctgactggggcgttcctggcccattatttgaggcatcggctacttcacatccaaatggtctctggccccaacaagatcatcctgactctggacgatgtcacctttctccacccgcatgggggcagcacgcgaaaggtggtccagggaagtcgctcgagtctggccgcccgcagtacatcagacattcgcagcgtccccagccagcccttggataactccaacattggcctctttgaaggagactgggtttggctgaagaaattccccggggaccagcacatagccatccgcccagcaaccaagacggccttctccaagctccgggagctccggcatgagaacgtggtgctctacctggggctcttcctcggcagcgggggagctggtggctcggccgcgggggaaggcgtgctggccgtggtctcagagcactgcgcccggggctccctccacgacctcctcgcccaaagggacattaagttggactggatgttcaagtcctccctcctgctggacctcatcaagggaatgaggtatctgcaccatcgaggcgtggcccacgggcgcctgaagtcgcggaactgcgtggtggacgggaggttcgtgcttaaggtcacggatcacggccacgcgcgactaatggaagctcagagggtgttactggagcctcccagcgccgaggaccagctatggacagccccggagctgcttcgggacccggccctggagcgccggggaacgctgcccggcgacgtcttcagcctgggcatcatcatgcaggaggtcgtgtgtcgcagcgccccctatgccatgctggagctcactcccgaggaagtggtggagagggtgcggagcccccctccactgtgccggccctccgtgtccatggaccaggcacctgtggagtgcattcagctgatgaagcagtgttgggcagagcaccctgatcttcggccctccttgggccacatcttcgaccagtttaaaagcatcaacaagggtcggaaaaccaacatcattgactcgatgctgaggatgctggagcagtactccagtaacctggaggacctgatccgggagcggacggaggagctggagctggaaaagcagaagaccgacaggctactcacgcagatgctgcctccttctgtggcggaggccctgaagatggggacgccggtggagcccgagtattttgaggaggtgacactgtacttcagtgacattgtgggcttcaccaccatctcagccatgagtgagcccatcgaggtggtggatctgctcaacgatctctacacactcttcgacgccatcattggctcccacgacgtctacaaggtggagacaatcggggatgcctacatggtggcctcggggctgccacagcggaacgggcagcgacacgccgcggagatcgccaacatggccctggacatcctcagcgccgtgggctccttccgaatgcgtcacatgcccgaagtgcccgtgcgcattcgcattggcctgcactcgggcccgtgcgtggccggcgtggtgggcctcaccatgccacggtactgcctatttggggacacggtcaacaccgcctcgcgcatggagtccacggggctgccttaccgaatccacgtgaacatgagcaccgtgcggattctgcacgctctggacgagggcttccagacggaggtgcgcggccgcacggagctgaagggcaagggcgccgaagacacgtactggctggtgggcagacgcggcttcaacaaacccatccccaaaccgcccgacctgcaaccgggcgccagcaaccatggcatcagtctgcaggagatccctctcgatcggcgctggaagctggagaaggcaaggccgggccagttctctggaaagtgaggcccagctggagcagggtactggaaggtcctcttcctgaaagttgctgctataggtgaccaaaagtctggccgacaccagtggcttctagccagctctgcctcaaaggattccaggcctttacaggtgctggctgcaaatctgctgtgtgacctttgggaaaagtctcgtgcactctctgtgcttgggatccccctccagggcgaactgaggagtggcctgtgtggtttccatgctcccctgctctgacagctgcttcagcagagttggcctggggatatggggcactgggctcggggcctccagccccagggtctctgagcccatcacgagaggttggggtggggattttgcactgtccagtgcctcccaagaccccagggatggggtgtctgggattggccccaaccccagaggcagtggaggagacccttccagcgcagggctgtcacatggcctaaggatgagcctctgtctagcttctagtgtcgtccgtccccgcctgtcagacactgctcccatcgtgacttgctcaagtgcagagaaaagctggcttcaaggcttgggggaaaggaaggcaaattggctgctccaaaactctgctaaccagaacatcccctgcttaactgggtatcgctgagcatcccctctacttagatctttccagcacgcattaacaatccctgcctgcccccaccctgcccgtccagctgaagtttcttttgtggaactgatgttccagagcctgagccttggcacggctgactcggggtgcccttccccatggcttcagaccctggaaagttagccgcaaccaactagagggctgcttgaggtagtgagcgtccagtctctggaggtctccaagcagaaccggcaacatcgttggccagggatggagcagtccgagacaggttctaggtgtaaagatgaacctgatcctcggcaggtggagcgtggttgggagccagtagcagcgacctcacctgggagcttgttagacatgcagagtctcaggccctgacctgactcgaatcagaatctgcattttaacgagtccactccaagcgctcacctgcactcgaacatttgtgaatcgtgtcactaagtgatcctgagaatctctaagatttcattaaaaaccaggctagactctagccctgagactccttttaaaaaaaaaaaaaaaa

SEQ ID NO: 12050 - DNA, 566 bp, Canis familiaris
tgatatgctgctgggtttccttgtcatgcccgtgtccatgctaaccatcctatatggttaccggtggcctctgcctagcaaactgtgcgccgtgtggatctacctggacgtgctcttctccacggcctccatcatgcacctgtgcgccatctcgctagaccgctacgttgccatccagaaccccatccaccatagccgattcaactccagaactaaggcatttctgaagatcatcgctgtctggaccatatcagtgggtatatctatgccaataccagttttcgggctacaggatgattccaaggtctttaaggaagggagctgcctacttgccgacgataactttgtcctgatcggctctttcgtgtcgttcttcattcccttaaccatcatggtgatcacctactttctaactatcaagtcgctccagaaagaagccaccttgtgtgtgagtgatcctggcacacgggccaagctagcgtctttcagcttcctccctcagagctccctgtcttcggaaaagctcttccaacgatcaatccacagggagccagggtcctacggca

SEQ ID NO: 12051 - DNA, 561 bp, Canis familiaris
gtatggttaatttcaataggcattgccattccagtccctattagagggatagaaactgatcggagtaacccaagcaacatcacctgtgtgctgacaaaggatcgttttggcaacttcatgctgtatggctcactggctgccttttttacacctctggcaatcatgattgtcacctactttctcactatccgtgctttacagaagaaagcttccttggtcaaaaacaagccacctccatgcctaacatggctgactgtgtctacagctttccgaaggaatgaaacaccttgctcgtcacctgaaaaggtggcaatgctggatggttcccacaaagacagaactctgcccagctcaagtgatgacctacttatgcgaagaatgtccacagctggaaaaaagtccatgcagaccatttccaacgaacagagagcctccaaggttctagggattgttttttttctctttttgcttatgtggtgtcccttttttattacaaatgtaactttagttttgtgtgattcctgcaaccagactactctcaatatgcttctggaggtattt

SEQ ID NO: 12052 - DNA, 1484 bp, Canis familiaris
ccaggcgctcgagacacctgccccggccccaccatgctcctggcatccaccacctcggctgtgccccggaccctctctccacctactccagctggcaacggcagcagggagctgctggacacccgggacccgctgcttgtccaggccgagctagccctgctctccacggtcttcgtggctgtggccctgagcaacggcctggtgctgggggccctggcgcgccgggtccggcggggtcgctgggcacccatgcacgtcttcattggccacttgtgcctggccgacctggctgtggctctgttccaagtactgccccagctggcgtgggatgccacggaccgcttccgtgggcctgatgccctgtgccgggcagtcaagtacctgcagatggtgggcatgtatgcctcctcctacatgatcctggccatgacgctggaccgccaccgcgccatctgccgccccatgctggcataccgccacggaggtggagctcgctggaaccggccggtgctggtggcctgggccttctcgctcattctcagcctgccccagctcttcatctttgcccagcgtgacgtgggaaatggcagtggggtccttgactgctgggcccacttcgctgagccctggggcctccgagcctatgtcacctggatcgccctaatggtctttgtggcacctgccctgggcatcgcggcctgccaggtgctcatcttccgggagattcactccagcctggtgccggggccagcagagagggctggggggtgccgtggagggcaccggaccggcagccccagcgagggggcccgggtgtccgcagccatggccaagacggtgaggatgacgctggtcattgtgatcgtctacgtgttgtgctgggcgcccttcttcctcgtgcagctgtgggcagcgtgggacccgcaggcgcccctggaaggggcccccttcgtgctgcttatgttgctggccagcctcaacagctgcaccaacccctggatctacgccttcttcagcagcagcgtctcctccgagctgcgcagcctgttctgctgggcccggagtcgggccccacccagcctggggccccaagaggagtcctgcgccacggccagctccttcctggccaaggacacttcctcctgaggagccaaggggcgccttccttccagaggctctgcgaggcccggctgcctacctggggctggccctcggacccctggggggaggagaccctctgggagggggctctgggactaggagccagaggtcagctccttggggcctagcgtgggggggctagggcggcagccgggggcctcgtctggggggcgcacaaggcctccacgcagcgggtgcctgcccctgacaggaggctcctcggagcccgggaggaaggaaaggggtagggggcctctctgctccccctctgccctcccctctcactctgtccctaataaaagatccagcactttttccataaa

SEQ ID NO: 12053 - DNA, 5016 bp, Canis familiaris
tcatgctggagaagttctgcaactctacgttttggaactcttcattcttggatagcccagaagcggacctgccactttgttttgagcaaactgttctggtgtggattcccttgggtttcctttggctcctggccccttggcagcttcttcatgtgtataggaccaagatcaagagatcttctataaccaaactctaccttgctaagcaggtgcttgttgggtttcttcttattctagcagccatagagctggtccttgtactcacagaagactctggagaagccacagtccccgccattagatacaccaatccaagcctttacctgggcacatggctcctggttttgctgatccaatacagcaggcgatggtgtgtacagaaggattcttggttcctgtctctattctggattctctcaatactctgtggtagtttccaatttcagactctgatccggacactcttaaaggacagcaattctaacttggcttactcctgcctgttcttcatcggctatgcactacagatcctggtcctgatcctatcagcattttcagaaaaagatgcctcctcaaataatccatcattcacggcctcatttctgagtagcattacgtttagttggtatgacagcattgttatgaaaggctacaagcaacctctgacactggaagatgtgtgggatgttgatgaacagattacaaccaaggcactggtcagcaagtttgaaaaatatatggtagaagagctgcagaaggccagaaagaccctccagaaacagcaacagaggaacacccaggggaagtctggagaaaggctgcatgacttgaacaagaatcagagtcaaagccaagatatccttgttctggaagaagttaaaaagaaaaaaaagaagtctgggaccacagaaaagtttcccaagtcctggttggtcaagagtctcttcaaaactttctatgtcatactcttgaaatcattcctactgaagctggtgtttgaccttctcacgttcctgaatcctcagctgctgaagttgctgatctcctttgcaaatgacccagacatgtatgtgtggactgggtatttctattcggtcctcttctttgttgtggctctcatccagtctctctgccttcagagctactttcaaatgtgcttcatgttgggtgtaaacgtacggacaaccatcatggcttccatatacaagaaggcgctgaccctttccaaccaggccaggaagcagtacaccattggagaaacagtgaacctgatgtctgtggatgctcagaagctcatggatgtgaccaacttcattcatctgctgtggtcaaatgttctccagattgctttatctatctacttcctgtgggcagagctgggaccctccatcttagcaggtgttggggtgatgatactcctaattccagttaatgggctacttgcctctaagagtagagctattcaggtaaaaaatatgaagaataaagacaaacgtttaaagatcatgaatgaaattctcagtgggatcaagatcctgaaatattttgcctgggaaccttcattcaaaaaccaagtccacgaacttcggaagaaagagctcaagaacctgctgaccttcgggcagatgcagtctgtaatggtgtttctcttatacttaactccggtcttggtgtctgtgatcacgttttcagtttacactctggtggacagcaataatgttttggatgcagagaaggcattcacctccatcaccctcttcaatatcctgcgctttcccctaagcatgctccccatggtaatctcctcactgctccaggccagcgtttccagagaacgcctggaaaagtacttgggaggggatgacttagacacatccgccattcgacgtgacagcagttctgacaaagctgtgcagttctcagaggcctccttcacctgggaccgggactcggaagccacaatccgagatgtgaacctggagattatgccaggccttatggtggctgtggtgggcactgtaggctctgggaagtcttccttgatgtcagccatgctgggagaaatggaagatgtccatgggcacatcaccatcaagggcaccatagcctacgtcccacagcaatcctggattcagaatggcaccataaaggacaacatcctttttggatccgagttggatgaaaagagataccagcaggtgctagaagcctgtgccctcctaccagacttggaagtgctgccgggaggagacctggctgagattggagagaagggtataaatcttagtgggggtcagaagcagcggattagcctggccagagctacctatcagaattcagacatctatgttctggatgaccccctgtcagctgtggatgctcatgtgggaagacatattttcaataaggtcttgggtcccaatggcctattgaaaggcaagactcgtctcttggttacacatagcattcactttcttccccaagtggatgagattgtggttctggggaatggcaccatcttggagaagggatcctacaacactctgctggccaagaaaggattgtttgctaagattctgaaggcattcacaaaacagacgggtcctgaaggagaggccacagtcaatgaggacagtgaagaagatgatgactgtgggctgatgcccagtgtggaggaaatccctgaggaagtggcctccttgaccatgaaaagagagaacagccttcatcgaacacttagtcgcagttccaggtccaggagcagacatcagaaatccctaagaaactctttgaaaacccggaatgtgaacactctgaaggaggaggaggaaccagtgaaaggacaaaaactaattaagaaggaattcatacaaactggaaaggtgaagttctccatctacctgaagtacctacgagcaataggatggtatttgatattcctcatcatttttgcctatgtgatcaattctgtggcttatattggatccaacctctggctcagtgcttggaccaatgactctaaagcctttaatggcactaactatccagcctctcagagggacatgagaattggcgtctatggagttctgggattagctcaaggtgtgtttgtgctcatggcaaatctcttgagtgcccatggttccacccatgcatcaaacatccttcacaggcaactgctaaacaacatccttcaagcacccatgagtttttttgacacaacacccacaggtcggattgtgaacaggtttgctggtgatatttccacagtggatgacaccctcccccaatccttgcgcagctggatattgtgtttcctgggaatagtcagcactcttgtcatgatctgcacggccactccagtgttcatcatcgtcatcattcctcttagcattatttatgtgtctattcagatattttatgtggctacttcccgccagctgaaacgtctagactctgtcaccagatccccaatttactctcacttcagtgagacagtgtcaggtttgtccgtcatccgtgcctttgagcatcagcagagatttctgaaacacaatgaagtggggattgacaccaaccagaaatgtgtcttttcctggattgtctccaacagatggcttgcagttcgtctggagctgattgggaacttgattgtcttcttttcatccctgatgatggttatttataaagctaccctaagtggagacactgtgggctttgttctgtccaatgcacttaatatcacacagaccctgaactggctagtgaggatgacgtcagaaatagagaccaacattgtggctgttgaaagaataaatgaatacataaaagtggaaaatgaggcaccctgggtgactgataagagacctcccccaggttggcccagcaaaggggagattcggtttaacaactaccaagtgcggtaccggcctgaactggatcttgtactgagagggatcacttgtgatattaggagcatggagaagattggtgtggtgggcagaacaggagctgggaagtcatccttgacaaatggcctcttcagaatcctagaggctgcaggtggtcagatcatcattgatggggtagatattgcttccattgggctccatgacctccgagaaaaattgaccatcatcccccaggatcccatcctgttctctggaagcctgaggatgaatctagacccttttaaccactactcagatggggagatttggaaggccttggagctggctcacctcaaaacatttgtggctggcctgcaactggggttgtcccacgaagtggcagaggctggtgacaaccttagcatagggcagaggcagctactgtgcctggccagggctctgcttcggaaatccaagattctgatcatggatgaggccactgctgcggtggacctagagaccgatcacctcatccagatgaccatccaaagggagttctcccactgcacgactatcaccattgctcacaggctacacaccatcatggacagtgacaagtgagtgtgggggacagcttgacagatgggaccaagcccttgaacaacagtaataacactggccgtaggatatctacagctaaaggttgaaccaccttcattttactgatgaggaaaccgagaattcaagtaatttgtccaaaattaaacatgaagttaatgaaagccaactcagttaagggaactggacttgagggtaaaatgggcaattgtgtgtttacttattaactgagtttggggaggtggcggcccgagctatgagaggctgatattaaccagagatcttctcaactactcaacagctcaacagctgttctcaacagctgttcccaagcaagaagctttctggcttctgactagaagctttctacttcttccaactctgacatattacattaaaaatgggggtaacaccagtaatcttggaagctgtttggagagaataggctcccttaaacaatatatatttgtaaaaaaaaacttctgtaattggactgactcatactgca

SEQ ID NO: 12054 - DNA, 1808 bp, Canis familiaris
gaaggagcctcgccagccccgcggggtcgcctcccgcacggggccggggccggggcggggcggagcgggagcgggagcgggagcgggagccggagcgggagccggagccggagccggagcgggagccggagcggagcgggagcccgagtctcggcgctgccccgcgggtggaggcgcccgctcgccggcggtcggcggcgcagaggcgggacgtgcggcgccccctcccgtcccctcccgtcccctcccctccccgctctccccctcccctcccccccctcccggcgggcgcgggcgcgggcgcgggcagcatgggccggcgcggggcgctgctctgcctcctcccgctgctgcgcgccgccgagcgccccgagggccgggccgacgagccgggcctggaggcggccctggcggggcccaacgcctcgcacttcttctggagcaactacagcttctccgactggcagaacttcgtgggccggaggcgctacggcgccgagtcgcagaaccccacggtgaaagccctgctcgtcgtggcttactccttcatcatcgtcttctcgctcttcggcaacgtcctggtctgtcatgtcatcttcaagaaccagcggatgcgctcggccaccagcctcttcatcgtcaacctggcggtggccgacatcctcatcacgctcctcaacacgcccttcaccctggtccgctttgtgaacagcacgtgggtatttgggaaaggcatgtgccacgtcagccgctttgcccagtactgctccctgcacgtctcagcactgacgttgacggccattgctgttgaccgccaccaggtcatcatgcacccattaaaaccccggatctcgatcacaaaaggtgtcatctacatcacggtcatctggaccatggctacgttcttttcacttccccacgccatctgccagaaattgtttaccttcaagtacagtgaggacattgtccgctcactatgcctgccagacttccctgagccagctgacctcttctggaagtacctggacttggccaccttcatcctgctttacatcttacccctcctcatcatctctgtggcctatgcccgagtggccaagaagctgtggttgtgcaacacgattggcgacgtgaccactgagcagtacctggctctacggcgtaagaagaagaagaccatcaagatgctgatgctggtggtggtcctctttgccctctgctggtttcccctcaactgctatgtcctcctcctgtccagcaaggtcatccacaccaacaatgccctctacttcgccttccactggtttgccatgagcagcacttgctacaaccctttcatctactgctggctcaacgagaatttcaggattgagctgaaggcattactgagcatgtgccaaagactcccaaagccccaggaagaaaggcccccgtctccagtgccttccttcagggtggcttggacagagaagagcaatgggcggagggttcccccagccaacaacctcctgctttcctcccatctccactctgggaagacagacctgtcttctgtggagcccattgtagccatgagttaggtgggagtgggggtgggaagaggcaggaggagagctctgtctccaggacctgaggacagagcctgcaagaaagcctgttctctgacacatgacctttacagggctgaaaacaaggtcctgcagaagccacaggacccttgatttcctaggaaacgctatctagctttctaccccatttgatgtgaaaactacaagacagctaccaattagacacgtgtttatgaattc

SEQ ID NO: 12055 - DNA, 660 bp, Canis familiaris
aggccggccgacttcaagctgcaggtcatcatcatcggctcccgaggcgtgggcaagaccagcctgatggagcgcttcaccgacgacaccttctgcgaggcctgcaagtccaccgtgggtgttgactttaaaatcaagactgtagagctaagaggaaagaaaatcagattacagatctgggacacagcaggtcaggagagattcaacagcattacctcagcttattacagaagtgccaaggggatcatactagtatatgatatcactaagaaggagacttttgatgatttgccaaaatggatgaagatgattgataagtacgcttcagaagatgcagaacttctcttagttggaaataagttggactgtgaaactgaccgagagatcaccaggcagcaaggtgaaaagttcgcgcacgagataaccgggatgcggttctgtgaagccagtgccaaggataacttcaatgtggacgagatctttctgaagcttgtcgatgacattctgaaaaagatgcctctggatattttaaggaatgagttgtccaatagtatcctctcgttacaaccagaacccgagattccaccagaactgcctccaccaagaccacacgttcgatgctgttaatttgctactttggagacaaagtggaaatgattc

SEQ ID NO: 12056 - DNA, 620 bp, Canis familiaris
gcgcccctggctcccgggccatggcgctgagggagctcaaagtgtgcctgctgggggatacgggcgtaggtaaatcgagcatcgtgtggcggttcgtggaagacagttttgatccaaacatcaacccgacgataggggcatcttttatgaccaagactgtccagtaccaaaatgagctacataaattcctaatctgggatacagctggacaagaacgatttcgtgccttagcgccgatgtactatcgagggtctgctgcagccatcattgtttacgacatcacaaaagaagagacgttttcaacactgaagaactgggtgaaagagctccggcagcacggcccgcccaacatcgtcgttgctattgccgggaataagtgtgatcttatcgatgtcagagaagtcatggagagagatgccaaggactacgccgactccatccatgcgatttttgtggagaccagcgcgaaaaatgcgataaacataaatgaactctttatagaaattagtcgaagaattccgtccgctgacgccaacccgccatctggcggtaagggcttcaagctccggagacagccttccgagccgcagcgaagctgctgctgaccgagcctcagcctc

SEQ ID NO: 12057 - DNA, 4327 bp, Canis familiaris
ggatccctgggtagctcagcgtctagcgcctgcctttgacccagggcgtgatcctggagtcccaggcaatattgatagatataaccatagcccccacacacaaaatctttcttggaggtcctcactaacttgtagatatcctgacaacgaaatgtttgagaatcacggactgcagcagtgagaccatgtgacaagagcactccctgcaggagaagaggggtcaaggacaaagtcataaatccccaggcctgtcgctcaggctgtccgcgcaaaggcagtgtctggggcgggggaagccctgcttggggagtccccacatgcgctggtttcacttcctctcacatcctgcttgaggtccttctgccgggatactcgtgacgcgactccgggtggcattcccattgccagtcgggtttctagagaagccaatcggcgtcacctcaccgtggctcagggctgacagtgtctcctctgcaactcagttgctgcctggaacacgtggatgcctgtcatgcgcccccgaaccctcctcctgctgctgctgctgctgctgctgtcggggaccctgggcctggcccagaccagtgcaggtgagcctggggtccgcagagaaagcgccgcaggcggggagcggggaggaagccctactccacccgggatggacccaggccctcacctccgcctcgcccacacctcggccccactcacctcccgcccctggccccttccccaccgaccagcccctaagcccccgggacccccgcccgggaggaggctcagcctcttggcgcccgcaggctcgcactccctgaggttcttgaacacggtcgtatcccggcctggccacggggagccccgccactgggcagtcgcctacgtggacgacacgccgttcgaacggttcaacagcgaacgcgagggtcggcggcctgagccgctggtgcggtggctggagcaggaggggcctgagtactgggaagagcgcacgctgaactccaggacctgcacacaggtcctccgaaggacgctgaacgaagtttcgcaggactactccaatcagagcaggaccggtgagccacgggggcgggtccaggtcgccatccccgtctccgcccacggccgaggtcgccccgagtgtctgggcgagggccaccccgaggctgcggactcacccgtccccgtccccgaaagggaaggagactcctggggacgcgactgggttttgttttcagttgtagactttcgtgctgacacatcgtgggcggggccagggtctcacaccttccagactataacaggctgcgacgtgggacctgatgggcgcttcctgcgcgggtaccagcgtcacgcctatgacggcctggattacatcaccctgagcgaggacctgcgctcctggatcgtggaggacccggtggctcagatcactcggcgcaagtgggatgcggccactgtagctgagaaccgtaagaacttcctggagggcaggtgcttggagtggctccgcagacacctggagaatgggagggagacgctgcagcgcgcaggtaccaggggcctccccatcttcactctgctggggctggcttcccccaaggaagggagggtggactcagtgtcagaatactgccccctcccacaggtgggaagaaagagatccatctcaacattcatattcccactacagagtaattcttcaaaagagctgctttcctctagaggacaactgaggaatccagtctccctggaggcaggtggagaccatccctgaaataactcatcagagttctcctccatcctggaaaccaccttgtgaaccatggctttccttctcaaggccttgttctccatcggagaacatttttggaggtctgactccaggttttctgagtcactgaccctctgctgcagtccagaccgttagtgtgttccccactctagacctgcactctcctgtcctgggatctttccgtgattctaaaatgttattccagacaaccaagtctaggctgtgtcagggttttgtgctttttccttctaaaccaattgtcctctccatcctcagcatggtcacaagtgctgctttaatgacccatgaaggtaacccagagtgtggattttctgattcttcttcttcagacccccccaaaacatctgtgacccgccgtcccatctctgagcatgaggtcaccctgaagtgctgggctctgggcttctaccctgcggagatcaccttgacctggcagcgtgatggggaggaccagacccaggacacagagcttgtggagaccaggcctggaggagatgggaccttccagaagtgggcagctgtggtggtgccttctggagaggagcagagatacacatgccatattctgcacaagagcctgaccaagcccatcaccttgagatggggtaaggaggggtttggcatagacactcttctcagagaacaactgtgaggtcatgactcaagcctgaggtctgggcccctcgccttcccttccctttccagaaccacctcctcagtccaccatccccatagtgagcatcattgctggcctggttctccttgtgatcactggagctatgctggttggagttgtgatatggaggaagaagcactcaggtagggaagggagtggggggaatctgagttttcctgtcctactgggaggtttcaagcccaaagtagaagtttgtcctgtcttgttaataagaagtgccatctggagtagctgggtgactcagtggttgagcatctgcctttggcacaggtcacgatcccggagtcctgggatcaagtcctacatcaggctccctgctcagcacagagcctgcttctctctctgcatatgtctctgcctctctctgtatgtctttcatgaatacataaataaaatcttttaaaaagagacagaaaaagaggtaccatccacaatacatgtgctagccagctgctaacattcactccttagtaaagacttgtgcaaatgaaggacagatttttcacctttctattctggcattggggacctgagccctagcagctgaaggtagggggaattccctgatacagacagacctccgggaagacagttggcccagtgccctacatatactttctctgtggtctccgatacagccgtgagtcttcagttaacagtcctggaaactgcattttggtacaggactagggtattcctttggataccatagccttctccttagcctctgacatgatattttcttcccacaggcagaaaaggagggagctactcacaggctgaaaataagtatggagggagtgatccttgagaccctgggatagtatagataggaccccatgggggaactcagccaccctatatagctcctcctttagtctcatctcttgtgggtttgaccacatcctgttgttctaccgtaggcagtgctcaggactctcagatgtctgtcatggctcctaatggtgagaccctggagggcctgaagccaaggggagtggttggggcagaggggacatgactgggttatgaggattctttgagtggaacattataagcatgtggagatgtcagcacttaacatgattgacctgaatttgttcatgactattttctttcacagagcaagccagctgccttgtgggactctgagtgatgcaagatttgttcacactcccacttttttgacttcaagagccccggatatctccatctgctaatggtgtctgaaagtgactctgttcctattagcataatgtgagcaggtggggaaattggcccacctctactcatcatgtcccttcccccaactgacctgtgttctttccctaatctgctttcctcttccagcagagatggactggtcattaccatccttgtctttacttcatatttggctgggaagtaatatttaacttgtcttattctgtatgttagtaaattgaacaccaataaaaaaaataaattaaaaaaaaagttaaaaaaaaaagaaaatctggatatgactttgtttttcctattcttgtcatataaaattggcatggtaataaagtagaagactcttaaagttgagatacgaaataaatggaagcactgagaaccttccagaatctgccagattgctgtgctgtctgttgtaggtggaccaggagaggctgtgaggagccaagtgtggacaaaaccctgcctggtcagtactcagtacattatgggctttaacatggtcactccccagttgagtcatctttgctatagctggtcacttcagtggaattttgtcacaccaggacctgtgatcacaggactcagacatcacctgt

SEQ ID NO: 12058 - DNA, 587 bp, Canis familiaris
gggcagtggtgggtagtgtgacatggcaagatgtgccaccacccaggggcataacctggggtactttgttttcccatctgtaaaatggggtcaataatcactcttctctcataggattgttgtgaagactaaatcatgaatatatgtaaaatgttcagaacagtgcctgcatggagtcagtactataggagtgttggctgttatcatttattaaagtaaagctttagttaagctgaattctgaatcaaatcttttttactggagcacaatttttgtcaatatctgaactatcatacccatcaggactcttgataactttagattttatttatttctgaaagttttatgtatcttagagagagagtgagagcgagcgagcgagagcagggaggaggggcagagcaagagggagaaagtctcaagcagactctgcgccaacccagggcaacatcccatcatgatgtgaaccaaatcaaagtcggacacccaactgactaagccacccaggtgccccttgataaccttagatttttttaaaatgttttttaagctctttttattagtgaaatatcttcatttctagcaat

SEQ ID NO: 12059 - DNA, 763 bp, Canis familiaris
ccccggagacgccttggaggccccccctcctcactaagtgcctcttcacacagcgccggcccccgccgcacgctcactggtaccactacagcaggacgggccatggcgggtcggggaggtgcagcgcgacccaatggaccagctgctgggaacaagatctgtcaattcaagctggtcctgctcggggaatctgcagtgggcaaatctagcctcgtccttcgcttcgtcaagggacagttccatgagtaccaggagagcacaattggagcggccttcctcacacagacggtctgtttggacgacacaacagtcaaatttgagatctgggacacagctggacaggagcggtatcacagcctggcccccatgtactatcggggggcccaggctgccatcgtggtctatgacatcaccaacacagatacgtttgcacgggccaagaactgggtgaaggagctacagaggcaggccagccccaacatcgtcattgcactcgcggggaacaaggcagacctggccagcaagagagccgtggaattccaggaagcacaagcctatgcagacgacaacagtttgctgttcatggagacatccgcaaagactgcaatgaacgtgaatgaaattttcatggcaatagctaagaaacttcccaagaatgagccccagaatgcagctggtgccccgagccggaaccgaggggtggacctccaggagaacagcccagccagccggagccagtgctgcagcaactgagccccccttt

SEQ ID NO: 12060 - DNA, 1055 bp, Canis familiaris
acctggcctggggactgtgcctcctgcggctgagcctggcgcagatcgatttgaacataacctgccgctacgcaggtgtgttccatgtggagaaaaacggtcgctacagcatctccaggacggcggctgccgacctctgcaaggctttcaacagcaccctgcccaccatggcccagatggagcgagccctgagcgtgggctttgagacctgcaggtacgggttcatagaaggacatgtggtgatcccccgtatccaacccaatgctatttgtgctgcaaaccatacaggggtgtacatcctcatatccaacacctcccagtacgacacgtattgcttcaatgcttcagctccacctgaagaggattgtacatcggtcacacacctgcccaatgcctttgatggaccaattaccataaccatcgttaaccgtgatggcacccgctacagccagaagggtgaatacagaaccaaccctgaagacatcaaccccagcaaccccactgacgatgatgtgagcagtggatcctccagtgaaaggagcacttcggcaggctacaacatcttccacacccaccttccaactgcatacccgaccgaggaccaagacagttccagggtgtctagcaactcagaccatacccccattaccaaagaccacgactcatcggttcaccccagtgagaggtcccataccactcatggatcagaatcagctggacactcaagtggaagtcaagaaggtggtgcaaacacaacctcgggtcctatgcggaaacctcaaatcccagaatggctcatcatcttggcctcgctcctggccttggctttgattcttgccgtttgcatcgctgtcaatagtcgaagaaggtgtgggcagaagaaaaagctggttatcaacaatggcaatggagcagtgggggacaggaagccaagtgggatcaacggagaggccagcaagtctcaggagatggtgcacttggtaaacaaggaaccctcagagacccccgatcagtatacgacagccgacgagacacggaacctgcagaacgtggat

SEQ ID NO: 12061 - DNA, 2010 bp, Canis familiaris
cgggagcacccacccgtgggtgcgccgccctcccgctgagcagccatgagtgagacggttatctgctccagctgggccactgtgatgctttatgatgacagcaataagcgatggctgccggcaggcacgggcccccagagtttcagccgcgtccagatctaccacaaccccacggccaattctttccgggttgtgggctggaagatgcagccagaccagcaggtggtcatcaactgtgccatcgtccggggtatcaagtataaccaggccacccccaccttccaccagtggcgcgatgcccgccaggtctggggcctcaactttgggagcaaggaggatgccacccagttcgcggcggccatggccagcgcccttgaggctctggaaggaggggggcctccgccacccccgccacctgcagcacctcccacctggtctgtccagaatggtcccgcctcagaggaggtggagcagcagaaaaggcagcagccgggcccaccagagcacctggagcgccgagtctccaatgcaggagggcctcctgctcccccagctgggggaccgcctccccctccaggacctcctcctcctccgggtccccccccaccccctggtgtgtccctctcagggggctctgcggcagggcacggagcagggggaggcccaccccctgcgccccctctccccacagcacaaggcaccagtggtgggggaacaggggcccccggtcttgcagcagccattgccggagccaaactcaggaaagtcagcaagcaagaggaggcctcaggggggcccccagtccctaaagcagagagcactcgaagcacgggcggggggctgatggaagagatgaatgccatgctggcccggagaaggaaagccacacaagttggggagaaaccccccaaggatgaatctgccaatgaggagccagaggccagagtcccagtcccagcccagagtgaaactgtgcggagaccctgggagaagaacagcacaaccttgccaaggatgaagtcctcttcatccgtgaccacttccgaggcccacccctccacgcccagctccagtgacgagtcagacctggagagagtgaaacaggagcttctggaagaggtgaggaaggaactgcagaaagtaaaagaagagatcattgaagcgtttgtccaggagctgaggaagcggggttccccctgaccacagggctccagaagatcctgtatctcctttctgcacaccccgcctgtcaccctgctttccctgcctcaactcgacttggaattggccaaagaccacacaggaatgcatctcccccactccctgtcctacttggaaaataccaagggggtgtggctccgtggccccagggccacacccatactggctgctgattggctggggaggcccccaccctttgcttcctttggtccttccccttcgccatccccttggggctggttcctctgttggggattggggaccaagtgaccccacagtaagggggaaggaaggagggaatctcacattcccttgttctagattcactttaacgcttaatgccttcgaatttttgtttttttaaggaaaaaaaaatatatatatatatttaggttttggggggaagggaaattttgtttctctttcgttttgataaaactggggtgtggggagtttttaaatgctatgcccagggcttgtcccctttggagcagctatttaagggggaggatgtcccaccaggctgggggcacctcccccacccccacccccaccccagggagctcccttccctttggctccttccccttttctatgaggaattaagatgctataactttttggaacctcagttttttggttttttatttgggtaggttttggggtccccctggggaaataagatgagggagaaaggaaagggggaggaaacctcccctctcccaccttcacctttagcttcttgaaaatgggcccctaccgaataaatctgccagttttttataaata

SEQ ID NO: 12062 - DNA, 2787 bp, Canis familiaris
agggctgaagtgagaaaccatcacctcccattcccaggggcgtcatcacattgaacaaggcatggaggcaggggcatctttgcagctcagcctagaaggactgtgttctctccaggttcataaatcgttcaaaattttttatttgctttctgtttctgctcgtttttggtgggggctgggaggtggctgatgtttgacttttattttgtattgttttgttgggagagtcaaagttttttgtttctcgtgggaggtgatgaccaatctaagtgcaaatgggcttttggcaaaaatttaaatcattacaattactctctccaaaaactttaaaaattattttggattaagaaaggatatggcatggaagaagaagcatgtcttcactacatcactaaatttcatgcttatctctggaacatgagaagaggtaaagctgcctccaggaagaagcatgggagctcgaatgcagccaggaaaagtggtagttctagatacagtctgatatttaaagatacaatgcctgggcactcttgttcaacaggtacagaaataatgtgcctagattcccaagaacatgcaaaagactttatttcttatctctttagctctggacgtgtattagcaaggccttatcttttccaacctgactaaacccccaggccctcatcctaaccctcctcctcctgcccaccacctctcatgcaaacaggaataatcccattcaaaaagcacattaccctcttccatttgcttcgatatgtcccagtcccatgtttgctgttgcctgggatcattcgtcggttttattttcaaaagcattcatggcttgcacaatcctgttccagtcatgactgaacatttgctccttcttcatgtgcctgtttgggaatgttgttgtgatacctgttacacagtgcatggatgaaaaacaaaataagcgtatctgtatatagtagagtatagcgtatactgttctcccattcagcaatgttgactggacattgaagacataagtgagtttccttttcacctgagttgtaacttttgtgttgttattgagtttgattttactagggataagaggagaaaatggcttagtgttcatggacctgcacattcatttctaagaagcaataacagttcactgggaaattaaagctattgagaggacaggaggcaaactaccaagtatcttcatggaaaattagccatgtggaatacaccggagcctctaaacagtcacctgttgatgattctggaaggaggagaaaggtgtagagcagtggctggattcgatgttccccgggctttgagagcctccattttcatgacacccctaaccccaaagtatttatttcacttctgctctgtctggcacagatggtagatagtggtttgttcattttatttttttgtgtaaaaggctattttgagccctgtttatttcaccacccagactcctctgattgtatccgtagttcctgagtaggaaaggagccagggagaccaatgggcctttactagtgcatcttctgtacttatgactaaggaggaagcaattagatgagattagtgtctcccaggaggattgcactgggaggtttttaaccctggaaaaggaatggctctttctatttcaaaataccaaagagcatggataaacctaacattccaaagtagtgagtccagtaatgaggaaaaatggaatgacgttggtcctgtctcagagacttctctatctataaagaatcccagccagagacaccactggccctctgtattgattcagagatacttaagagataaaaagctgttcagttatttcctcttatttactcaataatcacaatcattcatcatttaataaacatttggtgactgaatgaataattaaatgctggttactcctcaatatgccaggtactgtgctactcttgggacctaaaccatgaacaagacagcccagatccctgccctcagggggctcacagctaatgtgattgctatttccatgggtaaaagttagcacagccaaatggaaacacttttatcttgcaaggaaaaacaggattataaaacttttgacataacacattgaaattgttaccaatggagttgtccaaatatctaagattttaactcagagataagcacaggttaagggaagcatcctatgtatccttagctgttcttatatatccgtacacaccccccccccaatcgtaagccaagaaaggcaatatattggtgatccagataactgaaatgctccaattaaccccagtttttatctttgttggatagcagtacttttctatgccccacacctctatagtttcctcatatctccaggagactcaccccagcaggccatggccaacatttgatggtctaagtcttttgggggcacatgctaacctttttttaagatttactaaaatgaatctagcctagaaacaccaagtaaatattgtcaaaggatgtgagttgtctaaaaattagattttgcactcaattttagccatatttggaacatcaataatcccatagcaaattttcacagaggactttcagaaattcctgccattgaattttaatttcaaagctttttggtttgtttgctttttcaagtttcatgttatagggaaaatatgattctgattgttcagagttgttaataattgtagttgtgtaaaattatttcattttgtttattttgtgtgtattgtgcacagctttaggggggaagtgcactaattgtgctgttccttatgcggccgcgaattc

SEQ ID NO: 12063 - DNA, 2810 bp, Canis familiaris
cacctcctgactctgtcttgcccccagctatagaccttccctgggcaggccagctttaggctctcctgggaagtagccagcgggattccagtcatgggtgaggtgacagcagagcaggtggagaagttcctggactcgaatattatctttgccaaacagtactacaacctccgctaccgggccaaggtcatctcagacatgctgggggccaaggaggcagcggtggacttcagcaactaccactcgctgagcagtgtggaggagagtgaaatcatctttgacctcctgcgagacttccaggagaatttgcaggccgagagatgcatcttcaatgtcatgaagaagctgtgcttcctccttcaggcagatcgcatgagcctgttcatgtacagggtccgaaatggcatcgcagagctagccacccggctcttcaatgtccacaaggatgctgtccttgaggaatgcctggtggcgcccgactcagagattgtgttccccctggacatgggtgtggtgggtcacgttgcccactctaaaaagatcgccaacgtcgtcaacacagaagaggatgagcatttctgtgactttgtggacaccctcactgagtaccagaccaagaacatcttggcttcccccataatgaatgggaaggacgtagtggcagtaatcatggctgtgaataaagtggacgagccccacttcaccaagagagatgaagagattcttctcaagtacctcaattttgcaaacctaatcatgaaggtataccacctgagttacctacacaattgtgagactcggcgtggccagatactgctgtggtctgggagcaaagtctttgaagagcttacggacatcgagaggcagttccacaaggccctgtacacagtccgggccttcctcaactgtgacagatattctgtgggactcttagacatgaccaagcagaaggaattttttgatgtgtggccagtcctgatgggggaggctccaccctattctggtcccaggactccggatggaagggaaatcaacttttacaaggtcattgactatatcctacacggcaaagaagacatcaaagtaatcccgaatccacctcctgatcattgggctttagtaagtggtctgcccacttatgttgcccagaatggcctgatttgcaacatcatgaatgcacctgcagaggacttttttgcattccagaaagagcctctggatgagtctggatggatgattaagaatgtcctttctatgccaattgtgaacaagaaggaggaaattgttggggtggccacgttttacaatcgcaaagatggaaaaccctttgatgaaatggatgagaccctcatggagtctttggctcaattcctgggctggtccgtcttaaatcctgatacttacgagtcaatgaacagacttgaaaacaggaaggatattttccaggacatggtaaaataccacgtgaagtgtgacaatgaagagatccagaaaatcctgaaaaccagagaggtgtatgggaaggagccgtgggagtgcgaggaagaggaactcgctgagatcctgcaaggagagctgccagatgcagagaaatatgaaatcaataaattccacttcagcgacttgcccctgaccgaactggagctggtgaaatgtgggatacagatgtactatgagctcaaagtggtggataaatttcacattcctcaggaggccctggtgcgcttcatgtactcgctgagcaagggctaccgcaggatcacctaccacaactggcggcacggcttcaacgtggggcagaccatgttctccttgctggtgaccggaaagctgaagcgatacttcacagacctagaggccttggccatggtcaccgctgccttctgccatgacattgaccacagaggcaccaacaatctctaccagatgaagtcccagaacccactggccaagctccatgggtcctccatcttggaaagacaccacttggagttcggcaaaacgttgctgcgagatgagagcctgaatatctttcaaaacctcaatcgcaggcagcacgagcacgccatccacatgatggacatagcaatcattgccacagacctcgccctgtatttcaagaagaggacaatgttccaaaagatcgtggatcagtctaaaacatatgaaactcagcaggagtggacacagtacatgatgctggagcagacacggaaggaaattgttatggccatgatgatgaccgcctgtgatctctcagccatcaccaagccctgggaggtgcagagtaaggtagctctactggttgctgccgaattctgggaacaaggtgacctggagcgcacagtgctgcagcagaatcccattcccatgatggacaggaacaaggcagatgaactccccaagcttcaagtcggcttcattgactttgtttgcacctttgtctacaaggaattctcccgtttccacgaggagatcactcccatgctggatgggatcaccaacaaccgcaaggagtggaaggcgctcgccgatgagtacgacaccaagatgaaggccctggaggaggagaagcagaagcagcagacagccaagcaaggggcggcaggagatcagccggggggcaaccccagcccggccgggggcgcacctgcatccaagtcctgctgcatccagtaacgctgcctggcatcagctgcaccgaatggtaccacccttcctggaaagagaccacccaagccagcagaaaaccaaaaacctgcttgtgaagtaaaatagtaatcggatttgaaaaaaaaaaaaaaaaaaaa

SEQ ID NO: 12064 - DNA, 1178 bp, Canis familiaris
cccgtgaccctgagacctgcccagggcttggacttcctctgttcagctggttgagacctgcaaggggggcagccgcagggggggctgactggtgtgcccccagcccacagcgtgaggggagtctagaagccagacgtcgccgtggggttctctgccaacctggccatgaacctggagccaccgaaggccgagatccggtcggccaccagggtgattggggggcccgtcactcccagaaaagggccccccaaatttaagcagcggcaaaccaggcagttcaagagcaagccccccaagaaaggcgtccaagggtaagcagagctggcggaggggcccagccgcaggctacccaggaattggggggggcggccaccctttcctggctgaggtcggtcccaccatcctactaggctggggtggtgcccctcattcctcagcatggaggtgggagggctcggggccccctggcactgtccccctgaggaccacactcactgccccttagtgactgggccacagcccccgcaccagcctgtgtccccgcatgcacccccactcccctcctcctggccactggccctgaccactctgtcctgcaggtttggggacgacatccctggaatggaaggcctggggacaggtatgacggcatctagggtcttcccagatcccccaactctcccgcgggccgtgggctggggcctgtgctccctgtgctgtctccagccggagcttacctagggcatcgccccaagcctgtctgtcctctgccccaaccccgagctttagcctcaccgaggggctgctcctttcagtgggttcgccgggtacttggaggtgccggagagcaccgaggggccctcgctgtcctctcacctccctggcgtgctgtacccgtacgcttccctcgacaccctgggaagaggacctctgggcgtggacaacagggccacgacccccctgatgccctgtcccttctcctgcagacatcacggtcatctgcccttgggaggccttcaaccacctggagctgcacgagctggcccagtacggcatcatctagcgccagagcctgacccagaggcttggggccagggtccctgccgcccactccgctccctgctccgggtgcctgcgaggaggccggcccccccccgcggtgtccagacggcccagtg

SEQ ID NO: 12065 - DNA, 185 bp, Canis familiaris
gctgcagttctgtcaagagtcagttcagaacttcgatgccagtgtataaaaacacactccacacctttccatcccaaatatattaaagaactgagagtgattgacagtggcccacattgtgaaaactcagaaatcattgtaaagcttttcaatggaaatgaggtgtgcctggaccccaaggaaaa

SEQ ID NO: 12066 - DNA, 1401 bp, Canis familiaris
tctggggatctaaggatagtgaagagaaaagcatagtgactccatatctcagattccttgagttggtattgaagagcactaggaaccgaagatgagtgaacttgaccagttacggcaggaggctgagcagcttaaaaaccaaattagggatgctagaaaagcatgtgcagatgcaactctctctcagatcacaaacaacatcgacccagtaggaagaatccagatgcgcaccaggagaacgctgagggggcatttggccaaaatttatgccatgcattggggcacggattccaggcttctggtcagtgcctcacaggatggcaaactgatcatctgggatagctacaccacaaacaaggtccatgccatccctctgcgttcctcatgggtcatgacctgtgcatatgccccttctgggaactatgtggcctgtggtggcctggataacatttgctccatttacaatctgaaaactcgtgaagggaatgtacgtgtgagccgtgaactggccggacatacaggttatctgtcctgctgccgcttcctggatgacaatcagatcgtcaccagctctggggacaccacttgtgctctgtgggacatcgagaccggccagcagacaaccacgttcactggacacactggggatgttatgagcctttcactcgctcccgacaccagactgtttgtctctggtgcttgtgatgcttcagccaaactctgggatgtgcgagaagggatgtgccggcaaactttcactggccacgagtccgacatcaatgccatctgtttctttccaaatggcaatgcatttgccactggttcagatgatgccacctgcaggctgttcgaccttcgtgcagaccaggagctcatgacttactcccatgacaatatcatctgtgggatcacctcggtgtctttctccaagagcgggcgcctcctcctcgcagggtacgatgacttcaactgcaatgtgtgggatgcactcaaggccgacagagcaggtgtcttggctgggcatgacaaccgtgtcagctgcctgggggtgactgacgatgggatggccgtggcgacggggtcctgggatagcttcctcaagatctggaactaacgctgacagcaggtagacgtcgtggcgactggaagatcattccaaccttgaagcgttacagtgatagcatttccaatccacccctactaacgtggacgccctgcaccccctcagaacttcaaaagggcaagaccttttccttcacttattgctgaaatcaagagcacaattcccacgaagagaagaacctctgtgctgtaaactcaaacaaattgtgcattcctcccgggaccattgtctttgtttccttttttgtcttggatgaatttaaaaggaaaaactataat

SEQ ID NO: 12067 - DNA, 439 bp, Canis familiaris
gaccattcataagaaatcagttatcatagaaagctaaagcaaagaaacagttcacttacaggcaaaagatgccagtgattaatattgaggacttgacagaaaaggacaaattgaagatggaagttgaccagctcaagaaagaagtgaccctggaaagaatgctggtctccaaatgttgtgaagaagtaagggattatgttgaagaaagatctggggaagatccactagtaaagggcatcccagaggacaaaaatcccttcaaggagctcaaaggaggctgtgtgatttcataagaaaaaaaaagttccttggaatagcttgagttttaatgacagtactaatttttggtcatctataataatactattaagcatttacataaccttttaatttataaatataaacttttaataaaaattgggatgtgataatgaaaaaa

SEQ ID NO: 12068 - DNA, 4521 bp, Canis familiaris
tcttccatcaaaaaaaactgtttacagaatgactcagaaaaaccagctttgtctttaaccagctcttttgggacaattctgagaaaagtttccagtaatggagccagttctcctaataataaaataatatctcaggatcctgattataaagaagcaaaaattaataagaaaaaattggagtcatttataaccacagaaactgattgtctgtcatccctgcaggaaaaacattgggaagatgatgcaaaaaaacaaagagtttcagatataaaagaaaaagtcttgcctacagtaagtcaccctcctgtgccacattcagaagtggaaggtagtgatattcactttcagtctccaaaaagcttttcatttgactgtgataataccagtctgttaactcctagctctagggattctccatcaagcctagttgtgatgtctagaggaaaagaatcatataaaatatcagagaaactaaaatgtaagaatcatgaaactggttttgaattaaccaaaaatattcccatggaaaagaatcaagacatacatgttttaaatgcagattctaaaaatgctaaactgttgtcaactgaaaaacatataacagtagcatcatcttcagtaaaggttcagttcaaccaaaatgcaaatctcaccacaatccaaaaagaccaaaaagaaactactttaatttcaaaaataactgttaatccaaactctgaagaacttttcccagatgatgaaaataattttgtcttaaagataactaatgaaagtaatactcctgttttaggaaatactaaggaactacatgattcaaacctctgttgtgtaagagattctgttcctaagaactctaccatggtagtatgtacagacctggatgacaaacaaacagccaaagtgtcgattatgaaagattgttattcatcaagcatagatgatcttacagaaaggaacagaagtaccataaagcaacaactaaaaatgactctagatcaagattcaaaatcagacattacctcagatatagttaggaaatcaaatggaaacagtgattatatggataattgggcaagactgtctgatccaatttcaaatcacagttttgaaaatggcttcaaaacagcttctaataaagagataaaactctctgaaaacaacattaggaaaagtaaaatgcttttcaaagatattgaggaacattatcctactaacttagcatgtcttgaaattgtaaatacttcatcattagaaagtcaaaagaaaccaagcaaatctcatgcacttgatccacagtcaattaatatcatatctgggtttgtgcagaatagcacatatgtttctgatagtgaaagtggtcacacagctcctccaactttatctttaaagcaagattttgattcaaatcgtaatttaactcctagtcaaaaggcagaaattacagaactttctactattttggaagaatcaggaagccagtttgaatttacacagtttagaaaaccaagccacataatacagaaaaatccatttgaaatgcctgaaaaccagctgactatcttgaatagcacttctaaggaatggaaagatgatgatcttcatctcacaactaatgctccatctatcagtcaggtagatagcaagaaatctgaaggtataattggaggtaagcagaagtttgcttgcttgtcaagaaccagctgtaacagaagtgcttctggctattcaacagataaaaatgaagtggagtttagaggcttttattctgctcgtggcacaaaactgaatgttggtagtgaagcattgcaaaaagctaagaaactgttcagtgaccttgagaatatcaatgaggaaacttctgtagaagtagatagaagtttctcctcaagcaaatacaatgattctgtctcaatgattcagatagaagattgtaatgataaaaatttaaatgagcccaataataaatgccggctaatactacaaaataatattgaaatgactactgacatttttgttgaagaatatactgaaagttacaggagaaatacagaaaatgaaggtaaccaatgtactgacgctggtagaaatacttgtaactcagaatctgatggcagtgattccagtaaaaatgatacagtttatattcatgaagaagaaaatggcttgccctgtattgatcagcacaacatagatctgaaattatttagccagtttatgaaggaggggaacactcaaattaaagaaggtttgtcagatttaacctgtttggaagttatgaaagctgaagaaacatctcatgttactatgtcaaataaacagcagttaacagctaatacggggcaaaacataaaagattttgacactttttatttatcctttcagactgcaagcagaaaaaatataagggtctccagagagtcattaaataaagctagaagtctccttaatcaaaaatggacagaagaagaattaaataacttttcagattccttgaattctgaattacttcctggcatagatatcaagaaaacagacatctcaaatcatgaggtaatagaaaatactgaaagaaaagacaaaataacgaaagaaagtgacctaattggtactgaaaatatattactgatcctgcagcaaagaccagaaagtaaaataaaaaagatcaaagaatctgctgtgttgggttttcatacagctagtgggaaaaaaatagaaattacaaaggaatctttggacaaagtaaaaaatctttttgaagaaaaagagcaagataatagtgaaatcactaattttagccatcgaggggcaaagatgtccaaggacagagaagaatgtaaagatgggcgtgaattagcttgtgggacaactgaaataacaactaccccagagtatgaagaaactcacagttctctagagaagaaaaaacttgtttctaatgagattgcagccttaagacccaggctcttaagtgataatttatacaaacaaactgaaaatcttaaaatatcagatcatgcctctcagaaagttgatgtacatgaaaatacagaaaaagaaacagcaaaaaagcctacaatgtatacaaatcaatccacttattcagccattgaaaactcacctttaacatttacacaggacacggaagaaaaattttctgtgagtgaggcttcactatttgaagcaaaaaaatggcttagagaaggagaatgggatgatcaatcagaaagaataaatgctgccaaggttaactgcttaaaagaatatcctgatgattacgtagaaaatccttcatgtggaaatagttcaaatagtgccataactgaaaatgacaaaaatcatctctctgaaaaacaaggctcaacttatttaagtaatagtaccatgtctaacagctattcataccatcctggcttttgtcattctagtgaagtgtataataaatcagaatatctttcaagaagtaaaattgataattctggtattgaaccagtaataaagaatattagagagagaaaaaacattggtttttctgaaataatgtcccctggaagagaagcagacacagacccacaaagtgtaaatgaagatatttgtgttgagaaacttgcgactaactcttcatgcaaaaataaaaatacagccattaaagtggccatatctgactcaaataattttaatacaattcaaaagttgaattctgattcaaataattctgtacctgcatacagtacagtaaatagtaaaagagtctttgttgcacaccagacaaaagtgacagaggggtttacagacaactgcagcatggtaactaaacaaaacaccaagagtaaatcagacacttgccatgcagaaattgtggcagattatcctaaggcactggatgattcagaggctatttttcctaactctctgggtgctatagaatgttcaccttcacataaggtttttgctgacattcaaagtgaacaaacttcacaacttaaccaaagtatgtctggattggagaaagtttctgaaacaccaccttgtcagattaattcaaaaacttctgatagatgtgaacttcctagggggaagcttcccaagtcagtctcttacacaaatgcatgtgggatttttagcacagcaagtggaaaatctgtacaagtatcagatgctgcaatacaaaaggcaagagaggtgttttctaagctagaagatagtgccaagcaactctttcctgaagtatcacttaaagataatgaagaacattcagaaaagttcacaaatgaagaaaatactgtgatatatacctcccaaaatttactatcatctgctttctctggatttaggacagcaagtgggaaacaagttccagtttctgaaagtgccttatgcaaagttaagggaatgttagaagaattcaatctgatcagaactgaaagttgtcttcagcattcatctacttctagacaagatgtatcaaaaatgcctcctccctcttgtattggtaagagaaccccagaacactccagaaactcc

SEQ ID NO: 12069 - DNA, 1531 bp, Canis familiaris
  misc_feature (1346)..(1346): n comprises a, c, g, or t, or includes no nucleotide
  misc_feature (1385)..(1385): n comprises a, c, g, or t, or includes no nucleotide
  misc_feature (1448)..(1448): n comprises a, c, g, or t, or includes no nucleotide
  misc_feature (1486)..(1486): n comprises a, c, g, or t, or includes no nucleotide
  misc_feature (1518)..(1518): n comprises a, c, g, or t, or includes no nucleotide
gtcagctcggcggcggcggctgcgggaggaggaagcttggggaccctgggcgccggggctcctgctccccgcggccttccagcccctcttccctggctcccggggctgggccctggccgcagagcttggacccccccagcgccgagacaaccgctggcccccaggggaccgggcagccgacgagatgtggagggtgccagtcctgctcttggttttgggcggcgcggggctccgggtcccggcagcaggagccagcacagtccggccagatgacataataccaggtgtagaagacagcgtggtgaccccaggcacagaagacagcgtggtgacgccaggcgcagaagataacgtggtgactgacggtgccactgaagagccttatgagtctggcttaacccctctggtgacaaaaaatacagagagtgtaacagacttacacttagaggatgggccgactcaagaaagcacagtccatgccaaagaagagagccagagcaccacaaccttgaatgtagtgactagtcactccagagagaaagtaggtgaagacaccgagacaacggttgagaaagatggcctggcaacagtgaccctggttgggatcatagttggagtcttactagccattggattcattggtgggatcatcattgtggttgctcgaaaaatgtcaggaaggtactcgccctaaagagctgaagaattgtgcccttctaccaacacatttaaaagagagtttccgacttccccgtccccaagcatgtgggagaagatgacccatggaaatgcttggcgatcccactaccaaatccatggtgatccctccacttaccaaaagtaacccaagggaaagacagttcacaagacttgctcctctaggcaggcatctgtcttctgaaaatgtttttaaatataaattttgcaaaagaggattcaaaagacacaatgcctagaaaatggagcaaaaccacgtaaactgatttgtaactaagacaatataatttaattgatgttagaaattatgctcccatctccgttctgaccattctctcgtattgttaaaatgcaatcaagcctggaaatatttataccagtggagcccttgagttgagtgcgacgttcataaacagcagaagcattttgcaatttccgatctgttgaaatgtacacattccaatctggcctgcttttttaaagcctaacttcatgtgaataatcaaatagaaaaatctaaacttgtataatatgtaatgaccaactgcctttccctggcccagataaataatttcaaaggcgcccgtgttaggtccataaacggggaaagtctatggtttgggagaaanggatttgtttatccgccaataaggtccatccgggggcangctcctaaggcttgctttattgccttcctcccagcggaatgggctttgggtggaactccaaanggctttgctcccccggccttggccggcccttccctccnttccccctccaagaaacgaaatggggggaaanccccaaaaacctc

SEQ ID NO: 12070 - DNA, 364 bp, Canis familiaris
ggtcagggtggagttcacagtgggagacaagcctgtcaacaacttccgcatgattgagaggcactactttcgcaaccagctcctcaaaagttttgacttccactttggtttctgcatccccagcagcaagaacacctgcgagcacatctacgacttcccccctctctctgaggagctgatcaatgagatgatccgtcacccatatgaaacacagtctgacagcttctacttcgtggatgaccggctggtgatgcacacaaagcagactattcctacagtggaaccctgactcccaaacagtccctacccagaggtccgacttcagcgtgactccaatccctttaccaaggtttttgctggatgt

SEQ ID NO: 12071 - DNA, 603 bp, Canis familiaris
aagatttcactgatttgagagtgagaacaagcacaagaggcagggaggggcagtgggagaaggagaagtagacttcccacggagcagggaaccaacacagggaaccaacacagggctctatcccagaaccccgagatcatgacctgagccaaaggcagctgcttaaccaactgagccacccagatactccaatagcaatacttgttaaaatgctaatcaaatactggggaaaataccaacagacttttttaggtgggctttttttttttaatttttatttatttatgatagagctcgtgccgaattcctgcagcccgggggatccactagttctagagcggccgccaccgcggtggagctccagcttttgttccctttagtgagggttatttcgagcttgcttaatcatggtcatagcgtttcctgtgtgaattgttatcgctcacattcacacacatacgagcggagcataagtgtaagctgggtgctatgatgggcactcccttattgcgtgsgtcctgccgtttcgtcgaactgtgtgcgctgctatgatcgcacgccggggagggttcgatgggcgctccgtctcgtctatcgtggcgt

SEQ ID NO: 12072 - DNA, 600 bp, Canis familiaris
  misc_feature (236)..(236): n comprises a, c, g, or t, or includes no nucleotide
  misc_feature (368)..(368): n comprises a, c, g, or t, or includes no nucleotide
tttttttttttttttttaaacctcatcaattttccttgcccaaatcaccactaaaaatgtgccattagagcttctggccaaaagtgcctatttttctgtgaattttggtctcctgagatgggaggtagggggagcacttagcagagccactgcttctgatgaggtaaaaggggagggagggcaggaaggcgaaggccacagatatgtttaaacattcacagtatcgatatatctgnaacaacttcttacgtctttgatctaaagaagctccaaaaaagaaagataggaggaaagtggaaaaacaatactatattcttagcagagatctctgcctcaatcaaaatcaccctcaacaaaaggacaggggntgtgttcctggggcctgctgtcaggacagctgccctgcctcacatgctatgtccatcatggctctgagaaaggctgctaatgagttctgcttatacgaagggtgtatcttgagagggcagaacccccctagctgctttgccccacccgctgcgggctttgaggttcccagatctgtgactgcatactgggtggatatgggaactagtgaaggtcaccccctgatacacacca

SEQ ID NO: 12073 - DNA, 550 bp, Canis familiaris
tttttttttttttttttttttccgttttaggaaaaaatagtttaatgttaggtttcaaacctcttttcacatgaggtcccattctccgtgggacctcatcccaatgctcttcccatgcccgctgggaggtagcagcccctctctggagggcaccacccgcgccagacgcccctgccctcctgggaggcctgccttggctatggctatgtgggaagacttgtgtgtttattcacagtgggagagcactgtgcattgcccgtttcggatgcatggacagccaggacctgactgattcctgagccgggatcaatgtatagcggcgcacggtgagtcagtttgttccttagtaggtattcaggtggtatatggcatatgttgtgtgtgaatgtattcggcaaatgcaaaaatagagcgagataatgtaagctgtcgctatgatgcatcgatgatgctgtgatgcctggatggaatgtgtcatgatatatggcaagctcaaccttgtatgccttgttgtgtatatgtgttgtgtggtgcatatgtagtaatcaag

SEQ ID NO: 12074 - DNA, 822 bp, Canis familiaris
ttttttttttttttaattttatttatttatgatagtcacagagagagagagagagagagaggcagagactaaggcagagggagaagcaggccctagcaccgggagcccgacgtgggtatcgtacccgggtccccaggtacgcgccctcgggccaaaggcaggcgccaaaccgtcgcgccacccaggtacccccaagaggttatttcaacatatcgaagaagtattcttttctcttatctaacacgtatagacaggacggtgtattagttagagtatagtacgactattagttattgcagatcggaaaacgtgttattttttttcaatagtagaaaactcagtatattcttactaggaaaatcacgtattagatgtaagagtacgacgaaggggtcctattgttcttttcgttcctcctgttgttattgttgtccgtaaagtgtcgatgccgtctctgtcagttttctcatactgcgcgtcggtctcgtcgtctattcacctgtctcgtcggtgccgctcctcgtcacgtgtcaggctcatctcgtgttcttttcgttcgtagtgtgtcttgcgtgcttgtctagccgttgcttccggttgttctctcctctctgcgcggcttgcgcggcgtgtcgtcttgcgggcgccgtcgcggtggtgctcctgtttctgggtgtttggtcgggttctgctggcgtctgtcggtgtttgttgtccctccccctcgggggctcgtgtgtggcgttccgggtttctcgtggggtgccgtccgcggtctttggcgggttttttgggcggggggtgtttcggtggttccccccc

SEQ ID NO: 12075 - DNA, 937 bp, Canis familiaris
  misc_feature (577)..(577): n comprises a, c, g, or t, or includes no nucleotide
tttttttttctacaactttttgatagtgcactaggcaaagcaagttaaaaagctgactcagctcaggtttccttctccataatatacaaggctttatattttttttggctgtgtcatctttgtagaaatgtttttataagatgcttgagggaaccatattgttctttcctatcaaagataaatgcaaaggcatgttcagcccattagataatgatacttctgttctcaatctcagtagtatttgggatgtgttggtaagtgccccttagccatcagatcagtattttcaaaaacatacatctaatgaatattttttgaaaagaatattgagtagagcttctcattttgaaagggaaaaaattcctctaggatatagctactactaaccctcctggtgcgggtatatggacactttcttcgagaaggaaatgagcctcgattgaatacctgatttgggccccattttttttgtcaaataaatggtctcaatgatcctccgaaggctttggtttaggggggtcagttcctgtgtccgtaatgggagcggcgggatatagtcttttttgttctgttcttnctcttggttttctcccctgtgttttgtcggtcgggttccggttgccccggttcttgcttctccttgggggtctccctggccctctctgtgcttcctgtttctgctgtgctgctcccctttgtggtgtgcttttgtgattatgtggctgctcttcgggtggggctctcgtgcggtctggccggggtcctgtttggggcgcccgtgggtcccctttgtcttggtgggttttcggctgggtctggctgggtctgggggtgttcgccctccccccttgcggggttggtgcctggcgtggtggccctttggtgggcccgttcttggcttggcgggtttttgccgggggggtggttgctcccgccc

SEQ ID NO: 12076 - DNA, 700 bp, Canis familiaris
ttttttttttttttttttctttttggtaataaaaaatttcttggtttaggcgaatactctgtgcagcgcagtaccgagggggagccctgcccccccacctccctccccttcctttgcctcctgttggggagaggggggaagggggactttctgggcaggggtaaatgttgggggaggggaagaaccatctcccgtcccccccccacccaacaaacatggaagaaagaaccgagaagggcggaagggaagaagtgccagcagggggagacacaccgatccatctccacagtctcgcccaggtgggttggagcccggccccagcagctaagtccagctggcccgcctccgtcgccccccactcccggcagcctgttaaagcttgagctcgttggctattttggaggcaatgtttttgaaggccatggaggtgcccgatatccgcttaatcggacacgttgagagacagcgcggcagtttgccacctccatctccactgcacgaagtctcgtggccaggcgtgcgtgatgccagcgcatgtacttctctcgtgcgatttctgcgcccggggatcactattttgagggccgcccggtggagctcagctttgtcctttgtgaggtatttgggtgcgtatatgtctagcgttctggtgaatgtttcgtcaatcccaacatgggcgagctgatttagctggtgctgt

SEQ ID NO: 12077 - DNA, 706 bp, Canis familiaris
tttttttttttttttttttttgagcaaagttttcatctccccagagcccaggggtcctaaggcgggtgccatgctggaggggcttatgcccacgtgaggcctcagagctgctgaggaaacacctagagagaaatccctttgggtggggagggttgcggggagactggtcactggtggactgggagtgttttagggggcactcctggccaacccggaaaccactcagagaccaaacgctagacatctgttcgttcagcctcagaagagaggggcttgaagccagtagggacctacaggaacgtgataaagcctccgagaccctgctggtcgcacagcgcagaccccgtggtgattcatggttagggagtcgactggaatcactaaggaaactccagctcttccggaatccggatctccctgctcctaagaccccacggaacaccacttcgattgcgggattttattgcgacaaaatcttatcatcacggcacattcattggttaactccgtcaccaaagctgaccttcttccgagaacaataactaaaataacccatcttaactcgtctaataatctttatctttcactcaccacacttcgcttggcttcaacaacatctcttcttaatcccagcaaaagcgtcccccccggggacaccgcgccaccccttgttccaacttcccgactccttcctccaattaaaccc

SEQ ID NO: 12078 - DNA, 281 bp, Canis familiaris
tttttttttttagatttttttactattttactctctcgcctgcacagaggagtcgtgtcttctctatgtgtgtagacgccgccactgccgaccgcggtgtctatgctaggctctcccggacgtgagctacgggagagcgcgcgtttgccctatagtggccaggcgctcccctccctgcgccttctgttgatcctctcatctcttgcctggtctcttgcggactcggagttcactgctgtcacggttcccggcaggttaaaatggtgtcttcctcgcttctg

SEQ ID NO: 12079 - DNA, 380 bp, Canis familiaris
ttttttctctaagtttatttatttataatgtctacatctaacatggggctggaactcgtgaccccgcaatcaagagtcacatgctccaccacctgagccagctagatgcccctggtttgaccacttttaacaaaaaactcctatgaatgaatattacttatttgcaagcatgtatttaaattacagtagaacgttaaggcactgccaggctgaagaacatggaagagaatgctcctgttcttagataatgaataaaggtctaaattataaagtgatgagctggatgaattatgagaaagtaatgggtttaagtttcattgattcaaagttatgattgagcagctcctcgtgccgaattcctgcagcccgggggatccact

SEQ ID NO: 12080 - DNA, 600 bp, Canis familiaris
  misc_feature (575)..(575): n comprises a, c, g, or t, or includes no nucleotide
tttttttttttttttttaattttgcccccttaataaggagactctttagatatattttcttttaattgtttcctaccatgaaatttaaataccgcagacttaccatttataaactgtgtccaatggaggttcacaaaccattataatatctaaagttttttatcccaacaaccaatctcaccctcttgaggacaaaatcacccccatttacaaagtgtgtcttacattgaattctttttcatcagagcacttaacacctctcgacatttatatttctttattggctgtcacttccacaacaatgtgagcactgtggataggactttttggtcaccactacagctccaagtatccactataatgcctggcatgtttttgtaatagactatatatgtctgttgggcttattatacttttgatagggaggaggggtgagcttcagggtaaagcgccccgaaactgttgttgctgaagtgtggagctgcctctmtattctggatgtctatctttaccactatgtgatgtgtgatatatgcatctgctgcacaagaggaaccagagcgggggtggagagnagccccgccctgcaatatggtgtgg

SEQ ID NO: 12081 - DNA, 280 bp, Canis familiaris
tttttttaagtttacattatatatattttatgtatccttgtatatccaaaatattatccatatttcattttggtcatatataaactcattaacgtgtattttcacttctctttttttgacacagctgttgatcttggtgggttctacaccccaaggtgttctcaacgcacacaacgccacacctcaggtcccgtatgcacccgtgtgctcggtcatagtgcacagccggcaagccacccgtactcatacgacgtggctcacactgtggtgtcgaaagtac

SEQ ID NO: 12082 - DNA, 315 bp, Canis familiaris
cgaamgcaaaacaaacagcaaaaaagcccccgcaacccaaaaaatgacacggtggggggggggggggggaggcagaaacagagagacaggagcagaggaggacaaaccccttgatcaaaaataaaacaatatatgagaaacaaactatagtatatatatatagggagctagggcacacaattatactataaaatatacaatactatataaagcacagagagaggacagaagaataccaccaagagtaacaagaacaaccagggtaaagcgcttatgtactcctcctcctctcgaacctatgctctcgaaatcttc

SEQ ID NO: 12083 - DNA, 513 bp, Canis familiaris
ttgtctcggactcactatagggcgaattgggtacgggccccccctcgagtaggtcagacataagtacaaaaattgtgtgtggggctgcagtttaaggacatttttctgcagccgccacatggtagcaaaacggtggtaagcagtgcacgagtctgcgtcgacgacagccagagtccatgcatcgggaggttctctcggtttgagaagaaacggtaggacatgcacgggccgggaggtgcagtttctcgctcctgccactaggggtcaggaggtggccgcctcacggctcggaggtgggcccctctcggatttgctagcggcggcgggacgcggggcgcagggtgccccccccttccgcacttcctttcaaagccaacttctcagttacttttttgaagttgggggaaggcctcacttttcccctcttttcttttggcttacaaaacaaaggaaaattccattttttggtcaaaaacaaactttttattcaacttttaaaacttttcctttctt

SEQ ID NO: 12084 - DNA, 419 bp, Canis familiaris
cttgtaaatacgactcactatagggcgaattgggtaccgggccccccctcgagtaggtcagacataagtacaaaaattgtgtgtggggctgcagtttaaggacatttttctgcagccgccacatggtagcaaaacggtggtaagcagtgcacgagtctgcgtcgacgacagccagagtccatgcatcgggaggttctctcggtttgagaagaaacggtagacatgcacgggccgggagtgcagtttctcgctcctgccactagggtcagaggtggccgcctcaggcttggagtggccctctggatgctacgcgcggagcggcgaggttcccccgtcgcacttcttcaagcaactcggtacttttagtggggaggctcacttcctctttctggctaaaaccggaaatcatttggtcaagc

SEQ ID NO: 12085 - DNA, 600 bp, Canis familiaris
ttttttcacggtaattccccaaaagaaaaataagtaatttattttatgacatacttatttggatgattacttactggcaattagtatttctactttttttttttaaaggcaaccattttaagtgacaatatatatcaggctagtagaaaaaagttgaaacaaagccctctcttttgatctcacaaagtcatgcagacaagagaaggtacatccgatttgttccaatcaggcttcttggaattatcaaatttctttctggcaaagatgaatttggctcctcctagaaaggtctttgaaggctgctgctaaactcgttccctttgaaaaagtaaatttcaggcctgtagtgccgaggaagtttttgttttttgccattttttgcctattgtgcctagctcccatttccccttttttttaagcccggacccctgttggtgagttcccttttgcccaattttcccgtctccctggcccgccccgggtttgggcgcttggttcccccgcggtccgccccggatcccgcccctgtgcctgccggggggccccccggcctggggccccccccgcctgggcccgggggccccccgctgggggcccggg

SEQ ID NO: 12086 - DNA, 500 bp, Canis familiaris
tttttttttttttttttaatgatagtcacagagagagaaagagagagaggcagagacacaggcagagggagaagcaggctccacgcaccgggagcccgacgtgggactcgaccccgggtctccaggatcgcgccctgggccaaaggcaggcgccaaacagctgcgccacccagggatccctgtaaataaactttaaaagagagagagagagactggccagatgcaacaggaactgccagggccccagacctctattgtcaagtatccccatagtagatgttacccaggccaaggggcatgaggacaagggtcttggatatttcagcatcggagatttgacccctcgtttcctttgtccctttttgtcagtttcaacacccccccccagcactactttatttttgggtgttatctgttcttctctcgaatactctttcttgctaaagcaattcttttcccgtttctcttttcttccagtgaatgggtccctccccaggggc

SEQ ID NO: 12087 - DNA, 405 bp, Canis familiaris
gcagaggtagggcttagacttccttcagttttattggaagtctatagtcccatccttacaccgctaaccgagataagtaaagtaacaaagatgccaatacacttggagtatatgcatactgttatatatatcgcaacgagagataacttgcagatagtggtagaaagttctcggtaggtataagataggcttacagattaggaaagcgttaccgcgctcttatggtatggctgtcagagtgaggggcagcactacccaggcgctagctgcgctggccgcggctggcgtgtcagtcccgggtagtcggtatgggacggggtagcggcgcggagcccccgtgaccgccgtcccatcgcgccccagtctcggtctctctccgggggggtgtcctcctggcgcggcggc

SEQ ID NO: 12088 - DNA, 450 bp, Canis familiaris
tttttttttttttttttttcctgttttggtagtaatttgcccatttcatctcggttatataattaataccatgtaatttatcatagtattcctgaataatcttttattcctacaagattggtagtgatgtctcttctttagaatattcacttttttttttgactattcacttttaaatacactttcttctaaattcgagtccttagcttctttcttaattgactgacatggcttcccacaatatttacatgttgtccaaatccctttttttaaaaaagagaaggacagagacatagcaaagggacagaagcccccgccagcagtcccgatgtggggacttgaagcccaaccccgggatcaagccccggagccaaagctggggccccacccacaagcccccgcgggcatccccctgggggtgcaacccccaaagggaattttttaaaggat

SEQ ID NO: 12089 - DNA, 700 bp, Canis familiaris
gcacgagcctaagccctgcccttatctagaaatcaagcccaaaacaccaagtgcactcaggcccttatcagccagggggagggggaaaaggggcacatctggcaactacacttctcaccccataaagccattcagcgattgggaaactgtctgtctgcaaagccaacataagtcagcaaggcattttctgaattgcacaacacatccccacagaggccagaacagagctacagcctcacatgctggctcaggccctccttgtgcttcccattccaatggcgtaatgcagtgcacatgttcccatctgagcccagcagggagaagggcagacatgcaggggggagagaactagtatcattaagtagaattgacttttggctctgggggaagttccaagagaggtaccctctgtcccctcagaccctcatttccgggggtcgtctctcttccatggtccccttggccctctagctgacatctcttctctcataaataccctttcacttgcaaaaaaggttttccagggtggccaaatggatgcctcgaaggtacagaggtggtgcagtcaatgtttgttgcttcactagaggtggttggagtgtgtgtgggtgtgttaaggcccatgtgagcgggggggggtgttccttgggttgttggttttccatcttccggtttttttttttttccccccccttttgat

SEQ ID NO: 12090 - DNA, 709 bp, Canis familiaris
ttttttatattttctatctctgttgcatttctatctttgttcacacattgcattcctgactttggttaagtacatttcttaccattattttgaattctctattctgtaaaccatttatctctgtttcattatagtttctggtgatataccttattcttttgtttagaacatattccccttgtttctccgttttccttgactctctgtgttgtacattagataaaaacaattatttctcctagtcttgacagattggtctcctataggaaatggactttgtcaatcagcctatcctgagctcctatttgcctcttaaacttttgtgattgttcaagctaccatctgtttcttagtggcccccagtagttgaatgtgtaccaaagactcaggggkacccaaaagcgaggatcacaggcagcactcagatgctgggcggaccagaagccagaaactcaggcaaacagctgggggaacwacgcagtcaaaccctgcccccggagggaacctggaggaaaggacatttttgcctcccccccctgcataaagccaccggggggggccaacaccccatttaaaagcggctgggtggccaaggccccgggggacccctaattgcagggggcattggggaacaaaaactggggttaagggcccctcccccagggggagggataaaaattggggcccacaagttggcaggccccccccc

SEQ ID NO: 12091 - DNA, 499 bp, Canis familiaris
ttttttttttctcagtaaaccactctgatttagtgaagaggactagttacgttcaagggtgaccaacctttgttcctaaatcttaggacttggggttcttttaaaaaggaaatggtggtgcagcggtttggcgcctgcctttggcccagggcgcgatcctggagacccgggatcgaatcccacatcggactcccggtgcatggagcctgcttctccctctgcctgtgtctctgcctctctctctttctctctctgtgactatcataaataaataaaaaattgaaaattttaaaaaaaaaaaaaaaaaaaaggggaatgcccttgggcagccctggtggctcgcgggttttgttccgcctttggcccagggcggaccctggagttccggggtggggtccccgccgggggtccccgccctgggggccgctttttccccctgcctgcgccccgcttcttcccggggcctcccccgaataaataaataaatctttaaaaaaaa

SEQ ID NO: 12092 - DNA, 300 bp, Canis familiaris
  misc_feature (237)..(237): n comprises a, c, g, or t, or includes no nucleotide
ttttttttttttttttaagattttattcatctattcacgagagacacacacacacagaaagaggcaaagacacaggcagagggagaagcagtaatcaaaaggctagtgcctggaattacctaggtatatctaggtatagctctcccaactatgtcaaggatgtggtttagagctgtgttatccaacagggtagccactagccacaggtggcgactgagtacttgaaaagtagtctgnaaaaaaaaggaaggaatgtagtctgcattggcgtgaagtggccaataccttcccgctttccaa

SEQ ID NO: 12093 - DNA, 500 bp, Canis familiaris
gcacgaggtgagaagcaatacttaaccaaacagtaataattttatcaaaacaaaatagtatggtttactgcataacacaaaagcgcagtaagtaaactgattttatttttaaaaatttgtatttaaattcaatttagtttaactatagtgtattattagtctcaagttagaatttagtgactcatcagtcttatatcctacccagtgctcattacaacacgtgtcctccttaatgctcattacccagttacccaaaccccaccactccttccagcagttcgtttctatgttagagctctctggttgtcttcctgtttgtttttaatactgtcttctgtattatgtttggctactgtctctatgtttttagtaagtgtttgtttgttttgattcttttttgggggttagggccgccgggccccgtcgtggccggcggtcggccgtctccggggggatgggggttcccccctgggtctgctgcctcccgcggcccccgtggc

SEQ ID NO: 12094 - DNA, 520 bp, Canis familiaris
acgaggcggcccaagccccgaccgaggccagcatgtccccgcagaggatcgtgcgtgtgtccctggagcatcccaccagcgccgtgtgtgtggctggcgtggagaccctcgtggacatttacgggtcggtacctgagggcacggagatgttcgaggtgtatgggacccccggtgtggacgtctacatctctcctagtatggagaggggccgggagcgtcggacaccagacggtggcacttttataacgggttggagatcatcgtggtcatgaactctcccagcaacgacctcaatgacagtcattttcagatttcctaccactccagccatgagccccctccccctggcctaccagtgctctacctcacctgtgttgacatcgctctggatttttacctgaacttccacggcaggcacgacaagaagctattttgacaaaccggcagttgttcttgggccccccaagtatttgaacccctcttcctggtaaacttttacaagaattatttttacctttta

SEQ ID NO: 12095 - DNA, 470 bp, Canis familiaris
gcacgagcccccacccacctccagttcctcctaccttccctttctctctcctccattccagaacccttgcccacaccctcagctttgttttcgccccctgtcctcccctcctaccccaccgggcttggctgcccttgccttaccagttctcttcctccttctctccgttctctttttgctttctctccaactgccagccgatcgggtcaggcaagtccgtcccgtcctgagagccccaggccccccttcgacctctaaccagatccctctattcctcggagacctccctttccaagcctgcctggacggctgttctgtgacttgacagtggtccccagccccaaagcctcccccttcatctgtgacttagtctgttgtagtggtgagtgaaacatccaggcgtgatattggtgaaaagttgtgcccctctgtgggattgctcctatccattttataaaatactattaata

SEQ ID NO: 12096 - DNA, 650 bp, Canis familiaris
gcacgaggagagaggatcctgggagagcacggatggacaaacggatggtcggatggaaggaaagaagggtgccctgaagacctgcaggggaggggaaggagtggctgtccacctggcaccctcctccaacagtgacacccctgccactctgcacgctcccaggcagggcgaggggaaccaatcccagaactgcccctttccatggaagcaagaagggcagccgagggcagcctgtgggactcaggctagacagcaggaaaacttcccaacagaaggctgcaggaaagcccatggaggactctcttccagagctggcctgcacagccttcagcatggggcccggcacacaattggtgccctcacaggatgcattttttcccagaagaggatccccttaggtttggctgtgttctttcccttgaagagttagggcccagcaatgggcagcaacacatgccttcagtggcattaaaaccccttaatttgcccctcccaccaaaaaaaaaaaactcctgggggggccggttccccaattcgccctttatgaattgttttaaattcgtggcggtgttttcaaagtcgtgctgggaaccctgcgtttcccacttatcccttgcggaatcccctttgcaagtggtgatacgaaaggc

SEQ ID NO: 12097 - DNA, 600 bp, Canis familiaris
gcacgagctagccgcgcatcggatgcttgcctcagtctctgctcggctctcctggcatgctacgcgagcaatgcagcgcaaagatgcctcttaagcagggctttaagcccctatcacgcaggcattgaggcgtaaccagcacaggaggaggtccgctaccgaagccacccagccaagcccacagcactcccctcgacctcccaattccgcctcagaatcagtgatgcccgggcagacagctcgagcttccgaccgaccacgtcgcctcaactgcacgacgcaatccgcttttaacacacataccaagaaccactgcacgcgatgatgctacacgagaggtccaggagctcaggccagatcacgaaagcaaagaaagacggaactggcaactcacatctcagctaatacttagagggaacagtgcgtacaaaaccgttaagacgggagttgatcaccacaaaggttacaaaaacatccaaaaaaccctatgtcagaacttattcctccccccccctagccccccaaggctccagagacacaacaacgggcttcaccgaacttagaaagggtgaccacccaagcggcccttgcgcaagccag

SEQ ID NO: 12098 - DNA, 500 bp, Canis familiaris
gcacgagccaccatgtacacttagaactgttttgttcagaaaagaactatgtagtttgttctttttactgtgtgtgtatatgtgtttagtttttgtgctttgatctcaacagtagctactaccaaattcataataccaagccacagtattatgattattaaaataaatggatgtattgagcatatgtttccactagttcctaaacatgtttaatggagttggggctttgagccaaaatggcttttttttttttttttaagttaagcttctttaaaacctcactttgcacaacactttccaaagcgtgaggcaaactaatctgcttaatacattaacattgaggtggcatttgtttcggtttccctgactggtttcccttaagcagtctagtggtccaaagttgtccgcaggtttcagaatgaccctttctctgaattgttccgtaggcacctcacactgcccggggcttatttctggaagccgccgtgccaaactccttt

SEQ ID NO: 12099 - DNA, 660 bp, Canis familiaris
gcacgaggccggtcgactgttgggccgttccgctcggacctcgggcccggccctggccctggccccgcgatgggagctgctccctgggggctgagctcgtcagcatccttgacctgccgtcactcctgaagtcggagaagagccccttgcccacccacatagccccttgctccgttttggggtcgcctccgtccatccggtcctctgccctagcggctgcccagtctaacaaagaaacaaaggaacagggcaggaagatgatactggcgtccgtgttggggagcggtccccggagcggacctccactccggcccttgctggggcctgcactctctctccgggccgctccacgtcagccaccgacacgcaccacgtgagatggcggggagtcccaagactgtacctccttttaaaacagtcggcatcgatgtggcagggagaagccctcagtcgcctcattccgacatgatgctctatttaggcgctttaggatggagcaccttttaaaagtgccggtatttgagaaaaagtttcagtaggatgctaccaaataaagggtttcgagcgttcgtttaatattgggtgaacaagcaatatttatgttaagagtttttatcggtgctttaaaaagtgaaaaattttttttttatgaaaaggaaa

SEQ ID NO: 12100 - DNA, 650 bp, Canis familiaris
gcacgagggaagatgagaagagggccattggacccaatcacaagggccacccccgcactagctactaccagtatggcctgggcatcctggccctgtgtgtccaccagaagcggctccatgacaccgtggtgggcaagctcctgtatgctgtggaacatgaccatcatctccaccgggaccacctctctgtgggtattgctgaatacacccccaagaacggagaaaccatcgagctgaggctggttagctggtagcccctgggctcacctgcccacagcctggcctactccctgggcttctgccttccctccagacatcgctgtaacaggcacacacccaaccctgctgctacctcatgtgtacttggagcagtgtcccctggattacccacctatcaccttcacagatgtcctcagccatcatccaccctggatcagggaaccaagcaccttcccttggaagggtgccttctcaagtctggctcacctggccacacaggatcccctaaggatatagttgagggttaaagmaaatctccacaaagagaagtacggctatagtgttttagtcgcccatatggattgggtcttcgaggagctttttggccaagggctgttcctttacccagtttttttttggctttaggaagt

SEQ ID NO: 12101 - DNA, 350 bp, Canis familiaris
acgaggcactacatgtgtagattaaaaatgaagtttcaattcaataaccgaagcatccatcttaagaattttttaaaaactcagaaaatataaatccaaagcaagcagaatgaagggaataaagagcagacagatatcaatgaaatttgaaacaaaaacagacaaaactgattaaaactagttcttgaaagatccctatgataagtctgatttgtaaccattcagataaggaggttcctcagttctgtgggttatctcatgatctcccgactccctgtcgtagtggtgctccggttgcatgcttgtcggctgtctggtgtggtgtcccttggtctcctggctgtgtttat

SEQ ID NO: 12102 - DNA, 450 bp, Canis familiaris
acgagagaaattctgtaggagttcatagttgtaattagatttcagagaagttcatggaagaattctcaaaggctcttaacctccagactgagtgatgaaattgatgacatatcatcagagagctttaagccaatcaggcagccaacaacaagccattcctacctttctaatttgtgttctgtcttactgctatgagacaatccattgtcatcagtaatgggaataatagcaaagatttttggaccttaatttctttctcctctttgaaagatttattattgacgaagaggggactgctggggggtccgggagagagcactcctggacggtctgaccggctttcgacccgatatgctggcaagcgttttccactgccccgtgctgacccattctaaatacttatcgtatatttgtctgttgcctggtgttgtgtgctgcctttttcgcccg

SEQ ID NO: 12103 - DNA, 350 bp, Canis familiaris
gcacgaggaatgatcgctgctcctcataatagggaagcatgctattctaaggcttgttcatggtgcctttattttaaaggaaacttaaggtggggggagcacgtagctcttgatttgtgactcatagatttgctggcctgtcgcagaactcagaatgaatgacgggtttcaggcagaggagatgtcgaccgagcaagtcacgaatactccggctccggcggctttctcgggcttttcatacaccccacaccggtgagggaaatcactttggggctctcttttgcccgggccctgccccctgccactccccctcctaacgtttttttctgaaaaaatttttttgcsggcgg

SEQ ID NO: 12104 - DNA, 350 bp, Canis familiaris
gcacgaggctataccaacatcagaaaaagtagatttcaaaaaaagtattaccaggaagtaaaaaggggtcaacgccagtaagtgaaaaccggggtgagctcagttaatgaagacaaaaaccagtcgtaaagtggtgtaggaagtcgtagtaacaaaagtggttcaagtaccgtgaaaaaagtacgttaaaaaccgtcccaggaaaagtaaaagtagtgggaaagttccaaacccgccctcgtgggtgctaaggttgcgttaaagtgtcttcctcctcggtttattccagtgccgttcagttttttggggtttttcccccccccctggtttttttttttaaattccgtttc

SEQ ID NO: 12105 - DNA, 250 bp, Canis familiaris
gcagagcagggacttattatatatgtttaccaaatttcagtttcctgtagacaaacacaattaccatatagttaaatggggatgaggattgttataatttcatttgcttttctgaagtctctgtgacacaagcactgaatgacattacaaagcagaccatgaaagcaaaatatgttcatggatagtaaaacctcgtgtcycaggatatattttctttttgcgttgcgtatattttattggttattcccca

SEQ ID NO: 12106 - DNA, 600 bp, Canis familiaris
agccagaagatggtgtacgttcgtgccatgattgagtactggccccaagaggatcccaccatcccctgcatggatgcaggttgcctttccagaagggcgacatccttcagattgtggaccagaacgatgccctctggtggcaggcccggaaaatttcagaccttggtacctgtgctggcctaattccttctaaccaccttctgaagaggtaagaggattcaggactgagccatcaggaaataaaatgttttctcggtcttctgttattgcagttaggatgaggtaaagggagacaagcagacggacaaacacatatactggtctataaatcaaagtcaacttatccataaaccctaagcatcttaaataccaagggggtcagaataatcatatccgctagaaaaaaagcaaaaagcccttgtgcaactcaaaccttttaaaggtggttctaactgcctctttttaatcttttgaagcccagttgaaacctcccgctttttgattctgaacccctggccttccctttttttgtccttgaggtcccaaggggttgtttaaggttggggtttactttttggcccggttttccgcctttttttt

SEQ ID NO: 12107 - DNA, 580 bp, Canis familiaris
acgagccagaactgatcatgaaatccatcatcccagtggtcatggctggtattattgccatctactgggcttggtcggtggcagtcctcatcgctaattccctgaatgaatgcgccatcagcctctacaggagtttcctccaactgggtgctcgcctgagtgtgggcctgatcgggctggcggctggctttgcattggcatcgtgggggacgctggtgtgcgtggcacgcccaccagcctcaggctattcgtgggcataatcctgatcctcattttcgccgaggtgctcgcctctacggtctcattgttgccctcatcctgtccacaaaatagcccttctccaaacgcaccagccacaaaatatgatgtaaaaaccaccccctcatttcaaaatgaacaacctccacacacatgccacggggcagctgccccccaccccccagtaatttggtctttttaaatgcaacattttcctaatcccccatcctctgttaaatccgggccttttccccggccccttccccttgtaaaaagtcgggcccaatcaatttccccaaattaaggcccccgaccaatgaac

SEQ ID NO: 12108 - DNA, 380 bp, Canis familiaris
gcacgaggcaattcataaccaaaagggacgaacctgagctctcatacttatatcactaattctatttattggctcaactaatctacttggactattacctcactcatttacgccacaacacaactctctataaacctcggaatagcaattcccctatgagcaggacagtattaccggttcgctataaaccaaagctccttggcccttctccccagggccctcttcccctattcaatctagtgtgtgttacttttgcttttttttacccctggttttggttggttttcgccgtttttattgggggctcctatcctttttttttggggggcctttggccttttagtttttgggggcccgcttttttcctttttttttttagc

SEQ ID NO: 12109 - DNA, 300 bp, Canis familiaris
gcacgagtcttgaacctacaggatgaaagttttacccggggcagtgacagcctcatcaagagtaagaagtgagcctcgtgaccaggaatccgactcccagagaagttgatgtttcttccctggtgtttgaggagccagcttgaggtcagcatacacccctgtccacccccagtattatgtgatggcccctccctggatctttcctcccaccccttgatgaaaaaaacctgacccgtttccccctggggaataatttttttcctccctgttttggaaaagggtttggggaagttttttttt

SEQ ID NO: 12110 - DNA, 200 bp, Canis familiaris
  misc_feature (141)..(141): n comprises a, c, g, or t, or includes no nucleotide
gcasagggaaaaagcatttgtctggttagcacgtgaagggtcaggaggaagtgttgtagctcagactctttgccctcagtattgatagcagtattttaagttgattcgtacctgggtctgatttctaaattttataaaatngtaaatagtgaactcggatcgataattttcggtgactattccgaagtgttgtgaaagat

SEQ ID NO: 12111 - DNA, 430 bp, Canis familiaris
acgagctttattctcaggttatactcttaacgatacttgagcaaagattcactttacagttatgtttgtgggagtaaatataactttcttccctcaacatttcctaggtttatctggaatacctcgtcgatactctgactacccagatgcatatactacctgaaataccgtctcctctataggatcgtttatctcgcttacagggtgatgcttataatttttatgatctgggaagcctttgcatccaaacgagaagttgctatagtagaacttactacaactaacattgagtgactacatggatgtccccctccataccacacgttcgaagaactacatatgtgrtcaaaaataagaagggagggatcgaccccctaaaattggttccagccaatgtcataaccattatggctttcccaatccggaaaaa

SEQ ID NO: 12112 - DNA, 260 bp, Canis familiaris
acacgaggagagagagagagagagagagagagagagagagagagagagagagagagagagagagagagagagctcgtgccgctcgtgccgaattccggcgcgtcttaaattttgggtttttccacaactacaggggaaaaagaaaaccacgtctttaggcttcgcctttttgtcaataaaccaaaaagtcttcttataactttactcccttcatcgcttgtctacctggggtctagctgtttttgattccccccccttag

SEQ ID NO: 12113 - DNA, 350 bp, Canis familiaris
acgagggatggaggggtcccacagatcaaaccggcaatgagactgcccacacagtgtgaggcagcctgctagaaggcagggggctggaagtctgtccgcaaggaaaattgcagccagtacggaaggctcccgtcttcccggctgtgcttaaaggagctgtttcagctctgccctggtgctgctcccccagcccctgctgccagcccacaccctgacacctccctcctccccacctgttgtttcctcctcccacaccggcctttccaacccccacaaaaccgggttgactctccctgaaggacaggaggcctttctctaatctctggggcggactttttcttggccacgct

SEQ ID NO: 12114 - DNA, 536 bp, Canis familiaris
tttctgacagaatgacaagaaccagaagcaattaaggaaaagggagttatcaaataattccattccctgaggacaaaaattagaatttgactgacaagtaggagctagagtcaagaaaagactttaactgagcaatagtagacaattgtagtatttttagccctagccaatcagctggctgaagtccacacctggcttagcacagctggataaattgtcaatgcttaaagcatgatcactatgaataaataagggttagttaaaagaacattaaaatattgggcacaaattttagttatttagggggaattcctaaaaggccccgttctttttcttcccacttttaaaaaaaatgttttttgtaattttgtcctaaggttccacttaatttagtaatttttttatttgccgccctggcttttttattcccccgtccttgcgcgtttttcctttccccccctttttcctttcagctccccccccctttttcctttgctcttttggcttgccccctttttggggggggcctggggttt

SEQ ID NO: 12115 - DNA, 562 bp, Canis familiaris
ttttcagaatttgttttattcacatttaggcaccatatatttcattttattttcttttgaaaggtctcaggatgcctttggttgctccaatgacagagcaatggtgcagggtgacacaggacacagtgggctcccttctgagaccagactgggcctcctggagagggagcagcatggcctgagctcaggtctgggggagctgacccaggggctgaaggctctgctggattgggcaagggtggcatgggcacccagtgttgtccttgccaggactggggtgcaggggttcagtatcacaggggtggggtcccgcttctctctcccagattcatcctcagggagacgaggctgggcgtagaaactggctgaagttaaggaagtggcgggacccccggggtttttttccactctttgggaaaaaatgtcctttcctgtaagatttttaaggaaaagggtttttctccttcctttgtgttttcccccgggttttatttggggtttttaaattttccacttaacccgggtttttttcaccttatttaatttggtacctctgctcctt

SEQ ID NO: 12116 - DNA, 511 bp, Canis familiaris
acgagattaaggcagtatttatttatatgtgtatgcagtttcagctaaaattaaaatactcagtttacttctcttgattttgaatggatttactcttttttcaaccgcctggtgagatcaaaaggaatgtatccagaagtagcttattttgactggcatatcagtgtaaatagacacctcctctgagaccatagtttatcgcatatcgtggaaatacgtttggagtcagactcttaagtgtaattccacttctcccatttattggtcaaatggcattgggtaaactatttcaaatcctgtaaaatgaagatgagattgtttcagggtttgagaatgagttagggtacagaatttgagtgcccgtaaaggtaaatcttcgtcctcacatatgcccatggcaaaaaagaatttttacggattgcattgaggggtgtttcctccccttcaaagaaacttttaatggcatcggttcagccgataaacaggaagtgcctcagtttcaggaattgca

SEQ ID NO: 12117 - DNA, 680 bp, Canis familiaris
ttttatctgttacttccttaagttttttcatcagaaataatttgattgcagcaaacacattatctccattttgaacaattatgcagtttttctttgcttcatttgtaccaacatatacaggaagttcatcaggagaatccctgaaatatcccatgtggaattgagttttattatctccaataataatggtctggaactccggagatcatagtaaaatctccagtgaaggttaaaattcaggcttgctgattttttcattttatgttttccggcaaggatatcataaggcccactaactgaagtcaaggcttgtggaaagtgaatctttgccagtataacaggtgatagtcccatattattatagcattattttatatttcccttagaccagatctttgtaaaggttccttttctgtggaactgcttagatctccggtccggtttcctacccgtccttttccactggtaggaacccggggaatgattcgtgggggaaccccccccctgggttttccaggtcaggcccctcccaggacttcccggagtggttggaatgctccggcgggaaggctgttatggttttctacttcgtttcgaggggcccgggggctcggtttccccgggttacccccttccttcagcggtttttcccctgcgggcccccccgccgggttgggttt

SEQ ID NO: 12118 - DNA, 567 bp, Canis familiaris
tttgtttttggacctaaaaatccaattgtctggcactatttgttgaaaagactatcctttctctaccaatgtcttttgtaccttcattgaaaagtcagttttctatatatcacatatagtgtgggactatttctggactctattctgtttcactgacctatctttacaccaattatcacacaatctggaattactgtagttttataataaaattagatagtgctagttctttttcaaggttgttttggctttctaaattctttgctttccatatggattttatgtactttttattcatgagaggcccccgaaaaaggcggaaacataggccgatggggagcgctcctttccgggggcccgctgtggggcttaatcctggggccctggggtttggccctgagctgcaggccgatcctccccccctgggccccccaggcctccctccctttggggtttttggatgggctttccccatttcttccaattccccccctgggcttttgtttttgctgtactgcctcctttgatcctttttgggtcctgtttttcccccctgttgcccctcct

SEQ ID NO: 12119 - DNA, 473 bp, Canis familiaris
tttttggtgatgctttaaaacctggtttctgtcctgcagagctaagtctttcctcttggggaggtgacagcggcacattcaacatggtaatgcctgctggtttttcctcattcagctagtatccactagcccagtggtatgggccttttttgaccctcgtggattggaccccaagcaggcatgtgggggaaaaaaaaggagcgttttaacaataaaccacctttttgggcatccaaggctcaaaccacgcgccccaaaaggaccaattcttacattaacctaaagtcaaagattcttttgcagaaccctgggttttttaaatcaccctcggggccacaccaggggacatttttgctcatactagcaagccaccacccctataattcaaaccccttcttccccctccccaatccccccctaaacccacttcctttcattggcctctaacaccctttccaacttaattgggccaa

SEQ ID NO: 12120 - DNA, 638 bp, Canis familiaris
tttttcaggaagtcctatttctattcttgatttctgatgcacaaccattaaacttattaagaagtccatatgtaaaatttctagaaataactggcatctaccctttttagaaactagtttcaaaaaacaacttcctagaaattattttcacatgtttgagaggtataagctatttgttagacataaatggagaaaagtcagtccatattcttctgttggtttgcaaccttagagttttctgagtgaaattcacaactggtctccaagcatgaatagcagggagagaggaagaaaggcagattaccccagatcagtagggggcaggtttaaaaagcaaggaatttacatagggaggggggtcttgggggggccaaactaccaggtctccacacccatctgcccaaaatggtaaaaggtttttacccaaagccgtaaccggggaccatcatgtacccaatcccggaaaccctccccaacaccagtattttttcccagggcgcccgcccttacagatgcrctccccaatgtgcccatagatggggggggccccccttcccaagcccccagggccgggttcagggggccccccactggccccgggccccgcccccgaggccacctcctgggccgtacccctc

SEQ ID NO: 12121 - DNA, 635 bp, Canis familiaris
acgagcattttgagatagttctcactaccccaaatttaacttgataccgttaaaattaaaatctgtatagaagattgattacattttcttaaatttttttccttaagtggttggttttccaaggttttctccctggcttcatagatgatatgcttgataagagccagagtaggtgaagtcttcattcagtcttgtctttatcacttccaggtgttcactaatctaagttaaaattttgaaggaagtagcacttacatgcttcttgacttctttagcatgcattgtgtactgaaaaaactgatgccacattgaagttgttaataacatatactgtgtttggcaaacagccggataaacctgatcatgtgggaattttttcgaggagtccgccaaagtggattcatagtctctcggtgcagtgtgtattcctttaaggaaagcccagtgtttattggagagaaaaccttgtatctaaggttagttgaattttgaagtggggcgcattctagtatagtgccgcgctagtgaagggtttttaggttactctggccaatccctttgggcctataaaaaacctgggcgatgctcagccccgcggctcttaggcccttgggggatcttgaaccggttttttt

SEQ ID NO: 12122 - DNA, 501 bp, Canis familiaris
acgagcggcacgaggccgcgcggtgaagagctcttccctactgtcgcagccatgccgtccaagggtcctctgcagtccgtgcaggtcttcggacgtaagaagacggccaccgcstggcgcactgcaagcggggcaacggcctcatcaaggtgaacgggcggcccctggagatgatcgagccacgcacgctgcagtacaagctactggaacctgttctgcttctgggcaaggagcgatttccggggtggacatccgtgtcgagtgaaaggtggtggtcacgtggcccagatttacgccatccgcagttcatctccaaagcgcttgttgcctattacagaaatattttgacaagcctccaaaaggagattaagacatcttattcaataagacggacccttcttgtgggaaattccccgcgcttcgaattcaaaaaatttttgggtccttgttcccgtcttcctacaaaaattcttccggttgaattttttttcattaaggtca

SEQ ID NO: 12123 - DNA, 594 bp, Canis familiaris
acgagggacaccagttgcctggcagagcagtggtctggcaagaagggggacacagctgccctgggagggaagaagtctaaaaagaagagcagccgggttaaggcatcgggcagcagcagcaaacagaggaaggagctaggtggcctcgaggaagaccccagccctgatgaggatgagggcatccagaaggcatcccctctcacacacagccccccggatgagctttgagcccaacccagagccctgcgtaccgagacccctgagctggaggccagaagaagccaggccgcagcctkgcaagcgggacagccgtcctgctccaggtcctccctgcccggcgttctgctactaagaaggacacaagccccgggaagaacttttcgccttcctcttccaggctctgtgatttcacgccttcccaggactccagtgtggacccaagccgggcagggggcccgggctttaacttcccttaattctcttcagaaggaagcagaattcggggcactcaaaccttgttaccggtcgtgtggtacctttcaatcttcttgatcccgcattattcaattgggttaaagtaaaaagttttgcttt

SEQ ID NO: 12124 - DNA, 663 bp, Canis familiaris
gaggaaagagtcaactctccacctggtcctgcgcctgaggggtggtatgcagatcttcgtgaagaccctgaccggcaagaccatcaccctggaggtggagcccagtgacaccatcgaaaatgtgaaggccaagatccaggataaagagggcatcccgcctgaccagcagaggctcatctttgcaggcaagcagctggaagatggccgcactctttctgattacaacatccagaaagagtcaactctccacctggtcctgcgcctgaggggtggtatgcagatcttcgtgaagaccctgaccggcaagaccatcaccctggaggtggagcccagtgataccattgaaaatgtgaaggccaagatccaggataaagaaggcatcccgcctgaccagcagaggctcatctttgcaggcaagcagctggaagatggccgcactctttctgattacaacatccagaaagagtgaaatcttcacctggttctccgtctgaagggtggctgttaattcttcatcttgaattcttaagtgccaatgatggcattgtctgaactctagcattttcccaawtttaagtttgaawtaccaattcagtaaaactgaatcactggtttgtcatagctgtcaaatgttataaaattttttgcatgttaaaaaaaaaa

SEQ ID NO: 12125 - DNA, 639 bp, Canis familiaris
  misc_feature (497)..(497): n comprises a, c, g, or t, or includes no nucleotide
gggacagaagacggagattgagagagctggggagtccctttagttctgaagacagaggggatcacctgagccaaccaggtggacatggccaacaggggccacactcaacccagggccctggcctgggccctgggactgaccctggtatggatcctgctgggtgcctgtggagggagccgcccactcccagctttgtcccgaagacaccataggctggcggcagatcttggcacaggccagctgcaccttgcagagatggacacaccagaggcatcgggccctgggatggtctcagaacactgtgggaagccgagccccgggtgcgaatcctttctkggacacctccaagtcgccctccacaatcgctttcgcctgttgttactwgggatacgccaggcgcascctctgttcagagctcttcrgcattctggtttccacctgttaaagtgatattacctgcggtccgactttgctcccactcctagaaaaaagggctnttaactcgctgcactactacgagcagaccttccctacgggcggaccttttccctcgtttttggctaagctaccaatggcgctcctttgccgatactgctcacaattcatctcgtaattcggggtcaacaagacgaaggccag

SEQ ID NO: 12126 - DNA, 555 bp, Canis familiaris
ggcaaaagtcctgagatggcagtttttcagggaactgccaaataggtcgaatagtggcagttttctggggatggggcttttgaggatctccaaaccatttctatacctttagtggttgataggttgctggttatcaaggctgcatgattgcaaggttgttggttttgagtattctgtggaatgaggttaggggggttggagatatggcaagctaaaatggtttattgttcttgccacaattcaaccattttcctagaattaaacactctgaattgctgtaatacttggtcaatttttaaggtactgaaaatgttgattttgactttattgtattatttgtatgtatgtaatatatttatttattttgccagtcttcctcttgcgtttgtggaggagtagattttcagagacctttatactgccattttgggaagtacgaaaggagacaagtttttttaacaggttcccactgaagccaccaattagcaatgtgtcccccagctcttagcagcctgtgtgtccttgttggatcatctagaaaggatgggattggat

SEQ ID NO: 12127 - DNA, 441 bp, Canis familiaris
gaggtaaggaagaagtaaaattttcatcatttgcagattacatgacactgtatatagaaaaccctggagactccaccaaaaaactactagaattgacaaattcagtaagatcctaggatacaaaatcactgcataaaaacctgtttgcatttcaattacattgataattgaagttaacagagaagtttaagaaagcaatcccattttacaactgcagcaaaaataataaaatacttaggaataaacctaaccaaggaggtgaaagacctaaaacttttattgaaaagagactgaagatgacacaaagaaattggaagacattccattgctcacggatttggagaacaaattttttgtttagttacctttactacccgaagcaattgttacatttttattgcaattccaaattaccaattagcatttttcacagaactttga

SEQ ID NO: 12128 - DNA, 706 bp, Canis familiaris
ggccactcacggagacccagctgccttcctcacaggtcacttgggcacaggtcgtacaagtatcatgtgcagttcccacggaagcagtattgctttgggttttttaccctcttggaggaaagaggtcattctgtaggtttctgctctgccctccccactgggctggaccttgttggagggtcaagggaccctgccatcgctctgsaaagaggctctgggtcagaactggctcagtcctgggagtttggagagagggatgtggttctgtagtgatgcctccgtcaaccagccaaggggacagatttgctgatagagggtgatgtcagggacggcccacgtattcctgtccaaggggctccgtggttaactggctaccaccaaacgtctctgtaggtctgaccttcccgcgtagttacaggagccacgtgcacccctgtttttcagtccattctaggacctgacaccaggtccaacctttccagtgaagttgagtaatttaatttagatggtggcagttccctctgtcacctcctaagggcacagtcacgatgcacctgccagaatgcccgggtccctaccggtgtgcttttcaatactactcctgtaaaattttttggcataattaaaccactcattacaaacaacaaactagggacctgggtaatccctggggcatttttcctttcccagggcttacccaattcct

SEQ ID NO: 12129 - DNA, 699 bp, Canis familiaris
caacgggggactttttgaatctttgtctcaacctattttctacatctgattaaactggataattctttcattttaacccacagtgtggtccataacctccctaccggtaatggaatgaactcaaacaggttaacacgacaagtaaaacttgagtcaacagcagggtggtaggaatacgacgttgacgtggtcggagacttagacggtcgggttggtcttcggtccgggtctccatttaccaggtcggttcggaaagcggagaactcgataactcaattggttagaataaatgtgttgatatttatgtggtaaaaaaaaaataaaaaagtgcacccccccggcctaggaattgcggtatactcactgctattagaattgagtccggctgctttagaagctgctcagtcccaaaggtccgcttaggaagttatgcgttcacaaatgggtttgcgacgtcctaatacgcacacggcagcatgcggttgaaactgcgcgtcatcgcatcgaatctacgctattttctaatgccctaatttctaatcgtgttttagatacgcatccgaatgtttatkaacatcggccatcctccctctgcttcaacctggtttacacgcgtgactaccccaagctttccccccggtccagctgggatgcttttcctcctgtacgtatccggtaccccgcctttctttccacgcc

SEQ ID NO: 12130 - DNA, 618 bp, Canis familiaris
ggttttaaatgcctgtgtcccagacattcggccgtgtttgccgtgctctgtggacatcgctttgtatgtgggcgtgcgtgaacctcctcagcaggggcacactccaggtcagatgctgcaggcaccgtgtgtgtttattaacattgctgctgccgtagagagggagaaaatgtcctcagcatgaacgagagccaccgtgtcctcctcctgtcccctggtgtccagcgtgctcaggtgctccccgggggagcaggggagcccgggccgcccacccgcacggaccaccccggggtgaccgctctcttggaggctgtcctgctggttgcacttttcaggcttctccatttcacgtatatgctttggaaggggaatcggacgacgtgacacttgcaggcaaagacagatagctgtgacaatctaagtgacctctgctcaacggtctaaaccatcagacaaaggtttcaagtagcattctttatcaaatatttttgcacacaattctttttgaaaaatcaaacacattctcttttaaaaaaaattttttaacaaacttttcagcctcattttttttttaataataactaaaaaaaaaaaaaacttcgggggggtcaattccct

SEQ ID NO: 12131 - DNA, 700 bp, Canis familiaris
aggtcattttatctcactggcttaagactgcttacaaaaaactgctatagcttataactgcttccacccctccccaccccaatccaacataccaaacaacagaagccaggtagacaaccatcacctctagacagacagcagcaaaaccttacaatgtcattggagtccctctgatagttggatggctgctgctgttttccctgagggaacagaaacttcagcttcagtagcccaaagttgatgatatgcttaaagctcccctagggactcacctttgagtcttaccctgccactgttatcagactcagaacaggatcttcttgagttctgcttcctcccacccagcttcctggtgatagaattttgcatggctgttcgacctccctgccacctgctcaccctgttgattttttggctgactggcgagaaaaagggaaactgaactgtggagtcttgctgctttgccaatgatggggttacatttctcaaatgctcatttaaaggtctaagagtgggaattttgctatagaaacaagtggtgagaaggggcatttggggtataatactgtcagtaagttcagtaactccattttacatttttggggagcgccctgaggatactactaccataaactggtgatcctcgtacggggataatttgtttgatttccaccaaatttttaaaaaaaaattttgggca

SEQ ID NO: 12132 - DNA, 749 bp, Canis familiaris
gcggcacgagccgccggctcccccgggaccatcgttacacgcgtggaagtggacacacgatcctcaaggtggaacggagagtcaccgcagcgcatcggctccagccggtgcagccggggaaccgagagcgacgggtggccgggtgagcgaaatgcgttcatacacacaacgcggtattatccaaccttaaaaacgcacgaaattacggcgcacgtcacatcaggatgcacattcacgacgtgtaagtgagacaggccggacacaaaagggcagacattgtcggacttcgcttgtctggggcatctagagcccccaaactcctcaacgggaagtcgtgagccacaggaggggagcagaatcgtgggggttactcttttcattgcatcagagtcccagtgagggaagatgaactcccgagatggaccgtggttatcacttcccaaccgctccgaaataaccctacttaacttcacaccttaaagccgggtaaaacggtcaattttataatatgtatataaatatatatatttatggattatcgatattttccccactaaaaaatacatagaattcgccaataaataatgctgaatagaaatttcaaatacttttttaaaaccccttttttttcacccatcgtttcttttttaccattcccttccccgtctatttggaatcttcttctttgctggttttttggaatcattttttttccccccccctttctttaagcaaacctttttttcttt

SEQ ID NO: 12133 - DNA, 250 bp, Canis familiaris
aggtcattttatctcactggcttaagactgcttacaaaaaactgctatagcttataactgcttccaccctccccaacccaatccaacataccaaacaacagaaggccaggtagaaaaccatcccctcttgaaagaaagggcaaaacttcaaatttgcttggggcccccgcgtaattggtgggtgctcccctttttccccccgggggaaaaaatttgcttttttttgcccccctttttggttttttttggg

SEQ ID NO: 12134 - DNA, 353 bp, Canis familiaris
aggtcattttatctcactggcttaagactgcttacaaaaaactgctatagcttataactgcttccacccctccccacccccaatccaacatgccaaacaacagaaggccaggttgagaaccctgccctcttggagagggagggggaaaacctttaatgtttttgggggccccctccgaaatgggaggggcccgcgtttttcccccgggggcaaaaaattttctttttttggcccaagttttggggtcatttaaaaccccccgggggggggttttggggtttccccccccccgtttttttaaaccccaaaaggagggtctttggggtgttttcccccccccaaattttggggga

SEQ ID NO: 12135 - DNA, 415 bp, Canis familiaris
aggtcattttatctcactggcttaagactgcttacaaaaaactgctatagcttataactgcttccacccctccccaccccaatccaacataccaaacaacaggagccaggtagaaaaccatccctcttgtccggccgccgccaaaaccttccatttctttgggggcccctttgtaattggggggcgccccccgtttttccccggggggaaaaacttctccctttttttcccccaattttggcgttctttaaaaaccccccgggggccccccttttgtgttttccccgcccggtttttttcccccaccgggggttttttggggttttttttccccccccaatcgttggggggaaaagtttttggggggggggcccccccccccgttacccccctgttttttgtggcggggggaaaa

SEQ ID NO: 12136 - DNA, 364 bp, Canis familiaris
attcggcacgagggaatctgaaactgtaagggagaggggaggtccaggtcctcgcaggaaggagatgtctcggagtaacctcatgtggcctacatgtgcctggcccctgtgccagtctgctctcagctaaagtaccgcttaatccttcccacgtctgcgtgagttgcttgccctccaacagggaaggtgcactcaggacactgcagctatttatcatggtttcagaggaggtcagctgtcttcacttcccacgtatatgtaactccacagacacgcaagagtcttcaatagatagagacatgaggaacagaatttccagtagtgtgttgtggattatcagagtcgatattaatgagtcttctta

SEQ ID NO: 12137 - DNA, 376 bp, Canis familiaris
attcggcacgagcggcacgagcccctgctcccccgggaccatcgttacacgcgtggaagtggacacacagtcctcaaaggtggaacggagaatcacccgcaggcggcaattcggcctccaaccgggtttcaaccgggggaaccaaaaaccaaaggggttccccggtaaacaaattttttaaaaaaaaaaaacggggatttttcccccccaaaaaaccgggaaatttttgggggggcaaaaaagggggaaattcccccccaggggaaggaaaaaaaacccccaaaaaaaaagggggattttttttcccccccttttttggggggttaaaccccaaaaactttttatagggggggttttaaaaaattggggcaaaact

SEQ ID NO: 12138 - DNA, 336 bp, Canis familiaris
ggtcattttatctcactggcttaagactgcttacaaaaaactgctatagcttataactgcttccacccctccccaccccaatccaacataccaaacaacagaagccaggtagacaaccatcacctctagacagacagcagcaaaaccttacaatgtcattggagtcctctgatagttggatggctgctgctgttttcctgaggacagaacttcagctcagtagccaagttgatgatatgctaagctccctaggactcacttgagtcttacctgcactgttcagactcagacagatctctgagtctgttctccaccagcttctgtgtagaattgcag

SEQ ID NO: 12139 - DNA, 341 bp, Canis familiaris
ggaattcggcacgaggtcattttatctcactggcttaagactgcttacaaaaaactgctatagcttataactgcttccacccctccccaccccaatccaacataccaaacaaaagaaggccagggtagaaaaccatcccctcttaaaaaaaaaggggcaaaccttttccttttgttgggggcccccccccaaaaaggcgggaacctttttttttccccgggggggaaaaaaattttctttctggatccaaaatttttttttttttgaaaccccccccgggggggccctttttggtgtccccccccggtttttttaaccgcaaaagcgttttttttgggggg

SEQ ID NO: 12140 - DNA, 132 bp, Canis familiaris
attcggcacgatcggcacgagccccgcgcttcccccggcaccatcgttacacgcgtgggaagtggacacaccattccttcaaggtgggaagggagattcacccgccggcggccttcgcttccccccccgggt

SEQ ID NO: 12141 - DNA, 349 bp, Canis familiaris
gccagagcacaattcacactcccctcaggtagatgcacagactcagcaataaacctttgcatcaggccccggctgtcctttcttgtggggagagaaaaacgttaattatcatgagtcatgggcatttacgaagtgtccagcgctaggctggcaataaaatgggaagatctatgtccttccaggagaagccctggcccggcataaaaggagaactcatggggtatgtgacaactgtgctctgagagagtgagggaagagcatggaagattcaggatatttgtcaagagggtcttcggaagtggtgtctagccaaaccgcttggctatcacagcaggcgcaaggcatgggg

SEQ ID NO: 12142 - DNA, 508 bp, Canis familiaris
gatgctttagagaatcaagtattaggtaacagatcaacctttggacgagagcatcatattatgatgcttcctggagttcatcagtagtgcaaagacacactgggtggcaagcacattgggatggtgagatagtttcagtagaggaaaggtagacattccttctgttgagcaacacggataggctggactataggatgaaagctgtttctggggtttcaccaaggtgatatcagataaacagttgtagcggtggcatcataatgtgttcatggtaaaccataagaaaacattcatttcagatgattataataaaatttggctgatttacatgtcagtttgaaaaaatattttaaagagtaaaagctgggcctaaacaaggatattagtttctgtttagctgaaggttatttgtggtttttgctaacccccacctatttttccctcaaagcccccccatacctaatttaaataattaaacccccctaaacccgatgggagtctgcccccc

SEQ ID NO: 12143 - DNA, 339 bp, Canis familiaris
gcggcacgagcggcacgagaattagcccatgattctgcaggtcagtgtcttactccacagtttgggctgggctcagctagaaggttctgctgatccaggccaggttcagcccatctcagctgggcctggtcatgcatcagtggccagcgggctggttttgagtgtcccttaaccatggtggctccatgtttgccatctcctagcagctagtccaggctcgttcgtgaagtggtggccgcagcagggtgtcaagagtgcaggtggaatgtgcaagcctttgagcttgatccgtgtcacttctgctgtgtgtgtcacataaaaccaagcaccaattagatg

SEQ ID NO: 12144 - DNA, 385 bp, Canis familiaris
ccgaaattgagaagtaaaagcaacatttagtggtagtaaggaaaacttgctgggaggagctctcctaattgaacatatgatggatgacatggaaatttttcaaataatttattttagttatgacttaagtagattatatctaatgtgtgtttagcatttctggtatcagcaatattgttgagattttgtgcagttgacgcttggactcacacacgcttgcagagctaatcatcacacactttttgatactgctaacttctagacagtgatctcacaggtcaactcatcctgtatctggtatgtctagaggctttggtgtcattggtggcattagatgctagagatgtatcaattactcgtgtctgagcctcccagatatgcagct

SEQ ID NO: 12145 - DNA, 461 bp, Canis familiaris
gacgccatccacatgatggacatagcaatcattgccacagacctcgccctgtatttcaagttggtatttcttttcattttaagaacaacaataacaataacaataacaataacaatgactgtaataataacaaacgccatagatccaattgacttaatatgttctggcacaacacttgtaccacagaacagtaactctcagtaagatcctggaagttagacagtctcacccccattgtatccatgagacgctggaatgcaggggaagagatttgctcagtaatagcaggtacacagtggtgacagagtctgggtagactaggtctcactccagctggtcttcacttgtttgtatatgtgttcagactctgtctgacaggcagtagagcgggtgctctctagatgagctctttatactggtatgttgcagagagcatgtcaagtcgtggatcagtcactatg

SEQ ID NO: 12146 - DNA, 397 bp, Canis familiaris
gtgctggttcattagttattttctcaagtttgtaaatagcatggaaaaaactttcactaaaagtcacccctccttaaaatcttagtcatattttgtcttctgcaacagtatatctaaaatagctgagaaattctgatgccctttctttgtttaccgattttaagatcattatgcatactctaatgcataattataattatgcattcatgatgttacttgtgctggcttaactcagaaatagtgtgagcagctatctcgagctacaggctgttcccatcactagatctgatcagagcggttgttgagctattgacacggctctatgtgacagccacgctgaccctgtttatcataggttcatcctgccctcttttccccgatcggctagaagaactca

SEQ ID NO: 12147 - DNA, 405 bp, Canis familiaris
ggaagaatgttaggtttgaggttggtgttcagaataacgaccatgacttccaatgctttgacaaaacctcagatgtgaggctttctggccaagcatctgtgatttcatattgttggaacattcactgtatccctggggttgcatctttctgtaattttgctgtggtctaatcaatacagaaggagtatgcagatttatacagaaattatgattccttgaaagattttgaggaggtgaagaaggctggtatctttcagagtgcaagtgatttgaacataagatttggtgatccatggagttgcatcactgtatctgactatgacatgatatggatatgatagtctctgtgatactacatttatatataataacgtcttgtgaagggacatcctggaattctgcttg

SEQ ID NO: 12148 - DNA, 313 bp, Canis familiaris
ggagagagagaactagtctcgagttttttttttttttttttaatttttatttatttataatagtcacagagagagagagagaggcagagacacaggcagagggagaagcaggctccatgcaccgggagcccgacgtgggattcgatcccgggtcttcaggatcacgccctgggccaaagcaggcgccaaaccactgcgccacccagggatcccatgcaggctatttctattgtaccatgttatctttcctcctgaaggtgggagggcaggtaactccagttcagttcttagcctcagaatgccactgatgggg

SEQ ID NO: 12149 - DNA, 321 bp, Canis familiaris
ggttgattttaaaatgtatttggaattgcaaaagacctagagtatctaaaacaatttggaaaaaacatttttgatggacttccactacctgattttaatacttgttataaagctataataatcaagacagtgtggtattgacataaggatagacctaacaatcattggaaaagaatgaaaagttcaaaatagacacctacttatattgaccaatttatttattattaatatctatataattcatgtggaaagaaaaaaatggtgctgatgactgataccattaaagaaacaacactctctcaggccactcattttcattct

SEQ ID NO: 12150 - DNA, 355 bp, Canis familiaris
ggtttccttcattgatgatggaaataacgcaacagatctccttagaaaaatggcaacgcagatggtagcggcacagcttgcatcaatggtgtggaataacccaagtcagcagcaatttctgcaatttggaggaaattctggatcacagttgcctcaaatccagacagatgttgtacttccatcatgcaaaaaaaaagcccctcctgaaactcctgtgaaagaaagactttttatcgtgtttaatcctcatccttaccctttagatgtatttgaggatatattctgtcgttttggtaacctgattgaagtttaccttgtgtcgggaaaaatgtggggtgtgccgttttgccgctgg

SEQ ID NO: 12151 - DNA, 178 bp, Canis familiaris
ggaagggaacgcgggccgggctgtgtgcggacggtcggtaacgtggtgctccacccatctcgtcagggagtgccttccgtccctgttttctccctgtctcccgcggtcgcgccgacgccgcctttcgaggccccgcggctggtttgcgaagaagacggagtgcggggggcgcgagagc

SEQ ID NO: 12152 - DNA, 360 bp, Canis familiaris
ccaagttcaaaaagggtgctgcctgtgttctcctctaggatttgatggatcttgtctcactttagatctttcatccatttgagttatctttgtgtatggtgtaagagaatggtgctagtttcattcttctgcatgtggcgtccaatttccagcaccatttatttatttattcatgtagagagacagagagagaggcagagacaggcagagggagagcaggcctcctgtggggagccgatgcagactcgatccaggaccttggtcagcctgagctgaactcagatgctcaccatgagcaccaggcgctctgcctgattcttcctacacttgataggattcactatgtaaataccattcaga

SEQ ID NO: 12153 - DNA, 483 bp, Canis familiaris
ctcgattcttagatttcttctgttttcactgaataaatccttcttggttgatctcatctactatggtttcaattacaaacatttcttaaaacaactcctaagtctctaccctctagccctttagtttctgctgagcttccagacttagatttacttttcccataggaatctcaaacttaattttgagcaggaatattaactttctttttaaacctccttttagccaccaattttcctagagtagatatttaggagttattcttgattcctcttaaatcccttaataataactgtaactagctagaggctgtcagttttaccttcagaaacattgcgcttcttcagcactagtgctgctgtgcaggcctgtgtcatttccaccagctattcagtagcttctaactattcttgctctcatgctccttcattctgttagtagatgtagtgtgcttccagagaactgatgatactaaaaaaaaaaaa

SEQ ID NO: 12154 - DNA, 448 bp, Canis familiaris
ctcggtcgatctggcatacgatagctgtaaaacgaaggatttggcttggcaagcctaagtcccaacttgatcttatgagttatgacctttggtcatgtaactcttcttttggggccatttagggtaatgatgatggtgatataatattaccagtgggtaacagctgtaacaacagtgttagctgcccaggagtgaaacaggctgccttatgaagtgatgagctctttgctatgaggggtattcaagcagaagttaaagatactttgagtggttccaagaaacttcatcagaatcatctgatcattacaaatgagattcagactcacccagaactccattgcagctgatggatgtaggattgctaaagcgatctaggcagttgctgcttagagtggtcagaggattggacccagtactatacttgtgagtccaggcgcgtagtctgatc

SEQ ID NO: 12155 - DNA, 465 bp, Canis familiaris
gctgactcgtaaaagtagcgtttcccagaatccactggcacagactcttcaactctttcaaacacacatgaaacagttccaggctcagtgttagccctgaggatgaatgacatgattctcaattaggggattcagtaggaactatggttttagagatcattgaacatgtactttataccagtagtgtagacctggactctggaaaaataccagaactatgaaaattgaaaccacatgatcatgaaaatgttgtcctaatcgtgattggcattatttatatatttgacagctatactatggactctgtactacttagaagtcacagccttgtcctatttccaatctatgccttcaatgcttgtgtaggcaggtggcgatcctacatgtgaggagtcatacctagtttatcagatgagcttcctggcatacacgttggcatgccatgaggctatttctacatgaaga

SEQ ID NO: 12156 - DNA, 320 bp, Canis familiaris
gtttccttcattgatgatggaaataacgcaacagatctcctttagaaaaatggcaacgcagatggtagcggcacagcttgcatcaatggtgtggaataacccaagtcagcagcaatttctgcaatttggaggaaattctggatcacagttgcctcaaatccagacagatgttgtacttccatcatgcaaaaaagccctcctgaactcctgtgaagaagactttatcgtgttaatcctcatcctttacttagatgatattagggatatattctgcgtttggtactgatgagttactgtgctagaaatgtgggatgcagtat

SEQ ID NO: 12157 - DNA, 306 bp, Canis familiaris
gaagggaacgcgggccgggctgtgtgcggacgtcggtaacgtggtgctccacccatctcgtcagggagtgccttccgtccctgttttctccctgtctcccgcggtcgcgccgacgccgctttcgaggcccgcggctggttgcgaagagcggagtgcggggcgcgagagcgcggacaccgagcgttgccaggagagcgacgactcggctcctcccaccgcgcgtcttgtaagctgtcctgttctcagtgctttgtgtgtttcctttctctggcgttcacgtcttagcttccgaacgtttctttattt

SEQ ID NO: 12158 - DNA, 224 bp, Canis familiaris
gcgtcttgccccagaggctcctagttttgtagacagcggcacatagttcaaggagtgtctggtcaccgaagcgtacgcagcgacagaatacgtctatctgtcagtgagtcaagctttgcgactgcgatatctcgcatttggccgcccttctggatcaccttcatttgatttcaccccctttgtacgttcttcttggatgggcctccctccggaaattcttagta

SEQ ID NO: 12159 - DNA, 483 bp, Canis familiaris
gctcgattcttagatttcttctgttttcactgaataaatccttcttggttgatctcatctactatggtttcaattacaaacatttcttaaaacaactcctaagtctctaccctctagccctttagtttctgctgagcttccagacttagatttacttttcccataggaatctcaaacttaattttgagcaggaatattaactttctttttaaacctccttttagccaccaattttcctagagtagatatttaggagttattcttgattcctcttaaatccccttaataataacctgtaactagctagaggcctgtcagttttaccttcagaaaaccattgcgcttcttcagcactagtgctgctgtgcaggcctgtgtcatttcaccagctattcagtagcttctactatctgctctcatgtctcctcatcgttagtagactgtagtgtgcttcagaggtaacgactgatatctaaaaaaaaa

SEQ ID NO: 12160 - DNA, 487 bp, Canis familiaris
gctcgtgcaattcggcagccagttaagctgtaaaacgaaggatttggcttggcaagccctaagtcccaacttgatcttatgagttatgacctttggtcatgtaactcttcttttggggccatttagggtaatgatgatggtgatataatattaccagtgggtaacagctgtaacaacagtgttagctgcccaggagtgaaacaggctgccttatgaagtgatgagctctttgctatgaggggtattcaagcagaagttaaagaatactttgagtggttccaagaaaacttcatcagaatcatctgatcattaacaaaatgagattccaggcctccaccccagaactcccaatttggcagcttggattgggatgtaggatttcctaaaaagcggtcttgggcggtttctgcttagatggtcagagattttgggaacccccctttcttttgcttttgtggcgtcccccggggggggccgctgagttctg

SEQ ID NO: 12161 - DNA, 473 bp, Canis familiaris
gctcgtgccaattcggcacgccagttagctgtaaaacgaaggatttggcttggcaagccctaagtcccaacttgatcttatgagttatgacctttggtcatgtaactcttcttttggggccatttagggtaatgatgatggtgatataatattaccagtgggtaacagctgtaacaacagtgttagcgtgcccaggagtaaacgggctgccttataagtgatgagctctttgctatgggggtattcaagcagaagttaaagaatactttgagtgttccaagaaacttcatagaatcatctgatcattaacaaatgagatccagactcctcaccccagaactcccatttgcacttgattgggattaggatttctaaaacgatctagcattgctctagattcaagattgaccaattactaactttggatccgggcargcaataactgaactttagaaattatttttaagccctct

SEQ ID NO: 12162 - DNA, 229 bp, Canis familiaris
gcccgagccggtccgtgccgccgcagccgcgcagcccaccgccgccctccgcacccatgtccacccaggtctgtgtcctcgtcctccctaccgcagatgttcggctggcccgggcaccgagcccggcccgagctccacgcggagctacgtgaccacgtccacccgcacctacagcctggcaccgcctgcccccagccaccagcccgcagcctctacgctcgttcccggg

SEQ ID NO: 12163 - DNA, 616 bp, Canis familiaris
  misc_feature (596)..(596): n comprises a, c, g, or t, or includes no nucleotide
ggagaccctcctggcttactaatgcagccaccacgaatggccgcacagacaccatgcaactccagagggctcccttcacctagcccatgctgtgactggcagccagcaattgtgcaacaaggcaggtagcttctggaatacataagccaaccactcttttttttttttttttttaagattttatttatttattcatgagagacagagagagaggcagagacacaggcagaaggagaagcaggctccatgcagggagcccgacgcgggactcgatccggggactccaggatcacgccctgggctgaaggcagcgctaaacccccgagccacctgggctgcccagcaaccactcttaaaatcaatttcawttatycacttgtgggttatccagtgtcttttttgatcaaaaacagttttcccgcttccattttgtttttaacacactcctttgctggtgctggggttcagggatggaaactatttgagggaagcttttaaaaaaataactcgatgctccaacctkggggatgttttgagaaatttggggattttcctcccyagggggaagatcccaaattccattaactgctttttanaaaaattggtttccacgaat

SEQ ID NO: 12164 - DNA, 441 bp, Canis familiaris
ggtttccttcattgatgatggaaataacgcaacagatctccttagaaaaatggcaacgccgatggtagcggcacagcttgcatcaatggtgtggaataacccaagtcagcagcaatttctgcaatttggaggaaattctggatcacagttgcctcaaatccagacagatgttgtacttccatcatgcaaaaaaaaagcccctcctgaaactcctgtgaaagagagactttttatcgtgtttaatcctcatcctttacctttagatgtttagagggtatattctgtcgttttggtacctgattgaagtttccttgtgtcaggaaaaatgtgggtatccaagttgcggatatatagcgcccattctccattctcctttcatggggggttcctaatggggtcggccttaagtttcctggggatcccccgggaagatctttaacg

SEQ ID NO: 12165 - DNA, 400 bp, Canis familiaris
gccaagttcaaaaagggtgctgcctgtgttctcctctaggattttgatggattcttgtctcactttagatctttcatccattttgagtttatctttgtgtatggtgtaagagaatggtctagtttcattcttctgcatgtggctgtccaattttcccagcaccatttatttatttattcatgagagagacagagagagaggcagagacaggcagagggagaagcaggctctctgtggggagcccgatgcaggactcgatcccaggaccctgggatatgccctgagctgaactcagatgctcaaccactgagccacccaggcgctctgcttgatttttttcctaaaaactttgagaggtaattacatagtgtaaagtcmccatttcgggagaactagtggg

SEQ ID NO: 12166 - DNA, 456 bp, Canis familiaris
  misc_feature (331)..(331): n comprises a, c, g, or t, or includes no nucleotide
gaagtggacgagccccacttcaccaagagagatgaagagattcttctcaagtacctcaattttgcaaacctaatcatgaaggtataccacctgagttacctacacaattgcgagactcggcgtggccagatactgctgtggtctgggagcaaagtctttgaagagcttacggacatcgagaggcagttccacaaggccctgtacacagtccgggccttcctcaactgtgacagatattctgtgggactcttagacatgaccaagcagagggattttttgatgtgtggccatcctgatgggggggctccccctttctggtccaggactcggntggaagggaatcaacttttcaaggtctttactatatcctcccggcaagaaacctccaggtatccccggtcccctctggtcttgggcttggtagtggctgccattttgtttccccatgcctgtttc

SEQ ID NO: 12167 - DNA, 300 bp, Canis familiaris
ccatacaaaagtaagcgtgtgtagcgtgccactttaaacaccacaacaaacatcgtactattacttccattggtgccctttctaccatattyctatcattctgtcttctttcttctctcttyaagtgacaatgtctactcccatatcccccgccatccacgtccaaaagatcttcatccctggcctcagtttaaaccaccaccgtttcctccaccattttttcgtccatttgttacaaaactcacacacgagtcgcgtttctctacaatcagcttccttccctctccttacacgttctca

SEQ ID NO: 12168 - DNA, 1969 bp, Canis familiaris
  misc_feature (57)..(61): n comprises a, c, g, or t, or includes no nucleotide
ccgtccgtccgtcgtcctcctcgcttgcggggcgccgggcccgtcctcgagcccccnnnnnccgtccggccgcgtcggggcctcgccgcgctctacctacctacctggttgatcctgccagtagcatatgcttgtctcaaagattaagccatgcatgtctaagtacgcacggccggtacagtgaaactgcgaatggctcattaaatcagttatggttcctttggtcgctcgctcctctcctacttggataactgtggtaattctagagctaatacatgccgacgggcgctgacccccttcgcgggggggatgcgtgcatttatcagatcaaaaccaacccggtcagcccctctccggccccggccggggggcgggccgcggcggctttggtgactctagataacctcgggccgatcgcacgccccccgtggcggcgacgacccattcgaacgtctgccctatcaactttcgatggtagtcgccgtgcctaccatggtgaccacgggtgacggggaatcagggttcgattccggagagggagcctgagaaacggctaccacatccaaggaaggcagcaggcgcgcaaattacccactcccgacccggggaggtagtgacgaaaaataacaatacaggactctttcgaggccctgtaattggaatgagtccactttaaatcctttaacgaggatccattggagggcaagtctggtgccagcagccgcggtaattccagctccaatagcgtatattaaagttgctgcagttaaaaagctcgtagttggatcttgggagcgggcgggcggtccgccgcgaggcgagccaccgcccgtccccgccccttgcctctcggcgccccctcgatgctcttagctgagtgtcccgcggggcccgaagcgtttactttgaaaaaattagagtgttcaaagcaggcccgagccgcctggataccgcagctaggaataatggaataggaccgcggttctattttgttggttttcggaactgaggccatgattaagagggacggccgggggcattcgtattgcgccgctagaggtgaaattcttggaccggcgcaagacggaccagagcgaaagcatttgccaagaatgttttcattaatcaagaacgaaagtcggaggttcgaagacgatcagataccgtcgtagttccgaccataaacgatgccgaccggcgatgcggcggcgttattcccatgacccgccgggcagcttccgggaaaccaaagtctttgggttccggggggagtatggttgcaaagctgaaacttaaaggaattgacggaagggcaccaccaggagtggagcctgcggcttaatttgactcaacacgggaaacctcacccggcccggacacggacaggattgacagattgatagctctttctcgattccgtgggtggtggtgcatggccgttcttagttggtggagcgatttgtctggttaattccgataacgaacgagactctggcatgctaactagttacgcgacccccgagcggtcggcgtcccccaacttcttagagggacaagtggcgttcagccacccgagattgagcaataacaggtctgtgatgcccttagatgtccggggctgcacgcgcgctacactgactggctcagcgtgtgcctaccctacgccggcaggcgcgggtaacccgttgaaccccattcgtgatggggatcggggattgcaattattccccatgaacgaggaattcccagtaagtgcgggtcataagcttgcgttgattaagtccctgccctttgtacacaccgcccgtcgctactaccgattggatggtttagtgaggccctcggatcggccccgccggggtcggcccacggcctggcggagcgctgagaagacggtcgaacttgactatctagaggaagtaaaagtcgtaacaaggtttccgtaggtgaacctgcggaaggatcatta

SEQ ID NO: 12169 - DNA, 1869 bp, Canis familiaris
tacctggttgatcctgccagtagcatatgcttgtctcaaagattaagccatgcatgtctaagtacgcacggccggtacagtgaaactgcgaatggctcattaaatcagttatggttcctttggtcgctcgctcctctcctacttggataactgtggtaattctagagctaatacatgccgacgggcgctgaccccccttcccggggggggatgcgtgcatttatcagatcaaaaccaacccggtgagctccctcccggctccggccgggggtcgggcgccggcggcttggtgactctagataacctcgggccgatcgcacgccccccgtggcggcgacgacccattcgaacgtctgccctatcaactttcgatggtagtcgccgtgcctaccatggtgaccacgggtgacggggaatcagggttcgattccggagagggagcctgagaaacggctaccacatccaaggaaggcagcaggcgcgcaaattacccactcccgacccggggaggtagtgacgaaaaataacaatacaggactctttcgaggccctgtaattggaatgagtccactttaaatcctttaacgaggatccattggagggcaagtctggtgccagcagccgcggtaattccagctccaatagcgtatattaaagttgctgcagttaaaaagctcgtagttggatcttgggagcgggcgggcggtccgccgcgaggcgagtcaccgcccgtccccgccccttgcctctcggcgccccctcgatgctcttagctgagtgtcccgcggggcccgaagcgtttactttgaaaaaattagagtgttcaaagcaggcccgagccgcctggataccgcagctaggaataatggaataggaccgcggttctattttgttggttttcggaactgaggccatgattaagagggacggccgggggcattcgtattgcgccgctagaggtgaaattcttggaccggcgcaagacggaccagagcgaaagcatttgccaagaatgttttcattaatcaagaacgaaagtcggaggttcgaagacgatcagataccgtcgtagttccgaccataaacgatgccgactggcgatgcggcggcgttattcccatgacccgccgggcagcttccgggaaaccaaagtctttgggttccggggggagtatggttgcaaagctgaaacttaaaggaattgacggaagggcaccaccaggagtgggcctgcggcttaatttgactcaacacgggaaacctcacccggcccggacacggacaggattgacagattgatagctctttctcgattccgtgggtggtggtgcatggccgttcttagttggtggagcgatttgtctggttaattccgataacgaacgagactctggcatgctaactagttacgcgacccccgagcggtcggcgtcccccaacttcttagagggacaagtggcgttcagccacccgagattgagcaataacaggtctgtgatgcccttagatgtccggggctgcacgcgcgctacactgactggctcagcgtgtgcctaccctgcgccggcaggcgcgggtaacccgttgaaccccattcgtgatggggatcggggattgcaattattccccatgaacgaggaattcccagtaagtgcgggtcataagcttgcgttgattaagtccctgccctttgtacacaccgcccgtcgctactaccgattggatggtttagtgaggccctcggatcggccccgccggggtcggcccacggccctggcggagcgctgagaagacggtcgaacttgactatctagaggaagtaaaagtcgtaacaaggtttccgtaggtgaacctgcggaaggatcatta

SEQ ID NO: 12170 - DNA, 1969 bp, Canis familiaris; identical to SEQ ID NO: 12168
  misc_feature (57)..(61): n comprises a, c, g, or t, or includes no nucleotide

SEQ ID NO: 12171 - DNA, 1869 bp, Canis familiaris; identical to SEQ ID NO: 12169

SEQ ID NO: 12172 - DNA, 1969 bp, Canis familiaris; identical to SEQ ID NO: 12168
  misc_feature (57)..(61): n comprises a, c, g, or t, or includes no nucleotide

SEQ ID NO: 12173 - DNA, 1869 bp, Canis familiaris; identical to SEQ ID NO: 12169

SEQ ID NO: 12174 - DNA, 223 bp, Canis familiaris
gcggggcgggggggttgcggcggggccccggcggcgggggaggtcccccgcggggcccgcgggcccacgggggcccgggcacccggggggccggcggcggcggcgactctggacgcgagccgggcccttcccgtggatcgccccagctgcggcgggcgtcgcggccgcacccggggagcccggcgggcgccggcgcgccccgccgcgcgcgcgccgtgcgcgg

SEQ ID NO: 12175 - DNA, 1869 bp, Canis familiaris; identical to SEQ ID NO: 12169

SEQ ID NO: 12176 - DNA, 1869 bp, Canis familiaris; identical to SEQ ID NO: 12169

SEQ ID NO: 12177 - DNA, 1869 bp, Canis familiaris; identical to SEQ ID NO: 12169

SEQ ID NO: 12178 - DNA, 1109 bp, Canis familiaris
ccccgggctgtattcccctccatcgtgggccgctctaggcaccaaggtgtgatggtgggaatgggtcagaaggactcctatgtgggtgacgaggcccagagcaagagaggtatcctgaccctgaagtaccccattgaacatggcattgttaccaactgggacgacatggagaagatctggcaccacaccttctacaatgagctgcgtgtggcccctgaggagcaccctgtgctgctcaccgaggcccccctgaaccctaaggccaaccgtgaaaagatgacccagatcatgtttgagaccttcaacaccccagccatgtacgtagccatccaggctgtgctgtccctgtatgcctctggtcgtaccacgggcattgtgatggactccggtgacggggtcacccacactgtgcccatctacgagggctatgctctccctcacgccatcctgcgtctggacttggctggccgggacctgacggactacctcatgaagatcctgaccgagcgtggctacagcttcaccaccacagctgagagggaaatcgtgcgtgacatcaaagagaagctgtgctatgttgctctagacttcgagcaggagatggccactgccgcatcctcttcctccctggagaagagctatgagctgcctgacggccaagtcatcactattggcaacgagcggttccgatgccctgaggctcttttccagccttccttcttgggtatggaatcctgtggcatccatgaaactacattcaattccatcatgaagtgtgacgttgacatccgtaaagacctctatgccaacacagtgttgtctggtggtaccaccatgtacccaggcattgctgacaggatgcagaaggagattactgctctggctcctagcaccatgaagatcaagatcattgctcctcctgagcgcaagtactctgtgtggatcggtggctccatcttggcctcactgtccaccttccagcagatgtggatcagcaagcaggagtacgatgagtccggcccctccatcgtgcaccgcaagtgcttctaggcggactgttactgagctgcgttttacaccctttctttgacaaaacctaacttgcgcag

SEQ ID NO: 12179 - DNA, 1109 bp, Canis familiaris; identical to SEQ ID NO: 12178

SEQ ID NO: 12180 - DNA, 1109 bp, Canis familiaris; identical to SEQ ID NO: 12178

SEQ ID NO: 12181 - DNA, 1049 bp, Canis familiaris
atggctcaccgcccacgctggacattgtcgcaagtcacagaattatttgaaaaaccgttgctggatctgctgtttgaagcgcagcaggtgcatcgccagcatttcgatcctcgtcaggtgcaggtcagcacgttgctgtcgattaagaccggagcttgtccggaagattgcaaatactgcccgcaaacgtcgcgctacaaaaccgggctggaagccgagcggttgatggaagttgaacaggtgctggagtcggcgcgcaaagcgaaagcggcaggatcgacgcgcttctgtatgggcgcggcgtggaagaatccccacgaacgcgatatgccgtacctggaacaaatggtgcagggggtaaaagcgatggggctggaggcgtgtatgacgctgggcacgttgagtgaatctcaggcgcagcgcctcgcgaacgccgggctggattactacaaccacaacctggacacctcgccggagttttacggcaatatcatcaccacacgcacttatcaggaacgcctcgatacgctggaaaaagtgcgcgatgccgggatcaaagtctgttctggcggcattgtgggcttaggcgaaacggtaaaagatcgcgccggattattgctgcaactggcaaacctgccgacgccgccggaaagcgtgccaatcaacatgctggtgaaggtgaaaggcacgccgcttgccgataacgatgatgtcgatgcctttgattttattcgcaccattgcggtcgcgcggatcatgatgccaacctcttacgtgcgcctttctgccggacgcgagcagatgaacgaacagactcaggcgatgtgctttatggcaggcgcaaactcgattttctacggttgcaaactgctgaccacgccgaatccggaagaagataaagacctgcaactgttccgcaaactggggctaaatccgcagcaaactgccgtgctggcaggggataacgaacaacagcaacgtcttgaacaggcgctgatgaccccggacaccgacgaatattacaacgcggcagcattatgagctggcag

SEQ ID NO: 12182 - DNA, 1049 bp, Canis familiaris; identical to SEQ ID NO: 12181

SEQ ID NO: 12183 - DNA, 1049 bp, Canis familiaris; identical to SEQ ID NO: 12181

SEQ ID NO: 12184 - DNA, 748 bp, Canis familiaris
atggcaacggttaataaacaagccattgcagcggcatttggtcgggcagccgcacactatgagcaacatgcagatctacagcgccagagtgctgacgccttactggcaatgcttccacagcgtaaatacacccacgtactggacgcgggttgtggacctggctggatgagccgccactggcgggaacgtcacgcgcaggtgacggccttagatctctcgccgccaatgcttgttcaggcacgccagaaggatgccgcagaccattatctggcgggagatatcgaatccctgccgttagcgactgcgacgttcgatcttgcatggagcaatctcgcagtgcagtggtgcggtaatttatccacggcactccgcgagctgtatcgggtggtgcgccccaaaggcgtggtcgcgtttaccacgctggtgcagggatcgttacccgaacgtcatcaggcgtggcaggcggtggacgagcgtccgcatgctaatcgctttttaccgccagatgaaatcgaacagtcgctgaacggcgtgcattatcaacatcatattcagcccatcacgctgtggtttgatgatgcgctcagtgccatgcgttcgctgaaaggcatcggtgccacgcatcttcatgaagggcgcgacccgcgaatattaacgcgttcgcagttgcagcgattgcaactggcctggccgcaacagcaggggcgatatcctctgacgtatcatctttttttgggagtgattgctc

SEQ ID NO: 12185 - DNA, 748 bp, Canis familiaris; identical to SEQ ID NO: 12184

SEQ ID NO: 12186 - DNA, 652 bp, Canis familiaris
aaacgttattttgtcaccggaacggataccgaagtggggaaaactgtcgccagttgtgcacttttacaagccgcaaaggcagcaggctaccggacggcaggttataaaccggtcgcctctggcagcgaaaagaccccggaaggtttacgcaatagcgacgcgctggcgttacagcgcaacagcagcctgcagctggattacgcaacagtaaatccttacaccttcgcagaacccacttcgccgcacatcatcagcgcgcaagagggcagaccgatagaatcattggtaatgagcgccggattacgcgcgcttgaacaacaggctgactgggtgttagtggaaggtgctggcggctggtttacgccgctttctgacactttcacttttgcagattgggtaacacaggaacaactgccggtgatactggtagttggtgtgaaactcggctgtattaatcacgcgatgttgactgcacaggtaatacaacacgccggactgactctggcgggttgggtggcgaacgatgttacgcctccgggaaaacgtcacgctgaatatatgaccacgctcacccgcatgattcccgcgccgctgctgggagagatcccctggcttgcagaaaatccagaaaatgcggcaaccggaaagtaca

SEQ ID NO: 12187 - DNA, 652 bp, Canis familiaris; identical to SEQ ID NO: 12186

SEQ ID NO: 12188 - DNA, 1032 bp, Canis familiaris
atgtccaatttactgaccgtacaccaaaatttgcctgcattaccggtcgatgcaacgagtgatgaggttcgcaagaacctgatggacatgttcagggatcgccaggcgttttctgagcatacctggaaaatgcttctgtccgtttgccggtcgtgggcggcatggtgcaagttgaataaccggaaatggtttcccgcagaacctgaagatgttcgcgattatcttctatatcttcaggcgcgcggtctggcagtaaaaactatccagcaacatttgggccagctaaacatgcttcatcgtcggtccgggctgccacgaccaagtgacagcaatgctgtttcactggttatgcggcggatccgaaaagaaaacgttgatgccggtgaacgtgcaaaacaggctctagcgttcgaacgcactgatttcgaccaggttcgttcactcatggaaaatagcgatcgctgccaggatatacgtaatctggcatttctggggattgcttataacaccctgttacgtatagccgaaattgccaggatcagggttaaagatatctcacgtactgacggtgggagaatgttaatccatattggcagaacgaaaacgctggttagcaccgcaggtgtagagaaggcacttagcctgggggtaactaaactggtcgagcgatggatttccgtctctggtgtagctgatgatccgaataactacctgttttgccgggtcagaaaaaatggtgttgccgcgccatctgccaccagccagctatcaactcgcgccctggaagggatttttgaagcaactcatcgattgatttacggcgctaaggatgactctggtcagagatacctggcctggtctggacacagtgcccgtgtcggagccgcgcgagatatggcccgcgctggagtttcaataccggagatcatgcaagctggtggctggaccaatgtaaatattgtcatgaactatatccgtaacctggatagtgaaacaggggcaatggtgcgcctgctggaagatggcgattag

SEQ ID NO: 12189 - DNA, 1032 bp, Canis familiaris; identical to SEQ ID NO: 12188

SEQ ID NO: 12190 - DNA, 6540 bp, Canis familiaris
gggactaccctaaataaggatgaggggcggcggtcagccgccttttttctattacatgtcagcgcggaagcggatttttattttcatcaagcgtaaatccttctccgagcacatcgtgaacatcgcttaccgctacaaaggcatggggatcaatggagttaatcacgcttttcagcatcaccaattcatttttcggcaccacacaataaagtacatctatatcctcttttgtgtaggaaccttgtcctttcaaaatggtgacgccccgttccatttcttcaagaatctttttctgaatcaggtcgtttttcgaagagatgatcgtagcgcctttagcagcgtatccgccttcctgaataaaatcgattaatcttgccgctacaaatacagctaccagcgtatacatcgcttctttataggagagataagtaagcaaagacaaaatgatgacgcaggcatcgaaagcaaacatcgttctgcccatcggaatcccaaaatacttattcactaaacgtgcgatgatatcaacaccgcctgtcgtaccgccgaacttaaaaataatacccagtccggctccgatgaatacgccggcaaataaagcggcgagcgctaagtcgtgctgaaggggcatatggatttcatatcgctgaaagatgctgaggaacaaagacaaggctacagtgccgacaagggtataaacaaacattgtcctgccgagcatgtggaaaagggcataaagcaaaagtgtaatacctgtaaaaccgccctcagccagattgttctgcatattgaaatgaaccaagccaaatgaaaaaattgccgctccgattaaaataaaaaatatgttttttaatctaatttctccaagcatcacacaaaaccccttttccttccattagatagcgtttatattatagtggatgaaaaagaaaacagcaaacgtgcttaaacatttgtcaaacgtatctgaattagctaacatgtaagaggatgataggaggtttcgttcagtgagtgataaaacaatgaaagacatacaggctgaagtagaccgttacataggccaatttaaagaaggatattttagcccgctggccatgatggcgaggctgactgaagaactgggcgagcttgccagagaagtgaatcaccgttatggagaaaaaccaaaaaaagcgactgaagatgataaaagcatggaagaggaaataggcgatgtgctatttgtattggtttgtttagccaactctcttgatatctctttagaggaagctcacgaccgagtcatgcataaatttaatacaagagataaagatcgctggaccagaaaagaagaaggaaagtagaggagatcaagatgtcaaacgaaacaattaaattagtcattgcgggaccgcgtggaagaatggggcaggaagctgttaaattggcagaacgaacaccacattttgaccttgtaggggccatagaccatacatacgatcagcaaaaattatctgatgtgatgcctgttgagtcagatgctttcatttacacagatatccatgcctgttttacagaaacacaaccggatgtcttgattgatttaacaacgcccgaaatcggaaaagtacatacaaaaattgcattagagcacggagtccgtccagttgtcggaacaaccggtttctcagaagctgatttaaaagagctcacatctttaacagaagaaaaagggatcggagccatcatcgcgccaaattttgcgctcggtgcgatactgatgatgaaattttcaaaaatggctgccaactattttgaggatgttgagattattgagcttcatcatgaccagaagcttgacgcaccaagcggaactgcgcttaaaacagcggaaatgatttcagaagtccgtaaagaaaagcagcaaggacatccggatgaaaaagaaattctcccaggagcaagaggagcggagcaaaacggtattcgcttgcacaggcttcagatacgccatgattcttataaccgtgcttctttcatgtcaggcgttaaactgtcagtcgaacaagtcatgaagattgatcagcttgtgtatggtttagaaaatatcattgattagacggggggataaacaatgaaaattgctttgatcgcgcatgacaagaaaaaacaggatatggttcaatttacgactgcctatcgggatattttaaagaatcatgatctatacgcaaccggaaccacagggttgaaaattcatgaggcgacaggtcttcaaattgaacgttttcaatccggccctttagggggagaccagcaaatcggtgcactgatcgctgccaatgcactcgatcttgtcatttttttgcgcgacccgctgaccgcgcagccgcatgaaccggatgtctcggcattaatccgtttatgtgatgtgtattccattccgctcgccacaaatatgggtactgcggaaattcttgtgcgcacacttgatgaaggtgttttcgaattccgtgaccttcttcggggagaagagccgaatgtataatgctgacgttcttgcttttggcgcccacagtgatgatgtcgagatcggaatgggcggcacaatagcgaagtttgtcaaacaggaaaaaaaagtaatgatatgcgatttgacagaagcggaactctcttctaacggtacggtcagtttgcgtaaagaagaagcagctgaagcagcccgcatattaggcgcagataaaagaattcagctaacgcttccagaccgcggcctaataatgagtgatcaggcaattcggtcaattgtcactgtcatcagaatctgtcggccaaaagcggtttttatgccgtataaaaaggatcgccatccggatcacggcaatgcggctgcactggtggaagaagcgatcttttccgccggaatccataaatataaagacgaaaaaagccttccggcgcataaagtcagcaaggtttactattatatgataaatggttttcatcagccggattttgttattgatatctcggatacaatagaggcaaagaaacaaagcctcaacgcctacaaaagccagtttatcccgtcaaaggattccgtttctactcctctgacgaatgggtatattgaaatcgttgaagcgagagaaaagctttacggtaaagaagcgggcgtggagtatgccgaagtttcttttccaaacggatgctgatgcttgatcatgatgtgcttgggggcgaacaatgagaaaactagggaagcagcttgctgaaaagggacatgaaatccatttcatcacatcaagcattccgtttagactgaatacatatcatcccaatattcattttcatgaagttgaggttaatcaatatgctgtttttaagtatcctccgtatgatttgacattggcaagcaaaatcgctgaggtggcggaacgggagaatttagacattatccatgctcactatgctctcccgcatgccgtttgcgcctatcttgcaaaacaaatgctgaaacgcaatatcggcattgttaccactttgcatggcacggatatcacggtgttaggttatgatccgtctctaaaagatctgatccgttttgctattgagtcatcagacagggtgacggccgtctcctcagcgcttgcggctgaaacatacgatttaattaaaccggagaaaaaaattgaaacgatttataactttatagacgagcgcgtgtatctgaagaaaaacacagcggcaattaaagagaaacatggaattttaccagatgaaaaagtcgtcatccatgtgtccaacttcagaaaagttaaacgcgtgcaggatgtcatccgtgtgttccgcaatatcgctggcaaaacgaaagcgaagctgcttttagtcggagacggtccggagaaatcgacagcctgcgagcttatcagaaaatatggcttggaagaccaagtcttaatgcttggaaatcaagaccgtgttgaagatctttattctattagcgatttgaagctgctgctatctgaaaaagaaagctttggccttgtcctgcttgaagcgatggcttgcggagtgccttgtattggaacaaacattggcggtatccctgaggttataaaaaacaatgtgagcggatttttggtggatgtcggtgatgttacggccgcaacagcccgcgcgatgagcattttagaagatgaacagctaagcaatcgttttacaaaggcggcaatagagatgcttgaaaatgaattttcttctaaaaaaattgtcagccagtatgaacagatttatgccgatttagcagaaccggagtgatcacatggaaaaagtttttatcaaagcacttcccgtgctccgcatcttaatcgaagcgggccatcaggcttattttgtcgggggcgcagttcgtgacagctatatgaaacgaacgatcggagatgtcgatatcgcgacagatgcggcacctgatcaagtagaacggctgtttcagcggactgttgatgtaggcaaagatgaatctgattatgttgatttcagaagaccgtcagaagtgcaatttatctcatcattagaagaggatctaaaacgcagagatttaacgatcaatgcgatggccatgacagcggacgggaaggtgcttgattattttggcggcaagaaagatattgatcagaaagtgattcgaaccgttggaaagcctgaggatagatttcaagaggatgcgcttcgtatgctgagagccgtacgctttatgagccagcttggctttacgctttcaccggaaacagaagaagccattgcgaaagaaaaatcactcctctcccatgtttcagtcgaacgaaaaactatagagtttgagaaattgctgcagggaagagcttctcgccaggcgcttcaaacactcattcaaacgagattgtatgaagagcttcctggtttttatcataaacgagaaaacctgatttcaacgagtgagtttccattcttctctttaacatcccgtgaggagctttgggctgctcttttaattaaccttggcatagttttgaaagacgcgccccttttcctgaaagcctggaagctcccgggaaaagtgatcaaggaagccattcacattgccgatacgtttggccagagccttgacgcaatgacaatgtacagagctgggaaaaaagcactgctctcagcggccaaaatatcgcagcttcggcaaaacgaaaaactggatgaaaagaaactgaaggacattcagtacgcttatcaaaacctgccgatcaaaagccttaaggatcttgatatcacgggtaaggacttgcttgcgcttcgaaaccggccggccggaaaatgggtgtcagaagaattacagtggatcgagcaggctgttgtgacagggaagctctccaatcaaaagaaacacatagaggagtggctgaagacatgcggtcaacattaagaaaagaccttattgaattattttctcaggccggcaatgaatttatttccggccaaaaaatcagtgatgctctcggctgttcaagaactgctgtgtggaagcatattgaagagcttcggaaagagggttatgaagtagaagccgttagaagaaaaggatatcggctcatcaaaaaacccggaaaactcagtgaaagcgaaattcgttttggattaaaaacggaagtgatgggccagcatcttatttaccatgacgttctttcaagcacgcaaaaaacggctcatgagctcgcgaataataacgcaccggaaggcacccttgaaggaaacggtgtttggatgagcctgattttgcggcctgacattccgctccaaaaaacaccgcagctgactctgcttgctgcagtagctgttgtgcagggaatagaagaggcagcaggcatccaaacggatattaaatggccaaatgatattttgattaacggaaaaaaaacagtcggtatcctaacggaaatgcaggctgaagaagaccgcgtacgttcagtgatcattgggatcggcattaacgttaaccagcagcctaatgattttccagatgaattgaaggacatcgcgacaagcctcagccaagctgctggggaaaaaattgatcgggccggcgtcatccagcatattttactatgctttgagaaacggtaccgggattatatgacgcacggatttacgccgattaagcttttatgggaaagctatgcgctcggtattggcactaatatgagagccagaacgttaaacggaaccttttacggtaaggcgttaggtatagatgatgaaggcgttctgcttttagaaacgaacgaaggcattaaaaaaatctattctgccgatatcgaattgggctaatgtgttggtacaagcccgttgattttggtatacttccattgggcagtatcgcctgcgaactgcacctattattaaaatagatagacattgcagcagtctgccttgatccaaaaaaggactgggacagagggatgaaactcgccgaactttagaaagtgaagaatccttctcgttgtaacggaaggttttttggcttgc

SEQ ID NO: 12191 - DNA, 6540 bp, Canis familiaris; identical to SEQ ID NO: 12190

SEQ ID NO: 12192 - DNA, 6540 bp, Canis familiaris; identical to SEQ ID NO: 12190

SEQ ID NO: 12193 - DNA, 1228 bp, Canis familiaris
acagccgcatcttcttgtgcagtgccagcctcgtcccgtagacaaaatggtgaaggtcggtgtgaacggatttggccgtattgggcgcctggtcaccagggctgccatttgcagtggcaaagtggagattgttgccatcaacgaccccttcattgacctcaactacatggtctacatgttccagtatgactccactcacggcaaattcaacggcacagtcaaggccgagaatgggaagcttgtcatcaacgggaagcccatcaccatcttccaggagcgagaccccactaacatcaaatggggtgaggccggtgctgagtatgtcgtggagtctactggtgtcttcaccaccatggagaaggccggggcccacttgaagggtggagccaaacgggtcatcatctccgccccttctgccgatgcccccatgtttgtgatgggtgtgaaccacgagaaatatgacaactcactcaagattgtcagcaatgcatcctgcaccaccaactgcttagcccccctggccaaggtcatccatgacaactttggcattgtggaagggctcatgaccacagtccatgccatcactgccacccagaagactgtggatggcccctctggaaagctgtggcgtgatggccgtggggctgcccagaacatcatccctgcatccactggtgctgccaaggctgtgggcaaggtcatcccagagctgaacgggaagctcactggcatggccttccgtgttcctacccccaatgtgtccgtcgtggatctgacgtgccgcctggagaaacctgccaagtatgatgacatcaagaaggtggtgaagcaggcatctgagggcccactgaagggcatcttgggctacactgaggaccaggttgtctcctgcgacttcaacagcaactcccactcttccaccttcgatgccggggctggcattgctctcaatgacaactttgtcaagctcatttcctggtatgacaatgaatacggctacagcaacagggtggtggacctcatggcctacatggcctccaaggagtaagaaaccctggaccacccaccccagcaaggacactgagcaagagaggccctatcccaactcggcccccaacactgagcatctccctcacaatttccatcccagacccccataataacaggaggggcctagggagccctccctactctcttgaataccatcaataaagttcgctgcacccac

SEQ ID NO: 12194 - DNA, 1228 bp, Canis familiaris; identical to SEQ ID NO: 12193

SEQ ID NO: 12195 - DNA, 1228 bp, Canis familiaris; identical to SEQ ID NO: 12193

SEQ ID NO: 12196 - DNA, 1761 bp, Canis familiaris
ttgccgatccgccgcccgtccacacccgccgccagctcaccatggatgatgatatcgccgcgctcgtcgtcgacaacggctccggcatgtgcaaggccggcttcgcgggcgacgatgccccccgggccgtcttcccctccatcgtggggcgccccaggcaccagggcgtgatggtgggcatgggtcagaaggattcctatgtgggcgacgaggcccagagcaagagaggcatcctcaccctgaagtaccccatcgagcacggcatcgtcaccaactgggacgacatggagaaaatctggcaccacaccttctacaatgagctgcgtgtggctcccgaggagcaccccgtgctgctgaccgaggcccccctgaaccccaaggccaaccgcgagaagatgacccagatcatgtttgagaccttcaacaccccagccatgtacgttgctatccaggctgtgctatccctgtacgcctctggccgtaccactggcatcgtgatggactccggtgacggggtcacccacactgtgcccatctacgaggggtatgccctcccccatgccatcctgcgtctggacctggctggccgggacctgactgactacctcatgaagatcctcaccgagcgcggctacagcttcaccaccacggccgagcgggaaatcgtgcgtgacattaaggagaagctgtgctacgtcgccctggacttcgagcaagagatggccacggctgcttccagctcctccctggagaagagctacgagctgcctgacggccaggtcatcaccattggcaatgagcggttccgctgccctgaggcactcttccagccttccttcctgggcatggagtcctgtggcatccacgaaactaccttcaactccatcatgaagtgtgacgtggacatccgcaaagacctgtacgccaacacagtgctgtctggcggcaccaccatgtaccctggcattgccgacaggatgcagaaggagatcactgccctggcacccagcacaatgaagatcaagatcattgctcctcctgagcgcaagtactccgtgtggatcggcggctccatcctggcctcgctgtccaccttccagcagatgtggatcagcaagcaggagtatgacgagtccggcccctccatcgtccaccgcaaatgcttctaggcggactatgacttagttgcgttacaccctttcttgacaaaacctaacttgcgcagaaaacaagatgagattggcatggctttatttgttttttttgttttgttttggttttttttttttttttggcttgactcaggatttaaaaactggaacggtgaaggtgacagcagtcggttggagcgagcatcccccaaagttcacaatgtggccgaggactttgattgcacattgttgtttttttaatagtcattccaaatatgagatgcattgttacaggaagtcccttgccatcctaaaagccaccccacttctctctaaggagaatggcccagtcctctcccaagtccacacaggggaggtgatagcattgctttcgtgtaaattatgtaatgcaaaatttttttaatcttcgccttaatacttttttattttgttttattttgaatgatgagccttcgtgcccccccttccccctttttgtcccccaacttgagatgtatgaaggcttttggtctccctgggagtgggtggaggcagccagggcttacctgtacactgacttgagaccagttgaataaaagtgcacacctta

SEQ ID NO: 12197 - DNA, 1761 bp, Canis familiaris; identical to SEQ ID NO: 12196

SEQ ID NO: 12198 - DNA, 1761 bp, Canis familiaris; identical to SEQ ID NO: 12196

SEQ ID NO: 12199 - DNA, 285 bp, Canis familiaris
ggctgggcgtggtggctcacgcctgtaatcccagcactttgggaggccgaggtgggtggatcacctgaggtcaggagttcaagaccagcctggccaacatggtgaaaccccgtctctactaaaaatacaaaaattagccgggcgtggtggcgcgcgcctgtaatcccagctactcgggaggctgaggcaggagaatcgcttgaacccgggaggtggaggttgcagtgagccgagatcgcgccactgcactccagcctgggcgacagagcgagactccgtctcaga

SEQ ID NO: 12200 - DNA, 1268 bp, Canis familiaris
gttcgacagtcagccgcatcttcttttgcgtcgccagccgagccacatcgctcagacaccatggggaaggtgaaggtcggagtcaacggatttggtcgtattgggcgcctggtcaccagggctgcttttaactctggtaaagtggatattgttgccatcaatgaccccttcattgacctcaactacatggtttacatgttccaatatgattccacccatggcaaattccatggcaccgtcaaggctgagaacgggaagcttgtcatcaatggaaatcccatcaccatcttccaggagcgagatccctccaaaatcaagtggggcgatgctggcgctgagtacgtcgtggagtccactggcgtcttcaccaccatggagaaggctggggctcatttgcaggggggagccaaaagggtcatcatctctgccccctctgctgatgcccccatgttcgtcatgggtgtgaaccatgagaagtatgacaacagcctcaagatcatcagcaatgcctcctgcaccaccaactgcttagcacccctggccaaggtcatccatgacaactttggtatcgtggaaggactcatgaccacagtccatgccatcactgccacccagaagactgtggatggcccctccgggaaactgtggcgtgatggccgcggggctctccagaacatcatccctgcctctactggcgctgccaaggctgtgggcaaggtcatccctgagctgaacgggaagctcactggcatggccttccgtgtccccactgccaacgtgtcagtggtggacctgacctgccgtctagaaaaacctgccaaatatgatgacatcaagaaggtggtgaagcaggcgtcggagggccccctcaagggcatcctgggctacactgagcaccaggtggtctcctctgacttcaacagcgacacccactcctccacctttgacgctggggctggcattgccctcaacgaccactttgtcaagctcatttcctggtatgacaacgaatttggctacagcaacagggtggtggacctcatggcccacatggcctccaaggagtaagacccctggaccaccagccccagcaagagcacaagaggaagagagagaccctcactgctggggagtccctgccacactcagtcccccaccacactgaatctcccctcctcacagttgccatgtagaccccttgaagaggggaggggcctagggagccgcaccttgtcatgtaccatcaataaagtaccctgtgctcaacc

SEQ ID NO: 12201 - DNA, 1268 bp, Canis familiaris; identical to SEQ ID NO: 12200

SEQ ID NO: 12202 - DNA, 1268 bp, Canis familiaris; identical to SEQ ID NO: 12200

SEQ ID NO: 12203 - DNA, 3970 bp, Canis familiaris
attaaacctctcgccgagcccctccgcagactctgcgccggaaagtttcatttgctgtatgccatcctcgagagctgtctaggttaacgttcgcactctgtgtatataacctcgacagtcttggcacctaacgtgctgtgcgtagctgctcctttggttgaatccccaggcccttgttggggcacaaggtggcaggatgtctcagtggtacgaacttcagcagcttgactcaaaattcctggagcaggttcaccagctttatgatgacagttttcccatggaaatcagacagtacctggcacagtggttagaaaagcaagactgggagcacgctgccaatgatgtttcatttgccaccatccgttttcatgacctcctgtcacagctggatgatcaatatagtcgcttttctttggagaataacttcttgctacagcataacataaggaaaagcaagcgtaatcttcaggataattttcaggaagacccaatccagatgtctatgatcatttacagctgtctgaaggaagaaaggaaaattctggaaaacgcccagagatttaatcaggctcagtcggggaatattcagagcacagtgatgttagacaaacagaaagagcttgacagtaaagtcagaaatgtgaaggacaaggttatgtgtatagagcatgaaatcaagagcctggaagatttacaagatgaatatgacttcaaatgcaaaaccttgcagaacagagaacacgagaccaatggtgtggcaaagagtgatcagaaacaagaacagctgttactcaagaagatgtatttaatgcttgacaataagagaaaggaagtagttcacaaaataatagagttgctgaatgtcactgaacttacccagaatgccctgattaatgatgaactagtggagtggaagcggagacagcagagcgcctgtattggggggccgcccaatgcttgcttggatcagctgcagcaagttcggcagcagcttaaaaagttggaggaattggaacagaaatacacctacgaacatgaccctatcacaaaaaacaaacaagtgttatgggaccgcaccttcagtcttttccagcagctcattcagagctcgtttgtggtggaaagacagccctgcatgccaacgcaccctcagaggccgctggtcttgaagacaggggtccagttcactgtgaagttgagactgttggtgaaattgcaagagctgaattataatttgaaagtcaaagtcttatttgataaagatgtgaatgagagaaatacagtaaaaggatttaggaagttcaacattttgggcacgcacacaaaagtgatgaacatggaggagtccaccaatggcagtctggcggctgaatttcggcacctgcaattgaaagaacagaaaaatgctggcaccagaacgaatgagggtcctctcatcgttactgaagagcttcactcccttagttttgaaacccaattgtgccagcctggtttggtaattgacctcgagacgacctctctgcccgttgtggtgatctccaacgtcagccagctcccgagcggttgggcctccatcctttggtacaacatgctggtggcggaacccaggaatctgtccttcttcctgactccaccatgtgcacgatgggctcagctttcagaagtgctgagttggcagttttcttctgtcaccaaaagaggtctcaatgtggaccagctgaacatgttgggagagaagcttcttggtcctaacgccagccccgatggtctcattccgtggacgaggttttgtaaggaaaatataaatgataaaaattttcccttctggctttggattgaaagcatcctagaactcattaaaaaacacctgctccctctctggaatgatgggtgcatcatgggcttcatcagcaaggagcgagagcgtgccctgttgaaggaccagcagccggggaccttcctgctgcggttcagtgagagctcccgggaaggggccatcacattcacatgggtggagcggtcccagaacggaggcgaacctgacttccatgcggttgaaccctacacgaagaaagaactttctgctgttactttccctgacatcattcgcaattacaaagtcatggctgctgagaatattcctgagaatcccctgaagtatctgtatccaaatattgacaaagaccatgcctttggaaagtattactccaggccaaaggaagcaccagagccaatggaacttgatggccctaaaggaactggatatatcaagactgagttgatttctgtgtctgaagttcacccttctagacttcagaccacagacaacctgctccccatgtctcctgaggagtttgacgaggtgtctcggatagtgggctctgtagaattcgacagtatgatgaacacagtatagagcatgaatttttttcatcttctctggcgacagttttccttctcatctgtgattccctcctgctactctgttccttcacatcctgtgtttctagggaaatgaaagaaaggccagcaaattcgctgcaacctgttgatagcaagtgaatttttctctaactcagaaacatcagttactctgaagggcatcatgcatcttactgaaggtaaaattgaaaggcattctctgaagagtgggtttcacaagtgaaaaacatccagatacacccaaagtatcaggacgagaatgagggtcctttgggaaaggagaagttaagcaacatctagcaaatgttatgcataaagtcagtgcccaactgttataggttgttggataaatcagtggttatttagggaactgcttgacgtaggaacggtaaatttctgtgggagaattcttacatgttttctttgctttaagtgtaactggcagttttccattggtttacctgtgaaatagttcaaagccaagtttatatacaattatatcagtcctctttcaaaggtagccatcatggatctggtagggggaaaatgtgtattttattacatctttcacattggctatttaaagacaaagacaaattctgtttcttgagaagagaatattagctttactgtttgttatggcttaatgacactagctaatatcaatagaaggatgtacatttccaaattcacaagttgtgtttgatatccaaagctgaatacattctgctttcatcttggtcacatacaattatttttacagttctcccaagggagttaggctattcacaaccactcattcaaaagttgaaattaaccatagatgtagataaactcagaaatttaattcatgtttcttaaatgggctactttgtcctttttgttattagggtggtatttagtctattagccacaaaattgggaaaggagtagaaaaagcagtaactgacaacttgaataatacaccagagataatatgagaatcagatcatttcaaaactcatttcctatgtaactgcattgagaactgcatatgtttcgctgatatatgtgtttttcacatttgcgaatggttccattctctctcctgtactttttccagacacttttttgagtggatgatgtttcgtgaagtatactgtatttttacctttttccttccttatcactgacacaaaaagtagattaagagatgggtttgacaaggttcttcccttttacatactgctgtctatgtggctgtatcttgtttttccactactgctaccacaactatattatcatgcaaatgctgtattcttctttggtggagataaagatttcttgagttttgttttaaaattaaagctaaagtatctgtattgcattaaatataatatcgacacagtgctttccgtggcactgcatacaatctgaggcctcctctctcagtttttatatagatggcgagaacctaagtttcagttgattttacaattgaaatgactaaaaaacaaagaagacaacattaaaaacaatattgtttcta

SEQ ID NO: 12204 - DNA, 3970 bp, Canis familiaris; identical to SEQ ID NO: 12203

SEQ ID NO: 12205 - DNA, 3970 bp, Canis familiaris; identical to SEQ ID NO: 12203

SEQ ID NO: 12206 - DNA, 3970 bp, Canis familiaris; identical to SEQ ID NO: 12203

SEQ ID NO: 12207 - DNA, 1969 bp, Canis familiaris; identical to SEQ ID NO: 12168
  misc_feature (57)..(61): n comprises a, c, g, or t, or includes no nucleotide

SEQ ID NO: 12208 - DNA, 1969 bp, Canis familiaris; identical to SEQ ID NO: 12168
  misc_feature (57)..(61): n comprises a, c, g, or t, or includes no nucleotide

SEQ ID NO: 12209 - DNA, 1969 bp, Canis familiaris; identical to SEQ ID NO: 12168
  misc_feature (57)..(61): n comprises a, c, g, or t, or includes no nucleotide

SEQ ID NO: 12210 - DNA, 1612 bp, Canis familiaris
aagcttggcaacaaatgagccgtcttgtcctcatgatactcgttgctttatttcatataaaagggctcgtcatcggatttacagtgctaattatgccatggcaagcatcaaatcccttcagacaccgtacttatggccgctgattccctttaacggaaaggcgctgtggcaggtgcttgtcccgacagcgaaacctggcgcaaaagtaagacccagcatcgttcaccccaaaaatcgcttaaggcagcctaccaattcataatcgcattgaaactgactgaagagtatgataatgtatgtcttaattatgaagggacagtccataaaactgtcctttcatccataagcggagaaagagggaatgacattgttcttacacggcacaagcagacaaaatcaacatggtcatttagaaatcggaggtgtggatgctctctatttagcggagaaatatggtacacctctttacgtatatgatgtggctttaatacgtgagcgtgctaaaagctttaagcaggcgtttatttctgcagggctgaaagcacaggtggcatatgcgagcaaagcattctcatcagtcgcaatgattcagctcgctgaggaagagggactttctttagatgtcgtatccggaggagagctatatacggctgttgcagcaggctttccggcagaacgcatccactttcatggaaacaataagagcagggaagaactgcggatggcgcttgagcaccgcatcggctgcattgtggtggataatttctatgaaatcgcgcttcttgaagacctatgtaaagaaacgggtcactccatcgatgttcttcttcggatcacgcccggagtagaagcgcatacgcatgactacattacaacgggccaggaagattcaaagtttggtttcgatcttcataacggacaaactgaacgggccattgaacaagtattacaatcggaacacattcagctgctgggtgtccattgccatatcggctcgcaaatctttgatacggccggttttgtgttagcagcggaaaaaatcttcaaaaaactagacgaatggagagattcatattcatttgtatccaaggtgctgaatcttggaggaggtttcggtattcgttatacggaagatgatgaaccgcttcatgccactgaatacgttgaaaaaattatcgaagctgtgaaagaaaatgcttcccgttacggttttgacattccggaaatttggatcgaaccgggccgttctctcgtgggagacgcaggcacaactctttatacggttggctctcaaaaagaagtggataagctgtacaatcgtttcatcattcggcgtgcgaattaagaaaggtctcattgcgcctgtaaagcttacgcgtatttctgctccttcaagcacctttagtgcatccagcatatattttggactaaaagagatatttaattcctcaccttcaatttgatccgcaacaattgcttccacaactttaccgatttctggcgaattggaagaaatttcaatggattcagccggttttgcggacagttttacaacgttgttgcgtccctctctagctaaaagagatgcacgatcaatggcctgaaggaattc

SEQ ID NO: 12211 - DNA, 1612 bp, Canis familiaris; identical to SEQ ID NO: 12210

SEQ ID NO: 12212 - DNA, 1612 bp, Canis familiaris; identical to SEQ ID NO: 12210

SEQ ID NO: 12213 - DNA, 1955 bp, Canis familiaris
gaattcaccaagcgttggattgttcacccactaatagggaacgtgagctgggtttagaccgtcgtgagacaggttagttttaccctactgatgatgtgttgttgccatggtaatcctgctcagtacgagaggaaccgcaggttcagacatttggtgtatgtgcttggctgaggagccaatggggcgaacgtaccatctgtgggattatgactgaacgcctctaagtcagaatcccgcccaggcgaacgatacggcagcgccgcggagcctcggttggcctcggatagccggtcccccgcctgtccccgccggcgggccgcccccccctccagcgccccgcgcgcgcgggagggcgcgtgccccgccgcgcgccgggaccggggtccggtgcggagtgcccttcgtcctgggaaacggggcgcggccggaaaggcggccgccccctcgcccgtcacgcaccgcacgttcgtggggaacctggcgctaaaccattcgtagacgacctgcttctgggtcggggtttcgtacgtagcagagcagctccctcgctgcgatctattgaaagtcagccctcgacacaagggtttgtccgcgcgcgcggcggcgtgcgtgcggggggcccggcggggcgtgcgcgtccggcgccgtccgtccttccgttcgtcttcctccctcccggcctctccgccgaccgcgggcgtggtgggggggtgggggggggacgcgcgaccccggtcggcgcgccccgcttcttcggttcccgcctcctccccgttcaccgcggggcggctcgtccgctccgggccgggacggggtccggggagcgtggtttgggagccgcggaggcggccgcgccgagccgggcccgtgcgcggtccccgtcccgggggttggccgcgcgggccccggtggggccacccggggtcccggccctcgcgcgtccttcctctcgctcctccgcacgggtcgaccagcagaccgcgggtggtgggcggcgggcggcgaggccgcacgggcgtccccgcacccggccgacctccgctcgtgacctctcctcggtcgggctccggggtcgaccgcctgccccgcgggcgtgagactcagccgctgtctcgccgtgtcccgggtcgaccggcgggcttctccaccgagcggcgtgtaggagtgcccgtcgggacgaaccgcaaccggagcgtccccgtctcggtcggcacctccggggtcgaccagctgccgcccgcgagctccggacttagccggcgcctgcacgtgtcccgggtcgaccagcaggcggccgcgacgtgcggcgcaccgacgagagggcgtgcattcccgttcgcgcgcccggaccctccaccggcctgggcccgacggtggagctgggaccacgcggaactccctctcctacatttttttcagccccaccgcgagtttgcgtccgcgggattttaagagggagtcactgctgccgtcagccagtaatgcttcctccttttttgcttttaggttttgctcttgcctttttttttttttttttctttctttctttctttctttctttctttctttctttctttctttctttctcgctctcgcctctcgctctctccctcgctcgttttctttctctttctctttctctctctctctctctctctctctctctgtctctcgctctcgccctctctctctctctcttctctctgtctctctctgtctctctctctctctctctctctctctctctctctctctctctctctctctccctccccctccctccctctctccccttccttggtgccttctcggctcttgacacttagccgctgtctcgccgtgtcccgggtcgaccggcgggccttctccaccgagcggcgtgtaagagtgcccgtcgggacgagccggacccgccgcgtccccgtctcggtcggcactccggggtcgaccagctg

SEQ ID NO: 12214 - DNA, 1955 bp, Canis familiaris; identical to SEQ ID NO: 12213

SEQ ID NO: 12215 - DNA, 1955 bp, Canis familiaris; identical to SEQ ID NO: 12213

SEQ ID NO: 12216 - DNA, 185 bp, Canis familiaris
cgggcggtgagatggcttcgccggtaagagcaccggactactcttccaaacgtcccgagttcaaacccagcaaccacatggtagcttcaacaaccatctcgtaacaaaaatctgatgccctggtctggagtgtctgaagacagctacagtgtctaaataaataaataaataaataaataaatctt

SEQ ID NO: 12217 - DNA, 152 bp, Canis familiaris
ggggttggggatttagctcagtggtagagcgcttgcctagcaagcgcaaggccctgggttcggtcctcagctctggaaaaaaaaaaaaaaaaaaaaagacaaaataacaaaaagaccaaaaaaaaacaaggtaactggcacacacaaccttt

SEQ ID NO: 12218 - DNA, 166 bp, Canis familiaris
gggctggtgagatggctcagtgggtaagagcacccgactgctcttccgaaggtccagagttcaaatcccagcaaccacatggtggctcacaaccatcygtaacgagatctgaykccctcttctggtgtgtctgaagacagctacagtgtacttacatataataaat

SEQ ID NO: 12219 - DNA, 3360 bp, Canis familiaris
  misc_feature (2982)..(2982): n comprises a, c, g, or t, or includes no nucleotide
ataatacacacttatacagactcctaaataagaaattaaatgattgggagtgcgaaaatgaaggatgtttcaaaaaatcaagaagaaaatataagcgacacggcattaacaaacgaactgattcatctgcttggccattcccggcatgattggatgaataagctgcagctgattaaaggaaacttaagcttacagaagtatgaccgtgtctttgaaatgattgaagaaatggttatagacgcaaagcacgaatcaaagctctcaaacctgaaaacaccgcatttggcgtttgattttcttacgtttaattggaaaacccattatatgacgcttgaatatgaagttctcggagaaattaaggatttgtcggcttatgatcaaaagctggcgaaactgatgagaaagctgtttcatctgtttgatcaagcagtcagcagagagagtgaaaatcatttaacggtttcgcttcaaacggatcatcctgacagacagctgattctgtaccttgattttcacggcgcctttgccgatccatctgcttttgatgatattcggcagaatggatatgaggacgttgatatcatgcgttttgaaatcacgagtcacgaatgtctgattgaaattgggttggactagcggagtttttaacggtttagaacggaggacattatgtttgtagatcaggtcaaagtatatgtaaaaggcggcgacggcggcaacggtatggttgcgtttcgccgtgaaaaatatgtgccgaaaggcggccctgccggcggtgacggaggaaagggaggagacgtcgtttttgaagtagatgaaggtctccgcaccctgatggattttagatacaaaaaacactttaaagcgattcgcggcgagcatggcatgtccaaaaaccagcacgggcgaaatgctgatgatatggtcattaaagttccgccgggcaccgttgtgacagacgatgatacaaaacaggtcatcgctgatttaacagagcacggacagcgggctgtcattgcaagaggcggaagaggcggaagaggaaatagccgctttgctacaccggctaatcccgcgcctcagctttcagaaaacggcgagccgggaaaagaacgctacattgttcttgaattaaaagtgcttgcagatgtcggacttgtcgggttcccgagtgtgggaaaatctactttgctgtctgttgtctcatctgcaaaaccgaaaattgcggactatcactttacaacgcttgtcccgaatctcggcatggttgaaacggatgacggacgcagctttgtcatggctgatttgccagggctgattgaaggcgcacaccaaggcgtcggactgggccaccagtttttgcgccatattgaacggacgagggttattgttcatgtcattgacatgtcaggcttagaaggccgtgatccatatgatgattatcttacgattaaccaggagctgagcgagtacaatctgcgtctcactgagcgtccgcaaattatcgttgcaaataaaatggacatgccggaggctgcggaaaatctcgaagcctttaaagaaaagctgacggatgattatccggtattcccgatcagtgcggtgacaagagaaggtctgcgtgagcttctgtttgaggttgccaatcagcttgagaacacaccggaattcccgctgtatgacgaggaagagcttacacaaaaccgtgtcatgtacacgatggaaaatgaagaagtgccatttaacattacacgcgatccagacggtgtatttgtgctttcaggagacagccttgagcggttattcaagatgactgatttctcacgtgatgaatcggttaaacggtttgcaagacagatgcgcggaatgggtgttgatgaagcactcagagaacgcggagccaaggatggagatataatcaggcttctggaatttgaatttgaatttattgattaatcaatgttggctgaaaagagagcctggtgccaggctctctattttaaaggggggatgcaaatgaaagaggagacattttatcttgtccgtgaagatgtattgcccgatgcaatgagaaaaacattagaagtcaaaaagctgcttgatcgacaaaaagcagattcagtagcagatgccgttcaaaaggtcgatttaagtagaagtgcgttttataaatacagggatgctgtttttccattctacaccatggtaaaagaacaaattatcacacttttctttcatttggaggataggtcaggtgcgttatctcagcttcttcaggcggtagctgattctggaagcaacgttctttccattcaccagaccattccgcttcaaggcagagcaaatgtgacactgtctatcagtacgtcggcaatggaagaagacattcatacattaatgaataagctcaggaagtttgattttgtagaaaaggttgaaatattaggttcaggtgcataagggagagaaaatcgtcatgaaagtcggttatttaggtccagcagctacatttacacatctagcagtcagttcttgttttcaaaacggcgccgaacatgttgcttaccgcaccattccggagtgtatagatgcagccgttgcaggcgaagttgattttgcttttgttcctttggaaaatgctttagaaggatctgttaatctaacaatagactatttaatacatgaacagcctttgccaatcgtgggtgaaatgacgttgccgattcaccagcacttgctcgtccatccctcaagagagaatgcatggaaagagctcgacaaaatttactcacattcacacgcgattgcgcaatgccataaatttcttcatcgacattttccttccgttccatatgaatacgccaattctaccggggcggcagcaaagtttgtcagtgaccatcccgagctgaatatcggggtcattgccaatgatatggcagcttctacatacgaattaaaaatcgtgaaacgggatatacnggattatagggacaatcatacaagatttattatcctgtctcccgatgaaaacatatcttttgaagtgaattcaaaattgagctctaggcccaaaacgaccttaatggtcatgctgccgcaggatgatcagtccggggcgctgcatagagtgctgtctgcattttcttggagaaatttaaacctgtcaaaaattgagtcacgtccgactaaaaccggattaggccattatttctttattattgatattgagaaagcgtttgatgatgtattgattccaggggccatgcaggagcttgaagcactcggctgcaaagtgaggcttctgggtgcataccagtcttaccaattataaaaaaagcccactagagggcttttttt

SEQ ID NO: 12220 - DNA, 3360 bp, Canis familiaris; identical to SEQ ID NO: 12219
  misc_feature (2982)..(2982): n comprises a, c, g, or t, or includes no nucleotide

SEQ ID NO: 12221 - DNA, 3360 bp, Canis familiaris; identical to SEQ ID NO: 12219
  misc_feature (2982)..(2982): n comprises a, c, g, or t, or includes no nucleotide

SEQ ID NO: 12222 - DNA, 4067 bp, Canis familiaris
ccctgctggaggcctgggcctcgggtggagcagttactgcctgtggatcctctatcacgtcctctgtgtgcagcacacctaggtgcttggctggtacaagatgctgaagttccaaacagttcgagggggcctgaggctcctgggtgtccgccgatcctcctcggcccctgttgcctccccaaatgtccggcgtctggagtataagcctatcaagaaagtaatggtggccaacagaggtgagattgccatccgagtgtttcgtgcgtgcacagagctgggtatccgcacagtggctgtctactcggagcaggacacagggcagatgcacaggcagaaagctgatgaagcctaccttattggccgtggcctggcacctgtgcaggcctacctgcacattccagacatcatcaaggtggccaaggaaaatggtgtagatgcggtgcatcctggctatgggttcctctcagagcgagcagactttgcccaggcctgccaagatgctggagtccggttcattggtccaagcccagaggtggtccgcaagatgggagacaaggtggaagcccgggccattgccatcgctgcaggcgttccagtggtccccggcacggactcccccatcagctccctgcacgaggcgcatgagttctccaacaccttcggcttccctattatcttcaaggccgcctacggaggtgggggccgcggcatgcgggtcgtgcatagctatgaggagttggaagagaattacacccgggcctactccgaggccttggcagcctttgggaatggagcgttgtttgtggagaagttcattgagaagccaaggcacattgaggtgcagatcctaggggaccagtatgggaacatcctgcacctgtacgagcgagactgctccatccagcgtcggcaccagaaggtggtagagatcgcccctgctacccacctggatccccaacttcgctcacgtctcaccagtgactctgtcaaacttgccaagcaggtaggctatgagaacgccggcactgtggagttcctggtggacaagcacggcaagcactacttcatcgaggtcaattcccgcctgcaggtggagcacacggtcaccgaggagatcacagatgtggacctggtccatgctcagatccacgtgtccgaaggccggagcctgcctgacctgggcctgcggcaggagaacatccgcatcaatggctgtgccattcagtgtcgggtcaccaccgaggaccctgcacgcagcttccagccagacaccggccgcattgaggttttccggagtggtgagggcatgggcatccgcctggacaacgcctctgcattccagggcgctgtcatatcgccccactatgactctctgctcgtcaaggtcattgcacacggcaaagaccaccccacagctgccaccaagatgagcagagccctggccgagttccgtgtccgaggtgtaaagaccaacatccccttcctgcagaatgttctcaacaaccagcagttcctggcaggcacagtggacacccagttcatcgatgagaaccctgagctgttccagcttcggcctgcacagaaccgggcccagaagttgctacattacctcggacatgtcatggtgaatggccctaccactccaatccctgtcaatgtgagccccagtcctgtggatcctgctgttcctgtggtgcccataggcccacctccagctggtttcagggacatccttctgcgagaagggccagagggctttgcccgagctgtgcggaatcaccaggggctgctgttgatggacacaaccttccgggatgcccaccagtcactgctggccactagagtgcgcacacatgatctcaaaaagattgcgccctatgttgcccacaacttcaacaagctcttcagcatggagaactggggaggcgccacgttcgacgttgccatgcgcttcctgtacgagtgcccctggcggcggctccaggagctccgggagcttatcccgaacatcccgttccagatgctactgaggggggccaatgctgtgggctacaccaactaccctgacaacgtggtcttcaagttctgtgaggtggccaaagagaatggtatggacgtcttccgagtctttgactccctcaactacttgccaaacatgctgctgggcatggaagcagcaggcagtgctgggggtgtggtggaggctgccatctcatacacgggggacgtggctgaccctagtcgcactaaatactcactggagtactacatgggcttagctgaagaactggtgcgagctggcactcacatcctgtgcattaaggacatggcgggcctgctgaagcctgccgcctgcaccatgctggtcagctccctccgggaccgattccccgacctcccactgcacatccatacccatgatacatcaggggcaggtgtggcagccatgctggcctgtgcacaagcaggggctgatgttgtggacgtggcagtagactccatgtctgggatgacctcacagccaagcatgggggccctggtggcctgtaccaaagggactcctttggacacagaggtacccctggagcgtgtgtttgactacagtgagtactgggaaggggctcggggactgtacgcagccttcgattgcacggctaccatgaagtctggcaactccgacgtgtatgagaatgagattccagggggccagtacaccaacctgcacttccaggcccatagcatggggcttggctccaagttcaaggaggtcaagaaggcctatgtggaggctaaccagatgctgggggacctcatcaaggtgacaccatcctccaagattgtgggggacctggcccagttcatggtgcagaatgggttgagccgggcagaggcagaagctcaggcagaagagctgtccttcccccgctctgtggtggagttcctgcagggctacattggcattccccatgggggtttccctgagccctttcgctctaaggtgctaaaggacctgccaagaatagaggggcggcctggagcctccctccctcccctgaacctgaaggagctggagaaggacctgattgataggcatggggaggaggtgaccccagaggacgtcctctctgcagccatgtaccctgatgtctttgctcaattcaaagacttcacggctaccttcggccccctggatagccttaatactcgtctctttcttcaaggacccaaaattgcagaggagtttgaggttgagctggaacggggcaagaccctgcacatcaaagccctggctgtaagcgacctgaaccgtgctggccagaggcaggtgttctttgaactcaatgggcagcttcgatccattctggttaaagacacccaggccatgaaggagatgcacttccatcccaaggctttgaaggatgtgaagggccaaattggggccccgatgcctgggaaggtcatagacatcaaggtggcagcaggggacaaggtggctaagggccagcccctctgtgtgctcagcgccatgaagatggagactgtggtgacttcgcccatggagggcactatccgaaaggttcatgttaccaaggacatgactctggaaggcgacgacctcatcctagagattgagtgatcttactccagcctggcagcctggccgaccctaccccaagcctctcaacagaagctgtgcagccagggcaggcccaggccagccagtacctgagagtaggaaggccaggcccttgaggtcctgtcccatgggacagcacacacactacctgcaatggcctgcccattcccttcagctatttgtccttttcttactggcaggtagttgctcacatattcatctcttgccaaataagggcctgctcctcgtgggagaccacaggtgtacagtcggtggccttgtacctgggggaggtggcttagggcttctacctctgggggtagagggaagacctaattcacaggtcctgggaaatttgctcaataaaagtggccttcccttgccctccacactaggtcatgtacagtctaaaaaaaaaaaaaaaaaaaaa

SEQ ID NO: 12223 - DNA, 4067 bp, Canis familiaris; identical to SEQ ID NO: 12222

SEQ ID NO: 12224 - DNA, 4067 bp, Canis familiaris; identical to SEQ ID NO: 12222

SEQ ID NO: 12225 - DNA, 4067 bp, Canis familiaris; identical to SEQ ID NO: 12222

SEQ ID NO: 12226 - DNA, 6540 bp, Canis familiaris; identical to SEQ ID NO: 12190

SEQ ID NO: 12227 - DNA, 6540 bp, Canis familiaris; identical to SEQ ID NO: 12190

SEQ ID NO: 12228 - DNA, 6540 bp, Canis familiaris; identical to SEQ ID NO: 12190

SEQ ID NO: 12229 - DNA, 1612 bp, Canis familiaris; identical to SEQ ID NO: 12210

SEQ ID NO: 12230 - DNA, 1612 bp, Canis familiaris; identical to SEQ ID NO: 12210

SEQ ID NO: 12231 - DNA, 1612 bp, Canis familiaris; identical to SEQ ID NO: 12210

SEQ ID NO: 12232 - DNA, 3360 bp, Canis familiaris; identical to SEQ ID NO: 12219
  misc_feature (2982)..(2982): n comprises a, c, g, or t, or includes no nucleotide

SEQ ID NO: 12233 - DNA, 3360 bp, Canis familiaris; identical to SEQ ID NO: 12219
  misc_feature (2982)..(2982): n comprises a, c, g, or t, or includes no nucleotide

SEQ ID NO: 12234 - DNA, 3360 bp, Canis familiaris; identical to SEQ ID NO: 12219
  misc_feature (2982)..(2982): n comprises a, c, g, or t, or includes no nucleotide

SEQ ID NO: 12235 - DNA, 2400 bp, Canis familiaris
gaattcatgtaaaagatgaggttggttcattctcgaaaattacatctgtgttctcagagcggggcgtgacgtttgaaaaaatccttcagctgccaattaaaggccatgatgagttagctgaaatcgtaattgtcacacatcatacatcagaagctgatttcagtgatatcctgcaaaacctaaatgatttggaagtcgttcaagaagtcaaaagcacatatcgtgtagaagggaacggttggagctaatgtggaaaggacttatccatcaatataaagaatttttacctgtaacagatcaaacaccggcgctaactttacatgaaggaaacacacctcttattcacctgccgaagctgtctgagcagctcggaattgagcttcatgtcaaaacggaaggcgtcaatcctacgggatcatttaaagatcgcggaatggttatggctgtggcaaaggcaaaagaagaaggcaatgacacgattatgtgcgcgtcaacaggtaacacttccgctgctgcggcagcatatgcagcccgtgctaacatgaaatgcattgtcatcatcccgaacggaaaaattgcatttggaaaactcgctcaagctgtcatgtacggagccgagattatcgcaattgacggaaactttgacgatgcgcttaaaattgtccgttccatctgtgagaaatcaccgattgcccttgtcaactcagtcaacccttaccgcattgaaggccaaaaaactgctgccttcgaagtgtgcgaacagctgggggaagcgcctgatgttttagcgatcccggtcggaaatgctggaaacatcactgcgtactggaagggcttcaaggaatatcatgagaaaaacggcacaggccttccgaaaatgcgcggctttgaagctgagggtgcggcggcaatcgtgcgcaatgaagtgattgaaaatccggaaacaatagcgacagccattcgtatcggaaacccggcaagctgggacaaagctgtaaaggcagccgaggaatccaatgggaaaattgacgaagtcactgatgatgaaatccttcacgcatatcagctgatcgcccgtgtagaaggcgtgtttgcagaaccaggttcttgcgcgtctatcgcaggagtgctgaaacaggtgaaatccggagaaattccgaaaggcagcaaggtcgtagctgtgttaacaggaaacggactgaaagatccgaacacagcggtcgacatttcagaaatcaagcctgtcacattgccgactgatgaagacagcatccttgaatatgtaaaaggagcggcccgtgtatgaacgaagccgacatgctgttctctgtcactgttcccggaagcacagctaacctaggccccggctttgattcagtcggaatggcgctcagcagatatttgaagctgaccgtctttgaaagcgacaaatggtcttttgaggctgaaacagaaacagtcgccggaattcgcggtacagataacctgatctaccaagtggctaaacggaccgcagatttgtacggaaaagaaatgcctcctgtccatgtgaaggtgtggagcgacatcccgcttgcacgcggccttggcagcagcgccgcagcgattgtagcggccattgaactggctgatgaattatgcggcttaaagctgtctgaagcggacaagctgcatttagcgagtctagaagaaggacacccggacaatgctggcgcttctctcgtcggcggacttgtgatcggcctgcatgaggatgacgagacccaaatgatccgcgtcccgaatgctgacattgacgtagtcgttgtcattcctttttatgaagtgctgacaagagacgcgagagacgtgcttccgaaggagtttccatatgccgatgccgtaaaagcaagtgctgtcagcaatatcctcattgctgcgatcatgtccaaggattggccgcttgtcgggaaaatcatgaagaaggatatgttccatcagccgtaccgggcgatgcttgtgcctgagctgtcaaaagtagagcacgtcgccgagatgaagggcgcatatggaacggctctcagcggagcaggcccaacgattctcgtcatgaccgaaaaaggaaagggagaagagctaaaagaacagctcgcgcttcatttccctcattgtgaagtagacgctttgaccgttccgaaagagggaagtataatagagcgaaatcctttatatcaagtaaaaagtgtatagatcatgccaagcgttcctcagcgtcagcggagggcgcctttttttgctggagataaaggagttttattagaaacgaatacatgtaaaggaggagatgaatatgaaaagctgataaccgcagacgacatcacagcgattgtctctgtgaccagtcctcaatacgccccagac

SEQ ID NO: 12236 - DNA, 2400 bp, Canis familiaris; identical to SEQ ID NO: 12235

SEQ ID NO: 12237 - DNA, 2400 bp, Canis familiaris; identical to SEQ ID NO: 12235

SEQ ID NO: 12238 - DNA, 1049 bp, Canis familiaris; identical to SEQ ID NO: 12181

SEQ ID NO: 12239 - DNA, 1049 bp, Canis familiaris; identical to SEQ ID NO: 12181

SEQ ID NO: 12240 - DNA, 1049 bp, Canis familiaris; identical to SEQ ID NO: 12181

SEQ ID NO: 12241 - DNA, 748 bp, Canis familiaris; identical to SEQ ID NO: 12184

SEQ ID NO: 12242 - DNA, 748 bp, Canis familiaris; identical to SEQ ID NO: 12184

SEQ ID NO: 12243 - DNA, 652 bp, Canis familiaris; identical to SEQ ID NO: 12186

SEQ ID NO: 12244 - DNA, 652 bp, Canis familiaris; identical to SEQ ID NO: 12186

SEQ ID NO: 12245 - DNA, 1032 bp, Canis familiaris; identical to SEQ ID NO: 12188

SEQ ID NO: 12246 - DNA, 1032 bp, Canis familiaris; identical to SEQ ID NO: 12188

SEQ ID NO: 12247 - DNA, 2403 bp, Canis familiaris
gaattcatgtaaaagatgaggttggttcattctcgaaaattacatctgtgttctcagagcggggcgtgacgtttgaaaaaatccttcagctgccaattaaaggccatgatgagttagctgaaatcgtaattgtcacacatcatacatcagaagctgatttcagtgatatcctgcaaaacctaaatgatttggaagtcgttcaagaagtcaaaagcacatatcgtgtagaagggaacggttggagctaatgtggaaaggacttatccatcaatataaagaatttttacctgtaacagatcaaacaccggcgctaactttacatgaaggaaacacacctcttattcacctgccgaagctgtctgagcagctcggaattgagcttcatgtcaaaacggaaggcgtcaatcctacgggatcatttaaagatcgcggaatggttatggctgtggcaaaggcaaaagaagaaggcaatgacacgattatgtgcgcgtcaacaggtaacacttccgctgctgcggcagcatatgcagcccgtgctaacatgaaatgcattgtcatcatcccgaacggaaaaattgcatttggaaaactcgctcaagctgtcatgtacggagccgagattatcgcaattgacggaaactttgacgatgcgcttaaaattgtccgttccatctgtgagaaatcaccgattgcccttgtcaactcagtcaacccttaccgcattgaaggccaaaaaactgctgccttcgaagtgtgcgaacagctgggggaagcgcctgatgttttagcgatcccggtcggaaatgctggaaacatcactgcgtactggaagggcttcaaggaatatcatgagaaaaacggcacaggccttccgaaaatgcgcggctttgaagctgagggtgcggcggcaatcgtgcgcaatgaagtgattgaaaatccggaaacaatagcgacagccattcgtatcggaaacccggcaagctgggacaaagctgtaaaggcagccgaggaatccaatgggaaaattgacgaagtcactgatgatgaaatccttcacgcatatcagctgatcgcccgtgtagaaggcgtgtttgcagaaccaggttcttgcgcgtctatcgcaggagtgctgaaacaggtgaaatccggagaaattccgaaaggcagcaaggtcgtagctgtgttaacaggaaacggactgaaagatccgaacacagcggtcgacatttcagaaatcaagcctgtcacattgccgactgatgaagacagcatccttgaatatgtaaaaggagcggcccgtgtatgaacgaagccgacatgctgttctctgtcactgttcccggaagcacagctaacctaggccccggctttgattcagtcggaatggcgctcagcagatatttgaagctgaccgtctttgaaagcgacaaatggtcttttgaggctgaaacagaaacagtcgccggaattccgggcggtacagataacctgatctaccaagtggctaaacggaccgcagatttgtacggaaaagaaatgcctcctgtccatgtgaaggtgtggagcgacatcccgcttgcacgcggccttggcagcagcgccgcagcgattgtagcggccattgaactggctgatgaattatgcggcttaaagctgtctgaagcggacaagctgcatttagcgagtctagaagaaggacacccggacaatgctggcgcttctctcgtcggcggacttgtgatcggcctgcatgaggatgacgagacccaaatgatccgcgtcccgaatgctgacattgacgtagtcgttgtcattcctttttatgaagtgctgacaagagacgcgagagacgtgcttccgaaggagtttccatatgccgatgccgtaaaagcaagtgctgtcagcaatatcctcattgctgcgatcatgtccaaggattggccgcttgtcgggaaaatcatgaagaaggatatgttccatcagccgtaccgggcgatgcttgtgcctgagctgtcaaaagtagagcacgtcgccgagatgaagggcgcatatggaacggctctcagcggagcaggcccaacgattctcgtcatgaccgaaaaaggaaagggagaagagctaaaagaacagctcgcgcttcatttccctcattgtgaagtagacgctttgaccgttccgaaagagggaagtataatagagcgaaatcctttatatcaagtaaaaagtgtatagatcatgccaagcgttcctcagcgtcagcggagggcgcctttttttgctggagataaaggagttttattagaaacgaatacatgtaaaggaggagatgaatatgaaaagctgataaccgcagacgacatcacagcgattgtctctgtgaccagtcctcaatacgccccagac

SEQ ID NO: 12248 - DNA, 2403 bp, Canis familiaris; identical to SEQ ID NO: 12247

SEQ ID NO: 12249 - DNA, 2403 bp, Canis familiaris; identical to SEQ ID NO: 12247

SEQ ID NO: 12250 - DNA, 2292 bp, Canis familiaris
atgatggatcaagccagatcagcattctctaacttgtttggtggggaaccattgtcatacacccggtttagccttgctcggcaagtagatggagataacagtcatgtggagatgaaactggctgcagatgaagaagaaaatgccgacaataacatgaaggctagtgtcagaaaacccaagaggtttaatggaagactctgctttgcagctattgcactagtcattttcttcttgattggattcatgagtggctacctgggctattgtaagcgtgtagaacaaaaagaggagtgtgtgaaactggctgaaacggaggagacagacaagtcagaaaccatggaaacagaggatgttcctacatcatctcgcttatattgggcagacctcaaaacactgttgtcagagaagttgaactccatagagtttgctgacaccatcaagcagctgagccagaatacatacactcctcgtgaggctggatctcaaaaagatgaaagtcttgcctattatattgaaaatcagttccatgaatttaaattcagcaaagtctggcgagatgaacactatgtgaagattcaagtgaaaagcagcattggtcaaaacatggtgaccatagtgcagtcaaatggtaacttagacccagtggagtctcccgagggttatgtggcattcagtaaacctacagaagtttctggtaaactggtccatgctaattttggcactaaaaaggactttgaagaactaagttattctgtgaatggatctttagtgattgttagagcaggggaaattacttttgcagaaaaggttgcaaatgcccaaagctttaatgcaattggtgtcctcatatacatggacaagaataaattccccgttgttgaggcagaccttgcactctttggacatgctcatctaggaactggtgatccatacacacctggctttccttctttcaatcatactcagtttccgccatctcagtcatcagggttgcctaatatacctgtgcaaacaatctcaagagctgctgcagaaaagctatttggaaaaatggaaggaagctgtcctgctagatggaacatagattcttcatgtaagctggaactttcacagaatcaaaatgtgaagctcattgtgaaaaacgtactgaaagaaagaagaatacttaacatctttggagttattaaaggttatgaggaaccagaccgttatgttgtagtaggagcccagagagacgctttgggtgctggtgttgcggcgaagtccagtgtgggaacaggtcttctgttgaaacttgcccaagtattctcagatatgatttcaaaagatggatttagacccagcagaagtataatctttgccagctggactgcaggcgactttggagctgttggtgccactgagtggttggagggatacctttcatctttgcatttaaaagctttcacttatattaatttggataaagttgtccttggtactagtaacttcaaagtttctgccagccccttattatatacacttatgggaaagataatgcaagatgtaaagcatccagttgatggaaaatctctatatagagacagcaattggattagcaaagttgagaaactttcctttgacaatgctgcatatcctttccttgcatattctggaatcccagcagtttctttttgtttttgtgaggatgcagactatccttatttgggcactagattggatacctatgaggcattgactcagaaagttcctcagctcaaccaaatggttcgtacagcagcggaagtggctggtcagctcattattaaacttacccatgacgttgaattgaacctggactatgagatgtataacagcaaactactgtcatttatgaaggatctgaaccagttcaaaacagatatcagggatatgggtctaagtctacagtggctgtattccgctcgtggagactacttccgtgctacttctagactaacaactgattttcataatgctgagaaaacaaacagatttgtcatgagggaaatcaatgatcgtattatgaaagtggagtatcacttcctgtcgccctatgtatctccaagagagtctcctttccgacatatcttctggggctctggctctcacactctctcagctttagtggagaacttgaagcttcgtcaaaaaaatattactgcttttaatgaaaccctcttcagaaaccagttggccctggctacttggactattcagggagtcgcaaatgccctctctggtgacatttggaatattgacaatgagttttaa

SEQ ID NO: 12251 - DNA, 2292 bp, Canis familiaris; identical to SEQ ID NO: 12250

SEQ ID NO: 12252 - DNA, 2292 bp, Canis familiaris; identical to SEQ ID NO: 12250

SEQ ID NO: 12253 - DNA, 2525 bp, Canis familiaris
ctcgagccaacaccgagagagacatacggcgggtgtattgcctacattgggtttgacgggaatatcgactcttgtattacgattcgcacgatgagtgtaaagaacggtgttgcatcgatacaggcaggtgctggcattgttgctgattctgttccggaagccgaatacgaagaaagctgtaataaagccggtgcgctgctgaaaacgattcatattgcagaagacatgtttcatagcaaggaggataaagctgatgaacagatttctacaattgtgcgttgacggaaaaacccttactgccggtgaggctgaaacgctgatgaatatgatgatggcagcggaaatgactccttctgaaatgggggggatattgtcaattcttgctcatcggggggagacgccagaagagcttgcgggttttgtgaaggcaatgcgggcacacgctcttacagtcgatggacttcctgatattgttgatacatgcggaacagggggagacggtatttccacttttaatatctcaacggcctcggcaattgttgcctcggcagctggtgcgaaaatcgctaagcatggcaatcgctctgtctcttctaaaagcggaagcgctgatgttttagaggagctagaggtttctattcaaaccactcccgaaaaggtcaaaagcagcattgaaacaaacaacatgggatttctttttgcgccgctttaccattcgtctatgaaacatgtagcaggtactagaaaagagctaggtttcagaacggtatttaatctgcttgggccgctcagcaatcctttacaggcgaagcgtcaggtgattggggtctattctgttgaaaaagctggactgatggcaagcgcactggagacgtttcagccgaagcacgtcatgtttgtatcaagccgtgacggtttagatgagctttcaattacagcaccgaccgacgtgattgaattaaaggacggagagcgccgggaatataccgtttcacccgaagatttcggtttcacaaatggcagacttgaagatttacaggtgcagtcaccgaaagagagcgcctatctcattcagaatatttttgaaaataaaagcagcagttccgctttatctattacggcttttaatgcgggagctgcgatttacacggcgggaattaccgcctcactgaaggaaggaacggagctggcgttagagacgattacaagcggaggcgctgccgcgcagcttgaacgactaaagcagaaagaggaagagatctatgcttgaaaaaatcatcaaacaaaagaaagaagaagtgaaaacactggttttgccggtagagcagcctttcgagaaacgttcatttaaggaggcgctggcaagcccgaatcggtttatcgggttgattgccgaagtgaagaaagcatcgccgtcaaaagggcttattaaagaggattttgtgcctgtgcagattgcaatagactatgaggctgcgaaggcagatgcgatttccgttttaacagacaccccgttttttcaaggggaaaacagttatttatcagacgtaaagcgtgctgtttcgattcctgtacttagaaaagattttattcttgattctcttcaagtagaggaatcaagaagaatcggagcggatgccatattgttaatcggcgaggtgcttgatcccttacaccttcatgaattatatcttgaagcaggtgaaaaggggatggacgtgttagtggaggttcatgatgcatcaacgctagaacaaatattgaaagtgttcacacccgacattctcggcgtaaataatcgaaacctaaaaacgtttgaaacatctgtaaagcagacagaacaaatcgcatctctcgttccgaaagaatccttgcttgtcagcgaaagcggaatcggttctttagaacatttaacatttgtcaatgaacatggggcgcgagctgtacttatcggtgaatcattgatgagacaaacttctcagcgtaaagcaatccatgctttgtttagggagtgaggttgtgaagaaaccggcattaaaatattgcggtattcggtcactaaaggatttgcagcttgcggcggaatcacaggctgattacctaggatttatttttgctaaaagcaaacgaaaagtatctccggaagatgtgaaaaaatggctgaaccaagttcgtgtcgaaaaacaggttgcaggtgtttttgttaatgaatcaatagagacgatgtcacgtattgccaagagcttgaagctcgacgtcattcagcttcacggtgatgaaaaaccggcggatgctgctgctcttcgcaagctgacaggctgtgaaatatggaaggcgcttcaccatcaagataacacaactcaagaaatagcccgctttaaagataatgttgacggctttgtgattgattcatctgtaaaagggtctagaggcggaactggtgttgcattttcttgggaatgtgtgccggaatatcagcaggcggctattggtaaacgctgttttatcgcaggcggcgtggatcc

SEQ ID NO: 12254 - DNA, 2525 bp, Canis familiaris; identical to SEQ ID NO: 12253

SEQ ID NO: 12255 - DNA, 2525 bp, Canis familiaris; identical to SEQ ID NO: 12253

SEQ ID NO: 12256 - DNA, 1714 bp, Canis familiaris
  misc_feature (1256)..(1256): n comprises a, c, g, or t, or includes no nucleotide
  misc_feature (1275)..(1275): n comprises a, c, g, or t, or includes no nucleotide
  misc_feature (1306)..(1306): n comprises a, c, g, or t, or includes no nucleotide
atggacgatgaaattgcggcgctagttgtagataacggctccggtatgtgcaaggcgggcttcgccggggatgacgcccctcgagccgtgttcccgtccatcgtcgggcgaccccggcaccagggcgtgatggtgcgcatgggccagaaggactcctacgtgggcgacgaggcccagagcaagcggggcatcctgaccctcaagtaccccatcgagcacggcatcgtcaccaactgggacgacatggagaagatctggcaccacaccttctacaacgagctgcgcgtggcccccgaggaagcacccgtgctgctgaccgaggcccccctgaatcccaaagccaaccgtgagaagatgactcagatcatgttcgagacgttcaacaccccagccatgtatgtggccatccaggctgtgctgtccctgtacgcctctggccgcaccactggtattgtcatggactctggggatggcgtcacccacactgtgcccatctacgaggggtacgccttgccccacgccatcctgcgtctggacctggctggccgggacctgactgactacctcatgaagatcctcacggagcgtggctacagcttcaccaccactgctgagcgggagatcgtgcgtgacatcaaggaagaagctctgctacgtcgccctggacttcgagcaggagatggccacggcgcgtcctcgtcctccctggagaagagctacgaactacccgacgggcaggtgatcaccattggcaacgagcggttccgctgcccaaaagcactcttccaaccttctttcctggggatggaatcatgcggtatccacgagaccaccttcaactccatcatgaagtgcgacgtggacatccgtaaggacctgtatgccaacacagtgctgtctggaggtaccaccatgtaccctggcattgctgacaggatgcagaaggaaatcacagccctggccccagcaaggatgaagatcaagatcatcgcccctccggaacgcaagtattctgtgtggatcggaggctccatcctggcctcgctgtccaccttccagcagatgtggatcagcaagcaggagtacgacgagtcgggcccctccatcgtccatcgcaaatgcttctagatcgactgcgagcagatgcgtagcatttgctgcatgagtgaattccgaagtataaattggccctggcaaatggctagcctcatgaaactggaataagcgctttgaaaagaaatttgtccttgaagctngtatctgatatatcagcantggattgtagaacttgttgctgatcttgacnttgtatccaagttaactgttcccttggtatatgtttaataccgcctattccaggattctctagaggctggcaagagtctgaaccagttgtcatttctgtcttgccggtctaacagggttgggaaggtccgagccttaggacccactttcctgtcttacccaatgttttcctgccagaacaccgtgggtggttaattgccttgaagttggaaaacggtttgcatttacaactgtaaatttattcatccttttaatttatgtaaggttttttgtacacaattctcaattcttttaagagatgacaacaaattttggttttctactgtcatgtgagaacattaggccccagcaacgcgtcattgtgtgaggaaaataaagtgctgcagtaaaaaaaaaaaaaaaaaaaaaa

SEQ ID NO: 12257 - DNA, 1761 bp, Canis familiaris; identical to SEQ ID NO: 12196

SEQ ID NO: 12258 - DNA, 1109 bp, Canis familiaris; identical to SEQ ID NO: 12178

SEQ ID NO: 12259 - DNA, 1714 bp, Canis familiaris; identical to SEQ ID NO: 12256
  misc_feature (1256)..(1256): n comprises a, c, g, or t, or includes no nucleotide
  misc_feature (1275)..(1275): n comprises a, c, g, or t, or includes no nucleotide
  misc_feature (1306)..(1306): n comprises a, c, g, or t, or includes no nucleotide

SEQ ID NO: 12260 - DNA, 1761 bp, Canis familiaris; identical to SEQ ID NO: 12196

SEQ ID NO: 12261 - DNA, 1109 bp, Canis familiaris; identical to SEQ ID NO: 12178

SEQ ID NO: 12262 - DNA, 1714 bp, Canis familiaris; identical to SEQ ID NO: 12256
  misc_feature (1256)..(1256): n comprises a, c, g, or t, or includes no nucleotide
  misc_feature (1275)..(1275): n comprises a, c, g, or t, or includes no nucleotide
  misc_feature (1306)..(1306): n comprises a, c, g, or t, or includes no nucleotide

SEQ ID NO: 12263 - DNA, 1761 bp, Canis familiaris; identical to SEQ ID NO: 12196

SEQ ID NO: 12264 - DNA, 1109 bp, Canis familiaris; identical to SEQ ID NO: 12178

SEQ ID NO: 12265 - DNA, 1049 bp, Canis familiaris
atggctcaccgcccacgctggacattgtcgcaagtcacagaattatttgaaaaaccgttgctggatctgctgtttgaagcgcagcaggtgcatcgccagcatttcgatcctcgtcaggtgcaggtcagcacgttgctgtcgattaagaccggagcttgtccggaagattgcaaatactgcccgcaaagctcgcgctacaaaaccgggctggaagccgagcggttgatggaagttgaacaggtgctggagtcggcgcgcaaagcgaaagcggcaggatcgacgcgcttctgtatgggcgcggcgtggaagaatccccacgaacgcgatatgccgtacctggaacaaatggtgcagggggtaaaagcgatggggctggaggcgtgtatgacgctgggcacgttgagtgaatctcaggcgcagcgcctcgcgaacgccgggctggattactacaaccacaacctggacacctcgccggagttttacggcaatatcatcaccacacgcacttatcaggaacgcctcgatacgctggaaaaagtgcgcgatgccgggatcaaagtctgttctggcggcattgtgggcttaggcgaaacggtaaaagatcgcgccggattattgctgcaactggcaaacctgccgacgccgccggaaagcgtgccaatcaacatgctggtgaaggtgaaaggcacgccgcttgccgataacgatgatgtcgatgcctttgattttattcgcaccattgcggtcgcgcggatcatgatgccaacctcttacgtgcgcctttctgccggacgcgagcagatgaacgaacagactcaggcgatgtgctttatggcaggcgcaaactcgattttctacggttgcaaactgctgaccacgccgaatccggaagaagataaagacctgcaactgttccgcaaactggggctaaatccgcagcaaactgccgtgctggcaggggataacgaacaacagcaacgtcttgaacaggcgctgatgaccccggacaccgacgaatattacaacgcggcagcattatgagctggcag

SEQ ID NO: 12266 - DNA, 1049 bp, Canis familiaris; identical to SEQ ID NO: 12265

SEQ ID NO: 12267 - DNA, 1049 bp, Canis familiaris; identical to SEQ ID NO: 12265

SEQ ID NO: 12268 - DNA, 751 bp, Canis familiaris
atggcaacggttaataaacaagccattgcagcggcatttggtcgggcagccgcacactatgagcaacatgcagatctacagcgccagagtgctgacgccttactggcaatgcttccacagcgtaaatacacccacgtactggacgcgggttgtggacctggctggatgagccgccactggcgggaacgtcacgcgcaggtgacggccttagatctctcgccgccaatgcttgttcaggcacgccagaaggatgccgcagaccattatctggcgggagatatcgaatccctgccgttagcgactgcgacgttcgatcttgcatggagcaatctcgcagtgcagtggtgcggtaatttatccacggcactccgcgagctgtatcgggtggtgcgccccaaaggcgtggtcgcgtttaccacgctggtgcagggatcgttacccgaactgcatcaggcgtggcaggcggtggacgagcgtccgcatgctaatcgctttttaccgccagatgaaatcgaacagtcgctgaacggcgtgcattatcaacatcatattcagcccatcacgctgtggtttgatgatgcgctcagtgccatgcgttcgctgaaaggcatcggtgccacgcatcttcatgaagggcgcgacccgcgaatattaacgcgttcgcagttgcagcgattgcaactggcctggccgcaacagcaggggcgatatcctctgacgtatcatctttttttgggagtgattgctcgtg

SEQ ID NO: 12269 - DNA, 751 bp, Canis familiaris; identical to SEQ ID NO: 12268

SEQ ID NO: 12270 - DNA, 661 bp, Canis familiaris
gtgagtaaacgttattttgtcaccggaacggataccgaagtggggaaaactgtcgccagttgtgcacttttacaagccgcaaaggcagcaggctaccggacggcaggttataaaccggtcgcctctggcagcgaaaagaccccggaaggtttacgcaatagcgacgcgctggcgttacagcgcaacagcagcctgcagctggattacgcaacagtaaatccttacaccttcgcagaacccacttcgccgcacatcatcagcgcgcaagagggcagaccgatagaatcattggtaatgagcgccggattacgcgcgcttgaacaacaggctgactgggtgttagtggaaggtgctggcggctggtttacgccgctttctgacactttcacttttgcagattgggtaacacaggaacaactgccggtgatactggtagttggtgtgaaactcggctgtattaatcacgcgatgttgactgcacaggtaatacaacacgccggactgactctggcgggttgggtggcgaacgatgttacgcctccgggaaaacgtcacgctgaatatatgaccacgctcacccgcatgattcccgcgccgctgctgggagagatcccctggcttgcagaaaatccagaaaatgcggcaaccggaaagtacataa

SEQ ID NO: 12271 - DNA, 661 bp, Canis familiaris; identical to SEQ ID NO: 12270

SEQ ID NO: 12272 - DNA, 1032 bp, Canis familiaris
atgtccaatttactgaccgtacaccaaaatttgcctgcattaccggtcgatgcaacgagtgatgaggttcgcaagaacctgatggacatgttcagggatcgccaggcgttttctgagcatacctggaaaatgcttctgtccgtttgccggtcgtgggcggcatggtgcaagttgaataaccggaaatggtttcccgcagaacctgaagatgttcgcgattatcttctatatcttcaggcgcgcggtctggcagtaaaaactatccagcaacatttgggccagctaaacatgcttcatcgtcggtccgggctgccacgaccaagtgacagcaatgctgtttcactggttatgcggcggatccgaaaagaaaacgttgatgccggtgaacgtgcaaaacaggctctagcgttcgaacgcactgatttcgaccaggttcgttcactcatggaaaatagcgatcgctgccaggatatacgtaatctggcatttctggggattgcttataacaccctgttacgtatagccgaaattgccaggatcagggttaaagatatctcacgtactgacggtgggagaatgttaatccatattggcagaacgaaaacgctggttagcaccgcaggtgtagagaaggcacttagcctgggggtaactaaactggtcgagcgatggatttccgtctctggtgtagctgatgatccgaataactacctgttttgccgggtcagaaaaaatggtgttgccgcgccatctgccaccagccagctatcaactcgcgccctggaagggatttttgaagcaactcatcgattgatttacggcgctaaggatgactctggtcagagatacctggcctggtctggacacagtgcccgtgtcggagccgcgcgagatatggcccgcgctggagtttcaataccggagatcatgcaagctggtggctggaccaatgtaaatattgtcatgaactatatccgtaacctggatagtgaaacaggggcaatggtgcgcctgctggaagatgccgattag

SEQ ID NO: 12273 - DNA, 1032 bp, Canis familiaris; identical to SEQ ID NO: 12272

SEQ ID NO: 12274 - DNA, 1840 bp, Canis familiaris
atgtcaaacgaaacaattaaattagtcattgcgggaccgcgtggaagaatggggcaggaagctgttaaattggcagaacgaacaccacattttgaccttgtaggggccatagaccatacatacgatcagcaaaaattatctgatgtgatgcctgttgagtcagatgctttcatttacacagatatccatgcctgttttacagaaacacaaccggatgtcttgattgatttaacaacgcccgaaatcggaaaagtacatacaaaaattgcattagagcacggagtccgtccagttgtcggaacaaccggtttctcagaagctgatttaaaagagctcacatctttaacagaagaaaaagggatcggagccatcatcgcgccaaattttgcgctcggtgcgatactgatgatgaaattttcaaaaatggctgccaactattttgaggatgttgagattattgagcttcatcatgaccagaagcttgacgcaccaagcggaactgcgcttaaaacagcggaaatgatttcagaagtccgtaaagaaaagcagcaaggacatccggatgaaaaagaaattctcccaggagcaagaggagcggagcaaaacggtattcgcttgcacaggcttcagatacgccatgattcttataaccgtgcttctttcatgtcaggcgttaaactgtcagtcgaacaagtcatgaagattgatcagcttgtgtatggtttagaaaatatcattgattagacggggggataaacaatgaaaattgctttgatcgcgcatgacaagaaaaaacaggatatggttcaatttacgactgcctatcgggatattttaaagaatcatgatctatacgcaaccggaaccacagggttgaaaattcatgaggcgacaggtcttcaaattgaacgttttcaatccggccctttagggggagaccagcaaatcggtgcactgatcgctgccaatgcactcgatcttgtcatttttttgcgcgacccgctgaccgcgcagccgcatgaaccggatgtctcggcattaatccgtttatgtgatgtgtattccattccgctcgccacaaatatgggtactgcggaaattcttgtgcgcacacttgatgaaggtgttttcgaattccgtgaccttcttcggggagaagagccgaatgtataatgctgacgttcttgcttttggcgcccacagtgatgatgtcgagatcggaatgggcggcacaatagcgaagtttgtcaaacaggaaaaaaaagtaatgatatgcgatttgacagaagcggaactctcttctaacggtacggtcagtttgcgtaaagaagaagcagctgaagcagcccgcatattaggcgcagataaaagaattcagctaacgcttccagaccgcggcctaataatgagtgatcaggcaattcggtcaattgtcactgtcatcagaatctgtcggccaaaagcggtttttatgccgtataaaaaggatcgccatccggatcacggcaatgcggctgcactggtggaagaagcgatcttttccgccggaatccataaatataaagacgaaaaaagccttccggcgcataaagtcagcaaggtttactattatatgataaatggttttcatcagccggattttgttattgatatctcggatacaatagaggcaaagaaacaaagcctcaacgcctacaaaagccagtttatcccgtcaaaggattccgtttctactcctctgacgaatgggtatattgaaatcgttgaagcgagagaaaagctttacggtaaagaagcgggcgtggagtatgccgaagtttcttttccaaacggatgctga

SEQ ID NO: 12275 - DNA, 1840 bp, Canis familiaris; identical to SEQ ID NO: 12274

SEQ ID NO: 12276 - DNA, 1840 bp, Canis familiaris; identical to SEQ ID NO: 12274

SEQ ID NO: 12277 - DNA, 1194 bp, Canis familiaris
  misc_feature (1066)..(1067): n comprises a, c, g, or t, or includes no nucleotide
  misc_feature (1114)..(1115): n comprises a, c, g, or t, or includes no nucleotide
  misc_feature (1133)..(1134): n comprises a, c, g, or t, or includes no nucleotide
  misc_feature (1164)..(1164): n comprises a, c, g, or t, or includes no nucleotide
  misc_feature (1172)..(1173): n comprises a, c, g, or t, or includes no nucleotide
  misc_feature (1192)..(1192): n comprises a, c, g, or t, or includes no nucleotide
gcacgagagacagccgcgtcttctgctgcagccccaggcgcgtccccgaggcacgatggtgaaggtcggagtsaacgsatttggycgtattgkgcgcctggtcaccagggctgcttttrrctctggcaaagtggatattgtcgccatcaatgaccccttcattgatctcaactacatggtgtacatgttccagtatgattctacccacggcaaattccacggcacagtcaaggctgagaacgggaaacttgtcatcaacgggaagtccatctccatcttccaggagcgagatccckccaamatcaaatggggtgatgctggtgcysagyrtsykgtggagtccactggggtcttcaccaccatggagaaggctggggctcacttgaaaggcggggccaagagggtcatcatctctgctccttctgctgatgcccccatgtttgtgatgggcgtgaaccatgagaagtatgacaactccctcaagattgtcagcaatgcctcctgcaccaccaactgcttggctcctctagccaaagtcatccatgaccacttcggcatcgtggagggcctcatgaccaccgtccatgccatcacygccacccaraaraccgtggacggcccctctgggaagatgtggcgtgacggccgaggggctgcccagaacatcatccctgcttccactggcgctgccaaggctgtgggcaaggtcatccctgagctgaacgggaagctcactggcatggccttccgtgtccccacccccaatgtatcagttgtggatctgacctgccgcctggagaaagctgccaaatatgacgacatcaagaaggtagtgaagcaggcatcggagggacccctcaaaggcatcctgggctacactgaggaccaggtggtctcctgtgacttcaacagtgacacccactcttccaccttcgacgccggggctggcattgccctcaatgaccactttgtcaagctcatttcctggtatgacaatgaatttggctacagcaaccgggtggtgggacctcatggtcyacatgggcctccaaggagtaagagcctnnctggaccaccagccccagcagaacaagagggaagagagaggcctcannctgctggggagtccctgnncccacttaatccccaacaactgagagaatntctgactnncaattaattctaaacccanga

SEQ ID NO: 12278 - DNA, 1268 bp, Canis familiaris; identical to SEQ ID NO: 12200

SEQ ID NO: 12279 - DNA, 1228 bp, Canis familiaris; identical to SEQ ID NO: 12193

SEQ ID NO: 12280 - DNA, 1194 bp, Canis familiaris; identical to SEQ ID NO: 12277
  misc_feature (1066)..(1067): n comprises a, c, g, or t, or includes no nucleotide
  misc_feature (1114)..(1115): n comprises a, c, g, or t, or includes no nucleotide
  misc_feature (1133)..(1134): n comprises a, c, g, or t, or includes no nucleotide
  misc_feature (1164)..(1164): n comprises a, c, g, or t, or includes no nucleotide
  misc_feature (1172)..(1173): n comprises a, c, g, or t, or includes no nucleotide
  misc_feature (1192)..(1192): n comprises a, c, g, or t, or includes no nucleotide

SEQ ID NO: 12281 - DNA, 1268 bp, Canis familiaris; identical to SEQ ID NO: 12200

SEQ ID NO: 12282 - DNA, 1228 bp, Canis familiaris; identical to SEQ ID NO: 12193

SEQ ID NO: 12283 - DNA, 1194 bp, Canis familiaris; identical to SEQ ID NO: 12277
  misc_feature (1066)..(1067): n comprises a, c, g, or t, or includes no nucleotide
  misc_feature (1114)..(1115): n comprises a, c, g, or t, or includes no nucleotide
  misc_feature (1133)..(1134): n comprises a, c, g, or t, or includes no nucleotide
  misc_feature (1164)..(1164): n comprises a, c, g, or t, or includes no nucleotide
  misc_feature (1172)..(1173): n comprises a, c, g, or t, or includes no nucleotide
  misc_feature (1192)..(1192): n comprises a, c, g, or t, or includes no nucleotide

SEQ ID NO: 12284 - DNA, 1268 bp, Canis familiaris; identical to SEQ ID NO: 12200

SEQ ID NO: 12285 - DNA, 1228 bp, Canis familiaris; identical to SEQ ID NO: 12193

SEQ ID NO: 12286 - DNA, 984 bp, Canis familiaris
atgacattgttcttacacggcacaagcagacaaaatcaacatggtcatttagaaatcggaggtgtggatgctctctatttagcggagaaatatggtacacctctttacgtatatgatgtggctttaatacgtgagcgtgctaaaagctttaagcaggcgtttatttctgcagggctgaaagcacaggtggcatatgcgagcaaagcattctcatcagtcgcaatgattcagctcgctgaggaagagggactttctttagatgtcgtatccggagagagctatatacggctgttgcagcaggctttccggcagaacgcatccactttcatggaaacaataagagcagggaagaactgcggatggcgcttgagcaccgcatcggctgcattgtggtggataatttctatgaaatcgtcgcttcttgaagacctatgtaaagaaacgggtcactccatcgatgttcttcttcggatcacgcccggagtagaagcgcatacgcatgactacattacaacgggccaggaagattcaaagtttggtttcgatcttcataacggacaaactgaacgggccattgaacaagtattacaatcggaacacattcagctgctgggtgtccattgccatatcggctcgcaaatctttgatacggccggttttgtgttagcagcggaaaaaatcttcaaaaaactagacgaatggagagattcatattcatttgtatccaaggtgctgaatcttggaggaggtttcggcattcgttatacggaagatgatgaaccgcttcatgccactgaatacgttgaaaaaattatcgaagctgtgaaagaaaatgcttcccgttacggttttgacattccggaaatttggatcgaaccgggccgttctctcgtgggagacgcaggcacaactctttatacggttggctctcaaaaagaagtggataagctgtacaatcgtttcatcattcggcgtgcgaattaa

SEQ ID NO: 12287 - DNA, 984 bp, Canis familiaris; identical to SEQ ID NO: 12286

SEQ ID NO: 12288 - DNA, 984 bp, Canis familiaris; identical to SEQ ID NO: 12286

SEQ ID NO: 12289 - DNA, 1318 bp, Canis familiaris
atgaaagaggagacattttatcttgtccgtgaagatgtattgcccgatgcaatgagaaaaacattagaagtcaaaaagctgcttgatcgaaaaaaagcagattcagtagcagatgccgttcaaaaggtcgatttaagtagaagtgcgttttataaatacagggatgctgtttttccattctacaccatggtaaaagaacaaattatcacacttttctttcatttggaggataggtcaggtgcgttatctcagcttcttcaggcggtagctgattctggaagcaacgttctttccattcaccagaccattccgcttcaaggcagagcaaatgtgacactgtctatcagtacgtcggcaatggaagaagacattcatacattaatgaataagctcaggaagtttgattttgtagaaaaggttgaaatattaggttcaggtgcataagggagagaaaatcgtcatgaaagtcggttatttaggtccagcagctacatttacacatctagcagtcagttcttgttttcaaaacggcgccgaacatgttgcttaccgcaccattccggagtgtatagatgcagccgttgcaggcgaagttgattttgcttttgttcctttggaaaatgctttagaaggatctgttaatctaacaatagactatttaatacatgaacagcctttgccaatcgtgggtgaaatgacgttgccgattcaccagcacttgctcgtccatccctcaagagagaatgcatggaaagagctcgacaaaatttactcacattcacacgcgattgcgcaatgccataaatttcttcatcgacattttccttccgttccatatgaatacgccaattctaccggggcggcagcaaagtttgtcagtgaccatcccgagctgaatatcggggtcattgccaatgatatggcagcttctacatacgaattaaaaatcgtgaaacgggatatacaggattatagggacaatcatacaagatttgttatcctgtctcccgatgaaaacatatcttttgaagtgaattcaaaattgagctctaggcccaaaacgaccttaatggtcatgctgccgcaggatgatcagtccggggcgctgcatagagtgctgtctgcattttcttggagaaatttaaacctgtcaaaaattgagtcacgtccgactaaaaccggattaggccattatttctttattattgatattgagaaagcgtttgatgatgtattgattccaggggccatgcaggagcttgaagcactcggctgcaaagtgaggcttctgggtgcataccagtcttaccaattataa

SEQ ID NO: 12290 - DNA, 1318 bp, Canis familiaris; identical to SEQ ID NO: 12289

SEQ ID NO: 12291 - DNA, 1318 bp, Canis familiaris; identical to SEQ ID NO: 12289

SEQ ID NO: 12292 - DNA, 3953 bp, Canis familiaris
gggttcttacccatttaaagtttgaccaaacactaaggatgctgaagttccgaacagtccatgggggcctgaggctcctgggaatccgccgaacctccaccgcccccgctgcctccccaaatgtccggcgcctggagtataagcccatcaagaaagtcatggtggccaacagaggtgagattgccatccgtgtgttccgggcctgcacggagctgggcatccgcaccgtagccatctactctgagcaggacacgggccagatgcaccggcagaaagcagatgaagcctatctcatcggccgcggcctggcccccgtgcaggcctacctgcacatcccagacatcatcaaggtggccaaggagaacaacgtagatgcagtgcaccctggctacgggttcctctctgagcgagcggacttcgcccaggcctgccaggatgcaggggtccggtttattgggccaagcccagaagtggtccgcaagatgggagacaaggtggaggcccgggccatcgccattgctgcgggtgttcccgttgtccctggcacagatgcccccatcacgtccctgcatgaggcccacgagttctccaacacctacggcttccccatcatcttcaaggcggcctatgggggtggagggcgtggcatgagggtggtgcacagctacgaggagctggaggagaattacacccgggcctactcagaggctctggccgcctttgggaatggggcgctgtttgtggagaagttcatcgagaagccacggcacatcgaggtgcagatcttgggggaccagtatgggaacatcctgcacctgtacgagcgagactgctccatccagcggcggcaccagaaggtggtcgagattgcccccgccgcccacctggacccgcagcttcggactcggctcaccagcgactctgtgaaactcgctaaacaggtgggctacgagaacgcaggcaccgtggagttcctggtggacaggcacggcaagcactacttcatcgaggtcaactcccgcctgcaggtggagcacacggtcacagaggagatcaccgacgtagacctggtccatgctcagatccacgtggctgagggcaggagcctacccgacctgggcctgcggcaggagaacatccgcatcaacgggtgtgccatccagtgccgggtcaccaccgaggaccccgcgcgcagcttccagccggacaccggccgcattgaggtgttccggagcggagagggcatgggcatccgcctggataatgcttccgccttccaaggagccgtcatctcgccccactacgactccctgctggtcaaagtcattgcccacggcaaagaccaccccacggccgccaccaagatgagcagggcccttgcggagttccgcgtccgaggtgtgaagaccaacatcgccttcctgcagaatgtgctcaacaaccagcagttcctggcaggcactgtggacacccagttcatcgacgagaacccagagctgttccagctgcggcctgcacagaaccgggcccaaaagctgttgcactacctcggccatgtcatggtaaacggtccaaccaccccgattcccgtcaaggccagccccagccccacggaccccgttgtccctgcagtgcccataggcccgcccccggctggtttcagagacatcctgctgcgagaggggcctgagggctttgctcgagctgtgcggaaccacccggggctgctgctgatggacacgaccttcagggacgcccaccagtcactgctggccactcgtgtgcgcacccacgatctcaaaaagatcgccccctatgttgcccacaacttcagcaagctcttcagcatggagaactggggaggagccacgtttgacgtcgccatgcgcttcctgtatgagtgcccctggcggcggctgcaggagctccgggagctcatccccaacatccctttccagatgctgctgcggggggccaatgctgtgggctacaccaactacccagacaacgtggtcttcaagttctgtgaagtggccaaagagaatggcatggatgtcttccgtgtgtttgactccctcaactacttgcccaacatgctgctgggcatggaggcggcaggaagtgccggaggcgtggtggaggctgccatctcatacacgggcgacgtggccgaccccagccgcaccaagtactcactgcagtactacatgggcttggccgaagagctggtgcgagctggcacccacatcctgtgcatcaaggacatggccgggctgctgaagcccacggcctgcaccatgctggtcagctccctccgggaccgcttccccgacctcccactgcacatccacacccacgacacgtcaggggcaggcgtggcagccatgctggcctgtgcccaggctggagctgatgtggtggatgtggcagctgattccatgtctgggatgacttcacagcccagcatgggggccctggtggcctgtaccagagggactcccctggacacagaggtgcccatggagcgcgtgtttgactacagtgagtactgggagggggctcggggactgtacgcggccttcgactgcacggccaccatgaagtctggcaactcggacgtgtatgaaaatgagatcccagggggccagtacaccaacctgcacttccaggcccacagcatggggcttggctccaagttcaaggaggtcaagaaggcctatgtggaggccaaccagatgctgggcgatctcatcaaggtgacgccctcctccaagatcgtgggggacctggcccagtttatggtgcagaatggattgagccgggcagaggccgaagctcaggcggaagagctgtcctttccccgctccgtggtggagttcctgcagggctacatcggtgtcccccatggggggttccccgaaccctttcgctctaaggtactgaaggacctgccaagggtggaggggcggcctggagcctccctccctcccctggatctgcaggcactggagaaggagctggtagaccggcatggggaggaggtgacgccggaagatgtgctctcagcagctatgtaccccgatgtgtttgcccacttcaaggacttcactgccacctttggccccctggatagcctgaatactcgcctcttcctgcagggacccaagatcgcagaggagtttgaggtggagctggagcggggcaagacgctgcacatcaaagccctggccgtgagcgacctgaaccgggccggccagaggcaggtcttctttgagctcaatgggcagctgcggtccatcttggtcaaggacacccaggccatgaaggagatgcacttccaccccaaggccctaaaggacgtgaagggccagatcggggcgcccatgcctgggaaggtgatagacatcaaagtggtggcaggggccaaggtggccaagggccagcccctgtgtgtgctcagtgccatgaagatggagactgtggtgacctcacccatggagggtactgtccgcaaggttcatgtgaccaaggacatgacactggaaggtgacgacctcatcctggagatcgagtgatcttgccccagaccggcagcctggccatccccaagccttcaacagaagctgtgctgccacggcaggcccaggccagccagtgcccgaggccaggaaggccgggccgtggaggtcctgtgtccacagctggacaggagagacaccgcctgcggtggttcattcctttcagccatcgtcctttcctccggcggacagctgcttacatgttcatctcttgccaaataagggtcccctcctcactggagactacaagtggtgggtcaggtggtcctaggacccaggggaggtttaggggtcctatctcctgggggaaggggagatcaagatgtcccaggtcctgggaagtttactcaataaagctggctttcccctgccctc

SEQ ID NO: 12293 - DNA, 4067 bp, Canis familiaris; identical to SEQ ID NO: 12222

SEQ ID NO: 12294 - DNA, 3953 bp, Canis familiaris; identical to SEQ ID NO: 12292

SEQ ID NO: 12295 - DNA, 4067 bp, Canis familiaris; identical to SEQ ID NO: 12222

SEQ ID NO: 12296 - DNA, 3953 bp, Canis familiaris; identical to SEQ ID NO: 12292

SEQ ID NO: 12297 - DNA, 4067 bp, Canis familiaris; identical to SEQ ID NO: 12222

SEQ ID NO: 12298 - DNA, 3953 bp, Canis familiaris; identical to SEQ ID NO: 12292

SEQ ID NO: 12299 - DNA, 4067 bp, Canis familiaris; identical to SEQ ID NO: 12222

SEQ ID NO: 12300 - DNA, 1982 bp, Canis familiaris
atgtggaaaggacttatccatcaatataaagaatttttacctgtaacagatcaaacaccggcgctaactttacatgaaggaaacacacctcttattcacctgccgaagctgtctgagcagctcggaattgagcttcatgtcaaaacggaaggcgtcaatcctacgggatcatttaaagatcgcggaatggttatggctgtggcaaaggcaaaagaagaaggcaatgacacgattatgtgcgcgtcaacaggtaacacttccgctgctgcggcagcatatgcagcccgtgctaacatgaaatgcattgtcatcatcccgaacggaaaaattgcatttggaaaactcgctcaagctgtcatgtacggagccgagattatcgcaattgacggaaactttgacgatgcgcttaaaattgtccgttccatctgtgagaaatcaccgattgcccttgtcaactcagtcaacccttaccgcattgaaggccaaaaaactgctgccttcgaagtgtgcgaacagctgggggaagcgcctgatgttttagcgatcccggtcggaaatgctggaaacatcactgcgtactggaagggcttcaaggaatatcatgagaaaaacggcacaggccttccgaaaatgcgcggctttgaagctgagggtgcggcggcaatcgtgcgcaatgaagtgattgaaaatccggaaacaatagcgacagccattcgtatcggaaacccggcaagctgggacaaagctgtaaaggcagccgaggaatccaatgggaaaattgacgaagtcactgatgatgaaatccttcacgcatatcagctgatcgcccgtgtagaaggcgtgtttgcagaaccaggttcttgcgcgtctatcgcaggagtgctgaaacaggtgaaatccggagaaattccgaaaggcagcaaggtcgtagctgtgttaacaggaaacggactgaaagatccgaacacagcggtcgacatttcagaaatcaagcctgtcacattgccgactgatgaagacagcatccttgaatatgtaaaaggagcggcccgtgtatgaacgaagccgacatgctgttctctgtcactgttcccggaagcacagctaacctaggccccggctttgattcagtcggaatggcgctcagcagatatttgaagctgaccgtctttgaaagcgacaaatggtcttttgaggctgaaacagaaacagtcgccggaattcgcggtacagataacctgatctaccaagtggctaaacggaccgcagatttgtacggaaaagaaatgcctcctgtccatgtgaaggtgtggagcgacatcccgcttgcacgcggccttggcagcagcgccgcagcgattgtagcggccattgaactggctgatgaattatgcggcttaaagctgtctgaagcggacaagctgcatttagcgagtctagaagaaggacacccggacaatgctggcgcttctctcgtcggcggacttgtgatcggcctgcatgaggatgacgagacccaaatgatccgcgtcccgaatgctgacattgacgtagtcgttgtcattcctttttatgaagtgctgacaagagacgcgagagacgtgcttccgaaggagtttccatatgccgatgccgtaaaagcaagtgctgtcagcaatatcctcattgctgcgatcatgtccaaggattggccgcttgtcgggaaaatcatgaagaaggatatgttccatcagccgtaccgggcgatgcttgtgcctgagctgtcaaaagtagagcacgtcgccgagatgaagggcgcatatggaacggctctcagcggagcaggcccaacgattctcgtcatgaccgaaaaaggaaagggagaagagctaaaagaacagctcgcgcttcatttccctcattgtgaagtagacgctttgaccgttccgaaagagggaagtataatagagcgaaatcctttatatcaagtaaaaagtgtatag

SEQ ID NO: 12301 - DNA, 1982 bp, Canis familiaris; identical to SEQ ID NO: 12300

SEQ ID NO: 12302 - DNA, 1982 bp, Canis familiaris; identical to SEQ ID NO: 12300

SEQ ID NO: 12303 - DNA, 2826 bp, Canis familiaris
ccggttaggggccgccatcccctcagagcgtcgggatatcgggtggcggctcgggacggaggacgcgctagtgttcttctgtgtggcagttcagaatgatggatcaagctagatcagcattctctaacttgtttggtggagaaccattgtcatatacccggttcagcctggctcggcaagtagatggcgataacagtcatgtggagatgaaacttgctgtagatgaagaagaaaatgctgacaataacacaaaggccaatgtcacaaaaccaaaaaggtgtagtggaagtatctgctatgggactattgctgtgatcgtctttttcttgattggatttatgattggctacttgggctattgtaaaggggtagaaccaaaaactgagtgtgagagactggcaggaaccgagtctccagtgagggaggagccaggagaggacttccctgcagcacgtcgcttatattgggatgacctgaagagaaagttgtcggagaaactggacagcacagacttcaccagcaccatcaagctgctgaatgaaaattcatatgtccctcgtgaggctggatctcaaaaagatgaaaatcttgcgttgtatgttgaaaatcaatttcgtgaatttaaactcagcaaagtctggcgtgatcaacattttgttaagattcaggtcaaagacagcgctcaaaactcggtgatcatagttgataagaacggtagacttgtttacctggtggagaatcctgggggttatgtggcgtatagtaaggctgcaacagttactggtaaactggtccatgctaattttggtactaaaaaagattttgaggatttatacactcctgtgaatggatctatagtgattgtcagagcagggaaaatcacgtttgcagaaaaggttgcaaatgctgaaagcttaaatgcaattggtgtgttgatatacatggaccagactaaatttcccattgttaacgcagaactttcattctttggacatgctcatctggggacaggtgacccttacacacctggattcccttccttcaatcacactcagtttccaccatctcggtcatcaggattgcctaatatacctgtccagacaatctccagagctgctgcagaaaagctgtttgggaatatggaaggagactgtccctctgactggaaaacagactctacatgtaggatggtaacctcagaaagcaagaatgtgaagctcactgtgagcaatgtgctgaaagagataaaaattcttaacatctttggagttattaaaggctttgtagaaccagatcactatgttgtagttggggcccagagagatgcatggggccctggagctgcaaaatccggtgtaggcacagctctcctattgaaacttgcccagatgttctcagatatggtcttaaaagatgggtttcagcccagcagaagcattatctttgccagttggagtgctggagactttggatcggttggtgccactgaatggctagagggatacctttcgtccctgcatttaaaggctttcacttatattaatctggataaagcggttcttggtaccagcaacttcaaggtttctgccagcccactgttgtatacgcttattgagaaaacaatgcaaaatgtgaagcatccggttactgggcaatttctatatcaggacagcaactgggccagcaaagttgagaaactcactttagacaatgctgctttccctttccttgcatattctggaatcccagcagtttctttctgtttttgcgaggacacagattatccttatttgggtaccaccatggacacctataaggaactgattgagaggattcctgagttgaacaaagtggcacgagcagctgcagaggtcgctggtcagttcgtgattaaactaacccatgatgttgaattgaacctggactatgagaggtacaacagccaactgctttcatttgtgagggatctgaaccaatacagagcagacataaaggaaatgggcctgagtttacagtggctgtattctgctcgtggagacttcttccgtgctacttccagactaacaacagatttcgggaatgctgagaaaacagacagatttgtcatgaagaaactcaatgatcgtgtcatgagagtggagtatcacttcctctctccctacgtatctccaaaagagtctcctttccgacatgtcttctggggctccggctctcacacgctgccagctttactggagaacttgaaactgcgtaaacaaaataacggtgcttttaatgaaacgctgttcagaaaccagttggctctagctacttggactattcagggagctgcaaatgccctctctggtgacgtttgggacattgacaatgagttttaaatgtgatacccatagcttccatgagaacagcagggtagtctggtttctagacttgtgctgatcgtgctaaattttcagtaggcctacaaaacctgatgttaaaattccatcccatcatcttggtactactagatgtctttaggcagcagcttttaatacagggtagataacctgtacttcaagttaaagtgaataaccacttaaaaaatgtccatgatggaatattcccctatctctagaattttaagtgctttgtaatgggaactgcctctttcctgttgttgttaatgaaaatgtcagaaaccagttatgtgaatgatctctctgaatcctaagggctggtctctgctgaaggttgtaagtggtcgcttactttgagtgatcctccaacttcatttgatgctaaataggagataccaggttgaaagaccttctccaaatgagatct

SEQ ID NO: 12304 - DNA, 2292 bp, Canis familiaris; identical to SEQ ID NO: 12250

SEQ ID NO: 12305 - DNA, 2826 bp, Canis familiaris; identical to SEQ ID NO: 12303

SEQ ID NO: 12306 - DNA, 2292 bp, Canis familiaris; identical to SEQ ID NO: 12250

SEQ ID NO: 12307 - DNA, 2826 bp, Canis familiaris; identical to SEQ ID NO: 12303

SEQ ID NO: 12308 - DNA, 2292 bp, Canis familiaris; identical to SEQ ID NO: 12250

SEQ ID NO: 12309 - DNA, 2525 bp, Canis familiaris; identical to SEQ ID NO: 12253

SEQ ID NO: 12310 - DNA, 2525 bp, Canis familiaris; identical to SEQ ID NO: 12253

SEQ ID NO: 12311 - DNA, 2525 bp, Canis familiaris; identical to SEQ ID NO: 12253

SEQ ID NO: 12312 - DNA, 25 bp, Canis familiaris
ttaactcttagtctccgttggaaca

SEQ ID NO: 12313 - DNA, 25 bp, Canis familiaris
gggacttcacggtaacgtctgtcta

SEQ ID NO: 12314 - DNA, 25 bp, Canis familiaris
aatgggttcctatcgaaccgctttg

SEQ ID NO: 12315 - DNA, 25 bp, Canis familiaris
cactttgtcctgcggccaaaggtcg

SEQ ID NO: 12316 - DNA, 25 bp, Canis familiaris
caatcttggccgtggggtcggttgg

SEQ ID NO: 12317 - DNA, 25 bp, Canis familiaris
aagggccggaagttcgagcgtgcca

SEQ ID NO: 12318 - DNA, 25 bp, Canis familiaris
aagggccggaagttcgagcgtgcca

SEQ ID NO: 12319 - DNA, 25 bp, Canis familiaris
tggaagggcctagctttgtttcctg

SEQ ID NO: 12320 - DNA, 25 bp, Canis familiaris
tcccgggatcgtgaggttacctagc

SEQ ID NO: 12321 - DNA, 25 bp, Canis familiaris
ggactccaaaatgaagggaaccctg

SEQ ID NO: 12322 - DNA, 25 bp, Canis familiaris
tcctccctaatataccgggttcact

SEQ ID NO: 12323 - DNA, 25 bp, Canis familiaris
cttctttagggcaaccctccatagc

SEQ ID NO: 12324 - DNA, 25 bp, Canis familiaris
ctaccttccggtagccctggaagtg

SEQ ID NO: 12325 - DNA, 25 bp, Canis familiaris
gaacggtcccggatacgttagattg

SEQ ID NO: 12326 - DNA, 25 bp, Canis familiaris
gttcggtacggtcaccagttaactg

SEQ ID NO: 12327 - DNA, 25 bp, Canis familiaris
gtggggctaccataggttttactct

SEQ ID NO: 12328 - DNA, 25 bp, Canis familiaris
atgtcacgattataggggttttctt

SEQ ID NO: 12329 - DNA, 25 bp, Canis familiaris
agccatccttacgcataaacgggct

SEQ ID NO: 12330 - DNA, 25 bp, Canis familiaris
gggtccctattctgtttcggaccat

SEQ ID NO: 12331 - DNA, 25 bp, Canis familiaris
tggacttggttggtaaggccctaat

SEQ ID NO: 12332 - DNA, 25 bp, Canis familiaris
gcgacgtgtttcgccactaaaaacg

SEQ ID NO: 12333 - DNA, 25 bp, Canis familiaris
gcaacaaggttgggccgttaagttg

SEQ ID NO: 12334 - DNA, 25 bp, Canis familiaris
tacgacgaaggggtcctattgttct

SEQ ID NO: 12335 - DNA, 25 bp, Canis familiaris
accaaacccagagcacgttgtttct

SEQ ID NO: 12336 - DNA, 25 bp, Canis familiaris
acacttccccgacaagacgttagtg

SEQ ID NO: 12337 - DNA, 25 bp, Canis familiaris
acttacccagttctcttattgggtg

SEQ ID NO: 12338 - DNA, 25 bp, Canis familiaris
atggttgaccctaacctttgtgtag

SEQ ID NO: 12339 - DNA, 25 bp, Canis familiaris
cgtttacgccggtttctatggatag

SEQ ID NO: 12340 - DNA, 25 bp, Canis familiaris
cctacccgcctagaactaaagcttg

SEQ ID NO: 12341 - DNA, 25 bp, Canis familiaris
cccgtgcctgagtaccaaaatacca

SEQ ID NO: 12342 - DNA, 25 bp, Canis familiaris
cccgttggccaagcgcaatttccgg

SEQ ID NO: 12343 - DNA, 25 bp, Canis familiaris
accggtggcgaggtcggttgccacg

SEQ ID NO: 12344 - DNA, 25 bp, Canis familiaris
accggtaagtggggctagatctatg

SEQ ID NO: 12345 - DNA, 25 bp, Canis familiaris
aaatgtaaatgcgtagatggaagga

SEQ ID NO: 12346 - DNA, 25 bp, Canis familiaris
aaagctcggttcagaaacggttcag

SEQ ID NO: 12347 - DNA, 25 bp, Canis familiaris
cgggagccggtgagaaaccgagttg

SEQ ID NO: 12348 - DNA, 25 bp, Canis familiaris
tcgggcctaaccattattcctggaa

SEQ ID NO: 12349 - DNA, 25 bp, Canis familiaris
cgaacctaaactctcgaccgtgaag

SEQ ID NO: 12350 - DNA, 25 bp, Canis familiaris
gccaatgttaaatccggaaccacca

SEQ ID NO: 12351 - DNA, 25 bp, Canis familiaris
aaactattattagaaggtcgccgct

SEQ ID NO: 12352 - DNA, 25 bp, Canis familiaris
aaacttagtaaagagcttcctagag

SEQ ID NO: 12353 - DNA, 25 bp, Canis familiaris
agtaagtatacatacccccgacagt

SEQ ID NO: 12354 - DNA, 25 bp, Canis familiaris
atatagtttcaatacccccgtacat

SEQ ID NO: 12355 - DNA, 25 bp, Canis familiaris
ctgaacttgtgagaattcgccctta

SEQ ID NO: 12356 - DNA, 25 bp, Canis familiaris
ggaattacggtctgacggtcttaga

SEQ ID NO: 12357 - DNA, 25 bp, Canis familiaris
agtttccacggtgacagggcctaat

SEQ ID NO: 12358 - DNA, 25 bp, Canis familiaris
agtcgaccgcgtcaacgaagttgac

SEQ ID NO: 12359 - DNA, 25 bp, Canis familiaris
ggtcggagggtcccaaggagtatag

SEQ ID NO: 12360 - DNA, 25 bp, Canis familiaris
agtccgaagaccaccagaacttgga

SEQ ID NO: 12361 - DNA, 25 bp, Canis familiaris
caccctgtaatctcgtaattcggga

SEQ ID NO: 12362 - DNA, 25 bp, Canis familiaris
cccggtcgacactgttacttagtca

SEQ ID NO: 12363 - DNA, 25 bp, Canis familiaris
cccggactccggtgatgtcctagta

SEQ ID NO: 12364 - DNA, 25 bp, Canis familiaris
cccaaactacgtgtcaccttcaggt

SEQ ID NO: 12365 - DNA, 25 bp, Canis familiaris
accaacttatttcttccttaggatg

SEQ ID NO: 12366 - DNA, 25 bp, Canis familiaris
agccgttccatcactaggtctaaaa

SEQ ID NO: 12367 - DNA, 25 bp, Canis familiaris
agatgggtcgacagtacgtcccacg

SEQ ID NO: 12368 - DNA, 25 bp, Canis familiaris
tagtgggccgatctaacccgaaaag

SEQ ID NO: 12369 - DNA, 25 bp, Canis familiaris
aggctccaggagtctaactttcaaa

SEQ ID NO: 12370 - DNA, 25 bp, Canis familiaris
aaatataaagccacctttgccctag

SEQ ID NO: 12371 - DNA, 25 bp, Canis familiaris
cggtgcaaaattccggatttccctg

SEQ ID NO: 12372 - DNA, 25 bp, Canis familiaris
cggttaggagtaggcgtccggactg

SEQ ID NO: 12373 - DNA, 25 bp, Canis familiaris
ccaggtaggggtgcgtactggcccg

SEQ ID NO: 12374 - DNA, 25 bp, Canis familiaris
agacgtagtaggtgaccctgtgtcc

SEQ ID NO: 12375 - DNA, 25 bp, Canis familiaris
agtcctggaaggagagggtcccaca

SEQ ID NO: 12376 - DNA, 25 bp, Canis familiaris
aaccccaaatgtatggattccccag

SEQ ID NO: 12377 - DNA, 25 bp, Canis familiaris
cgcacgtctaatgtattaaccccca

SEQ ID NO: 12378 - DNA, 25 bp, Canis familiaris
cgactttttcggattatcccaccat

SEQ ID NO: 12379 - DNA, 25 bp, Canis familiaris
gggcttttaaggtgtgccctaaatg

SEQ ID NO: 12380 - DNA, 25 bp, Canis familiaris
ggaatttttaactgtcaccggtatg

SEQ ID NO: 12381 - DNA, 25 bp, Canis familiaris
ttcaacctcctatccaaaacggtcg

SEQ ID NO: 12382 - DNA, 25 bp, Canis familiaris
caggacacgtctctacaaaccgttt

SEQ ID NO: 12383 - DNA, 25 bp, Canis familiaris
aaaagcggtcttgaccggcggcttg

SEQ ID NO: 12384 - DNA, 25 bp, Canis familiaris
tgtggaaccttacaacggggactca

SEQ ID NO: 12385 - DNA, 25 bp, Canis familiaris
atacacgtccaagggagcggtcgac

SEQ ID NO: 12386 - DNA, 25 bp, Canis familiaris
ataaagttcctgtggttgtgcccga

SEQ ID NO: 12387 - DNA, 25 bp, Canis familiaris
ataaccgtttgtgaccttacattat

SEQ ID NO: 12388 - DNA, 25 bp, Canis familiaris
aaagggtaatgtgtttctgagttca

SEQ ID NO: 12389 - DNA, 25 bp, Canis familiaris
aaacggaaatgtgtagtcgagcctt

SEQ ID NO: 12390 - DNA, 25 bp, Canis familiaris
aacttgtaaaatgtggggatccctg

SEQ ID NO: 12391 - DNA, 25 bp, Canis familiaris
acgttttacctcacaagactccgtg

SEQ ID NO: 12392 - DNA, 25 bp, Canis familiaris
aggaatttcgtctccaaagtctaat

SEQ ID NO: 12393 - DNA, 25 bp, Canis familiaris
cggaaatgaagtgcccaaagccccg

SEQ ID NO: 12394 - DNA, 25 bp, Canis familiaris
atggccgtaagtgaacccggcattc

SEQ ID NO: 12395 - DNA, 25 bp, Canis familiaris
ctgggagtcctagaaacccctggtg

SEQ ID NO: 12396 - DNA, 25 bp, Canis familiaris
ctcgcgaatccgtgtaaagtaatgg

SEQ ID NO: 12397 - DNA, 25 bp, Canis familiaris
ctcggggctagctgtaatctttacg

SEQ ID NO: 12398 - DNA, 25 bp, Canis familiaris
tgtctgggtcccagggtttggggca

SEQ ID NO: 12399 - DNA, 25 bp, Canis familiaris
gcccatgtctaacggggttacgttg

SEQ ID NO: 12400 - DNA, 25 bp, Canis familiaris
acctttagcccctgtaattgttgct

SEQ ID NO: 12401 - DNA, 25 bp, Canis familiaris
acacctaaaccctgtattcgctgaa

SEQ ID NO: 12402 - DNA, 25 bp, Canis familiaris
atcatttaccggagggttctgtgac

SEQ ID NO: 12403 - DNA, 25 bp, Canis familiaris
attccccattggagctggtttgttc

SEQ ID NO: 12404 - DNA, 25 bp, Canis familiaris
agtacttcatccgcgacgaatttct

SEQ ID NO: 12405 - DNA, 25 bp, Canis familiaris
cagtcaaggaaagcgtaacgtttga

SEQ ID NO: 12406 - DNA, 25 bp, Canis familiaris
ccgaggaagacgagcccacgttaga

SEQ ID NO: 12407 - DNA, 25 bp, Canis familiaris
cggaggtgggaacacccgtggtgag

SEQ ID NO: 12408 - DNA, 25 bp, Canis familiaris
acgggagtaggagaccccgcgagag

SEQ ID NO: 12409 - DNA, 25 bp, Canis familiaris
agcctcggggaagaagccacccagt

SEQ ID NO: 12410 - DNA, 25 bp, Canis familiaris
accttaaagtgatcttccccgatgt

SEQ ID NO: 12411 - DNA, 25 bp, Canis familiaris
accagtgtacgtgaccctctactgg

SEQ ID NO: 12412 - DNA, 25 bp, Canis familiaris
atcaaaggaagtgccccctgcaata

SEQ ID NO: 12413 - DNA, 25 bp, Canis familiaris
atcaacggaaatgtccttccttgta

SEQ ID NO: 12414 - DNA, 25 bp, Canis familiaris
atcacgggaatttttcggcctggag

SEQ ID NO: 12415 - DNA, 25 bp, Canis familiaris
cccgggagttactcccttgaagatg

SEQ ID NO: 12416 - DNA, 25 bp, Canis familiaris
cgttggattttacacccttagcaca

SEQ ID NO: 12417 - DNA, 25 bp, Canis familiaris
ggtaagcttaaacaccttttcagag

SEQ ID NO: 12418 - DNA, 25 bp, Canis familiaris
gggtgaggaaaacaacttgggtctg

SEQ ID NO: 12419 - DNA, 25 bp, Canis familiaris
agcggggaaccctgaacaggtcctg

SEQ ID NO: 12420 - DNA, 25 bp, Canis familiaris
gaagactaaaccacctaagggccag

SEQ ID NO: 12421 - DNA, 25 bp, Canis familiaris
agaatcctaaccaccaggaagccac

SEQ ID NO: 12422 - DNA, 25 bp, Canis familiaris
aggtgccttagataccgaaaccaca

SEQ ID NO: 12423 - DNA, 25 bp, Canis familiaris
atgacgtcttcgtgggtccacgggc

SEQ ID NO: 12424 - DNA, 25 bp, Canis familiaris
atgacgtcttcgtgggtccacgggc

SEQ ID NO: 12425 - DNA, 25 bp, Canis familiaris
ttataactacggcggtccttggtct

SEQ ID NO: 12426 - DNA, 25 bp, Canis familiaris
ttttaaagcccgaggcccagatcca

SEQ ID NO: 12427 - DNA, 25 bp, Canis familiaris
ttcttttcccggagatgggaattct

SEQ ID NO: 12428 - DNA, 25 bp, Canis familiaris
attaaccccggagaaggacaatcag

SEQ ID NO: 12429 - DNA, 25 bp, Canis familiaris
aaaagccgtccctgagcaaaaatgg

SEQ ID NO: 12430 - DNA, 25 bp, Canis familiaris
aacagttcctccacctgaaaataat

SEQ ID NO: 12431 - DNA, 25 bp, Canis familiaris
gccggttcccagaaccgtcacaaga

SEQ ID NO: 12432 - DNA, 25 bp, Canis familiaris
tggctttgtggctgtcccgacaaag

SEQ ID NO: 12433 - DNA, 25 bp, Canis familiaris
cctttgggacccgagccaagtagtg

SEQ ID NO: 12434 - DNA, 25 bp, Canis familiaris
acattagtgtggtgctacaaaaagt

SEQ ID NO: 12435 - DNA, 25 bp, Canis familiaris
gtaaactgggttcaaaatccttcat

SEQ ID NO: 12436 - DNA, 25 bp, Canis familiaris
gtaatccaatggtgggaaagacggt

SEQ ID NO: 12437 - DNA, 25 bp, Canis familiaris
ggtcctccggtgcaaaattccggat

SEQ ID NO: 12438 - DNA, 25 bp, Canis familiaris
gtgggtctccaacaaacttacccag

SEQ ID NO: 12439 - DNA, 25 bp, Canis familiaris
agtgggacaaagcaaccctacacga

SEQ ID NO: 12440 - DNA, 25 bp, Canis familiaris
gcggggaaaaacacctatactctca

SEQ ID NO: 12441 - DNA, 25 bp, Canis familiaris
agggggagggaatcctcaactcctg

SEQ ID NO: 12442 - DNA, 25 bp, Canis familiaris
agtgggattggtcaacctaccttgc

SEQ ID NO: 12443 - DNA, 25 bp, Canis familiaris
agttggtttacataattacgctttg

SEQ ID NO: 12444 - DNA, 25 bp, Canis familiaris
gctgtgggttttctaaccaggtttg

SEQ ID NO: 12445 - DNA, 25 bp, Canis familiaris
ctctactttggggtctacctggtat

SEQ ID NO: 12446 - DNA, 25 bp, Canis familiaris
ctcccttgcaagcgtggacctaaag

SEQ ID NO: 12447 - DNA, 25 bp, Canis familiaris
accacgtccgacataacctagaaga

SEQ ID NO: 12448 - DNA, 25 bp, Canis familiaris
aggccaatccgaataaacgtctcaa

SEQ ID NO: 12449 - DNA, 25 bp, Canis familiaris
cgttaaccgattaggaggtaacatg

SEQ ID NO: 12450 - DNA, 25 bp, Canis familiaris
cggctaaaccacagcgttgccaaag

SEQ ID NO: 12451 - DNA, 25 bp, Canis familiaris
agtaaaaagagctggttaaatgata

SEQ ID NO: 12452 - DNA, 25 bp, Canis familiaris
acggagtaagtctggttgctatttt

SEQ ID NO: 12453 - DNA, 25 bp, Canis familiaris
caagggaaggtcacggtcaagtacg

SEQ ID NO: 12454 - DNA, 25 bp, Canis familiaris
ctacgggacttcacggtaacgtctg

SEQ ID NO: 12455 - DNA, 25 bp, Canis familiaris
gtacgacgaacctccaggaatcgac

SEQ ID NO: 12456 - DNA, 25 bp, Canis familiaris
atttgaaaactgctcctggtggggc

SEQ ID NO: 12457 - DNA, 25 bp, Canis familiaris
atttccttttacacggttgagcctg

SEQ ID NO: 12458 - DNA, 25 bp, Canis familiaris
gaacaccatttatcgccgggaaggg

SEQ ID NO: 12459 - DNA, 25 bp, Canis familiaris
gaaacaatttaacacggaaacagct

SEQ ID NO: 12460 - DNA, 25 bp, Canis familiaris
agttcaacaagacaccggacaaaca

SEQ ID NO: 12461 - DNA, 25 bp, Canis familiaris
cgaaaccgacttgcacgggtcaaca

SEQ ID NO: 12462 - DNA, 25 bp, Canis familiaris
gcgaacaacgccaggctcggttaac

SEQ ID NO: 12463 - DNA, 25 bp, Canis familiaris
cgcaccccccttgctgggggtgctt

SEQ ID NO: 12464 - DNA, 25 bp, Canis familiaris
caacgggacggagcgggtgcggttg

SEQ ID NO: 12465 - DNA, 25 bp, Canis familiaris
caacgggacggagcgggtgcggttg

SEQ ID NO: 12466 - DNA, 25 bp, Canis familiaris
caacgggacggagcgggtgcggttg

SEQ ID NO: 12467 - DNA, 25 bp, Canis familiaris
tttctgggaaaagaggaccttgttg

SEQ ID NO: 12468 - DNA, 25 bp, Canis familiaris
gttgtgcgattagaatttacgggtt

SEQ ID NO: 12469 - DNA, 25 bp, Canis familiaris
gtctaatttaggcatttaccccttg

SEQ ID NO: 12470 - DNA, 25 bp, Canis familiaris
gaccgatttaggagggtccaactcg

SEQ ID NO: 12471 - DNA, 25 bp, Canis familiaris
accaacaagaagtgggtccggctcg

SEQ ID NO: 12472 - DNA, 25 bp, Canis familiaris
ttggaccaaaaacaggacctgggca

SEQ ID NO: 12473 - DNA, 25 bp, Canis familiaris
ttgaaaagttagctctccccggaga

SEQ ID NO: 12474 - DNA, 25 bp, Canis familiaris
agaaaatgggggtgccctccaagct

SEQ ID NO: 12475 - DNA, 25 bp, Canis familiaris
aggaatttgggggtgggtgccacag

SEQ ID NO: 12476 - DNA, 25 bp, Canis familiaris
ctgacttttcggacggtttatccag

SEQ ID NO: 12477 - DNA, 25 bp, Canis familiaris
caagtggttgggtccctaattacag

SEQ ID NO: 12478 - DNA, 25 bp, Canis familiaris
caaggcaaaggcaccaaacttaggc

SEQ ID NO: 12479 - DNA, 25 bp, Canis familiaris
ctaggacgacgaaccgacacggagg

SEQ ID NO: 12480 - DNA, 25 bp, Canis familiaris
aggtgaacaagtctaaccgggatgc

SEQ ID NO: 12481 - DNA, 25 bp, Canis familiaris
agggtaccggttctggaaggcatgc

SEQ ID NO: 12482 - DNA, 25 bp, Canis familiaris
agacctatccggtgttgtgagggtt

SEQ ID NO: 12483 - DNA, 25 bp, Canis familiaris
agacctagggaggggtacctggatg

SEQ ID NO: 12484 - DNA, 25 bp, Canis familiaris
atcctctgacggtggtaaggggacg

SEQ ID NO: 12485 - DNA, 25 bp, Canis familiaris
acatggtagtactggaaatttcgac

SEQ ID NO: 12486 - DNA, 25 bp, Canis familiaris
aggctgtggtactggaaacctcctt

SEQ ID NO: 12487 - DNA, 25 bp, Canis familiaris
agaggtgaaaaagtacaaagcccat

SEQ ID NO: 12488 - DNA, 25 bp, Canis familiaris
aagggactaaactccaagcttctgg

SEQ ID NO: 12489 - DNA, 25 bp, Canis familiaris
acaaagtccaaagaggtactgaagg

SEQ ID NO: 12490 - DNA, 25 bp, Canis familiaris
agcaaaggacacacggggttaagag

SEQ ID NO: 12491 - DNA, 25 bp, Canis familiaris
agaaaagggctacagttcttagcag

SEQ ID NO: 12492 - DNA, 25 bp, Canis familiaris
gttccaaggtccaaacttcaaggct

SEQ ID NO: 12493 - DNA, 25 bp, Canis familiaris
gtaagttggccagatacggacctga

SEQ ID NO: 12494 - DNA, 25 bp, Canis familiaris
atcaactttgaccccacaggttcat

SEQ ID NO: 12495 - DNA, 25 bp, Canis familiaris
caacgttataagtctaaggtgttag

SEQ ID NO: 12496 - DNA, 25 bp, Canis familiaris
agaggttaacgtcacttgttccagc

SEQ ID NO: 12497 - DNA, 25 bp, Canis familiaris
aggcccgaacagctactgtttgcct

SEQ ID NO: 12498 - DNA, 25 bp, Canis familiaris
atagagcccaaatttagtttagcct

SEQ ID NO: 12499 - DNA, 25 bp, Canis familiaris
aaagttgggtatgaatttaatcaat

SEQ ID NO: 12500 - DNA, 25 bp, Canis familiaris
atactattgggtattttccccagat

SEQ ID NO: 12501 - DNA, 25 bp, Canis familiaris
aaagattcggtcatttttcgggcag

SEQ ID NO: 12502 - DNA, 25 bp, Canis familiaris
atacttactgttctaatttggtggt

SEQ ID NO: 12503 - DNA, 25 bp, Canis familiaris
cgtgattttgggagaccttggggct

SEQ ID NO: 12504 - DNA, 25 bp, Canis familiaris
cgtagaaggtgatggccgtttgggt

SEQ ID NO: 12505 - DNA, 25 bp, Canis familiaris
tggttaagggactgggtccggtgtg

SEQ ID NO: 12506 - DNA, 25 bp, Canis familiaris
actcgttgggactcagttccggaat

SEQ ID NO: 12507 - DNA, 25 bp, Canis familiaris
accgtacaaagcacgaggccgaaat

SEQ ID NO: 12508 - DNA, 25 bp, Canis familiaris
accttaagtgggcaatgggcgaaga

SEQ ID NO: 12509 - DNA, 25 bp, Canis familiaris
aggtttaagtgtcacatggccccag

SEQ ID NO: 12510 - DNA, 25 bp, Canis familiaris
gtcactttaattccgaagacctacg

SEQ ID NO: 12511 - DNA, 25 bp, Canis familiaris
ctacgagaactcacgaaggcttttt

SEQ ID NO: 12512 - DNA, 25 bp, Canis familiaris
ctacgaactacccgacgggcaggtg

SEQ ID NO: 12513 - DNA, 25 bp, Canis familiaris
atattacccctactacggcaagttg

SEQ ID NO: 12514 - DNA, 25 bp, Canis familiaris
cctcaacgggctctacggaagtaca

SEQ ID NO: 12515 - DNA, 25 bp, Canis familiaris
cctcctccggaatacgtggactacg

SEQ ID NO: 12516 - DNA, 25 bp, Canis familiaris
attttccaggaagacccggagatca

SEQ ID NO: 12517 - DNA, 25 bp, Canis familiaris
gactttccggacagaacgtccagtc

SEQ ID NO: 12518 - DNA, 25 bp, Canis familiaris
ctgccaaggaagcaaaaaaggctaa

SEQ ID NO: 12519 - DNA, 25 bp, Canis familiaris
aaaatcggcgagtgacaaaggcgga

SEQ ID NO: 12520 - DNA, 25 bp, Canis familiaris
ctacaccggggacaagaaggcgaag

SEQ ID NO: 12521 - DNA, 25 bp, Canis familiaris
aagtccacgttacaatgtatgggga

SEQ ID NO: 12522 - DNA, 25 bp, Canis familiaris
gaattaacgttctcggaagtgtaca

SEQ ID NO: 12523 - DNA, 25 bp, Canis familiaris
gaaaaccgtcctctaaaattcacat

SEQ ID NO: 12524 - DNA, 25 bp, Canis familiaris
gggggggtcctgatataagcccaag

SEQ ID NO: 12525 - DNA, 25 bp, Canis familiaris
cggcctggaatttaattaaggaatg

SEQ ID NO: 12526 - DNA, 25 bp, Canis familiaris
cgggttcgacttctacatcctgaag

SEQ ID NO: 12527 - DNA, 25 bp, Canis familiaris
gcggttacttttgtggatgcgtctg

SEQ ID NO: 12528 - DNA, 25 bp, Canis familiaris
gccggaagttttgtggaccaacttg

SEQ ID NO: 12529 - DNA, 25 bp, Canis familiaris
gggaaatgttttgtgaacaggttgt

SEQ ID NO: 12530 - DNA, 25 bp, Canis familiaris
aggtaagtttggtgtataatatgga

SEQ ID NO: 12531 - DNA, 25 bp, Canis familiaris
aggaaaaccttgtgctaggaatact

SEQ ID NO: 12532 - DNA, 25 bp, Canis familiaris
aaacgcgttttgtgtagagaataag

SEQ ID NO: 12533 - DNA, 25 bp, Canis familiaris
aaattggtccaactcttattaatga

SEQ ID NO: 12534 - DNA, 25 bp, Canis familiaris
atcacttgcttacgagttagcttca

SEQ ID NO: 12535 - DNA, 25 bp, Canis familiaris
attattcctacatgggatttaacca

SEQ ID NO: 12536 - DNA, 25 bp, Canis familiaris
gagcttttcaaagaggttactaccg

SEQ ID NO: 12537 - DNA, 25 bp, Canis familiaris
agtcctgtaaactgttttctaggtg

SEQ ID NO: 12538 - DNA, 25 bp, Canis familiaris
cttttttcaactatcatttccggtg

SEQ ID NO: 12539 - DNA, 25 bp, Canis familiaris
ctgttcttaaacgcaagggccgacg

SEQ ID NO: 12540 - DNA, 25 bp, Canis familiaris
gcgttcatttaacaaaagaccctca

SEQ ID NO: 12541 - DNA, 25 bp, Canis familiaris
ctctttgtaccataaaaaatacttg

SEQ ID NO: 12542 - DNA, 25 bp, Canis familiaris
cagagttccaaaataaaaattagtg

SEQ ID NO: 12543 - DNA, 25 bp, Canis familiaris
aggcttccatttcaaaagtcaaggc

SEQ ID NO: 12544 - DNA, 25 bp, Canis familiaris
atccgtgcatcgggtacaatagtcc

SEQ ID NO: 12545 - DNA, 25 bp, Canis familiaris
attggattccctcatcaaggctaca

SEQ ID NO: 12546 - DNA, 25 bp, Canis familiaris
attggtttccgataacctagacagt

SEQ ID NO: 12547 - DNA, 25 bp, Canis familiaris
attaactacccataacctagatatt

SEQ ID NO: 12548 - DNA, 25 bp, Canis familiaris
agtgactaacccacagtactacggt

SEQ ID NO: 12549 - DNA, 25 bp, Canis familiaris
agtggtaactacacgttcgggatgt

SEQ ID NO: 12550 - DNA, 25 bp, Canis familiaris
ccggtaaccaaatctgctaaaattg

SEQ ID NO: 12551 - DNA, 25 bp, Canis familiaris
atccggaactaacaattaaacacat

SEQ ID NO: 12552 - DNA, 25 bp, Canis familiaris
cccgaaccgaagcttgtataccact

SEQ ID NO: 12553 - DNA, 25 bp, Canis familiaris
cccatggttcgagactttcaaccaa

SEQ ID NO: 12554 - DNA, 25 bp, Canis familiaris
agtactctgtctgaatctttacccg

SEQ ID NO: 12555 - DNA, 25 bp, Canis familiaris
gtgcccctggttcacttgtaaaggc

SEQ ID NO: 12556 - DNA, 25 bp, Canis familiaris
cggacctgggtcagtggtcgtcgat

SEQ ID NO: 12557 - DNA, 25 bp, Canis familiaris
accacggccgagcgggaaatcgtgc

SEQ ID NO: 12558 - DNA, 25 bp, Canis familiaris
aggcgtgtacggtgggaggtctata

SEQ ID NO: 12559 - DNA, 25 bp, Canis familiaris
aggcgtgtacggtgggaggtctata

SEQ ID NO: 12560 - DNA, 25 bp, Canis familiaris
aggcgtgtacggtgggaggtctata

SEQ ID NO: 12561 - DNA, 25 bp, Canis familiaris
aggcgtgtacggtgggaggtctata

SEQ ID NO: 12562 - DNA, 25 bp, Canis familiaris
aggcgtgtacggtgggaggtctata

SEQ ID NO: 12563 - DNA, 25 bp, Canis familiaris
aggcgtgtacggtgggaggtctata

SEQ ID NO: 12564 - DNA, 25 bp, Canis familiaris
aggcgtgtacggtgggaggtctata

SEQ ID NO: 12565 - DNA, 25 bp, Canis familiaris
aggcgtgtacggtgggaggtctata

SEQ ID NO: 12566 - DNA, 25 bp, Canis familiaris
aggcgtgtacggtgggaggtctata

SEQ ID NO: 12567 - DNA, 25 bp, Canis familiaris
caggggtagggtcttgaatgtcttt

SEQ ID NO: 12568 - DNA, 25 bp, Canis familiaris
aaggagtcgggcaggtcaagggcta

SEQ ID NO: 12569 - DNA, 25 bp, Canis familiaris
ctccgcgttcggcggaaagggcaag

SEQ ID NO: 12570 - DNA, 25 bp, Canis familiaris
cttcgggacggcagtggagggacaa

SEQ ID NO: 12571 - DNA, 25 bp, Canis familiaris
gtacccaggaccagggggaaccatg

SEQ ID NO: 12572 - DNA, 25 bp, Canis familiaris
taatcccgggacatcgggttcccat

SEQ ID NO: 12573 - DNA, 25 bp, Canis familiaris
agaaccgggtatcttgagttccaca

SEQ ID NO: 12574 - DNA, 25 bp, Canis familiaris
aaaacacgttagctgtcgttccgag

SEQ ID NO: 12575 - DNA, 25 bp, Canis familiaris
ataaaaactccagagaccacccgag

SEQ ID NO: 12576 - DNA, 25 bp, Canis familiaris
aggtaaaggccgtgagcactccgga

SEQ ID NO: 12577 - DNA, 25 bp, Canis familiaris
gtactagtaccctgggaccatggta

SEQ ID NO: 12578 - DNA, 25 bp, Canis familiaris
gctttttaggcctgggtaacaatct

SEQ ID NO: 12579 - DNA, 25 bp, Canis familiaris
cttgtccaaagtgtccgtaacaact

SEQ ID NO: 12580 - DNA, 25 bp, Canis familiaris
aagttaccagatgctacctaaccct

SEQ ID NO: 12581 - DNA, 25 bp, Canis familiaris
ctagggatctacagtacgaaactac

SEQ ID NO: 12582 - DNA, 25 bp, Canis familiaris
atcagagatatgcacaagtcagtaa

SEQ ID NO: 12583 - DNA, 25 bp, Canis familiaris
atgccagtcggagcttacactcaat

SEQ ID NO: 12584 - DNA, 25 bp, Canis familiaris
accgtcggacctgataccaacatta

SEQ ID NO: 12585 - DNA, 25 bp, Canis familiaris
acccactaacccatatttagcttca

SEQ ID NO: 12586 - DNA, 25 bp, Canis familiaris
ggcccccccgagagaatgggattca

SEQ ID NO: 12587 - DNA, 25 bp, Canis familiaris
aggccccccaggagaagcaaaggag

SEQ ID NO: 12588 - DNA, 25 bp, Canis familiaris
agtaccctccggatgaccatccgga

SEQ ID NO: 12589 - DNA, 25 bp, Canis familiaris
agttcaccccgtgtgttgtaggacg

SEQ ID NO: 12590 - DNA, 25 bp, Canis familiaris
acaacacccggaaatttggtcaatg

SEQ ID NO: 12591 - DNA, 25 bp, Canis familiaris
atagagagggcgggagatttagtaa

SEQ ID NO: 12592 - DNA, 25 bp, Canis familiaris
atgacaggggggacaccatctagtg

SEQ ID NO: 12593 - DNA, 25 bp, Canis familiaris
cgacgacggtggcacccaagtcaaa

SEQ ID NO: 12594 - DNA, 25 bp, Canis familiaris
tcaccgacgggtgtactaaccgaat

SEQ ID NO: 12595 - DNA, 25 bp, Canis familiaris
acctagggagcagccctacctagga

SEQ ID NO: 12596 - DNA, 25 bp, Canis familiaris
ttcctaccggaatcttatcgtataa

SEQ ID NO: 12597 - DNA, 25 bp, Canis familiaris
attcgtcccgtgaggattcgatcga

SEQ ID NO: 12598 - DNA, 25 bp, Canis familiaris
gttcggactcgtgaagctacgtcgc

SEQ ID NO: 12599 - DNA, 25 bp, Canis familiaris
ggtcgggcctgtcaggtacagtagc

SEQ ID NO: 12600 - DNA, 25 bp, Canis familiaris
acaccgtgcgtacacgtacgtacac

SEQ ID NO: 12601 - DNA, 25 bp, Canis familiaris
atgtccgggtggctcagtaggttaa

SEQ ID NO: 12602 - DNA, 25 bp, Canis familiaris
attcccgaatgtgtaggttagtata

SEQ ID NO: 12603 - DNA, 25 bp, Canis familiaris
aacccaacatctcaagtaaaggtca

SEQ ID NO: 12604 - DNA, 25 bp, Canis familiaris
aaaccccagatagcgtaataagtgc

SEQ ID NO: 12605 - DNA, 25 bp, Canis familiaris
atacccctattgtcacctaagggct

SEQ ID NO: 12606 - DNA, 25 bp, Canis familiaris
attcctttagtgaccaccaaggtat

SEQ ID NO: 12607 - DNA, 25 bp, Canis familiaris
ataccagttaccatccacaatttag

SEQ ID NO: 12608 - DNA, 25 bp, Canis familiaris
gtaccgttactatcaaattattcga

SEQ ID NO: 12609 - DNA, 25 bp, Canis familiaris
ccccggtgacgataagactttggct

SEQ ID NO: 12610 - DNA, 25 bp, Canis familiaris
ctccaaggttggctaactctttcct

SEQ ID NO: 12611 - DNA, 25 bp, Canis familiaris
tctaaagttggctggtttttacctg

SEQ ID NO: 12612 - DNA, 25 bp, Canis familiaris
tcgtaagttcccattttcacgacct

SEQ ID NO: 12613 - DNA, 25 bp, Canis familiaris
gttagagggcccagctttacagtac

SEQ ID NO: 12614 - DNA, 25 bp, Canis familiaris
attcaaacctggatccttgggtaca

SEQ ID NO: 12615 - DNA, 25 bp, Canis familiaris
gaattaactggggaccttgggcaag

SEQ ID NO: 12616 - DNA, 25 bp, Canis familiaris
gctaacgaaggagcatccctggtaa

SEQ ID NO: 12617 - DNA, 25 bp, Canis familiaris
ccgtcccattgagaccctggtggac

SEQ ID NO: 12618 - DNA, 25 bp, Canis familiaris
cactctgaccgttaaccaaggtttg

SEQ ID NO: 12619 - DNA, 25 bp, Canis familiaris
acctgacctcccagacgaggtgggt

SEQ ID NO: 12620 - DNA, 25 bp, Canis familiaris
accaaaccctccacacattgaagga

SEQ ID NO: 12621 - DNA, 25 bp, Canis familiaris
atcccaaaaccctcaactgacaagg

SEQ ID NO: 12622 - DNA, 25 bp, Canis familiaris
atccgtaacaccacatggaccaagg

SEQ ID NO: 12623 - DNA, 25 bp, Canis familiaris
atcaggtaaagggctagtatccaag

SEQ ID NO: 12624 - DNA, 25 bp, Canis familiaris
atacgaccagggctgtaactatggc

SEQ ID NO: 12625 - DNA, 25 bp, Canis familiaris
ctacagccaactgcaggttactagt

SEQ ID NO: 12626 - DNA, 25 bp, Canis familiaris
atacattcagacaccacatcaagcc

SEQ ID NO: 12627 - DNA, 25 bp, Canis familiaris
agtactaagtcctagacgagcccgt

SEQ ID NO: 12628 - DNA, 25 bp, Canis familiaris
atgtaaaaatcagacgggttcgact

SEQ ID NO: 12629 - DNA, 25 bp, Canis familiaris
cttaattggccctgggggttgcctg

SEQ ID NO: 12630 - DNA, 25 bp, Canis familiaris
ctgccaacgtcctgaggtgggttag

SEQ ID NO: 12631 - DNA, 25 bp, Canis familiaris
tccgaccgactgtgtggtccgtcgg

SEQ ID NO: 12632 - DNA, 25 bp, Canis familiaris
tacgttctggtacaaggtcttcggg

SEQ ID NO: 12633 - DNA, 25 bp, Canis familiaris
attgtttttgaatggtcctgttgcg

SEQ ID NO: 12634 - DNA, 25 bp, Canis familiaris
cactttctttcctctgtaaaacgtg

SEQ ID NO: 12635 - DNA, 25 bp, Canis familiaris
cacttactactcaggggaaaaagag

SEQ ID NO: 12636 - DNA, 25 bp, Canis familiaris
tccttaccccgtctggtcaataaag

SEQ ID NO: 12637 - DNA, 25 bp, Canis familiaris
ccgtaactacctattcaaccaatat

SEQ ID NO: 12638 - DNA, 25 bp, Canis familiaris
cagcctaaaactgttaacaagaaag

SEQ ID NO: 12639 - DNA, 25 bp, Canis familiaris
caggtggaacggcttgaaaggacaa

SEQ ID NO: 12640 - DNA, 25 bp, Canis familiaris
ctggggtcgcggagataaaaactat

SEQ ID NO: 12641 - DNA, 25 bp, Canis familiaris
tcggtcttcgggagtagaacctaag

SEQ ID NO: 12642 - DNA, 25 bp, Canis familiaris
ctggtccctgggaggagtatttgga

SEQ ID NO: 12643 - DNA, 25 bp, Canis familiaris
ctgcccggctggtgggggaagggag

SEQ ID NO: 12644 - DNA, 25 bp, Canis familiaris
aaattgggcgggcgcggaaggcgag

SEQ ID NO: 12645 - DNA, 25 bp, Canis familiaris
gcaacttaagggcgagtggaaccgt

SEQ ID NO: 12646 - DNA, 25 bp, Canis familiaris
ctacgcctggtatggacggctacca

SEQ ID NO: 12647 - DNA, 25 bp, Canis familiaris
atacgtctgactgaggacgggttaa

SEQ ID NO: 12648 - DNA, 25 bp, Canis familiaris
atacaggtcacgagcggtgggtttc

SEQ ID NO: 12649 - DNA, 25 bp, Canis familiaris
tgagtcggtacgacgggggggtctg

SEQ ID NO: 12650 - DNA, 25 bp, Canis familiaris
tggctccagggtatttggggttctc

SEQ ID NO: 12651 - DNA, 25 bp, Canis familiaris
ggtccaaaagttcttcagggctaca

SEQ ID NO: 12652 - DNA, 25 bp, Canis familiaris
agtgcaggaaacaaaataagggctc

SEQ ID NO: 12653 - DNA, 25 bp, Canis familiaris
agtcaacaaacttggctccttggct

SEQ ID NO: 12654 - DNA, 25 bp, Canis familiaris
aggaactcaattttgacctcccatc

SEQ ID NO: 12655 - DNA, 25 bp, Canis familiaris
taaaacctaatctgacccaaacctg

SEQ ID NO: 12656 - DNA, 25 bp, Canis familiaris
actaagccttagagaaaccacccag

SEQ ID NO: 12657 - DNA, 25 bp, Canis familiaris
aaatagtacaacagaactcgccccg

SEQ ID NO: 12658 - DNA, 25 bp, Canis familiaris
ctaaagtggccatcaaaccctcgcc

SEQ ID NO: 12659 - DNA, 25 bp, Canis familiaris
tgtacgtggggatcttaccactccc

SEQ ID NO: 12660 - DNA, 25 bp, Canis familiaris
ataccgtcgtaggctgtcctaccat

SEQ ID NO: 12661 - DNA, 25 bp, Canis familiaris
ataccaactttccctttaggagcag

SEQ ID NO: 12662 - DNA, 25 bp, Canis familiaris
atgacccttaggcctatttaggtga

SEQ ID NO: 12663 - DNA, 25 bp, Canis familiaris
atacctggtagtataatgtacctga

SEQ ID NO: 12664 - DNA, 25 bp, Canis familiaris
cttcggggaagaatttgaatgccga

SEQ ID NO: 12665 - DNA, 25 bp, Canis familiaris
atcccgggatttattgtgcccggtg

SEQ ID NO: 12666 - DNA, 25 bp, Canis familiaris
acttcggctactgttacttacctgg

SEQ ID NO: 12667 - DNA, 25 bp, Canis familiaris
agcttctagaactcctaaaaccaga

SEQ ID NO: 12668 - DNA, 25 bp, Canis familiaris
agtaaaggacctgtgaagtcactaa

SEQ ID NO: 12669 - DNA, 25 bp, Canis familiaris
tagtaaaaaacgtgaatggagccaa

SEQ ID NO: 12670 - DNA, 25 bp, Canis familiaris
agtacaagccacaggggggcaccac

SEQ ID NO: 12671 - DNA, 25 bp, Canis familiaris
ataaaagcccatcaggttggaacgt

SEQ ID NO: 12672 - DNA, 25 bp, Canis familiaris
ttaaaggccccgtggtaatgaccag

SEQ ID NO: 12673 - DNA, 25 bp, Canis familiaris
ttaactacctaacaggctaaactag

SEQ ID NO: 12674 - DNA, 25 bp, Canis familiaris
ccaaccagttagcgggctactacca

SEQ ID NO: 12675 - DNA, 25 bp, Canis familiaris
atcacaccgagtctacggaactgat

SEQ ID NO: 12676 - DNA, 25 bp, Canis familiaris
aaaatcggtctatctgggccagttg

SEQ ID NO: 12677 - DNA, 25 bp, Canis familiaris
aaattccagttagcttcaggtgtat

SEQ ID NO: 12678 - DNA, 25 bp, Canis familiaris
actttacagtaagccttgaggttgg

SEQ ID NO: 12679 - DNA, 25 bp, Canis familiaris
atagttacattaaggacttccggtg

SEQ ID NO: 12680 - DNA, 25 bp, Canis familiaris
ctcgttgaacgaaaagtcttaggct

SEQ ID NO: 12681 - DNA, 25 bp, Canis familiaris
gcttttacaggataattttagtggt

SEQ ID NO: 12682 - DNA, 25 bp, Canis familiaris
cttttttggtcatacgtatcggtat

SEQ ID NO: 12683 - DNA, 25 bp, Canis familiaris
gtttcttagttatccaaagccgttg

SEQ ID NO: 12684 - DNA, 25 bp, Canis familiaris
cgtccggaggtatctactgaccttc

SEQ ID NO: 12685 - DNA, 25 bp, Canis familiaris
ctttttctggtctctccgagttaat

SEQ ID NO: 12686 - DNA, 25 bp, Canis familiaris
cttgggtccgtatccactacaaaat

SEQ ID NO: 12687 - DNA, 25 bp, Canis familiaris
ttcgggttcgtcacctttgagaaca

SEQ ID NO: 12688 - DNA, 25 bp, Canis familiaris
agtgggtttgtctcaccggaatact

SEQ ID NO: 12689 - DNA, 25 bp, Canis familiaris
attggaacttttgtccgctagtggc

SEQ ID NO: 12690 - DNA, 25 bp, Canis familiaris
attagaggtctgattccaaatagga

SEQ ID NO: 12691 - DNA, 25 bp, Canis familiaris
atcaacggactttccaatgttcgta

SEQ ID NO: 12692 - DNA, 25 bp, Canis familiaris
atactcggtctatctaggttcctat

SEQ ID NO: 12693 - DNA, 25 bp, Canis familiaris
atactaattgtatcataaagccgtt

SEQ ID NO: 12694 - DNA, 25 bp, Canis familiaris
atactgacttaggcaataaacactg

SEQ ID NO: 12695 - DNA, 25 bp, Canis familiaris
atcactactacccagaaaacccgat

SEQ ID NO: 12696 - DNA, 25 bp, Canis familiaris
atcactactacccagaaaacccgat

SEQ ID NO: 12697 - DNA, 25 bp, Canis familiaris
atcactactacccagaaaacccgat

SEQ ID NO: 12698 - DNA, 25 bp, Canis familiaris
atataagcttcacaaaggtaccaaa

SEQ ID NO: 12699 - DNA, 25 bp, Canis familiaris
atttagtttggagagcaagcccaaa

SEQ ID NO: 12700 - DNA, 25 bp, Canis familiaris
cctagttttagagaagagccccact

SEQ ID NO: 12701 - DNA, 25 bp, Canis familiaris
agataattattttcgtaggtactca

SEQ ID NO: 12702 - DNA, 25 bp, Canis familiaris
atagcctttttgtattagtgaaaga

SEQ ID NO: 12703 - DNA, 25 bp, Canis familiaris
ctcggtttattccagtgccgttcag

SEQ ID NO: 12704 - DNA, 25 bp, Canis familiaris
gcccagtaaaagaaggccgttccag

SEQ ID NO: 12705 - DNA, 25 bp, Canis familiaris
gccctaaattacccgtagttccatg

SEQ ID NO: 12706 - DNA, 25 bp, Canis familiaris
ctcaccgaattatccagggtctcaa

SEQ ID NO: 12707 - DNA, 25 bp, Canis familiaris
attccaaattttgcagtaccttatt

SEQ ID NO: 12708 - DNA, 25 bp, Canis familiaris
caatgccaaattgagggtacctgaa

SEQ ID NO: 12709 - DNA, 25 bp, Canis familiaris
ggtaatgacttaagggtactagcaa

SEQ ID NO: 12710 - DNA, 25 bp, Canis familiaris
cttagtcctgaaagggaacggccat

SEQ ID NO: 12711 - DNA, 25 bp, Canis familiaris
cttagttggatctgtgggaccggcc

SEQ ID NO: 12712 - DNA, 25 bp, Canis familiaris
cttacttgggagtggaacctgtcca

SEQ ID NO: 12713 - DNA, 25 bp, Canis familiaris
cgtaatattcggaggcaaccactgc

SEQ ID NO: 12714 - DNA, 25 bp, Canis familiaris
ccttatcgacggagtaccccatgga

SEQ ID NO: 12715 - DNA, 25 bp, Canis familiaris
ttttacgactcctgaaggcccgaag

SEQ ID NO: 12716 - DNA, 25 bp, Canis familiaris
attcgagcccttgagtcaggctccc

SEQ ID NO: 12717 - DNA, 25 bp, Canis familiaris
attcggggcttgtggaggacctgtt

SEQ ID NO: 12718 - DNA, 25 bp, Canis familiaris
attaggcgtagtttaggtgacagct

SEQ ID NO: 12719 - DNA, 25 bp, Canis familiaris
gttacccagacatccaggggcctaa

SEQ ID NO: 12720 - DNA, 25 bp, Canis familiaris
ggtcggcccaaagatgggccgggag

SEQ ID NO: 12721 - DNA, 25 bp, Canis familiaris
ggtccccctcagagcatagctctga

SEQ ID NO: 12722 - DNA, 25 bp, Canis familiaris
gcttccccccaataagggctggtat

SEQ ID NO: 12723 - DNA, 25 bp, Canis familiaris
atacccggacaatatcgttggattt

SEQ ID NO: 12724 - DNA, 25 bp, Canis familiaris
accccaagaaactcctagtgaacat

SEQ ID NO: 12725 - DNA, 25 bp, Canis familiaris
atctccaaaagacattccacgtaca

SEQ ID NO: 12726 - DNA, 25 bp, Canis familiaris
cttcgacaaatatcacccaggttac

SEQ ID NO: 12727 - DNA, 25 bp, Canis familiaris
cgctagtagtaagcacgccacggtc

SEQ ID NO: 12728 - DNA, 25 bp, Canis familiaris
ttggacggaacagacccagggacgc

SEQ ID NO: 12729 - DNA, 25 bp, Canis familiaris
agcaccaggaaagagagaaggggga

SEQ ID NO: 12730 - DNA, 25 bp, Canis familiaris
aagaggaggagagagaaaggaggga

SEQ ID NO: 12731 - DNA, 25 bp, Canis familiaris
taaaggttaagctgaaagggcggct

SEQ ID NO: 12732 - DNA, 25 bp, Canis familiaris
ataaggtgaaatgtaaaggttctgc

SEQ ID NO: 12733 - DNA, 25 bp, Canis familiaris
ttccaaggaaagctaaaggggctct

SEQ ID NO: 12734 - DNA, 25 bp, Canis familiaris
gtcacaactaaatggtaaggggcgt

SEQ ID NO: 12735 - DNA, 25 bp, Canis familiaris
ttaaagtacgtctgtagcgggatgg

SEQ ID NO: 12736 - DNA, 25 bp, Canis familiaris
aagaagccacccagtacgggcatta

SEQ ID NO: 12737 - DNA, 25 bp, Canis familiaris
gggaagtaggactctgacagttatt

SEQ ID NO: 12738 - DNA, 25 bp, Canis familiaris
gccgaagaagggtgtacaaaccact

SEQ ID NO: 12739 - DNA, 25 bp, Canis familiaris
ccgaacccggacagccagagaaact

SEQ ID NO: 12740 - DNA, 25 bp, Canis familiaris
ttcgacccagggagttccaaaactg

SEQ ID NO: 12741 - DNA, 25 bp, Canis familiaris
aggactaggggatccagcccaagaa

SEQ ID NO: 12742 - DNA, 25 bp, Canis familiaris
aggtgtaacggtctccaccaaggat

SEQ ID NO: 12743 - DNA, 25 bp, Canis familiaris
actatattatcgctaatccaacggg

SEQ ID NO: 12744 - DNA, 25 bp, Canis familiaris
attgatgttcagctgcatacacgaa

SEQ ID NO: 12745 - DNA, 25 bp, Canis familiaris
cgtaaacgggtcccgcatagctccg

SEQ ID NO: 12746 - DNA, 25 bp, Canis familiaris
ctttaataggggccaatggatcctc

SEQ ID NO: 12747 - DNA, 25 bp, Canis familiaris
tagttaaaagggatgtggacagttt

SEQ ID NO: 12748 - DNA, 25 bp, Canis familiaris
acctagaaaggttgtggagtatacg

SEQ ID NO: 12749 - DNA, 25 bp, Canis familiaris
cacgtaaccggttcggaggtatcat

SEQ ID NO: 12750 - DNA, 25 bp, Canis familiaris
atcgtcacaacacaccggtagggat

SEQ ID NO: 12751 - DNA, 25 bp, Canis familiaris
ttggtacggccacaggagacggaat

SEQ ID NO: 12752 - DNA, 25 bp, Canis familiaris
gctaaaccggcccaggtactggtat

SEQ ID NO: 12753 - DNA, 25 bp, Canis familiaris
cttaaagtacgtctgtagcgggatg

SEQ ID NO: 12754 - DNA, 25 bp, Canis familiaris
gttacggttggtctttggcagtagt

SEQ ID NO: 12755 - DNA, 25 bp, Canis familiaris
gttacacgttcgtgtcccagaaccg

SEQ ID NO: 12756 - DNA, 25 bp, Canis familiaris
gaatacccaacgagaccgaggaagg

SEQ ID NO: 12757 - DNA, 25 bp, Canis familiaris
gcaatagcctagagtaaacgggacc

SEQ ID NO: 12758 - DNA, 25 bp, Canis familiaris
aggaacaaagcacaaacggcccctg

SEQ ID NO: 12759 - DNA, 25 bp, Canis familiaris
aggaacttggcacaacctgttacct

SEQ ID NO: 12760 - DNA, 25 bp, Canis familiaris
cggaacttggaaccctatggtctag

SEQ ID NO: 12761 - DNA, 25 bp, Canis familiaris
aggattttggagacccctcaatgca

SEQ ID NO: 12762 - DNA, 25 bp, Canis familiaris
agttttcctgaagccacttgagcac

SEQ ID NO: 12763 - DNA, 25 bp, Canis familiaris
aggccttacatggttccacgggcct

SEQ ID NO: 12764 - DNA, 25 bp, Canis familiaris
aggccctttctgtgcgcgagggcct

SEQ ID NO: 12765 - DNA, 25 bp, Canis familiaris
agcgccctaggtctatggtgggccc

SEQ ID NO: 12766 - DNA, 25 bp, Canis familiaris
atcctgcctaggccctagggctaca

SEQ ID NO: 12767 - DNA, 25 bp, Canis familiaris
atagttctaggtcagttggcccaaa

SEQ ID NO: 12768 - DNA, 25 bp, Canis familiaris
atggcttcaaggttacttcgcggag

SEQ ID NO: 12769 - DNA, 25 bp, Canis familiaris
aggccctcttgggagtccgaggagt

SEQ ID NO: 12770 - DNA, 25 bp, Canis familiaris
taaccctggttgcggccaagggtct

SEQ ID NO: 12771 - DNA, 25 bp, Canis familiaris
gaccgtcgacggagacctagtcgtc

SEQ ID NO: 12772 - DNA, 25 bp, Canis familiaris
attcgggaccgacacttgagtcgtc

SEQ ID NO: 12773 - DNA, 25 bp, Canis familiaris
actcggaggccgagatcaaggtcga

SEQ ID NO: 12774 - DNA, 25 bp, Canis familiaris
actacagttgaatttaaaggtgcta

SEQ ID NO: 12775 - DNA, 25 bp, Canis familiaris
attgggctctactgtcaaaggctct

SEQ ID NO: 12776 - DNA, 25 bp, Canis familiaris
attgggcttcagtgtgagaactgtg

SEQ ID NO: 12777 - DNA, 25 bp, Canis familiaris
atttggctccatcttgtaagttccc

SEQ ID NO: 12778 - DNA, 25 bp, Canis familiaris
cttggagtcaccaggttattccccg

SEQ ID NO: 12779 - DNA, 25 bp, Canis familiaris
ctttggaaaagtgttcattctatgc

SEQ ID NO: 12780 - DNA, 25 bp, Canis familiaris
ctattggaagccatacttatatttt

SEQ ID NO: 12781 - DNA, 25 bp, Canis familiaris
cttgataggaatctgacttatagtt

SEQ ID NO: 12782 - DNA, 25 bp, Canis familiaris
atcagtacggtccggttgatgtttc

SEQ ID NO: 12783 - DNA, 25 bp, Canis familiaris
attgtccgttttgctgatgggtttg

SEQ ID NO: 12784 - DNA, 25 bp, Canis familiaris
acctccgtcttctcgtagtatcgga

SEQ ID NO: 12785 - DNA, 25 bp, Canis familiaris
ccttctcggttctcgaacactggga

SEQ ID NO: 12786 - DNA, 25 bp, Canis familiaris
aggtccacaacctcgacgattgaaa

SEQ ID NO: 12787 - DNA, 25 bp, Canis familiaris
agaaccagcccgtggacgattggga

SEQ ID NO: 12788 - DNA, 25 bp, Canis familiaris
aggaccaggtggtgaacttccagga

SEQ ID NO: 12789 - DNA, 25 bp, Canis familiaris
atgaaggggtactggcaccccagtg

SEQ ID NO: 12790 - DNA, 25 bp, Canis familiaris
ctagggacctagtttgaaggccatt

SEQ ID NO: 12791 - DNA, 25 bp, Canis familiaris
atagagggccctctaggagacctgt

SEQ ID NO: 12792 - DNA, 25 bp, Canis familiaris
atagtcttgaccaccgggaacttag

SEQ ID NO: 12793 - DNA, 25 bp, Canis familiaris
atacctgtagttaccctggaaacat

SEQ ID NO: 12794 - DNA, 25 bp, Canis familiaris
ataacttctccgatactggaaactt

SEQ ID NO: 12795 - DNA, 25 bp, Canis familiaris
ataacttctccgatactggaaactt

SEQ ID NO: 12796 - DNA, 25 bp, Canis familiaris
ataacttctccgatactggaaactt

SEQ ID NO: 12797 - DNA, 25 bp, Canis familiaris
ctccctgacgccattacttattacg

SEQ ID NO: 12798 - DNA, 25 bp, Canis familiaris
ctcaactaacccagtcttttctcaa

SEQ ID NO: 12799 - DNA, 25 bp, Canis familiaris
acaactacgactattccgtttatct

SEQ ID NO: 12800 - DNA, 25 bp, Canis familiaris
acccgacagaccatttagtattact

SEQ ID NO: 12801 - DNA, 25 bp, Canis familiaris
accagagaccccattttgccagggt

SEQ ID NO: 12802 - DNA, 25 bp, Canis familiaris
acgaaggtcccctgttggaacagat

SEQ ID NO: 12803 - DNA, 25 bp, Canis familiaris
aaccgggtgccctgaggagacggag

SEQ ID NO: 12804 - DNA, 25 bp, Canis familiaris
ataccggtgaccctgtggaaatcca

SEQ ID NO: 12805 - DNA, 25 bp, Canis familiaris
catggccttggagactaaaacccct

SEQ ID NO: 12806 - DNA, 25 bp, Canis familiaris
caggcgtttcggctaaacaaccctg

SEQ ID NO: 12807 - DNA, 25 bp, Canis familiaris
aggaggtggtggctgaaaacccctg

SEQ ID NO: 12808 - DNA, 25 bp, Canis familiaris
agtagaaagttcctaatgaaatctt

SEQ ID NO: 12809 - DNA, 25 bp, Canis familiaris
agtagaaggtcctcaacttcctctg

SEQ ID NO: 12810 - DNA, 25 bp, Canis familiaris
agtaaagaggtatcattcaggggtg

SEQ ID NO: 12811 - DNA, 25 bp, Canis familiaris
agtccactggatcaccaacggaggc

SEQ ID NO: 12812 - DNA, 25 bp, Canis familiaris
aatcgattcagacaactccggacgt

SEQ ID NO: 12813 - DNA, 25 bp, Canis familiaris
attcgttcgaaaactccgagacact

SEQ ID NO: 12814 - DNA, 25 bp, Canis familiaris
aaattttaacccttctggaatgatg

SEQ ID NO: 12815 - DNA, 25 bp, Canis familiaris
atagacttaatgactttttggtttg

SEQ ID NO: 12816 - DNA, 25 bp, Canis familiaris
gctgggcaaaacatttttggttggc

SEQ ID NO: 12817 - DNA, 25 bp, Canis familiaris
gttgaggtcgaggttttcggtcgcg

SEQ ID NO: 12818 - DNA, 25 bp, Canis familiaris
cattggttaggcacctcgggggaag

SEQ ID NO: 12819 - DNA, 25 bp, Canis familiaris
ataggcattccgagctacgggggac

SEQ ID NO: 12820 - DNA, 25 bp, Canis familiaris
atgggtattatgaggaaggggtagt

SEQ ID NO: 12821 - DNA, 25 bp, Canis familiaris
gttggtagaaggtggatgagggggt

SEQ ID NO: 12822 - DNA, 25 bp, Canis familiaris
agaggtcaaaactgctgggaagggg

SEQ ID NO: 12823 - DNA, 25 bp, Canis familiaris
actggtcaacaacggccggaatccg

SEQ ID NO: 12824 - DNA, 25 bp, Canis familiaris
atcggccaacaacggggtatacttg

SEQ ID NO: 12825 - DNA, 25 bp, Canis familiaris
tttggattaaactgaggaacctctc

SEQ ID NO: 12826 - DNA, 25 bp, Canis familiaris
ttctgttttccctgtggaaccgtca

SEQ ID NO: 12827 - DNA, 25 bp, Canis familiaris
tcctgttactgaagggtaccccgtg

SEQ ID NO: 12828 - DNA, 25 bp, Canis familiaris
ctggttaggacctctacagcttcgt

SEQ ID NO: 12829 - DNA, 25 bp, Canis familiaris
ctgtgctacgtcgccctggacttcg

SEQ ID NO: 12830 - DNA, 25 bp, Canis familiaris
ctgtgctacgtcgccctggacttcg

SEQ ID NO: 12831 - DNA, 25 bp, Canis familiaris
tttctaaggaccacagaactatacc

SEQ ID NO: 12832 - DNA, 25 bp, Canis familiaris
atacgaagaactgaagagattgaca

SEQ ID NO: 12833 - DNA, 25 bp, Canis familiaris
aaaaaggcaatctaatgaatataaa

SEQ ID NO: 12834 - DNA, 25 bp, Canis familiaris
agggaatccgactgtgaataaacca

SEQ ID NO: 12835 - DNA, 25 bp, Canis familiaris
atggaaaacttctgggttaattcat

SEQ ID NO: 12836 - DNA, 25 bp, Canis familiaris
ttggtaaactttctgggagatggcc

SEQ ID NO: 12837 - DNA, 25 bp, Canis familiaris
ctggtcagtttcagtacggacgtga

SEQ ID NO: 12838 - DNA, 25 bp, Canis familiaris
ctgggactacccctcaggagggtca

SEQ ID NO: 12839 - DNA, 25 bp, Canis familiaris
cggcgacgacccattcgaacgtctg

SEQ ID NO: 12840 - DNA, 25 bp, Canis familiaris
cgggaccaacatgttctgaactccc

SEQ ID NO: 12841 - DNA, 25 bp, Canis familiaris
aggctgggcaaagagtctgaaccca

SEQ ID NO: 12842 - DNA, 25 bp, Canis familiaris
aggctgaggggtcagtctggactcc

SEQ ID NO: 12843 - DNA, 25 bp, Canis familiaris
atcggagcgggaggggcgtgacccg

SEQ ID NO: 12844 - DNA, 25 bp, Canis familiaris
acgtaacaggacgcaattccaccgc

SEQ ID NO: 12845 - DNA, 25 bp, Canis familiaris
ccttaaagtagatctcgtccaccac

SEQ ID NO: 12846 - DNA, 25 bp, Canis familiaris
agtaaaaataactcagtccaactga

SEQ ID NO: 12847 - DNA, 25 bp, Canis familiaris
attaagcaagtttttagtccagagg

SEQ ID NO: 12848 - DNA, 25 bp, Canis familiaris
atctacgacggctcctgggtggagt

SEQ ID NO: 12849 - DNA, 25 bp, Canis familiaris
attacgcgttgccacaaggaaaggt

SEQ ID NO: 12850 - DNA, 25 bp, Canis familiaris
attcctgcagctatcccaagaacag

SEQ ID NO: 12851 - DNA, 25 bp, Canis familiaris
ataccgtctcctctataggatcgtt

SEQ ID NO: 12852 - DNA, 25 bp, Canis familiaris
ataccgtctcctctataggatcgtt

SEQ ID NO: 12853 - DNA, 25 bp, Canis familiaris
acgccgtcccagtccttggacggca

SEQ ID NO: 12854 - DNA, 25 bp, Canis familiaris
atcgccgccctaggatatgggggac

SEQ ID NO: 12855 - DNA, 25 bp, Canis familiaris
atcgccgccctaggatatgggggac

SEQ ID NO: 12856 - DNA, 25 bp, Canis familiaris
atacatccccagagattattgaggc

SEQ ID NO: 12857 - DNA, 25 bp, Canis familiaris
atcacttccaggtgttcactaatct

SEQ ID NO: 12858 - DNA, 25 bp, Canis familiaris
ataatcttgggcttcttcctgaatc

SEQ ID NO: 12859 - DNA, 25 bp, Canis familiaris
attagattcggtcgttctggaaaag

SEQ ID NO: 12860 - DNA, 25 bp, Canis familiaris
atcctgtcgccgcactttaaaaagt

SEQ ID NO: 12861 - DNA, 25 bp, Canis familiaris
atggggctcctaagtttacaaagtg

SEQ ID NO: 12862 - DNA, 25 bp, Canis familiaris
ccgggtcgtaatctccaacagagga

SEQ ID NO: 12863 - DNA, 25 bp, Canis familiaris
cccggggtcagcagttaacaggtat

SEQ ID NO: 12864 - DNA, 25 bp, Canis familiaris
ccccgagtgtccaggtgaaacgttg

SEQ ID NO: 12865 - DNA, 25 bp, Canis familiaris
cttgccccgttgagttagaactttg

SEQ ID NO: 12866 - DNA, 25 bp, Canis familiaris
cttcttacgttacatggaaaagtgt

SEQ ID NO: 12867 - DNA, 25 bp, Canis familiaris
ttttaccgtaactgtacaaggagat

SEQ ID NO: 12868 - DNA, 25 bp, Canis familiaris
gggaagcacgtagaggtaaaggagg

SEQ ID NO: 12869 - DNA, 25 bp, Canis familiaris
aggaagaccccgtggacaaggatgg

SEQ ID NO: 12870 - DNA, 25 bp, Canis familiaris
aggaaaccagtgcagaatgaaaggg

SEQ ID NO: 12871 - DNA, 25 bp, Canis familiaris
attactaccgttcttgcaaagtagt

SEQ ID NO: 12872 - DNA, 25 bp, Canis familiaris
attcccaccggtcttagagattccg

SEQ ID NO: 12873 - DNA, 25 bp, Canis familiaris
acaaactcctggattaaggcaattt

SEQ ID NO: 12874 - DNA, 25 bp, Canis familiaris
attcgaccctggaattccaggaatc

SEQ ID NO: 12875 - DNA, 25 bp, Canis familiaris
attggacctttgttcttttccagca

SEQ ID NO: 12876 - DNA, 25 bp, Canis familiaris
attggacgacattttccgacctcaa

SEQ ID NO: 12877 - DNA, 25 bp, Canis familiaris
aggaaccaaggttccaggcccatag

SEQ ID NO: 12878 - DNA, 25 bp, Canis familiaris
aggtccactaggacctctaggccac

SEQ ID NO: 12879 - DNA, 25 bp, Canis familiaris
atcggcgtcgagaacctgtaccgcc

SEQ ID NO: 12880 - DNA, 25 bp, Canis familiaris
ccgaaggcagacacctaaccaactg

SEQ ID NO: 12881 - DNA, 25 bp, Canis familiaris
acgtcaggaaccacgacatccatac

SEQ ID NO: 12882 - DNA, 25 bp, Canis familiaris
atcaccaagaacacggccaagctgg

SEQ ID NO: 12883 - DNA, 25 bp, Canis familiaris
attcaagtcagggacaggccccgtg

SEQ ID NO: 12884 - DNA, 25 bp, Canis familiaris
atcccaatcggacctcgatttctgg

SEQ ID NO: 12885 - DNA, 25 bp, Canis familiaris
atcagtaactgtcacatcgtttccc

SEQ ID NO: 12886 - DNA, 25 bp, Canis familiaris
acgtaaattcgtctgtaagcctgca

SEQ ID NO: 12887 - DNA, 25 bp, Canis familiaris
atagtactttttctcttaactgatt

SEQ ID NO: 12888 - DNA, 25 bp, Canis familiaris
caaggactttggagccggtgttgtt

SEQ ID NO: 12889 - DNA, 25 bp, Canis familiaris
ctaggttgtcggtgtcgggtcatta

SEQ ID NO: 12890 - DNA, 25 bp, Canis familiaris
gtaggtcttccgagtccaagtagtt

SEQ ID NO: 12891 - DNA, 25 bp, Canis familiaris
aggaggctttagagcccaactgttt

SEQ ID NO: 12892 - DNA, 25 bp, Canis familiaris
actggaggttcgagttcctcgttgc

SEQ ID NO: 12893 - DNA, 25 bp, Canis familiaris
acgaggagttcgagtaccgggcatg

SEQ ID NO: 12894 - DNA, 25 bp, Canis familiaris
cacgaaagtttgcttacctggggcg

SEQ ID NO: 12895 - DNA, 25 bp, Canis familiaris
cacgaaagtttgcttacctggggcg

SEQ ID NO: 12896 - DNA, 25 bp, Canis familiaris
cacgaaagtttgcttacctggggcg

SEQ ID NO: 12897 - DNA, 25 bp, Canis familiaris
cacgaaagtttgcttacctggggcg

SEQ ID NO: 12898 - DNA, 25 bp, Canis familiaris
accaaagtttgcccagtcctaatgg

SEQ ID NO: 12899 - DNA, 25 bp, Canis familiaris
attaaagtcttctacctggctttgg

SEQ ID NO: 12900 - DNA, 25 bp, Canis familiaris
aaaaagtcttcctcgtggtagctct

SEQ ID NO: 12901 - DNA, 25 bp, Canis familiaris
caaacgatatttgttccggttcctg

SEQ ID NO: 12902 - DNA, 25 bp, Canis familiaris
ctaaggttattatcccagggtcctg

SEQ ID NO: 12903 - DNA, 25 bp, Canis familiaris
cttcgagtttatcttcgggggcctg

SEQ ID NO: 12904 - DNA, 25 bp, Canis familiaris
atttattctccatcttcgacgggta

SEQ ID NO: 12905 - DNA, 25 bp, Canis familiaris
atataattcctgtccggagtagatg

SEQ ID NO: 12906 - DNA, 25 bp, Canis familiaris
atagctaaactgtggaaaaagccca

SEQ ID NO: 12907 - DNA, 25 bp, Canis familiaris
attttctgaaaacataaccagccca

SEQ ID NO: 12908 - DNA, 25 bp, Canis familiaris
attgttacgagagtcctgaaagcac

SEQ ID NO: 12909 - DNA, 25 bp, Canis familiaris
aggttccaggagctctaaagtcaga

SEQ ID NO: 12910 - DNA, 25 bp, Canis familiaris
agcgtactgggacgccaatcggtcg

SEQ ID NO: 12911 - DNA, 25 bp, Canis familiaris
ctggctaataggcaccaccttccag

SEQ ID NO: 12912 - DNA, 25 bp, Canis familiaris
cgttaatcaagcacagcatccctgt

SEQ ID NO: 12913 - DNA, 25 bp, Canis familiaris
attaccacacatcacagaccgttta

SEQ ID NO: 12914 - DNA, 25 bp, Canis familiaris
attaccccaacctgctcaagagttg

SEQ ID NO: 12915 - DNA, 25 bp, Canis familiaris
aattccccgagttaatctactgttg

SEQ ID NO: 12916 - DNA, 25 bp, Canis familiaris
attgggtctgtactaaattaatgga

SEQ ID NO: 12917 - DNA, 25 bp, Canis familiaris
attcaagtcctagaaaatgtttttg

SEQ ID NO: 12918 - DNA, 25 bp, Canis familiaris
attactgaagctgcccaaacttttt

SEQ ID NO: 12919 - DNA, 25 bp, Canis familiaris
aacgtggcgtccacgacttttgtca

SEQ ID NO: 12920 - DNA, 25 bp, Canis familiaris
aaggaaactacctcactctttgaag

SEQ ID NO: 12921 - DNA, 25 bp, Canis familiaris
atttacatcctagaccccaaggaag

SEQ ID NO: 12922 - DNA, 25 bp, Canis familiaris
atcttattccgagcacttcccggaa

SEQ ID NO: 12923 - DNA, 25 bp, Canis familiaris
attttctcgcatgatttacccgtgg

SEQ ID NO: 12924 - DNA, 25 bp, Canis familiaris
atttacttccgacatgatcgaaatg

SEQ ID NO: 12925 - DNA, 25 bp, Canis familiaris
attgaactccatgaagtgggtcaag

SEQ ID NO: 12926 - DNA, 25 bp, Canis familiaris
gtcgtttgagccacgtgggtcaagt

SEQ ID NO: 12927 - DNA, 25 bp, Canis familiaris
atcttttagtaagggcaggtaatag

SEQ ID NO: 12928 - DNA, 25 bp, Canis familiaris
atcgttgtcgtttagtcccaaaatg

SEQ ID NO: 12929 - DNA, 25 bp, Canis familiaris
attgttctggttcaaccctggatct

SEQ ID NO: 12930 - DNA, 25 bp, Canis familiaris
atcggactcgttcagagattcggtt

SEQ ID NO: 12931 - DNA, 25 bp, Canis familiaris
attggccacagctgctgaagtccgc

SEQ ID NO: 12932 - DNA, 25 bp, Canis familiaris
ataggtgggtcacttaggcctggta

SEQ ID NO: 12933 - DNA, 25 bp, Canis familiaris
attggcggttaatcgaacggctaga

SEQ ID NO: 12934 - DNA, 25 bp, Canis familiaris
gctttcggttactggggccagggca

SEQ ID NO: 12935 - DNA, 25 bp, Canis familiaris
attcccagtaagtgcggcttcggga

SEQ ID NO: 12936 - DNA, 25 bp, Canis familiaris
ctcccaggctccgagacggttaggt

SEQ ID NO: 12937 - DNA, 25 bp, Canis familiaris
atcctaggagccttgacgtcctact

SEQ ID NO: 12938 - DNA, 25 bp, Canis familiaris
atttcagtgacatcgacggacccat

SEQ ID NO: 12939 - DNA, 25 bp, Canis familiaris
tttgttggactatattggccccacc

SEQ ID NO: 12940 - DNA, 25 bp, Canis familiaris
cattttggaaatcttccccttatcg

SEQ ID NO: 12941 - DNA, 25 bp, Canis familiaris
attattcaagagtgtttcccttttg

SEQ ID NO: 12942 - DNA, 25 bp, Canis familiaris
atgaatcctagatagttttcccttc

SEQ ID NO: 12943 - DNA, 25 bp, Canis familiaris
ataagcctagagaggttgttaactc

SEQ ID NO: 12944 - DNA, 25 bp, Canis familiaris
atacggccggttttgtgttagcagc

SEQ ID NO: 12945 - DNA, 25 bp, Canis familiaris
atcactccgagggtttggttagact

SEQ ID NO: 12946 - DNA, 25 bp, Canis familiaris
atagtccgagggttggtcttgaagg

SEQ ID NO: 12947 - DNA, 25 bp, Canis familiaris
atgaggggatgccagagcttctttg

SEQ ID NO: 12948 - DNA, 25 bp, Canis familiaris
aggagttgagtctcggtttggtcct

SEQ ID NO: 12949 - DNA, 25 bp, Canis familiaris
agaacagtattctcgttaagggact

SEQ ID NO: 12950 - DNA, 25 bp, Canis familiaris
agattaggtactcagttttgggact

SEQ ID NO: 12951 - DNA, 25 bp, Canis familiaris
atagctaaaacctgttgtggggaat

SEQ ID NO: 12952 - DNA, 25 bp, Canis familiaris
aaatgaaaattctctatccaaggga

SEQ ID NO: 12953 - DNA, 25 bp, Canis familiaris
taaaaaggacctgtcccaagcgtgg

SEQ ID NO: 12954 - DNA, 25 bp, Canis familiaris
aaccctgggactgtccaaagcctgt

SEQ ID NO: 12955 - DNA, 25 bp, Canis familiaris
attcccgggatagcttataactcca

SEQ ID NO: 12956 - DNA, 25 bp, Canis familiaris
ataccgggccaatatatatttccaa

SEQ ID NO: 12957 - DNA, 25 bp, Canis familiaris
acatctaggtgataaacttttacta

SEQ ID NO: 12958 - DNA, 25 bp, Canis familiaris
ctctacagggtttgaagcttttatc

SEQ ID NO: 12959 - DNA, 25 bp, Canis familiaris
cttactgggatatcctgtttaacag

SEQ ID NO: 12960 - DNA, 25 bp, Canis familiaris
aataccgagctatactttaaaatgt

SEQ ID NO: 12961 - DNA, 25 bp, Canis familiaris
gaagtagggtaagagttgaaaattg

SEQ ID NO: 12962 - DNA, 25 bp, Canis familiaris
aggtggggaaactcataaagcaatt

SEQ ID NO: 12963 - DNA, 25 bp, Canis familiaris
atgggaagaaaatctaatatcgcag

SEQ ID NO: 12964 - DNA, 25 bp, Canis familiaris
attggggacgactgctagagtccag

SEQ ID NO: 12965 - DNA, 25 bp, Canis familiaris
attggggagtaccgcataccgtaat

SEQ ID NO: 12966 - DNA, 25 bp, Canis familiaris
cttggtggataatggttcctggcaa

SEQ ID NO: 12967 - DNA, 25 bp, Canis familiaris
gcttgcgggaactcgtacccggagt

SEQ ID NO: 12968 - DNA, 25 bp, Canis familiaris
attctggaaaaggcgttccctggag

SEQ ID NO: 12969 - DNA, 25 bp, Canis familiaris
ataatggccaaacggtctcagcctg

SEQ ID NO: 12970 - DNA, 25 bp, Canis familiaris
atcgatggtaaactcgactgactcc

SEQ ID NO: 12971 - DNA, 25 bp, Canis familiaris
attgttgaactacctgaagcctgcc

SEQ ID NO: 12972 - DNA, 25 bp, Canis familiaris
cacgtctaatgtattaacccccagg

SEQ ID NO: 12973 - DNA, 25 bp, Canis familiaris
aggccgagtgctatttcaccaacgg

SEQ ID NO: 12974 - DNA, 25 bp, Canis familiaris
attgacgactgctatacttcggcca

SEQ ID NO: 12975 - DNA, 25 bp, Canis familiaris
attgacgactgctatacttcggcca

SEQ ID NO: 12976 - DNA, 25 bp, Canis familiaris
attgatgcaagggtttgccggatca

SEQ ID NO: 12977 - DNA, 25 bp, Canis familiaris
attggcatactccgtcagttagtca

SEQ ID NO: 12978 - DNA, 25 bp, Canis familiaris
attggaaccctggctgtgtttgcag

SEQ ID NO: 12979 - DNA, 25 bp, Canis familiaris
attggaaaccttcgtcacatgggcc

SEQ ID NO: 12980 - DNA, 25 bp, Canis familiaris
atatggaacaagcttcgggggcctc

SEQ ID NO: 12981 - DNA, 25 bp, Canis familiaris
aaattagctactcttggggtgcctg

SEQ ID NO: 12982 - DNA, 25 bp, Canis familiaris
ataaacgctttcattgggggcctgg

SEQ ID NO: 12983 - DNA, 25 bp, Canis familiaris
agtagaactgttgtgggccaggcct

SEQ ID NO: 12984 - DNA, 25 bp, Canis familiaris
ataaagactgttgagccgcaggccc

SEQ ID NO: 12985 - DNA, 25 bp, Canis familiaris
ataaagactgtctcccaccagtaaa

SEQ ID NO: 12986 - DNA, 25 bp, Canis familiaris
attaaactcatcagccaacttggaa

SEQ ID NO: 12987 - DNA, 25 bp, Canis familiaris
attaagacgtccgtgaatttcaaag

SEQ ID NO: 12988 - DNA, 25 bp, Canis familiaris
atttacaccccagagatttaagaag

SEQ ID NO: 12989 - DNA, 25 bp, Canis familiaris
atttacgaccgctgagttatccaca

SEQ ID NO: 12990 - DNA, 25 bp, Canis familiaris
attccaaagtcctgagttgcttccc

SEQ ID NO: 12991 - DNA, 25 bp, Canis familiaris
cttccaaactcctgaacctgataat

SEQ ID NO: 12992 - DNA, 25 bp, Canis familiaris
gccccaagtccctgtatttatggtc

SEQ ID NO: 12993 - DNA, 25 bp, Canis familiaris
ctccaaagtccagcaggtttaggtc

SEQ ID NO: 12994 - DNA, 25 bp, Canis familiaris
ccctaagggcagtggtcggggctct

SEQ ID NO: 12995 - DNA, 25 bp, Canis familiaris
acctcaaagtggaggaccccattct

SEQ ID NO: 12996 - DNA, 25 bp, Canis familiaris
acctcaaccgaggaggcttctccat

SEQ ID NO: 12997 - DNA, 25 bp, Canis familiaris
atcccaaacaaggaactggtccgca

SEQ ID NO: 12998 - DNA, 25 bp, Canis familiaris
acccaacccaagtgtgacattccaa

SEQ ID NO: 12999 - DNA, 25 bp, Canis familiaris
cttaaaccccaatgtcaatagccca

SEQ ID NO: 13000 - DNA, 25 bp, Canis familiaris
gtacagaactgagaaattaacccca

SEQ ID NO: 13001 - DNA, 25 bp, Canis familiaris
gtaaaaactacatattaatccttat

SEQ ID NO: 13002 - DNA, 25 bp, Canis familiaris
cttaaaactacttcttccatgccaa

SEQ ID NO: 13003 - DNA, 25 bp, Canis familiaris
attaaaagctaatattggggcacct

SEQ ID NO: 13004 - DNA, 25 bp, Canis familiaris
attgaacccttgtaaaggtggaatg

SEQ ID NO: 13005 - DNA, 25 bp, Canis familiaris
attgcttccccgataaggtcgaagg

SEQ ID NO: 13006 - DNA, 25 bp, Canis familiaris
attccactcccgagtaggggctatg

SEQ ID NO: 13007 - DNA, 25 bp, Canis familiaris
atttcaccggcgtgttgcctggaat

SEQ ID NO: 13008 - DNA, 25 bp, Canis familiaris
attattgcgggtctgtgggggtatt

SEQ ID NO: 13009 - DNA, 25 bp, Canis familiaris
attcctgctaggtaaggggcgcgtt

SEQ ID NO: 13010 - DNA, 25 bp, Canis familiaris
attccttcaaggtgggaagggagat

SEQ ID NO: 13011 - DNA, 25 bp, Canis familiaris
ataccattatagcttcgttagggaa

SEQ ID NO: 13012 - DNA, 25 bp, Canis familiaris
atagccatttagggacactaaagga

SEQ ID NO: 13013 - DNA, 25 bp, Canis familiaris
aggccagttagtccaagtcagaaaa

SEQ ID NO: 13014 - DNA, 25 bp, Canis familiaris
gattcggttaaccaattccaactag

SEQ ID NO: 13015 - DNA, 25 bp, Canis familiaris
attggactgtaaggccattttttga

SEQ ID NO: 13016 - DNA, 25 bp, Canis familiaris
attggaaataacgtaatcttagtgt

SEQ ID NO: 13017 - DNA, 25 bp, Canis familiaris
attgtggaacaccctcaaagtatgt

SEQ ID NO: 13018 - DNA, 25 bp, Canis familiaris
attgaggaaccacttgaccggggag

SEQ ID NO: 13019 - DNA, 25 bp, Canis familiaris
acgagacaacacccgttaatgggca

SEQ ID NO: 13020 - DNA, 25 bp, Canis familiaris
aagagtcgagcctccattaaacgac

SEQ ID NO: 13021 - DNA, 25 bp, Canis familiaris
agacctcaacccgtcattgggacga

SEQ ID NO: 13022 - DNA, 25 bp, Canis familiaris
attgtgtaacccgagttggaaccat

SEQ ID NO: 13023 - DNA, 25 bp, Canis familiaris
attggtcaaccgggtgctgatagtt

SEQ ID NO: 13024 - DNA, 25 bp, Canis familiaris
cgtagtaaccgatatgcgccgtata

SEQ ID NO: 13025 - DNA, 25 bp, Canis familiaris
cttgaaaatccctgtggccagtttg

SEQ ID NO: 13026 - DNA, 25 bp, Canis familiaris
attaaaaactgctgtggccgtgctc

SEQ ID NO: 13027 - DNA, 25 bp, Canis familiaris
atacgtaggagactttggcccgctc

SEQ ID NO: 13028 - DNA, 25 bp, Canis familiaris
atacgtgaggaatcccaagggcccg

SEQ ID NO: 13029 - DNA, 25 bp, Canis familiaris
aagtcgggcagagaccgggattccg

SEQ ID NO: 13030 - DNA, 25 bp, Canis familiaris
aattcggcacgagaattccgataac

SEQ ID NO: 13031 - DNA, 25 bp, Canis familiaris
atagccgtactataattctcgcacg

SEQ ID NO: 13032 - DNA, 25 bp, Canis familiaris
atagggggatataaattcccctgct

SEQ ID NO: 13033 - DNA, 25 bp, Canis familiaris
atcggggtgttgaaagtagtcgtgt

SEQ ID NO: 13034 - DNA, 25 bp, Canis familiaris
acgtcaggtttgaggtaggtgtgaa

SEQ ID NO: 13035 - DNA, 25 bp, Canis familiaris
ccgtcgtggttaaggaaaggcatct

SEQ ID NO: 13036 - DNA, 25 bp, Canis familiaris
ccttcctggttaattaaatcctcag

SEQ ID NO: 13037 - DNA, 25 bp, Canis familiaris
agtttcctattcataaagtcctaat

SEQ ID NO: 13038 - DNA, 25 bp, Canis familiaris
gtgttacctgttgtaaagtttcctg

SEQ ID NO: 13039 - DNA, 25 bp, Canis familiaris
atctgtacccctgtaacgagttact

SEQ ID NO: 13040 - DNA, 25 bp, Canis familiaris
atagtacccctgataacaacttagt

SEQ ID NO: 13041 - DNA, 25 bp, Canis familiaris
aggtacccaatgaggaagcccaagt

SEQ ID NO: 13042 - DNA, 25 bp, Canis familiaris
aggtccgccacaattcgggaacaag

SEQ ID NO: 13043 - DNA, 25 bp, Canis familiaris
aggttgcctgatgatccggggaaat

SEQ ID NO: 13044 - DNA, 25 bp, Canis familiaris
aggttccttttctgtggaactgctt

SEQ ID NO: 13045 - DNA, 25 bp, Canis familiaris
aagggccattggcggtggaaactat

SEQ ID NO: 13046 - DNA, 25 bp, Canis familiaris
atggggctaagggaagtgctgaaat

SEQ ID NO: 13047 - DNA, 25 bp, Canis familiaris
atacggctacagcaacagggtggtg

SEQ ID NO: 13048 - DNA, 25 bp, Canis familiaris
atacgggtaccaagggaggcgctga

SEQ ID NO: 13049 - DNA, 25 bp, Canis familiaris
acaagggtctacagtataacctgga

SEQ ID NO: 13050 - DNA, 25 bp, Canis familiaris
actaccacctactgtaaacctggat

SEQ ID NO: 13051 - DNA, 25 bp, Canis familiaris
aatccaatccaaaggccaaacctgg

SEQ ID NO: 13052 - DNA, 25 bp, Canis familiaris
attacattccagagttaaacgagtg

SEQ ID NO: 13053 - DNA, 25 bp, Canis familiaris
atgttccctgagacgtaaaatttgg

SEQ ID NO: 13054 - DNA, 25 bp, Canis familiaris
attcctctaggagctaaaagtgctg

SEQ ID NO: 13055 - DNA, 25 bp, Canis familiaris
atccctcaaggtgatagaaaattcc

SEQ ID NO: 13056 - DNA, 25 bp, Canis familiaris
attccccgggcactggcagaaaact

SEQ ID NO: 13057 - DNA, 25 bp, Canis familiaris
attgccccatggtgttaacattcct

SEQ ID NO: 13058 - DNA, 25 bp, Canis familiaris
attgtaccagaatgtgttaaatttc

SEQ ID NO: 13059 - DNA, 25 bp, Canis familiaris
attggccaatgtaaggttaaatagt

SEQ ID NO: 13060 - DNA, 25 bp, Canis familiaris
attggacagattaaatgtacatgga

SEQ ID NO: 13061 - DNA, 25 bp, Canis familiaris
attggccaagtcatcatgtccatcc

SEQ ID NO: 13062 - DNA, 25 bp, Canis familiaris
attggccaagtcatcatgtccatcc

SEQ ID NO: 13063 - DNA, 25 bp, Canis familiaris
attgcttcaaggcaaaggcaccaaa

SEQ ID NO: 13064 - DNA, 25 bp, Canis familiaris
attgtggaagggctcatgaccacag

SEQ ID NO: 13065 - DNA, 25 bp, Canis familiaris
atcggtgaaggccccagaggaacct

SEQ ID NO: 13066 - DNA, 25 bp, Canis familiaris
atccgggcacgtcccagggaatagc

SEQ ID NO: 13067 - DNA, 25 bp, Canis familiaris
atccgtctgacgagggggagagatc

SEQ ID NO: 13068 - DNA, 25 bp, Canis familiaris
attcgccgccagaatgagggaggat

SEQ ID NO: 13069 - DNA, 25 bp, Canis familiaris
attggtgccaagtctgggtgaggaa

SEQ ID NO: 13070 - DNA, 25 bp, Canis familiaris
atcgatattgcaaacggggggacta

SEQ ID NO: 13071 - DNA, 25 bp, Canis familiaris
atcgatcaagaagcgggggccacaa

SEQ ID NO: 13072 - DNA, 25 bp, Canis familiaris
atcgttgggagtgtgggcgcccatg

SEQ ID NO: 13073 - DNA, 25 bp, Canis familiaris
aggatgggggtgagggaggtattcg

SEQ ID NO: 13074 - DNA, 25 bp, Canis familiaris
atagagggggagcgggctgggtgtc

SEQ ID NO: 13075 - DNA, 25 bp, Canis familiaris
aattggggcccacaagttggcaggc

SEQ ID NO: 13076 - DNA, 25 bp, Canis familiaris
atactgggacccacgttctgaaagc

SEQ ID NO: 13077 - DNA, 25 bp, Canis familiaris
atttggaaagccaccttttcaagtg

SEQ ID NO: 13078 - DNA, 25 bp, Canis familiaris
atactaaataccattcctttcagcc

SEQ ID NO: 13079 - DNA, 25 bp, Canis familiaris
gtcagaaaattagggtcgttgtacg

SEQ ID NO: 13080 - DNA, 25 bp, Canis familiaris
atatcaaaaatatggtcgttcaaaa

SEQ ID NO: 13081 - DNA, 25 bp, Canis familiaris
attgcagcaaatcttacctttaaaa

SEQ ID NO: 13082 - DNA, 25 bp, Canis familiaris
attgctatactgcttagttttaact

SEQ ID NO: 13083 - DNA, 25 bp, Canis familiaris
aggttcccctgtatgtctgaaacta

SEQ ID NO: 13084 - DNA, 25 bp, Canis familiaris
agagttttccttctctggactgatc

SEQ ID NO: 13085 - DNA, 25 bp, Canis familiaris
aactaattgcctttgaatggttgtc

SEQ ID NO: 13086 - DNA, 25 bp, Canis familiaris
caatctacggacacggggtcgtcgt

SEQ ID NO: 13087 - DNA, 25 bp, Canis familiaris
atctctggggacatccagggggctc

SEQ ID NO: 13088 - DNA, 25 bp, Canis familiaris
atctgtgggggaaaaggccgcggct

SEQ ID NO: 13089 - DNA, 25 bp, Canis familiaris
gtcttggttgggttaggctccgact

SEQ ID NO: 13090 - DNA, 25 bp, Canis familiaris
gttcgacattggtaaggactcctac

SEQ ID NO: 13091 - DNA, 25 bp, Canis familiaris
attgtagcattctaaaggacctgga

SEQ ID NO: 13092 - DNA, 25 bp, Canis familiaris
atggcgtaatcatagggaccagaag

SEQ ID NO: 13093 - DNA, 25 bp, Canis familiaris
atggactagaagtggacccgtaatc

SEQ ID NO: 13094 - DNA, 25 bp, Canis familiaris
agaactttctggagaccacttaaag

SEQ ID NO: 13095 - DNA, 25 bp, Canis familiaris
aaatcttttgagtgttaactaacag

SEQ ID NO: 13096 - DNA, 25 bp, Canis familiaris
aagtccttcgaagagttttgtacag

SEQ ID NO: 13097 - DNA, 25 bp, Canis familiaris
atagtctttccatataattttacga

SEQ ID NO: 13098 - DNA, 25 bp, Canis familiaris
attgtctattcctggtataattact

SEQ ID NO: 13099 - DNA, 25 bp, Canis familiaris
attgactttgcccactggatcaagt

SEQ ID NO: 13100 - DNA, 25 bp, Canis familiaris
attggttggcatggcacatagcatt

SEQ ID NO: 13101 - DNA, 25 bp, Canis familiaris
attggcaatgacatggatagagcta

SEQ ID NO: 13102 - DNA, 25 bp, Canis familiaris
atagactatgaggctgcgaaggcag

SEQ ID NO: 13103 - DNA, 25 bp, Canis familiaris
atagactatgaggctgcgaaggcag

SEQ ID NO: 13104 - DNA, 25 bp, Canis familiaris
attctctggcaggcaggctagtggt

SEQ ID NO: 13105 - DNA, 25 bp, Canis familiaris
attcattcatggacacatgcacagt

SEQ ID NO: 13106 - DNA, 25 bp, Canis familiaris
atatatccagtgccagatacgatgt

SEQ ID NO: 13107 - DNA, 25 bp, Canis familiaris
atagttaagctacaccagatttggt

SEQ ID NO: 13108 - DNA, 25 bp, Canis familiaris
ataggtggtagacactggaagtggg

SEQ ID NO: 13109 - DNA, 25 bp, Canis familiaris
attggggtcgggtggatgttgacca

SEQ ID NO: 13110 - DNA, 25 bp, Canis familiaris
atctccaagaagtggggctttacta

SEQ ID NO: 13111 - DNA, 25 bp, Canis familiaris
attggacggatgtgagggtttggcc

SEQ ID NO: 13112 - DNA, 25 bp, Canis familiaris
attggcaggtgctaagggttgtggg

SEQ ID NO: 13113 - DNA, 25 bp, Canis familiaris
attgggttccaagggctgttccaga

SEQ ID NO: 13114 - DNA, 25 bp, Canis familiaris
atatcagtattccgaccaggtctca

SEQ ID NO: 13115 - DNA, 25 bp, Canis familiaris
cttggtttcggctcaggtcaagatc

SEQ ID NO: 13116 - DNA, 25 bp, Canis familiaris
attgggttcctctcggaatgacgca

SEQ ID NO: 13117 - DNA, 25 bp, Canis familiaris
attgggaactactctgtgaaacaca

SEQ ID NO: 13118 - DNA, 25 bp, Canis familiaris
attggcaacacaaaccggatttctc

SEQ ID NO: 13119 - DNA, 25 bp, Canis familiaris
attgatttacagattcggtttagaa

SEQ ID NO: 13120 - DNA, 25 bp, Canis familiaris
attgcatgtaaaactgatggaatct

SEQ ID NO: 13121 - DNA, 25 bp, Canis familiaris
attgactgacttactgggattttaa

SEQ ID NO: 13122 - DNA, 25 bp, Canis familiaris
attgcctgcagatgaggaggatttg

SEQ ID NO: 13123 - DNA, 25 bp, Canis familiaris
attgtcgcaagtcacagaattattt

SEQ ID NO: 13124 - DNA, 25 bp, Canis familiaris
agttaaaggaaccaatgtgccattg

SEQ ID NO: 13125 - DNA, 25 bp, Canis familiaris
attgaaaatggagcccttccaaggg

SEQ ID NO: 13126 - DNA, 25 bp, Canis familiaris
ataaactggtgatcctcgtacgggg

SEQ ID NO: 13127 - DNA, 25 bp, Canis familiaris
atggtcctggaatcccaggatcgag

SEQ ID NO: 13128 - DNA, 25 bp, Canis familiaris
attgggtggggacccatgtccgatc

SEQ ID NO: 13129 - DNA, 25 bp, Canis familiaris
atctgtggtagggatcgttcccctc

SEQ ID NO: 13130 - DNA, 25 bp, Canis familiaris
atatcggggctcaggttcagcccac

SEQ ID NO: 13131 - DNA, 25 bp, Canis familiaris
attcgggacatatggatacgccctc

SEQ ID NO: 13132 - DNA, 25 bp, Canis familiaris
gttggattgtacaggtacccattcg

SEQ ID NO: 13133 - DNA, 25 bp, Canis familiaris
attggttatgccaggaatccctctc

SEQ ID NO: 13134 - DNA, 25 bp, Canis familiaris
attggttgtgtatctaatctgcccc

SEQ ID NO: 13135 - DNA, 25 bp, Canis familiaris
cttcgttcttaataatatggccctc

SEQ ID NO: 13136 - DNA, 25 bp, Canis familiaris
attcccctttgatagaagtgcctct

SEQ ID NO: 13137 - DNA, 25 bp, Canis familiaris
atcttccgtattcagcaacgatctc

SEQ ID NO: 13138 - DNA, 25 bp, Canis familiaris
attgggaaatgggcaacttgttgct

SEQ ID NO: 13139 - DNA, 25 bp, Canis familiaris
attaggaaatggggcacttgggtgg

SEQ ID NO: 13140 - DNA, 25 bp, Canis familiaris
ctagacgtagggcgtcttcggcggg

SEQ ID NO: 13141 - DNA, 25 bp, Canis familiaris
atagccggggtgacgattttgcagc

SEQ ID NO: 13142 - DNA, 25 bp, Canis familiaris
attccggaggagatgcttaccatgt

SEQ ID NO: 13143 - DNA, 25 bp, Canis familiaris
aaacggactatgccagttgaacttt

SEQ ID NO: 13144 - DNA, 25 bp, Canis familiaris
aggttggtgcttcatcattaacttt

SEQ ID NO: 13145 - DNA, 25 bp, Canis familiaris
aggcttggacctcatttaaaaatat

SEQ ID NO: 13146 - DNA, 25 bp, Canis familiaris
cgggtgtgaccgatatttccaaagt

SEQ ID NO: 13147 - DNA, 25 bp, Canis familiaris
cagtgggtaccgagtcccactaagc

SEQ ID NO: 13148 - DNA, 25 bp, Canis familiaris
attggggaccgtggtcgtccattag

SEQ ID NO: 13149 - DNA, 25 bp, Canis familiaris
attgggaggcctgagttccctttga

SEQ ID NO: 13150 - DNA, 25 bp, Canis familiaris
attggaatggttgggtggctcagtg

SEQ ID NO: 13151 - DNA, 25 bp, Canis familiaris
attggcaacgagcggttccgatgcc

SEQ ID NO: 13152 - DNA, 25 bp, Canis familiaris
attggcccagagtggtactcaagaa

SEQ ID NO: 13153 - DNA, 25 bp, Canis familiaris
atagatccctgagaagtaaaagcca

SEQ ID NO: 13154 - DNA, 25 bp, Canis familiaris
atagttgtcttgcagttaaaagctc

SEQ ID NO: 13155 - DNA, 25 bp, Canis familiaris
attgtcctattgtgggagtaagcca

SEQ ID NO: 13156 - DNA, 25 bp, Canis familiaris
attgttcgttgaccagggacaggcc

SEQ ID NO: 13157 - DNA, 25 bp, Canis familiaris
attggttgttgaccagggacttaat

SEQ ID NO: 13158 - DNA, 25 bp, Canis familiaris
attgagcagtggcgccagtggcatt

SEQ ID NO: 13159 - DNA, 25 bp, Canis familiaris
attggaatgaccccagtgtcagatt

SEQ ID NO: 13160 - DNA, 25 bp, Canis familiaris
cttaaatgtcaaccagttaaccctg

SEQ ID NO: 13161 - DNA, 25 bp, Canis familiaris
attcaaattccaacttaaccttcat

SEQ ID NO: 13162 - DNA, 25 bp, Canis familiaris
attaccattagatcagctaaccagt

SEQ ID NO: 13163 - DNA, 25 bp, Canis familiaris
attgtccaatattgcccgaaccaga

SEQ ID NO: 13164 - DNA, 25 bp, Canis familiaris
attgaccaggataaccgaagcacgt

SEQ ID NO: 13165 - DNA, 25 bp, Canis familiaris
attacctggaggtcaatgaactcga

SEQ ID NO: 13166 - DNA, 25 bp, Canis familiaris
atttctggtagacaatgaatttggt

SEQ ID NO: 13167 - DNA, 25 bp, Canis familiaris
attaccttcagtctacattttgttt

SEQ ID NO: 13168 - DNA, 25 bp, Canis familiaris
attgagtttcttcttctttaggcct

SEQ ID NO: 13169 - DNA, 25 bp, Canis familiaris
attgtgttaattatcttctagggga

SEQ ID NO: 13170 - DNA, 25 bp, Canis familiaris
cttgtttgtcaaagacccttgggtg

SEQ ID NO: 13171 - DNA, 25 bp, Canis familiaris
gttctgaaggaagaccctcgggtcg

SEQ ID NO: 13172 - DNA, 25 bp, Canis familiaris
actctaagtgtagaccccttcgtat

SEQ ID NO: 13173 - DNA, 25 bp, Canis familiaris
accaactgcttagcacccctggcca

SEQ ID NO: 13174 - DNA, 25 bp, Canis familiaris
actacacggtcgtcattcgttgtcc

SEQ ID NO: 13175 - DNA, 25 bp, Canis familiaris
ctaggcacggttcaccgtacagctc

SEQ ID NO: 13176 - DNA, 25 bp, Canis familiaris
attcacttggttcagcggtcaactc

SEQ ID NO: 13177 - DNA, 25 bp, Canis familiaris
attcccgggatgcaaggccaagttc

SEQ ID NO: 13178 - DNA, 25 bp, Canis familiaris
attcctcaggttgaacctcgggact

SEQ ID NO: 13179 - DNA, 25 bp, Canis familiaris
attttagtctaataccattgtaaca

SEQ ID NO: 13180 - DNA, 25 bp, Canis familiaris
atttcggactactcccgttaagctg

SEQ ID NO: 13181 - DNA, 25 bp, Canis familiaris
atttcctggaactcaccggattact

SEQ ID NO: 13182 - DNA, 25 bp, Canis familiaris
atcttctgggaaccttacggattct

SEQ ID NO: 13183 - DNA, 25 bp, Canis familiaris
attgttgtaccaccttacatgaagt

SEQ ID NO: 13184 - DNA, 25 bp, Canis familiaris
attgctttgggaacctccaaactca

SEQ ID NO: 13185 - DNA, 25 bp, Canis familiaris
aggtttgggtccctcaggatgactg

SEQ ID NO: 13186 - DNA, 25 bp, Canis familiaris
attggtgttggtattaggagatctg

SEQ ID NO: 13187 - DNA, 25 bp, Canis familiaris
attggtggaggatatgatgaagagt

SEQ ID NO: 13188 - DNA, 25 bp, Canis familiaris
attggagtgatagctttgaaggttc

SEQ ID NO: 13189 - DNA, 25 bp, Canis familiaris
atataagtgtagcccctcagagcgt

SEQ ID NO: 13190 - DNA, 25 bp, Canis familiaris
attacgtgtcgtgtcacagtggctc

SEQ ID NO: 13191 - DNA, 25 bp, Canis familiaris
attgacaatacacaaccagttgcac

SEQ ID NO: 13192 - DNA, 25 bp, Canis familiaris
attccgataacgaacgagactctgg

SEQ ID NO: 13193 - DNA, 25 bp, Canis familiaris
attccgttaaactatcaggcctgca

SEQ ID NO: 13194 - DNA, 25 bp, Canis familiaris
attaccagtgaaactgacccattca

SEQ ID NO: 13195 - DNA, 25 bp, Canis familiaris
attacagaaaaccaggtccatgtcc

SEQ ID NO: 13196 - DNA, 25 bp, Canis familiaris
attgaatggaattccaggaacccga

SEQ ID NO: 13197 - DNA, 25 bp, Canis familiaris
attggagtatactcgtgtacaccaa

SEQ ID NO: 13198 - DNA, 25 bp, Canis familiaris
attgtctttcagcaagggacaacaa

SEQ ID NO: 13199 - DNA, 25 bp, Canis familiaris
attccattccctgaggacaaaaatt

SEQ ID NO: 13200 - DNA, 25 bp, Canis familiaris
atagccatagcctcaaaccataaac

SEQ ID NO: 13201 - DNA, 25 bp, Canis familiaris
ataggttgtttcttcatctacgaac

SEQ ID NO: 13202 - DNA, 25 bp, Canis familiaris
attggtatttattgtcctacttcct

SEQ ID NO: 13203 - DNA, 25 bp, Canis familiaris
tttggaactaattggtccaatgctt

SEQ ID NO: 13204 - DNA, 25 bp, Canis familiaris
attggtaatagtcggcacagcaact

SEQ ID NO: 13205 - DNA, 25 bp, Canis familiaris
attggctctgaattagccacctccc

SEQ ID NO: 13206 - DNA, 25 bp, Canis familiaris
attgagctgctgcagcggtcactcc

SEQ ID NO: 13207 - DNA, 25 bp, Canis familiaris
atagatcgcagcgagggagctgctc

SEQ ID NO: 13208 - DNA, 25 bp, Canis familiaris
attgatggcaatgggaatgttcctt

SEQ ID NO: 13209 - DNA, 25 bp, Canis familiaris
attgtagcacagcagacttgtagga

SEQ ID NO: 13210 - DNA, 25 bp, Canis familiaris
attaatgctcggaagtgttcggggc

SEQ ID NO: 13211 - DNA, 25 bp, Canis familiaris
attataccgtgaaggtcctgggtca

SEQ ID NO: 13212 - DNA, 25 bp, Canis familiaris
attgtttccagagggtgcctgggtg

SEQ ID NO: 13213 - DNA, 25 bp, Canis familiaris
atagcggtctgcaggagtccgaggt

SEQ ID NO: 13214 - DNA, 25 bp, Canis familiaris
atagcgacgcgctggcgttacagcg

SEQ ID NO: 13215 - DNA, 25 bp, Canis familiaris
attgccatcgctgcaggcgttccag

SEQ ID NO: 13216 - DNA, 25 bp, Canis familiaris
attgctgcaactggcaaacctgccg

SEQ ID NO: 13217 - DNA, 25 bp, Canis familiaris
attgctgatgcccatataactaccg

SEQ ID NO: 13218 - DNA, 25 bp, Canis familiaris
attctgcatgtgccatttcctacag

SEQ ID NO: 13219 - DNA, 25 bp, Canis familiaris
atactgcaggacatccccaagtggt

SEQ ID NO: 13220 - DNA, 25 bp, Canis familiaris
atagtcagtaaagcccagcctggga

SEQ ID NO: 13221 - DNA, 25 bp, Canis familiaris
atagttggagaagccgtgtcgggaa

SEQ ID NO: 13222 - DNA, 25 bp, Canis familiaris
attgcttttagagccctgtaagaaa

SEQ ID NO: 13223 - DNA, 25 bp, Canis familiaris
attgttttgacctcccagacaaata

SEQ ID NO: 13224 - DNA, 25 bp, Canis familiaris
attgttttagtctcctcaaaagctg

SEQ ID NO: 13225 - DNA, 25 bp, Canis familiaris
attgtttctgatctcctctaaaagg

SEQ ID NO: 13226 - DNA, 25 bp, Canis familiaris
attgtttctgggtcgcgagataaaa

SEQ ID NO: 13227 - DNA, 25 bp, Canis familiaris
attgtttctggtcgcgagattaact

SEQ ID NO: 13228 - DNA, 25 bp, Canis familiaris
attgcttttgactcagacaaaacta

SEQ ID NO: 13229 - DNA, 25 bp, Canis familiaris
attccacttgactcagtaaacctcc

SEQ ID NO: 13230 - DNA, 25 bp, Canis familiaris
attctcctgttctaaaaataccata

SEQ ID NO: 13231 - DNA, 25 bp, Canis familiaris
attgtatgctttcagaataaattat

SEQ ID NO: 13232 - DNA, 25 bp, Canis familiaris
attgtgactactcaatttttctttt

SEQ ID NO: 13233 - DNA, 25 bp, Canis familiaris
attcggtgcacgcacattactacca

SEQ ID NO: 13234 - DNA, 25 bp, Canis familiaris
attcgataactgcacatcaacccct

SEQ ID NO: 13235 - DNA, 25 bp, Canis familiaris
attcgaacgtctgccctatcaactt

SEQ ID NO: 13236 - DNA, 25 bp, Canis familiaris
attggagtttgaggcccctaagctg

SEQ ID NO: 13237 - DNA, 25 bp, Canis familiaris
attgggaatctcgagacccgtggcg

SEQ ID NO: 13238 - DNA, 25 bp, Canis familiaris
atcttggcaatttaattcaaagggg

SEQ ID NO: 13239 - DNA, 25 bp, Canis familiaris
attaacagcttttcatttaggggtg

SEQ ID NO: 13240 - DNA, 25 bp, Canis familiaris
atcttcaaggccgcctacggaggtg

SEQ ID NO: 13241 - DNA, 25 bp, Canis familiaris
attggaatggaccacttccttcggt

SEQ ID NO: 13242 - DNA, 25 bp, Canis familiaris
attggttgcaagcccctattttggg

SEQ ID NO: 13243 - DNA, 25 bp, Canis familiaris
attgtgattgaaggcccttaccgca

SEQ ID NO: 13244 - DNA, 25 bp, Canis familiaris
attgaattcaatatctttcccccca

SEQ ID NO: 13245 - DNA, 25 bp, Canis familiaris
attgtatcaaataactttacttgcc

SEQ ID NO: 13246 - DNA, 25 bp, Canis familiaris
attctactagtcactcaggaccgct

SEQ ID NO: 13247 - DNA, 25 bp, Canis familiaris
attgtttattcaaccagtcaccctt

SEQ ID NO: 13248 - DNA, 25 bp, Canis familiaris
attgttacttcagctactaattcaa

SEQ ID NO: 13249 - DNA, 25 bp, Canis familiaris
attgactttgtaccaagtggttcaa

SEQ ID NO: 13250 - DNA, 25 bp, Canis familiaris
attgtctttgtcacggatggtttag

SEQ ID NO: 13251 - DNA, 25 bp, Canis familiaris
attgctatcgatcagggggttttaa

SEQ ID NO: 13252 - DNA, 25 bp, Canis familiaris
attgtaattctgtggcggtttctat

SEQ ID NO: 13253 - DNA, 25 bp, Canis familiaris
attgcttctttttggcggtatgttt

SEQ ID NO: 13254 - DNA, 25 bp, Canis familiaris
attggtttcatgctggcctttggat

SEQ ID NO: 13255 - DNA, 25 bp, Canis familiaris
attggtggtctgcagattccttaaa

SEQ ID NO: 13256 - DNA, 25 bp, Canis familiaris
attcggcacgccagttagctgtaaa

SEQ ID NO: 13257 - DNA, 25 bp, Canis familiaris
attgtccctgacagtttctgataat

SEQ ID NO: 13258 - DNA, 25 bp, Canis familiaris
attaccaaacaccttccaacaatga

SEQ ID NO: 13259 - DNA, 25 bp, Canis familiaris
attcctctaaacattgcccaagtga

SEQ ID NO: 13260 - DNA, 25 bp, Canis familiaris
attggcggagaagtttcaccaagct

SEQ ID NO: 13261 - DNA, 25 bp, Canis familiaris
attggagggcaagtctggtgccagc

SEQ ID NO: 13262 - DNA, 25 bp, Canis familiaris
attggggtgaggtgggccagcatga

SEQ ID NO: 13263 - DNA, 25 bp, Canis familiaris
attggggcaggtttgtggcttgaga

SEQ ID NO: 13264 - DNA, 25 bp, Canis familiaris
atttgggggtggagagaggcagagg

SEQ ID NO: 13265 - DNA, 25 bp, Canis familiaris
attctgtgacgggggaagggagcat

SEQ ID NO: 13266 - DNA, 25 bp, Canis familiaris
atagcattactgattggagggaaca

SEQ ID NO: 13267 - DNA, 25 bp, Canis familiaris
atgtaaatgcgtagatggaaggaaa

SEQ ID NO: 13268 - DNA, 25 bp, Canis familiaris
ataaaatctgcatgctggagggaaa

SEQ ID NO: 13269 - DNA, 25 bp, Canis familiaris
atattgaaatcgttgaagcgagaga

SEQ ID NO: 13270 - DNA, 25 bp, Canis familiaris
attctcagatatgatttcaaaagat

SEQ ID NO: 13271 - DNA, 25 bp, Canis familiaris
attgcctgagatgtttactcgtgcc

SEQ ID NO: 13272 - DNA, 25 bp, Canis familiaris
attgccagattctgggatccggccc

SEQ ID NO: 13273 - DNA, 25 bp, Canis familiaris
attgagagcttcacggtgcagcggc

SEQ ID NO: 13274 - DNA, 25 bp, Canis familiaris
attgagagcttcacggtgcagcggc

SEQ ID NO: 13275 - DNA, 25 bp, Canis familiaris
attgtcactgtcatcagaatctgtc

SEQ ID NO: 13276 - DNA, 25 bp, Canis familiaris
attctaatcctacttacgatcctgg

SEQ ID NO: 13277 - DNA, 25 bp, Canis familiaris
attctcattgaaagtttggatcctg

SEQ ID NO: 13278 - DNA, 25 bp, Canis familiaris
attccaaggacgatcataaccccta

SEQ ID NO: 13279 - DNA, 25 bp, Canis familiaris
attgctctgggacactttatcccct

SEQ ID NO: 13280 - DNA, 25 bp, Canis familiaris
attgaagtgggaccttcttgcctct

SEQ ID NO: 13281 - DNA, 25 bp, Canis familiaris
attggagctggtttgttctttccct

SEQ ID NO: 13282 - DNA, 25 bp, Canis familiaris
attgtgcacatttcagtttcctatc

SEQ ID NO: 13283 - DNA, 25 bp, Canis familiaris
attgagccgtactttgggctccctg

SEQ ID NO: 13284 - DNA, 25 bp, Canis familiaris
cttggccttaactttggaattctgg

SEQ ID NO: 13285 - DNA, 25 bp, Canis familiaris
attagcggtatatttcttgaagttt

SEQ ID NO: 13286 - DNA, 25 bp, Canis familiaris
attagcggtatatttcttgaagttt

SEQ ID NO: 13287 - DNA, 25 bp, Canis familiaris
attccggaatagttcttttgatcgt

SEQ ID NO: 13288 - DNA, 25 bp, Canis familiaris
attgccggcaaatcctttcaggaat

SEQ ID NO: 13289 - DNA, 25 bp, Canis familiaris
attgacggcaaatggcgggtaggcg

SEQ ID NO: 13290 - DNA, 25 bp, Canis familiaris
attgaccaaatgtggctgccagtag

SEQ ID NO: 13291 - DNA, 25 bp, Canis familiaris
attcggaaagtgggctgacgacatc

SEQ ID NO: 13292 - DNA, 25 bp, Canis familiaris
attgggagaagggggctagagcagt

SEQ ID NO: 13293 - DNA, 25 bp, Canis familiaris
attgggaagatatgggctgtatgcc

SEQ ID NO: 13294 - DNA, 25 bp, Canis familiaris
atagggatagtatgagccaataata

SEQ ID NO: 13295 - DNA, 25 bp, Canis familiaris
attccacaagtctgagctccataaa

SEQ ID NO: 13296 - DNA, 25 bp, Canis familiaris
attcattagggtggagcccaggtac

SEQ ID NO: 13297 - DNA, 25 bp, Canis familiaris
attcaagagatgtttccccaggttc

SEQ ID NO: 13298 - DNA, 25 bp, Canis familiaris
attgtagagctgctgctccagtctg

SEQ ID NO: 13299 - DNA, 25 bp, Canis familiaris
attgtaactggattgaagtgtcgtt

SEQ ID NO: 13300 - DNA, 25 bp, Canis familiaris
attggatagctgcacaagaggcttt

SEQ ID NO: 13301 - DNA, 25 bp, Canis familiaris
attgtgtcctgccatagactggttc

SEQ ID NO: 13302 - DNA, 25 bp, Canis familiaris
attgttggatgccaaatctcagtgt

SEQ ID NO: 13303 - DNA, 25 bp, Canis familiaris
attgcttaaggccaaccaggagctt

SEQ ID NO: 13304 - DNA, 25 bp, Canis familiaris
attcctacagtggaaccctgactcc

SEQ ID NO: 13305 - DNA, 25 bp, Canis familiaris
attgctagacctcaaccacagtctt

SEQ ID NO: 13306 - DNA, 25 bp, Canis familiaris
attctagtttcttcacaacgtagtg

SEQ ID NO: 13307 - DNA, 25 bp, Canis familiaris
atggaagtatgtatcgaatcgtaga

SEQ ID NO: 13308 - DNA, 25 bp, Canis familiaris
gttgaagtctttctaacgtagctac

SEQ ID NO: 13309 - DNA, 25 bp, Canis familiaris
attgcaccttttctggacagggtcc

SEQ ID NO: 13310 - DNA, 25 bp, Canis familiaris
attgaacagtcccgtggaaaggcca

SEQ ID NO: 13311 - DNA, 25 bp, Canis familiaris
attcaacaggcctggggaatgggct

SEQ ID NO: 13312 - DNA, 25 bp, Canis familiaris
attcccaggccccataggtattagt

SEQ ID NO: 13313 - DNA, 25 bp, Canis familiaris
attccggatcgcaacatgggttaag

SEQ ID NO: 13314 - DNA, 25 bp, Canis familiaris
atatctcggatacaatagaggcaaa

SEQ ID NO: 13315 - DNA, 25 bp, Canis familiaris
attccgggatggccaaggtgcaaac

SEQ ID NO: 13316 - DNA, 25 bp, Canis familiaris
attccagtggtgcagcacacttcct

SEQ ID NO: 13317 - DNA, 25 bp, Canis familiaris
attccactacatggtgcacacgtcc

SEQ ID NO: 13318 - DNA, 25 bp, Canis familiaris
attgaacttctcttcagcagagcaa

SEQ ID NO: 13319 - DNA, 25 bp, Canis familiaris
attgcctttgcctaccagagaagga

SEQ ID NO: 13320 - DNA, 25 bp, Canis familiaris
attgagcttcatcatgaccagaagc

SEQ ID NO: 13321 - DNA, 25 bp, Canis familiaris
attggctctgaatgacttaagctga

SEQ ID NO: 13322 - DNA, 25 bp, Canis familiaris
attgtcctggtgaacttcctggaag

SEQ ID NO: 13323 - DNA, 25 bp, Canis familiaris
attgtccgatttgatctccgtagga

SEQ ID NO: 13324 - DNA, 25 bp, Canis familiaris
attggcccaggagacctcagtatgg

SEQ ID NO: 13325 - DNA, 25 bp, Canis familiaris
attccgagaggagacccaatatact

SEQ ID NO: 13326 - DNA, 25 bp, Canis familiaris
cttcctgaggaagagcccgttagag

SEQ ID NO: 13327 - DNA, 25 bp, Canis familiaris
cttgcacggcggctaggccggtaga

SEQ ID NO: 13328 - DNA, 25 bp, Canis familiaris
cttgtcaggtggctagtttggggtt

SEQ ID NO: 13329 - DNA, 25 bp, Canis familiaris
attgatcacgggcttggttggcgtc

SEQ ID NO: 13330 - DNA, 25 bp, Canis familiaris
attgcccgggcactgttttgaggaa

SEQ ID NO: 13331 - DNA, 25 bp, Canis familiaris
attgtcctggactttgaattaaggt

SEQ ID NO: 13332 - DNA, 25 bp, Canis familiaris
attgtattgctgtccttgaatgcca

SEQ ID NO: 13333 - DNA, 25 bp, Canis familiaris
attggatatcggtcttagctcacac

SEQ ID NO: 13334 - DNA, 25 bp, Canis familiaris
attgtcttgcaggatggtaggacac

SEQ ID NO: 13335 - DNA, 25 bp, Canis familiaris
attgtcctgaaaatgtagagcacca

SEQ ID NO: 13336 - DNA, 25 bp, Canis familiaris
agtgccacgaaacggaggacacgga

SEQ ID NO: 13337 - DNA, 25 bp, Canis familiaris
attgccaccctacagggaactgctg

SEQ ID NO: 13338 - DNA, 25 bp, Canis familiaris
atggccaggccgtgacgaggcaagt

SEQ ID NO: 13339 - DNA, 25 bp, Canis familiaris
attgccaagcacttaaaggggagaa

SEQ ID NO: 13340 - DNA, 25 bp, Canis familiaris
attccgcccaaaaagcaccgagagg

SEQ ID NO: 13341 - DNA, 25 bp, Canis familiaris
atgtccccaaagatcagccttaaag

SEQ ID NO: 13342 - DNA, 25 bp, Canis familiaris
attccaccaaaatcaccaatccgaa

SEQ ID NO: 13343 - DNA, 25 bp, Canis familiaris
attcccgggattgacggtcacggag

SEQ ID NO: 13344 - DNA, 25 bp, Canis familiaris
attcccgggattgagcaggaggcgc

SEQ ID NO: 13345 - DNA, 25 bp, Canis familiaris
attcctcctagagtaattggacggc

SEQ ID NO: 13346 - DNA, 25 bp, Canis familiaris
attgcacattgttgaagcagaggca

SEQ ID NO: 13347 - DNA, 25 bp, Canis familiaris
attcatcaatccctgaggaggccag

SEQ ID NO: 13348 - DNA, 25 bp, Canis familiaris
attggcgtccgctatgatgagcccc

SEQ ID NO: 13349 - DNA, 25 bp, Canis familiaris
attggccctggcaaatggctagcct

SEQ ID NO: 13350 - DNA, 25 bp, Canis familiaris
attggggctgttaagtctgaccata

SEQ ID NO: 13351 - DNA, 25 bp, Canis familiaris
attggtggtcttaaactgaactggt

SEQ ID NO: 13352 - DNA, 25 bp, Canis familiaris
attgggcagacctcaaaacactgtt

SEQ ID NO: 13353 - DNA, 25 bp, Canis familiaris
attaggagtgccgcgaatgctacgt

SEQ ID NO: 13354 - DNA, 25 bp, Canis familiaris
attaggagtgctggggatccctggg

SEQ ID NO: 13355 - DNA, 25 bp, Canis familiaris
attgagaggttgagcgccctcgtgg

SEQ ID NO: 13356 - DNA, 25 bp, Canis familiaris
attgatgggattcctatgccacctg

SEQ ID NO: 13357 - DNA, 25 bp, Canis familiaris
attggccattgtacatagcaccgtg

SEQ ID NO: 13358 - DNA, 25 bp, Canis familiaris
attggtttgttatcatgcacttatg

SEQ ID NO: 13359 - DNA, 25 bp, Canis familiaris
attggttaagtgtctgactcctgat

SEQ ID NO: 13360 - DNA, 25 bp, Canis familiaris
attgagcgctcaggtgactgcagcc

SEQ ID NO: 13361 - DNA, 25 bp, Canis familiaris
attgtggcatcaactgacactccag

SEQ ID NO: 13362 - DNA, 25 bp, Canis familiaris
attggagtacggtatcccagacata

SEQ ID NO: 13363 - DNA, 25 bp, Canis familiaris
attgcatcagtagagaataccttta

SEQ ID NO: 13364 - DNA, 25 bp, Canis familiaris
attgcatactcagatgtcaagctct

SEQ ID NO: 13365 - DNA, 25 bp, Canis familiaris
attgatcagcttgtgtatggtttag

SEQ ID NO: 13366 - DNA, 25 bp, Canis familiaris
attggcctgccagtttgagtttcct

SEQ ID NO: 13367 - DNA, 25 bp, Canis familiaris
attgtccatcagttcctggtaacct

SEQ ID NO: 13368 - DNA, 25 bp, Canis familiaris
attggccacagaatccgcgtgatgc

SEQ ID NO: 13369 - DNA, 25 bp, Canis familiaris
atagcccaacacgcactgggcgtac

SEQ ID NO: 13370 - DNA, 25 bp, Canis familiaris
atagttccaatggccctgaggggga

SEQ ID NO: 13371 - DNA, 25 bp, Canis familiaris
attgttctcctaccctaaggtgaca

SEQ ID NO: 13372 - DNA, 25 bp, Canis familiaris
attgaatccagctctccaagaggtg

SEQ ID NO: 13373 - DNA, 25 bp, Canis familiaris
attgcacagtacccccaaggatggg

SEQ ID NO: 13374 - DNA, 25 bp, Canis familiaris
attgcaagtttggcttttggggaca

SEQ ID NO: 13375 - DNA, 25 bp, Canis familiaris
attgcttcttgtgttttactgtcag

SEQ ID NO: 13376 - DNA, 25 bp, Canis familiaris
attggtgctactgtttatccgtaat

SEQ ID NO: 13377 - DNA, 25 bp, Canis familiaris
attggcttcttggtgttagctcagt

SEQ ID NO: 13378 - DNA, 25 bp, Canis familiaris
attggcattattttagtctgtcagt

SEQ ID NO: 13379 - DNA, 25 bp, Canis familiaris
attggcattcttgtagtcattggga

SEQ ID NO: 13380 - DNA, 25 bp, Canis familiaris
atctggagttggggcctttgggagg

SEQ ID NO: 13381 - DNA, 25 bp, Canis familiaris
attgggtctggatctttattgggaa

SEQ ID NO: 13382 - DNA, 25 bp, Canis familiaris
attggctttctcccaaatattggga

SEQ ID NO: 13383 - DNA, 25 bp, Canis familiaris
attccgctcgccacaaatatgggta

SEQ ID NO: 13384 - DNA, 25 bp, Canis familiaris
attcctcactgagagccaggtgggt

SEQ ID NO: 13385 - DNA, 25 bp, Canis familiaris
attcctccatcagggcctggtggaa

SEQ ID NO: 13386 - DNA, 25 bp, Canis familiaris
attggctaatcctccattgtacaca

SEQ ID NO: 13387 - DNA, 25 bp, Canis familiaris
attgtctgaactctagcattttccc

SEQ ID NO: 13388 - DNA, 25 bp, Canis familiaris
attgtcatatacccggttcagcctg

SEQ ID NO: 13389 - DNA, 25 bp, Canis familiaris
attgatttggggcatttcagcgctg

SEQ ID NO: 13390 - DNA, 25 bp, Canis familiaris
atttctggtggtctttccagggcct

SEQ ID NO: 13391 - DNA, 25 bp, Canis familiaris
attctctggaggaggtcaccaggtg

SEQ ID NO: 13392 - DNA, 25 bp, Canis familiaris
attggctggggtagtgctgcccaga

SEQ ID NO: 13393 - DNA, 25 bp, Canis familiaris
attgggagccagctgcaaccagcag

SEQ ID NO: 13394 - DNA, 25 bp, Canis familiaris
attgggacagcaagtgaaggcacag

SEQ ID NO: 13395 - DNA, 25 bp, Canis familiaris
attgtggaacacgatggggcaaaca

SEQ ID NO: 13396 - DNA, 25 bp, Canis familiaris
attgggagtcatctgtgggaataca

SEQ ID NO: 13397 - DNA, 25 bp, Canis familiaris
attgtggcacttggggcgaggacaa

SEQ ID NO: 13398 - DNA, 25 bp, Canis familiaris
ataggtcactgtgtggccatctacc

SEQ ID NO: 13399 - DNA, 25 bp, Canis familiaris
attgagttcctcagtcattctagcc

SEQ ID NO: 13400 - DNA, 25 bp, Canis familiaris
attgggagcctcatctgcaatgtag

SEQ ID NO: 13401 - DNA, 25 bp, Canis familiaris
attgggcgaagcattctgggcgcgg

SEQ ID NO: 13402 - DNA, 25 bp, Canis familiaris
attgggcccatggctgttgggcggc

SEQ ID NO: 13403 - DNA, 25 bp, Canis familiaris
attgggcccatgtgtggggtgtcgt

SEQ ID NO: 13404 - DNA, 25 bp, Canis familiaris
attgggctccccatgggagtttcat

SEQ ID NO: 13405 - DNA, 25 bp, Canis familiaris
attaggccccacatgggactctggt

SEQ ID NO: 13406 - DNA, 25 bp, Canis familiaris
attggccacctctacgggaatagag

SEQ ID NO: 13407 - DNA, 25 bp, Canis familiaris
attgtgcccacctgaatgtaaagta

SEQ ID NO: 13408 - DNA, 25 bp, Canis familiaris
attgatgccgccaggaaccagagac

SEQ ID NO: 13409 - DNA, 25 bp, Canis familiaris
attatgacccagagaggcccgatgc

SEQ ID NO: 13410 - DNA, 25 bp, Canis familiaris
attgaggttcagaaggcccacgacc

SEQ ID NO: 13411 - DNA, 25 bp, Canis familiaris
attgaggatctatcagggcacaccc

SEQ ID NO: 13412 - DNA, 25 bp, Canis familiaris
attgtgctgacaacacaggagccaa

SEQ ID NO: 13413 - DNA, 25 bp, Canis familiaris
attgtcagcaatgcatcctgcacca

SEQ ID NO: 13414 - DNA, 25 bp, Canis familiaris
attgtacatggaagcctgcacgcat

SEQ ID NO: 13415 - DNA, 25 bp, Canis familiaris
attgtcatatgtcaggatgaccaga

SEQ ID NO: 13416 - DNA, 25 bp, Canis familiaris
attgctcaatctcagttgacggcac

SEQ ID NO: 13417 - DNA, 25 bp, Canis familiaris
attctcgttaagggacttcaggtca

SEQ ID NO: 13418 - DNA, 25 bp, Canis familiaris
attcccttctcactgggtaaagtag

SEQ ID NO: 13419 - DNA, 25 bp, Canis familiaris
attccttttaggagaattagctagg

SEQ ID NO: 13420 - DNA, 25 bp, Canis familiaris
attcccttttcactggtttactatg

SEQ ID NO: 13421 - DNA, 25 bp, Canis familiaris
attgcggagttaccttttgtacgag

SEQ ID NO: 13422 - DNA, 25 bp, Canis familiaris
attgctggattgtcaccttttggga

SEQ ID NO: 13423 - DNA, 25 bp, Canis familiaris
atgcctggtggctcaccagttgagc

SEQ ID NO: 13424 - DNA, 25 bp, Canis familiaris
attctggcagtgtccaggcagcggg

SEQ ID NO: 13425 - DNA, 25 bp, Canis familiaris
tattcggaattcaaaacggaccaat

SEQ ID NO: 13426 - DNA, 25 bp, Canis familiaris
attgcagggcttgaaaccaaaccaa

SEQ ID NO: 13427 - DNA, 25 bp, Canis familiaris
attggatctcgggaatgaccaaacc

SEQ ID NO: 13428 - DNA, 25 bp, Canis familiaris
attgtcaccgttatcaccaaagtcc

SEQ ID NO: 13429 - DNA, 25 bp, Canis familiaris
attggagggcttcacacctataccc

SEQ ID NO: 13430 - DNA, 25 bp, Canis familiaris
attggaggtgccctatacacgtcat

SEQ ID NO: 13431 - DNA, 25 bp, Canis familiaris
attggccgtggcctggcacctgtgc

SEQ ID NO: 13432 - DNA, 25 bp, Canis familiaris
attgaccgtcaattggcaacgcgaa

SEQ ID NO: 13433 - DNA, 25 bp, Canis familiaris
attcagtcggaatggcgctcagcag

SEQ ID NO: 13434 - DNA, 25 bp, Canis familiaris
attgcattagagcacggagtccgtc

SEQ ID NO: 13435 - DNA, 25 bp, Canis familiaris
attgagtaggagtgtggttggtgtc

SEQ ID NO: 13436 - DNA, 25 bp, Canis familiaris
attggacaagcatcgatgattttgg

SEQ ID NO: 13437 - DNA, 25 bp, Canis familiaris
attgggacagctctatgatttgggt

SEQ ID NO: 13438 - DNA, 25 bp, Canis familiaris
atgcgggtcgtgcatagctatgagg

SEQ ID NO: 13439 - DNA, 25 bp, Canis familiaris
attgcggtcgcgcggatcatgatgc

SEQ ID NO: 13440 - DNA, 25 bp, Canis familiaris
attgcggtcactggagagaagaaga

SEQ ID NO: 13441 - DNA, 25 bp, Canis familiaris
attgctttcagtgacagggcagaag

SEQ ID NO: 13442 - DNA, 25 bp, Canis familiaris
attgccttcctgagagctggggagg

SEQ ID NO: 13443 - DNA, 25 bp, Canis familiaris
attctcctctgcccaagggagggag

SEQ ID NO: 13444 - DNA, 25 bp, Canis familiaris
attctccacgccccagtgagaatgc

SEQ ID NO: 13445 - DNA, 25 bp, Canis familiaris
attggacccagcccatggagaagct

SEQ ID NO: 13446 - DNA, 25 bp, Canis familiaris
attggtgtccgcggcggcaagagct

SEQ ID NO: 13447 - DNA, 25 bp, Canis familiaris
attgggctccagggaggcactgcat

SEQ ID NO: 13448 - DNA, 25 bp, Canis familiaris
attggacatccacctgcaggaggat

SEQ ID NO: 13449 - DNA, 25 bp, Canis familiaris
attggccaccaactgtagatgtata

SEQ ID NO: 13450 - DNA, 25 bp, Canis familiaris
attgcatactcctcagttagtcata

SEQ ID NO: 13451 - DNA, 25 bp, Canis familiaris
attgtcacactctgatttaatcatg

SEQ ID NO: 13452 - DNA, 25 bp, Canis familiaris
attggatcacatttactaatacatt

SEQ ID NO: 13453 - DNA, 25 bp, Canis familiaris
attggaactctgtgtgattgtcata

SEQ ID NO: 13454 - DNA, 25 bp, Canis familiaris
attgtgtgactattccatgtttaaa

SEQ ID NO: 13455 - DNA, 25 bp, Canis familiaris
attgaagcaatctggagtgttaaat

SEQ ID NO: 13456 - DNA, 25 bp, Canis familiaris
attgtaggtcaacagtgtgtaaagt

SEQ ID NO: 13457 - DNA, 25 bp, Canis familiaris
attgagagtgcttatctttgttgaa

SEQ ID NO: 13458 - DNA, 25 bp, Canis familiaris
attgagctgctcttttatataataa

SEQ ID NO: 13459 - DNA, 25 bp, Canis familiaris
attgttcgaagtctatgatatctaa

SEQ ID NO: 13460 - DNA, 25 bp, Canis familiaris
attgtaccatttgtgaacttcatca

SEQ ID NO: 13461 - DNA, 25 bp, Canis familiaris
attgttcctgttgagactatgacta

SEQ ID NO: 13462 - DNA, 25 bp, Canis familiaris
attggatacctatgaggcattgact

SEQ ID NO: 13463 - DNA, 25 bp, Canis familiaris
attgaaacattacctgccttgcagt

SEQ ID NO: 13464 - DNA, 25 bp, Canis familiaris
attgaataatacgccctgttttttg

SEQ ID NO: 13465 - DNA, 25 bp, Canis familiaris
attgagtgaatccagtccctcattt

SEQ ID NO: 13466 - DNA, 25 bp, Canis familiaris
attgggaccaagatcccttgctaaa

SEQ ID NO: 13467 - DNA, 25 bp, Canis familiaris
attgaggtctcatgaatttttctaa

SEQ ID NO: 13468 - DNA, 25 bp, Canis familiaris
attgcagaggcagacagacttgttc

SEQ ID NO: 13469 - DNA, 25 bp, Canis familiaris
attactggcacggagttgctgtaga

SEQ ID NO: 13470 - DNA, 25 bp, Canis familiaris
attggctgacaagcaggtctgtaat

SEQ ID NO: 13471 - DNA, 25 bp, Canis familiaris
attggccatccaggagtgctctgaa

SEQ ID NO: 13472 - DNA, 25 bp, Canis familiaris
attggcaattactattcatctgaga

SEQ ID NO: 13473 - DNA, 25 bp, Canis familiaris
attgagatgatgtatctgatatttg

SEQ ID NO: 13474 - DNA, 25 bp, Canis familiaris
attgcaggaattggatatcatctat

SEQ ID NO: 13475 - DNA, 25 bp, Canis familiaris
attgccgagcctgcatgacataatc

SEQ ID NO: 13476 - DNA, 25 bp, Canis familiaris
attgcacggctaccatgaagtctgg

SEQ ID NO: 13477 - DNA, 25 bp, Canis familiaris
attgatcacctacatattcttactg

SEQ ID NO: 13478 - DNA, 25 bp, Canis familiaris
attgctccagttctttgctaagcag

SEQ ID NO: 13479 - DNA, 25 bp, Canis familiaris
attccacacgtcatttctcaaaatc

SEQ ID NO: 13480 - DNA, 25 bp, Canis familiaris
attggagcacaaatttttagagaac

SEQ ID NO: 13481 - DNA, 25 bp, Canis familiaris
aggcgtcacgagattttaagagagt

SEQ ID NO: 13482 - DNA, 25 bp, Canis familiaris
atagccacctggagtttcacggagt

SEQ ID NO: 13483 - DNA, 25 bp, Canis familiaris
attggcacactgattgtttgccgga

SEQ ID NO: 13484 - DNA, 25 bp, Canis familiaris
attggagatctgacttcctgtgcac

SEQ ID NO: 13485 - DNA, 25 bp, Canis familiaris
attgagtcattgagtcttgtgcatc

SEQ ID NO: 13486 - DNA, 25 bp, Canis familiaris
attgtgatactttgttatggcagcc

SEQ ID NO: 13487 - DNA, 25 bp, Canis familiaris
attgatgtggccaaggtcaacacct

SEQ ID NO: 13488 - DNA, 25 bp, Canis familiaris
attgatgtacccagcagaacagcaa

SEQ ID NO: 13489 - DNA, 25 bp, Canis familiaris
attgttctccacagagagatgcaga

SEQ ID NO: 13490 - DNA, 25 bp, Canis familiaris
attctacgccacaggagggagtggt

SEQ ID NO: 13491 - DNA, 25 bp, Canis familiaris
attctagagccagttttagagaggg

SEQ ID NO: 13492 - DNA, 25 bp, Canis familiaris
attcccaccatgatagaagagggtc

SEQ ID NO: 13493 - DNA, 25 bp, Canis familiaris
attcggcacgaggtaaaacaggatg

SEQ ID NO: 13494 - DNA, 25 bp, Canis familiaris
attcagtgtcgggtcaccaccgagg

SEQ ID NO: 13495 - DNA, 25 bp, Canis familiaris
attagctttggtggcccacctgtca

SEQ ID NO: 13496 - DNA, 25 bp, Canis familiaris
attgacattttagcccattcttacc

SEQ ID NO: 13497 - DNA, 25 bp, Canis familiaris
attgatctcccattattccatagtt

SEQ ID NO: 13498 - DNA, 25 bp, Canis familiaris
attgactcagaaagttcctcagctc

SEQ ID NO: 13499 - DNA, 25 bp, Canis familiaris
attgtcccaaagaatctgtcctcca

SEQ ID NO: 13500 - DNA, 25 bp, Canis familiaris
attgggccagcaagtctgctgacct

SEQ ID NO: 13501 - DNA, 25 bp, Canis familiaris
attgtagctcagtcacagccgactc

SEQ ID NO: 13502 - DNA, 25 bp, Canis familiaris
attgtagtcaatctgcatgcgacca

SEQ ID NO: 13503 - DNA, 25 bp, Canis familiaris
attgtcagtgcaagctggtggccca

SEQ ID NO: 13504 - DNA, 25 bp, Canis familiaris
attctgagtcatctggaccccagag

SEQ ID NO: 13505 - DNA, 25 bp, Canis familiaris
attgatgtatatgttatgccccaga

SEQ ID NO: 13506 - DNA, 25 bp, Canis familiaris
attttctagtttcccttgcagttat

SEQ ID NO: 13507 - DNA, 25 bp, Canis familiaris
attgtggttttttgccttgagagta

SEQ ID NO: 13508 - DNA, 25 bp, Canis familiaris
attggcttttgcctacctggaagat

SEQ ID NO: 13509 - DNA, 25 bp, Canis familiaris
attggtctctcgacgacacgaataa

SEQ ID NO: 13510 - DNA, 25 bp, Canis familiaris
attggccctgctaaaatagaatata

SEQ ID NO: 13511 - DNA, 25 bp, Canis familiaris
attggccttgctgaactataaactt

SEQ ID NO: 13512 - DNA, 25 bp, Canis familiaris
attggcattctgttatagcctgaat

SEQ ID NO: 13513 - DNA, 25 bp, Canis familiaris
attgttcttgtggctgaccatcagt

SEQ ID NO: 13514 - DNA, 25 bp, Canis familiaris
attgtgcccttaaattcatcagatt

SEQ ID NO: 13515 - DNA, 25 bp, Canis familiaris
attggccttgacagattcacacagt

SEQ ID NO: 13516 - DNA, 25 bp, Canis familiaris
attgagcctgtgtctagctagaaga

SEQ ID NO: 13517 - DNA, 25 bp, Canis familiaris
attgcaactggcctggccgcaacag

SEQ ID NO: 13518 - DNA, 25 bp, Canis familiaris
attgaagatgtcctcagcccagaat

SEQ ID NO: 13519 - DNA, 25 bp, Canis familiaris
attgcagagatgcctgacacagtca

SEQ ID NO: 13520 - DNA, 25 bp, Canis familiaris
attgcagagatggcattatagcatc

SEQ ID NO: 13521 - DNA, 25 bp, Canis familiaris
attgcagctgatggatgtaggattg

SEQ ID NO: 13522 - DNA, 25 bp, Canis familiaris
atagcagtattttaagttgattcgt

SEQ ID NO: 13523 - DNA, 25 bp, Canis familiaris
ataggtgttttgggtagcatctggt

SEQ ID NO: 13524 - DNA, 25 bp, Canis familiaris
attgttttttcctgagacgcagttt

SEQ ID NO: 13525 - DNA, 25 bp, Canis familiaris
attgttctatattgccgaggtctga

SEQ ID NO: 13526 - DNA, 25 bp, Canis familiaris
attgtattcctgaccgaactctgaa

SEQ ID NO: 13527 - DNA, 25 bp, Canis familiaris
attgctttcctgaggataccttccc

SEQ ID NO: 13528 - DNA, 25 bp, Canis familiaris
attggttctcttatcataccttccc

SEQ ID NO: 13529 - DNA, 25 bp, Canis familiaris
attggattttatagttcgtcttaga

SEQ ID NO: 13530 - DNA, 25 bp, Canis familiaris
attggtgttagctgctacctttcag

SEQ ID NO: 13531 - DNA, 25 bp, Canis familiaris
attgccttacttgtcaccatttaga

SEQ ID NO: 13532 - DNA, 25 bp, Canis familiaris
attgtcttcctgtaagacctttggg

SEQ ID NO: 13533 - DNA, 25 bp, Canis familiaris
attgtcttcctgtaagacctttggg

SEQ ID NO: 13534 - DNA, 25 bp, Canis familiaris
attgttccctacaatacgtgcttcc

SEQ ID NO: 13535 - DNA, 25 bp, Canis familiaris
attgtctccaatatggacatctctt

SEQ ID NO: 13536 - DNA, 25 bp, Canis familiaris
attggattcattggtgggatcatca

SEQ ID NO: 13537 - DNA, 25 bp, Canis familiaris
attggaactatgactaagacatcag

SEQ ID NO: 13538 - DNA, 25 bp, Canis familiaris
attggaactgataccgataccgctt

SEQ ID NO: 13539 - DNA, 25 bp, Canis familiaris
attggaactgtgctactgactcctt

SEQ ID NO: 13540 - DNA, 25 bp, Canis familiaris
attggaaggatctgcactggtctct

SEQ ID NO: 13541 - DNA, 25 bp, Canis familiaris
attggagggctaatgtctggtgtca

SEQ ID NO: 13542 - DNA, 25 bp, Canis familiaris
attgtgtaggcttgttcttctcata

SEQ ID NO: 13543 - DNA, 25 bp, Canis familiaris
attgatgtactgtgcttttgttaga

SEQ ID NO: 13544 - DNA, 25 bp, Canis familiaris
attgattcacctgtttttgataagg

SEQ ID NO: 13545 - DNA, 25 bp, Canis familiaris
attgttcacctggtttgaaataata

SEQ ID NO: 13546 - DNA, 25 bp, Canis familiaris
attgttcctctcctttgtaacattt

SEQ ID NO: 13547 - DNA, 25 bp, Canis familiaris
attgttctcattttctgtgatacat

SEQ ID NO: 13548 - DNA, 25 bp, Canis familiaris
attggtgcatcattatcacttgtcc

SEQ ID NO: 13549 - DNA, 25 bp, Canis familiaris
attggtgtcagatacactgcgccca

SEQ ID NO: 13550 - DNA, 25 bp, Canis familiaris
attgaagtagaagacctgccacagt

SEQ ID NO: 13551 - DNA, 25 bp, Canis familiaris
attgggccaaaggtcactacacgga

SEQ ID NO: 13552 - DNA, 25 bp, Canis familiaris
attggcatgtttagactgtcacggt

SEQ ID NO: 13553 - DNA, 25 bp, Canis familiaris
attggttttctgtattagcagcttt

SEQ ID NO: 13554 - DNA, 25 bp, Canis familiaris
atcatgtttgtaaaactggccgaat

SEQ ID NO: 13555 - DNA, 25 bp, Canis familiaris
attgtgttggatgattctgcccgaa

SEQ ID NO: 13556 - DNA, 25 bp, Canis familiaris
attggctgttatgttggcgctgcta

SEQ ID NO: 13557 - DNA, 25 bp, Canis familiaris
attggtgttcattatttgcattgct

SEQ ID NO: 13558 - DNA, 25 bp, Canis familiaris
attgtctgattctagaattgctctg

SEQ ID NO: 13559 - DNA, 25 bp, Canis familiaris
attgtgctggtaatgcaaccctggt

SEQ ID NO: 13560 - DNA, 25 bp, Canis familiaris
attgccggtatggacagcacctgga

SEQ ID NO: 13561 - DNA, 25 bp, Canis familiaris
attccaggccagaaccagcacagga

SEQ ID NO: 13562 - DNA, 25 bp, Canis familiaris
attggccatcaatcttgtcattcaa

SEQ ID NO: 13563 - DNA, 25 bp, Canis familiaris
attggcctcaaatagctgcttcatt

SEQ ID NO: 13564 - DNA, 25 bp, Canis familiaris
attgtgcctaggttatgtggtgact

SEQ ID NO: 13565 - DNA, 25 bp, Canis familiaris
attcatctctaccctagcaggaact

SEQ ID NO: 13566 - DNA, 25 bp, Canis familiaris
attgcgccaattccgagaggagacc

SEQ ID NO: 13567 - DNA, 25 bp, Canis familiaris
attcctgcagagcccatgggtggac

SEQ ID NO: 13568 - DNA, 25 bp, Canis familiaris
attccagagggccatcactggggca

SEQ ID NO: 13569 - DNA, 25 bp, Canis familiaris
attgaaaggacttccagggaatgaa

SEQ ID NO: 13570 - DNA, 25 bp, Canis familiaris
attgtagatgaactctaaagccaag

SEQ ID NO: 13571 - DNA, 25 bp, Canis familiaris
attgcatagcagtgttaacctcata

SEQ ID NO: 13572 - DNA, 25 bp, Canis familiaris
attgaggagatagccaacctctacc

SEQ ID NO: 13573 - DNA, 25 bp, Canis familiaris
attgcacgaatatgccatacctgaa

SEQ ID NO: 13574 - DNA, 25 bp, Canis familiaris
attgcagtggactagacaacttcaa

SEQ ID NO: 13575 - DNA, 25 bp, Canis familiaris
atctgcatgatcccaaacaactagt

SEQ ID NO: 13576 - DNA, 25 bp, Canis familiaris
attgatatctcggatacaatagagg

SEQ ID NO: 13577 - DNA, 25 bp, Canis familiaris
atatattctggatacttgggagggg

SEQ ID NO: 13578 - DNA, 25 bp, Canis familiaris
atatcttagccatccagggtaggta

SEQ ID NO: 13579 - DNA, 25 bp, Canis familiaris
attgcttagcattaaattcgtagag

SEQ ID NO: 13580 - DNA, 25 bp, Canis familiaris
attgctgtacttaaattccttgtga

SEQ ID NO: 13581 - DNA, 25 bp, Canis familiaris
attgctgaaataaaagcccatcagg

SEQ ID NO: 13582 - DNA, 25 bp, Canis familiaris
attctacacaatcaagcggtcgaca

SEQ ID NO: 13583 - DNA, 25 bp, Canis familiaris
accgacgatgtagacaggtcgactg

SEQ ID NO: 13584 - DNA, 25 bp, Canis familiaris
attcgacgttgacccgaaatgcctg

SEQ ID NO: 13585 - DNA, 25 bp, Canis familiaris
attgccacctaacaggaagtgtctg

SEQ ID NO: 13586 - DNA, 25 bp, Canis familiaris
attccccaacccagatcagtttgat

SEQ ID NO: 13587 - DNA, 25 bp, Canis familiaris
attccaccactctgcaggtggtgtt

SEQ ID NO: 13588 - DNA, 25 bp, Canis familiaris
atatcccccacaccaggttaattgt

SEQ ID NO: 13589 - DNA, 25 bp, Canis familiaris
attgcccgaacacctgaggtcacat

SEQ ID NO: 13590 - DNA, 25 bp, Canis familiaris
attgcccagtgggttgaacatcctg

SEQ ID NO: 13591 - DNA, 25 bp, Canis familiaris
attggccgtgtttaaatctcttcgt

SEQ ID NO: 13592 - DNA, 25 bp, Canis familiaris
attgtcgtgtgttaattactcctct

SEQ ID NO: 13593 - DNA, 25 bp, Canis familiaris
attgtcgttgtggcaaactcttccg

SEQ ID NO: 13594 - DNA, 25 bp, Canis familiaris
attgtggttgtgttacttatttctg

SEQ ID NO: 13595 - DNA, 25 bp, Canis familiaris
attgatgacgtttctggctttctac

SEQ ID NO: 13596 - DNA, 25 bp, Canis familiaris
atttgggtttgtcctagcactatgc

SEQ ID NO: 13597 - DNA, 25 bp, Canis familiaris
attagggtactgaacgtcactgtca

SEQ ID NO: 13598 - DNA, 25 bp, Canis familiaris
attaggcgcgaccacagccttttat

SEQ ID NO: 13599 - DNA, 25 bp, Canis familiaris
attgcaggccggcacaatcttatgt

SEQ ID NO: 13600 - DNA, 25 bp, Canis familiaris
attgtcccttggtcagttttgtaga

SEQ ID NO: 13601 - DNA, 25 bp, Canis familiaris
atgggccggtaatgatttagtagct

SEQ ID NO: 13602 - DNA, 25 bp, Canis familiaris
aggacctacctacatttgaaagcca

SEQ ID NO: 13603 - DNA, 25 bp, Canis familiaris
attccctaactattattggcaaagc

SEQ ID NO: 13604 - DNA, 25 bp, Canis familiaris
attccaggaatcttcttcggaccat

SEQ ID NO: 13605 - DNA, 25 bp, Canis familiaris
attcctgagaatcttaagggccatt

SEQ ID NO: 13606 - DNA, 25 bp, Canis familiaris
attcacttgaacaggaaacccatgt

SEQ ID NO: 13607 - DNA, 25 bp, Canis familiaris
attgcacttgtagagggattcacgt

SEQ ID NO: 13608 - DNA, 25 bp, Canis familiaris
attgagctttagggttatttcttat

SEQ ID NO: 13609 - DNA, 25 bp, Canis familiaris
attgactaaaattttatttctctca

SEQ ID NO: 13610 - DNA, 25 bp, Canis familiaris
attgcaaacaaatactaaactcatt

SEQ ID NO: 13611 - DNA, 25 bp, Canis familiaris
attaagccaaatctctaaagactca

SEQ ID NO: 13612 - DNA, 25 bp, Canis familiaris
attaaccggaggccaatataacatt

SEQ ID NO: 13613 - DNA, 25 bp, Canis familiaris
attacccttggtaggcattagactt

SEQ ID NO: 13614 - DNA, 25 bp, Canis familiaris
atattggccttgctggactataacc

SEQ ID NO: 13615 - DNA, 25 bp, Canis familiaris
attgcttctctaaaagccttatacc

SEQ ID NO: 13616 - DNA, 25 bp, Canis familiaris
attgctggctttgaagttactccca

SEQ ID NO: 13617 - DNA, 25 bp, Canis familiaris
attgggccttgcaaatacatccccc

SEQ ID NO: 13618 - DNA, 25 bp, Canis familiaris
attggacagtgtctacctactccac

SEQ ID NO: 13619 - DNA, 25 bp, Canis familiaris
attgccacggatgaatcttccacca

SEQ ID NO: 13620 - DNA, 25 bp, Canis familiaris
attgcggggtgggctctatccacca

SEQ ID NO: 13621 - DNA, 25 bp, Canis familiaris
attgggggaggattgctatctttat

SEQ ID NO: 13622 - DNA, 25 bp, Canis familiaris
attggtgagggcatatcttctttac

SEQ ID NO: 13623 - DNA, 25 bp, Canis familiaris
attggtgtgtggtgttgtctgtata

SEQ ID NO: 13624 - DNA, 25 bp, Canis familiaris
attgtgtgattggttttcctgcctg

SEQ ID NO: 13625 - DNA, 25 bp, Canis familiaris
attgttgacatttcttttctcctat

SEQ ID NO: 13626 - DNA, 25 bp, Canis familiaris
attgaagatcactgtatttacctat

SEQ ID NO: 13627 - DNA, 25 bp, Canis familiaris
attgggaactccgatatccagcctt

SEQ ID NO: 13628 - DNA, 25 bp, Canis familiaris
attgtggagaaccaagagggcctct

SEQ ID NO: 13629 - DNA, 25 bp, Canis familiaris
attgtggagaaaccagagggcctct

SEQ ID NO: 13630 - DNA, 25 bp, Canis familiaris
attgggaggggcctgaggctggtct

SEQ ID NO: 13631 - DNA, 25 bp, Canis familiaris
attggggtagggctggctgttccct

SEQ ID NO: 13632 - DNA, 25 bp, Canis familiaris
attgctgtggtatgtgttggctgag

SEQ ID NO: 13633 - DNA, 25 bp, Canis familiaris
attgctgatgcgattgtttttgtaa

SEQ ID NO: 13634 - DNA, 25 bp, Canis familiaris
attgagagcaatgtctttcttccaa

SEQ ID NO: 13635 - DNA, 25 bp, Canis familiaris
attggagagtcaccatgctgtcctc

SEQ ID NO: 13636 - DNA, 25 bp, Canis familiaris
attggtgcagttcagctgtcttctc

SEQ ID NO: 13637 - DNA, 25 bp, Canis familiaris
attgtgtatttatctgtgcttctta

SEQ ID NO: 13638 - DNA, 25 bp, Canis familiaris
attgtctacttatttgtgcattcta

SEQ ID NO: 13639 - DNA, 25 bp, Canis familiaris
attgtctgactttactatgattcct

SEQ ID NO: 13640 - DNA, 25 bp, Canis familiaris
attgctgttttctcaagtttctgcc

SEQ ID NO: 13641 - DNA, 25 bp, Canis familiaris
attgctcattattcccaaggttctt

SEQ ID NO: 13642 - DNA, 25 bp, Canis familiaris
attgccatcatgctttaggagtttt

SEQ ID NO: 13643 - DNA, 25 bp, Canis familiaris
attccaagcctttctgggactagct

SEQ ID NO: 13644 - DNA, 25 bp, Canis familiaris
attgcagaaggttggggggctcact

SEQ ID NO: 13645 - DNA, 25 bp, Canis familiaris
attcaggagggctttggggctccct

SEQ ID NO: 13646 - DNA, 25 bp, Canis familiaris
attcgaagcattgtgggtgcctccc

SEQ ID NO: 13647 - DNA, 25 bp, Canis familiaris
attgcaaagcattctctgggaggcc

SEQ ID NO: 13648 - DNA, 25 bp, Canis familiaris
attctgtattaaagggaggcctcag

SEQ ID NO: 13649 - DNA, 25 bp, Canis familiaris
attgcttaaaatacaggaccttcag

SEQ ID NO: 13650 - DNA, 25 bp, Canis familiaris
attgagctaaagtgcaggagccccg

SEQ ID NO: 13651 - DNA, 25 bp, Canis familiaris
attgagtatcaggaccgtgacgccc

SEQ ID NO: 13652 - DNA, 25 bp, Canis familiaris
attgtgataagcgccgatgtctgcc

SEQ ID NO: 13653 - DNA, 25 bp, Canis familiaris
attgtagagacagcactcactccct

SEQ ID NO: 13654 - DNA, 25 bp, Canis familiaris
attgttgaagacaacgcacccctat

SEQ ID NO: 13655 - DNA, 25 bp, Canis familiaris
attggtggagatgacctctcaactt

SEQ ID NO: 13656 - DNA, 25 bp, Canis familiaris
attgtgattgaagaccatttagtat

SEQ ID NO: 13657 - DNA, 25 bp, Canis familiaris
attggataaactgtcctatatgaat

SEQ ID NO: 13658 - DNA, 25 bp, Canis familiaris
attggtacaacttgtcttagcacga

SEQ ID NO: 13659 - DNA, 25 bp, Canis familiaris
atacctaccacatgtcaaagaccag

SEQ ID NO: 13660 - DNA, 25 bp, Canis familiaris
attgcctaccgatgtaaagaaatat

SEQ ID NO: 13661 - DNA, 25 bp, Canis familiaris
attgcctcccgtttagaaccagagc

SEQ ID NO: 13662 - DNA, 25 bp, Canis familiaris
attctccccgagtacgagatagcag

SEQ ID NO: 13663 - DNA, 25 bp, Canis familiaris
attctcctgtgctaggtgcgcagat

SEQ ID NO: 13664 - DNA, 25 bp, Canis familiaris
atttttgacaagcaccagtaattgc

SEQ ID NO: 13665 - DNA, 25 bp, Canis familiaris
attggtggacccatccagtttgagc

SEQ ID NO: 13666 - DNA, 25 bp, Canis familiaris
attcttccaccagttggagtttgac

SEQ ID NO: 13667 - DNA, 25 bp, Canis familiaris
atatcgacgaccttgtggacttggc

SEQ ID NO: 13668 - DNA, 25 bp, Canis familiaris
attcagaggcccgtgtgacacatcg

SEQ ID NO: 13669 - DNA, 25 bp, Canis familiaris
attgaggggccaagcatgtcactcc

SEQ ID NO: 13670 - DNA, 25 bp, Canis familiaris
attcggggcaagaggactcgcaaga

SEQ ID NO: 13671 - DNA, 25 bp, Canis familiaris
attatggtccggaggaccagagaca

SEQ ID NO: 13672 - DNA, 25 bp, Canis familiaris
attgtggtcctgccatagaacctgg

SEQ ID NO: 13673 - DNA, 25 bp, Canis familiaris
attggtgccctggaagctgtatctg

SEQ ID NO: 13674 - DNA, 25 bp, Canis familiaris
attggtccaaaaatgctgttgttta

SEQ ID NO: 13675 - DNA, 25 bp, Canis familiaris
attggtatataattcacttttcttg

SEQ ID NO: 13676 - DNA, 25 bp, Canis familiaris
attggttgataataggttcctggca

SEQ ID NO: 13677 - DNA, 25 bp, Canis familiaris
attggtgtctttaagcagttccgaa

SEQ ID NO: 13678 - DNA, 25 bp, Canis familiaris
attgtttgtctataagtgcatccga

SEQ ID NO: 13679 - DNA, 25 bp, Canis familiaris
attgttttccataatagatattcaa

SEQ ID NO: 13680 - DNA, 25 bp, Canis familiaris
attgtctgtaggcatcatagttgtc

SEQ ID NO: 13681 - DNA, 25 bp, Canis familiaris
attgggtgatgtctcaagctgcgct

SEQ ID NO: 13682 - DNA, 25 bp, Canis familiaris
attgtggctgttaagcacctggtgc

SEQ ID NO: 13683 - DNA, 25 bp, Canis familiaris
attgttgctttatcatccagaggct

SEQ ID NO: 13684 - DNA, 25 bp, Canis familiaris
attgtgtgtgtttttcacgaggaga

SEQ ID NO: 13685 - DNA, 25 bp, Canis familiaris
attgtatgtatggccttctctgaga

SEQ ID NO: 13686 - DNA, 25 bp, Canis familiaris
attgaatgtatccatattttgtcat

SEQ ID NO: 13687 - DNA, 25 bp, Canis familiaris
attgaaaatcatctgcttcatgtgt

SEQ ID NO: 13688 - DNA, 25 bp, Canis familiaris
attccaaatatgagatgcattgtta

SEQ ID NO: 13689 - DNA, 25 bp, Canis familiaris
attcccaattactaaatgattatcc

SEQ ID NO: 13690 - DNA, 25 bp, Canis familiaris
attctggccttgaaaaagatttggc

SEQ ID NO: 13691 - DNA, 25 bp, Canis familiaris
attctggttctggctaaagttcaaa

SEQ ID NO: 13692 - DNA, 25 bp, Canis familiaris
attctgtttttccaaagcgttagca

SEQ ID NO: 13693 - DNA, 25 bp, Canis familiaris
attcccctatatgagggcgattaca

SEQ ID NO: 13694 - DNA, 25 bp, Canis familiaris
attccggtactttgatgtggcttta

SEQ ID NO: 13695 - DNA, 25 bp, Canis familiaris
attctgggtacgtaattgctggtta

SEQ ID NO: 13696 - DNA, 25 bp, Canis familiaris
attgtggtgtacctggttccagttt

SEQ ID NO: 13697 - DNA, 25 bp, Canis familiaris
attcgaggctctttggatctccaat

SEQ ID NO: 13698 - DNA, 25 bp, Canis familiaris
attgccactacttatggtacctatg

SEQ ID NO: 13699 - DNA, 25 bp, Canis familiaris
attgtcactgagatgggctctccta

SEQ ID NO: 13700 - DNA, 25 bp, Canis familiaris
atttactaggtgtgactgctgaatt

SEQ ID NO: 13701 - DNA, 25 bp, Canis familiaris
attgcacgtaggctgggtctcatat

SEQ ID NO: 13702 - DNA, 25 bp, Canis familiaris
attcctgcttggggcagcagtctct

SEQ ID NO: 13703 - DNA, 25 bp, Canis familiaris
attgcctcttggcagacagtccttc

SEQ ID NO: 13704 - DNA, 25 bp, Canis familiaris
attgatcctggactagacctaccca

SEQ ID NO: 13705 - DNA, 25 bp, Canis familiaris
attgacctcgagacgacctctctgc

SEQ ID NO: 13706 - DNA, 25 bp, Canis familiaris
attgactctggctctaatccatatg

SEQ ID NO: 13707 - DNA, 25 bp, Canis familiaris
attgacatctactctatcactattg

SEQ ID NO: 13708 - DNA, 25 bp, Canis familiaris
attgatttgacgttatccttttatg

SEQ ID NO: 13709 - DNA, 25 bp, Canis familiaris
attgtcttactgatttcttttgatt

SEQ ID NO: 13710 - DNA, 25 bp, Canis familiaris
attgttgttcccattttttgtagat

SEQ ID NO: 13711 - DNA, 25 bp, Canis familiaris
attgttttttccagttcttgtcatg

SEQ ID NO: 13712 - DNA, 25 bp, Canis familiaris
attgtttctttcaaggcttctttct

SEQ ID NO: 13713 - DNA, 25 bp, Canis familiaris
attgttcttgaaatagtccccctat

SEQ ID NO: 13714 - DNA, 25 bp, Canis familiaris
attgtgtttgactattttcccactt

SEQ ID NO: 13715 - DNA, 25 bp, Canis familiaris
attgtgtttatttatatacctcctc

SEQ ID NO: 13716 - DNA, 25 bp, Canis familiaris
attgttttttaactactccacagca

SEQ ID NO: 13717 - DNA, 25 bp, Canis familiaris
attgaacttccttactacttccaga

SEQ ID NO: 13718 - DNA, 25 bp, Canis familiaris
attgacagttttgcaccaggttctt

SEQ ID NO: 13719 - DNA, 25 bp, Canis familiaris
attgtaattttagctcgtgttctgt

SEQ ID NO: 13720 - DNA, 25 bp, Canis familiaris
attgtaagttctgctgtgctttcct

SEQ ID NO: 13721 - DNA, 25 bp, Canis familiaris
attgtaataatcgcgtgctccacct

SEQ ID NO: 13722 - DNA, 25 bp, Canis familiaris
attgatgaatacttggctgtttcca

SEQ ID NO: 13723 - DNA, 25 bp, Canis familiaris
attgtgccatagtctgaatgtgtgt

SEQ ID NO: 13724 - DNA, 25 bp, Canis familiaris
attgagtcatagtctgcgggcagtt

SEQ ID NO: 13725 - DNA, 25 bp, Canis familiaris
attgcagtcatggttgaaagtcatt

SEQ ID NO: 13726 - DNA, 25 bp, Canis familiaris
attgtggctctgatgaaaccctcta

SEQ ID NO: 13727 - DNA, 25 bp, Canis familiaris
attgttctgctgatgacacctttct

SEQ ID NO: 13728 - DNA, 25 bp, Canis familiaris
attgtcttatttgctgcctgctatc

SEQ ID NO: 13729 - DNA, 25 bp, Canis familiaris
attgttgagtttgctccagtcatct

SEQ ID NO: 13730 - DNA, 25 bp, Canis familiaris
attgtgctcagtttaccggctatca

SEQ ID NO: 13731 - DNA, 25 bp, Canis familiaris
attgttctgtatgctgccaagtaca

SEQ ID NO: 13732 - DNA, 25 bp, Canis familiaris
attgtgctcttactccaaagtccat

SEQ ID NO: 13733 - DNA, 25 bp, Canis familiaris
attgattattctcccaaagccactc

SEQ ID NO: 13734 - DNA, 25 bp, Canis familiaris
attttggtctacaaatcaccctgcc

SEQ ID NO: 13735 - DNA, 25 bp, Canis familiaris
attccaggtcaaaattccctgtctc

SEQ ID NO: 13736 - DNA, 25 bp, Canis familiaris
attccagggatgttacccctattca

SEQ ID NO: 13737 - DNA, 25 bp, Canis familiaris
attcgagaggctctgaccccagaat

SEQ ID NO: 13738 - DNA, 25 bp, Canis familiaris
attcttgagcggcctgaagcgccag

SEQ ID NO: 13739 - DNA, 25 bp, Canis familiaris
attcttgagcggcctgaagcgccag

SEQ ID NO: 13740 - DNA, 25 bp, Canis familiaris
attcttgagcggcctgaagcgccag

SEQ ID NO: 13741 - DNA, 25 bp, Canis familiaris
attctctgggtgctgcggagccagt

SEQ ID NO: 13742 - DNA, 25 bp, Canis familiaris
attctcgggttcccagagccagatt

SEQ ID NO: 13743 - DNA, 25 bp, Canis familiaris
attcctggttgtgtcatagctagat

SEQ ID NO: 13744 - DNA, 25 bp, Canis familiaris
attgcgcttgatcacgcttagtggt

SEQ ID NO: 13745 - DNA, 25 bp, Canis familiaris
attcgtattgcgccgctagaggtga

SEQ ID NO: 13746 - DNA, 25 bp, Canis familiaris
attcgtattgcgccgctagaggtga

SEQ ID NO: 13747 - DNA, 25 bp, Canis familiaris
attcctcatgtccctccagggaaat

SEQ ID NO: 13748 - DNA, 25 bp, Canis familiaris
attgcactagttcctccagcataaa

SEQ ID NO: 13749 - DNA, 25 bp, Canis familiaris
attccttttcgatctgcatatgcag

SEQ ID NO: 13750 - DNA, 25 bp, Canis familiaris
attgccttgttcctaaatacgggtg

SEQ ID NO: 13751 - DNA, 25 bp, Canis familiaris
attgcctttcaactagaatgcttgg

SEQ ID NO: 13752 - DNA, 25 bp, Canis familiaris
attgctgtgataactataaatttga

SEQ ID NO: 13753 - DNA, 25 bp, Canis familiaris
attgctctgctagtgctgtaatatt

SEQ ID NO: 13754 - DNA, 25 bp, Canis familiaris
attgcatctgtaactgtcacatctc

SEQ ID NO: 13755 - DNA, 25 bp, Canis familiaris
attcagctgctgggtgtccattgcc

SEQ ID NO: 13756 - DNA, 25 bp, Canis familiaris
attacagaagcggtccattccgtac

SEQ ID NO: 13757 - DNA, 25 bp, Canis familiaris
attgaataaggtcccatttctaact

SEQ ID NO: 13758 - DNA, 25 bp, Canis familiaris
attgaatgaaaccctctgataaata

SEQ ID NO: 13759 - DNA, 25 bp, Canis familiaris
attactacccgccagagatataaaa

SEQ ID NO: 13760 - DNA, 25 bp, Canis familiaris
attcctggcccagaaacaaaagcag

SEQ ID NO: 13761 - DNA, 25 bp, Canis familiaris
attgcctagccccaaagacaggaga

SEQ ID NO: 13762 - DNA, 25 bp, Canis familiaris
attgcacaaactcttcagccaggaa

SEQ ID NO: 13763 - DNA, 25 bp, Canis familiaris
attgtaatactctagatcagcatat

SEQ ID NO: 13764 - DNA, 25 bp, Canis familiaris
attgctaaaatgtcagtactaccca

SEQ ID NO: 13765 - DNA, 25 bp, Canis familiaris
attgcagaaaagtcgacagccaccc

SEQ ID NO: 13766 - DNA, 25 bp, Canis familiaris
attgcggagaaaggtcaccaagctc

SEQ ID NO: 13767 - DNA, 25 bp, Canis familiaris
attgcggcaggcgtggtcacggaga

SEQ ID NO: 13768 - DNA, 25 bp, Canis familiaris
attgcccaggcagagtcactgcgtt

SEQ ID NO: 13769 - DNA, 25 bp, Canis familiaris
attctcgcaaatgggacatctcgat

SEQ ID NO: 13770 - DNA, 25 bp, Canis familiaris
attgcttgccagagatgaacacaga

SEQ ID NO: 13771 - DNA, 25 bp, Canis familiaris
attgctgctgccgtagagagggaga

SEQ ID NO: 13772 - DNA, 25 bp, Canis familiaris
attcatgctcccatgcataagaaca

SEQ ID NO: 13773 - DNA, 25 bp, Canis familiaris
attgcagttcacagtcagaccatcc

SEQ ID NO: 13774 - DNA, 25 bp, Canis familiaris
attgaattcccgaatgcccatacga

SEQ ID NO: 13775 - DNA, 25 bp, Canis familiaris
attgaatctcagtgttgtacaaatg

SEQ ID NO: 13776 - DNA, 25 bp, Canis familiaris
attgaggctcagagggtggctcagt

SEQ ID NO: 13777 - DNA, 25 bp, Canis familiaris
attcctgacagcagtggtccagcgt

SEQ ID NO: 13778 - DNA, 25 bp, Canis familiaris
attctcagaagctcggtgcggtgtt

SEQ ID NO: 13779 - DNA, 25 bp, Canis familiaris
attccacacactagccgtgggctgg

SEQ ID NO: 13780 - DNA, 25 bp, Canis familiaris
attcgcaccattgcggtcgcgcgga

SEQ ID NO: 13781 - DNA, 25 bp, Canis familiaris
attgctgggaatgcagggcgcccga

SEQ ID NO: 13782 - DNA, 25 bp, Canis familiaris
attctggagaatgccaacgtgctgg

SEQ ID NO: 13783 - DNA, 25 bp, Canis familiaris
attgatggagaaacctgtctcttgg

SEQ ID NO: 13784 - DNA, 25 bp, Canis familiaris
attgcttcagacaactatttgctcg

SEQ ID NO: 13785 - DNA, 25 bp, Canis familiaris
attgttcttcatgacacttgctcta

SEQ ID NO: 13786 - DNA, 25 bp, Canis familiaris
attgaactttgttctcttgccacat

SEQ ID NO: 13787 - DNA, 25 bp, Canis familiaris
attgaactctctcgtatctcggttc

SEQ ID NO: 13788 - DNA, 25 bp, Canis familiaris
attgcagtttgtggtctttggttct

SEQ ID NO: 13789 - DNA, 25 bp, Canis familiaris
attcgcctttcattcttcaggttaa

SEQ ID NO: 13790 - DNA, 25 bp, Canis familiaris
attcctcacccttgcttaggagtaa

SEQ ID NO: 13791 - DNA, 25 bp, Canis familiaris
attccatcccatcatcttggtacta

SEQ ID NO: 13792 - DNA, 25 bp, Canis familiaris
attgctaccctgtctgattgggagt

SEQ ID NO: 13793 - DNA, 25 bp, Canis familiaris
attgattcctctttgttgtgttgct

SEQ ID NO: 13794 - DNA, 25 bp, Canis familiaris
attgtcttcctttatattgtatctt

SEQ ID NO: 13795 - DNA, 25 bp, Canis familiaris
attcacttcctggtcaaatccattt

SEQ ID NO: 13796 - DNA, 25 bp, Canis familiaris
attccattccttccaacaacaattt

SEQ ID NO: 13797 - DNA, 25 bp, Canis familiaris
attgcctttgccttccacaaaatat

SEQ ID NO: 13798 - DNA, 25 bp, Canis familiaris
attccgaaccacccactatggtatg

SEQ ID NO: 13799 - DNA, 25 bp, Canis familiaris
attccgtactcaccgtctacggtgc

SEQ ID NO: 13800 - DNA, 25 bp, Canis familiaris
attccacttctcccatttattggtc

SEQ ID NO: 13801 - DNA, 25 bp, Canis familiaris
attcatcatgtggcccttttagggg

SEQ ID NO: 13802 - DNA, 25 bp, Canis familiaris
attactgaggaggactttagagggc

SEQ ID NO: 13803 - DNA, 25 bp, Canis familiaris
attatcgatgttgtcctataaaggc

SEQ ID NO: 13804 - DNA, 25 bp, Canis familiaris
atggaccattaggccctaattaagg

SEQ ID NO: 13805 - DNA, 25 bp, Canis familiaris
attgacgttattgcctacttacatg

SEQ ID NO: 13806 - DNA, 25 bp, Canis familiaris
attgttattatagtggtcatcttac

SEQ ID NO: 13807 - DNA, 25 bp, Canis familiaris
attgtctttgattttgttgcttcca

SEQ ID NO: 13808 - DNA, 25 bp, Canis familiaris
attgttttcatatttattgcctgca

SEQ ID NO: 13809 - DNA, 25 bp, Canis familiaris
attgttttacgcatattcctactga

SEQ ID NO: 13810 - DNA, 25 bp, Canis familiaris
attgttattactcattatctcattc

SEQ ID NO: 13811 - DNA, 25 bp, Canis familiaris
attgttcattcctaattttgtatct

SEQ ID NO: 13812 - DNA, 25 bp, Canis familiaris
attgtattgtcctaagtgttcagtg

SEQ ID NO: 13813 - DNA, 25 bp, Canis familiaris
attgtatcttttttatgttgcatgt

SEQ ID NO: 13814 - DNA, 25 bp, Canis familiaris
attgtttcttttcttgatatggaat

SEQ ID NO: 13815 - DNA, 25 bp, Canis familiaris
attgtttctatctgtgttttaatat

SEQ ID NO: 13816 - DNA, 25 bp, Canis familiaris
attgcatttcttaggtgttttaatt

SEQ ID NO: 13817 - DNA, 25 bp, Canis familiaris
attgatctgttttggatgttgctat

SEQ ID NO: 13818 - DNA, 25 bp, Canis familiaris
attgactgcctttgggtcaccatac

SEQ ID NO: 13819 - DNA, 25 bp, Canis familiaris
attgccagaatgtgttgtcccaaat

SEQ ID NO: 13820 - DNA, 25 bp, Canis familiaris
attgccgaataaggtgtccacaaga

SEQ ID NO: 13821 - DNA, 25 bp, Canis familiaris
attgcgggagaaggtttcaccaagc

SEQ ID NO: 13822 - DNA, 25 bp, Canis familiaris
attgcgggaacaacattgtcctcaa

SEQ ID NO: 13823 - DNA, 25 bp, Canis familiaris
attcgggaacaagatgatgggaatc

SEQ ID NO: 13824 - DNA, 25 bp, Canis familiaris
attgctcggaactacctggagggat

SEQ ID NO: 13825 - DNA, 25 bp, Canis familiaris
attgttggaattactctctggggag

SEQ ID NO: 13826 - DNA, 25 bp, Canis familiaris
attgcagggaggctttctggctggg

SEQ ID NO: 13827 - DNA, 25 bp, Canis familiaris
attgcgggaagattggattggattg

SEQ ID NO: 13828 - DNA, 25 bp, Canis familiaris
attcggggcaaatgactggcaagtg

SEQ ID NO: 13829 - DNA, 25 bp, Canis familiaris
attaggggctaatggcatgatacga

SEQ ID NO: 13830 - DNA, 25 bp, Canis familiaris
attcatggggccctatgtgcgatac

SEQ ID NO: 13831 - DNA, 25 bp, Canis familiaris
attgcttggagcattttgcagaagc

SEQ ID NO: 13832 - DNA, 25 bp, Canis familiaris
attgcccggcatattatagaagctt

SEQ ID NO: 13833 - DNA, 25 bp, Canis familiaris
attgccctatgccttctagaaatcc

SEQ ID NO: 13834 - DNA, 25 bp, Canis familiaris
attgccagcttgctggctagtttca

SEQ ID NO: 13835 - DNA, 25 bp, Canis familiaris
attgcaacttgctggcaggggtgcc

SEQ ID NO: 13836 - DNA, 25 bp, Canis familiaris
attgaactgtctgtgcactgtgtgt

SEQ ID NO: 13837 - DNA, 25 bp, Canis familiaris
attgctaattccatgccttgtgata

SEQ ID NO: 13838 - DNA, 25 bp, Canis familiaris
attgcatgattatcttgattgtgtt

SEQ ID NO: 13839 - DNA, 25 bp, Canis familiaris
attgcagcagataactttttgagtc

SEQ ID NO: 13840 - DNA, 25 bp, Canis familiaris
attgccagtccacagtttgtgctcg

SEQ ID NO: 13841 - DNA, 25 bp, Canis familiaris
attgctaatgcccaagctttgtatt

SEQ ID NO: 13842 - DNA, 25 bp, Canis familiaris
attgctaggttgaagttcaccatgt

SEQ ID NO: 13843 - DNA, 25 bp, Canis familiaris
attgcaatgtttatttcctttccct

SEQ ID NO: 13844 - DNA, 25 bp, Canis familiaris
attgcacatgttaactctgcccttt

SEQ ID NO: 13845 - DNA, 25 bp, Canis familiaris
attgcgtgcattaatcagattcaaa

SEQ ID NO: 13846 - DNA, 25 bp, Canis familiaris
attgctgctattcctcaagtgcatc

SEQ ID NO: 13847 - DNA, 25 bp, Canis familiaris
attctgttcaggccaattgctgctt

SEQ ID NO: 13848 - DNA, 25 bp, Canis familiaris
attcgtggggacttctgcattcaag

SEQ ID NO: 13849 - DNA, 25 bp, Canis familiaris
attcagggctgagacctttccagtt

SEQ ID NO: 13850 - DNA, 25 bp, Canis familiaris
attccgggcagaaccttgtggcggg

SEQ ID NO: 13851 - DNA, 25 bp, Canis familiaris
attcccgggatccctggaggaggtg

SEQ ID NO: 13852 - DNA, 25 bp, Canis familiaris
attcccgggatggcgttcagaatgg

SEQ ID NO: 13853 - DNA, 25 bp, Canis familiaris
attcccgggatgaaccgcaagttga

SEQ ID NO: 13854 - DNA, 25 bp, Canis familiaris
attcccgggatcacaaccatgcggg

SEQ ID NO: 13855 - DNA, 25 bp, Canis familiaris
attcccgggatcacgagtcagtagg

SEQ ID NO: 13856 - DNA, 25 bp, Canis familiaris
attcccgggatcggtgatgatccca

SEQ ID NO: 13857 - DNA, 25 bp, Canis familiaris
attcccgggatgcagtggatggtcg

SEQ ID NO: 13858 - DNA, 25 bp, Canis familiaris
attcccgggatccggagatggttcg

SEQ ID NO: 13859 - DNA, 25 bp, Canis familiaris
attcccgggatctcgatgtgatttc

SEQ ID NO: 13860 - DNA, 25 bp, Canis familiaris
attccccggacctagatggacatcg

SEQ ID NO: 13861 - DNA, 25 bp, Canis familiaris
attgaacctggactatgagatgtat

SEQ ID NO: 13862 - DNA, 25 bp, Canis familiaris
attgttattggacttgattttcttt

SEQ ID NO: 13863 - DNA, 25 bp, Canis familiaris
attgttatgactatctttactattt

SEQ ID NO: 13864 - DNA, 25 bp, Canis familiaris
attgctcttactgtttttattatat

SEQ ID NO: 13865 - DNA, 25 bp, Canis familiaris
attccttatgctgtgccttttatcc

SEQ ID NO: 13866 - DNA, 25 bp, Canis familiaris
attctttcttttgttagtcttcaat

SEQ ID NO: 13867 - DNA, 25 bp, Canis familiaris
attcttttctaatcgtagttaccag

SEQ ID NO: 13868 - DNA, 25 bp, Canis familiaris
attaatgtttactctgcggtctgaa

SEQ ID NO: 13869 - DNA, 25 bp, Canis familiaris
attgaatgtttttctctttgtgctg

SEQ ID NO: 13870 - DNA, 25 bp, Canis familiaris
attgttgtccttttcataggtctga

SEQ ID NO: 13871 - DNA, 25 bp, Canis familiaris
attgctcctcctatcatcaaggtga

SEQ ID NO: 13872 - DNA, 25 bp, Canis familiaris
attgctccattctatttaggcgtgt

SEQ ID NO: 13873 - DNA, 25 bp, Canis familiaris
attcccttgctatctagcagctggt

SEQ ID NO: 13874 - DNA, 25 bp, Canis familiaris
attctgcctctgcttatacgggata

SEQ ID NO: 13875 - DNA, 25 bp, Canis familiaris
attcagcgtcatgatgattacctgg

SEQ ID NO: 13876 - DNA, 25 bp, Canis familiaris
attccatggcaccgtcaaggctgag

SEQ ID NO: 13877 - DNA, 25 bp, Canis familiaris
attccatggcaccgtcaaggctgag

SEQ ID NO: 13878 - DNA, 25 bp, Canis familiaris
attccagccactctacagactgaga

SEQ ID NO: 13879 - DNA, 25 bp, Canis familiaris
attgccaccttgatgtctgacgagg

SEQ ID NO: 13880 - DNA, 25 bp, Canis familiaris
attgacccatacaagcatctataga

SEQ ID NO: 13881 - DNA, 25 bp, Canis familiaris
attgccctcacactgagattacaca

SEQ ID NO: 13882 - DNA, 25 bp, Canis familiaris
attgcttgctaacagtgtatgcacc

SEQ ID NO: 13883 - DNA, 25 bp, Canis familiaris
attgcttgctagaccagttctgcag

SEQ ID NO: 13884 - DNA, 25 bp, Canis familiaris
attgatctgcacagtccttctgaga

SEQ ID NO: 13885 - DNA, 25 bp, Canis familiaris
attgaagcccgagctttgcagcact

SEQ ID NO: 13886 - DNA, 25 bp, Canis familiaris
attgagaggcactactttcgcaacc

SEQ ID NO: 13887 - DNA, 25 bp, Canis familiaris
attcagagactgtcctttgccaagg

SEQ ID NO: 13888 - DNA, 25 bp, Canis familiaris
attcagagtgctgggtttctacgag

SEQ ID NO: 13889 - DNA, 25 bp, Canis familiaris
attcacactgtgcgttttagagtat

SEQ ID NO: 13890 - DNA, 25 bp, Canis familiaris
attgccttatgatgctttattggtt

SEQ ID NO: 13891 - DNA, 25 bp, Canis familiaris
attcctcatgaatgtaaatttgtac

SEQ ID NO: 13892 - DNA, 25 bp, Canis familiaris
atgtcctctgtagataaacccatag

SEQ ID NO: 13893 - DNA, 25 bp, Canis familiaris
attgcccatggtttaacatcctcaa

SEQ ID NO: 13894 - DNA, 25 bp, Canis familiaris
attgctgcgatgctgtctacaatcc

SEQ ID NO: 13895 - DNA, 25 bp, Canis familiaris
attgctgttgcttacacacacacac

SEQ ID NO: 13896 - DNA, 25 bp, Canis familiaris
attgctgcattatttacaacagcca

SEQ ID NO: 13897 - DNA, 25 bp, Canis familiaris
attgccatcatctacggcaacacgc

SEQ ID NO: 13898 - DNA, 25 bp, Canis familiaris
attgccagcacctgagaaaccacta

SEQ ID NO: 13899 - DNA, 25 bp, Canis familiaris
attgccagagacggaggctgtcctc

SEQ ID NO: 13900 - DNA, 25 bp, Canis familiaris
attccagacatcatcaaggtggcca

SEQ ID NO: 13901 - DNA, 25 bp, Canis familiaris
attccagacatcatcaaggtggcca

SEQ ID NO: 13902 - DNA, 25 bp, Canis familiaris
attgcccctcagaaatgctgtacca

SEQ ID NO: 13903 - DNA, 25 bp, Canis familiaris
attgctacctcaagtctttcacatc

SEQ ID NO: 13904 - DNA, 25 bp, Canis familiaris
attgaatcctgtagcatccattccc

SEQ ID NO: 13905 - DNA, 25 bp, Canis familiaris
attcatccctgggatccatgtctcc

SEQ ID NO: 13906 - DNA, 25 bp, Canis familiaris
attccccttgaagagttcagcggat

SEQ ID NO: 13907 - DNA, 25 bp, Canis familiaris
attacccttatagatttatggccat

SEQ ID NO: 13908 - DNA, 25 bp, Canis familiaris
atagcccccttaacattttgtggag

SEQ ID NO: 13909 - DNA, 25 bp, Canis familiaris
atagccccctagaccataaagaaag

SEQ ID NO: 13910 - DNA, 25 bp, Canis familiaris
attccacgccaactcatcaaaaaaa

SEQ ID NO: 13911 - DNA, 25 bp, Canis familiaris
attccacgcctaaaaataattgtat

SEQ ID NO: 13912 - DNA, 25 bp, Canis familiaris
attccacagttgtaaatgctagttt

SEQ ID NO: 13913 - DNA, 25 bp, Canis familiaris
attccactgtcttaaactgaagcaa

SEQ ID NO: 13914 - DNA, 25 bp, Canis familiaris
attcaccatccactaaacatcaaca

SEQ ID NO: 13915 - DNA, 25 bp, Canis familiaris
attgactatatccttaagctgtaca

SEQ ID NO: 13916 - DNA, 25 bp, Canis familiaris
agtacgtacgtacagacatacatac

SEQ ID NO: 13917 - DNA, 25 bp, Canis familiaris
attacccacttagaagatcaaagta

SEQ ID NO: 13918 - DNA, 25 bp, Canis familiaris
attacacccctgccaaggctatttt

SEQ ID NO: 13919 - DNA, 25 bp, Canis familiaris
attgaatcccctccaaaatctttat

SEQ ID NO: 13920 - DNA, 25 bp, Canis familiaris
attgaatcttatcgggagaactatt

SEQ ID NO: 13921 - DNA, 25 bp, Canis familiaris
attgaatttgtctgaagcccatagt

SEQ ID NO: 13922 - DNA, 25 bp, Canis familiaris
attgactttgtattgtaccctgtta

SEQ ID NO: 13923 - DNA, 25 bp, Canis familiaris
attgagagctttcatgtacccttgt

SEQ ID NO: 13924 - DNA, 25 bp, Canis familiaris
attgcagtgattttttaactctatt

SEQ ID NO: 13925 - DNA, 25 bp, Canis familiaris
attgcagatattttatgttccctga

SEQ ID NO: 13926 - DNA, 25 bp, Canis familiaris
attgagaatatctgtattcctcaga

SEQ ID NO: 13927 - DNA, 25 bp, Canis familiaris
attaaattactgaagctgcccaaac

SEQ ID NO: 13928 - DNA, 25 bp, Canis familiaris
attgagatgttaggtagcccccttc

SEQ ID NO: 13929 - DNA, 25 bp, Canis familiaris
attgcacatattgcgacagcccact

SEQ ID NO: 13930 - DNA, 25 bp, Canis familiaris
attgcagaattgcgttgccctgatg

SEQ ID NO: 13931 - DNA, 25 bp, Canis familiaris
attgcgagttgtttgtagttgtgtg

SEQ ID NO: 13932 - DNA, 25 bp, Canis familiaris
attgcagtgccgtttttttgtgtga

SEQ ID NO: 13933 - DNA, 25 bp, Canis familiaris
attgaatgccacatgctttcttaat

SEQ ID NO: 13934 - DNA, 25 bp, Canis familiaris
attccacaagcattgccttcttatt

SEQ ID NO: 13935 - DNA, 25 bp, Canis familiaris
attgcctattcatgaccactagact

SEQ ID NO: 13936 - DNA, 25 bp, Canis familiaris
attcgctccatcaatgacccggagc

SEQ ID NO: 13937 - DNA, 25 bp, Canis familiaris
attatgtaataatcccaggaccctg

SEQ ID NO: 13938 - DNA, 25 bp, Canis familiaris
attgaataatttccccagagagccc

SEQ ID NO: 13939 - DNA, 25 bp, Canis familiaris
attgcaaatactgcccgcaaagctc

SEQ ID NO: 13940 - DNA, 25 bp, Canis familiaris
attgcaattattccccatgaacgag

SEQ ID NO: 13941 - DNA, 25 bp, Canis familiaris
attgcaattattccccatgaacgag

SEQ ID NO: 13942 - DNA, 25 bp, Canis familiaris
attgcaattattccccatgaacgag

SEQ ID NO: 13943 - DNA, 25 bp, Canis familiaris
attgaaatgattttctcagaatttg

SEQ ID NO: 13944 - DNA, 25 bp, Canis familiaris
attgaccatatttttctgagtttta

SEQ ID NO: 13945 - DNA, 25 bp, Canis familiaris
attgcctactacatttgagttacag

SEQ ID NO: 13946 - DNA, 25 bp, Canis familiaris
attccacttactcttgatgtctaca

SEQ ID NO: 13947 - DNA, 25 bp, Canis familiaris
attccctcagagaacttgtgttggc

SEQ ID NO: 13948 - DNA, 25 bp, Canis familiaris
attccttaactatcgtgtgtgtgtg

SEQ ID NO: 13949 - DNA, 25 bp, Canis familiaris
attccagtaactttttttgtgtatg

SEQ ID NO: 13950 - DNA, 25 bp, Canis familiaris
attgccctaagacctcagtttttat

SEQ ID NO: 13951 - DNA, 25 bp, Canis familiaris
attcctcaaacaggcctggtttatt

SEQ ID NO: 13952 - DNA, 25 bp, Canis familiaris
attccaaaaacttgctggttgccag

SEQ ID NO: 13953 - DNA, 25 bp, Canis familiaris
attgactaaataccacttttgcaca

SEQ ID NO: 13954 - DNA, 25 bp, Canis familiaris
attgctctcaatgacaactttgtca

SEQ ID NO: 13955 - DNA, 25 bp, Canis familiaris
attgctccacagtgagactttctga

SEQ ID NO: 13956 - DNA, 25 bp, Canis familiaris
attgccctctggtcagttttgcata

SEQ ID NO: 13957 - DNA, 25 bp, Canis familiaris
attgcttcctgtccatttacgaaat

SEQ ID NO: 13958 - DNA, 25 bp, Canis familiaris
attgctgtagtttttccccaaatgc

SEQ ID NO: 13959 - DNA, 25 bp, Canis familiaris
attgctggtgtgttttgcccacaat

SEQ ID NO: 13960 - DNA, 25 bp, Canis familiaris
attgagccagattttgtgcagtcac

SEQ ID NO: 13961 - DNA, 25 bp, Canis familiaris
attgcggcgctagttgtagataacg

SEQ ID NO: 13962 - DNA, 25 bp, Canis familiaris
attgcgccgctagaggtgaaattct

SEQ ID NO: 13963 - DNA, 25 bp, Canis familiaris
attgcgccgctagaggtgaaattct

SEQ ID NO: 13964 - DNA, 25 bp, Canis familiaris
atagtccctcacatggtataaaatc

SEQ ID NO: 13965 - DNA, 25 bp, Canis familiaris
attgctcctatccattttataaaat

SEQ ID NO: 13966 - DNA, 25 bp, Canis familiaris
attgctgaattcctatgtgtatgta

SEQ ID NO: 13967 - DNA, 25 bp, Canis familiaris
attctgcgagctgtcaggctttgac

SEQ ID NO: 13968 - DNA, 25 bp, Canis familiaris
attacacatgctgtcaggggcctct

SEQ ID NO: 13969 - DNA, 25 bp, Canis familiaris
attacacgagaattggggcagtccc

SEQ ID NO: 13970 - DNA, 25 bp, Canis familiaris
attagccagaagttggaggcatttc

SEQ ID NO: 13971 - DNA, 25 bp, Canis familiaris
attaggacactattcgaggctcttt

SEQ ID NO: 13972 - DNA, 25 bp, Canis familiaris
attcaggcccttacagggcttttca

SEQ ID NO: 13973 - DNA, 25 bp, Canis familiaris
attataccactataggtctactaaa

SEQ ID NO: 13974 - DNA, 25 bp, Canis familiaris
attccaccattagcagagccaacaa

SEQ ID NO: 13975 - DNA, 25 bp, Canis familiaris
attcccctgtaccagccaagaataa

SEQ ID NO: 13976 - DNA, 25 bp, Canis familiaris
attcaccgcttctcccaaaggaagc

SEQ ID NO: 13977 - DNA, 25 bp, Canis familiaris
attcacccttcgccataaagcagga

SEQ ID NO: 13978 - DNA, 25 bp, Canis familiaris
attgccagcctaaggaacaattgga

SEQ ID NO: 13979 - DNA, 25 bp, Canis familiaris
attgctggccataaggtcctttgtg

SEQ ID NO: 13980 - DNA, 25 bp, Canis familiaris
attgctgacgttagagtcctctgcc

SEQ ID NO: 13981 - DNA, 25 bp, Canis familiaris
attgctatcatacaggtcacgagcg

SEQ ID NO: 13982 - DNA, 25 bp, Canis familiaris
attctgatatagctgggcaatggtt

SEQ ID NO: 13983 - DNA, 25 bp, Canis familiaris
attgctattatgactggtgacattt

SEQ ID NO: 13984 - DNA, 25 bp, Canis familiaris
attgcctgtgtgcggtgacatcaaa

SEQ ID NO: 13985 - DNA, 25 bp, Canis familiaris
attgcattcttaaggtatcacaaat

SEQ ID NO: 13986 - DNA, 25 bp, Canis familiaris
attcagtcttcttcggaaaggagaa

SEQ ID NO: 13987 - DNA, 25 bp, Canis familiaris
attctgggcctgaggaatcggaaga

SEQ ID NO: 13988 - DNA, 25 bp, Canis familiaris
attaggagcttcacgggctagtaga

SEQ ID NO: 13989 - DNA, 25 bp, Canis familiaris
attcggagcatgagccggtctagta

SEQ ID NO: 13990 - DNA, 25 bp, Canis familiaris
attcgaagatagccacgcagagtat

SEQ ID NO: 13991 - DNA, 25 bp, Canis familiaris
agtcgagaaagtccggagtcataaa

SEQ ID NO: 13992 - DNA, 25 bp, Canis familiaris
attcaatggaagcgcgggtatacgg

SEQ ID NO: 13993 - DNA, 25 bp, Canis familiaris
attcggcacgagcgctgccgtaagg

SEQ ID NO: 13994 - DNA, 25 bp, Canis familiaris
attaggcctggatctgctcagccaa

SEQ ID NO: 13995 - DNA, 25 bp, Canis familiaris
attaaggcggagcgcaagcggctgc

SEQ ID NO: 13996 - DNA, 25 bp, Canis familiaris
attacaggggcgcaatgggcatcat

SEQ ID NO: 13997 - DNA, 25 bp, Canis familiaris
attccaggggccatgcaggagcttg

SEQ ID NO: 13998 - DNA, 25 bp, Canis familiaris
attccacggcacagtcaaggctgag

SEQ ID NO: 13999 - DNA, 25 bp, Canis familiaris
attcaacggcacagtcaaggccgag

SEQ ID NO: 14000 - DNA, 25 bp, Canis familiaris
attaatcagatctaagccaaccccg

SEQ ID NO: 14001 - DNA, 25 bp, Canis familiaris
attagtagtaaagtctcgggcactg

SEQ ID NO: 14002 - DNA, 25 bp, Canis familiaris
attaaagtctaaagtctgggtcatt

SEQ ID NO: 14003 - DNA, 25 bp, Canis familiaris
attaagagtctgacccttggggata

SEQ ID NO: 14004 - DNA, 25 bp, Canis familiaris
attgcagatactaacccttggtgga

SEQ ID NO: 14005 - DNA, 25 bp, Canis familiaris
attgcagctaataaagctgatagag

SEQ ID NO: 14006 - DNA, 25 bp, Canis familiaris
attgcgctacaatgaaggagatatt

SEQ ID NO: 14007 - DNA, 25 bp, Canis familiaris
attgctgttcaataagccaatgtta

SEQ ID NO: 14008 - DNA, 25 bp, Canis familiaris
attctgatgtactataagccgttat

SEQ ID NO: 14009 - DNA, 25 bp, Canis familiaris
attagcatctactcagggcagttat

SEQ ID NO: 14010 - DNA, 25 bp, Canis familiaris
attagctcattctcctgggcaaagc

SEQ ID NO: 14011 - DNA, 25 bp, Canis familiaris
gttcctttccccaggtatagctgga

SEQ ID NO: 14012 - DNA, 25 bp, Canis familiaris
gttcctttccccaggtatagctgga

SEQ ID NO: 14013 - DNA, 25 bp, Canis familiaris
attcctttacccatagattaggtgt

SEQ ID NO: 14014 - DNA, 25 bp, Canis familiaris
attccagtacatcacctaatgaagg

SEQ ID NO: 14015 - DNA, 25 bp, Canis familiaris
attccagctccaatagcgtatatta

SEQ ID NO: 14016 - DNA, 25 bp, Canis familiaris
attccatgctcctatatgcgtatac

SEQ ID NO: 14017 - DNA, 25 bp, Canis familiaris
attccatgtctgggatgacttcaca

SEQ ID NO: 14018 - DNA, 25 bp, Canis familiaris
attccatgggcttactattcaactg

SEQ ID NO: 14019 - DNA, 25 bp, Canis familiaris
attccttctcaatctgatgtgcaaa

SEQ ID NO: 14020 - DNA, 25 bp, Canis familiaris
attgcagatttgtatcctgtgtcaa

SEQ ID NO: 14021 - DNA, 25 bp, Canis familiaris
attgccaggtacttcatgttcagaa

SEQ ID NO: 14022 - DNA, 25 bp, Canis familiaris
attgccaggcaatgatcgtgtggac

SEQ ID NO: 14023 - DNA, 25 bp, Canis familiaris
attctgagcgctttctcagtgggac

SEQ ID NO: 14024 - DNA, 25 bp, Canis familiaris
attgctggcagctattgtattaaaa

SEQ ID NO: 14025 - DNA, 25 bp, Canis familiaris
attgctccagattggctttcttaaa

SEQ ID NO: 14026 - DNA, 25 bp, Canis familiaris
attgctcctattctgtgtcttggtt

SEQ ID NO: 14027 - DNA, 25 bp, Canis familiaris
attgctcccttatgtgttcatgttt

SEQ ID NO: 14028 - DNA, 25 bp, Canis familiaris
attgcttactctacagtgtgtgcat

SEQ ID NO: 14029 - DNA, 25 bp, Canis familiaris
attgctttctccaagagatgttgca

SEQ ID NO: 14030 - DNA, 25 bp, Canis familiaris
attcctatcctcaagactcgtgatc

SEQ ID NO: 14031 - DNA, 25 bp, Canis familiaris
attccaatgggcaagcagctcttat

SEQ ID NO: 14032 - DNA, 25 bp, Canis familiaris
attccaagccaaagtcatatctctg

SEQ ID NO: 14033 - DNA, 25 bp, Canis familiaris
attgcgcaatgccataaatttcttc

SEQ ID NO: 14034 - DNA, 25 bp, Canis familiaris
attgcgcaatgccataaatttcttc

SEQ ID NO: 14035 - DNA, 25 bp, Canis familiaris
attgccttggtatgtctttgttttg

SEQ ID NO: 14036 - DNA, 25 bp, Canis familiaris
attgcactaggtttctttctgtctt

SEQ ID NO: 14037 - DNA, 25 bp, Canis familiaris
attctcagggcttcatcatctcctg

SEQ ID NO: 14038 - DNA, 25 bp, Canis familiaris
attccatgatggctatatctcaatc

SEQ ID NO: 14039 - DNA, 25 bp, Canis familiaris
attctcatcagtcgcaatgattcag

SEQ ID NO: 14040 - DNA, 25 bp, Canis familiaris
attctgctcagaatgacagtccatc

SEQ ID NO: 14041 - DNA, 25 bp, Canis familiaris
attccgagcattccagtaacttttt

SEQ ID NO: 14042 - DNA, 25 bp, Canis familiaris
attccgagcattccagtaacttttt

SEQ ID NO: 14043 - DNA, 25 bp, Canis familiaris
attcctggctgtgaggaacttttaa

SEQ ID NO: 14044 - DNA, 25 bp, Canis familiaris
attgcctgggatgattactgttcaa

SEQ ID NO: 14045 - DNA, 25 bp, Canis familiaris
attgccatgggagtgttgccttaca

SEQ ID NO: 14046 - DNA, 25 bp, Canis familiaris
attgccatccgagtgtttcgtgcgt

SEQ ID NO: 14047 - DNA, 25 bp, Canis familiaris
attcgagctcgagtttgcacagatg

SEQ ID NO: 14048 - DNA, 25 bp, Canis familiaris
attgccctcatgacaattgtcaagt

SEQ ID NO: 14049 - DNA, 25 bp, Canis familiaris
attgcatccctatttcatatcacat

SEQ ID NO: 14050 - DNA, 25 bp, Canis familiaris
attgcagtaatttttcatatctgaa

SEQ ID NO: 14051 - DNA, 25 bp, Canis familiaris
attgcagttttacatcagtgttcac

SEQ ID NO: 14052 - DNA, 25 bp, Canis familiaris
attcagtttgtagactgggccccac

SEQ ID NO: 14053 - DNA, 25 bp, Canis familiaris
attagtggagtcacagggaccccca

SEQ ID NO: 14054 - DNA, 25 bp, Canis familiaris
attcgctgaagtttagtctaccctc

SEQ ID NO: 14055 - DNA, 25 bp, Canis familiaris
attgcctgacaattatagactacat

SEQ ID NO: 14056 - DNA, 25 bp, Canis familiaris
attgcctacatttattgcagtcccg

SEQ ID NO: 14057 - DNA, 25 bp, Canis familiaris
attcctacatatcattctacaatgc

SEQ ID NO: 14058 - DNA, 25 bp, Canis familiaris
attcactgaccaaatccttaacctt

SEQ ID NO: 14059 - DNA, 25 bp, Canis familiaris
attcgccaccatatagcttcaacgc

SEQ ID NO: 14060 - DNA, 25 bp, Canis familiaris
attgctacacccaatagcttctctc

SEQ ID NO: 14061 - DNA, 25 bp, Canis familiaris
attctaatgttgaacgcttccctga

SEQ ID NO: 14062 - DNA, 25 bp, Canis familiaris
attgcattttatacactcattttta

SEQ ID NO: 14063 - DNA, 25 bp, Canis familiaris
attgcatctattttcatgtctttct

SEQ ID NO: 14064 - DNA, 25 bp, Canis familiaris
attgccatattgcacatgtcttaat

SEQ ID NO: 14065 - DNA, 25 bp, Canis familiaris
attgcctaaggatgtctgctgtttg

SEQ ID NO: 14066 - DNA, 25 bp, Canis familiaris
attgcctgagaaagttctgcttctt

SEQ ID NO: 14067 - DNA, 25 bp, Canis familiaris
atatccagaaagagtccaccttgca

SEQ ID NO: 14068 - DNA, 25 bp, Canis familiaris
attccacacaaatgtgccccaggac

SEQ ID NO: 14069 - DNA, 25 bp, Canis familiaris
attcacacatcaaatggtacccatc

SEQ ID NO: 14070 - DNA, 25 bp, Canis familiaris
attagcaatctgctgtggtgcccac

SEQ ID NO: 14071 - DNA, 25 bp, Canis familiaris
attatcacatatccctggttccaga

SEQ ID NO: 14072 - DNA, 25 bp, Canis familiaris
attcccaaggacaggcttcagcatc

SEQ ID NO: 14073 - DNA, 25 bp, Canis familiaris
atttacggtgacaaggctccagaga

SEQ ID NO: 14074 - DNA, 25 bp, Canis familiaris
attccggatgtagggagcctggaga

SEQ ID NO: 14075 - DNA, 25 bp, Canis familiaris
attccggtagagggatgcctgtagt

SEQ ID NO: 14076 - DNA, 25 bp, Canis familiaris
attccggtaggatctctcaatattt

SEQ ID NO: 14077 - DNA, 25 bp, Canis familiaris
attccctttgctaacttaatatttg

SEQ ID NO: 14078 - DNA, 25 bp, Canis familiaris
attccaccgaatacacttcatattt

SEQ ID NO: 14079 - DNA, 25 bp, Canis familiaris
attccatcatggtcctgacccaact

SEQ ID NO: 14080 - DNA, 25 bp, Canis familiaris
attccctgctgatctgaagccagag

SEQ ID NO: 14081 - DNA, 25 bp, Canis familiaris
attgcccactgtactgagattcata

SEQ ID NO: 14082 - DNA, 25 bp, Canis familiaris
attgcccactggccatggagaggat

SEQ ID NO: 14083 - DNA, 25 bp, Canis familiaris
attgccatctctgacaagagagaac

SEQ ID NO: 14084 - DNA, 25 bp, Canis familiaris
attgcctctgtggtaacacagactc

SEQ ID NO: 14085 - DNA, 25 bp, Canis familiaris
attgccgttttggacagagaatcac

SEQ ID NO: 14086 - DNA, 25 bp, Canis familiaris
attgcgtttttccttgaaatcagcc

SEQ ID NO: 14087 - DNA, 25 bp, Canis familiaris
attgctgtccttttgccataacaac

SEQ ID NO: 14088 - DNA, 25 bp, Canis familiaris
attcagtccttcttggaagactact

SEQ ID NO: 14089 - DNA, 25 bp, Canis familiaris
attcgtcttcttaggctacctgact

SEQ ID NO: 14090 - DNA, 25 bp, Canis familiaris
attcgctattttaagatacacacac

SEQ ID NO: 14091 - DNA, 25 bp, Canis familiaris
attgcctttttgaagaaactacatg

SEQ ID NO: 14092 - DNA, 25 bp, Canis familiaris
attcaatttattcagtacagttctt

SEQ ID NO: 14093 - DNA, 25 bp, Canis familiaris
attgcttagtttcttatagtgttct

SEQ ID NO: 14094 - DNA, 25 bp, Canis familiaris
attgcttttttgtcttagtctattc

SEQ ID NO: 14095 - DNA, 25 bp, Canis familiaris
attgctctttatattgtgtgttatc

SEQ ID NO: 14096 - DNA, 25 bp, Canis familiaris
attcggattagttctgtttattcgt

SEQ ID NO: 14097 - DNA, 25 bp, Canis familiaris
attccgataatttctgttacttcat

SEQ ID NO: 14098 - DNA, 25 bp, Canis familiaris
attcccatatattaggtttcctcgg

SEQ ID NO: 14099 - DNA, 25 bp, Canis familiaris
atttccttaatatgtcccagttgcg

SEQ ID NO: 14100 - DNA, 25 bp, Canis familiaris
attctgtcctaaaagtcgtcctgtc

SEQ ID NO: 14101 - DNA, 25 bp, Canis familiaris
attcttcccaattggcaataccttg

SEQ ID NO: 14102 - DNA, 25 bp, Canis familiaris
attcatttgtactgtgaacacctgg

SEQ ID NO: 14103 - DNA, 25 bp, Canis familiaris
attgctattttttgagaaccctggg

SEQ ID NO: 14104 - DNA, 25 bp, Canis familiaris
attctgtttttctacataacctgtg

SEQ ID NO: 14105 - DNA, 25 bp, Canis familiaris
attctgggctacgaacaaacctttg

SEQ ID NO: 14106 - DNA, 25 bp, Canis familiaris
attcgggcttcccagagagagcctg

SEQ ID NO: 14107 - DNA, 25 bp, Canis familiaris
atctagggatatcctaggaggcctt

SEQ ID NO: 14108 - DNA, 25 bp, Canis familiaris
attaatgggttcaatcgaacacttt

SEQ ID NO: 14109 - DNA, 25 bp, Canis familiaris
atttagggacactatagaacaagtt

SEQ ID NO: 14110 - DNA, 25 bp, Canis familiaris
attttaaactcctagtagccatgta

SEQ ID NO: 14111 - DNA, 25 bp, Canis familiaris
attctttaactcccattaccatgta

SEQ ID NO: 14112 - DNA, 25 bp, Canis familiaris
atattcttacttctcgtcaaatgtc

SEQ ID NO: 14113 - DNA, 25 bp, Canis familiaris
atatttgtacttcaatccagatagt

SEQ ID NO: 14114 - DNA, 25 bp, Canis familiaris
attcttccctttttctcaatagatc

SEQ ID NO: 14115 - DNA, 25 bp, Canis familiaris
attcgttcatatattcatctaaaaa

SEQ ID NO: 14116 - DNA, 25 bp, Canis familiaris
attcggtcaattgtcactgtcatca

SEQ ID NO: 14117 - DNA, 25 bp, Canis familiaris
attcggtcaattgtcactgtcatca

SEQ ID NO: 14118 - DNA, 25 bp, Canis familiaris
gttcatagttatatatattctgaag

SEQ ID NO: 14119 - DNA, 25 bp, Canis familiaris
attgctggtcaacataatcctgggg

SEQ ID NO: 14120 - DNA, 25 bp, Canis familiaris
attcgagctatacccatcattcatt

SEQ ID NO: 14121 - DNA, 25 bp, Canis familiaris
attgccactgaaaccatgtacttac

SEQ ID NO: 14122 - DNA, 25 bp, Canis familiaris
attgccttttgtccattaatcagca

SEQ ID NO: 14123 - DNA, 25 bp, Canis familiaris
attccttttgtgacattcaagtcct

SEQ ID NO: 14124 - DNA, 25 bp, Canis familiaris
attccacatctattgtgattatcag

SEQ ID NO: 14125 - DNA, 25 bp, Canis familiaris
attccactccatttgtttcggacaa

SEQ ID NO: 14126 - DNA, 25 bp, Canis familiaris
attcccctattgttttccataatag

SEQ ID NO: 14127 - DNA, 25 bp, Canis familiaris
attccagttatttatgttccaaaag

SEQ ID NO: 14128 - DNA, 25 bp, Canis familiaris
attccatgtgtcaattatatctcca

SEQ ID NO: 14129 - DNA, 25 bp, Canis familiaris
attcctctgccaagaagacccaaag

SEQ ID NO: 14130 - DNA, 25 bp, Canis familiaris
attcctgtgctctgaagatgccagc

SEQ ID NO: 14131 - DNA, 25 bp, Canis familiaris
attcctggtcccagtgcacagtgac

SEQ ID NO: 14132 - DNA, 25 bp, Canis familiaris
attccatctcaggtgcttggggcat

SEQ ID NO: 14133 - DNA, 25 bp, Canis familiaris
attcccatcatcatcttgtggctga

SEQ ID NO: 14134 - DNA, 25 bp, Canis familiaris
attgctgccctcatttgtcagctaa

SEQ ID NO: 14135 - DNA, 25 bp, Canis familiaris
attccctcacacacttcagtgacat

SEQ ID NO: 14136 - DNA, 25 bp, Canis familiaris
attccccctgaagtctctagacatg

SEQ ID NO: 14137 - DNA, 25 bp, Canis familiaris
attcacctgccgaagctgtctgagc

SEQ ID NO: 14138 - DNA, 25 bp, Canis familiaris
attcaggaggcggactgcttggctg

SEQ ID NO: 14139 - DNA, 25 bp, Canis familiaris
attcatgagtggctacctgggctat

SEQ ID NO: 14140 - DNA, 25 bp, Canis familiaris
attcatgtgtaagagccgcctattc

SEQ ID NO: 14141 - DNA, 25 bp, Canis familiaris
attcttgtaaatatcctttctccct

SEQ ID NO: 14142 - DNA, 25 bp, Canis familiaris
attccttcagcatttattctttccc

SEQ ID NO: 14143 - DNA, 25 bp, Canis familiaris
attccttgcatattataatcctcct

SEQ ID NO: 14144 - DNA, 25 bp, Canis familiaris
attcctcctaaatatgttctcaagt

SEQ ID NO: 14145 - DNA, 25 bp, Canis familiaris
attccttctaaccaccttctgaaga

SEQ ID NO: 14146 - DNA, 25 bp, Canis familiaris
attcctttgcaattggctaatgggg

SEQ ID NO: 14147 - DNA, 25 bp, Canis familiaris
attctttgtgaattcgcatggggtg

SEQ ID NO: 14148 - DNA, 25 bp, Canis familiaris
attctttccagttctcagttggagg

SEQ ID NO: 14149 - DNA, 25 bp, Canis familiaris
attcatttcacgtactcctagatag

SEQ ID NO: 14150 - DNA, 25 bp, Canis familiaris
attctttccagtaacctgctattga

SEQ ID NO: 14151 - DNA, 25 bp, Canis familiaris
attctgtaccatatcgttgctctga

SEQ ID NO: 14152 - DNA, 25 bp, Canis familiaris
attctgatcccatcagcggtgattg

SEQ ID NO: 14153 - DNA, 25 bp, Canis familiaris
attctgaaactatatctggcatctg

SEQ ID NO: 14154 - DNA, 25 bp, Canis familiaris
attctgaagttatcctgccagttcc

SEQ ID NO: 14155 - DNA, 25 bp, Canis familiaris
atatgccaagattaccctcggtcat

SEQ ID NO: 14156 - DNA, 25 bp, Canis familiaris
attgccaaaacaccaccatttgcat

SEQ ID NO: 14157 - DNA, 25 bp, Canis familiaris
attccaaatcaatcagcctgttgca

SEQ ID NO: 14158 - DNA, 25 bp, Canis familiaris
attcctgagcaaaacatgcctttca

SEQ ID NO: 14159 - DNA, 25 bp, Canis familiaris
attccttgaaagacacaatctgcca

SEQ ID NO: 14160 - DNA, 25 bp, Canis familiaris
attccgagagatggcattcaaccct

SEQ ID NO: 14161 - DNA, 25 bp, Canis familiaris
attcagggagctgcaaatgccctct

SEQ ID NO: 14162 - DNA, 25 bp, Canis familiaris
attcaaggacttaattccctctcat

SEQ ID NO: 14163 - DNA, 25 bp, Canis familiaris
attaatgggttccaaccattcctca

SEQ ID NO: 14164 - DNA, 25 bp, Canis familiaris
attctgggtgtttagccttttctag

SEQ ID NO: 14165 - DNA, 25 bp, Canis familiaris
attcatgggtttttcttcttattgc

SEQ ID NO: 14166 - DNA, 25 bp, Canis familiaris
attagggcattttctcgtgtgaatg

SEQ ID NO: 14167 - DNA, 25 bp, Canis familiaris
attaattgctttgatccttgcaaga

SEQ ID NO: 14168 - DNA, 25 bp, Canis familiaris
atgggttcaatcgaacactttagca

SEQ ID NO: 14169 - DNA, 25 bp, Canis familiaris
attgccctcaatgaccactttgtca

SEQ ID NO: 14170 - DNA, 25 bp, Canis familiaris
attgccctcaatgaccactttgtca

SEQ ID NO: 14171 - DNA, 25 bp, Canis familiaris
attgccctcaatgaccactttgtca

SEQ ID NO: 14172 - DNA, 25 bp, Canis familiaris
attgccctcaacgaccactttgtca

SEQ ID NO: 14173 - DNA, 25 bp, Canis familiaris
atatcctctaactaaactttacaag

SEQ ID NO: 14174 - DNA, 25 bp, Canis familiaris
attgccttaatttatgtttgtttca

SEQ ID NO: 14175 - DNA, 25 bp, Canis familiaris
attccttagactatgatcagtgctt

SEQ ID NO: 14176 - DNA, 25 bp, Canis familiaris
attcctgatgaagtagtatgtagct

SEQ ID NO: 14177 - DNA, 25 bp, Canis familiaris
attcacgagcacatggttatcaccg

SEQ ID NO: 14178 - DNA, 25 bp, Canis familiaris
attaaagccaggctgcttggccagc

SEQ ID NO: 14179 - DNA, 25 bp, Canis familiaris
gttaagacgaatctgtatggcacct

SEQ ID NO: 14180 - DNA, 25 bp, Canis familiaris
attaaaccaagtagtcaggaccatg

SEQ ID NO: 14181 - DNA, 25 bp, Canis familiaris
attaaactagaaattcattcaacta

SEQ ID NO: 14182 - DNA, 25 bp, Canis familiaris
attaaggtgaacacctatagaacaa

SEQ ID NO: 14183 - DNA, 25 bp, Canis familiaris
attcaggggaagttcactttacagc

SEQ ID NO: 14184 - DNA, 25 bp, Canis familiaris
attaggcattgtggttactgtttcc

SEQ ID NO: 14185 - DNA, 25 bp, Canis familiaris
attctagatttggatgtgacgtgga

SEQ ID NO: 14186 - DNA, 25 bp, Canis familiaris
attctcatgcttttggaaggtgcga

SEQ ID NO: 14187 - DNA, 25 bp, Canis familiaris
attctcagccatttggggcacatgc

SEQ ID NO: 14188 - DNA, 25 bp, Canis familiaris
atttcacgatggcctaccaatgccc

SEQ ID NO: 14189 - DNA, 25 bp, Canis familiaris
attctagagattgttactaccctta

SEQ ID NO: 14190 - DNA, 25 bp, Canis familiaris
attccagatgttttctcttacccat

SEQ ID NO: 14191 - DNA, 25 bp, Canis familiaris
attagaagcttgtttcattcccctg

SEQ ID NO: 14192 - DNA, 25 bp, Canis familiaris
attcagaattcgttttagctttatt

SEQ ID NO: 14193 - DNA, 25 bp, Canis familiaris
attcctgaatgggtttactcttagt

SEQ ID NO: 14194 - DNA, 25 bp, Canis familiaris
attcctaatggctttaactctcact

SEQ ID NO: 14195 - DNA, 25 bp, Canis familiaris
attctcaaggacatcataaccccta

SEQ ID NO: 14196 - DNA, 25 bp, Canis familiaris
attagagacgaccgatacccaccat

SEQ ID NO: 14197 - DNA, 25 bp, Canis familiaris
attactgtagaccgagacccagctt

SEQ ID NO: 14198 - DNA, 25 bp, Canis familiaris
attactgtaacggttgtccacaatc

SEQ ID NO: 14199 - DNA, 25 bp, Canis familiaris
attactataaccctataaacctctg

SEQ ID NO: 14200 - DNA, 25 bp, Canis familiaris
gttactataaagtggaccctcttga

SEQ ID NO: 14201 - DNA, 25 bp, Canis familiaris
atttaagagaagggaagtctacttg

SEQ ID NO: 14202 - DNA, 25 bp, Canis familiaris
attcgacgaacgtcgaggtcccctg

SEQ ID NO: 14203 - DNA, 25 bp, Canis familiaris
agtcgacgtacgagaattgacccat

SEQ ID NO: 14204 - DNA, 25 bp, Canis familiaris
agtctactaatccttaattaccacg

SEQ ID NO: 14205 - DNA, 25 bp, Canis familiaris
attctactaatcttaatttacaggg

SEQ ID NO: 14206 - DNA, 25 bp, Canis familiaris
atttcactttgtgttgttccggcgt

SEQ ID NO: 14207 - DNA, 25 bp, Canis familiaris
attccttttcttgtttatcggcagt

SEQ ID NO: 14208 - DNA, 25 bp, Canis familiaris
attctatttttctgtttaatccagt

SEQ ID NO: 14209 - DNA, 25 bp, Canis familiaris
attccaatctttatattgtgacatc

SEQ ID NO: 14210 - DNA, 25 bp, Canis familiaris
attccacatattatttttgccaaaa

SEQ ID NO: 14211 - DNA, 25 bp, Canis familiaris
attccactatatttatttttgccaa

SEQ ID NO: 14212 - DNA, 25 bp, Canis familiaris
attcccttctttagtatgtttacag

SEQ ID NO: 14213 - DNA, 25 bp, Canis familiaris
attcccattctgattgtattttgta

SEQ ID NO: 14214 - DNA, 25 bp, Canis familiaris
attgccaccctaatgatgtttggtg

SEQ ID NO: 14215 - DNA, 25 bp, Canis familiaris
attcccctgaattgtgtttcgatgc

SEQ ID NO: 14216 - DNA, 25 bp, Canis familiaris
attcctcacagattcgtattctcca

SEQ ID NO: 14217 - DNA, 25 bp, Canis familiaris
attccacacaattcgtgagatccac

SEQ ID NO: 14218 - DNA, 25 bp, Canis familiaris
attccacaagactgctcagctcaac

SEQ ID NO: 14219 - DNA, 25 bp, Canis familiaris
attcccaaagcagccagcctaggaa

SEQ ID NO: 14220 - DNA, 25 bp, Canis familiaris
attccaagaggagacactggagaag

SEQ ID NO: 14221 - DNA, 25 bp, Canis familiaris
attacaagcggaggcgctgccgcgc

SEQ ID NO: 14222 - DNA, 25 bp, Canis familiaris
attacaatcggaacacattcagctg

SEQ ID NO: 14223 - DNA, 25 bp, Canis familiaris
attaatctgggcaccagctcgttcc

SEQ ID NO: 14224 - DNA, 25 bp, Canis familiaris
attaaatggatctccagcctatgct

SEQ ID NO: 14225 - DNA, 25 bp, Canis familiaris
attatttcagtctggcagccatgtt

SEQ ID NO: 14226 - DNA, 25 bp, Canis familiaris
attatgttgaatcttaggcgtctta

SEQ ID NO: 14227 - DNA, 25 bp, Canis familiaris
atttgtaagtttcaggtgacatgtg

SEQ ID NO: 14228 - DNA, 25 bp, Canis familiaris
attattcacaggttccagggacgga

SEQ ID NO: 14229 - DNA, 25 bp, Canis familiaris
attcttaaggtgacctgagacccca

SEQ ID NO: 14230 - DNA, 25 bp, Canis familiaris
attcagatccggagactacacaccc

SEQ ID NO: 14231 - DNA, 25 bp, Canis familiaris
attgccatcccgtggcgaacaacaa

SEQ ID NO: 14232 - DNA, 25 bp, Canis familiaris
attcctcaccagttgtctcaataaa

SEQ ID NO: 14233 - DNA, 25 bp, Canis familiaris
attcgtctccaagatcacaatcaaa

SEQ ID NO: 14234 - DNA, 25 bp, Canis familiaris
agtctgagtcccagtccaaaaatga

SEQ ID NO: 14235 - DNA, 25 bp, Canis familiaris
attccagtgcccaagtccagaggga

SEQ ID NO: 14236 - DNA, 25 bp, Canis familiaris
attaagtccttactgataggggcac

SEQ ID NO: 14237 - DNA, 25 bp, Canis familiaris
attaactccatctgcttgggtaagc

SEQ ID NO: 14238 - DNA, 25 bp, Canis familiaris
attaaggacacatagacaagttgac

SEQ ID NO: 14239 - DNA, 25 bp, Canis familiaris
attaaggacacatttgcatcaacca

SEQ ID NO: 14240 - DNA, 25 bp, Canis familiaris
attagacaaccagtagacaaatgca

SEQ ID NO: 14241 - DNA, 25 bp, Canis familiaris
attacagccccagaaatcatcagca

SEQ ID NO: 14242 - DNA, 25 bp, Canis familiaris
attccacccatggcaaattccatgg

SEQ ID NO: 14243 - DNA, 25 bp, Canis familiaris
attcctcagcactcaaatctacgat

SEQ ID NO: 14244 - DNA, 25 bp, Canis familiaris
attcctgcgcagtacaagcttgctc

SEQ ID NO: 14245 - DNA, 25 bp, Canis familiaris
attcctgctgtgttgtatctggctc

SEQ ID NO: 14246 - DNA, 25 bp, Canis familiaris
attcctctggggacagtggtcacca

SEQ ID NO: 14247 - DNA, 25 bp, Canis familiaris
attccatttgtcctaggattcccat

SEQ ID NO: 14248 - DNA, 25 bp, Canis familiaris
attccatatttataatgttggccac

SEQ ID NO: 14249 - DNA, 25 bp, Canis familiaris
attccatttccatatatgatttcta

SEQ ID NO: 14250 - DNA, 25 bp, Canis familiaris
attccttatttaattgtatttatct

SEQ ID NO: 14251 - DNA, 25 bp, Canis familiaris
attcgttgttgttgaaggttttctg

SEQ ID NO: 14252 - DNA, 25 bp, Canis familiaris
attctttggttgcttcagtttatta

SEQ ID NO: 14253 - DNA, 25 bp, Canis familiaris
attcctgttttgctccgaagtattc

SEQ ID NO: 14254 - DNA, 25 bp, Canis familiaris
attcctgtcatttgttccgggtgat

SEQ ID NO: 14255 - DNA, 25 bp, Canis familiaris
attctccattcctttcctgatggag

SEQ ID NO: 14256 - DNA, 25 bp, Canis familiaris
attccatattcctttattattgatt

SEQ ID NO: 14257 - DNA, 25 bp, Canis familiaris
attccaatgtactttttatgttatt

SEQ ID NO: 14258 - DNA, 25 bp, Canis familiaris
attccaatctggcctgcttttttaa

SEQ ID NO: 14259 - DNA, 25 bp, Canis familiaris
attccagatgctcaatttctcttaa

SEQ ID NO: 14260 - DNA, 25 bp, Canis familiaris
attccacgtcactatttctctttgg

SEQ ID NO: 14261 - DNA, 25 bp, Canis familiaris
attctagctgtatgatttgttttga

SEQ ID NO: 14262 - DNA, 25 bp, Canis familiaris
attcctttattgattgcctctatga

SEQ ID NO: 14263 - DNA, 25 bp, Canis familiaris
attcctggtttaattcctttgcaat

SEQ ID NO: 14264 - DNA, 25 bp, Canis familiaris
attcctctttaatcccattatgaat

SEQ ID NO: 14265 - DNA, 25 bp, Canis familiaris
atgttttgttggagccactttgttt

SEQ ID NO: 14266 - DNA, 25 bp, Canis familiaris
atttcctgggagagcccctgtttat

SEQ ID NO: 14267 - DNA, 25 bp, Canis familiaris
attagccgtgggctgtcttcgttat

SEQ ID NO: 14268 - DNA, 25 bp, Canis familiaris
atgtcccggctgctggaatgttttt

SEQ ID NO: 14269 - DNA, 25 bp, Canis familiaris
attccctgagttgtgattcttttat

SEQ ID NO: 14270 - DNA, 25 bp, Canis familiaris
attctcctcggtggtttcaaatcat

SEQ ID NO: 14271 - DNA, 25 bp, Canis familiaris
attcttccagtggttcttccaattg

SEQ ID NO: 14272 - DNA, 25 bp, Canis familiaris
attctgttcttggttctgtaaactt

SEQ ID NO: 14273 - DNA, 25 bp, Canis familiaris
attcctcttcaggctgttgcttaac

SEQ ID NO: 14274 - DNA, 25 bp, Canis familiaris
attccttccatgtgagtgtagagtc

SEQ ID NO: 14275 - DNA, 25 bp, Canis familiaris
attccattctattgaggtgtacctg

SEQ ID NO: 14276 - DNA, 25 bp, Canis familiaris
attcagcttcaaggctggtgaagtc

SEQ ID NO: 14277 - DNA, 25 bp, Canis familiaris
attcagtgcatcagccgtgtctatt

SEQ ID NO: 14278 - DNA, 25 bp, Canis familiaris
attcagtaccgctcagtattgttaa

SEQ ID NO: 14279 - DNA, 25 bp, Canis familiaris
attcatgtaccgagtgctcctttag

SEQ ID NO: 14280 - DNA, 25 bp, Canis familiaris
atatatggaccgaggcccgttttga

SEQ ID NO: 14281 - DNA, 25 bp, Canis familiaris
attattgacttgtcccccaattttg

SEQ ID NO: 14282 - DNA, 25 bp, Canis familiaris
attacaactactgacccatttgtct

SEQ ID NO: 14283 - DNA, 25 bp, Canis familiaris
attaaaatagtctccttcctgtcac

SEQ ID NO: 14284 - DNA, 25 bp, Canis familiaris
attaccaatttatcctccgtgattc

SEQ ID NO: 14285 - DNA, 25 bp, Canis familiaris
attacaacaaaatcacttccctctc

SEQ ID NO: 14286 - DNA, 25 bp, Canis familiaris
attacttttaaaactgccacctgct

SEQ ID NO: 14287 - DNA, 25 bp, Canis familiaris
attaacttttaattatgcccacaga

SEQ ID NO: 14288 - DNA, 25 bp, Canis familiaris
attaacttattgcctttcatgagct

SEQ ID NO: 14289 - DNA, 25 bp, Canis familiaris
attcatactctttggttcttggccc

SEQ ID NO: 14290 - DNA, 25 bp, Canis familiaris
attcaatccctctggttggacactc

SEQ ID NO: 14291 - DNA, 25 bp, Canis familiaris
attctgaaccccaagtctaacacta

SEQ ID NO: 14292 - DNA, 25 bp, Canis familiaris
attctgataacctcaaatattagat

SEQ ID NO: 14293 - DNA, 25 bp, Canis familiaris
attcacaacaccactgaagttatat

SEQ ID NO: 14294 - DNA, 25 bp, Canis familiaris
attcgcacagcagctgggagcagct

SEQ ID NO: 14295 - DNA, 25 bp, Canis familiaris
attcccagaaatcagagatgctcta

SEQ ID NO: 14296 - DNA, 25 bp, Canis familiaris
attcccttgaagcagtcatgtccaa

SEQ ID NO: 14297 - DNA, 25 bp, Canis familiaris
attcccggattgcaactgtcttcgg

SEQ ID NO: 14298 - DNA, 25 bp, Canis familiaris
attccctggttgctaatgatcaccg

SEQ ID NO: 14299 - DNA, 25 bp, Canis familiaris
attcccgggatgtctctagacaccc

SEQ ID NO: 14300 - DNA, 25 bp, Canis familiaris
attccctgtgaaaccgagaatccca

SEQ ID NO: 14301 - DNA, 25 bp, Canis familiaris
attctggtgttagccgatggacgcc

SEQ ID NO: 14302 - DNA, 25 bp, Canis familiaris
attcgtctgtaagcctgcaggtcaa

SEQ ID NO: 14303 - DNA, 25 bp, Canis familiaris
attcatgttctaaacacaagcacca

SEQ ID NO: 14304 - DNA, 25 bp, Canis familiaris
attcatttgctataccaaccatggt

SEQ ID NO: 14305 - DNA, 25 bp, Canis familiaris
atctcagtgcgtacagagcctaccg

SEQ ID NO: 14306 - DNA, 25 bp, Canis familiaris
attcaggcagcagcacaactacctc

SEQ ID NO: 14307 - DNA, 25 bp, Canis familiaris
attcaaggagcagcacatctacccc

SEQ ID NO: 14308 - DNA, 25 bp, Canis familiaris
attcaagaggcagtgctgggtttcc

SEQ ID NO: 14309 - DNA, 25 bp, Canis familiaris
attcacgggcgccgtggctttatgc

SEQ ID NO: 14310 - DNA, 25 bp, Canis familiaris
attcgtggtatccttgtttgtctgg

SEQ ID NO: 14311 - DNA, 25 bp, Canis familiaris
attcctggcctgttttttgttgtgg

SEQ ID NO: 14312 - DNA, 25 bp, Canis familiaris
attcctgtgctgttattttgttgtt

SEQ ID NO: 14313 - DNA, 25 bp, Canis familiaris
attccttgtgtttgctcactgtgtc

SEQ ID NO: 14314 - DNA, 25 bp, Canis familiaris
attccttgtgtttgctcactgtgtc

SEQ ID NO: 14315 - DNA, 25 bp, Canis familiaris
attccttgtgtttgctcactgtgtc

SEQ ID NO: 14316 - DNA, 25 bp, Canis familiaris
attccttgtgtttgctcactgtgtc

SEQ ID NO: 14317 - DNA, 25 bp, Canis familiaris
attccttgtgtttgctcactgtgtc

SEQ ID NO: 14318 - DNA, 25 bp, Canis familiaris
attccttgtgtttgctcactgtgtc

SEQ ID NO: 14319 - DNA, 25 bp, Canis familiaris
attccttgtgtttgctcactgtgtc

SEQ ID NO: 14320 - DNA, 25 bp, Canis familiaris
attccttgtgtttgctcactgtgtc

SEQ ID NO: 14321 - DNA, 25 bp, Canis familiaris
attccatttgatttctatctgtgtg

SEQ ID NO: 14322 - DNA, 25 bp, Canis familiaris
attcaattccactcagcttgggcaa

SEQ ID NO: 14323 - DNA, 25 bp, Canis familiaris
attcaagtgcccccagctatggaaa

SEQ ID NO: 14324 - DNA, 25 bp, Canis familiaris
attcaaggcacaatcccttggctaa

SEQ ID NO: 14325 - DNA, 25 bp, Canis familiaris
attcgcagacaatgtcctctgtgct

SEQ ID NO: 14326 - DNA, 25 bp, Canis familiaris
atatccgaaatcttgccatgagtgc

SEQ ID NO: 14327 - DNA, 25 bp, Canis familiaris
attcctgaagtctttatttgcaata

SEQ ID NO: 14328 - DNA, 25 bp, Canis familiaris
attcaataaactggtgatttcttac

SEQ ID NO: 14329 - DNA, 25 bp, Canis familiaris
attcatgataacaagggattcccaa

SEQ ID NO: 14330 - DNA, 25 bp, Canis familiaris
attctgtagctccagttttctaaaa

SEQ ID NO: 14331 - DNA, 25 bp, Canis familiaris
attcccctccagaattgtcggagaa

SEQ ID NO: 14332 - DNA, 25 bp, Canis familiaris
attcacacacattcaaaaggcagga

SEQ ID NO: 14333 - DNA, 25 bp, Canis familiaris
attagaagcatgccagaacagactg

SEQ ID NO: 14334 - DNA, 25 bp, Canis familiaris
attcagcaatatccgcatcaacatg

SEQ ID NO: 14335 - DNA, 25 bp, Canis familiaris
attctacaatgctctgatacatgaa

SEQ ID NO: 14336 - DNA, 25 bp, Canis familiaris
attacaacacatatgcatcagctaa

SEQ ID NO: 14337 - DNA, 25 bp, Canis familiaris
attcaaatggaaattctgctcagaa

SEQ ID NO: 14338 - DNA, 25 bp, Canis familiaris
attcccagatgatgtctgcgtcgtc

SEQ ID NO: 14339 - DNA, 25 bp, Canis familiaris
attcctgcaggattactttgatggc

SEQ ID NO: 14340 - DNA, 25 bp, Canis familiaris
attccctcgtagtctttatggctaa

SEQ ID NO: 14341 - DNA, 25 bp, Canis familiaris
attccctgctgcagacgttagccta

SEQ ID NO: 14342 - DNA, 25 bp, Canis familiaris
attcccactgcttactttaatctga

SEQ ID NO: 14343 - DNA, 25 bp, Canis familiaris
attacgcagtccttcactgtacact

SEQ ID NO: 14344 - DNA, 25 bp, Canis familiaris
attcaacatctttgccagcgtaact

SEQ ID NO: 14345 - DNA, 25 bp, Canis familiaris
attcaagcacatatcacgtaacagt

SEQ ID NO: 14346 - DNA, 25 bp, Canis familiaris
attcaagctccaaggctgtgaaagt

SEQ ID NO: 14347 - DNA, 25 bp, Canis familiaris
attcatatccgcagcttctgaaggt

SEQ ID NO: 14348 - DNA, 25 bp, Canis familiaris
attcctgcctgcaactttatgaggt

SEQ ID NO: 14349 - DNA, 25 bp, Canis familiaris
attccgtcgctaccatggtggagtt

SEQ ID NO: 14350 - DNA, 25 bp, Canis familiaris
attcctgtgcctttcatgggtttga

SEQ ID NO: 14351 - DNA, 25 bp, Canis familiaris
attcctctgcttcataggtgttctg

SEQ ID NO: 14352 - DNA, 25 bp, Canis familiaris
attccctgtctcaagaatctctttg

SEQ ID NO: 14353 - DNA, 25 bp, Canis familiaris
attcccggatctttttctatgtgtc

SEQ ID NO: 14354 - DNA, 25 bp, Canis familiaris
attcctcaggttttatctgctcttt

SEQ ID NO: 14355 - DNA, 25 bp, Canis familiaris
attcttcagtgtaaaaatccttaca

SEQ ID NO: 14356 - DNA, 25 bp, Canis familiaris
attcattcgttgtaacatattctat

SEQ ID NO: 14357 - DNA, 25 bp, Canis familiaris
attaagtgtctatcctatgctttgg

SEQ ID NO: 14358 - DNA, 25 bp, Canis familiaris
attaaggtctttctctttgtctgtt

SEQ ID NO: 14359 - DNA, 25 bp, Canis familiaris
attaagttccttctgggcttcatgg

SEQ ID NO: 14360 - DNA, 25 bp, Canis familiaris
attcaaatctcgtgttgggctccat

SEQ ID NO: 14361 - DNA, 25 bp, Canis familiaris
attcaattcacgttctgggtgccca

SEQ ID NO: 14362 - DNA, 25 bp, Canis familiaris
attcgcatcttgattctgggcggaa

SEQ ID NO: 14363 - DNA, 25 bp, Canis familiaris
attcatctcgtaattcggggtcaac

SEQ ID NO: 14364 - DNA, 25 bp, Canis familiaris
attctaccttttcagtttcaacctg

SEQ ID NO: 14365 - DNA, 25 bp, Canis familiaris
attctagcctatttcaagtactcag

SEQ ID NO: 14366 - DNA, 25 bp, Canis familiaris
attcatcacatttttcaacatcagc

SEQ ID NO: 14367 - DNA, 25 bp, Canis familiaris
attcccatttcaacaccaggaaaca

SEQ ID NO: 14368 - DNA, 25 bp, Canis familiaris
attcctctattaacacacctgatca

SEQ ID NO: 14369 - DNA, 25 bp, Canis familiaris
attccctttgaatcactcgtgaatc

SEQ ID NO: 14370 - DNA, 25 bp, Canis familiaris
attcccttgtaaccagtaagcaatc

SEQ ID NO: 14371 - DNA, 25 bp, Canis familiaris
attcctgctttaattagtcaagact

SEQ ID NO: 14372 - DNA, 25 bp, Canis familiaris
attactgttcttactggtacatggt

SEQ ID NO: 14373 - DNA, 25 bp, Canis familiaris
attaagtgtcttgctatataaaata

SEQ ID NO: 14374 - DNA, 25 bp, Canis familiaris
atctaaggtcgagcctcattaaacg

SEQ ID NO: 14375 - DNA, 25 bp, Canis familiaris
attagagtttgctcctttaagtcaa

SEQ ID NO: 14376 - DNA, 25 bp, Canis familiaris
attagtgttcatttgcctttccaga

SEQ ID NO: 14377 - DNA, 25 bp, Canis familiaris
attcagtattgatctgcctctcgtc

SEQ ID NO: 14378 - DNA, 25 bp, Canis familiaris
attctgtttgacgtgctgttctgga

SEQ ID NO: 14379 - DNA, 25 bp, Canis familiaris
atttgttaaccagaattggatcaat

SEQ ID NO: 14380 - DNA, 25 bp, Canis familiaris
atttgtggagaataatttggagaag

SEQ ID NO: 14381 - DNA, 25 bp, Canis familiaris
atttggtataattatggttggtgat

SEQ ID NO: 14382 - DNA, 25 bp, Canis familiaris
atttggtataattatggttggtgat

SEQ ID NO: 14383 - DNA, 25 bp, Canis familiaris
attacattgtaatagtgttctggag

SEQ ID NO: 14384 - DNA, 25 bp, Canis familiaris
attactctgtttcagtgtttgggga

SEQ ID NO: 14385 - DNA, 25 bp, Canis familiaris
attttctactggccaagtttgagtg

SEQ ID NO: 14386 - DNA, 25 bp, Canis familiaris
attctgttccggggagatctccgtg

SEQ ID NO: 14387 - DNA, 25 bp, Canis familiaris
atatatttcccgtgtgaccagcagg

SEQ ID NO: 14388 - DNA, 25 bp, Canis familiaris
attactacccagcgtcactatgacg

SEQ ID NO: 14389 - DNA, 25 bp, Canis familiaris
attcaggaccacgggttctggactg

SEQ ID NO: 14390 - DNA, 25 bp, Canis familiaris
attagaaccacactgtatttacatt

SEQ ID NO: 14391 - DNA, 25 bp, Canis familiaris
attaggcacctaccatatgttagac

SEQ ID NO: 14392 - DNA, 25 bp, Canis familiaris
attacgcacactacaatttcagtat

SEQ ID NO: 14393 - DNA, 25 bp, Canis familiaris
attacgcacactacaatttcagtat

SEQ ID NO: 14394 - DNA, 25 bp, Canis familiaris
attacacaacaattatttgcaatag

SEQ ID NO: 14395 - DNA, 25 bp, Canis familiaris
attaactaatcttacacgcaatggc

SEQ ID NO: 14396 - DNA, 25 bp, Canis familiaris
atgtaaaatgacttacccaaggcca

SEQ ID NO: 14397 - DNA, 25 bp, Canis familiaris
attaataagaaatcagccgtagcta

SEQ ID NO: 14398 - DNA, 25 bp, Canis familiaris
attactttccagaaccacgtagcta

SEQ ID NO: 14399 - DNA, 25 bp, Canis familiaris
atttcgttccaaataccacggctat

SEQ ID NO: 14400 - DNA, 25 bp, Canis familiaris
atttgcgggccaagtacctggacga

SEQ ID NO: 14401 - DNA, 25 bp, Canis familiaris
attctggggagcaggtccttgtgga

SEQ ID NO: 14402 - DNA, 25 bp, Canis familiaris
attctaaggatatgtgtccttggga

SEQ ID NO: 14403 - DNA, 25 bp, Canis familiaris
attctccagacgttctactttcgga

SEQ ID NO: 14404 - DNA, 25 bp, Canis familiaris
attctcacggagttctgccttaagt

SEQ ID NO: 14405 - DNA, 25 bp, Canis familiaris
attccctgtgattctcaggttatac

SEQ ID NO: 14406 - DNA, 25 bp, Canis familiaris
attccgtgtgctgctgcaggtgttc

SEQ ID NO: 14407 - DNA, 25 bp, Canis familiaris
attctctgttgtctcctggagtagg

SEQ ID NO: 14408 - DNA, 25 bp, Canis familiaris
attctcttatttacacgtagcgggt

SEQ ID NO: 14409 - DNA, 25 bp, Canis familiaris
attcccatattctacattgctactg

SEQ ID NO: 14410 - DNA, 25 bp, Canis familiaris
attccctcatcaaggctacaattgc

SEQ ID NO: 14411 - DNA, 25 bp, Canis familiaris
attctcagctcggaggtaatttgct

SEQ ID NO: 14412 - DNA, 25 bp, Canis familiaris
attctctgtgtatgtgtacgcttgt

SEQ ID NO: 14413 - DNA, 25 bp, Canis familiaris
attctcttgtatatcacacgctctc

SEQ ID NO: 14414 - DNA, 25 bp, Canis familiaris
attctgcattttatccagcttttct

SEQ ID NO: 14415 - DNA, 25 bp, Canis familiaris
attcagcagtttagcaaccctttcc

SEQ ID NO: 14416 - DNA, 25 bp, Canis familiaris
attcgagtttaaatgtgtccttcac

SEQ ID NO: 14417 - DNA, 25 bp, Canis familiaris
attctctatttaccatttctttcac

SEQ ID NO: 14418 - DNA, 25 bp, Canis familiaris
attctgcttctgaacagctttttat

SEQ ID NO: 14419 - DNA, 25 bp, Canis familiaris
attcagcacctgacactgttctgct

SEQ ID NO: 14420 - DNA, 25 bp, Canis familiaris
attcagtcctgttcttttttgtact

SEQ ID NO: 14421 - DNA, 25 bp, Canis familiaris
attcagtccgcgtcagtattttaaa

SEQ ID NO: 14422 - DNA, 25 bp, Canis familiaris
attcaccctggatttcatttacaaa

SEQ ID NO: 14423 - DNA, 25 bp, Canis familiaris
attcccgggatgtcatagtaaataa

SEQ ID NO: 14424 - DNA, 25 bp, Canis familiaris
attcccgggatagcagctgcaagga

SEQ ID NO: 14425 - DNA, 25 bp, Canis familiaris
attcccgggatcttagtgaggtgca

SEQ ID NO: 14426 - DNA, 25 bp, Canis familiaris
attcccgggatctcggatgactgca

SEQ ID NO: 14427 - DNA, 25 bp, Canis familiaris
attcccgggattgaagagcctgctc

SEQ ID NO: 14428 - DNA, 25 bp, Canis familiaris
attcccgggatcagagaagacatcc

SEQ ID NO: 14429 - DNA, 25 bp, Canis familiaris
attcccgggatcaagagaacatcat

SEQ ID NO: 14430 - DNA, 25 bp, Canis familiaris
attcccgggatcaaggaggctcagc

SEQ ID NO: 14431 - DNA, 25 bp, Canis familiaris
attcccgggatggatggagttgctg

SEQ ID NO: 14432 - DNA, 25 bp, Canis familiaris
attcccgggatcccatagttgctaa

SEQ ID NO: 14433 - DNA, 25 bp, Canis familiaris
attcccatggaagcctagtctgtat

SEQ ID NO: 14434 - DNA, 25 bp, Canis familiaris
attcccatggatgtcaatctgttta

SEQ ID NO: 14435 - DNA, 25 bp, Canis familiaris
attcacattggagaccctgttggac

SEQ ID NO: 14436 - DNA, 25 bp, Canis familiaris
attacttcgatatccctacttacat

SEQ ID NO: 14437 - DNA, 25 bp, Canis familiaris
attttggtgtactcctagataatcc

SEQ ID NO: 14438 - DNA, 25 bp, Canis familiaris
atattttgggacgctaaagatgttc

SEQ ID NO: 14439 - DNA, 25 bp, Canis familiaris
attctgtggcggtttctataggtgt

SEQ ID NO: 14440 - DNA, 25 bp, Canis familiaris
attctgtgggaggatactttttgcc

SEQ ID NO: 14441 - DNA, 25 bp, Canis familiaris
attcttcaggagctacttttccagt

SEQ ID NO: 14442 - DNA, 25 bp, Canis familiaris
attcttcttaattgccttttgccat

SEQ ID NO: 14443 - DNA, 25 bp, Canis familiaris
attctggattttaccccatagcctt

SEQ ID NO: 14444 - DNA, 25 bp, Canis familiaris
attctggtttttgcctgatacaagt

SEQ ID NO: 14445 - DNA, 25 bp, Canis familiaris
attagcgttctgattccttatcgag

SEQ ID NO: 14446 - DNA, 25 bp, Canis familiaris
attaagtccttttatcgtatcagga

SEQ ID NO: 14447 - DNA, 25 bp, Canis familiaris
attaagccatgcatgtctaagtacg

SEQ ID NO: 14448 - DNA, 25 bp, Canis familiaris
attaagccatgcatgtctaagtacg

SEQ ID NO: 14449 - DNA, 25 bp, Canis familiaris
attcaaccactttgccatactgact

SEQ ID NO: 14450 - DNA, 25 bp, Canis familiaris
attcccaatctttgctatcctaatt

SEQ ID NO: 14451 - DNA, 25 bp, Canis familiaris
attcccactctgtgctctaattttt

SEQ ID NO: 14452 - DNA, 25 bp, Canis familiaris
attctcaacctgtgaatttggtttg

SEQ ID NO: 14453 - DNA, 25 bp, Canis familiaris
caatataacgtccgaacttgggttg

SEQ ID NO: 14454 - DNA, 25 bp, Canis familiaris
cttataaccctctgactatgcggat

SEQ ID NO: 14455 - DNA, 25 bp, Canis familiaris
attaacaacctcgtgcgctgaaaat

SEQ ID NO: 14456 - DNA, 25 bp, Canis familiaris
attaagatatccagtccgtgacgat

SEQ ID NO: 14457 - DNA, 25 bp, Canis familiaris
attaatgcaatatagtcacgtttga

SEQ ID NO: 14458 - DNA, 25 bp, Canis familiaris
attaaccatcgttgtatgccctaga

SEQ ID NO: 14459 - DNA, 25 bp, Canis familiaris
attaatcctggtgaggccctttgtt

SEQ ID NO: 14460 - DNA, 25 bp, Canis familiaris
attacatttaggggctccagtgttg

SEQ ID NO: 14461 - DNA, 25 bp, Canis familiaris
attacattgtacctgacctcattgg

SEQ ID NO: 14462 - DNA, 25 bp, Canis familiaris
attacatttacctaagtcatcttat

SEQ ID NO: 14463 - DNA, 25 bp, Canis familiaris
attatctaactctttagttctaaat

SEQ ID NO: 14464 - DNA, 25 bp, Canis familiaris
attctctgtaccatgtcaattcgac

SEQ ID NO: 14465 - DNA, 25 bp, Canis familiaris
attctctggaagggataatctcaac

SEQ ID NO: 14466 - DNA, 25 bp, Canis familiaris
attcgttatacggaagatgatgaac

SEQ ID NO: 14467 - DNA, 25 bp, Canis familiaris
attcttttactggcaatggacaact

SEQ ID NO: 14468 - DNA, 25 bp, Canis familiaris
attctttctccagaacacacacaca

SEQ ID NO: 14469 - DNA, 25 bp, Canis familiaris
attcttttccgtgcatgtgcaccca

SEQ ID NO: 14470 - DNA, 25 bp, Canis familiaris
attcattttcttcacagttcaccaa

SEQ ID NO: 14471 - DNA, 25 bp, Canis familiaris
attcactgatctatcaacagtaatc

SEQ ID NO: 14472 - DNA, 25 bp, Canis familiaris
attctcatactcaccatcaatatct

SEQ ID NO: 14473 - DNA, 25 bp, Canis familiaris
attctgaactctttacagatattct

SEQ ID NO: 14474 - DNA, 25 bp, Canis familiaris
attcatacacctactgatggacagt

SEQ ID NO: 14475 - DNA, 25 bp, Canis familiaris
attagaacactgtctgatacaccta

SEQ ID NO: 14476 - DNA, 25 bp, Canis familiaris
attacagatactactgatccccggc

SEQ ID NO: 14477 - DNA, 25 bp, Canis familiaris
attacgcattctatatcaacttgcc

SEQ ID NO: 14478 - DNA, 25 bp, Canis familiaris
attacaattttttcatactctcagg

SEQ ID NO: 14479 - DNA, 25 bp, Canis familiaris
attcacctgcttactacatacacta

SEQ ID NO: 14480 - DNA, 25 bp, Canis familiaris
attccctctgataatatattttcaa

SEQ ID NO: 14481 - DNA, 25 bp, Canis familiaris
attagaccagttaacactttcaatt

SEQ ID NO: 14482 - DNA, 25 bp, Canis familiaris
attacaacgctaatgaacttttcat

SEQ ID NO: 14483 - DNA, 25 bp, Canis familiaris
attactactcgaatcaactgtgaat

SEQ ID NO: 14484 - DNA, 25 bp, Canis familiaris
attactactccataaaatgtgcatg

SEQ ID NO: 14485 - DNA, 25 bp, Canis familiaris
attactggtccatagagagctgaat

SEQ ID NO: 14486 - DNA, 25 bp, Canis familiaris
attttgtgaccatagaggatttaaa

SEQ ID NO: 14487 - DNA, 25 bp, Canis familiaris
attttgcccttacagagaataccaa

SEQ ID NO: 14488 - DNA, 25 bp, Canis familiaris
atttggcccttctcactgaaaagag

SEQ ID NO: 14489 - DNA, 25 bp, Canis familiaris
atttggacctattcaaccagtaaat

SEQ ID NO: 14490 - DNA, 25 bp, Canis familiaris
attttacactgaaaaccaacatggt

SEQ ID NO: 14491 - DNA, 25 bp, Canis familiaris
attcaatccactatagaccagccac

SEQ ID NO: 14492 - DNA, 25 bp, Canis familiaris
attaatccatacatgagctctccct

SEQ ID NO: 14493 - DNA, 25 bp, Canis familiaris
attaatccatacatgagctctccct

SEQ ID NO: 14494 - DNA, 25 bp, Canis familiaris
attaatccatacatgagctctccct

SEQ ID NO: 14495 - DNA, 25 bp, Canis familiaris
attaatccatacatgagctctccct

SEQ ID NO: 14496 - DNA, 25 bp, Canis familiaris
attaatccatacatgagctctccct

SEQ ID NO: 14497 - DNA, 25 bp, Canis familiaris
attaatccatacatgagctctccct

SEQ ID NO: 14498 - DNA, 25 bp, Canis familiaris
attaatccatacatgagctctccct

SEQ ID NO: 14499 - DNA, 25 bp, Canis familiaris
attcaataaccgaagcatccatctt

SEQ ID NO: 14500 - DNA, 25 bp, Canis familiaris
attaaaatccagtatcagctccatg

SEQ ID NO: 14501 - DNA, 25 bp, Canis familiaris
attcaacacaatggagtcgctcctg

SEQ ID NO: 14502 - DNA, 25 bp, Canis familiaris
attcggcacgagcagtgcagtcgtg

SEQ ID NO: 14503 - DNA, 25 bp, Canis familiaris
attcggcacgagctgatttattata

SEQ ID NO: 14504 - DNA, 25 bp, Canis familiaris
attcggcacgaggtcattttatctc

SEQ ID NO: 14505 - DNA, 25 bp, Canis familiaris
attcgtagagtagtattgtaatctt

SEQ ID NO: 14506 - DNA, 25 bp, Canis familiaris
atttgcttgagctgtaggtatagtt

SEQ ID NO: 14507 - DNA, 25 bp, Canis familiaris
attctttcagaataagctacatgtc

SEQ ID NO: 14508 - DNA, 25 bp, Canis familiaris
atttcctagaattcacagttttcac

SEQ ID NO: 14509 - DNA, 25 bp, Canis familiaris
atttaataaatcctagtgctaccgt

SEQ ID NO: 14510 - DNA, 25 bp, Canis familiaris
attaaataagcccctgtgtttcagt

SEQ ID NO: 14511 - DNA, 25 bp, Canis familiaris
attaataaactctctgctgtctgaa

SEQ ID NO: 14512 - DNA, 25 bp, Canis familiaris
attctcattaacctccgggtggaat

SEQ ID NO: 14513 - DNA, 25 bp, Canis familiaris
attctgcacataaaaccactgggga

SEQ ID NO: 14514 - DNA, 25 bp, Canis familiaris
attcagacatgtgaacctgcatgat

SEQ ID NO: 14515 - DNA, 25 bp, Canis familiaris
attcaaatgatgtgtcctcgacgac

SEQ ID NO: 14516 - DNA, 25 bp, Canis familiaris
attcagcacattgagtttcccaagc

SEQ ID NO: 14517 - DNA, 25 bp, Canis familiaris
attcgactctgaagacttctccacc

SEQ ID NO: 14518 - DNA, 25 bp, Canis familiaris
attcaactcaataacatccactcat

SEQ ID NO: 14519 - DNA, 25 bp, Canis familiaris
attcaagtcatataagtcctatttt

SEQ ID NO: 14520 - DNA, 25 bp, Canis familiaris
attctagtaatcagttccatttgta

SEQ ID NO: 14521 - DNA, 25 bp, Canis familiaris
attctaatcagaatccccaaattaa

SEQ ID NO: 14522 - DNA, 25 bp, Canis familiaris
attctgactcaaatcctctgtttta

SEQ ID NO: 14523 - DNA, 25 bp, Canis familiaris
attctcctaattatcttttctcagt

SEQ ID NO: 14524 - DNA, 25 bp, Canis familiaris
attcttctgaacttttctttctgcc

SEQ ID NO: 14525 - DNA, 25 bp, Canis familiaris
attcatctacaacattattttcatt

SEQ ID NO: 14526 - DNA, 25 bp, Canis familiaris
attcacttcaattctgcgtttacac

SEQ ID NO: 14527 - DNA, 25 bp, Canis familiaris
attcatttgcattcttggtttaact

SEQ ID NO: 14528 - DNA, 25 bp, Canis familiaris
attcttagctacgattttccaactg

SEQ ID NO: 14529 - DNA, 25 bp, Canis familiaris
attctgaagccaatcatatccccaa

SEQ ID NO: 14530 - DNA, 25 bp, Canis familiaris
attagaagcacatcttccagccacc

SEQ ID NO: 14531 - DNA, 25 bp, Canis familiaris
ataggatggcactgctctaaacctg

SEQ ID NO: 14532 - DNA, 25 bp, Canis familiaris
atattgggcagacctcaaaacactg

SEQ ID NO: 14533 - DNA, 25 bp, Canis familiaris
attcgggcagacatcgcagaggcat

SEQ ID NO: 14534 - DNA, 25 bp, Canis familiaris
attctctccaacatcatgcatcaag

SEQ ID NO: 14535 - DNA, 25 bp, Canis familiaris
attttgctgaaattcattaaactag

SEQ ID NO: 14536 - DNA, 25 bp, Canis familiaris
attctgtgacttttgcttaatccca

SEQ ID NO: 14537 - DNA, 25 bp, Canis familiaris
attctggatctttcatcttttacgg

SEQ ID NO: 14538 - DNA, 25 bp, Canis familiaris
attctaatctcttctcttgtgtatt

SEQ ID NO: 14539 - DNA, 25 bp, Canis familiaris
attaagcatcttttcatgggtctgt

SEQ ID NO: 14540 - DNA, 25 bp, Canis familiaris
attacagcagggctcagcggattcc

SEQ ID NO: 14541 - DNA, 25 bp, Canis familiaris
attacatcgagtcttctggttgcaa

SEQ ID NO: 14542 - DNA, 25 bp, Canis familiaris
attcagctcaagtctttgtagtcct

SEQ ID NO: 14543 - DNA, 25 bp, Canis familiaris
attattgccagttttggcctcctca

SEQ ID NO: 14544 - DNA, 25 bp, Canis familiaris
attagtgcagcagagcttcgccatg

SEQ ID NO: 14545 - DNA, 25 bp, Canis familiaris
attcatgtgccatcagcttgcagtt

SEQ ID NO: 14546 - DNA, 25 bp, Canis familiaris
attctgatcatttcaggggattcac

SEQ ID NO: 14547 - DNA, 25 bp, Canis familiaris
attctccatttgttttcatctgcac

SEQ ID NO: 14548 - DNA, 25 bp, Canis familiaris
attctccttatcctgagtcgcagat

SEQ ID NO: 14549 - DNA, 25 bp, Canis familiaris
attctggtatattgtggctaaggct

SEQ ID NO: 14550 - DNA, 25 bp, Canis familiaris
attctacgaatgtggccacgtgctg

SEQ ID NO: 14551 - DNA, 25 bp, Canis familiaris
attcttcgacacagtgccacatggc

SEQ ID NO: 14552 - DNA, 25 bp, Canis familiaris
attctattctaaaagccacatggca

SEQ ID NO: 14553 - DNA, 25 bp, Canis familiaris
attcatattcatttgtatccaaggt

SEQ ID NO: 14554 - DNA, 25 bp, Canis familiaris
attctgttgatattgtttcggcaaa

SEQ ID NO: 14555 - DNA, 25 bp, Canis familiaris
attcatttgcaatgtgtatgccaca

SEQ ID NO: 14556 - DNA, 25 bp, Canis familiaris
attcatttgcactcatgtaaaacca

SEQ ID NO: 14557 - DNA, 25 bp, Canis familiaris
attctcttgcacgctgaccaaaaac

SEQ ID NO: 14558 - DNA, 25 bp, Canis familiaris
attctgtcgaagtcgccctgaacaa

SEQ ID NO: 14559 - DNA, 25 bp, Canis familiaris
atatcgggatggggtcgtcaaagca

SEQ ID NO: 14560 - DNA, 25 bp, Canis familiaris
attctggaaggaagggcgccaagca

SEQ ID NO: 14561 - DNA, 25 bp, Canis familiaris
attcttgaaaagccgtccctgagca

SEQ ID NO: 14562 - DNA, 25 bp, Canis familiaris
attttgaaaggcctggcccgtgcct

SEQ ID NO: 14563 - DNA, 25 bp, Canis familiaris
atttatacaaatgctgacctcaggt

SEQ ID NO: 14564 - DNA, 25 bp, Canis familiaris
attagaacttcaagctgcacccagg

SEQ ID NO: 14565 - DNA, 25 bp, Canis familiaris
attaagtgcttaacatacgcctggc

SEQ ID NO: 14566 - DNA, 25 bp, Canis familiaris
attagagtgttcaaagcaggcccga

SEQ ID NO: 14567 - DNA, 25 bp, Canis familiaris
attaatgttttttgcaagacctgaa

SEQ ID NO: 14568 - DNA, 25 bp, Canis familiaris
attcagagatggctgtcagacaaca

SEQ ID NO: 14569 - DNA, 25 bp, Canis familiaris
attcacatgggccttgcgagaacct

SEQ ID NO: 14570 - DNA, 25 bp, Canis familiaris
attactgctagctttggaatgacct

SEQ ID NO: 14571 - DNA, 25 bp, Canis familiaris
attagctcctaaatggtcatgaccc

SEQ ID NO: 14572 - DNA, 25 bp, Canis familiaris
attacccaataagctatcaccactg

SEQ ID NO: 14573 - DNA, 25 bp, Canis familiaris
attagaccatagacccaaagccctt

SEQ ID NO: 14574 - DNA, 25 bp, Canis familiaris
attagaccataagctcctagaggaa

SEQ ID NO: 14575 - DNA, 25 bp, Canis familiaris
attacataataaactcttggatgga

SEQ ID NO: 14576 - DNA, 25 bp, Canis familiaris
attacgaaatctcatctgggatcta

SEQ ID NO: 14577 - DNA, 25 bp, Canis familiaris
attactactttaactggtgttccag

SEQ ID NO: 14578 - DNA, 25 bp, Canis familiaris
atacctacttacacccattgtgcaa

SEQ ID NO: 14579 - DNA, 25 bp, Canis familiaris
atacctccttcgaaggcgacttaga

SEQ ID NO: 14580 - DNA, 25 bp, Canis familiaris
atatgcccaactgaacccacgggat

SEQ ID NO: 14581 - DNA, 25 bp, Canis familiaris
atcatcctaacagaccccaagggga

SEQ ID NO: 14582 - DNA, 25 bp, Canis familiaris
attttagaaccagcccgtggacgat

SEQ ID NO: 14583 - DNA, 25 bp, Canis familiaris
atgtttaataccgcctattccagga

SEQ ID NO: 14584 - DNA, 25 bp, Canis familiaris
attcttaaacccctcttataatatg

SEQ ID NO: 14585 - DNA, 25 bp, Canis familiaris
attcatgtactctgcccatttatac

SEQ ID NO: 14586 - DNA, 25 bp, Canis familiaris
attactgcacactagctggatttat

SEQ ID NO: 14587 - DNA, 25 bp, Canis familiaris
attcactaatgctgtctttcatcat

SEQ ID NO: 14588 - DNA, 25 bp, Canis familiaris
attcatcataagtaatatcttcatt

SEQ ID NO: 14589 - DNA, 25 bp, Canis familiaris
attctatcatagtacatcattttta

SEQ ID NO: 14590 - DNA, 25 bp, Canis familiaris
attctcatcctgtatctatgctttg

SEQ ID NO: 14591 - DNA, 25 bp, Canis familiaris
attctcctctgtatatctgtgtgta

SEQ ID NO: 14592 - DNA, 25 bp, Canis familiaris
attctcccattggactttgagctaa

SEQ ID NO: 14593 - DNA, 25 bp, Canis familiaris
attctctgccttggagcttgggact

SEQ ID NO: 14594 - DNA, 25 bp, Canis familiaris
attctctgcgccttgacattcagaa

SEQ ID NO: 14595 - DNA, 25 bp, Canis familiaris
attattcgcattgaagtcagaaaca

SEQ ID NO: 14596 - DNA, 25 bp, Canis familiaris
attttatgagtgatgcagccatgca

SEQ ID NO: 14597 - DNA, 25 bp, Canis familiaris
attctcatatcccaatggcctcaat

SEQ ID NO: 14598 - DNA, 25 bp, Canis familiaris
attctatctctatcttggctcaatg

SEQ ID NO: 14599 - DNA, 25 bp, Canis familiaris
attcttcttcaacatgactgcccaa

SEQ ID NO: 14600 - DNA, 25 bp, Canis familiaris
attcttattccctgacttctcagta

SEQ ID NO: 14601 - DNA, 25 bp, Canis familiaris
attctatgatggtttcgccttctct

SEQ ID NO: 14602 - DNA, 25 bp, Canis familiaris
attctgatagccttctgttttcttc

SEQ ID NO: 14603 - DNA, 25 bp, Canis familiaris
attaaagcctttacagtctcttcct

SEQ ID NO: 14604 - DNA, 25 bp, Canis familiaris
attaaactgtcttatttctcccact

SEQ ID NO: 14605 - DNA, 25 bp, Canis familiaris
attaatatatgtccagttttccctt

SEQ ID NO: 14606 - DNA, 25 bp, Canis familiaris
attactaaacagcttttgccctgaa

SEQ ID NO: 14607 - DNA, 25 bp, Canis familiaris
attaccgttagtctcaatcccataa

SEQ ID NO: 14608 - DNA, 25 bp, Canis familiaris
attacacggaattcttccatcccat

SEQ ID NO: 14609 - DNA, 25 bp, Canis familiaris
attctcacgggttgttgcaattcca

SEQ ID NO: 14610 - DNA, 25 bp, Canis familiaris
attctcacggaggcatttatattca

SEQ ID NO: 14611 - DNA, 25 bp, Canis familiaris
atttcatggtggtccaatttatgga

SEQ ID NO: 14612 - DNA, 25 bp, Canis familiaris
attttgtgtgtgtggtttcatacaa

SEQ ID NO: 14613 - DNA, 25 bp, Canis familiaris
attcttggttaaggccctatcataa

SEQ ID NO: 14614 - DNA, 25 bp, Canis familiaris
atttggttcccaggaccagtcaaca

SEQ ID NO: 14615 - DNA, 25 bp, Canis familiaris
attagtctctagccttgacctacat

SEQ ID NO: 14616 - DNA, 25 bp, Canis familiaris
attaacctacttcgctcagcataat

SEQ ID NO: 14617 - DNA, 25 bp, Canis familiaris
attacactcacactttcacacagta

SEQ ID NO: 14618 - DNA, 25 bp, Canis familiaris
attacacatctattctctctacagt

SEQ ID NO: 14619 - DNA, 25 bp, Canis familiaris
attacctcatgactgctgcattaca

SEQ ID NO: 14620 - DNA, 25 bp, Canis familiaris
attaccactgacatcattaccaatt

SEQ ID NO: 14621 - DNA, 25 bp, Canis familiaris
attactcagtgctgttctacgccat

SEQ ID NO: 14622 - DNA, 25 bp, Canis familiaris
attactagtgccttactcaccgaaa

SEQ ID NO: 14623 - DNA, 25 bp, Canis familiaris
attacaagttgctcatgatcccgac

SEQ ID NO: 14624 - DNA, 25 bp, Canis familiaris
attactacattgcacaggtccagcc

SEQ ID NO: 14625 - DNA, 25 bp, Canis familiaris
attactaggtggtcagatgtttttg

SEQ ID NO: 14626 - DNA, 25 bp, Canis familiaris
attcagtagcttctaactattcttg

SEQ ID NO: 14627 - DNA, 25 bp, Canis familiaris
attcagtagcttctactatctgctc

SEQ ID NO: 14628 - DNA, 25 bp, Canis familiaris
attcaggacttctttcatatgcttg

SEQ ID NO: 14629 - DNA, 25 bp, Canis familiaris
attctctcacttttgagtaccatgg

SEQ ID NO: 14630 - DNA, 25 bp, Canis familiaris
attctctcactctttgagtaccact

SEQ ID NO: 14631 - DNA, 25 bp, Canis familiaris
attcttatttgcatgtggaccactg

SEQ ID NO: 14632 - DNA, 25 bp, Canis familiaris
attcttttctcttatctaacacgta

SEQ ID NO: 14633 - DNA, 25 bp, Canis familiaris
attcttccttcactttagacatcga

SEQ ID NO: 14634 - DNA, 25 bp, Canis familiaris
attcattaattcattctgcaaatag

SEQ ID NO: 14635 - DNA, 25 bp, Canis familiaris
attcagtaattcatcattggtcttg

SEQ ID NO: 14636 - DNA, 25 bp, Canis familiaris
attcaggagtctggcctctgagtct

SEQ ID NO: 14637 - DNA, 25 bp, Canis familiaris
attagggtcgtgactttctctcagc

SEQ ID NO: 14638 - DNA, 25 bp, Canis familiaris
attagacccagactctgtactctcc

SEQ ID NO: 14639 - DNA, 25 bp, Canis familiaris
attaatcacgcgatgttgactgcac

SEQ ID NO: 14640 - DNA, 25 bp, Canis familiaris
attatgtacgcagctgtggactcca

SEQ ID NO: 14641 - DNA, 25 bp, Canis familiaris
attatgcacacctgctgtgcgtctc

SEQ ID NO: 14642 - DNA, 25 bp, Canis familiaris
attatcacagtgtttgggattcaac

SEQ ID NO: 14643 - DNA, 25 bp, Canis familiaris
attaacagttactagtttctgactt

SEQ ID NO: 14644 - DNA, 25 bp, Canis familiaris
attagactttaatatccttacaaat

SEQ ID NO: 14645 - DNA, 25 bp, Canis familiaris
attcaacttgccgcaatgccttaca

SEQ ID NO: 14646 - DNA, 25 bp, Canis familiaris
attctacttctgcaatatcctatta

SEQ ID NO: 14647 - DNA, 25 bp, Canis familiaris
attctactcttgtataatagtagct

SEQ ID NO: 14648 - DNA, 25 bp, Canis familiaris
attctactctaattcctaatggctt

SEQ ID NO: 14649 - DNA, 25 bp, Canis familiaris
attctacctagcgttctacagcaga

SEQ ID NO: 14650 - DNA, 25 bp, Canis familiaris
attacatcctaagttctcaagcaga

SEQ ID NO: 14651 - DNA, 25 bp, Canis familiaris
attatccactaatgtcatccacggc

SEQ ID NO: 14652 - DNA, 25 bp, Canis familiaris
attagctcattaccagaatcacctg

SEQ ID NO: 14653 - DNA, 25 bp, Canis familiaris
attacatcttcatataagcccatca

SEQ ID NO: 14654 - DNA, 25 bp, Canis familiaris
attcagcatttctatacatcaccca

SEQ ID NO: 14655 - DNA, 25 bp, Canis familiaris
attcaactgtcaggcgtcacttgca

SEQ ID NO: 14656 - DNA, 25 bp, Canis familiaris
attcattttctggcgtcatcgtcat

SEQ ID NO: 14657 - DNA, 25 bp, Canis familiaris
attcatttatctctccacgtatgca

SEQ ID NO: 14658 - DNA, 25 bp, Canis familiaris
attttttccttatagtatgatcttc

SEQ ID NO: 14659 - DNA, 25 bp, Canis familiaris
attcttttactttcaacttatctat

SEQ ID NO: 14660 - DNA, 25 bp, Canis familiaris
attcttcatgtaagctggaactttc

SEQ ID NO: 14661 - DNA, 25 bp, Canis familiaris
attatgtgatggagtgaaagatttc

SEQ ID NO: 14662 - DNA, 25 bp, Canis familiaris
attcatgtttggggccacgttgttg

SEQ ID NO: 14663 - DNA, 25 bp, Canis familiaris
attctttctacgggatctgttttgt

SEQ ID NO: 14664 - DNA, 25 bp, Canis familiaris
attcttgttcgaccgttgtttgtca

SEQ ID NO: 14665 - DNA, 25 bp, Canis familiaris
attctcactttgttctgtttttctc

SEQ ID NO: 14666 - DNA, 25 bp, Canis familiaris
attacaatgttgaagtgtttagatt

SEQ ID NO: 14667 - DNA, 25 bp, Canis familiaris
attacaggcaagaagttttctctgt

SEQ ID NO: 14668 - DNA, 25 bp, Canis familiaris
attcagcccataaatatgttttcgt

SEQ ID NO: 14669 - DNA, 25 bp, Canis familiaris
attcagccaataaatatgttctcgt

SEQ ID NO: 14670 - DNA, 25 bp, Canis familiaris
attcattcagatataaggtttgtac

SEQ ID NO: 14671 - DNA, 25 bp, Canis familiaris
attcttcctaaaagtgttcttggct

SEQ ID NO: 14672 - DNA, 25 bp, Canis familiaris
attttgcccaaagatgagtttttat

SEQ ID NO: 14673 - DNA, 25 bp, Canis familiaris
attcttcttccaacaagtgaacttt

SEQ ID NO: 14674 - DNA, 25 bp, Canis familiaris
attctttctctaataggtatacttg

SEQ ID NO: 14675 - DNA, 25 bp, Canis familiaris
atttttcctgccaggaatactcctg

SEQ ID NO: 14676 - DNA, 25 bp, Canis familiaris
attttgtctcccaggcattgaactc

SEQ ID NO: 14677 - DNA, 25 bp, Canis familiaris
atatttggctacagtgtgcatggca

SEQ ID NO: 14678 - DNA, 25 bp, Canis familiaris
attctatggcccagttagagcatca

SEQ ID NO: 14679 - DNA, 25 bp, Canis familiaris
attttgacgcctattacaggcctcc

SEQ ID NO: 14680 - DNA, 25 bp, Canis familiaris
attaaaccactgattattctcctcc

SEQ ID NO: 14681 - DNA, 25 bp, Canis familiaris
attagaatccctagtctctaccttt

SEQ ID NO: 14682 - DNA, 25 bp, Canis familiaris
attagttccctttgtcaattctgtt

SEQ ID NO: 14683 - DNA, 25 bp, Canis familiaris
attagttctcttgatgctttactgt

SEQ ID NO: 14684 - DNA, 25 bp, Canis familiaris
attctattcctttcattttaatgtt

SEQ ID NO: 14685 - DNA, 25 bp, Canis familiaris
attcttcccatctcatgtaagagat

SEQ ID NO: 14686 - DNA, 25 bp, Canis familiaris
attaatgcccttcattatagcagga

SEQ ID NO: 14687 - DNA, 25 bp, Canis familiaris
attaacgcgttcgcagttgcagcga

SEQ ID NO: 14688 - DNA, 25 bp, Canis familiaris
attagagctcgaatgggcacttggg

SEQ ID NO: 14689 - DNA, 25 bp, Canis familiaris
attaggctccagaatgtccctgatg

SEQ ID NO: 14690 - DNA, 25 bp, Canis familiaris
attaggcttcaagtaatgccagagg

SEQ ID NO: 14691 - DNA, 25 bp, Canis familiaris
attagccatgacatccttcacaagc

SEQ ID NO: 14692 - DNA, 25 bp, Canis familiaris
attctttatgtattttcctagtgat

SEQ ID NO: 14693 - DNA, 25 bp, Canis familiaris
attctttttaatatcgtctcatttc

SEQ ID NO: 14694 - DNA, 25 bp, Canis familiaris
attcattattttattcactgtcgta

SEQ ID NO: 14695 - DNA, 25 bp, Canis familiaris
attagtgtttttgtatggcgggagt

SEQ ID NO: 14696 - DNA, 25 bp, Canis familiaris
atctaggtttgggatttgagggaca

SEQ ID NO: 14697 - DNA, 25 bp, Canis familiaris
attaagtgatttgtgcctgaggcca

SEQ ID NO: 14698 - DNA, 25 bp, Canis familiaris
attaaggctctggaattctcaaggc

SEQ ID NO: 14699 - DNA, 25 bp, Canis familiaris
atttaccatttatttccaagacctg

SEQ ID NO: 14700 - DNA, 25 bp, Canis familiaris
atttcaactttcttggaaggccttg

SEQ ID NO: 14701 - DNA, 25 bp, Canis familiaris
atttccgtcccattggagagcttct

SEQ ID NO: 14702 - DNA, 25 bp, Canis familiaris
attactgctatgccccatgcatatt

SEQ ID NO: 14703 - DNA, 25 bp, Canis familiaris
atttctgctctgtcctgagcaactc

SEQ ID NO: 14704 - DNA, 25 bp, Canis familiaris
attactgcgtgagttgtgccattca

SEQ ID NO: 14705 - DNA, 25 bp, Canis familiaris
attatcgcgctgtgttccaggaacc

SEQ ID NO: 14706 - DNA, 25 bp, Canis familiaris
attaccctgatagtctatgcaggat

SEQ ID NO: 14707 - DNA, 25 bp, Canis familiaris
attacttctgaaggctttggttaag

SEQ ID NO: 14708 - DNA, 25 bp, Canis familiaris
attaggtgcccaactcttggtttca

SEQ ID NO: 14709 - DNA, 25 bp, Canis familiaris
atcaggagtgggtgctttggttccc

SEQ ID NO: 14710 - DNA, 25 bp, Canis familiaris
attcatttggtgtgcttttgttctt

SEQ ID NO: 14711 - DNA, 25 bp, Canis familiaris
attcttaggctatgtctttctgtct

SEQ ID NO: 14712 - DNA, 25 bp, Canis familiaris
attcttattccagttcattttgttt

SEQ ID NO: 14713 - DNA, 25 bp, Canis familiaris
attcttttaatgtatcatccctgct

SEQ ID NO: 14714 - DNA, 25 bp, Canis familiaris
attcttttcaattctagcttctctg

SEQ ID NO: 14715 - DNA, 25 bp, Canis familiaris
attcatttctagtcctacttgctaa

SEQ ID NO: 14716 - DNA, 25 bp, Canis familiaris
attcattgttaatttgttctcataa

SEQ ID NO: 14717 - DNA, 25 bp, Canis familiaris
attttgcttgaatttgccccaggaa

SEQ ID NO: 14718 - DNA, 25 bp, Canis familiaris
atttatttgaaatggggagcgtgca

SEQ ID NO: 14719 - DNA, 25 bp, Canis familiaris
atttatttggacacagggaaacact

SEQ ID NO: 14720 - DNA, 25 bp, Canis familiaris
atttttctaggctgtgtgttaacgt

SEQ ID NO: 14721 - DNA, 25 bp, Canis familiaris
attagtttactgttggatgctgctg

SEQ ID NO: 14722 - DNA, 25 bp, Canis familiaris
attcatgttctgtcaggaggtggtg

SEQ ID NO: 14723 - DNA, 25 bp, Canis familiaris
attatgtacatatggctggggcttt

SEQ ID NO: 14724 - DNA, 25 bp, Canis familiaris
attcttgcacatacagacaccgact

SEQ ID NO: 14725 - DNA, 25 bp, Canis familiaris
attcttcacatattgtacccaccac

SEQ ID NO: 14726 - DNA, 25 bp, Canis familiaris
attcatctggaattgctacccaatc

SEQ ID NO: 14727 - DNA, 25 bp, Canis familiaris
attcatctagacatatatacacata

SEQ ID NO: 14728 - DNA, 25 bp, Canis familiaris
attcattgattcattctgcaaatta

SEQ ID NO: 14729 - DNA, 25 bp, Canis familiaris
attcaatgttaaccactcaattcac

SEQ ID NO: 14730 - DNA, 25 bp, Canis familiaris
attcacatgtcgaagtcctaacccc

SEQ ID NO: 14731 - DNA, 25 bp, Canis familiaris
attactgcagcgagatacaaccccc

SEQ ID NO: 14732 - DNA, 25 bp, Canis familiaris
attacacatcagctgttaaccccaa

SEQ ID NO: 14733 - DNA, 25 bp, Canis familiaris
attaataacttaaaactgccacaca

SEQ ID NO: 14734 - DNA, 25 bp, Canis familiaris
attaaaacctatactgattgccaaa

SEQ ID NO: 14735 - DNA, 25 bp, Canis familiaris
attagaaagctatgcctattctcta

SEQ ID NO: 14736 - DNA, 25 bp, Canis familiaris
attaacatactaggcaattttgcta

SEQ ID NO: 14737 - DNA, 25 bp, Canis familiaris
attaaatcctcagactggtgctgtg

SEQ ID NO: 14738 - DNA, 25 bp, Canis familiaris
attataacctacacatttgcagcgc

SEQ ID NO: 14739 - DNA, 25 bp, Canis familiaris
attttgacccacgtgatttagccga

SEQ ID NO: 14740 - DNA, 25 bp, Canis familiaris
attactacgagctctgttgctacta

SEQ ID NO: 14741 - DNA, 25 bp, Canis familiaris
attagctacaactactactccatcc

SEQ ID NO: 14742 - DNA, 25 bp, Canis familiaris
attagctatacatacatacctcacc

SEQ ID NO: 14743 - DNA, 25 bp, Canis familiaris
attaatctgaaaacaactctctaaa

SEQ ID NO: 14744 - DNA, 25 bp, Canis familiaris
attaatctaattacattttctgaaa

SEQ ID NO: 14745 - DNA, 25 bp, Canis familiaris
attaatttatttttcattcatgtga

SEQ ID NO: 14746 - DNA, 25 bp, Canis familiaris
attttggtagtttacttctatcaca

SEQ ID NO: 14747 - DNA, 25 bp, Canis familiaris
attcttggctacttattttccccat

SEQ ID NO: 14748 - DNA, 25 bp, Canis familiaris
attacatgatcttttttaggaccct

SEQ ID NO: 14749 - DNA, 25 bp, Canis familiaris
attaattgaatttgtctgaagccca

SEQ ID NO: 14750 - DNA, 25 bp, Canis familiaris
attaatcattttttctgcgacctcc

SEQ ID NO: 14751 - DNA, 25 bp, Canis familiaris
attagaattcaggtttcccatctcc

SEQ ID NO: 14752 - DNA, 25 bp, Canis familiaris
attagaattcacagaacttgtccca

SEQ ID NO: 14753 - DNA, 25 bp, Canis familiaris
attagttgtctgcacgagttgtccc

SEQ ID NO: 14754 - DNA, 25 bp, Canis familiaris
attacctggtggtgagcttaaccca

SEQ ID NO: 14755 - DNA, 25 bp, Canis familiaris
atttcggtgtcctgagtttgagccc

SEQ ID NO: 14756 - DNA, 25 bp, Canis familiaris
atttcaggggtatagagcttgtgga

SEQ ID NO: 14757 - DNA, 25 bp, Canis familiaris
atttagccacggggaacgatgctgg

SEQ ID NO: 14758 - DNA, 25 bp, Canis familiaris
atttcccgaggagccattggtggtg

SEQ ID NO: 14759 - DNA, 25 bp, Canis familiaris
atttccgcatggggtaatcggagtt

SEQ ID NO: 14760 - DNA, 25 bp, Canis familiaris
atagtctttgaggagatcccccgtt

SEQ ID NO: 14761 - DNA, 25 bp, Canis familiaris
atagtttagaaatatccccacgtgt

SEQ ID NO: 14762 - DNA, 25 bp, Canis familiaris
atttttcagaaatgttgccctttga

SEQ ID NO: 14763 - DNA, 25 bp, Canis familiaris
attttgaagatattggtggcccgaa

SEQ ID NO: 14764 - DNA, 25 bp, Canis familiaris
attaattgatatactgggcagctcc

SEQ ID NO: 14765 - DNA, 25 bp, Canis familiaris
attacaaggattcatggagcgggat

SEQ ID NO: 14766 - DNA, 25 bp, Canis familiaris
attaccggtcgatgcaacgagtgat

SEQ ID NO: 14767 - DNA, 25 bp, Canis familiaris
attaccgtatggttgcattcatagg

SEQ ID NO: 14768 - DNA, 25 bp, Canis familiaris
attacttttctgatattcataggca

SEQ ID NO: 14769 - DNA, 25 bp, Canis familiaris
attacgctttctatatacaacttgc

SEQ ID NO: 14770 - DNA, 25 bp, Canis familiaris
attacttatttataacagcctctta

SEQ ID NO: 14771 - DNA, 25 bp, Canis familiaris
attaaatattaacaaccttcctgat

SEQ ID NO: 14772 - DNA, 25 bp, Canis familiaris
attaacacttaactatacgctccct

SEQ ID NO: 14773 - DNA, 25 bp, Canis familiaris
attatacacttatttatgtcccgcc

SEQ ID NO: 14774 - DNA, 25 bp, Canis familiaris
cttaaccttaatatgcccaaccagc

SEQ ID NO: 14775 - DNA, 25 bp, Canis familiaris
attacctcctagtggcccacaagag

SEQ ID NO: 14776 - DNA, 25 bp, Canis familiaris
atattcctttagtgaccaccaaggt

SEQ ID NO: 14777 - DNA, 25 bp, Canis familiaris
atttcttttagtcacctagatactg

SEQ ID NO: 14778 - DNA, 25 bp, Canis familiaris
atttttgttcctcatcttaactctc

SEQ ID NO: 14779 - DNA, 25 bp, Canis familiaris
atttcttgatttcaacatcttcccc

SEQ ID NO: 14780 - DNA, 25 bp, Canis familiaris
attaactatttgtgtatttcctctc

SEQ ID NO: 14781 - DNA, 25 bp, Canis familiaris
attaatctactttttgtcttcctat

SEQ ID NO: 14782 - DNA, 25 bp, Canis familiaris
attaacactctgcttagtttcctaa

SEQ ID NO: 14783 - DNA, 25 bp, Canis familiaris
attaatgctgctggttccgttttct

SEQ ID NO: 14784 - DNA, 25 bp, Canis familiaris
attacctgttttttctgatgtatct

SEQ ID NO: 14785 - DNA, 25 bp, Canis familiaris
attaccagtggcgttgttgcatgtt

SEQ ID NO: 14786 - DNA, 25 bp, Canis familiaris
attatctgatgtgatgcctgttgag

SEQ ID NO: 14787 - DNA, 25 bp, Canis familiaris
attatctgatgtgatgcctgttgag

SEQ ID NO: 14788 - DNA, 25 bp, Canis familiaris
attatgcatcatatatgtgctagga

SEQ ID NO: 14789 - DNA, 25 bp, Canis familiaris
attatgccatgaactctccaggatg

SEQ ID NO: 14790 - DNA, 25 bp, Canis familiaris
attcaccagtggacacacactgagg

SEQ ID NO: 14791 - DNA, 25 bp, Canis familiaris
atttctcagtgccgcaccacaagta

SEQ ID NO: 14792 - DNA, 25 bp, Canis familiaris
atttcccccacacacgagtgaatac

SEQ ID NO: 14793 - DNA, 25 bp, Canis familiaris
atttccacccagttctgggtatatc

SEQ ID NO: 14794 - DNA, 25 bp, Canis familiaris
attaccattctgggcctgaggaatc

SEQ ID NO: 14795 - DNA, 25 bp, Canis familiaris
attactatttcttgcctgtgttact

SEQ ID NO: 14796 - DNA, 25 bp, Canis familiaris
attacattcacatttactggttatt

SEQ ID NO: 14797 - DNA, 25 bp, Canis familiaris
attacattactatttctgacttgaa

SEQ ID NO: 14798 - DNA, 25 bp, Canis familiaris
attaccacactgatgtcatacccaa

SEQ ID NO: 14799 - DNA, 25 bp, Canis familiaris
attcaggcaacgttgtcacagaccg

SEQ ID NO: 14800 - DNA, 25 bp, Canis familiaris
attcagctaacgcttccagaccgcg

SEQ ID NO: 14801 - DNA, 25 bp, Canis familiaris
attcagctacagggtgaccagcgca

SEQ ID NO: 14802 - DNA, 25 bp, Canis familiaris
attcagcttcacggtgatgaaaaac

SEQ ID NO: 14803 - DNA, 25 bp, Canis familiaris
atttgattcacgagatttaaacccg

SEQ ID NO: 14804 - DNA, 25 bp, Canis familiaris
atttgcctcaccacttaaaacaata

SEQ ID NO: 14805 - DNA, 25 bp, Canis familiaris
attagcttgaccttttagaaactga

SEQ ID NO: 14806 - DNA, 25 bp, Canis familiaris
attaccttgcttttgcatatgaaaa

SEQ ID NO: 14807 - DNA, 25 bp, Canis familiaris
attaccttcatttctttggcatcaa

SEQ ID NO: 14808 - DNA, 25 bp, Canis familiaris
attatccatatttcattttggtcat

SEQ ID NO: 14809 - DNA, 25 bp, Canis familiaris
attcaccatattcatttctagtcta

SEQ ID NO: 14810 - DNA, 25 bp, Canis familiaris
attcaacatgttcactcgatttaaa

SEQ ID NO: 14811 - DNA, 25 bp, Canis familiaris
attaacctgaggccccattcaataa

SEQ ID NO: 14812 - DNA, 25 bp, Canis familiaris
attaacttgaggcccactcactagt

SEQ ID NO: 14813 - DNA, 25 bp, Canis familiaris
attacttggagccccatccaatagt

SEQ ID NO: 14814 - DNA, 25 bp, Canis familiaris
attactgcaggacacgctcctaaat

SEQ ID NO: 14815 - DNA, 25 bp, Canis familiaris
attactgaaacgtgctgcctccatt

SEQ ID NO: 14816 - DNA, 25 bp, Canis familiaris
attaatgaaggcgacgtgcttccct

SEQ ID NO: 14817 - DNA, 25 bp, Canis familiaris
atttatatggggatggttccactag

SEQ ID NO: 14818 - DNA, 25 bp, Canis familiaris
atttaatccaagtgttgtccccagt

SEQ ID NO: 14819 - DNA, 25 bp, Canis familiaris
atttcctccaaagtaatgtgccctc

SEQ ID NO: 14820 - DNA, 25 bp, Canis familiaris
atgcattttaagtactatcgggtct

SEQ ID NO: 14821 - DNA, 25 bp, Canis familiaris
cttcttttatgtcaatcgggtttat

SEQ ID NO: 14822 - DNA, 25 bp, Canis familiaris
ataatttttggataagggtgtgtga

SEQ ID NO: 14823 - DNA, 25 bp, Canis familiaris
atcatttccggtgaagaggggctgg

SEQ ID NO: 14824 - DNA, 25 bp, Canis familiaris
attttcacttgagcggggtggattg

SEQ ID NO: 14825 - DNA, 25 bp, Canis familiaris
atttggcaccgggggttgtagctct

SEQ ID NO: 14826 - DNA, 25 bp, Canis familiaris
atttggaaggcgggcctcgtgttct

SEQ ID NO: 14827 - DNA, 25 bp, Canis familiaris
attatagggggcgtcttcattttca

SEQ ID NO: 14828 - DNA, 25 bp, Canis familiaris
attatctgaggtgggtcttggtctg

SEQ ID NO: 14829 - DNA, 25 bp, Canis familiaris
atttcaggcgtggggatctggctcg

SEQ ID NO: 14830 - DNA, 25 bp, Canis familiaris
atcccagcctgtcaagttggcctgg

SEQ ID NO: 14831 - DNA, 25 bp, Canis familiaris
atcttggccgtgaggttggccctgt

SEQ ID NO: 14832 - DNA, 25 bp, Canis familiaris
atcttgaccttgtgcttgaggccgt

SEQ ID NO: 14833 - DNA, 25 bp, Canis familiaris
atttgtcaattgtgtaacccgagtt

SEQ ID NO: 14834 - DNA, 25 bp, Canis familiaris
atttatatttaaataccctccagag

SEQ ID NO: 14835 - DNA, 25 bp, Canis familiaris
atttacgtgaaattaacgtcgtgat

SEQ ID NO: 14836 - DNA, 25 bp, Canis familiaris
atttactgtgtatagaacggtttat

SEQ ID NO: 14837 - DNA, 25 bp, Canis familiaris
attaccatggtagaatccggttttg

SEQ ID NO: 14838 - DNA, 25 bp, Canis familiaris
attactctgttagggatactttatt

SEQ ID NO: 14839 - DNA, 25 bp, Canis familiaris
attacttgcatgttcggttatttta

SEQ ID NO: 14840 - DNA, 25 bp, Canis familiaris
attacttgacttgccttgatttata

SEQ ID NO: 14841 - DNA, 25 bp, Canis familiaris
attattttcacaaacttgccttaat

SEQ ID NO: 14842 - DNA, 25 bp, Canis familiaris
attttgttcttatcatggcccaact

SEQ ID NO: 14843 - DNA, 25 bp, Canis familiaris
attttgttcatgcatactttcacca

SEQ ID NO: 14844 - DNA, 25 bp, Canis familiaris
atatattgttctgaggcgtctggcc

SEQ ID NO: 14845 - DNA, 25 bp, Canis familiaris
atttcagttctaagtggactccatt

SEQ ID NO: 14846 - DNA, 25 bp, Canis familiaris
attaatgtctctctgtggactctcc

SEQ ID NO: 14847 - DNA, 25 bp, Canis familiaris
attattggcattttgttccttccct

SEQ ID NO: 14848 - DNA, 25 bp, Canis familiaris
attagtacacggtagtcctttcctg

SEQ ID NO: 14849 - DNA, 25 bp, Canis familiaris
attagggcctggggtgaattctttg

SEQ ID NO: 14850 - DNA, 25 bp, Canis familiaris
attataccccctgggtcattctatt

SEQ ID NO: 14851 - DNA, 25 bp, Canis familiaris
atttatttgctgcgggtagcttttt

SEQ ID NO: 14852 - DNA, 25 bp, Canis familiaris
atttttctctgggagttgaattcca

SEQ ID NO: 14853 - DNA, 25 bp, Canis familiaris
attagtccttccaagaagccaacca

SEQ ID NO: 14854 - DNA, 25 bp, Canis familiaris
attactctgccctgagaagccaatc

SEQ ID NO: 14855 - DNA, 25 bp, Canis familiaris
attacttgtaataaacagtccattt

SEQ ID NO: 14856 - DNA, 25 bp, Canis familiaris
attattattcagcaaaatgaccttt

SEQ ID NO: 14857 - DNA, 25 bp, Canis familiaris
attttttggctaaacatgtccgtca

SEQ ID NO: 14858 - DNA, 25 bp, Canis familiaris
attttttacatcctactaacagtag

SEQ ID NO: 14859 - DNA, 25 bp, Canis familiaris
atttttctttcctctatactgtatt

SEQ ID NO: 14860 - DNA, 25 bp, Canis familiaris
attttccttattgttgtcaagtatc

SEQ ID NO: 14861 - DNA, 25 bp, Canis familiaris
atttgacacccctgtggacaactac

SEQ ID NO: 14862 - DNA, 25 bp, Canis familiaris
atctgaaaccccagcaagaaagttt

SEQ ID NO: 14863 - DNA, 25 bp, Canis familiaris
attaaaccccaggacaatatatgat

SEQ ID NO: 14864 - DNA, 25 bp, Canis familiaris
attaacccccaggaccatatgatga

SEQ ID NO: 14865 - DNA, 25 bp, Canis familiaris
attatgcccagtacaagacctatgg

SEQ ID NO: 14866 - DNA, 25 bp, Canis familiaris
attagccttgtcagatgtcatcttc

SEQ ID NO: 14867 - DNA, 25 bp, Canis familiaris
attactgtttcatagatctcgtcaa

SEQ ID NO: 14868 - DNA, 25 bp, Canis familiaris
attaattcattctgcaaatagctac

SEQ ID NO: 14869 - DNA, 25 bp, Canis familiaris
attcaatcgcatgtccatagaagat

SEQ ID NO: 14870 - DNA, 25 bp, Canis familiaris
attacatcacagctcccatggagtt

SEQ ID NO: 14871 - DNA, 25 bp, Canis familiaris
attttgatcgtttctctgagatgat

SEQ ID NO: 14872 - DNA, 25 bp, Canis familiaris
attttgctcatgaagccccaggttt

SEQ ID NO: 14873 - DNA, 25 bp, Canis familiaris
attatttacaatgccaagagatgga

SEQ ID NO: 14874 - DNA, 25 bp, Canis familiaris
atttttcaagcttccaacgtgggca

SEQ ID NO: 14875 - DNA, 25 bp, Canis familiaris
attattgctgcaactggcaaacctg

SEQ ID NO: 14876 - DNA, 25 bp, Canis familiaris
atttcagctgcccatgtgcacaaac

SEQ ID NO: 14877 - DNA, 25 bp, Canis familiaris
atttcgatccatcgccaataaccct

SEQ ID NO: 14878 - DNA, 25 bp, Canis familiaris
attaccacactggcctgagagaccc

SEQ ID NO: 14879 - DNA, 25 bp, Canis familiaris
attacccgctgggctggagaacatc

SEQ ID NO: 14880 - DNA, 25 bp, Canis familiaris
attacctgccttgcagtgacttccg

SEQ ID NO: 14881 - DNA, 25 bp, Canis familiaris
attagcgcgaccacagcttttatcg

SEQ ID NO: 14882 - DNA, 25 bp, Canis familiaris
attagcagagataaactgattttaa

SEQ ID NO: 14883 - DNA, 25 bp, Canis familiaris
attacatggctcactctgtatttta

SEQ ID NO: 14884 - DNA, 25 bp, Canis familiaris
attagtgcctcattatcatgtctcc

SEQ ID NO: 14885 - DNA, 25 bp, Canis familiaris
attacatgcaaatatgattcactca

SEQ ID NO: 14886 - DNA, 25 bp, Canis familiaris
attaggcaggtattattatcatcat

SEQ ID NO: 14887 - DNA, 25 bp, Canis familiaris
attacagtggtattcatatgctatg

SEQ ID NO: 14888 - DNA, 25 bp, Canis familiaris
attacagctgagaccattcatttga

SEQ ID NO: 14889 - DNA, 25 bp, Canis familiaris
attatcctggatacattcagtctga

SEQ ID NO: 14890 - DNA, 25 bp, Canis familiaris
attactgcttgaaatgttgtcattc

SEQ ID NO: 14891 - DNA, 25 bp, Canis familiaris
attactatatgttgatcttgccttc

SEQ ID NO: 14892 - DNA, 25 bp, Canis familiaris
attacatactgcatgattttattca

SEQ ID NO: 14893 - DNA, 25 bp, Canis familiaris
attaacacttggaagcttttcaaag

SEQ ID NO: 14894 - DNA, 25 bp, Canis familiaris
attacacctttccacttgctgaaaa

SEQ ID NO: 14895 - DNA, 25 bp, Canis familiaris
attacacctttccacttgctgaaaa

SEQ ID NO: 14896 - DNA, 25 bp, Canis familiaris
attcaatcacttctgcctctgtgaa

SEQ ID NO: 14897 - DNA, 25 bp, Canis familiaris
atataatagtgtctgcctccgatca

SEQ ID NO: 14898 - DNA, 25 bp, Canis familiaris
attatatagtattagtcttgctgac

SEQ ID NO: 14899 - DNA, 25 bp, Canis familiaris
attatgcatgatgtaagccacgtac

SEQ ID NO: 14900 - DNA, 25 bp, Canis familiaris
attagctatgccaaaggacttcaga

SEQ ID NO: 14901 - DNA, 25 bp, Canis familiaris
attaattcctaacttctcgcgatca

SEQ ID NO: 14902 - DNA, 25 bp, Canis familiaris
attacatcttccaagtcattccaat

SEQ ID NO: 14903 - DNA, 25 bp, Canis familiaris
attatattatccactcatcagctga

SEQ ID NO: 14904 - DNA, 25 bp, Canis familiaris
attaatgctaactcttgcatgtcaa

SEQ ID NO: 14905 - DNA, 25 bp, Canis familiaris
attagcactaattcatcataagtaa

SEQ ID NO: 14906 - DNA, 25 bp, Canis familiaris
attaacgtgtattcatagcagctaa

SEQ ID NO: 14907 - DNA, 25 bp, Canis familiaris
attaagagttcattatcagtgctaa

SEQ ID NO: 14908 - DNA, 25 bp, Canis familiaris
attaaagtacagttgctggcattaa

SEQ ID NO: 14909 - DNA, 25 bp, Canis familiaris
attatctcgtgaatgtcgggttaca

SEQ ID NO: 14910 - DNA, 25 bp, Canis familiaris
attatgccctgtttagagtttattc

SEQ ID NO: 14911 - DNA, 25 bp, Canis familiaris
atttaccattttcataattttcgag

SEQ ID NO: 14912 - DNA, 25 bp, Canis familiaris
attttatcattacaataattctatt

SEQ ID NO: 14913 - DNA, 25 bp, Canis familiaris
attttcaataaatatgcattacctg

SEQ ID NO: 14914 - DNA, 25 bp, Canis familiaris
atttaccagcagttaagttaccttg

SEQ ID NO: 14915 - DNA, 25 bp, Canis familiaris
atttgaccgtgcctaagttcgctaa

SEQ ID NO: 14916 - DNA, 25 bp, Canis familiaris
attttcagggggtgttctgtcaaat

SEQ ID NO: 14917 - DNA, 25 bp, Canis familiaris
attttcccagggttgttgtctgcaa

SEQ ID NO: 14918 - DNA, 25 bp, Canis familiaris
atttcccgctgggtattgtcttgcc

SEQ ID NO: 14919 - DNA, 25 bp, Canis familiaris
attatcccaggggctcctgggtggc

SEQ ID NO: 14920 - DNA, 25 bp, Canis familiaris
agctatttcgggatcggggtgtgcc

SEQ ID NO: 14921 - DNA, 25 bp, Canis familiaris
attatgttctgggttctgggggacg

SEQ ID NO: 14922 - DNA, 25 bp, Canis familiaris
attagtcattgcgggaccgcgtgga

SEQ ID NO: 14923 - DNA, 25 bp, Canis familiaris
atctactccgggagccacgatggac

SEQ ID NO: 14924 - DNA, 25 bp, Canis familiaris
atctactacggataccactgatttc

SEQ ID NO: 14925 - DNA, 25 bp, Canis familiaris
atatagttgcggtaacaatcatgaa

SEQ ID NO: 14926 - DNA, 25 bp, Canis familiaris
attagctctgctggaaactgattta

SEQ ID NO: 14927 - DNA, 25 bp, Canis familiaris
attaccttctgacaatttctagcta

SEQ ID NO: 14928 - DNA, 25 bp, Canis familiaris
attactttctgcattgttttcttag

SEQ ID NO: 14929 - DNA, 25 bp, Canis familiaris
attacttttcaccttttgagcctga

SEQ ID NO: 14930 - DNA, 25 bp, Canis familiaris
atttctcttaagccgaagtgagcgc

SEQ ID NO: 14931 - DNA, 25 bp, Canis familiaris
atttattctcaaccaggggcactga

SEQ ID NO: 14932 - DNA, 25 bp, Canis familiaris
atttttctcaatacaaggcgcaagg

SEQ ID NO: 14933 - DNA, 25 bp, Canis familiaris
attattctgctctttgaagaaacag

SEQ ID NO: 14934 - DNA, 25 bp, Canis familiaris
attttcctgcgtgaagtgacataat

SEQ ID NO: 14935 - DNA, 25 bp, Canis familiaris
atttggcctgcaagtcagagctgac

SEQ ID NO: 14936 - DNA, 25 bp, Canis familiaris
attagagctgctatgccacactcac

SEQ ID NO: 14937 - DNA, 25 bp, Canis familiaris
attatggctttcccacctgagaaat

SEQ ID NO: 14938 - DNA, 25 bp, Canis familiaris
atttgctcgttcagctgaccgaaga

SEQ ID NO: 14939 - DNA, 25 bp, Canis familiaris
atttacaggtgcagtcaccgaaaga

SEQ ID NO: 14940 - DNA, 25 bp, Canis familiaris
attttgggtcttccatcctcaaata

SEQ ID NO: 14941 - DNA, 25 bp, Canis familiaris
attttatggttatctcccagcagct

SEQ ID NO: 14942 - DNA, 25 bp, Canis familiaris
attagtttgttctttcttcaggctt

SEQ ID NO: 14943 - DNA, 25 bp, Canis familiaris
attactttatctcttagtcagctct

SEQ ID NO: 14944 - DNA, 25 bp, Canis familiaris
attactttcaagcctctattgcatt

SEQ ID NO: 14945 - DNA, 25 bp, Canis familiaris
attatcagtccaattctcagtttat

SEQ ID NO: 14946 - DNA, 25 bp, Canis familiaris
attatctgttctacctcggtgtgtg

SEQ ID NO: 14947 - DNA, 25 bp, Canis familiaris
attatctttgccagttggagtgctg

SEQ ID NO: 14948 - DNA, 25 bp, Canis familiaris
attatcttctccacgtggcggaatg

SEQ ID NO: 14949 - DNA, 25 bp, Canis familiaris
atctttataccaacagggtgggcag

SEQ ID NO: 14950 - DNA, 25 bp, Canis familiaris
atttgtgggcacccctggtggtgca

SEQ ID NO: 14951 - DNA, 25 bp, Canis familiaris
atttgtgcccaccagtacctggtga

SEQ ID NO: 14952 - DNA, 25 bp, Canis familiaris
atttggctacagcaaccgggtggtg

SEQ ID NO: 14953 - DNA, 25 bp, Canis familiaris
attattcttcgtcatcttgggggga

SEQ ID NO: 14954 - DNA, 25 bp, Canis familiaris
attatgttttatgtttggggagcta

SEQ ID NO: 14955 - DNA, 25 bp, Canis familiaris
atttttttcacgacattcttgggat

SEQ ID NO: 14956 - DNA, 25 bp, Canis familiaris
atttttataggcatcatcccaggtg

SEQ ID NO: 14957 - DNA, 25 bp, Canis familiaris
attttactgatgctggcccagaggg

SEQ ID NO: 14958 - DNA, 25 bp, Canis familiaris
attttagcttgtggagttctggagg

SEQ ID NO: 14959 - DNA, 25 bp, Canis familiaris
atttgtagcaatccgtctatctaga

SEQ ID NO: 14960 - DNA, 25 bp, Canis familiaris
attttatagcacttgactgtctgaa

SEQ ID NO: 14961 - DNA, 25 bp, Canis familiaris
attaggaacagaggacatgtcgcca

SEQ ID NO: 14962 - DNA, 25 bp, Canis familiaris
atttcacagatccaagacttcccaa

SEQ ID NO: 14963 - DNA, 25 bp, Canis familiaris
attaccatgatcccaaggttccatc

SEQ ID NO: 14964 - DNA, 25 bp, Canis familiaris
attagcctattttaggtgacaccta

SEQ ID NO: 14965 - DNA, 25 bp, Canis familiaris
attacccaatgttcagagcagcact

SEQ ID NO: 14966 - DNA, 25 bp, Canis familiaris
attatcccaaattacacaacagaaa

SEQ ID NO: 14967 - DNA, 25 bp, Canis familiaris
atttcaccgtaaacacagcgaagta

SEQ ID NO: 14968 - DNA, 25 bp, Canis familiaris
atttcactagctttcccgctaatgt

SEQ ID NO: 14969 - DNA, 25 bp, Canis familiaris
atttactgagtaccttcttcgtgtc

SEQ ID NO: 14970 - DNA, 25 bp, Canis familiaris
atttactgagtatctacttggtaag

SEQ ID NO: 14971 - DNA, 25 bp, Canis familiaris
atttcctgaatttctacttgggaca

SEQ ID NO: 14972 - DNA, 25 bp, Canis familiaris
attatattgttttgattcctgggaa

SEQ ID NO: 14973 - DNA, 25 bp, Canis familiaris
atttgaatgccgaagttactgacga

SEQ ID NO: 14974 - DNA, 25 bp, Canis familiaris
attatcgtccagaataccaccactg

SEQ ID NO: 14975 - DNA, 25 bp, Canis familiaris
attatcgtagccaatgaggttcatc

SEQ ID NO: 14976 - DNA, 25 bp, Canis familiaris
attttggatgctccagaggcttccc

SEQ ID NO: 14977 - DNA, 25 bp, Canis familiaris
attttgtggcatcccaagtgaccgg

SEQ ID NO: 14978 - DNA, 25 bp, Canis familiaris
atttggcgttaccgcctgaggggct

SEQ ID NO: 14979 - DNA, 25 bp, Canis familiaris
atttccagttccatcctagtgggat

SEQ ID NO: 14980 - DNA, 25 bp, Canis familiaris
gtttccccatctgtcaaacgggaag

SEQ ID NO: 14981 - DNA, 25 bp, Canis familiaris
atttcaccccaggttcaactgagga

SEQ ID NO: 14982 - DNA, 25 bp, Canis familiaris
attattcccaaggttcttgctcaga

SEQ ID NO: 14983 - DNA, 25 bp, Canis familiaris
attatcctctcctgcatttttaagg

SEQ ID NO: 14984 - DNA, 25 bp, Canis familiaris
attactcaatttgcaactatctgaa

SEQ ID NO: 14985 - DNA, 25 bp, Canis familiaris
attacttgtgtttcaactttgacct

SEQ ID NO: 14986 - DNA, 25 bp, Canis familiaris
attacttgtttatatttcttgccta

SEQ ID NO: 14987 - DNA, 25 bp, Canis familiaris
atttccttattatcattcttccgag

SEQ ID NO: 14988 - DNA, 25 bp, Canis familiaris
attacctttccttatatctttagag

SEQ ID NO: 14989 - DNA, 25 bp, Canis familiaris
attagcctgtgtctttatgtttgaa

SEQ ID NO: 14990 - DNA, 25 bp, Canis familiaris
attactctatgtttggatatgctca

SEQ ID NO: 14991 - DNA, 25 bp, Canis familiaris
attagctgctatgaatgggagaaaa

SEQ ID NO: 14992 - DNA, 25 bp, Canis familiaris
attacatgctgtgaaggcgaacaaa

SEQ ID NO: 14993 - DNA, 25 bp, Canis familiaris
attagcgttacaggccagaagaaaa

SEQ ID NO: 14994 - DNA, 25 bp, Canis familiaris
attagtgatatagtgtaccaaaaca

SEQ ID NO: 14995 - DNA, 25 bp, Canis familiaris
attagcttcaatacatccaaaccca

SEQ ID NO: 14996 - DNA, 25 bp, Canis familiaris
attagcattaacaaaccttccagaa

SEQ ID NO: 14997 - DNA, 25 bp, Canis familiaris
attactttactatcctgatcaccca

SEQ ID NO: 14998 - DNA, 25 bp, Canis familiaris
attactcttatttccctagacactt

SEQ ID NO: 14999 - DNA, 25 bp, Canis familiaris
attacactaattttccctgtgcctt

SEQ ID NO: 15000 - DNA, 25 bp, Canis familiaris
attacagtaatgtcttttgcattgg

SEQ ID NO: 15001 - DNA, 25 bp, Canis familiaris
attactctagaggcttttactgatg

SEQ ID NO: 15002 - DNA, 25 bp, Canis familiaris
attattttgaccttttactgctact

SEQ ID NO: 15003 - DNA, 25 bp, Canis familiaris
attattttgaatctaggctcttact

SEQ ID NO: 15004 - DNA, 25 bp, Canis familiaris
atttctattggatttaggtttgatc

SEQ ID NO: 15005 - DNA, 25 bp, Canis familiaris
attactactagtttttgttctgtcg

SEQ ID NO: 15006 - DNA, 25 bp, Canis familiaris
attacttctattttctctgttttct

SEQ ID NO: 15007 - DNA, 25 bp, Canis familiaris
attaggtctgattagtccgtttcca

SEQ ID NO: 15008 - DNA, 25 bp, Canis familiaris
attttctcggatagctccgtttcct

SEQ ID NO: 15009 - DNA, 25 bp, Canis familiaris
atttttgctggattcctttaccctg

SEQ ID NO: 15010 - DNA, 25 bp, Canis familiaris
atttttgcagggttttgctcacctc

SEQ ID NO: 15011 - DNA, 25 bp, Canis familiaris
atttttgcagggttttgctcacctc

SEQ ID NO: 15012 - DNA, 25 bp, Canis familiaris
attttcgggatgtttctcttccact

SEQ ID NO: 15013 - DNA, 25 bp, Canis familiaris
attttggtggtatgtgtttgctagc

SEQ ID NO: 15014 - DNA, 25 bp, Canis familiaris
attttgttcctgaagtggttgctac

SEQ ID NO: 15015 - DNA, 25 bp, Canis familiaris
attttttgcctattgtgcctagctc

SEQ ID NO: 15016 - DNA, 25 bp, Canis familiaris
atttattctccgtgtcattatctag

SEQ ID NO: 15017 - DNA, 25 bp, Canis familiaris
atttacccagtgttgccaagactcc

SEQ ID NO: 15018 - DNA, 25 bp, Canis familiaris
attatgacccatatatgccgatgcc

SEQ ID NO: 15019 - DNA, 25 bp, Canis familiaris
atttgatcgtctgccatgcacacat

SEQ ID NO: 15020 - DNA, 25 bp, Canis familiaris
attataggtctgtcaggcactctga

SEQ ID NO: 15021 - DNA, 25 bp, Canis familiaris
atttcaggcctgtagtgccgaggaa

SEQ ID NO: 15022 - DNA, 25 bp, Canis familiaris
atttagctcctgtaggacctcagaa

SEQ ID NO: 15023 - DNA, 25 bp, Canis familiaris
atttagcttcctgtacctgatgatg

SEQ ID NO: 15024 - DNA, 25 bp, Canis familiaris
atttagttcctgctgagtactggta

SEQ ID NO: 15025 - DNA, 25 bp, Canis familiaris
atttaggtgcccttaggacagttgt

SEQ ID NO: 15026 - DNA, 25 bp, Canis familiaris
atttcctttctcttcaggatagatt

SEQ ID NO: 15027 - DNA, 25 bp, Canis familiaris
attattagtttattactgagtgata

SEQ ID NO: 15028 - DNA, 25 bp, Canis familiaris
attttactctgataatcggctgaat

SEQ ID NO: 15029 - DNA, 25 bp, Canis familiaris
attattcctctttaatcccattatg

SEQ ID NO: 15030 - DNA, 25 bp, Canis familiaris
attatgttttacaatgatcccattt

SEQ ID NO: 15031 - DNA, 25 bp, Canis familiaris
attacttttgtcaacattcatgatt

SEQ ID NO: 15032 - DNA, 25 bp, Canis familiaris
attacattttctttattcatatatc

SEQ ID NO: 15033 - DNA, 25 bp, Canis familiaris
attactcaattctgtttctatatag

SEQ ID NO: 15034 - DNA, 25 bp, Canis familiaris
attactcgatccagttatcctcaag

SEQ ID NO: 15035 - DNA, 25 bp, Canis familiaris
attaccagtactactcttcctagac

SEQ ID NO: 15036 - DNA, 25 bp, Canis familiaris
attaccagtagccaatcgatcgcat

SEQ ID NO: 15037 - DNA, 25 bp, Canis familiaris
attttagtagctgatgctggcacat

SEQ ID NO: 15038 - DNA, 25 bp, Canis familiaris
attttacgctattatcaggcctccg

SEQ ID NO: 15039 - DNA, 25 bp, Canis familiaris
attttacgctattacaggcctccga

SEQ ID NO: 15040 - DNA, 25 bp, Canis familiaris
attttacgctattacaggcctccga

SEQ ID NO: 15041 - DNA, 25 bp, Canis familiaris
attttacgctattacaggcctccga

SEQ ID NO: 15042 - DNA, 25 bp, Canis familiaris
attttacgctattacaggcctccga

SEQ ID NO: 15043 - DNA, 25 bp, Canis familiaris
attttacgctattacaggcctccga

SEQ ID NO: 15044 - DNA, 25 bp, Canis familiaris
attttacgctattacaggcctccga

SEQ ID NO: 15045 - DNA, 25 bp, Canis familiaris
attttacgctattacaggcctccga

SEQ ID NO: 15046 - DNA, 25 bp, Canis familiaris
attttacgctattacaggcctccga

SEQ ID NO: 15047 - DNA, 25 bp, Canis familiaris
attttacgctattacaggcctccga

SEQ ID NO: 15048 - DNA, 25 bp, Canis familiaris
attttacgctattacaggcctccga

SEQ ID NO: 15049 - DNA, 25 bp, Canis familiaris
attttagccttcagcatgaccttgt

SEQ ID NO: 15050 - DNA, 25 bp, Canis familiaris
attattggctttaccattcctcatc

SEQ ID NO: 15051 - DNA, 25 bp, Canis familiaris
attagtgttttttcattctctgggt

SEQ ID NO: 15052 - DNA, 25 bp, Canis familiaris
attactggtgtttctatacctggaa

SEQ ID NO: 15053 - DNA, 25 bp, Canis familiaris
attacttctttattaacagcgatga

SEQ ID NO: 15054 - DNA, 25 bp, Canis familiaris
attactctgtattttcaaagtgaga

SEQ ID NO: 15055 - DNA, 25 bp, Canis familiaris
attactggagaatttaggagctatg

SEQ ID NO: 15056 - DNA, 25 bp, Canis familiaris
attactggaccaattaagtttgcct

SEQ ID NO: 15057 - DNA, 25 bp, Canis familiaris
attaccgccaataatcaagatttcg

SEQ ID NO: 15058 - DNA, 25 bp, Canis familiaris
atttcccacaccacacatttgtatg

SEQ ID NO: 15059 - DNA, 25 bp, Canis familiaris
atttgtccctaatcactttgtagca

SEQ ID NO: 15060 - DNA, 25 bp, Canis familiaris
atttaccctgaaacctctggtcgat

SEQ ID NO: 15061 - DNA, 25 bp, Canis familiaris
atttcccctacgatcacgtatacac

SEQ ID NO: 15062 - DNA, 25 bp, Canis familiaris
atttcttgcctaccttactttagca

SEQ ID NO: 15063 - DNA, 25 bp, Canis familiaris
attatatttctctcactttcttagc

SEQ ID NO: 15064 - DNA, 25 bp, Canis familiaris
attatgagttaattccttgtctgta

SEQ ID NO: 15065 - DNA, 25 bp, Canis familiaris
attagagcattaagccctggctgtg

SEQ ID NO: 15066 - DNA, 25 bp, Canis familiaris
attagaattcatttcctctgctgtc

SEQ ID NO: 15067 - DNA, 25 bp, Canis familiaris
attttcactatggacacctgctttt

SEQ ID NO: 15068 - DNA, 25 bp, Canis familiaris
attttgcagcatttaacctttatta

SEQ ID NO: 15069 - DNA, 25 bp, Canis familiaris
attttagagtcttcccttttgtgtg

SEQ ID NO: 15070 - DNA, 25 bp, Canis familiaris
attactatagtttcaccatccttct

SEQ ID NO: 15071 - DNA, 25 bp, Canis familiaris
attaccaagtcaaactatccatgtt

SEQ ID NO: 15072 - DNA, 25 bp, Canis familiaris
atttggcctgtaaatcttcaaggtg

SEQ ID NO: 15073 - DNA, 25 bp, Canis familiaris
atagtggcatcggtttctggccgtt

SEQ ID NO: 15074 - DNA, 25 bp, Canis familiaris
atagggtagactgcttggccacata

SEQ ID NO: 15075 - DNA, 25 bp, Canis familiaris
ataggtgcagaacctcttggccaac

SEQ ID NO: 15076 - DNA, 25 bp, Canis familiaris
atttccatgaagctttgacataatc

SEQ ID NO: 15077 - DNA, 25 bp, Canis familiaris
atttgtctgaagcccatagttcaat

SEQ ID NO: 15078 - DNA, 25 bp, Canis familiaris
attttctgaaacccagttgactcat

SEQ ID NO: 15079 - DNA, 25 bp, Canis familiaris
attttatgggacccctggatctagg

SEQ ID NO: 15080 - DNA, 25 bp, Canis familiaris
atttctagagggcccgaggcttctg

SEQ ID NO: 15081 - DNA, 25 bp, Canis familiaris
atttaaatcaatcccgtgtctctgt

SEQ ID NO: 15082 - DNA, 25 bp, Canis familiaris
atttactatgcacaccaggttcttt

SEQ ID NO: 15083 - DNA, 25 bp, Canis familiaris
atacatacatatcgatacgcatgtg

SEQ ID NO: 15084 - DNA, 25 bp, Canis familiaris
atttacttcaatacctggaccacct

SEQ ID NO: 15085 - DNA, 25 bp, Canis familiaris
attttattgacgatctggccgacct

SEQ ID NO: 15086 - DNA, 25 bp, Canis familiaris
attattaaaagttgctcctgcccct

SEQ ID NO: 15087 - DNA, 25 bp, Canis familiaris
attttcttaaattgtcatcgaccct

SEQ ID NO: 15088 - DNA, 25 bp, Canis familiaris
atttttaagtaacctctgcacccag

SEQ ID NO: 15089 - DNA, 25 bp, Canis familiaris
atttttaaataaacatctgactcta

SEQ ID NO: 15090 - DNA, 25 bp, Canis familiaris
atttttgaacatttacctgcccata

SEQ ID NO: 15091 - DNA, 25 bp, Canis familiaris
attatactaggtttcccttccatag

SEQ ID NO: 15092 - DNA, 25 bp, Canis familiaris
atttccaaggtcatttcattaaaga

SEQ ID NO: 15093 - DNA, 25 bp, Canis familiaris
attatcacacaatatctttcttaaa

SEQ ID NO: 15094 - DNA, 25 bp, Canis familiaris
atttacacaatgctttgcttttcct

SEQ ID NO: 15095 - DNA, 25 bp, Canis familiaris
atcttaaaatcctgaccctattctc

SEQ ID NO: 15096 - DNA, 25 bp, Canis familiaris
atctttaaactctgttccataccct

SEQ ID NO: 15097 - DNA, 25 bp, Canis familiaris
attttacaaatctgtgtcatccact

SEQ ID NO: 15098 - DNA, 25 bp, Canis familiaris
atttaccaaaccttgtacactgctg

SEQ ID NO: 15099 - DNA, 25 bp, Canis familiaris
atttacccagtcaattgtacagtgt

SEQ ID NO: 15100 - DNA, 25 bp, Canis familiaris
catttaagccagttttatccgtaag

SEQ ID NO: 15101 - DNA, 25 bp, Canis familiaris
atttagaaaggctctaccctcactg

SEQ ID NO: 15102 - DNA, 25 bp, Canis familiaris
atatgtaaacggtgaacctccactt

SEQ ID NO: 15103 - DNA, 25 bp, Canis familiaris
atttgaaaggtacaagactacagcc

SEQ ID NO: 15104 - DNA, 25 bp, Canis familiaris
atttcaaagagtttacatatgtgca

SEQ ID NO: 15105 - DNA, 25 bp, Canis familiaris
atattcaaagacacattaaacacat

SEQ ID NO: 15106 - DNA, 25 bp, Canis familiaris
atttcaattaatcctccaataccta

SEQ ID NO: 15107 - DNA, 25 bp, Canis familiaris
attataatatttcccacagaaagcc

SEQ ID NO: 15108 - DNA, 25 bp, Canis familiaris
attttttcattggccaaggcaacca

SEQ ID NO: 15109 - DNA, 25 bp, Canis familiaris
atttcatgttttgcacggtattcca

SEQ ID NO: 15110 - DNA, 25 bp, Canis familiaris
atttctgaccaaaccggtgtcacca

SEQ ID NO: 15111 - DNA, 25 bp, Canis familiaris
atttctggcccctgtgggccatcaa

SEQ ID NO: 15112 - DNA, 25 bp, Canis familiaris
atttcgaggacgtggggcactctac

SEQ ID NO: 15113 - DNA, 25 bp, Canis familiaris
attttcaggtcctgggatcacaccc

SEQ ID NO: 15114 - DNA, 25 bp, Canis familiaris
atttgccagggcagccgtgacaaac

SEQ ID NO: 15115 - DNA, 25 bp, Canis familiaris
attatgcagaatccacgccagtata

SEQ ID NO: 15116 - DNA, 25 bp, Canis familiaris
attatgatgtatcagtgtcgattca

SEQ ID NO: 15117 - DNA, 25 bp, Canis familiaris
attatgcttttatgtgctattcaga

SEQ ID NO: 15118 - DNA, 25 bp, Canis familiaris
atttctttgataggatgtcttgctg

SEQ ID NO: 15119 - DNA, 25 bp, Canis familiaris
atttcttctgaagtggtttccaatt

SEQ ID NO: 15120 - DNA, 25 bp, Canis familiaris
attttccatatattggccctgctaa

SEQ ID NO: 15121 - DNA, 25 bp, Canis familiaris
attttctctaattccgcatatgctg

SEQ ID NO: 15122 - DNA, 25 bp, Canis familiaris
attatccctgagttgcccagtagaa

SEQ ID NO: 15123 - DNA, 25 bp, Canis familiaris
atttgactcaagatgcagccaggga

SEQ ID NO: 15124 - DNA, 25 bp, Canis familiaris
atttcctacatgaccgcagcggaga

SEQ ID NO: 15125 - DNA, 25 bp, Canis familiaris
atttccagaccgaccacggagacac

SEQ ID NO: 15126 - DNA, 25 bp, Canis familiaris
atttcactacctagcaactaaaagc

SEQ ID NO: 15127 - DNA, 25 bp, Canis familiaris
atttcaccacactgaggcaaaaagg

SEQ ID NO: 15128 - DNA, 25 bp, Canis familiaris
attatccccacacccagagaaaagg

SEQ ID NO: 15129 - DNA, 25 bp, Canis familiaris
atttttatccacccatagaacaagg

SEQ ID NO: 15130 - DNA, 25 bp, Canis familiaris
attttgtgccccgagcatcgaaaga

SEQ ID NO: 15131 - DNA, 25 bp, Canis familiaris
attttgagcaccagagagaggagag

SEQ ID NO: 15132 - DNA, 25 bp, Canis familiaris
atttggagatccctgctggagaaat

SEQ ID NO: 15133 - DNA, 25 bp, Canis familiaris
atttgttgatgcaggctgtggaaac

SEQ ID NO: 15134 - DNA, 25 bp, Canis familiaris
attttatgcactggcagcggcggca

SEQ ID NO: 15135 - DNA, 25 bp, Canis familiaris
attatctgtgcatttcacattggga

SEQ ID NO: 15136 - DNA, 25 bp, Canis familiaris
atttgcttcatttcaagggtacaga

SEQ ID NO: 15137 - DNA, 25 bp, Canis familiaris
atttttcttaaacagctacgcacag

SEQ ID NO: 15138 - DNA, 25 bp, Canis familiaris
atttgcctgtaataaagccaggact

SEQ ID NO: 15139 - DNA, 25 bp, Canis familiaris
attttggcatcagaaaacacttact

SEQ ID NO: 15140 - DNA, 25 bp, Canis familiaris
attttgctagcccataaacctttct

SEQ ID NO: 15141 - DNA, 25 bp, Canis familiaris
attagtccaggagaaaagctttcag

SEQ ID NO: 15142 - DNA, 25 bp, Canis familiaris
attaggctcaaagcaaatcagtttg

SEQ ID NO: 15143 - DNA, 25 bp, Canis familiaris
attttgccaactgccaatcatgttg

SEQ ID NO: 15144 - DNA, 25 bp, Canis familiaris
attttgccacacaacccagcaattc

SEQ ID NO: 15145 - DNA, 25 bp, Canis familiaris
atttctccaccaagcgctggaaagg

SEQ ID NO: 15146 - DNA, 25 bp, Canis familiaris
atttcctcacctactgggtatctga

SEQ ID NO: 15147 - DNA, 25 bp, Canis familiaris
atttcacatctggttctgggtcatt

SEQ ID NO: 15148 - DNA, 25 bp, Canis familiaris
attatctatctgttttggactatat

SEQ ID NO: 15149 - DNA, 25 bp, Canis familiaris
atttctagctgtccttggagaatta

SEQ ID NO: 15150 - DNA, 25 bp, Canis familiaris
attattgagcttcatcatgaccaga

SEQ ID NO: 15151 - DNA, 25 bp, Canis familiaris
attttagcatgctcactgacctacc

SEQ ID NO: 15152 - DNA, 25 bp, Canis familiaris
atttgctaaaaactggcgattgcca

SEQ ID NO: 15153 - DNA, 25 bp, Canis familiaris
atttcaaacaactttccattcgcca

SEQ ID NO: 15154 - DNA, 25 bp, Canis familiaris
attttaaccacaactcttgtcctct

SEQ ID NO: 15155 - DNA, 25 bp, Canis familiaris
atttctaaacttccactttgaccat

SEQ ID NO: 15156 - DNA, 25 bp, Canis familiaris
attttataacttgcttttctcctct

SEQ ID NO: 15157 - DNA, 25 bp, Canis familiaris
atttatgatgacttatggattttta

SEQ ID NO: 15158 - DNA, 25 bp, Canis familiaris
attataatgacctaatttattaatc

SEQ ID NO: 15159 - DNA, 25 bp, Canis familiaris
atttatttgcccatttattagacga

SEQ ID NO: 15160 - DNA, 25 bp, Canis familiaris
atttttctcccttgcattttagcaa

SEQ ID NO: 15161 - DNA, 25 bp, Canis familiaris
attttgtgtgtcttatctctttaaa

SEQ ID NO: 15162 - DNA, 25 bp, Canis familiaris
attttgtgtttcacactcttacaga

SEQ ID NO: 15163 - DNA, 25 bp, Canis familiaris
attttgttttgcatcttttccagac

SEQ ID NO: 15164 - DNA, 25 bp, Canis familiaris
attttctgctttgtgtcaattctaa

SEQ ID NO: 15165 - DNA, 25 bp, Canis familiaris
attttcgtcgtctatgtcaacaaca

SEQ ID NO: 15166 - DNA, 25 bp, Canis familiaris
attatttagcagttcgtcaccaaag

SEQ ID NO: 15167 - DNA, 25 bp, Canis familiaris
attatcttcaaggccgcctacggag

SEQ ID NO: 15168 - DNA, 25 bp, Canis familiaris
atttcaccaaggagcgctgactgtg

SEQ ID NO: 15169 - DNA, 25 bp, Canis familiaris
attttctacggttgcaaactgctga

SEQ ID NO: 15170 - DNA, 25 bp, Canis familiaris
atttttactgcgcaccattccagtt

SEQ ID NO: 15171 - DNA, 25 bp, Canis familiaris
atttcattaggatacctttcatttt

SEQ ID NO: 15172 - DNA, 25 bp, Canis familiaris
atacctaatcaatgtttttctgttt

SEQ ID NO: 15173 - DNA, 25 bp, Canis familiaris
attttgcagaattcgttttttgaag

SEQ ID NO: 15174 - DNA, 25 bp, Canis familiaris
attttgcattcattccttttgttca

SEQ ID NO: 15175 - DNA, 25 bp, Canis familiaris
attttgaacttgccttctggctctc

SEQ ID NO: 15176 - DNA, 25 bp, Canis familiaris
attttgaatctaggctcttactcct

SEQ ID NO: 15177 - DNA, 25 bp, Canis familiaris
attatttctctgatcatttggtcct

SEQ ID NO: 15178 - DNA, 25 bp, Canis familiaris
atttattcctgcttatatgtctccc

SEQ ID NO: 15179 - DNA, 25 bp, Canis familiaris
atttaccaatgcttactgttctcaa

SEQ ID NO: 15180 - DNA, 25 bp, Canis familiaris
atttagcgcaggctctctatttcat

SEQ ID NO: 15181 - DNA, 25 bp, Canis familiaris
atttggtgcagcccctatttttggg

SEQ ID NO: 15182 - DNA, 25 bp, Canis familiaris
attttgtgcaggacccatgctttgc

SEQ ID NO: 15183 - DNA, 25 bp, Canis familiaris
attttgtgctgagcccatagttcat

SEQ ID NO: 15184 - DNA, 25 bp, Canis familiaris
attttgtccccacgaagttgcataa

SEQ ID NO: 15185 - DNA, 25 bp, Canis familiaris
attattttccactgatagatgtatc

SEQ ID NO: 15186 - DNA, 25 bp, Canis familiaris
atttttgtccagtcgtgtgatttat

SEQ ID NO: 15187 - DNA, 25 bp, Canis familiaris
attttgtgtcacctccagaaagtat

SEQ ID NO: 15188 - DNA, 25 bp, Canis familiaris
atttttgtaacctaacagtgaatca

SEQ ID NO: 15189 - DNA, 25 bp, Canis familiaris
atttgcttgaaaagacaaaggacct

SEQ ID NO: 15190 - DNA, 25 bp, Canis familiaris
attttcagcgaaccacaacggcacc

SEQ ID NO: 15191 - DNA, 25 bp, Canis familiaris
attttgagaaagaccctcagaaaat

SEQ ID NO: 15192 - DNA, 25 bp, Canis familiaris
attttagcatcagaccccacaaaga

SEQ ID NO: 15193 - DNA, 25 bp, Canis familiaris
attttgactcagcaactcacacaat

SEQ ID NO: 15194 - DNA, 25 bp, Canis familiaris
atttatagctcactgcaagtcccac

SEQ ID NO: 15195 - DNA, 25 bp, Canis familiaris
atttctggtccaacagttccaggta

SEQ ID NO: 15196 - DNA, 25 bp, Canis familiaris
atttctggcatggagggttcctgga

SEQ ID NO: 15197 - DNA, 25 bp, Canis familiaris
attatctgggccttgtattcccttt

SEQ ID NO: 15198 - DNA, 25 bp, Canis familiaris
attagagagcctaattattccgtgt

SEQ ID NO: 15199 - DNA, 25 bp, Canis familiaris
attagagagctttgtgtttcagttt

SEQ ID NO: 15200 - DNA, 25 bp, Canis familiaris
attagagagcctttgttgttcattt

SEQ ID NO: 15201 - DNA, 25 bp, Canis familiaris
atttcgagtcgatttctgatttctt

SEQ ID NO: 15202 - DNA, 25 bp, Canis familiaris
atttccagtaatatgctttcctttt

SEQ ID NO: 15203 - DNA, 25 bp, Canis familiaris
attttcagtttaatctttctatact

SEQ ID NO: 15204 - DNA, 25 bp, Canis familiaris
attttcactgttcttattctaatca

SEQ ID NO: 15205 - DNA, 25 bp, Canis familiaris
atttttcatactcttaactgactga

SEQ ID NO: 15206 - DNA, 25 bp, Canis familiaris
attttaacatctccttaattgggca

SEQ ID NO: 15207 - DNA, 25 bp, Canis familiaris
attatgctaaatcccttctatctgt

SEQ ID NO: 15208 - DNA, 25 bp, Canis familiaris
attagtcacgtaatcgtatattgtt

SEQ ID NO: 15209 - DNA, 25 bp, Canis familiaris
atttataccatatctggaaatgtgt

SEQ ID NO: 15210 - DNA, 25 bp, Canis familiaris
atttcagcagctaacactggcgaag

SEQ ID NO: 15211 - DNA, 25 bp, Canis familiaris
atttcagcagcttcggtggtatcta

SEQ ID NO: 15212 - DNA, 25 bp, Canis familiaris
atttccctacatggtgttgatctat

SEQ ID NO: 15213 - DNA, 25 bp, Canis familiaris
atataccccataagcgttactgcac

SEQ ID NO: 15214 - DNA, 25 bp, Canis familiaris
attatccctgatcatctgtaactac

SEQ ID NO: 15215 - DNA, 25 bp, Canis familiaris
attatcctaatcctagatcgctcta

SEQ ID NO: 15216 - DNA, 25 bp, Canis familiaris
atttagctcagtggtagagcgcttg

SEQ ID NO: 15217 - DNA, 25 bp, Canis familiaris
attatattcattgtgcttggctctg

SEQ ID NO: 15218 - DNA, 25 bp, Canis familiaris
attatcttctatatcttcaggcgcg

SEQ ID NO: 15219 - DNA, 25 bp, Canis familiaris
attttgctggcaatcttataaggag

SEQ ID NO: 15220 - DNA, 25 bp, Canis familiaris
attaggccagcaatgcttgtagtgc

SEQ ID NO: 15221 - DNA, 25 bp, Canis familiaris
attatggcctgcagtatctcgtgct

SEQ ID NO: 15222 - DNA, 25 bp, Canis familiaris
atttgcagttgacggcatctccagt

SEQ ID NO: 15223 - DNA, 25 bp, Canis familiaris
atttcagcttcaagaatttcagcaa

SEQ ID NO: 15224 - DNA, 25 bp, Canis familiaris
attatcacttaaatcagatccagca

SEQ ID NO: 15225 - DNA, 25 bp, Canis familiaris
attatgcacttgtttctgtcatcaa

SEQ ID NO: 15226 - DNA, 25 bp, Canis familiaris
attatgtcttgatttttctaaacga

SEQ ID NO: 15227 - DNA, 25 bp, Canis familiaris
attatctctcttattatcccaatcc

SEQ ID NO: 15228 - DNA, 25 bp, Canis familiaris
attatctcagtaattgttccaattc

SEQ ID NO: 15229 - DNA, 25 bp, Canis familiaris
attattcacaattctgttcctttgt

SEQ ID NO: 15230 - DNA, 25 bp, Canis familiaris
attatatatacttgctctgtgcttt

SEQ ID NO: 15231 - DNA, 25 bp, Canis familiaris
attagtgagacttgtatttatatta

SEQ ID NO: 15232 - DNA, 25 bp, Canis familiaris
attagtggccagtgacttttgtcat

SEQ ID NO: 15233 - DNA, 25 bp, Canis familiaris
atttgggccatacaccttttgttga

SEQ ID NO: 15234 - DNA, 25 bp, Canis familiaris
attttttataaagcttgtgtgttga

SEQ ID NO: 15235 - DNA, 25 bp, Canis familiaris
attttttgtaattgccatgtttctg

SEQ ID NO: 15236 - DNA, 25 bp, Canis familiaris
attttattgtacagtttgctttggt

SEQ ID NO: 15237 - DNA, 25 bp, Canis familiaris
atttctcttgtatgagtttccttgg

SEQ ID NO: 15238 - DNA, 25 bp, Canis familiaris
atttctcttttatgatttccttggg

SEQ ID NO: 15239 - DNA, 25 bp, Canis familiaris
atttcaaccgtatgtcttcctggaa

SEQ ID NO: 15240 - DNA, 25 bp, Canis familiaris
atttcaaccttttggctattgagaa

SEQ ID NO: 15241 - DNA, 25 bp, Canis familiaris
attttcccctgatggctgttagttt

SEQ ID NO: 15242 - DNA, 25 bp, Canis familiaris
attttgcccccaatagagatttgtt

SEQ ID NO: 15243 - DNA, 25 bp, Canis familiaris
attattcagcccataaatatgtttt

SEQ ID NO: 15244 - DNA, 25 bp, Canis familiaris
attattaccgcagatcatatatgat

SEQ ID NO: 15245 - DNA, 25 bp, Canis familiaris
attatttcctctgcataattgaaat

SEQ ID NO: 15246 - DNA, 25 bp, Canis familiaris
atttattttccctgtgtgaagtgac

SEQ ID NO: 15247 - DNA, 25 bp, Canis familiaris
atttctttacccttttgcgatgtgt

SEQ ID NO: 15248 - DNA, 25 bp, Canis familiaris
attattttcaccctattgcagctaa

SEQ ID NO: 15249 - DNA, 25 bp, Canis familiaris
attatttcagcagatctattcagat

SEQ ID NO: 15250 - DNA, 25 bp, Canis familiaris
attatcttacattattttcactgaa

SEQ ID NO: 15251 - DNA, 25 bp, Canis familiaris
attatctctgatggtattttactaa

SEQ ID NO: 15252 - DNA, 25 bp, Canis familiaris
attattctgcaagtatagtaggtga

SEQ ID NO: 15253 - DNA, 25 bp, Canis familiaris
attttatgatatgtagtaattgatt

SEQ ID NO: 15254 - DNA, 25 bp, Canis familiaris
atttatttatgctctgtactgtatt

SEQ ID NO: 15255 - DNA, 25 bp, Canis familiaris
attttctaatgcttcttcaatggtg

SEQ ID NO: 15256 - DNA, 25 bp, Canis familiaris
attattctactcttgtataatagta

SEQ ID NO: 15257 - DNA, 25 bp, Canis familiaris
atttgactactcttgttgaacacga

SEQ ID NO: 15258 - DNA, 25 bp, Canis familiaris
atttatgctacttctgtggggcaag

SEQ ID NO: 15259 - DNA, 25 bp, Canis familiaris
atatattgctaatcttggggctgaa

SEQ ID NO: 15260 - DNA, 25 bp, Canis familiaris
atttgtctcaaactaggccagctgg

SEQ ID NO: 15261 - DNA, 25 bp, Canis familiaris
atttgcctgcattaccggtcgatgc

SEQ ID NO: 15262 - DNA, 25 bp, Canis familiaris
attttggcttacattctctgagact

SEQ ID NO: 15263 - DNA, 25 bp, Canis familiaris
attttcctcaacattcttcatttat

SEQ ID NO: 15264 - DNA, 25 bp, Canis familiaris
attttagtatttttgcttcatttca

SEQ ID NO: 15265 - DNA, 25 bp, Canis familiaris
attatttgttgttttctgtcttgtt

SEQ ID NO: 15266 - DNA, 25 bp, Canis familiaris
attatggttttgtgtgtgggtgtgt

SEQ ID NO: 15267 - DNA, 25 bp, Canis familiaris
atttcagttttgttggtggagccag

SEQ ID NO: 15268 - DNA, 25 bp, Canis familiaris
atttcagttttgcaagtaagtcctt

SEQ ID NO: 15269 - DNA, 25 bp, Canis familiaris
atttactatttgtgaggccttcctt

SEQ ID NO: 15270 - DNA, 25 bp, Canis familiaris
atttcactttctctgggactgtttt

SEQ ID NO: 15271 - DNA, 25 bp, Canis familiaris
atttcctttctgtgtgaagcttttg

SEQ ID NO: 15272 - DNA, 25 bp, Canis familiaris
atattgggaggcctgagttcccttt

SEQ ID NO: 15273 - DNA, 25 bp, Canis familiaris
attttgtcatgtctagtttctcttt

SEQ ID NO: 15274 - DNA, 25 bp, Canis familiaris
atttatgatttctttgtatggctcc

SEQ ID NO: 15275 - DNA, 25 bp, Canis familiaris
attttgagagtcgttgtgtgtgtgt

SEQ ID NO: 15276 - DNA, 25 bp, Canis familiaris
atttcgatcctcgtcaggtgcaggt

SEQ ID NO: 15277 - DNA, 25 bp, Canis familiaris
atttcttcgccactcaggaagtgct

SEQ ID NO: 15278 - DNA, 25 bp, Canis familiaris
atttcagtcggcatccgaagttgac

SEQ ID NO: 15279 - DNA, 25 bp, Canis familiaris
atttggccggggctgagggtgcaca

SEQ ID NO: 15280 - DNA, 25 bp, Canis familiaris
atttcaccagggccgctggggacaa

SEQ ID NO: 15281 - DNA, 25 bp, Canis familiaris
atttcagaatggagcttaggtacag

SEQ ID NO: 15282 - DNA, 25 bp, Canis familiaris
atatctcgaatgttctgattacttg

SEQ ID NO: 15283 - DNA, 25 bp, Canis familiaris
atttcatgcaagtgcctaacatcgc

SEQ ID NO: 15284 - DNA, 25 bp, Canis familiaris
atttcatgcaagtgcctaacatcgc

SEQ ID NO: 15285 - DNA, 25 bp, Canis familiaris
atttcagatggaagctccacctctc

SEQ ID NO: 15286 - DNA, 25 bp, Canis familiaris
atttatgtgcgaaggatccctcgac

SEQ ID NO: 15287 - DNA, 25 bp, Canis familiaris
attttggtacaggagcgcctgacac

SEQ ID NO: 15288 - DNA, 25 bp, Canis familiaris
attttggaactctatgccagtgatc

SEQ ID NO: 15289 - DNA, 25 bp, Canis familiaris
attttaatcaggttccaggagccac

SEQ ID NO: 15290 - DNA, 25 bp, Canis familiaris
atttattctcagccatttggggcac

SEQ ID NO: 15291 - DNA, 25 bp, Canis familiaris
atttattcaatgccacttcttgcca

SEQ ID NO: 15292 - DNA, 25 bp, Canis familiaris
attatattatagcactccttgatta

SEQ ID NO: 15293 - DNA, 25 bp, Canis familiaris
attattggcaaagctcttgctgaat

SEQ ID NO: 15294 - DNA, 25 bp, Canis familiaris
attttgcgtacagctcttgctaata

SEQ ID NO: 15295 - DNA, 25 bp, Canis familiaris
attttgcaggatagtgctcttgcct

SEQ ID NO: 15296 - DNA, 25 bp, Canis familiaris
attttgcagtgtagccagcctcatc

SEQ ID NO: 15297 - DNA, 25 bp, Canis familiaris
attatctcacttagcatcatgccct

SEQ ID NO: 15298 - DNA, 25 bp, Canis familiaris
attattggctctacattcctcattc

SEQ ID NO: 15299 - DNA, 25 bp, Canis familiaris
attatatggccttgtgtcaccttca

SEQ ID NO: 15300 - DNA, 25 bp, Canis familiaris
attataggcacttttactgtccact

SEQ ID NO: 15301 - DNA, 25 bp, Canis familiaris
attatagagcaccaatacctctccc

SEQ ID NO: 15302 - DNA, 25 bp, Canis familiaris
attatcaacataaaaccccctgcaa

SEQ ID NO: 15303 - DNA, 25 bp, Canis familiaris
attataataaacatcctcacccacc

SEQ ID NO: 15304 - DNA, 25 bp, Canis familiaris
attataataaacatcctcaccacca

SEQ ID NO: 15305 - DNA, 25 bp, Canis familiaris
attataataaacatctctcaccaac

SEQ ID NO: 15306 - DNA, 25 bp, Canis familiaris
atttacataaatactactcaacaat

SEQ ID NO: 15307 - DNA, 25 bp, Canis familiaris
atttacatctaactatctacgacat

SEQ ID NO: 15308 - DNA, 25 bp, Canis familiaris
attttcttacacaagctacagcctc

SEQ ID NO: 15309 - DNA, 25 bp, Canis familiaris
attatttctcccataatcatcgctc

SEQ ID NO: 15310 - DNA, 25 bp, Canis familiaris
attttttccccattatatagctgag

SEQ ID NO: 15311 - DNA, 25 bp, Canis familiaris
atttgctttctccaaatatggggag

SEQ ID NO: 15312 - DNA, 25 bp, Canis familiaris
atttctatatcaggacagcaactgg

SEQ ID NO: 15313 - DNA, 25 bp, Canis familiaris
attttattcaggtcagagcactttt

SEQ ID NO: 15314 - DNA, 25 bp, Canis familiaris
attattttggagtcatacatctatg

SEQ ID NO: 15315 - DNA, 25 bp, Canis familiaris
attattattttcttcatcattatga

SEQ ID NO: 15316 - DNA, 25 bp, Canis familiaris
attattatttatttcctctctacct

SEQ ID NO: 15317 - DNA, 25 bp, Canis familiaris
attttgtttatcttgtttcagtcct

SEQ ID NO: 15318 - DNA, 25 bp, Canis familiaris
attttcatctctttcgtttagcttc

SEQ ID NO: 15319 - DNA, 25 bp, Canis familiaris
attttgtgtgttacgtttatctctc

SEQ ID NO: 15320 - DNA, 25 bp, Canis familiaris
attttgctttctactgtgcttatgc

SEQ ID NO: 15321 - DNA, 25 bp, Canis familiaris
attttgcttgtctgtttcaatcccc

SEQ ID NO: 15322 - DNA, 25 bp, Canis familiaris
atttattatctcagtgttttcccct

SEQ ID NO: 15323 - DNA, 25 bp, Canis familiaris
attttctttaggctgtttcccatct

SEQ ID NO: 15324 - DNA, 25 bp, Canis familiaris
atttttttgactgtgatattcccca

SEQ ID NO: 15325 - DNA, 25 bp, Canis familiaris
atttttgggccaggtgaatatgacc

SEQ ID NO: 15326 - DNA, 25 bp, Canis familiaris
attttgtggagttgagagagcatat

SEQ ID NO: 15327 - DNA, 25 bp, Canis familiaris
atttcatcccagacggcatgactct

SEQ ID NO: 15328 - DNA, 25 bp, Canis familiaris
atttaccgtgactactactctgatt

SEQ ID NO: 15329 - DNA, 25 bp, Canis familiaris
atttaccggagggttctgtgactgg

SEQ ID NO: 15330 - DNA, 25 bp, Canis familiaris
attttcagggaagtcccctgagctg

SEQ ID NO: 15331 - DNA, 25 bp, Canis familiaris
atttttgaggaacttcatactgcac

SEQ ID NO: 15332 - DNA, 25 bp, Canis familiaris
atttttgaggagcccttcaccattc

SEQ ID NO: 15333 - DNA, 25 bp, Canis familiaris
atttttttagtgccagtgccctgac

SEQ ID NO: 15334 - DNA, 25 bp, Canis familiaris
attatttattacggagctgccccac

SEQ ID NO: 15335 - DNA, 25 bp, Canis familiaris
atatacacttggtccgatgcagtcc

SEQ ID NO: 15336 - DNA, 25 bp, Canis familiaris
gttgaccttgggtgaagcccttcag

SEQ ID NO: 15337 - DNA, 25 bp, Canis familiaris
atttttctggagcaaagccagcatt

SEQ ID NO: 15338 - DNA, 25 bp, Canis familiaris
attttcctggcatgagactcacaga

SEQ ID NO: 15339 - DNA, 25 bp, Canis familiaris
atttttcattcatgtgagacacaga

SEQ ID NO: 15340 - DNA, 25 bp, Canis familiaris
attttatctacatatggaatctata

SEQ ID NO: 15341 - DNA, 25 bp, Canis familiaris
atttttctatatttggagcttctaa

SEQ ID NO: 15342 - DNA, 25 bp, Canis familiaris
attattttttcattggcactaccta

SEQ ID NO: 15343 - DNA, 25 bp, Canis familiaris
attatttatttattagccagcacca

SEQ ID NO: 15344 - DNA, 25 bp, Canis familiaris
attttgaatttatttgtcagacacc

SEQ ID NO: 15345 - DNA, 25 bp, Canis familiaris
attttttttgtgtgtcagacctctc

SEQ ID NO: 15346 - DNA, 25 bp, Canis familiaris
atctttttaggttagtactcactgt

SEQ ID NO: 15347 - DNA, 25 bp, Canis familiaris
attttgttatgcactactacttttt

SEQ ID NO: 15348 - DNA, 25 bp, Canis familiaris
attttttgatctctgactgacttta

SEQ ID NO: 15349 - DNA, 25 bp, Canis familiaris
atttcattcagtttcatgactgagt

SEQ ID NO: 15350 - DNA, 25 bp, Canis familiaris
atttttgcctctaatgactggtgct

SEQ ID NO: 15351 - DNA, 25 bp, Canis familiaris
attttgctgccttaatgacattccc

SEQ ID NO: 15352 - DNA, 25 bp, Canis familiaris
attttccatctatgagaatttcaca

SEQ ID NO: 15353 - DNA, 25 bp, Canis familiaris
attttcctctgttcaagattcttcc

SEQ ID NO: 15354 - DNA, 25 bp, Canis familiaris
atttttctgctttaggttcttgctc

SEQ ID NO: 15355 - DNA, 25 bp, Canis familiaris
attttcattctgtgggtttcatctt

SEQ ID NO: 15356 - DNA, 25 bp, Canis familiaris
attttggactcatggttttgtttca

SEQ ID NO: 15357 - DNA, 25 bp, Canis familiaris
atttcctgtctctgtttttgtacta

SEQ ID NO: 15358 - DNA, 25 bp, Canis familiaris
atttgactttcatgtttttatactc

SEQ ID NO: 15359 - DNA, 25 bp, Canis familiaris
atttgtgtattctgcttggttaacc

SEQ ID NO: 15360 - DNA, 25 bp, Canis familiaris
attattgccagttccattggttgaa

SEQ ID NO: 15361 - DNA, 25 bp, Canis familiaris
attttcctgctgtcctatgtgaggc

SEQ ID NO: 15362 - DNA, 25 bp, Canis familiaris
atttctcctctgtccttagagggga

SEQ ID NO: 15363 - DNA, 25 bp, Canis familiaris
attttcccttgccctagagattgaa

SEQ ID NO: 15364 - DNA, 25 bp, Canis familiaris
attttccctaaccttcagatatgag

SEQ ID NO: 15365 - DNA, 25 bp, Canis familiaris
attttctcttgctccttggagtgag

SEQ ID NO: 15366 - DNA, 25 bp, Canis familiaris
attttctctctctcctttgatagaa

SEQ ID NO: 15367 - DNA, 25 bp, Canis familiaris
attttgtcattaacatcttttctga

SEQ ID NO: 15368 - DNA, 25 bp, Canis familiaris
attttgccattttgccattaataat

SEQ ID NO: 15369 - DNA, 25 bp, Canis familiaris
atttctccaagtagccacaacacgt

SEQ ID NO: 15370 - DNA, 25 bp, Canis familiaris
atttcccaagtaacatattgccagg

SEQ ID NO: 15371 - DNA, 25 bp, Canis familiaris
attttcctggttatgcaccaatgga

SEQ ID NO: 15372 - DNA, 25 bp, Canis familiaris
attttctcaggaatttgaaatagga

SEQ ID NO: 15373 - DNA, 25 bp, Canis familiaris
atttcccaggatttcttaatcttat

SEQ ID NO: 15374 - DNA, 25 bp, Canis familiaris
attattccaaatttcttagactcca

SEQ ID NO: 15375 - DNA, 25 bp, Canis familiaris
atttttcagcacatttcacaaccca

SEQ ID NO: 15376 - DNA, 25 bp, Canis familiaris
attttctagataattctccatacat

SEQ ID NO: 15377 - DNA, 25 bp, Canis familiaris
attattcattccattccactatcat

SEQ ID NO: 15378 - DNA, 25 bp, Canis familiaris
attttattactctaccactgtcaaa

SEQ ID NO: 15379 - DNA, 25 bp, Canis familiaris
atttactttgcttaccacagttcat

SEQ ID NO: 15380 - DNA, 25 bp, Canis familiaris
atttccattgctcacatcgacagtt

SEQ ID NO: 15381 - DNA, 25 bp, Canis familiaris
atttccggcatcgccgaggaggcaa

SEQ ID NO: 15382 - DNA, 25 bp, Canis familiaris
atttccggcatcgccgaggaggcaa

SEQ ID NO: 15383 - DNA, 25 bp, Canis familiaris
atttcctgcgtgcctgggcagggga

SEQ ID NO: 15384 - DNA, 25 bp, Canis familiaris
atttcccgggatggcgagagcagag

SEQ ID NO: 15385 - DNA, 25 bp, Canis familiaris
atttctctcagttgttggaggagca

SEQ ID NO: 15386 - DNA, 25 bp, Canis familiaris
atttccacagatgactggggccagt

SEQ ID NO: 15387 - DNA, 25 bp, Canis familiaris
atttccaagaggtggtggcacagcg

SEQ ID NO: 15388 - DNA, 25 bp, Canis familiaris
atttcctagagtggggagcctccct

SEQ ID NO: 15389 - DNA, 25 bp, Canis familiaris
atttactatgacgcagcggtgcccc

SEQ ID NO: 15390 - DNA, 25 bp, Canis familiaris
attttggaggcggcacaggagcccc

SEQ ID NO: 15391 - DNA, 25 bp, Canis familiaris
attttgtgtgggacacttgggcccg

SEQ ID NO: 15392 - DNA, 25 bp, Canis familiaris
atttgtgtttggacacttgggccct

SEQ ID NO: 15393 - DNA, 25 bp, Canis familiaris
atttggttgtgacaatcgggcctgt

SEQ ID NO: 15394 - DNA, 25 bp, Canis familiaris
atttacatttagtaatgggcccatg

SEQ ID NO: 15395 - DNA, 25 bp, Canis familiaris
atttacagcattggcaaatggtata

SEQ ID NO: 15396 - DNA, 25 bp, Canis familiaris
atttatgacatcgccatgctgggat

SEQ ID NO: 15397 - DNA, 25 bp, Canis familiaris
atttatgactgggcctctggcctct

SEQ ID NO: 15398 - DNA, 25 bp, Canis familiaris
atttcagaggcgtacgtgatgccct

SEQ ID NO: 15399 - DNA, 25 bp, Canis familiaris
atttacagggcaggggatccctggg

SEQ ID NO: 15400 - DNA, 25 bp, Canis familiaris
atactgaacttttgggacacctggg

SEQ ID NO: 15401 - DNA, 25 bp, Canis familiaris
agcactgtaagtacggtacaccgtg

SEQ ID NO: 15402 - DNA, 25 bp, Canis familiaris
atattgtaagtagcttggaccgtca

SEQ ID NO: 15403 - DNA, 25 bp, Canis familiaris
atttgccaattattaaaaacgatca

SEQ ID NO: 15404 - DNA, 25 bp, Canis familiaris
attttaacatttcatacgagccaag

SEQ ID NO: 15405 - DNA, 25 bp, Canis familiaris
attttccaccctaattagcagccaa

SEQ ID NO: 15406 - DNA, 25 bp, Canis familiaris
attttcccccactaatagagacatt

SEQ ID NO: 15407 - DNA, 25 bp, Canis familiaris
atttccccacgagatctcaagttta

SEQ ID NO: 15408 - DNA, 25 bp, Canis familiaris
atttccccctgaaagaccattcagt

SEQ ID NO: 15409 - DNA, 25 bp, Canis familiaris
atttcctccgggaagatgcctttgg

SEQ ID NO: 15410 - DNA, 25 bp, Canis familiaris
atttccatccttctacatttgttga

SEQ ID NO: 15411 - DNA, 25 bp, Canis familiaris
atttcacaacttatttcctgtgtca

SEQ ID NO: 15412 - DNA, 25 bp, Canis familiaris
atttcagaactgcagaagcccggtt

SEQ ID NO: 15413 - DNA, 25 bp, Canis familiaris
atttctgctactaagaacccccatt

SEQ ID NO: 15414 - DNA, 25 bp, Canis familiaris
attttctactcagtgaactcctcca

SEQ ID NO: 15415 - DNA, 25 bp, Canis familiaris
attttgtgtctggatgtgacccctc

SEQ ID NO: 15416 - DNA, 25 bp, Canis familiaris
atttatgtgtctggatccacgcctt

SEQ ID NO: 15417 - DNA, 25 bp, Canis familiaris
ataagggatgcatgttccgctttcc

SEQ ID NO: 15418 - DNA, 25 bp, Canis familiaris
gtaagggcctggaggcctttccagt

SEQ ID NO: 15419 - DNA, 25 bp, Canis familiaris
atttggagccggaggcacttgtttt

SEQ ID NO: 15420 - DNA, 25 bp, Canis familiaris
atttcgactcagccttagacttttt

SEQ ID NO: 15421 - DNA, 25 bp, Canis familiaris
atttccagtgcaggctttaattttt

SEQ ID NO: 15422 - DNA, 25 bp, Canis familiaris
attttcatctcggctttgagacttt

SEQ ID NO: 15423 - DNA, 25 bp, Canis familiaris
attttcatcgtcttttcaactcttt

SEQ ID NO: 15424 - DNA, 25 bp, Canis familiaris
attttccttcacgtgacagaccatc

SEQ ID NO: 15425 - DNA, 25 bp, Canis familiaris
atttttgctttcttgataggagatc

SEQ ID NO: 15426 - DNA, 25 bp, Canis familiaris
attttatcttgtccgtgaagatgta

SEQ ID NO: 15427 - DNA, 25 bp, Canis familiaris
attttttgtgagagtcgagcataac

SEQ ID NO: 15428 - DNA, 25 bp, Canis familiaris
attttatttacttatctgacagaga

SEQ ID NO: 15429 - DNA, 25 bp, Canis familiaris
attttcgttattattgatcacagag

SEQ ID NO: 15430 - DNA, 25 bp, Canis familiaris
attttctcttatttcatgtacactg

SEQ ID NO: 15431 - DNA, 25 bp, Canis familiaris
atttactttccatctgatatgcatt

SEQ ID NO: 15432 - DNA, 25 bp, Canis familiaris
atttttattacatctattcagttga

SEQ ID NO: 15433 - DNA, 25 bp, Canis familiaris
atattggtttgagaccgtagctata

SEQ ID NO: 15434 - DNA, 25 bp, Canis familiaris
atattggccctgctaaaatagaata

SEQ ID NO: 15435 - DNA, 25 bp, Canis familiaris
atttcccacatgagaccaatagaga

SEQ ID NO: 15436 - DNA, 25 bp, Canis familiaris
atttcccatatcctgcaaaaagaca

SEQ ID NO: 15437 - DNA, 25 bp, Canis familiaris
atttccctatccaatgaatctagca

SEQ ID NO: 15438 - DNA, 25 bp, Canis familiaris
attttatgtatccttgtatatccaa

SEQ ID NO: 15439 - DNA, 25 bp, Canis familiaris
atttcattgacactgatttgtacac

SEQ ID NO: 15440 - DNA, 25 bp, Canis familiaris
atttcaagaagccctcgatacctaa

SEQ ID NO: 15441 - DNA, 25 bp, Canis familiaris
atttgagacattcaccataacctaa

SEQ ID NO: 15442 - DNA, 25 bp, Canis familiaris
attttgcacttcaaccagatgacgt

SEQ ID NO: 15443 - DNA, 25 bp, Canis familiaris
atttcctcccaagcagagatggcat

SEQ ID NO: 15444 - DNA, 25 bp, Canis familiaris
atatctttgtcctggcaagaggcag

SEQ ID NO: 15445 - DNA, 25 bp, Canis familiaris
atatattggccctgctaaaatagaa

SEQ ID NO: 15446 - DNA, 25 bp, Canis familiaris
attttcccctagaataccacagaat

SEQ ID NO: 15447 - DNA, 25 bp, Canis familiaris
atgtgtacccccctaaacaatacat

SEQ ID NO: 15448 - DNA, 25 bp, Canis familiaris
atttcccctgcccttgaagaataat

SEQ ID NO: 15449 - DNA, 25 bp, Canis familiaris
atttcccccccattaatgaatcagt

SEQ ID NO: 15450 - DNA, 25 bp, Canis familiaris
atctacccccttttatatctaatgt

SEQ ID NO: 15451 - DNA, 25 bp, Canis familiaris
atagacccactcctacaaagtagtt

SEQ ID NO: 15452 - DNA, 25 bp, Canis familiaris
atattaccttcaattactagtagtt

SEQ ID NO: 15453 - DNA, 25 bp, Canis familiaris
atttagcagcttgattttatgttag

SEQ ID NO: 15454 - DNA, 25 bp, Canis familiaris
atattatgcctttatttttggttag

SEQ ID NO: 15455 - DNA, 25 bp, Canis familiaris
atttatgttatgtgtcttcctgtaa

SEQ ID NO: 15456 - DNA, 25 bp, Canis familiaris
atttatattgtttcttcccatgtac

SEQ ID NO: 15457 - DNA, 25 bp, Canis familiaris
atttttagtattgtccctattccat

SEQ ID NO: 15458 - DNA, 25 bp, Canis familiaris
atattttttattgtctcctgtttag

SEQ ID NO: 15459 - DNA, 25 bp, Canis familiaris
atttttttttttgcatgcgtagctt

SEQ ID NO: 15460 - DNA, 25 bp, Canis familiaris
attttctttttgcgttgcgtatatt

SEQ ID NO: 15461 - DNA, 25 bp, Canis familiaris
attttattttctcttgtgctttatc

SEQ ID NO: 15462 - DNA, 25 bp, Canis familiaris
attttatctggtctttttcttgctc

SEQ ID NO: 15463 - DNA, 25 bp, Canis familiaris
atttttctcaggtctttgttctata

SEQ ID NO: 15464 - DNA, 25 bp, Canis familiaris
attttcccatgtgcttctttcatgt

SEQ ID NO: 15465 - DNA, 25 bp, Canis familiaris
attttccctgtgatttctacatagc

SEQ ID NO: 15466 - DNA, 25 bp, Canis familiaris
atatttagctctccaatttagaaac

SEQ ID NO: 15467 - DNA, 25 bp, Canis familiaris
atatgtgggccatcgattcccaaga

SEQ ID NO: 15468 - DNA, 25 bp, Canis familiaris
atttggctgctgaggagtcccagaa

SEQ ID NO: 15469 - DNA, 25 bp, Canis familiaris
atttctgctcaggatgacagtccca

SEQ ID NO: 15470 - DNA, 25 bp, Canis familiaris
atttcttcagccagagatcccagac

SEQ ID NO: 15471 - DNA, 25 bp, Canis familiaris
atttgcttccataagaacctgcgat

SEQ ID NO: 15472 - DNA, 25 bp, Canis familiaris
atatatcttctcaagcgatcccatc

SEQ ID NO: 15473 - DNA, 25 bp, Canis familiaris
attttctccaccgatctcatgagga

SEQ ID NO: 15474 - DNA, 25 bp, Canis familiaris
attttctccaccaatctcatgagga

SEQ ID NO: 15475 - DNA, 25 bp, Canis familiaris
attttctccaccaatctcatgagga

SEQ ID NO: 15476 - DNA, 25 bp, Canis familiaris
atttatcttgaccaactcatttagt

SEQ ID NO: 15477 - DNA, 25 bp, Canis familiaris
atttttctgatccattgtgctttag

SEQ ID NO: 15478 - DNA, 25 bp, Canis familiaris
atttatttactcattgctcactaga

SEQ ID NO: 15479 - DNA, 25 bp, Canis familiaris
attttcagtatcttaatgtcctaat

SEQ ID NO: 15480 - DNA, 25 bp, Canis familiaris
atatttctgaacttcgaatttaatc

SEQ ID NO: 15481 - DNA, 25 bp, Canis familiaris
attttcccacttgtattttcatata

SEQ ID NO: 15482 - DNA, 25 bp, Canis familiaris
atttttccctctgatagctttcata

SEQ ID NO: 15483 - DNA, 25 bp, Canis familiaris
atttttgccagtaactggtattctt

SEQ ID NO: 15484 - DNA, 25 bp, Canis familiaris
atttctcccatgcatcaagttattt

SEQ ID NO: 15485 - DNA, 25 bp, Canis familiaris
atttcctagctgcaattgatatatg

SEQ ID NO: 15486 - DNA, 25 bp, Canis familiaris
atatacagctgacggtacattagtc

SEQ ID NO: 15487 - DNA, 25 bp, Canis familiaris
atattacaacgcggcagcattatga

SEQ ID NO: 15488 - DNA, 25 bp, Canis familiaris
attttcacactgcctcatgactgaa

SEQ ID NO: 15489 - DNA, 25 bp, Canis familiaris
atttattcgcagcctctgttatact

SEQ ID NO: 15490 - DNA, 25 bp, Canis familiaris
atatcatcatactgcctatcttata

SEQ ID NO: 15491 - DNA, 25 bp, Canis familiaris
atatcatattcttgccctgactagg

SEQ ID NO: 15492 - DNA, 25 bp, Canis familiaris
atttatatgctcccgcaaccagaga

SEQ ID NO: 15493 - DNA, 25 bp, Canis familiaris
atcttattccgagcattccagtaac

SEQ ID NO: 15494 - DNA, 25 bp, Canis familiaris
atcttattccgagcattccagtaac

SEQ ID NO: 15495 - DNA, 25 bp, Canis familiaris
atttattcctgagacacatagagaa

SEQ ID NO: 15496 - DNA, 25 bp, Canis familiaris
atttttgtctgaaacaatctgtgat

SEQ ID NO: 15497 - DNA, 25 bp, Canis familiaris
atttcatctgtcaaagcaagtttat

SEQ ID NO: 15498 - DNA, 25 bp, Canis familiaris
attttattttactagcatttcattt

SEQ ID NO: 15499 - DNA, 25 bp, Canis familiaris
attttttttctgtatcttgtctttg

SEQ ID NO: 15500 - DNA, 25 bp, Canis familiaris
attttctttatcttatgctggtgtg

SEQ ID NO: 15501 - DNA, 25 bp, Canis familiaris
attttctaattcttccatacttgtt

SEQ ID NO: 15502 - DNA, 25 bp, Canis familiaris
attttctatttcttcttgcatcatt

SEQ ID NO: 15503 - DNA, 25 bp, Canis familiaris
attttcagtattttctacataatat

SEQ ID NO: 15504 - DNA, 25 bp, Canis familiaris
attttagtcttgtccaatgctattt

SEQ ID NO: 15505 - DNA, 25 bp, Canis familiaris
atttggcaatgcagtccactgatag

SEQ ID NO: 15506 - DNA, 25 bp, Canis familiaris
atttagcattctcatacatcttggc

SEQ ID NO: 15507 - DNA, 25 bp, Canis familiaris
atttatgattggctacttgggctat

SEQ ID NO: 15508 - DNA, 25 bp, Canis familiaris
atttagattgtaccactcatgaagt

SEQ ID NO: 15509 - DNA, 25 bp, Canis familiaris
atttagccttggacccagcaattcc

SEQ ID NO: 15510 - DNA, 25 bp, Canis familiaris
attttcattttgaccacacacacac

SEQ ID NO: 15511 - DNA, 25 bp, Canis familiaris
atttattcgtcacacacacacgcac

SEQ ID NO: 15512 - DNA, 25 bp, Canis familiaris
atttatttgtctagtccaactccct

SEQ ID NO: 15513 - DNA, 25 bp, Canis familiaris
atttattttctattccatacctctg

SEQ ID NO: 15514 - DNA, 25 bp, Canis familiaris
attttttccatgtttcattgcctga

SEQ ID NO: 15515 - DNA, 25 bp, Canis familiaris
atttatccctcattttattgcctgg

SEQ ID NO: 15516 - DNA, 25 bp, Canis familiaris
atttgtcctgtcattctgttcaggc

SEQ ID NO: 15517 - DNA, 25 bp, Canis familiaris
atttcttgctgtattcttaggccac

SEQ ID NO: 15518 - DNA, 25 bp, Canis familiaris
atttctgagactttctcttagagtc

SEQ ID NO: 15519 - DNA, 25 bp, Canis familiaris
attttaactcattgtaatagctaag

SEQ ID NO: 15520 - DNA, 25 bp, Canis familiaris
atttctgaacctttaatggctgcta

SEQ ID NO: 15521 - DNA, 25 bp, Canis familiaris
attttacacactatattgatggcat

SEQ ID NO: 15522 - DNA, 25 bp, Canis familiaris
attttaacgtctactcatgtccatc

SEQ ID NO: 15523 - DNA, 25 bp, Canis familiaris
atttttacttctatgatgaccttgt

SEQ ID NO: 15524 - DNA, 25 bp, Canis familiaris
atttttattgtctttaagccagagt

SEQ ID NO: 15525 - DNA, 25 bp, Canis familiaris
atttttttatttcattgacactgat

SEQ ID NO: 15526 - DNA, 25 bp, Canis familiaris
attttttagtttactctacatgtat

SEQ ID NO: 15527 - DNA, 25 bp, Canis familiaris
atttaagtagatttcctcgagtgtg

SEQ ID NO: 15528 - DNA, 25 bp, Canis familiaris
attttagtaatcgtgtccgtgtgtg

SEQ ID NO: 15529 - DNA, 25 bp, Canis familiaris
atttaagaattcctgtcctctagag

SEQ ID NO: 15530 - DNA, 25 bp, Canis familiaris
atgtttggaaacttatgccctagaa

SEQ ID NO: 15531 - DNA, 25 bp, Canis familiaris
atttgggactacactgccctacagt

SEQ ID NO: 15532 - DNA, 25 bp, Canis familiaris
atttgggaggagagctggcccgggc

SEQ ID NO: 15533 - DNA, 25 bp, Canis familiaris
atttgtgcgatcattagggctccgg

SEQ ID NO: 15534 - DNA, 25 bp, Canis familiaris
atttgcctattttggtggactcacg

SEQ ID NO: 15535 - DNA, 25 bp, Canis familiaris
atttcctcattttctgaaagcacct

SEQ ID NO: 15536 - DNA, 25 bp, Canis familiaris
atttccttctaaatgcaaaccacat

SEQ ID NO: 15537 - DNA, 25 bp, Canis familiaris
atttccttaagcatatgacccacaa

SEQ ID NO: 15538 - DNA, 25 bp, Canis familiaris
atattgactacaaattaacccatac

SEQ ID NO: 15539 - DNA, 25 bp, Canis familiaris
atttactcactgaacttgacgcctc

SEQ ID NO: 15540 - DNA, 25 bp, Canis familiaris
atttcttcatcgacattttccttcc

SEQ ID NO: 15541 - DNA, 25 bp, Canis familiaris
atttcttcacgtttgtttgtaatct

SEQ ID NO: 15542 - DNA, 25 bp, Canis familiaris
atttcttgacttgtgtattgtagca

SEQ ID NO: 15543 - DNA, 25 bp, Canis familiaris
atttgagtaattgtgtatcgtcaga

SEQ ID NO: 15544 - DNA, 25 bp, Canis familiaris
atttagtgggctgatctaaccagaa

SEQ ID NO: 15545 - DNA, 25 bp, Canis familiaris
atttcggggcatgcactttgtcagt

SEQ ID NO: 15546 - DNA, 25 bp, Canis familiaris
atttctggacaggcagccgttccgt

SEQ ID NO: 15547 - DNA, 25 bp, Canis familiaris
atttcttggcaggactacattccag

SEQ ID NO: 15548 - DNA, 25 bp, Canis familiaris
atttccatgttaactccattccata

SEQ ID NO: 15549 - DNA, 25 bp, Canis familiaris
atttccatggttctgcttatttcaa

SEQ ID NO: 15550 - DNA, 25 bp, Canis familiaris
atttccttgttctatctatattcga

SEQ ID NO: 15551 - DNA, 25 bp, Canis familiaris
atttactctgtgacttctatatcca

SEQ ID NO: 15552 - DNA, 25 bp, Canis familiaris
atttgagctccaatcttcttgctcc

SEQ ID NO: 15553 - DNA, 25 bp, Canis familiaris
atttgcctccaatcatttgcttaag

SEQ ID NO: 15554 - DNA, 25 bp, Canis familiaris
atttgcccaccaatatttttagagg

SEQ ID NO: 15555 - DNA, 25 bp, Canis familiaris
atttcctcacttttttttatggctg

SEQ ID NO: 15556 - DNA, 25 bp, Canis familiaris
atttttccttacattcttatttgca

SEQ ID NO: 15557 - DNA, 25 bp, Canis familiaris
atttttcctgtatcattttactgta

SEQ ID NO: 15558 - DNA, 25 bp, Canis familiaris
atttttgccctatcatgttctgagt

SEQ ID NO: 15559 - DNA, 25 bp, Canis familiaris
atttttgtctgttttgctgtgggta

SEQ ID NO: 15560 - DNA, 25 bp, Canis familiaris
atattttgttctctttccggtgagt

SEQ ID NO: 15561 - DNA, 25 bp, Canis familiaris
atatagtgtgttactgtttcccgtg

SEQ ID NO: 15562 - DNA, 25 bp, Canis familiaris
atttttgtttgtccatacccaatgg

SEQ ID NO: 15563 - DNA, 25 bp, Canis familiaris
atttgtatattcaccaagcccaaga

SEQ ID NO: 15564 - DNA, 25 bp, Canis familiaris
attttatttattacgcacactacaa

SEQ ID NO: 15565 - DNA, 25 bp, Canis familiaris
atttctaatttttgcctaccactga

SEQ ID NO: 15566 - DNA, 25 bp, Canis familiaris
atttatcagatcaaaaccaacccgg

SEQ ID NO: 15567 - DNA, 25 bp, Canis familiaris
atttattgatcacacgcacacacac

SEQ ID NO: 15568 - DNA, 25 bp, Canis familiaris
atttattgtctctctgacgtgcctt

SEQ ID NO: 15569 - DNA, 25 bp, Canis familiaris
atttatctgacatttccacgtggtt

SEQ ID NO: 15570 - DNA, 25 bp, Canis familiaris
atttactcacattcacacgcgattg

SEQ ID NO: 15571 - DNA, 25 bp, Canis familiaris
atttcactctgatgccacctaatga

SEQ ID NO: 15572 - DNA, 25 bp, Canis familiaris
atttcattctgttgcataccttcac

SEQ ID NO: 15573 - DNA, 25 bp, Canis familiaris
attttttatttgacactgagcacca

SEQ ID NO: 15574 - DNA, 25 bp, Canis familiaris
atttctttgtgatacaggcagacca

SEQ ID NO: 15575 - DNA, 25 bp, Canis familiaris
atttctgttaaattcggccatcact

SEQ ID NO: 15576 - DNA, 25 bp, Canis familiaris
atttcttgtgcattaatctgaccat

SEQ ID NO: 15577 - DNA, 25 bp, Canis familiaris
atttttgtcatattctctgttaaaa

SEQ ID NO: 15578 - DNA, 25 bp, Canis familiaris
atttttgtcatatttctctcgttaa

SEQ ID NO: 15579 - DNA, 25 bp, Canis familiaris
atttatgtccacttttcctttgatt

SEQ ID NO: 15580 - DNA, 25 bp, Canis familiaris
atttattcatccttttaatttatgt

SEQ ID NO: 15581 - DNA, 25 bp, Canis familiaris
attttttcctattttatattcatgg

SEQ ID NO: 15582 - DNA, 25 bp, Canis familiaris
attttattctcatttttgctttcat

SEQ ID NO: 15583 - DNA, 25 bp, Canis familiaris
atttaatgctgctaactttgtgttt

SEQ ID NO: 15584 - DNA, 25 bp, Canis familiaris
atttattctgtgcacatttgtactt

SEQ ID NO: 15585 - DNA, 25 bp, Canis familiaris
atattttcatggtcacttgcatgta

SEQ ID NO: 15586 - DNA, 25 bp, Canis familiaris
atttcttcatggaacctcttctaca

SEQ ID NO: 15587 - DNA, 25 bp, Canis familiaris
atttgactcaagaacctcaccaaca

SEQ ID NO: 15588 - DNA, 25 bp, Canis familiaris
atattgaccaaatcttcggcctaaa

SEQ ID NO: 15589 - DNA, 25 bp, Canis familiaris
ataggccaaccatattcccttaagt

SEQ ID NO: 15590 - DNA, 25 bp, Canis familiaris
ataggatttcctttgtctccattat

SEQ ID NO: 15591 - DNA, 25 bp, Canis familiaris
atatttgccctttatgttcctattc

SEQ ID NO: 15592 - DNA, 25 bp, Canis familiaris
atattcaccctcaagacgattccat

SEQ ID NO: 15593 - DNA, 25 bp, Canis familiaris
atattacccctagatattatcatat

SEQ ID NO: 15594 - DNA, 25 bp, Canis familiaris
atttagctccctggtaattcatctt

SEQ ID NO: 15595 - DNA, 25 bp, Canis familiaris
atttagtcgtgtgccaaatggcttg

SEQ ID NO: 15596 - DNA, 25 bp, Canis familiaris
atttatgtttgccccaagatgagtt

SEQ ID NO: 15597 - DNA, 25 bp, Canis familiaris
atttctggttgctccatatggactt

SEQ ID NO: 15598 - DNA, 25 bp, Canis familiaris
atttttgttcaagcattagcctcat

SEQ ID NO: 15599 - DNA, 25 bp, Canis familiaris
atttttgatgtcttaattacttctt

SEQ ID NO: 15600 - DNA, 25 bp, Canis familiaris
atttttatccattacaataatttct

SEQ ID NO: 15601 - DNA, 25 bp, Canis familiaris
atttattacgcacactaccatttca

SEQ ID NO: 15602 - DNA, 25 bp, Canis familiaris
atttattacgcacactacaatttca

SEQ ID NO: 15603 - DNA, 25 bp, Canis familiaris
atttatatacctcctctctatattt

SEQ ID NO: 15604 - DNA, 25 bp, Canis familiaris
atttattatcacttgcctattctca

SEQ ID NO: 15605 - DNA, 25 bp, Canis familiaris
atttacacatcctcagattgtgcca

SEQ ID NO: 15606 - DNA, 25 bp, Canis familiaris
atttcacactccatatgtgttcctc

SEQ ID NO: 15607 - DNA, 25 bp, Canis familiaris
atttacactgacccagtgctcattt

SEQ ID NO: 15608 - DNA, 25 bp, Canis familiaris
atttacaatcttcaggccatatgtt

SEQ ID NO: 15609 - DNA, 25 bp, Canis familiaris
atttctaaatctccagtgccaagtg

SEQ ID NO: 15610 - DNA, 25 bp, Canis familiaris
atttctaacttggcagcatgacaaa

SEQ ID NO: 15611 - DNA, 25 bp, Canis familiaris
atttgcgctccaacaagatgaaaga

SEQ ID NO: 15612 - DNA, 25 bp, Canis familiaris
atttggctgccaacagagggaagaa

SEQ ID NO: 15613 - DNA, 25 bp, Canis familiaris
atttgccactatatgaggggatgcc

SEQ ID NO: 15614 - DNA, 25 bp, Canis familiaris
atattgctccttgaagggagaccgg

SEQ ID NO: 15615 - DNA, 25 bp, Canis familiaris
atttatccttcctaccgtgaaacag

SEQ ID NO: 15616 - DNA, 25 bp, Canis familiaris
atttttcgatcctctcctaatataa

SEQ ID NO: 15617 - DNA, 25 bp, Canis familiaris
atttttcttgcctctcaattttgaa

SEQ ID NO: 15618 - DNA, 25 bp, Canis familiaris
atttttctcttcactggatgtttat

SEQ ID NO: 15619 - DNA, 25 bp, Canis familiaris
atttttcctctctacatcatgattt

SEQ ID NO: 15620 - DNA, 25 bp, Canis familiaris
atttttgctttcttatgtgactctt

SEQ ID NO: 15621 - DNA, 25 bp, Canis familiaris
atttttctcaaattcatgtgtcatt

SEQ ID NO: 15622 - DNA, 25 bp, Canis familiaris
atttctgccagcaagaacatttctg

SEQ ID NO: 15623 - DNA, 25 bp, Canis familiaris
atttctgctcatacaagactacttg

SEQ ID NO: 15624 - DNA, 25 bp, Canis familiaris
atttctctcaaaacctagctatccc

SEQ ID NO: 15625 - DNA, 25 bp, Canis familiaris
atttctccagtaacatcacacatat

SEQ ID NO: 15626 - DNA, 25 bp, Canis familiaris
atttgtaatgaaatcctcaattttc

SEQ ID NO: 15627 - DNA, 25 bp, Canis familiaris
atttaagcatcatttcccagtttcc

SEQ ID NO: 15628 - DNA, 25 bp, Canis familiaris
atatcataagcatttttcaagtttc

SEQ ID NO: 15629 - DNA, 25 bp, Canis familiaris
atttcaatgttttatcctgattttt

SEQ ID NO: 15630 - DNA, 25 bp, Canis familiaris
atttaatttggtacctctgctcctt

SEQ ID NO: 15631 - DNA, 25 bp, Canis familiaris
atttgatttttcaaggcctcccata

SEQ ID NO: 15632 - DNA, 25 bp, Canis familiaris
atttctttttcatttgacatgggcc

SEQ ID NO: 15633 - DNA, 25 bp, Canis familiaris
atttatattcgtaattcactgggac

SEQ ID NO: 15634 - DNA, 25 bp, Canis familiaris
atatgaatacgccaattctaccggg

SEQ ID NO: 15635 - DNA, 25 bp, Canis familiaris
atataaacgccctttgcatgcgctc

SEQ ID NO: 15636 - DNA, 25 bp, Canis familiaris
atataaactcatggtcctgcgtgac

SEQ ID NO: 15637 - DNA, 25 bp, Canis familiaris
atataataccttcctctctgtaaac

SEQ ID NO: 15638 - DNA, 25 bp, Canis familiaris
atatatatacacaggccttcattgc

SEQ ID NO: 15639 - DNA, 25 bp, Canis familiaris
atttgaagatgacatcacttactgg

SEQ ID NO: 15640 - DNA, 25 bp, Canis familiaris
atctagatcaagtggacattacatg

SEQ ID NO: 15641 - DNA, 25 bp, Canis familiaris
atatagccaaactgaatgtccaaag

SEQ ID NO: 15642 - DNA, 25 bp, Canis familiaris
atgtaccaaaaccatttgccagtgg

SEQ ID NO: 15643 - DNA, 25 bp, Canis familiaris
ataccacaggtagactgtccagttg

SEQ ID NO: 15644 - DNA, 25 bp, Canis familiaris
ataccacggtcgtctgtggaccttg

SEQ ID NO: 15645 - DNA, 25 bp, Canis familiaris
atagtcgcgaggcactgtggactcc

SEQ ID NO: 15646 - DNA, 25 bp, Canis familiaris
atatttggagggctgtagcaaccgg

SEQ ID NO: 15647 - DNA, 25 bp, Canis familiaris
atattccaagggcttagaactcacc

SEQ ID NO: 15648 - DNA, 25 bp, Canis familiaris
atttccagggtgcatgaaaggtcgc

SEQ ID NO: 15649 - DNA, 25 bp, Canis familiaris
atttccaaggcacgatggcttggtc

SEQ ID NO: 15650 - DNA, 25 bp, Canis familiaris
atttctttggggtccttgtgtcgat

SEQ ID NO: 15651 - DNA, 25 bp, Canis familiaris
atagtggttggtggttgttggttgt

SEQ ID NO: 15652 - DNA, 25 bp, Canis familiaris
atatagctgttgcgagttttttttt

SEQ ID NO: 15653 - DNA, 25 bp, Canis familiaris
atatgagatgcttggagagggtcta

SEQ ID NO: 15654 - DNA, 25 bp, Canis familiaris
atttgcagcttgcggcggaatcaca

SEQ ID NO: 15655 - DNA, 25 bp, Canis familiaris
atatatgcaattgattcttgaacaa

SEQ ID NO: 15656 - DNA, 25 bp, Canis familiaris
atatataaagaactcattcaactca

SEQ ID NO: 15657 - DNA, 25 bp, Canis familiaris
atttgatctcaattatgttccacta

SEQ ID NO: 15658 - DNA, 25 bp, Canis familiaris
atttcattaatatttctgccagcaa

SEQ ID NO: 15659 - DNA, 25 bp, Canis familiaris
atatctttgatccaagtccccagat

SEQ ID NO: 15660 - DNA, 25 bp, Canis familiaris
atttgagtgacgtaatcccaatgct

SEQ ID NO: 15661 - DNA, 25 bp, Canis familiaris
atttcagtgagattaatccccgcat

SEQ ID NO: 15662 - DNA, 25 bp, Canis familiaris
atttatgtagtttacctccaagagg

SEQ ID NO: 15663 - DNA, 25 bp, Canis familiaris
atttataacttacccttgaagacag

SEQ ID NO: 15664 - DNA, 25 bp, Canis familiaris
atatttcaactttactcttctagcc

SEQ ID NO: 15665 - DNA, 25 bp, Canis familiaris
atttgccaaattttctgcttacatc

SEQ ID NO: 15666 - DNA, 25 bp, Canis familiaris
atttctatcaatgtggctttaaccc

SEQ ID NO: 15667 - DNA, 25 bp, Canis familiaris
atatttacagtgttggttaaagcaa

SEQ ID NO: 15668 - DNA, 25 bp, Canis familiaris
atttgctgcccgtggttatcagtaa

SEQ ID NO: 15669 - DNA, 25 bp, Canis familiaris
atttccccagatcttctcatagtaa

SEQ ID NO: 15670 - DNA, 25 bp, Canis familiaris
atttcccacagattttttcaaacat

SEQ ID NO: 15671 - DNA, 25 bp, Canis familiaris
atttccaccagcgtgtattcaacac

SEQ ID NO: 15672 - DNA, 25 bp, Canis familiaris
atctctacaccaggattaccggact

SEQ ID NO: 15673 - DNA, 25 bp, Canis familiaris
atcttctaggggaaaacactgacga

SEQ ID NO: 15674 - DNA, 25 bp, Canis familiaris
atcttctagggaaaacacctgacga

SEQ ID NO: 15675 - DNA, 25 bp, Canis familiaris
atttgtagtgacagcaccacctggc

SEQ ID NO: 15676 - DNA, 25 bp, Canis familiaris
atttccaggaaagtcccctgagctg

SEQ ID NO: 15677 - DNA, 25 bp, Canis familiaris
atttcaattgaggaaccacttgacc

SEQ ID NO: 15678 - DNA, 25 bp, Canis familiaris
atttaaaatatgccaccacgtgtcc

SEQ ID NO: 15679 - DNA, 25 bp, Canis familiaris
atttataaatatccacacgtgtcca

SEQ ID NO: 15680 - DNA, 25 bp, Canis familiaris
atatcttaactgtagccaaggaccc

SEQ ID NO: 15681 - DNA, 25 bp, Canis familiaris
atattttatgcaacacctgggaccc

SEQ ID NO: 15682 - DNA, 25 bp, Canis familiaris
atattggtgtgtacactcgggccct

SEQ ID NO: 15683 - DNA, 25 bp, Canis familiaris
atttgagggatccctggctggcaca

SEQ ID NO: 15684 - DNA, 25 bp, Canis familiaris
atttatgggaggactgtggccagag

SEQ ID NO: 15685 - DNA, 25 bp, Canis familiaris
atttagtggagatctgtggcacgag

SEQ ID NO: 15686 - DNA, 25 bp, Canis familiaris
atttactatagacctgtgacacaca

SEQ ID NO: 15687 - DNA, 25 bp, Canis familiaris
atatctttatactttggtcatcaca

SEQ ID NO: 15688 - DNA, 25 bp, Canis familiaris
atatttttacttctctataaaggct

SEQ ID NO: 15689 - DNA, 25 bp, Canis familiaris
aattgttcatcctccttaaaagttg

SEQ ID NO: 15690 - DNA, 25 bp, Canis familiaris
atattgtttaagaccgtagctatag

SEQ ID NO: 15691 - DNA, 25 bp, Canis familiaris
atattttctaatacctggagccaag

SEQ ID NO: 15692 - DNA, 25 bp, Canis familiaris
atttatcattagtacctgggaccag

SEQ ID NO: 15693 - DNA, 25 bp, Canis familiaris
atttgatcatgttattcctggggaa

SEQ ID NO: 15694 - DNA, 25 bp, Canis familiaris
atatgctaatgtttggactcaggga

SEQ ID NO: 15695 - DNA, 25 bp, Canis familiaris
atagctcactttgggcccagtagga

SEQ ID NO: 15696 - DNA, 25 bp, Canis familiaris
atactcttttgggcaaggtgggaga

SEQ ID NO: 15697 - DNA, 25 bp, Canis familiaris
atatcctttcgacaaagtcaagaga

SEQ ID NO: 15698 - DNA, 25 bp, Canis familiaris
atttctttggttcagatgtcacaca

SEQ ID NO: 15699 - DNA, 25 bp, Canis familiaris
atttctgttttttaagtcactcaca

SEQ ID NO: 15700 - DNA, 25 bp, Canis familiaris
atttgtgatgtctgtaaagtgtaac

SEQ ID NO: 15701 - DNA, 25 bp, Canis familiaris
atttaatgctctttacataaaaaat

SEQ ID NO: 15702 - DNA, 25 bp, Canis familiaris
atatctatacctttacatctggaat

SEQ ID NO: 15703 - DNA, 25 bp, Canis familiaris
atttcatagctcagtagctgataat

SEQ ID NO: 15704 - DNA, 25 bp, Canis familiaris
atttcagagctatgagaatgcttct

SEQ ID NO: 15705 - DNA, 25 bp, Canis familiaris
atttcacgctcattatatcatattc

SEQ ID NO: 15706 - DNA, 25 bp, Canis familiaris
atttacctaaaactatctctatgca

SEQ ID NO: 15707 - DNA, 25 bp, Canis familiaris
atttcccttaaattctgcttctgaa

SEQ ID NO: 15708 - DNA, 25 bp, Canis familiaris
atttgccagctttaaatcagcaggt

SEQ ID NO: 15709 - DNA, 25 bp, Canis familiaris
atttgcagcactgtaacacccttca

SEQ ID NO: 15710 - DNA, 25 bp, Canis familiaris
atttctgctttattaaccacttcac

SEQ ID NO: 15711 - DNA, 25 bp, Canis familiaris
atttctctccattccaaggagctta

SEQ ID NO: 15712 - DNA, 25 bp, Canis familiaris
atttgctgctccatctcaaggaagt

SEQ ID NO: 15713 - DNA, 25 bp, Canis familiaris
atttgctacccttccagagatattt

SEQ ID NO: 15714 - DNA, 25 bp, Canis familiaris
atttgatgacacattcccagcgatc

SEQ ID NO: 15715 - DNA, 25 bp, Canis familiaris
atttgcaaccagaatgctctagttc

SEQ ID NO: 15716 - DNA, 25 bp, Canis familiaris
atttgcacaaagctctcacgtatct

SEQ ID NO: 15717 - DNA, 25 bp, Canis familiaris
atttgtagtgtgctctccatgtatc

SEQ ID NO: 15718 - DNA, 25 bp, Canis familiaris
atatttagcgcaggctctctatttc

SEQ ID NO: 15719 - DNA, 25 bp, Canis familiaris
atttctaggcagactctcttacttg

SEQ ID NO: 15720 - DNA, 25 bp, Canis familiaris
atttctagcattttcatttgacttt

SEQ ID NO: 15721 - DNA, 25 bp, Canis familiaris
atttctcagctgcagtttctcaact

SEQ ID NO: 15722 - DNA, 25 bp, Canis familiaris
atttctggtcaacgttctatgtcat

SEQ ID NO: 15723 - DNA, 25 bp, Canis familiaris
atttgggacaagctcatctttgcaa

SEQ ID NO: 15724 - DNA, 25 bp, Canis familiaris
atttgtagaaaccctcttctgccat

SEQ ID NO: 15725 - DNA, 25 bp, Canis familiaris
atttctaaagactgtattgctgtaa

SEQ ID NO: 15726 - DNA, 25 bp, Canis familiaris
atattttaaatctctttgcatgtat

SEQ ID NO: 15727 - DNA, 25 bp, Canis familiaris
atttcttaaatgttcttgtctggct

SEQ ID NO: 15728 - DNA, 25 bp, Canis familiaris
atattcttgaaattttagttggcta

SEQ ID NO: 15729 - DNA, 25 bp, Canis familiaris
atttcttacaacaccatttgggcta

SEQ ID NO: 15730 - DNA, 25 bp, Canis familiaris
atttcttcacatgtaatctttgagg

SEQ ID NO: 15731 - DNA, 25 bp, Canis familiaris
atttctacattgttttctgtggaga

SEQ ID NO: 15732 - DNA, 25 bp, Canis familiaris
atttcaggattattactctcaggga

SEQ ID NO: 15733 - DNA, 25 bp, Canis familiaris
atttcaggattgttcctgctctgtg

SEQ ID NO: 15734 - DNA, 25 bp, Canis familiaris
atttcagtgttgtattttccttaat

SEQ ID NO: 15735 - DNA, 25 bp, Canis familiaris
aggtcactgttctcttaccaaaaga

SEQ ID NO: 15736 - DNA, 25 bp, Canis familiaris
atattccgatattttgtaccaaaca

SEQ ID NO: 15737 - DNA, 25 bp, Canis familiaris
atttctggcaagtttctacatgaaa

SEQ ID NO: 15738 - DNA, 25 bp, Canis familiaris
atttctccaaatttgtagcagtgta

SEQ ID NO: 15739 - DNA, 25 bp, Canis familiaris
atattccaaatttagaaggcttaag

SEQ ID NO: 15740 - DNA, 25 bp, Canis familiaris
atttccaaatgacaacgcactcgtg

SEQ ID NO: 15741 - DNA, 25 bp, Canis familiaris
atttcttcaagacaaccattctctt

SEQ ID NO: 15742 - DNA, 25 bp, Canis familiaris
ataccttcaagcccttaattcactt

SEQ ID NO: 15743 - DNA, 25 bp, Canis familiaris
atatccattaagtccttactgatag

SEQ ID NO: 15744 - DNA, 25 bp, Canis familiaris
atcgaattaaacggattcattttga

SEQ ID NO: 15745 - DNA, 25 bp, Canis familiaris
atcaattggaaaccggtctcttatt

SEQ ID NO: 15746 - DNA, 25 bp, Canis familiaris
ataccaggaactccaggttctcttc

SEQ ID NO: 15747 - DNA, 25 bp, Canis familiaris
ataccagtccctggggctgtgtttc

SEQ ID NO: 15748 - DNA, 25 bp, Canis familiaris
atttgagtctcctggtgtgcatgct

SEQ ID NO: 15749 - DNA, 25 bp, Canis familiaris
atttggacctgtacctgatgcactg

SEQ ID NO: 15750 - DNA, 25 bp, Canis familiaris
atttgtccactgactcattacctgc

SEQ ID NO: 15751 - DNA, 25 bp, Canis familiaris
atatatgaccacgctcacccgcatg

SEQ ID NO: 15752 - DNA, 25 bp, Canis familiaris
atttcagccaatatgcacacctagc

SEQ ID NO: 15753 - DNA, 25 bp, Canis familiaris
atttgctgtcatttgtctcacacat

SEQ ID NO: 15754 - DNA, 25 bp, Canis familiaris
atttgtgtcagcttcacacacacac

SEQ ID NO: 15755 - DNA, 25 bp, Canis familiaris
atattgtcatcaccatccgtaatgc

SEQ ID NO: 15756 - DNA, 25 bp, Canis familiaris
atttgtatccaaggtgctgaatctt

SEQ ID NO: 15757 - DNA, 25 bp, Canis familiaris
atttgttcctggtggtagcttgtcc

SEQ ID NO: 15758 - DNA, 25 bp, Canis familiaris
atttctttcaggtggacaatttact

SEQ ID NO: 15759 - DNA, 25 bp, Canis familiaris
atttcttggaagggtacataccaca

SEQ ID NO: 15760 - DNA, 25 bp, Canis familiaris
atttcctggacagaaacatatcccc

SEQ ID NO: 15761 - DNA, 25 bp, Canis familiaris
atttcctggtatgacaatgaatacg

SEQ ID NO: 15762 - DNA, 25 bp, Canis familiaris
atttccagggacaacaacaacacac

SEQ ID NO: 15763 - DNA, 25 bp, Canis familiaris
atattctcattgccaaaacaccacc

SEQ ID NO: 15764 - DNA, 25 bp, Canis familiaris
atattatcactaccaatcactaaca

SEQ ID NO: 15765 - DNA, 25 bp, Canis familiaris
atattaatgatccaccagtctacaa

SEQ ID NO: 15766 - DNA, 25 bp, Canis familiaris
atatcgtgtgcaccagggtctacgt

SEQ ID NO: 15767 - DNA, 25 bp, Canis familiaris
atatcacatgtggccaagctataac

SEQ ID NO: 15768 - DNA, 25 bp, Canis familiaris
atttcaggtcaaatgtatcaactgg

SEQ ID NO: 15769 - DNA, 25 bp, Canis familiaris
atttcagtggaattttgcacatgtg

SEQ ID NO: 15770 - DNA, 25 bp, Canis familiaris
atttctggcgtttttgtcatgttct

SEQ ID NO: 15771 - DNA, 25 bp, Canis familiaris
atttcttgaggttctgtgtgtgtgt

SEQ ID NO: 15772 - DNA, 25 bp, Canis familiaris
atttcattggtttcatgatttcatt

SEQ ID NO: 15773 - DNA, 25 bp, Canis familiaris
atttcttcttgcatcattttcaatt

SEQ ID NO: 15774 - DNA, 25 bp, Canis familiaris
atttcataattcactgatctatcaa

SEQ ID NO: 15775 - DNA, 25 bp, Canis familiaris
atttctagaccaagtttatcattta

SEQ ID NO: 15776 - DNA, 25 bp, Canis familiaris
atttgtaacttacctattcatttag

SEQ ID NO: 15777 - DNA, 25 bp, Canis familiaris
atatagtaattttgtgtttttaatg

SEQ ID NO: 15778 - DNA, 25 bp, Canis familiaris
atatcgatcacctgggtttctttat

SEQ ID NO: 15779 - DNA, 25 bp, Canis familiaris
atattgtcactatagggctcttttt

SEQ ID NO: 15780 - DNA, 25 bp, Canis familiaris
atatgaagcctttaccctgttggtt

SEQ ID NO: 15781 - DNA, 25 bp, Canis familiaris
atataacctttgtcctttcatcagt

SEQ ID NO: 15782 - DNA, 25 bp, Canis familiaris
atatacccatatttgtcttaatagc

SEQ ID NO: 15783 - DNA, 25 bp, Canis familiaris
atatatccactcaaaggttctcaag

SEQ ID NO: 15784 - DNA, 25 bp, Canis familiaris
atttccactttacatacatctcatt

SEQ ID NO: 15785 - DNA, 25 bp, Canis familiaris
atttctacttcatatgaggactcaa

SEQ ID NO: 15786 - DNA, 25 bp, Canis familiaris
atatttctttgctgagagcgcctaa

SEQ ID NO: 15787 - DNA, 25 bp, Canis familiaris
atattctccttaactagagcctata

SEQ ID NO: 15788 - DNA, 25 bp, Canis familiaris
atttctcatttcttctgtgatcctt

SEQ ID NO: 15789 - DNA, 25 bp, Canis familiaris
atattccttccattcttactggtga

SEQ ID NO: 15790 - DNA, 25 bp, Canis familiaris
atttctcttcaagtttagctgtttg

SEQ ID NO: 15791 - DNA, 25 bp, Canis familiaris
atttctctatcttgctgtccagaat

SEQ ID NO: 15792 - DNA, 25 bp, Canis familiaris
atttgctctcttttggtcagtttct

SEQ ID NO: 15793 - DNA, 25 bp, Canis familiaris
atttgctcctgttttgctaatgata

SEQ ID NO: 15794 - DNA, 25 bp, Canis familiaris
atatttccatgaagctttgacataa

SEQ ID NO: 15795 - DNA, 25 bp, Canis familiaris
atattgtcctcagctgttgataccc

SEQ ID NO: 15796 - DNA, 25 bp, Canis familiaris
atatgatgtcctagaagctttaact

SEQ ID NO: 15797 - DNA, 25 bp, Canis familiaris
atttgactttgaggccccaacattc

SEQ ID NO: 15798 - DNA, 25 bp, Canis familiaris
atttcactaatattgactacaaatt

SEQ ID NO: 15799 - DNA, 25 bp, Canis familiaris
atttcactatatatgtctcacccgt

SEQ ID NO: 15800 - DNA, 25 bp, Canis familiaris
atttctcataatattctgccttgct

SEQ ID NO: 15801 - DNA, 25 bp, Canis familiaris
atttctgaaaatatctctctctctc

SEQ ID NO: 15802 - DNA, 25 bp, Canis familiaris
atttctggatacattcttatttctt

SEQ ID NO: 15803 - DNA, 25 bp, Canis familiaris
atttcatgagatttgcttttttttt

SEQ ID NO: 15804 - DNA, 25 bp, Canis familiaris
atttcatttttaattcatctttatg

SEQ ID NO: 15805 - DNA, 25 bp, Canis familiaris
atatttatttgtattcccttcgctc

SEQ ID NO: 15806 - DNA, 25 bp, Canis familiaris
atattgtttaattttccctgctggg

SEQ ID NO: 15807 - DNA, 25 bp, Canis familiaris
atttcttctatgtatttcttctgct

SEQ ID NO: 15808 - DNA, 25 bp, Canis familiaris
cccctttatggtgtctgtactttga

SEQ ID NO: 15809 - DNA, 25 bp, Canis familiaris
atccctaccggtgtctaaaattcag

SEQ ID NO: 15810 - DNA, 25 bp, Canis familiaris
agccccccttgatcactaaaagata

SEQ ID NO: 15811 - DNA, 25 bp, Canis familiaris
atatttcccctatttcttagaagat

SEQ ID NO: 15812 - DNA, 25 bp, Canis familiaris
atttctcccttcaaatctgatagta

SEQ ID NO: 15813 - DNA, 25 bp, Canis familiaris
atttctccccaaaatctgtcaatcc

SEQ ID NO: 15814 - DNA, 25 bp, Canis familiaris
atttgggcccaaatttggcgcatac

SEQ ID NO: 15815 - DNA, 25 bp, Canis familiaris
atatggtcgacctattagtgggcaa

SEQ ID NO: 15816 - DNA, 25 bp, Canis familiaris
atatgcgttacctaatggaggaaga

SEQ ID NO: 15817 - DNA, 25 bp, Canis familiaris
atatggttaatttgctttggagagt

SEQ ID NO: 15818 - DNA, 25 bp, Canis familiaris
ataggaggcactaagtttggatcat

SEQ ID NO: 15819 - DNA, 25 bp, Canis familiaris
atattgggcacaaattttagttatt

SEQ ID NO: 15820 - DNA, 25 bp, Canis familiaris
atttgcagtcacacatttgcttgtt

SEQ ID NO: 15821 - DNA, 25 bp, Canis familiaris
atttcatgtgtcacatcttcttctt

SEQ ID NO: 15822 - DNA, 25 bp, Canis familiaris
atttctgtgtattctcttgtgtcaa

SEQ ID NO: 15823 - DNA, 25 bp, Canis familiaris
atttgtgagtcacttgtttctgaag

SEQ ID NO: 15824 - DNA, 25 bp, Canis familiaris
atttgggtcattctgttctttgtag

SEQ ID NO: 15825 - DNA, 25 bp, Canis familiaris
atttgggcacttgtgtttcctgctt

SEQ ID NO: 15826 - DNA, 25 bp, Canis familiaris
atattgggaattctcttctcacctc

SEQ ID NO: 15827 - DNA, 25 bp, Canis familiaris
atattaaacctggtgcttctccctc

SEQ ID NO: 15828 - DNA, 25 bp, Canis familiaris
atttctataaccagacagtgccccg

SEQ ID NO: 15829 - DNA, 25 bp, Canis familiaris
atacaaataaccagccagtgccctc

SEQ ID NO: 15830 - DNA, 25 bp, Canis familiaris
ataccactaacactagtaccctcta

SEQ ID NO: 15831 - DNA, 25 bp, Canis familiaris
atcgtgacgataagatagtacgttc

SEQ ID NO: 15832 - DNA, 25 bp, Canis familiaris
atttgacatgggccacttgttgcta

SEQ ID NO: 15833 - DNA, 25 bp, Canis familiaris
atattgcgacagcccactatattca

SEQ ID NO: 15834 - DNA, 25 bp, Canis familiaris
atttgctaagacgaatttgctcatt

SEQ ID NO: 15835 - DNA, 25 bp, Canis familiaris
atttcatcctgactatattctccat

SEQ ID NO: 15836 - DNA, 25 bp, Canis familiaris
atttcatcatctttgaggctgctcc

SEQ ID NO: 15837 - DNA, 25 bp, Canis familiaris
atttccatatgttggtctgctctgc

SEQ ID NO: 15838 - DNA, 25 bp, Canis familiaris
atttctgctatttgtgtcagcttca

SEQ ID NO: 15839 - DNA, 25 bp, Canis familiaris
atatactccattggcgtgggcttct

SEQ ID NO: 15840 - DNA, 25 bp, Canis familiaris
atatatctactttgtgtttgcgact

SEQ ID NO: 15841 - DNA, 25 bp, Canis familiaris
atatatccctgattatttgggtttt

SEQ ID NO: 15842 - DNA, 25 bp, Canis familiaris
atttccctgatgattagtgatgttg

SEQ ID NO: 15843 - DNA, 25 bp, Canis familiaris
atttctcggattttcactgttcatg

SEQ ID NO: 15844 - DNA, 25 bp, Canis familiaris
atttctgcgagagctgtgcactgca

SEQ ID NO: 15845 - DNA, 25 bp, Canis familiaris
atttcgcaggaggctcctgcatgaa

SEQ ID NO: 15846 - DNA, 25 bp, Canis familiaris
atttccagaaatgccagataccctt

SEQ ID NO: 15847 - DNA, 25 bp, Canis familiaris
atcttaaaccccgagtaacatctat

SEQ ID NO: 15848 - DNA, 25 bp, Canis familiaris
atttgttacccttgactacacttga

SEQ ID NO: 15849 - DNA, 25 bp, Canis familiaris
atttgtctttctgtgactaacttat

SEQ ID NO: 15850 - DNA, 25 bp, Canis familiaris
atttgtctttccctgactgacttat

SEQ ID NO: 15851 - DNA, 25 bp, Canis familiaris
atattttcgtgtggtactactgatt

SEQ ID NO: 15852 - DNA, 25 bp, Canis familiaris
atttgtactatttaactgactattc

SEQ ID NO: 15853 - DNA, 25 bp, Canis familiaris
atttgaatcttttatggtcattttt

SEQ ID NO: 15854 - DNA, 25 bp, Canis familiaris
atttgttcatttttcctgttctgtt

SEQ ID NO: 15855 - DNA, 25 bp, Canis familiaris
atttgtatatagtatccggttccat

SEQ ID NO: 15856 - DNA, 25 bp, Canis familiaris
atttctatgaaatcgtcgcttcttg

SEQ ID NO: 15857 - DNA, 25 bp, Canis familiaris
atttctgtgaatttaccctttctgt

SEQ ID NO: 15858 - DNA, 25 bp, Canis familiaris
atttcattgactgaccacctttttt

SEQ ID NO: 15859 - DNA, 25 bp, Canis familiaris
atattattcttcaacgacatttttt

SEQ ID NO: 15860 - DNA, 25 bp, Canis familiaris
atttcttgctctcaccaattttttg

SEQ ID NO: 15861 - DNA, 25 bp, Canis familiaris
atttcttgcaccttccatattatgt

SEQ ID NO: 15862 - DNA, 25 bp, Canis familiaris
atattagtcttcttccataacatta

SEQ ID NO: 15863 - DNA, 25 bp, Canis familiaris
atatcctgactttccaaaaatttag

SEQ ID NO: 15864 - DNA, 25 bp, Canis familiaris
atacgagagctttctaggaaaacga

SEQ ID NO: 15865 - DNA, 25 bp, Canis familiaris
ataagggtgtgtgaagaattatggg

SEQ ID NO: 15866 - DNA, 25 bp, Canis familiaris
ataagcgctttgaaaagaaatttgt

SEQ ID NO: 15867 - DNA, 25 bp, Canis familiaris
atacaacatttgagccttaatttta

SEQ ID NO: 15868 - DNA, 25 bp, Canis familiaris
atataccttcaaagccttatttcat

SEQ ID NO: 15869 - DNA, 25 bp, Canis familiaris
atatactcctaacacttttgttcac

SEQ ID NO: 15870 - DNA, 25 bp, Canis familiaris
atataccaacaacactctttttgaa

SEQ ID NO: 15871 - DNA, 25 bp, Canis familiaris
atattcctggaataccctttctaat

SEQ ID NO: 15872 - DNA, 25 bp, Canis familiaris
atattaggcgcgaccacagcctttt

SEQ ID NO: 15873 - DNA, 25 bp, Canis familiaris
atattaacactaacatacgctccct

SEQ ID NO: 15874 - DNA, 25 bp, Canis familiaris
atttgacacagtcacaactgccatc

SEQ ID NO: 15875 - DNA, 25 bp, Canis familiaris
atttccacagtgtaatactcctatc

SEQ ID NO: 15876 - DNA, 25 bp, Canis familiaris
atacccagactgtgttacctactac

SEQ ID NO: 15877 - DNA, 25 bp, Canis familiaris
atcgtccgttgatgttccgtaggac

SEQ ID NO: 15878 - DNA, 25 bp, Canis familiaris
atagtgtagtattggtttcaggggt

SEQ ID NO: 15879 - DNA, 25 bp, Canis familiaris
ataggaagattctggcaaaggggca

SEQ ID NO: 15880 - DNA, 25 bp, Canis familiaris
atattaggttcaggtgcataaggga

SEQ ID NO: 15881 - DNA, 25 bp, Canis familiaris
atttgaggaatgttgctgcttagaa

SEQ ID NO: 15882 - DNA, 25 bp, Canis familiaris
atttggaagatcttgctgccattca

SEQ ID NO: 15883 - DNA, 25 bp, Canis familiaris
atttgtaacatctgctcgcattttt

SEQ ID NO: 15884 - DNA, 25 bp, Canis familiaris
atttctagatactaccagttcttta

SEQ ID NO: 15885 - DNA, 25 bp, Canis familiaris
atttctatgaaatcgcgcttcttga

SEQ ID NO: 15886 - DNA, 25 bp, Canis familiaris
atttctacaacaggagcgctgatat

SEQ ID NO: 15887 - DNA, 25 bp, Canis familiaris
atttgctagcataacatggcctggt

SEQ ID NO: 15888 - DNA, 25 bp, Canis familiaris
atttgtagcctacttgcacaggata

SEQ ID NO: 15889 - DNA, 25 bp, Canis familiaris
atttgaatgcaggactctgccccca

SEQ ID NO: 15890 - DNA, 25 bp, Canis familiaris
atttggagatgcttcatcccatccc

SEQ ID NO: 15891 - DNA, 25 bp, Canis familiaris
atttgcatgggcacatgcaccctcc

SEQ ID NO: 15892 - DNA, 25 bp, Canis familiaris
atattgatgaccacacagacctcgc

SEQ ID NO: 15893 - DNA, 25 bp, Canis familiaris
atatctgggtcatacagtaattcta

SEQ ID NO: 15894 - DNA, 25 bp, Canis familiaris
atttggctgatttacatgtcagttt

SEQ ID NO: 15895 - DNA, 25 bp, Canis familiaris
atttggccaacatcatctactattc

SEQ ID NO: 15896 - DNA, 25 bp, Canis familiaris
atttgggatctcacacatactacgc

SEQ ID NO: 15897 - DNA, 25 bp, Canis familiaris
atttgaaatctgctatctgccttcc

SEQ ID NO: 15898 - DNA, 25 bp, Canis familiaris
atattaaattgtttagccctggcaa

SEQ ID NO: 15899 - DNA, 25 bp, Canis familiaris
atattcacttttgtagcccattgct

SEQ ID NO: 15900 - DNA, 25 bp, Canis familiaris
atttgtcagtttgtagcctttgcta

SEQ ID NO: 15901 - DNA, 25 bp, Canis familiaris
atttgtccctgataacctttggagt

SEQ ID NO: 15902 - DNA, 25 bp, Canis familiaris
atatatgtcccttaaacacctggta

SEQ ID NO: 15903 - DNA, 25 bp, Canis familiaris
atttgtgtcctagattaccatgatt

SEQ ID NO: 15904 - DNA, 25 bp, Canis familiaris
atttgtttctactttgactatgact

SEQ ID NO: 15905 - DNA, 25 bp, Canis familiaris
atattttttagcagtgacattccct

SEQ ID NO: 15906 - DNA, 25 bp, Canis familiaris
atattttgttcaacgtcgcattccg

SEQ ID NO: 15907 - DNA, 25 bp, Canis familiaris
atatttgctggtgcacaattcttgc

SEQ ID NO: 15908 - DNA, 25 bp, Canis familiaris
atatttgcagtgacccaacctctgt

SEQ ID NO: 15909 - DNA, 25 bp, Canis familiaris
atatttattgaatacccactgtgtc

SEQ ID NO: 15910 - DNA, 25 bp, Canis familiaris
atatattagggatagtgtgcacttt

SEQ ID NO: 15911 - DNA, 25 bp, Canis familiaris
atttgtgtttgatagttcctgctgt

SEQ ID NO: 15912 - DNA, 25 bp, Canis familiaris
atttgtttggatctcattcccactg

SEQ ID NO: 15913 - DNA, 25 bp, Canis familiaris
atcttgggggctttattcacctgga

SEQ ID NO: 15914 - DNA, 25 bp, Canis familiaris
atttggcaggggttctatggaggga

SEQ ID NO: 15915 - DNA, 25 bp, Canis familiaris
atatctggcaggggatcctctagag

SEQ ID NO: 15916 - DNA, 25 bp, Canis familiaris
atatcctgcattgctgatgcccata

SEQ ID NO: 15917 - DNA, 25 bp, Canis familiaris
atatcactgtcttctgtgctatctg

SEQ ID NO: 15918 - DNA, 25 bp, Canis familiaris
atatgacttctgtctggctgagtgc

SEQ ID NO: 15919 - DNA, 25 bp, Canis familiaris
atttctgacatgctggtgattgagg

SEQ ID NO: 15920 - DNA, 25 bp, Canis familiaris
atatctatgaagcatgttgattggg

SEQ ID NO: 15921 - DNA, 25 bp, Canis familiaris
atatttggactttctattgacagta

SEQ ID NO: 15922 - DNA, 25 bp, Canis familiaris
atattctgcgtttggtactgatgag

SEQ ID NO: 15923 - DNA, 25 bp, Canis familiaris
atattacaggtaagctacaatggtt

SEQ ID NO: 15924 - DNA, 25 bp, Canis familiaris
atattaatggaatctccttcatgga

SEQ ID NO: 15925 - DNA, 25 bp, Canis familiaris
atatgtaatgaccaactgcctttcc

SEQ ID NO: 15926 - DNA, 25 bp, Canis familiaris
atattaagatatccagtccgtgacg

SEQ ID NO: 15927 - DNA, 25 bp, Canis familiaris
atttgaagaattctctcctggcaga

SEQ ID NO: 15928 - DNA, 25 bp, Canis familiaris
atttgaagggtgatctctctggcca

SEQ ID NO: 15929 - DNA, 25 bp, Canis familiaris
atattttgaggtatctccgtacata

SEQ ID NO: 15930 - DNA, 25 bp, Canis familiaris
atttgtcttaggaatgccccataat

SEQ ID NO: 15931 - DNA, 25 bp, Canis familiaris
atttgaccgaggaactctccatgat

SEQ ID NO: 15932 - DNA, 25 bp, Canis familiaris
atatggacgggactgccttgtatga

SEQ ID NO: 15933 - DNA, 25 bp, Canis familiaris
atttgccaggcagagagtgtgtatg

SEQ ID NO: 15934 - DNA, 25 bp, Canis familiaris
atttccaggacttctgtgtgtgtgc

SEQ ID NO: 15935 - DNA, 25 bp, Canis familiaris
atttccgtctctggtgtagctgatg

SEQ ID NO: 15936 - DNA, 25 bp, Canis familiaris
atatcccagactgggtccgctgtgc

SEQ ID NO: 15937 - DNA, 25 bp, Canis familiaris
atttccacactcattcacgttgtgt

SEQ ID NO: 15938 - DNA, 25 bp, Canis familiaris
atttccacctgttgtgagctttgtg

SEQ ID NO: 15939 - DNA, 25 bp, Canis familiaris
atttccacatgttctgtagcttaga

SEQ ID NO: 15940 - DNA, 25 bp, Canis familiaris
atattccgcatttgctgatacccca

SEQ ID NO: 15941 - DNA, 25 bp, Canis familiaris
atattagcagctgatgtgaaggtaa

SEQ ID NO: 15942 - DNA, 25 bp, Canis familiaris
atttgacagcccattatgatgtata

SEQ ID NO: 15943 - DNA, 25 bp, Canis familiaris
atttgtcagcatccttttgctctaa

SEQ ID NO: 15944 - DNA, 25 bp, Canis familiaris
atttgtcaattcttgctactccaga

SEQ ID NO: 15945 - DNA, 25 bp, Canis familiaris
atttgtcaataatttcctgtgctga

SEQ ID NO: 15946 - DNA, 25 bp, Canis familiaris
atatgtccatgaactttacgagcgt

SEQ ID NO: 15947 - DNA, 25 bp, Canis familiaris
atttcctccagagtatacgagagct

SEQ ID NO: 15948 - DNA, 25 bp, Canis familiaris
atttcccctcatgtatgtggcagta

SEQ ID NO: 15949 - DNA, 25 bp, Canis familiaris
atttgcccttatatcttagagctac

SEQ ID NO: 15950 - DNA, 25 bp, Canis familiaris
atattgctttttttcttgcaggttt

SEQ ID NO: 15951 - DNA, 25 bp, Canis familiaris
atttccattttatctctcaagcttt

SEQ ID NO: 15952 - DNA, 25 bp, Canis familiaris
atttccttctgaattctatcatact

SEQ ID NO: 15953 - DNA, 25 bp, Canis familiaris
atttccatctcttcagttgattccc

SEQ ID NO: 15954 - DNA, 25 bp, Canis familiaris
atagtccattcttaaagtacttagt

SEQ ID NO: 15955 - DNA, 25 bp, Canis familiaris
atatgtccttcttacgttacatgga

SEQ ID NO: 15956 - DNA, 25 bp, Canis familiaris
atttccctgcttttgttattgtata

SEQ ID NO: 15957 - DNA, 25 bp, Canis familiaris
atttccacatttatttttctttcat

SEQ ID NO: 15958 - DNA, 25 bp, Canis familiaris
atttccttatggaatctgttttctt

SEQ ID NO: 15959 - DNA, 25 bp, Canis familiaris
atttccttcagggcattgacttctc

SEQ ID NO: 15960 - DNA, 25 bp, Canis familiaris
atttccttcaagaattaactcatct

SEQ ID NO: 15961 - DNA, 25 bp, Canis familiaris
atttccttgaggtcatttgagctgt

SEQ ID NO: 15962 - DNA, 25 bp, Canis familiaris
atatttctaagccacattcatgact

SEQ ID NO: 15963 - DNA, 25 bp, Canis familiaris
atttgtataggccaaccatattccc

SEQ ID NO: 15964 - DNA, 25 bp, Canis familiaris
atttgtcatgagggaaatcaatgat

SEQ ID NO: 15965 - DNA, 25 bp, Canis familiaris
atgttccagcacggtagatcaatgt

SEQ ID NO: 15966 - DNA, 25 bp, Canis familiaris
atatctcaacggcctcggcaattgt

SEQ ID NO: 15967 - DNA, 25 bp, Canis familiaris
atgttcagccgggacgtctattttc

SEQ ID NO: 15968 - DNA, 25 bp, Canis familiaris
atttccgtgtaagttctatcatagt

SEQ ID NO: 15969 - DNA, 25 bp, Canis familiaris
atttcctgggaattctgtgatcatc

SEQ ID NO: 15970 - DNA, 25 bp, Canis familiaris
atttgctgtggggagtctgtcatgc

SEQ ID NO: 15971 - DNA, 25 bp, Canis familiaris
atttgcttggatggaggtggcccct

SEQ ID NO: 15972 - DNA, 25 bp, Canis familiaris
atttgttgaatgctggggacctcca

SEQ ID NO: 15973 - DNA, 25 bp, Canis familiaris
agagagtcggagctaaggtcccaca

SEQ ID NO: 15974 - DNA, 25 bp, Canis familiaris
atagcctcggggaagaagccaccca

SEQ ID NO: 15975 - DNA, 25 bp, Canis familiaris
atgaggctacggaaacaggccgaaa

SEQ ID NO: 15976 - DNA, 25 bp, Canis familiaris
atgaggctacggaaacaggccgaaa

SEQ ID NO: 15977 - DNA, 25 bp, Canis familiaris
atgaggctacggaaacaggccgaaa

SEQ ID NO: 15978 - DNA, 25 bp, Canis familiaris
ataggtaggtaattcgttggacaca

SEQ ID NO: 15979 - DNA, 25 bp, Canis familiaris
atttgtataaaactgctgtttacca

SEQ ID NO: 15980 - DNA, 25 bp, Canis familiaris
atttgtatctcctggctttgtaata

SEQ ID NO: 15981 - DNA, 25 bp, Canis familiaris
atatttactccagaagctgagaaat

SEQ ID NO: 15982 - DNA, 25 bp, Canis familiaris
atttgtacaccagactgccataaaa

SEQ ID NO: 15983 - DNA, 25 bp, Canis familiaris
atttgttcctcaggacggagtccat

SEQ ID NO: 15984 - DNA, 25 bp, Canis familiaris
atttgttctgaactgacaggaatct

SEQ ID NO: 15985 - DNA, 25 bp, Canis familiaris
atttgtttgcatttacttgatggtt

SEQ ID NO: 15986 - DNA, 25 bp, Canis familiaris
atttgtcttcttgaggatattattc

SEQ ID NO: 15987 - DNA, 25 bp, Canis familiaris
atttgctattttgcatgatcatact

SEQ ID NO: 15988 - DNA, 25 bp, Canis familiaris
atttgcttcatcctgttataacttt

SEQ ID NO: 15989 - DNA, 25 bp, Canis familiaris
atttgctcatcccataatatagttt

SEQ ID NO: 15990 - DNA, 25 bp, Canis familiaris
atttgactcctgtagattctgattc

SEQ ID NO: 15991 - DNA, 25 bp, Canis familiaris
atttgcctcctctatgtgttgataa

SEQ ID NO: 15992 - DNA, 25 bp, Canis familiaris
atttgctttctctgtggttcatgcc

SEQ ID NO: 15993 - DNA, 25 bp, Canis familiaris
atttgccttctggggtgttgatgcc

SEQ ID NO: 15994 - DNA, 25 bp, Canis familiaris
atttgtctgttgcctggtgttgtgt

SEQ ID NO: 15995 - DNA, 25 bp, Canis familiaris
atttgtgtttgtctgtgttgtttgt

SEQ ID NO: 15996 - DNA, 25 bp, Canis familiaris
atttgttctgagccaatttttgttt

SEQ ID NO: 15997 - DNA, 25 bp, Canis familiaris
atttgctcattaaacattttgttgt

SEQ ID NO: 15998 - DNA, 25 bp, Canis familiaris
atatctgtacaatgacactttttgc

SEQ ID NO: 15999 - DNA, 25 bp, Canis familiaris
atttgtgtctattctacattttggg

SEQ ID NO: 16000 - DNA, 25 bp, Canis familiaris
atttgttcttacatgcacttctggc

SEQ ID NO: 16001 - DNA, 25 bp, Canis familiaris
atttgtgttctgtcttactgctatg

SEQ ID NO: 16002 - DNA, 25 bp, Canis familiaris
atttgtgttgtttctactttatggc

SEQ ID NO: 16003 - DNA, 25 bp, Canis familiaris
atatatgtccgtttcccttacatag

SEQ ID NO: 16004 - DNA, 25 bp, Canis familiaris
atttgatcacttttccctttcataa

SEQ ID NO: 16005 - DNA, 25 bp, Canis familiaris
atttggatcttgttcactttctcta

SEQ ID NO: 16006 - DNA, 25 bp, Canis familiaris
atttgtacttgattttttctcacag

SEQ ID NO: 16007 - DNA, 25 bp, Canis familiaris
atattcatttagttgtagttgtcca

SEQ ID NO: 16008 - DNA, 25 bp, Canis familiaris
atatttcttgagtatcgctgttgtc

SEQ ID NO: 16009 - DNA, 25 bp, Canis familiaris
atatgctttaagaatcgatggggga

SEQ ID NO: 16010 - DNA, 25 bp, Canis familiaris
atacttcttgtttctgtgggggaat

SEQ ID NO: 16011 - DNA, 25 bp, Canis familiaris
atatttcttgtattctttagttgta

SEQ ID NO: 16012 - DNA, 25 bp, Canis familiaris
atacttctgatactacttgtacctg

SEQ ID NO: 16013 - DNA, 25 bp, Canis familiaris
atatatcttatacttttgtgaactg

SEQ ID NO: 16014 - DNA, 25 bp, Canis familiaris
atattatagcattcatctgtgtgta

SEQ ID NO: 16015 - DNA, 25 bp, Canis familiaris
atatcataagcacccttgaccaacc

SEQ ID NO: 16016 - DNA, 25 bp, Canis familiaris
atatgctaagctccctaggactcac

SEQ ID NO: 16017 - DNA, 25 bp, Canis familiaris
atatgtattctgtttcactaatcct

SEQ ID NO: 16018 - DNA, 25 bp, Canis familiaris
atataatctcttaacatccaccttc

SEQ ID NO: 16019 - DNA, 25 bp, Canis familiaris
atattttcttcatgcataatcacag

SEQ ID NO: 16020 - DNA, 25 bp, Canis familiaris
atatttccatccacaaacaacataa

SEQ ID NO: 16021 - DNA, 25 bp, Canis familiaris
atagtatccggcttcaagaccacga

SEQ ID NO: 16022 - DNA, 25 bp, Canis familiaris
atagtgtggggcgcggaccacatgg

SEQ ID NO: 16023 - DNA, 25 bp, Canis familiaris
gaaagttcgtcagcgggaactcgtt

SEQ ID NO: 16024 - DNA, 25 bp, Canis familiaris
aaaggatcgccatccggatcacggc

SEQ ID NO: 16025 - DNA, 25 bp, Canis familiaris
atatcaggacagcaactgggccagc

SEQ ID NO: 16026 - DNA, 25 bp, Canis familiaris
atatctggccgacgtggtggacagc

SEQ ID NO: 16027 - DNA, 25 bp, Canis familiaris
atagtcaccgaccggaggactgggt

SEQ ID NO: 16028 - DNA, 25 bp, Canis familiaris
atagtaacaggccggggagcctcca

SEQ ID NO: 16029 - DNA, 25 bp, Canis familiaris
atcgtaggacccaaaggacctcctg

SEQ ID NO: 16030 - DNA, 25 bp, Canis familiaris
acggaatacaaccaagggctacctg

SEQ ID NO: 16031 - DNA, 25 bp, Canis familiaris
ataggcaaaccacacagggctcact

SEQ ID NO: 16032 - DNA, 25 bp, Canis familiaris
atttgcacccaagaaggctgcctct

SEQ ID NO: 16033 - DNA, 25 bp, Canis familiaris
atattccccagaaaatgtcccacat

SEQ ID NO: 16034 - DNA, 25 bp, Canis familiaris
atattccacccagggagtcaccttt

SEQ ID NO: 16035 - DNA, 25 bp, Canis familiaris
atatgttccccaagagatggccctt

SEQ ID NO: 16036 - DNA, 25 bp, Canis familiaris
atatgtcccacgcggatgggttgtt

SEQ ID NO: 16037 - DNA, 25 bp, Canis familiaris
atcattgggggttgcgtgggttttg

SEQ ID NO: 16038 - DNA, 25 bp, Canis familiaris
ataagtggttcttcggggttgtctg

SEQ ID NO: 16039 - DNA, 25 bp, Canis familiaris
agaccgttttcagggacgctttgat

SEQ ID NO: 16040 - DNA, 25 bp, Canis familiaris
ataaccttttcgctggagttgtgaa

SEQ ID NO: 16041 - DNA, 25 bp, Canis familiaris
ataacccttaagagaagagtggaga

SEQ ID NO: 16042 - DNA, 25 bp, Canis familiaris
ataatccgacgatgtagaagggtca

SEQ ID NO: 16043 - DNA, 25 bp, Canis familiaris
atttgtccaggatgaagtagaggtc

SEQ ID NO: 16044 - DNA, 25 bp, Canis familiaris
atttgtcgctgaggccatagtcaat

SEQ ID NO: 16045 - DNA, 25 bp, Canis familiaris
atatttcacgatggcctaccaatgc

SEQ ID NO: 16046 - DNA, 25 bp, Canis familiaris
atatcatgtaccagcgccaacaact

SEQ ID NO: 16047 - DNA, 25 bp, Canis familiaris
ctgaatgattccacgtatacacttt

SEQ ID NO: 16048 - DNA, 25 bp, Canis familiaris
aaatatgtccttcttacgttacatg

SEQ ID NO: 16049 - DNA, 25 bp, Canis familiaris
ataataggacttcttgctcaattta

SEQ ID NO: 16050 - DNA, 25 bp, Canis familiaris
atacttggaagccgtactgccagct

SEQ ID NO: 16051 - DNA, 25 bp, Canis familiaris
atacaggtaagggtaccgagctcga

SEQ ID NO: 16052 - DNA, 25 bp, Canis familiaris
ataagcctatagcttgactccctgg

SEQ ID NO: 16053 - DNA, 25 bp, Canis familiaris
atataatgctgaaggggaccactct

SEQ ID NO: 16054 - DNA, 25 bp, Canis familiaris
atattcacctagcaacatatcctcg

SEQ ID NO: 16055 - DNA, 25 bp, Canis familiaris
ataggcaccattgagcaacactccg

SEQ ID NO: 16056 - DNA, 25 bp, Canis familiaris
ataggcggcagtaggctgagcacca

SEQ ID NO: 16057 - DNA, 25 bp, Canis familiaris
ataggttcggagctggcattctcta

SEQ ID NO: 16058 - DNA, 25 bp, Canis familiaris
atatgttccaggcagtatctttcta

SEQ ID NO: 16059 - DNA, 25 bp, Canis familiaris
atatgttccgtcggttaccttacat

SEQ ID NO: 16060 - DNA, 25 bp, Canis familiaris
atagacccgggtctacactcatttt

SEQ ID NO: 16061 - DNA, 25 bp, Canis familiaris
ataaatccgtgagcaaaatcctttt

SEQ ID NO: 16062 - DNA, 25 bp, Canis familiaris
atacgtcctatacgcaaaaggtgtt

SEQ ID NO: 16063 - DNA, 25 bp, Canis familiaris
atacgtggcttgtggatgaaggtca

SEQ ID NO: 16064 - DNA, 25 bp, Canis familiaris
atactttctttgggtgtcaggctct

SEQ ID NO: 16065 - DNA, 25 bp, Canis familiaris
atatttatttgtggtctgtaatgca

SEQ ID NO: 16066 - DNA, 25 bp, Canis familiaris
atattttgtttcccatgaccatgat

SEQ ID NO: 16067 - DNA, 25 bp, Canis familiaris
atttgttataattaatgagccatca

SEQ ID NO: 16068 - DNA, 25 bp, Canis familiaris
atttgattattttcttgtcccaagt

SEQ ID NO: 16069 - DNA, 25 bp, Canis familiaris
atttgcatttttacctgaaccagag

SEQ ID NO: 16070 - DNA, 25 bp, Canis familiaris
atattttcttaaactaaagcatgta

SEQ ID NO: 16071 - DNA, 25 bp, Canis familiaris
atttggtttaacattgatcagcata

SEQ ID NO: 16072 - DNA, 25 bp, Canis familiaris
atttgacgttatccttttatgacaa

SEQ ID NO: 16073 - DNA, 25 bp, Canis familiaris
atttgcactgcatttgtcatttgtt

SEQ ID NO: 16074 - DNA, 25 bp, Canis familiaris
atttgcactgatttttaagtctgat

SEQ ID NO: 16075 - DNA, 25 bp, Canis familiaris
atttgcctttgtctgaactatgggt

SEQ ID NO: 16076 - DNA, 25 bp, Canis familiaris
atttgtgctgtgttgtgtgatactt

SEQ ID NO: 16077 - DNA, 25 bp, Canis familiaris
atattgtgtgtcgtgtgtatgtgtg

SEQ ID NO: 16078 - DNA, 25 bp, Canis familiaris
atatgtcagctactgtctgtctggg

SEQ ID NO: 16079 - DNA, 25 bp, Canis familiaris
atatgcatgggggtctgatctcaga

SEQ ID NO: 16080 - DNA, 25 bp, Canis familiaris
atatgcagatgcagagtcctctcag

SEQ ID NO: 16081 - DNA, 25 bp, Canis familiaris
atatgcgagcaaagcattctcatca

SEQ ID NO: 16082 - DNA, 25 bp, Canis familiaris
atatggcacagatatcgtcatcaga

SEQ ID NO: 16083 - DNA, 25 bp, Canis familiaris
atatggctcagtagtaaaaagatca

SEQ ID NO: 16084 - DNA, 25 bp, Canis familiaris
atatcgccgttgaagagtggataca

SEQ ID NO: 16085 - DNA, 25 bp, Canis familiaris
atatgcctccccaagcaatggaaac

SEQ ID NO: 16086 - DNA, 25 bp, Canis familiaris
atatccaatcttgagcattcagaaa

SEQ ID NO: 16087 - DNA, 25 bp, Canis familiaris
atataaatctttacaattttgaaat

SEQ ID NO: 16088 - DNA, 25 bp, Canis familiaris
atataccaccttgagatagttgaaa

SEQ ID NO: 16089 - DNA, 25 bp, Canis familiaris
atatactccattagtgagtcctgta

SEQ ID NO: 16090 - DNA, 25 bp, Canis familiaris
atatacccacaaattatctcgtgaa

SEQ ID NO: 16091 - DNA, 25 bp, Canis familiaris
atattctccatatgttttattgata

SEQ ID NO: 16092 - DNA, 25 bp, Canis familiaris
atattcatccgtggtctttttctat

SEQ ID NO: 16093 - DNA, 25 bp, Canis familiaris
atattcatctgaccagttttctctt

SEQ ID NO: 16094 - DNA, 25 bp, Canis familiaris
atatctattgggttttagctttatc

SEQ ID NO: 16095 - DNA, 25 bp, Canis familiaris
atattctgttagcttattgttttgc

SEQ ID NO: 16096 - DNA, 25 bp, Canis familiaris
atatttttactcttatgtttctcta

SEQ ID NO: 16097 - DNA, 25 bp, Canis familiaris
atatttttccatttctgtcatgctt

SEQ ID NO: 16098 - DNA, 25 bp, Canis familiaris
atattttctccatgtgtgtactttt

SEQ ID NO: 16099 - DNA, 25 bp, Canis familiaris
atatttttctaactgtattttctat

SEQ ID NO: 16100 - DNA, 25 bp, Canis familiaris
atattcatatttttctttttcgctt

SEQ ID NO: 16101 - DNA, 25 bp, Canis familiaris
atatacagatgtgttttgtctttct

SEQ ID NO: 16102 - DNA, 25 bp, Canis familiaris
atatatctgtttacaatttctttat

SEQ ID NO: 16103 - DNA, 25 bp, Canis familiaris
atatatttttatgtttctgagcaat

SEQ ID NO: 16104 - DNA, 25 bp, Canis familiaris
atattgtgctattatccttttaaat

SEQ ID NO: 16105 - DNA, 25 bp, Canis familiaris
atatttctgttcccttctgtgaaat

SEQ ID NO: 16106 - DNA, 25 bp, Canis familiaris
atattactgtttccattccttactc

SEQ ID NO: 16107 - DNA, 25 bp, Canis familiaris
atatcccgtttgtcatcaccaaacc

SEQ ID NO: 16108 - DNA, 25 bp, Canis familiaris
atatgggcccttaaaccacatacca

SEQ ID NO: 16109 - DNA, 25 bp, Canis familiaris
atatcaggaacggatagaccactga

SEQ ID NO: 16110 - DNA, 25 bp, Canis familiaris
atatcaggtcttactcaagccctaa

SEQ ID NO: 16111 - DNA, 25 bp, Canis familiaris
atatcaggtttcatctacttgtagt

SEQ ID NO: 16112 - DNA, 25 bp, Canis familiaris
atattggacttaatgctgctctctg

SEQ ID NO: 16113 - DNA, 25 bp, Canis familiaris
atatctgtacataagcctctgcatt

SEQ ID NO: 16114 - DNA, 25 bp, Canis familiaris
atatgtctatcagtcagcaacctct

SEQ ID NO: 16115 - DNA, 25 bp, Canis familiaris
atatatctgttgacatgtagacatg

SEQ ID NO: 16116 - DNA, 25 bp, Canis familiaris
atatttgttgaacttgagccccacc

SEQ ID NO: 16117 - DNA, 25 bp, Canis familiaris
ataggatggcgattttgcaccccag

SEQ ID NO: 16118 - DNA, 25 bp, Canis familiaris
atatggtggggatccacagcaccct

SEQ ID NO: 16119 - DNA, 25 bp, Canis familiaris
atagttagggacgcctgttctctgt

SEQ ID NO: 16120 - DNA, 25 bp, Canis familiaris
atagttacccactgctggtgtttat

SEQ ID NO: 16121 - DNA, 25 bp, Canis familiaris
atagttgagcctttcctgtttagtt

SEQ ID NO: 16122 - DNA, 25 bp, Canis familiaris
atagtgtaccttcatatttatttaa

SEQ ID NO: 16123 - DNA, 25 bp, Canis familiaris
atattcctgactttaatttgattaa

SEQ ID NO: 16124 - DNA, 25 bp, Canis familiaris
atattttgactggctaatttagggg

SEQ ID NO: 16125 - DNA, 25 bp, Canis familiaris
atatttctactgtctgcgcttaagg

SEQ ID NO: 16126 - DNA, 25 bp, Canis familiaris
atatactcaagctgtctgcttcaga

SEQ ID NO: 16127 - DNA, 25 bp, Canis familiaris
atatcactctgacttgttttctaca

SEQ ID NO: 16128 - DNA, 25 bp, Canis familiaris
atatcctcattgctgcgatcatgtc

SEQ ID NO: 16129 - DNA, 25 bp, Canis familiaris
atatttcatgctagtgcctcacatc

SEQ ID NO: 16130 - DNA, 25 bp, Canis familiaris
atatatacacataggcatacacaca

SEQ ID NO: 16131 - DNA, 25 bp, Canis familiaris
atatgaagtcataacacggccagtt

SEQ ID NO: 16132 - DNA, 25 bp, Canis familiaris
atatgaactctgccctaggccagta

SEQ ID NO: 16133 - DNA, 25 bp, Canis familiaris
atatcaattcttactgagcccagtg

SEQ ID NO: 16134 - DNA, 25 bp, Canis familiaris
atatttctcttaagccgaagtgagc

SEQ ID NO: 16135 - DNA, 25 bp, Canis familiaris
atatcctgtctaaacaaatagctag

SEQ ID NO: 16136 - DNA, 25 bp, Canis familiaris
atagctggttacccataaacagaat

SEQ ID NO: 16137 - DNA, 25 bp, Canis familiaris
atagtggttcctcaataagttaata

SEQ ID NO: 16138 - DNA, 25 bp, Canis familiaris
atagggtacctagatggtttgagaa

SEQ ID NO: 16139 - DNA, 25 bp, Canis familiaris
atagatggtcagggcccaggacttg

SEQ ID NO: 16140 - DNA, 25 bp, Canis familiaris
atatagttagactccttgacttcat

SEQ ID NO: 16141 - DNA, 25 bp, Canis familiaris
atatattaagcactaccttcccaaa

SEQ ID NO: 16142 - DNA, 25 bp, Canis familiaris
atatcattcaacctacttatttaat

SEQ ID NO: 16143 - DNA, 25 bp, Canis familiaris
atatcttcaagccttattcatgtac

SEQ ID NO: 16144 - DNA, 25 bp, Canis familiaris
atattcattgtgcttggctctgtcc

SEQ ID NO: 16145 - DNA, 25 bp, Canis familiaris
atattcagttggaggctctagccac

SEQ ID NO: 16146 - DNA, 25 bp, Canis familiaris
atatgaatttggacgtgtgtacaca

SEQ ID NO: 16147 - DNA, 25 bp, Canis familiaris
atattattttggagttcaatacatc

SEQ ID NO: 16148 - DNA, 25 bp, Canis familiaris
atatattttttatctctcctaacaa

SEQ ID NO: 16149 - DNA, 25 bp, Canis familiaris
atatatattcaataccctaccgaaa

SEQ ID NO: 16150 - DNA, 25 bp, Canis familiaris
atattttccaatacctcaacgctat

SEQ ID NO: 16151 - DNA, 25 bp, Canis familiaris
atatattaccattcacaccaaccat

SEQ ID NO: 16152 - DNA, 25 bp, Canis familiaris
atatttaaactccatcaccaccata

SEQ ID NO: 16153 - DNA, 25 bp, Canis familiaris
atattgtgaaagccattgcccgcct

SEQ ID NO: 16154 - DNA, 25 bp, Canis familiaris
atattgctgggaccagtggcaccct

SEQ ID NO: 16155 - DNA, 25 bp, Canis familiaris
atattgttggtggcagctgttccct

SEQ ID NO: 16156 - DNA, 25 bp, Canis familiaris
atttgtgaggtactctgcttcctgt

SEQ ID NO: 16157 - DNA, 25 bp, Canis familiaris
atattgaggaaatcatttgcctggc

SEQ ID NO: 16158 - DNA, 25 bp, Canis familiaris
atattgagccaaaactagtccagtt

SEQ ID NO: 16159 - DNA, 25 bp, Canis familiaris
atagtataacatgcctcagtccagt

SEQ ID NO: 16160 - DNA, 25 bp, Canis familiaris
atattcttactgtcacacttccaat

SEQ ID NO: 16161 - DNA, 25 bp, Canis familiaris
atattatatacttcctttccacaga

SEQ ID NO: 16162 - DNA, 25 bp, Canis familiaris
atatttatattgccactattcttaa

SEQ ID NO: 16163 - DNA, 25 bp, Canis familiaris
atattgataatttgctttttgtgaa

SEQ ID NO: 16164 - DNA, 25 bp, Canis familiaris
atatttactcattttatcattataa

SEQ ID NO: 16165 - DNA, 25 bp, Canis familiaris
atttggactcatgttgcagactgta

SEQ ID NO: 16166 - DNA, 25 bp, Canis familiaris
atttggacttagtgggctggctcct

SEQ ID NO: 16167 - DNA, 25 bp, Canis familiaris
atatatgtaatttggggggccctgt

SEQ ID NO: 16168 - DNA, 25 bp, Canis familiaris
ataatctataaatggggaccgaaag

SEQ ID NO: 16169 - DNA, 25 bp, Canis familiaris
atttgtgataatatggatggaccca

SEQ ID NO: 16170 - DNA, 25 bp, Canis familiaris
atttgtagagtcaatgaatgaggcc

SEQ ID NO: 16171 - DNA, 25 bp, Canis familiaris
ataggctaggtcatagctgccacct

SEQ ID NO: 16172 - DNA, 25 bp, Canis familiaris
atattctaaattaagtctcactgct

SEQ ID NO: 16173 - DNA, 25 bp, Canis familiaris
atatcccccttgtagagccaagctt

SEQ ID NO: 16174 - DNA, 25 bp, Canis familiaris
atataccagagcagacgacccagtt

SEQ ID NO: 16175 - DNA, 25 bp, Canis familiaris
atataccagcgatgacgagacgcgc

SEQ ID NO: 16176 - DNA, 25 bp, Canis familiaris
atatcaggctggagtcgagaagaca

SEQ ID NO: 16177 - DNA, 25 bp, Canis familiaris
atactgagcctctgtctgtgaaaaa

SEQ ID NO: 16178 - DNA, 25 bp, Canis familiaris
atatcatggctctaaaattaaatga

SEQ ID NO: 16179 - DNA, 25 bp, Canis familiaris
atttggcatctaagcgttcatagta

SEQ ID NO: 16180 - DNA, 25 bp, Canis familiaris
atttgtctgctattctgttcatgtt

SEQ ID NO: 16181 - DNA, 25 bp, Canis familiaris
atttgtgctgtattcgttagtatca

SEQ ID NO: 16182 - DNA, 25 bp, Canis familiaris
atttggggagctcattgcgcttgca

SEQ ID NO: 16183 - DNA, 25 bp, Canis familiaris
atttggatggggccatgggcttctc

SEQ ID NO: 16184 - DNA, 25 bp, Canis familiaris
atattcaatggaagcgcgggtatac

SEQ ID NO: 16185 - DNA, 25 bp, Canis familiaris
atagctactggagcctaagcttccc

SEQ ID NO: 16186 - DNA, 25 bp, Canis familiaris
atataaagtgattcccaaccctctg

SEQ ID NO: 16187 - DNA, 25 bp, Canis familiaris
atatcgttggattttacacccttag

SEQ ID NO: 16188 - DNA, 25 bp, Canis familiaris
atattttctgcatcttaacaactta

SEQ ID NO: 16189 - DNA, 25 bp, Canis familiaris
atattttcagcaactttcatcgact

SEQ ID NO: 16190 - DNA, 25 bp, Canis familiaris
atatctggtagctctttcttgcttc

SEQ ID NO: 16191 - DNA, 25 bp, Canis familiaris
atattgaagtgtttttcctgctatg

SEQ ID NO: 16192 - DNA, 25 bp, Canis familiaris
atattcaaggtttgtcctctccatg

SEQ ID NO: 16193 - DNA, 25 bp, Canis familiaris
atattcaaagtggtgatcccttcac

SEQ ID NO: 16194 - DNA, 25 bp, Canis familiaris
atataagacctctgattcctttcct

SEQ ID NO: 16195 - DNA, 25 bp, Canis familiaris
atagtaatcctgtttccacttttgg

SEQ ID NO: 16196 - DNA, 25 bp, Canis familiaris
atagtttccctaagcaagtttctgc

SEQ ID NO: 16197 - DNA, 25 bp, Canis familiaris
atattttccgatatgcaaatgcatt

SEQ ID NO: 16198 - DNA, 25 bp, Canis familiaris
atatatctgaacgtgtctacaagtc

SEQ ID NO: 16199 - DNA, 25 bp, Canis familiaris
atatgattgaatctttcgcggccgt

SEQ ID NO: 16200 - DNA, 25 bp, Canis familiaris
atatgattaatctttccggcctgac

SEQ ID NO: 16201 - DNA, 25 bp, Canis familiaris
atatgattaatctttccggcctgac

SEQ ID NO: 16202 - DNA, 25 bp, Canis familiaris
atatgattaatctttccggcctgac

SEQ ID NO: 16203 - DNA, 25 bp, Canis familiaris
atatgattaatctttccggcctgac

SEQ ID NO: 16204 - DNA, 25 bp, Canis familiaris
atatgtatattaaacccgcactgcc

SEQ ID NO: 16205 - DNA, 25 bp, Canis familiaris
atattttgtagagcacgcgcaacac

SEQ ID NO: 16206 - DNA, 25 bp, Canis familiaris
atatttatttccgccatcagactct

SEQ ID NO: 16207 - DNA, 25 bp, Canis familiaris
atatttatatttggccctatgtgtc

SEQ ID NO: 16208 - DNA, 25 bp, Canis familiaris
atattatctataaccagcctttgta

SEQ ID NO: 16209 - DNA, 25 bp, Canis familiaris
atatgtttaataccgcctattccag

SEQ ID NO: 16210 - DNA, 25 bp, Canis familiaris
atattctgattgtagcccacttacc

SEQ ID NO: 16211 - DNA, 25 bp, Canis familiaris
atatcagttggatcccactgcttcc

SEQ ID NO: 16212 - DNA, 25 bp, Canis familiaris
atatcgttggagccttcgctgtatc

SEQ ID NO: 16213 - DNA, 25 bp, Canis familiaris
atatagttgccacctatgcgtcact

SEQ ID NO: 16214 - DNA, 25 bp, Canis familiaris
atattctcgtcatgcttgcagtact

SEQ ID NO: 16215 - DNA, 25 bp, Canis familiaris
atattctctgaacgttcgaatctta

SEQ ID NO: 16216 - DNA, 25 bp, Canis familiaris
atatatttgtcaggtatctaagtta

SEQ ID NO: 16217 - DNA, 25 bp, Canis familiaris
atatttttgaaaactgaagattatg

SEQ ID NO: 16218 - DNA, 25 bp, Canis familiaris
atatgcttaatatgtgttaaactat

SEQ ID NO: 16219 - DNA, 25 bp, Canis familiaris
atatgctgctacttggtttgaaaaa

SEQ ID NO: 16220 - DNA, 25 bp, Canis familiaris
atatctatatgacgctctttaaaaa

SEQ ID NO: 16221 - DNA, 25 bp, Canis familiaris
atattacaaccaattcagaagagaa

SEQ ID NO: 16222 - DNA, 25 bp, Canis familiaris
atatctaaatgtattctgcacgagg

SEQ ID NO: 16223 - DNA, 25 bp, Canis familiaris
atatctagtcattaaactgcacaag

SEQ ID NO: 16224 - DNA, 25 bp, Canis familiaris
atatgaggacatttaccccaacccg

SEQ ID NO: 16225 - DNA, 25 bp, Canis familiaris
atatgggacaagtgcccaccagctc

SEQ ID NO: 16226 - DNA, 25 bp, Canis familiaris
ataggggacagatccccagcatccc

SEQ ID NO: 16227 - DNA, 25 bp, Canis familiaris
atagtgagagaccaacgcaaccatg

SEQ ID NO: 16228 - DNA, 25 bp, Canis familiaris
atatgaggaacccaggtaccatttc

SEQ ID NO: 16229 - DNA, 25 bp, Canis familiaris
atagggacacctgagttcccttcca

SEQ ID NO: 16230 - DNA, 25 bp, Canis familiaris
atagtggatactcttttcccaccac

SEQ ID NO: 16231 - DNA, 25 bp, Canis familiaris
ataaaatgacctgtaccccttactg

SEQ ID NO: 16232 - DNA, 25 bp, Canis familiaris
ataagaagacgcagtagacccctcc

SEQ ID NO: 16233 - DNA, 25 bp, Canis familiaris
ataaagacctttcagtatcccttca

SEQ ID NO: 16234 - DNA, 25 bp, Canis familiaris
atacaggactctttcgaggccctgt

SEQ ID NO: 16235 - DNA, 25 bp, Canis familiaris
atacaggactctttcgaggccctgt

SEQ ID NO: 16236 - DNA, 25 bp, Canis familiaris
atatcagctgtttaaagcaggccct

SEQ ID NO: 16237 - DNA, 25 bp, Canis familiaris
atataaggtgcttaggccccacttt

SEQ ID NO: 16238 - DNA, 25 bp, Canis familiaris
atattagcctcttgatggctctcca

SEQ ID NO: 16239 - DNA, 25 bp, Canis familiaris
atatctattgccccatggtgttaac

SEQ ID NO: 16240 - DNA, 25 bp, Canis familiaris
atattattggccgtgtttaaatctc

SEQ ID NO: 16241 - DNA, 25 bp, Canis familiaris
atatcttaacaccttattataatct

SEQ ID NO: 16242 - DNA, 25 bp, Canis familiaris
atattataacatcattgtaactatg

SEQ ID NO: 16243 - DNA, 25 bp, Canis familiaris
atataaacaatccactgtatactcc

SEQ ID NO: 16244 - DNA, 25 bp, Canis familiaris
atatacccttgactagtctgtctcc

SEQ ID NO: 16245 - DNA, 25 bp, Canis familiaris
atatcagccctttggcacagttgtc

SEQ ID NO: 16246 - DNA, 25 bp, Canis familiaris
atatctccatcaggtgtacagtttt

SEQ ID NO: 16247 - DNA, 25 bp, Canis familiaris
atatcctgctactgctccagaaatt

SEQ ID NO: 16248 - DNA, 25 bp, Canis familiaris
atatccttgacattacagctgacag

SEQ ID NO: 16249 - DNA, 25 bp, Canis familiaris
atatgcgtggcatcatcagcagtga

SEQ ID NO: 16250 - DNA, 25 bp, Canis familiaris
atgatggtgcgtttaagtgttagta

SEQ ID NO: 16251 - DNA, 25 bp, Canis familiaris
atatccgcagcttctgaaggttagg

SEQ ID NO: 16252 - DNA, 25 bp, Canis familiaris
atacccagtcctggaggaatggttg

SEQ ID NO: 16253 - DNA, 25 bp, Canis familiaris
atacccgcctcccagaagaggacta

SEQ ID NO: 16254 - DNA, 25 bp, Canis familiaris
atacccggattttccagggatcaca

SEQ ID NO: 16255 - DNA, 25 bp, Canis familiaris
atacccttgtgtatacaagaatcag

SEQ ID NO: 16256 - DNA, 25 bp, Canis familiaris
ataccttcttttaatgtaaatagca

SEQ ID NO: 16257 - DNA, 25 bp, Canis familiaris
atattttcttgtaaagtgcttttga

SEQ ID NO: 16258 - DNA, 25 bp, Canis familiaris
atattttttttctcagttcattctg

SEQ ID NO: 16259 - DNA, 25 bp, Canis familiaris
atatttttctttctgtgtttctctg

SEQ ID NO: 16260 - DNA, 25 bp, Canis familiaris
atatgtttacttctgaggcttaatt

SEQ ID NO: 16261 - DNA, 25 bp, Canis familiaris
atatgtttaaccacttgctctcaat

SEQ ID NO: 16262 - DNA, 25 bp, Canis familiaris
atattttttacttgctttctcactt

SEQ ID NO: 16263 - DNA, 25 bp, Canis familiaris
atattttttatttcagtcactcctg

SEQ ID NO: 16264 - DNA, 25 bp, Canis familiaris
atatatgttttcgtacgctctcggg

SEQ ID NO: 16265 - DNA, 25 bp, Canis familiaris
atattctcttatttacacgtagcgg

SEQ ID NO: 16266 - DNA, 25 bp, Canis familiaris
atatcgccaatagttatcacgctca

SEQ ID NO: 16267 - DNA, 25 bp, Canis familiaris
atatagcaattagcttcctgtcccc

SEQ ID NO: 16268 - DNA, 25 bp, Canis familiaris
atatatagttcagtcttccttccac

SEQ ID NO: 16269 - DNA, 25 bp, Canis familiaris
atatatgagttaatctttccgccct

SEQ ID NO: 16270 - DNA, 25 bp, Canis familiaris
atattacttatttaatccaggaata

SEQ ID NO: 16271 - DNA, 25 bp, Canis familiaris
atatgtatacatgttttccaggaaa

SEQ ID NO: 16272 - DNA, 25 bp, Canis familiaris
atatttcacccttcagatccgtggg

SEQ ID NO: 16273 - DNA, 25 bp, Canis familiaris
atatacaaccaatcaatcttgctgg

SEQ ID NO: 16274 - DNA, 25 bp, Canis familiaris
atatagtaccatagtattctgactg

SEQ ID NO: 16275 - DNA, 25 bp, Canis familiaris
atattgtatcctattttgctatgta

SEQ ID NO: 16276 - DNA, 25 bp, Canis familiaris
atatatgtacctattgttactgcta

SEQ ID NO: 16277 - DNA, 25 bp, Canis familiaris
ataagcctctctgttggaacggccc

SEQ ID NO: 16278 - DNA, 25 bp, Canis familiaris
ataaccgggaggagtacgtgcgctt

SEQ ID NO: 16279 - DNA, 25 bp, Canis familiaris
ataaccgggaggagtacgtgcgctt

SEQ ID NO: 16280 - DNA, 25 bp, Canis familiaris
ataaccgggaggagttcgtgcgctt

SEQ ID NO: 16281 - DNA, 25 bp, Canis familiaris
ataaccgggaggagttcgtgcgctt

SEQ ID NO: 16282 - DNA, 25 bp, Canis familiaris
ataaccgggaggagttcgtgcgctt

SEQ ID NO: 16283 - DNA, 25 bp, Canis familiaris
ataaccgggaggagttcgtgcgctt

SEQ ID NO: 16284 - DNA, 25 bp, Canis familiaris
ataaccgggaggagttcgtgcgctt

SEQ ID NO: 16285 - DNA, 25 bp, Canis familiaris
ataaccgggaggagttcgtgcgctt

SEQ ID NO: 16286 - DNA, 25 bp, Canis familiaris
ataaccgggaggagatcctgcgctt

SEQ ID NO: 16287 - DNA, 25 bp, Canis familiaris
ataaccgggaggagcacgtgcgctt

SEQ ID NO: 16288 - DNA, 25 bp, Canis familiaris
atattctctcagcaggaggcttggc

SEQ ID NO: 16289 - DNA, 25 bp, Canis familiaris
atatctttcggaggtggcatctgga

SEQ ID NO: 16290 - DNA, 25 bp, Canis familiaris
atatctctgtagcacagttgatagt

SEQ ID NO: 16291 - DNA, 25 bp, Canis familiaris
atatcattgctcagaagtatgtgtg

SEQ ID NO: 16292 - DNA, 25 bp, Canis familiaris
atatgcttctggggagtgaggctgc

SEQ ID NO: 16293 - DNA, 25 bp, Canis familiaris
atatctcatatgtggtcttgggctc

SEQ ID NO: 16294 - DNA, 25 bp, Canis familiaris
atatctcaagtgagtcatctcaggt

SEQ ID NO: 16295 - DNA, 25 bp, Canis familiaris
atatctctttgtagtgctctcaggc

SEQ ID NO: 16296 - DNA, 25 bp, Canis familiaris
atatctatgctactatactctcggc

SEQ ID NO: 16297 - DNA, 25 bp, Canis familiaris
atatgtaaagtaacgctattgcgat

SEQ ID NO: 16298 - DNA, 25 bp, Canis familiaris
atatgtgacacacaccaccattctt

SEQ ID NO: 16299 - DNA, 25 bp, Canis familiaris
atatgatgagaagccaccctacgtc

SEQ ID NO: 16300 - DNA, 25 bp, Canis familiaris
atatgtgaggaagctccctcggctg

SEQ ID NO: 16301 - DNA, 25 bp, Canis familiaris
ataggcaggagggtggcctgaggga

SEQ ID NO: 16302 - DNA, 25 bp, Canis familiaris
ataggtgaagctctggccttgagat

SEQ ID NO: 16303 - DNA, 25 bp, Canis familiaris
ataggctaactcaccctgtaattaa

SEQ ID NO: 16304 - DNA, 25 bp, Canis familiaris
ataggcaaaccatttccttaagttg

SEQ ID NO: 16305 - DNA, 25 bp, Canis familiaris
atatgaatgcaatactttttaaatt

SEQ ID NO: 16306 - DNA, 25 bp, Canis familiaris
atataaaataacctccatctcaaca

SEQ ID NO: 16307 - DNA, 25 bp, Canis familiaris
atatagaataaacaccctcacaaat

SEQ ID NO: 16308 - DNA, 25 bp, Canis familiaris
atatataaaaaatcacctcaaactt

SEQ ID NO: 16309 - DNA, 25 bp, Canis familiaris
atatcaaaccatcattcacacgaga

SEQ ID NO: 16310 - DNA, 25 bp, Canis familiaris
atatcaaaccatcattcacacgaga

SEQ ID NO: 16311 - DNA, 25 bp, Canis familiaris
ataccaatgccataggccggagata

SEQ ID NO: 16312 - DNA, 25 bp, Canis familiaris
ataccaggaacacccacggagaaga

SEQ ID NO: 16313 - DNA, 25 bp, Canis familiaris
ataccagaggacttacggaagaatc

SEQ ID NO: 16314 - DNA, 25 bp, Canis familiaris
ataagcgaggaaaaatgtgggagtg

SEQ ID NO: 16315 - DNA, 25 bp, Canis familiaris
atcggcgagtgacaaaggcggattt

SEQ ID NO: 16316 - DNA, 25 bp, Canis familiaris
atagtgctgcagtgaacctggggat

SEQ ID NO: 16317 - DNA, 25 bp, Canis familiaris
atagtgatgcagcgatcaatcggtt

SEQ ID NO: 16318 - DNA, 25 bp, Canis familiaris
atatagtgcgtttcaataagggagc

SEQ ID NO: 16319 - DNA, 25 bp, Canis familiaris
atagttggtgaaggatgaagggagc

SEQ ID NO: 16320 - DNA, 25 bp, Canis familiaris
atatggaggtgatcgtaggggagga

SEQ ID NO: 16321 - DNA, 25 bp, Canis familiaris
ataggggctgtcagtcaggggcagt

SEQ ID NO: 16322 - DNA, 25 bp, Canis familiaris
atagggtctgacccacagagcaggc

SEQ ID NO: 16323 - DNA, 25 bp, Canis familiaris
atagggaaagctctggctgagatgc

SEQ ID NO: 16324 - DNA, 25 bp, Canis familiaris
atatagcgatataggcctgcctcaa

SEQ ID NO: 16325 - DNA, 25 bp, Canis familiaris
atatatgccaattggccagggcagt

SEQ ID NO: 16326 - DNA, 25 bp, Canis familiaris
atatatccatatttgcctttttttg

SEQ ID NO: 16327 - DNA, 25 bp, Canis familiaris
atatttgctatctggctttttaaga

SEQ ID NO: 16328 - DNA, 25 bp, Canis familiaris
atatgcttgtacgggttcttttagt

SEQ ID NO: 16329 - DNA, 25 bp, Canis familiaris
atatgcgtgcatcacgtgttctctc

SEQ ID NO: 16330 - DNA, 25 bp, Canis familiaris
atatgctggcaagcgttttccactg

SEQ ID NO: 16331 - DNA, 25 bp, Canis familiaris
atatctgacaaaggattcttaccca

SEQ ID NO: 16332 - DNA, 25 bp, Canis familiaris
atatctgaatcatgctgtttctgaa

SEQ ID NO: 16333 - DNA, 25 bp, Canis familiaris
atatctatcattcgcggtctggaga

SEQ ID NO: 16334 - DNA, 25 bp, Canis familiaris
atatttcttcgccactcaggaagtg

SEQ ID NO: 16335 - DNA, 25 bp, Canis familiaris
atatccaattcggcacgaggaaaga

SEQ ID NO: 16336 - DNA, 25 bp, Canis familiaris
atattaattcttggagaggaccgga

SEQ ID NO: 16337 - DNA, 25 bp, Canis familiaris
atattatatttgtgggcgtcttcgc

SEQ ID NO: 16338 - DNA, 25 bp, Canis familiaris
atattttttctctagggttcatgcc

SEQ ID NO: 16339 - DNA, 25 bp, Canis familiaris
atatttcttatactaattgtatcat

SEQ ID NO: 16340 - DNA, 25 bp, Canis familiaris
atatgcttttataggaattcgattg

SEQ ID NO: 16341 - DNA, 25 bp, Canis familiaris
atatgtaatgtttgtagctccaatt

SEQ ID NO: 16342 - DNA, 25 bp, Canis familiaris
atatgctaagctactggaagccaat

SEQ ID NO: 16343 - DNA, 25 bp, Canis familiaris
atatctcatatgcccttcaacagct

SEQ ID NO: 16344 - DNA, 25 bp, Canis familiaris
atatctgacattcttgtaactactg

SEQ ID NO: 16345 - DNA, 25 bp, Canis familiaris
atatctgactcaccgtgtactcttc

SEQ ID NO: 16346 - DNA, 25 bp, Canis familiaris
atattaccagtaatgccagccattg

SEQ ID NO: 16347 - DNA, 25 bp, Canis familiaris
atatctgacctggaggccacaagct

SEQ ID NO: 16348 - DNA, 25 bp, Canis familiaris
atatgttgcctgtaactatcacacc

SEQ ID NO: 16349 - DNA, 25 bp, Canis familiaris
atatgcttgcctgtgtcaaccattc

SEQ ID NO: 16350 - DNA, 25 bp, Canis familiaris
atatctctggccaatgtcaaccacc

SEQ ID NO: 16351 - DNA, 25 bp, Canis familiaris
atatcctgaacactgacaagatcac

SEQ ID NO: 16352 - DNA, 25 bp, Canis familiaris
atatctctcaaattatccaacctaa

SEQ ID NO: 16353 - DNA, 25 bp, Canis familiaris
atactataagatcaggaagcccatt

SEQ ID NO: 16354 - DNA, 25 bp, Canis familiaris
atattatcacaaacgctatagcgac

SEQ ID NO: 16355 - DNA, 25 bp, Canis familiaris
atatatgatcaattccctaagccaa

SEQ ID NO: 16356 - DNA, 25 bp, Canis familiaris
atatcattattagtgccttaccgtg

SEQ ID NO: 16357 - DNA, 25 bp, Canis familiaris
atatctgtcaaagtcctttctcctt

SEQ ID NO: 16358 - DNA, 25 bp, Canis familiaris
atatattactactgcatcttccttt

SEQ ID NO: 16359 - DNA, 25 bp, Canis familiaris
atatattgggtcgtctgcttccctt

SEQ ID NO: 16360 - DNA, 25 bp, Canis familiaris
atatattgctgtaatttctgaccac

SEQ ID NO: 16361 - DNA, 25 bp, Canis familiaris
atatattctatcaaaactcccacta

SEQ ID NO: 16362 - DNA, 25 bp, Canis familiaris
atatatattatacactctctctcac

SEQ ID NO: 16363 - DNA, 25 bp, Canis familiaris
atattatacatactactctccttta

SEQ ID NO: 16364 - DNA, 25 bp, Canis familiaris
atatgtaacaaatcttagctttatt

SEQ ID NO: 16365 - DNA, 25 bp, Canis familiaris
atggttaaaaatgtgcgctgttttg

SEQ ID NO: 16366 - DNA, 25 bp, Canis familiaris
atatggttaaaaatgtgcgctgttt

SEQ ID NO: 16367 - DNA, 25 bp, Canis familiaris
atatttgtaactttgcatgcacttg

SEQ ID NO: 16368 - DNA, 25 bp, Canis familiaris
atatttgtcttttggcagagcatgt

SEQ ID NO: 16369 - DNA, 25 bp, Canis familiaris
atatatttcttatgtccagtatcac

SEQ ID NO: 16370 - DNA, 25 bp, Canis familiaris
atatttgatcttaagtcacttgaca

SEQ ID NO: 16371 - DNA, 25 bp, Canis familiaris
atatttggcaatgcagtccactgat

SEQ ID NO: 16372 - DNA, 25 bp, Canis familiaris
atatcttggaatgtgaccatcatgg

SEQ ID NO: 16373 - DNA, 25 bp, Canis familiaris
atatgtatggttttgccttctggac

SEQ ID NO: 16374 - DNA, 25 bp, Canis familiaris
atatttctgattttcgcttctaaca

SEQ ID NO: 16375 - DNA, 25 bp, Canis familiaris
atatgtttatgttatcgacatctaa

SEQ ID NO: 16376 - DNA, 25 bp, Canis familiaris
atatttactgttaccagcagcatat

SEQ ID NO: 16377 - DNA, 25 bp, Canis familiaris
atatactagtttaatgcagcggcat

SEQ ID NO: 16378 - DNA, 25 bp, Canis familiaris
atatcaccactagtagagcgacagt

SEQ ID NO: 16379 - DNA, 25 bp, Canis familiaris
atatcactcatgttgtagacctcag

SEQ ID NO: 16380 - DNA, 25 bp, Canis familiaris
atagcagcattgtgtcatgaccaag

SEQ ID NO: 16381 - DNA, 25 bp, Canis familiaris
ataccatatggggcagctacacaga

SEQ ID NO: 16382 - DNA, 25 bp, Canis familiaris
atatctatagggtcctgcactgctg

SEQ ID NO: 16383 - DNA, 25 bp, Canis familiaris
atatgtatcaaaccctgactgctcc

SEQ ID NO: 16384 - DNA, 25 bp, Canis familiaris
atatagaggcaacccatgtccatcc

SEQ ID NO: 16385 - DNA, 25 bp, Canis familiaris
atataaggccatcctagagagttat

SEQ ID NO: 16386 - DNA, 25 bp, Canis familiaris
atatgcatgaggtccctttgtttat

SEQ ID NO: 16387 - DNA, 25 bp, Canis familiaris
atatgcagtgagtgcctactaacca

SEQ ID NO: 16388 - DNA, 25 bp, Canis familiaris
atatatgtgaaagctacacacacac

SEQ ID NO: 16389 - DNA, 25 bp, Canis familiaris
atatatgtgatatctctccaccctg

SEQ ID NO: 16390 - DNA, 25 bp, Canis familiaris
atatcttgataaattggagcccagc

SEQ ID NO: 16391 - DNA, 25 bp, Canis familiaris
atatcttgagaatttagacctccta

SEQ ID NO: 16392 - DNA, 25 bp, Canis familiaris
atatggttcaatttacgactgccta

SEQ ID NO: 16393 - DNA, 25 bp, Canis familiaris
atatggttcattttttcaggcttaa

SEQ ID NO: 16394 - DNA, 25 bp, Canis familiaris
atatgtatttaacttctaccttaag

SEQ ID NO: 16395 - DNA, 25 bp, Canis familiaris
atatcattttctttccaaacgtaag

SEQ ID NO: 16396 - DNA, 25 bp, Canis familiaris
atagattttctgtattaaagtttat

SEQ ID NO: 16397 - DNA, 25 bp, Canis familiaris
atagtttttccataatatcctctct

SEQ ID NO: 16398 - DNA, 25 bp, Canis familiaris
atatttctcttttaaaattctcatt

SEQ ID NO: 16399 - DNA, 25 bp, Canis familiaris
atatggcttttttccaaattggcta

SEQ ID NO: 16400 - DNA, 25 bp, Canis familiaris
atatgcccaggttaccaacaatcct

SEQ ID NO: 16401 - DNA, 25 bp, Canis familiaris
atatgcccagcaaagaaaactacct

SEQ ID NO: 16402 - DNA, 25 bp, Canis familiaris
atatcaccagtaacatcaactatac

SEQ ID NO: 16403 - DNA, 25 bp, Canis familiaris
atatacaatgggcatcagttataca

SEQ ID NO: 16404 - DNA, 25 bp, Canis familiaris
atatcccgaggaatatgttcacact

SEQ ID NO: 16405 - DNA, 25 bp, Canis familiaris
atatccacgcggacctgactgaact

SEQ ID NO: 16406 - DNA, 25 bp, Canis familiaris
atatagcaccgcacttaccatattt

SEQ ID NO: 16407 - DNA, 25 bp, Canis familiaris
atatagtctggcatttacaagtgtt

SEQ ID NO: 16408 - DNA, 25 bp, Canis familiaris
atatctgtgtggctttacctgtggc

SEQ ID NO: 16409 - DNA, 25 bp, Canis familiaris
atatattgtagtgttcccatagtga

SEQ ID NO: 16410 - DNA, 25 bp, Canis familiaris
atatgttgtagtctctcactttctg

SEQ ID NO: 16411 - DNA, 25 bp, Canis familiaris
atagtcattttctctgcttttcaga

SEQ ID NO: 16412 - DNA, 25 bp, Canis familiaris
atatattttttgttgctgatttaga

SEQ ID NO: 16413 - DNA, 25 bp, Canis familiaris
atagattagattcggtcgttctgga

SEQ ID NO: 16414 - DNA, 25 bp, Canis familiaris
atagtgtagtaatgtccttctggac

SEQ ID NO: 16415 - DNA, 25 bp, Canis familiaris
atagttaaacaaacagtctgtggag

SEQ ID NO: 16416 - DNA, 25 bp, Canis familiaris
ataattagaacatagctttagggct

SEQ ID NO: 16417 - DNA, 25 bp, Canis familiaris
atatttaaaatatgccaccacgtgt

SEQ ID NO: 16418 - DNA, 25 bp, Canis familiaris
atatatataaatttatccttccgtt

SEQ ID NO: 16419 - DNA, 25 bp, Canis familiaris
atatataccaggtttgctcttcgcg

SEQ ID NO: 16420 - DNA, 25 bp, Canis familiaris
atatataaattgtcttgctgttttg

SEQ ID NO: 16421 - DNA, 25 bp, Canis familiaris
atataacatatggcactgaattctt

SEQ ID NO: 16422 - DNA, 25 bp, Canis familiaris
atatgtaacttgccagaattcctca

SEQ ID NO: 16423 - DNA, 25 bp, Canis familiaris
atagtgaagtcgtcatatgaaccca

SEQ ID NO: 16424 - DNA, 25 bp, Canis familiaris
atagaattacagttatatcccgata

SEQ ID NO: 16425 - DNA, 25 bp, Canis familiaris
atatggataagcaccttccctatga

SEQ ID NO: 16426 - DNA, 25 bp, Canis familiaris
atataaaccataagcttccaccatt

SEQ ID NO: 16427 - DNA, 25 bp, Canis familiaris
atataaattctatttctccccttga

SEQ ID NO: 16428 - DNA, 25 bp, Canis familiaris
atatcaacttgctaatttaaatttt

SEQ ID NO: 16429 - DNA, 25 bp, Canis familiaris
atatcaagatctcggattctattat

SEQ ID NO: 16430 - DNA, 25 bp, Canis familiaris
atataatgctgttgtctctgttttg

SEQ ID NO: 16431 - DNA, 25 bp, Canis familiaris
atataaattgtcttgctgttttgta

SEQ ID NO: 16432 - DNA, 25 bp, Canis familiaris
atatccctctgtggtgtttcttgtt

SEQ ID NO: 16433 - DNA, 25 bp, Canis familiaris
atatagtcttttttgttctgttctt

SEQ ID NO: 16434 - DNA, 25 bp, Canis familiaris
atagcgacgtcgctttttgatcctt

SEQ ID NO: 16435 - DNA, 25 bp, Canis familiaris
ataggacatctttggggtttccatg

SEQ ID NO: 16436 - DNA, 25 bp, Canis familiaris
atctggactttacggtgtcaccact

SEQ ID NO: 16437 - DNA, 25 bp, Canis familiaris
atcttacttaattgcgtcatcccaa

SEQ ID NO: 16438 - DNA, 25 bp, Canis familiaris
accaacgtagttgagctctccaaca

SEQ ID NO: 16439 - DNA, 25 bp, Canis familiaris
acggaagtagttaactctggaagag

SEQ ID NO: 16440 - DNA, 25 bp, Canis familiaris
ggggaagaatttgaatgccgaagtt

SEQ ID NO: 16441 - DNA, 25 bp, Canis familiaris
ggggaagaccgtgagtcttaggtat

SEQ ID NO: 16442 - DNA, 25 bp, Canis familiaris
gggaacacggtagatcctttggtat

SEQ ID NO: 16443 - DNA, 25 bp, Canis familiaris
aggaaattggaacacacatcttggt

SEQ ID NO: 16444 - DNA, 25 bp, Canis familiaris
agaggaacggcctggcctgttggtg

SEQ ID NO: 16445 - DNA, 25 bp, Canis familiaris
atagagcaacggcaacgcactgtct

SEQ ID NO: 16446 - DNA, 25 bp, Canis familiaris
agaactgacgggtactcctgtttct

SEQ ID NO: 16447 - DNA, 25 bp, Canis familiaris
aggactacgttgtcagaccttaatt

SEQ ID NO: 16448 - DNA, 25 bp, Canis familiaris
agccccacgactgagaccaaaattt

SEQ ID NO: 16449 - DNA, 25 bp, Canis familiaris
ataccccacgctgattcttaaagtt

SEQ ID NO: 16450 - DNA, 25 bp, Canis familiaris
ataaccctcaccaatattacaaggt

SEQ ID NO: 16451 - DNA, 25 bp, Canis familiaris
atacctcctaaattttaacagtcat

SEQ ID NO: 16452 - DNA, 25 bp, Canis familiaris
atatccccagaaagagcctgagcaa

SEQ ID NO: 16453 - DNA, 25 bp, Canis familiaris
atcatcaatcgatccggcctaagaa

SEQ ID NO: 16454 - DNA, 25 bp, Canis familiaris
atatagaggaaggaggcgcgcagaa

SEQ ID NO: 16455 - DNA, 25 bp, Canis familiaris
atatagggatagtatgagccaataa

SEQ ID NO: 16456 - DNA, 25 bp, Canis familiaris
ataaagctgatagaggtcaaaaaaa

SEQ ID NO: 16457 - DNA, 25 bp, Canis familiaris
aaaatggttcaatgtaaatacggat

SEQ ID NO: 16458 - DNA, 25 bp, Canis familiaris
ataacgtccctctgtaaaaccagat

SEQ ID NO: 16459 - DNA, 25 bp, Canis familiaris
aaacgttacctgtgaacttcaactg

SEQ ID NO: 16460 - DNA, 25 bp, Canis familiaris
aaaccttgaccgtgagtccacaggc

SEQ ID NO: 16461 - DNA, 25 bp, Canis familiaris
ataaccggactttggagagagcaca

SEQ ID NO: 16462 - DNA, 25 bp, Canis familiaris
ataatacgtaatcagggcatcccat

SEQ ID NO: 16463 - DNA, 25 bp, Canis familiaris
atagaccgagttcagggttcctcta

SEQ ID NO: 16464 - DNA, 25 bp, Canis familiaris
atagaaaagttctgtggatcgcccc

SEQ ID NO: 16465 - DNA, 25 bp, Canis familiaris
atatacagaatttccgttctcccca

SEQ ID NO: 16466 - DNA, 25 bp, Canis familiaris
atatacagaatttcctttctcccaa

SEQ ID NO: 16467 - DNA, 25 bp, Canis familiaris
atatcaagactttctttttcctctc

SEQ ID NO: 16468 - DNA, 25 bp, Canis familiaris
atatcaaacaactttttctaatcat

SEQ ID NO: 16469 - DNA, 25 bp, Canis familiaris
atatgcaaagacaagtttacagagt

SEQ ID NO: 16470 - DNA, 25 bp, Canis familiaris
atatgacaatgacttactttcaaat

SEQ ID NO: 16471 - DNA, 25 bp, Canis familiaris
atatgggcataatcaagttttttaa

SEQ ID NO: 16472 - DNA, 25 bp, Canis familiaris
atatggtcatgaaccatgcacttgc

SEQ ID NO: 16473 - DNA, 25 bp, Canis familiaris
atatgaactgtagcagcacctgccc

SEQ ID NO: 16474 - DNA, 25 bp, Canis familiaris
atataagtgtattcacacacacaca

SEQ ID NO: 16475 - DNA, 25 bp, Canis familiaris
atatataatatattcagccatcaaa

SEQ ID NO: 16476 - DNA, 25 bp, Canis familiaris
atatatcagtatttctccagcttga

SEQ ID NO: 16477 - DNA, 25 bp, Canis familiaris
atatgacctggttctgtagtgtgga

SEQ ID NO: 16478 - DNA, 25 bp, Canis familiaris
atatatgacttttgctgttgattaa

SEQ ID NO: 16479 - DNA, 25 bp, Canis familiaris
atatatgtctatttctgtggtttat

SEQ ID NO: 16480 - DNA, 25 bp, Canis familiaris
atatcttatgatagtctttttttac

SEQ ID NO: 16481 - DNA, 25 bp, Canis familiaris
atatcggtggttctatatatatata

SEQ ID NO: 16482 - DNA, 25 bp, Canis familiaris
atatcactggctccatattaaaaaa

SEQ ID NO: 16483 - DNA, 25 bp, Canis familiaris
atatcacgggactttccagaatgtc

SEQ ID NO: 16484 - DNA, 25 bp, Canis familiaris
atatgcgcgagagctcttcacaagt

SEQ ID NO: 16485 - DNA, 25 bp, Canis familiaris
atatctagatagtcccatagtgagt

SEQ ID NO: 16486 - DNA, 25 bp, Canis familiaris
atatctaatagctgtgaactcactg

SEQ ID NO: 16487 - DNA, 25 bp, Canis familiaris
atatcaatatccaggaacctcgctg

SEQ ID NO: 16488 - DNA, 25 bp, Canis familiaris
atatcagtcttcatggaactttcca

SEQ ID NO: 16489 - DNA, 25 bp, Canis familiaris
atatctttctttcgaacgtctgcac

SEQ ID NO: 16490 - DNA, 25 bp, Canis familiaris
atatcgtttttccaattgatccatt

SEQ ID NO: 16491 - DNA, 25 bp, Canis familiaris
atatcgtctctattcaaagtataat

SEQ ID NO: 16492 - DNA, 25 bp, Canis familiaris
atatctgtgattttcaagcacttat

SEQ ID NO: 16493 - DNA, 25 bp, Canis familiaris
atatctggacagtgcacaagttaaa

SEQ ID NO: 16494 - DNA, 25 bp, Canis familiaris
atatatggtagcaacacgctgttat

SEQ ID NO: 16495 - DNA, 25 bp, Canis familiaris
atagtggtacaatcacgttcccttc

SEQ ID NO: 16496 - DNA, 25 bp, Canis familiaris
atcggcttaaaactacttcttccat

SEQ ID NO: 16497 - DNA, 25 bp, Canis familiaris
atatcgtttagaactccttcgtctc

SEQ ID NO: 16498 - DNA, 25 bp, Canis familiaris
atataattctttactcctatccttc

SEQ ID NO: 16499 - DNA, 25 bp, Canis familiaris
atataatgttcctctctgtgtcagt

SEQ ID NO: 16500 - DNA, 25 bp, Canis familiaris
atatgatatctttctccacgtgttt

SEQ ID NO: 16501 - DNA, 25 bp, Canis familiaris
atatccacctacaaaatcagctctt

SEQ ID NO: 16502 - DNA, 25 bp, Canis familiaris
atatccaactattcgagtctctttc

SEQ ID NO: 16503 - DNA, 25 bp, Canis familiaris
atatagtacataccttgtccctgtc

SEQ ID NO: 16504 - DNA, 25 bp, Canis familiaris
atatgggattagcatgtaacctgta

SEQ ID NO: 16505 - DNA, 25 bp, Canis familiaris
atagggaattcttgctaatatttag

SEQ ID NO: 16506 - DNA, 25 bp, Canis familiaris
atacggataggttcttttgtatcgt

SEQ ID NO: 16507 - DNA, 25 bp, Canis familiaris
atactggaagaatcctttcataata

SEQ ID NO: 16508 - DNA, 25 bp, Canis familiaris
aacggagctgcttgaacctttaaat

SEQ ID NO: 16509 - DNA, 25 bp, Canis familiaris
ataaatatgtgctgaacccttaaaa

SEQ ID NO: 16510 - DNA, 25 bp, Canis familiaris
atagatgaatgtgtgacgacccaaa

SEQ ID NO: 16511 - DNA, 25 bp, Canis familiaris
atagagcatttccaacagtctcccc

SEQ ID NO: 16512 - DNA, 25 bp, Canis familiaris
ataaattaaaacattccctcccatg

SEQ ID NO: 16513 - DNA, 25 bp, Canis familiaris
accaaacaaaaacatcctcacgact

SEQ ID NO: 16514 - DNA, 25 bp, Canis familiaris
accggtgaaaagtgacccaatgact

SEQ ID NO: 16515 - DNA, 25 bp, Canis familiaris
atcccgggaacacagccgggtcact

SEQ ID NO: 16516 - DNA, 25 bp, Canis familiaris
agccgagggccagaagccgggattt

SEQ ID NO: 16517 - DNA, 25 bp, Canis familiaris
ataggaggggcccgagccaggaagt

SEQ ID NO: 16518 - DNA, 25 bp, Canis familiaris
ataggagggcccgagtcacggaatt

SEQ ID NO: 16519 - DNA, 25 bp, Canis familiaris
atacggagagacacgtcctggactt

SEQ ID NO: 16520 - DNA, 25 bp, Canis familiaris
atatccggacacaggatgccgttcg

SEQ ID NO: 16521 - DNA, 25 bp, Canis familiaris
atagtacgttcaaggagcgcaggtc

SEQ ID NO: 16522 - DNA, 25 bp, Canis familiaris
ataaacgttcaacactcgtgacagt

SEQ ID NO: 16523 - DNA, 25 bp, Canis familiaris
atacaaagttcaactggtctgtgag

SEQ ID NO: 16524 - DNA, 25 bp, Canis familiaris
ataacaggtctgtgatgcccttaga

SEQ ID NO: 16525 - DNA, 25 bp, Canis familiaris
ataacaggtctgtgatgcccttaga

SEQ ID NO: 16526 - DNA, 25 bp, Canis familiaris
atatcgggctattgagtccctgtaa

SEQ ID NO: 16527 - DNA, 25 bp, Canis familiaris
atagtggagatttttgccctgccaa

SEQ ID NO: 16528 - DNA, 25 bp, Canis familiaris
atagtctaattctatttcccacctc

SEQ ID NO: 16529 - DNA, 25 bp, Canis familiaris
atatgctgtatgtttacgatccccc

SEQ ID NO: 16530 - DNA, 25 bp, Canis familiaris
atatcagaattcgtacgaccgccct

SEQ ID NO: 16531 - DNA, 25 bp, Canis familiaris
atataagatgatcctgacgcccgag

SEQ ID NO: 16532 - DNA, 25 bp, Canis familiaris
atatgagggacactgcacggacgag

SEQ ID NO: 16533 - DNA, 25 bp, Canis familiaris
atatcgagtgtgtcagctccgacga

SEQ ID NO: 16534 - DNA, 25 bp, Canis familiaris
atatctgggatttgatctctgacta

SEQ ID NO: 16535 - DNA, 25 bp, Canis familiaris
atatctgggtcttgtgaggactcac

SEQ ID NO: 16536 - DNA, 25 bp, Canis familiaris
atatccagcttttgcggtgacatcc

SEQ ID NO: 16537 - DNA, 25 bp, Canis familiaris
atatcctcttgttggattgacctct

SEQ ID NO: 16538 - DNA, 25 bp, Canis familiaris
ataggtctttgtttagcctccatgt

SEQ ID NO: 16539 - DNA, 25 bp, Canis familiaris
atatgttttttatacacttcagtgc

SEQ ID NO: 16540 - DNA, 25 bp, Canis familiaris
atagttttgataaccacagttttca

SEQ ID NO: 16541 - DNA, 25 bp, Canis familiaris
atatgtttgtactcctatgttttgc

SEQ ID NO: 16542 - DNA, 25 bp, Canis familiaris
atatccatttacactttgtatatct

SEQ ID NO: 16543 - DNA, 25 bp, Canis familiaris
atatcaccagtatcctttgcttaat

SEQ ID NO: 16544 - DNA, 25 bp, Canis familiaris
atatcatttgttttcttcatcctaa

SEQ ID NO: 16545 - DNA, 25 bp, Canis familiaris
atatcttgtttctttatctagcatt

SEQ ID NO: 16546 - DNA, 25 bp, Canis familiaris
atatctgtgatgttttgcaaccgtt

SEQ ID NO: 16547 - DNA, 25 bp, Canis familiaris
atatcttggcgtttgtcacacactt

SEQ ID NO: 16548 - DNA, 25 bp, Canis familiaris
atatcttgaggaatggatgcctttt

SEQ ID NO: 16549 - DNA, 25 bp, Canis familiaris
atatcgtgggaaaatcttgtgtgtt

SEQ ID NO: 16550 - DNA, 25 bp, Canis familiaris
ataggggaggatgtcttcgtggctg

SEQ ID NO: 16551 - DNA, 25 bp, Canis familiaris
atatggggtggttgtcttttcttgg

SEQ ID NO: 16552 - DNA, 25 bp, Canis familiaris
ataggggtgcacatgtcttttcaaa

SEQ ID NO: 16553 - DNA, 25 bp, Canis familiaris
atatgtgagtggctctggctttctc

SEQ ID NO: 16554 - DNA, 25 bp, Canis familiaris
atatcatgagggcgtggctgttcca

SEQ ID NO: 16555 - DNA, 25 bp, Canis familiaris
atatggaggcaccagggcagctttc

SEQ ID NO: 16556 - DNA, 25 bp, Canis familiaris
atatggcccgcgctggagtttcaat

SEQ ID NO: 16557 - DNA, 25 bp, Canis familiaris
atagcagccacggatgtcgttgcgt

SEQ ID NO: 16558 - DNA, 25 bp, Canis familiaris
atacagagcacagagtcggcgggag

SEQ ID NO: 16559 - DNA, 25 bp, Canis familiaris
atatgaaggactgacccgggagcca

SEQ ID NO: 16560 - DNA, 25 bp, Canis familiaris
ataaagcgacgcggacagcgggggc

SEQ ID NO: 16561 - DNA, 25 bp, Canis familiaris
atagaacaacgttgtacaaagaagc

SEQ ID NO: 16562 - DNA, 25 bp, Canis familiaris
aggaagcaaaaaaggctaagcaagc

SEQ ID NO: 16563 - DNA, 25 bp, Canis familiaris
aggaagcgaaattggccttgacaga

SEQ ID NO: 16564 - DNA, 25 bp, Canis familiaris
atagaacgtatatggccttgccttt

SEQ ID NO: 16565 - DNA, 25 bp, Canis familiaris
atatgcacagggtttcaccttgctt

SEQ ID NO: 16566 - DNA, 25 bp, Canis familiaris
atatgtctgcaggtttctccttgat

SEQ ID NO: 16567 - DNA, 25 bp, Canis familiaris
atatgttgactgctttcattttgat

SEQ ID NO: 16568 - DNA, 25 bp, Canis familiaris
ataggagatctgcttataatttagc

SEQ ID NO: 16569 - DNA, 25 bp, Canis familiaris
ataggagcactatttacaatagcca

SEQ ID NO: 16570 - DNA, 25 bp, Canis familiaris
atatgacaccagtattgccaataaa

SEQ ID NO: 16571 - DNA, 25 bp, Canis familiaris
atatcacaattgtatttcttatgaa

SEQ ID NO: 16572 - DNA, 25 bp, Canis familiaris
atatggcaatatgtttttgtatcaa

SEQ ID NO: 16573 - DNA, 25 bp, Canis familiaris
atagtgcgatctttagtttctgata

SEQ ID NO: 16574 - DNA, 25 bp, Canis familiaris
atatgcctagcttctagttcgctgt

SEQ ID NO: 16575 - DNA, 25 bp, Canis familiaris
ataggcatatcccaagtacagcttt

SEQ ID NO: 16576 - DNA, 25 bp, Canis familiaris
atatgtctcccaatcagctggactt

SEQ ID NO: 16577 - DNA, 25 bp, Canis familiaris
atagatgccctttctctaactgcat

SEQ ID NO: 16578 - DNA, 25 bp, Canis familiaris
atagtccgcatttcatcacaacaca

SEQ ID NO: 16579 - DNA, 25 bp, Canis familiaris
atagcttgagctggactgcatgaaa

SEQ ID NO: 16580 - DNA, 25 bp, Canis familiaris
atatgctgagcagctgctccaggaa

SEQ ID NO: 16581 - DNA, 25 bp, Canis familiaris
atatgctggcagtgctttgcaatat

SEQ ID NO: 16582 - DNA, 25 bp, Canis familiaris
atatgtgctctgttgtgtctggctt

SEQ ID NO: 16583 - DNA, 25 bp, Canis familiaris
atatgttcatattggattgcgcctt

SEQ ID NO: 16584 - DNA, 25 bp, Canis familiaris
atatgcaaatattttctgcctcttc

SEQ ID NO: 16585 - DNA, 25 bp, Canis familiaris
atatgatttatctctaccttagcag

SEQ ID NO: 16586 - DNA, 25 bp, Canis familiaris
atatgttcacactggacactgtagt

SEQ ID NO: 16587 - DNA, 25 bp, Canis familiaris
ataggccaccaatgatactgaagct

SEQ ID NO: 16588 - DNA, 25 bp, Canis familiaris
atagtgtcaccaatccagtaaagct

SEQ ID NO: 16589 - DNA, 25 bp, Canis familiaris
atagtttgccttgtgttccagtttt

SEQ ID NO: 16590 - DNA, 25 bp, Canis familiaris
atatgtcttttttttttcagcttga

SEQ ID NO: 16591 - DNA, 25 bp, Canis familiaris
atatcttttttcttgtattcccata

SEQ ID NO: 16592 - DNA, 25 bp, Canis familiaris
atatctttctcaaaatggttcccat

SEQ ID NO: 16593 - DNA, 25 bp, Canis familiaris
atatctggcttcaaactgtttctct

SEQ ID NO: 16594 - DNA, 25 bp, Canis familiaris
atatctttctcttatctgttattta

SEQ ID NO: 16595 - DNA, 25 bp, Canis familiaris
atatcttacactttcattaacctta

SEQ ID NO: 16596 - DNA, 25 bp, Canis familiaris
atatctagcacctttttaacttttg

SEQ ID NO: 16597 - DNA, 25 bp, Canis familiaris
atatctagacccttcttccaattaa

SEQ ID NO: 16598 - DNA, 25 bp, Canis familiaris
atatcctcacccgttgtaagtatga

SEQ ID NO: 16599 - DNA, 25 bp, Canis familiaris
ataccacagccaccacttatgggaa

SEQ ID NO: 16600 - DNA, 25 bp, Canis familiaris
atatccacccagctttgttctggaa

SEQ ID NO: 16601 - DNA, 25 bp, Canis familiaris
ataggtcccagagtttgaatcccca

SEQ ID NO: 16602 - DNA, 25 bp, Canis familiaris
atatgcccaacggcattcacaaccc

SEQ ID NO: 16603 - DNA, 25 bp, Canis familiaris
atatcccaaccagttacctgatccc

SEQ ID NO: 16604 - DNA, 25 bp, Canis familiaris
atatcatcaactgctttaccttctt

SEQ ID NO: 16605 - DNA, 25 bp, Canis familiaris
atatcatcagccagttccttttgtt

SEQ ID NO: 16606 - DNA, 25 bp, Canis familiaris
atatcttgcgcgagactctttcttt

SEQ ID NO: 16607 - DNA, 25 bp, Canis familiaris
atatcttcgtgttgttttctcatca

SEQ ID NO: 16608 - DNA, 25 bp, Canis familiaris
atatctgctcttggctgattttctc

SEQ ID NO: 16609 - DNA, 25 bp, Canis familiaris
atagtggctgtgacgattgtgatcc

SEQ ID NO: 16610 - DNA, 25 bp, Canis familiaris
atagtgtgctgtcccagggcagacc

SEQ ID NO: 16611 - DNA, 25 bp, Canis familiaris
atatcattggtgcctgcagggtgcc

SEQ ID NO: 16612 - DNA, 25 bp, Canis familiaris
atatgctctgggctggagacatgaa

SEQ ID NO: 16613 - DNA, 25 bp, Canis familiaris
atatcttgtctactggagctgtaaa

SEQ ID NO: 16614 - DNA, 25 bp, Canis familiaris
atatgtctgctctgctgaagctggc

SEQ ID NO: 16615 - DNA, 25 bp, Canis familiaris
atagttctcgggaagcagctgctgg

SEQ ID NO: 16616 - DNA, 25 bp, Canis familiaris
atagtgtccggcaatcatcgtgggc

SEQ ID NO: 16617 - DNA, 25 bp, Canis familiaris
ataggtctagccaagacgttactgg

SEQ ID NO: 16618 - DNA, 25 bp, Canis familiaris
ataggttcacacaggctttatatct

SEQ ID NO: 16619 - DNA, 25 bp, Canis familiaris
ataggctaacctcggccttcaattt

SEQ ID NO: 16620 - DNA, 25 bp, Canis familiaris
atagggaagcacaggcacctaccct

SEQ ID NO: 16621 - DNA, 25 bp, Canis familiaris
atacgtagcgaccaacggctactcc

SEQ ID NO: 16622 - DNA, 25 bp, Canis familiaris
atatgcgatttgacagaagcggaac

SEQ ID NO: 16623 - DNA, 25 bp, Canis familiaris
atagagtttgctgacaccatcaagc

SEQ ID NO: 16624 - DNA, 25 bp, Canis familiaris
atagaggcacgtgcaaagcattaga

SEQ ID NO: 16625 - DNA, 25 bp, Canis familiaris
atcagggccagttaaaataatgcaa

SEQ ID NO: 16626 - DNA, 25 bp, Canis familiaris
ataggtgccgtttaactcacatgcc

SEQ ID NO: 16627 - DNA, 25 bp, Canis familiaris
ataggtacaccttaagcaactgtat

SEQ ID NO: 16628 - DNA, 25 bp, Canis familiaris
ataggccatacttatacagacgtgt

SEQ ID NO: 16629 - DNA, 25 bp, Canis familiaris
atagtactccatgtaaatgcaatgt

SEQ ID NO: 16630 - DNA, 25 bp, Canis familiaris
atagtcattccaaatatgagatgca

SEQ ID NO: 16631 - DNA, 25 bp, Canis familiaris
atatgcattacctgtatgaagctga

SEQ ID NO: 16632 - DNA, 25 bp, Canis familiaris
atatctgtaccagctatgtaccagt

SEQ ID NO: 16633 - DNA, 25 bp, Canis familiaris
atatctggactctcttgtatcatag

SEQ ID NO: 16634 - DNA, 25 bp, Canis familiaris
atatctgtgtctgtctgttctaagt

SEQ ID NO: 16635 - DNA, 25 bp, Canis familiaris
atatcgctccatttgcattatttgt

SEQ ID NO: 16636 - DNA, 25 bp, Canis familiaris
atatccacagatactgcctttagct

SEQ ID NO: 16637 - DNA, 25 bp, Canis familiaris
atatccacgttgactttacatttat

SEQ ID NO: 16638 - DNA, 25 bp, Canis familiaris
atatcctgcttgaacttgaccagtg

SEQ ID NO: 16639 - DNA, 25 bp, Canis familiaris
atatcctatctttgtcatacctgtg

SEQ ID NO: 16640 - DNA, 25 bp, Canis familiaris
atatccttgttcgactgagctttta

SEQ ID NO: 16641 - DNA, 25 bp, Canis familiaris
atatctttgtcttctcgaggatttt

SEQ ID NO: 16642 - DNA, 25 bp, Canis familiaris
atatctgtagttacatccttctttt

SEQ ID NO: 16643 - DNA, 25 bp, Canis familiaris
atatgatccagtttctttcttttgc

SEQ ID NO: 16644 - DNA, 25 bp, Canis familiaris
atatctccctgaattctttttctgc

SEQ ID NO: 16645 - DNA, 25 bp, Canis familiaris
atatcctctacaattctgttgtttg

SEQ ID NO: 16646 - DNA, 25 bp, Canis familiaris
atatcctctgacgtatcatcttttt

SEQ ID NO: 16647 - DNA, 25 bp, Canis familiaris
atactttgagtcttcattttttcca

SEQ ID NO: 16648 - DNA, 25 bp, Canis familiaris
ataccttcagtttcttattttgaat

SEQ ID NO: 16649 - DNA, 25 bp, Canis familiaris
ataggctctagtttgttttttcatt

SEQ ID NO: 16650 - DNA, 25 bp, Canis familiaris
atagtcttggtatttttcaattatg

SEQ ID NO: 16651 - DNA, 25 bp, Canis familiaris
atcacttcttgttgttttgaaccag

SEQ ID NO: 16652 - DNA, 25 bp, Canis familiaris
ataccatcgtaaatgttttcccagt

SEQ ID NO: 16653 - DNA, 25 bp, Canis familiaris
ataccacagaacttgactttacctt

SEQ ID NO: 16654 - DNA, 25 bp, Canis familiaris
atatgaaactacgtacgtctgactc

SEQ ID NO: 16655 - DNA, 25 bp, Canis familiaris
atatgataatcttttccggctgacc

SEQ ID NO: 16656 - DNA, 25 bp, Canis familiaris
atatgaatatcttgctatttgcagc

SEQ ID NO: 16657 - DNA, 25 bp, Canis familiaris
atatgaatactgttcagccatcaca

SEQ ID NO: 16658 - DNA, 25 bp, Canis familiaris
atatgaatgaatctcccatcccaag

SEQ ID NO: 16659 - DNA, 25 bp, Canis familiaris
atatgtaactccacagacacgcaag

SEQ ID NO: 16660 - DNA, 25 bp, Canis familiaris
atatggatacccactggactccaaa

SEQ ID NO: 16661 - DNA, 25 bp, Canis familiaris
ataggatgaccaacgaggcgctgca

SEQ ID NO: 16662 - DNA, 25 bp, Canis familiaris
atatgtggaccctggggccaaagcc

SEQ ID NO: 16663 - DNA, 25 bp, Canis familiaris
atatgctaaaccttttggccagaga

SEQ ID NO: 16664 - DNA, 25 bp, Canis familiaris
atatgccaacctgggcttggtggct

SEQ ID NO: 16665 - DNA, 25 bp, Canis familiaris
atagcgatgcactgggacggatggt

SEQ ID NO: 16666 - DNA, 25 bp, Canis familiaris
atagctgagctcggggagtggtggg

SEQ ID NO: 16667 - DNA, 25 bp, Canis familiaris
atactattcccaccatggggagcga

SEQ ID NO: 16668 - DNA, 25 bp, Canis familiaris
ataccttccaacaatcggtggcacc

SEQ ID NO: 16669 - DNA, 25 bp, Canis familiaris
atagcctccgagactcacaaggcca

SEQ ID NO: 16670 - DNA, 25 bp, Canis familiaris
atatgctcccgcaaccagagatgga

SEQ ID NO: 16671 - DNA, 25 bp, Canis familiaris
atatgctcaccgaacgtggatccca

SEQ ID NO: 16672 - DNA, 25 bp, Canis familiaris
atatgtcaatcgtactgggctgggc

SEQ ID NO: 16673 - DNA, 25 bp, Canis familiaris
atatgtcaaggcctctgaagcggga

SEQ ID NO: 16674 - DNA, 25 bp, Canis familiaris
atatgctccagtcgacataacggtg

SEQ ID NO: 16675 - DNA, 25 bp, Canis familiaris
atatgctcgtgtccacaaggggctt

SEQ ID NO: 16676 - DNA, 25 bp, Canis familiaris
atagaggggcactgggtggcttagt

SEQ ID NO: 16677 - DNA, 25 bp, Canis familiaris
ataggggtgcttagggtggcttcag

SEQ ID NO: 16678 - DNA, 25 bp, Canis familiaris
ataggagcccttggggtgatccaga

SEQ ID NO: 16679 - DNA, 25 bp, Canis familiaris
atatgaaccgatcaggagtaccaaa

SEQ ID NO: 16680 - DNA, 25 bp, Canis familiaris
atagacaccaggaggaccaccgaac

SEQ ID NO: 16681 - DNA, 25 bp, Canis familiaris
atagtctccaggaagaaccaaccct

SEQ ID NO: 16682 - DNA, 25 bp, Canis familiaris
ataggcccatgtcaggaggcgaccg

SEQ ID NO: 16683 - DNA, 25 bp, Canis familiaris
ataggcatcggacccgagaggagcc

SEQ ID NO: 16684 - DNA, 25 bp, Canis familiaris
atagtcactggctcaggagacaaga

SEQ ID NO: 16685 - DNA, 25 bp, Canis familiaris
atagatcctttaggggcaccatgaa

SEQ ID NO: 16686 - DNA, 25 bp, Canis familiaris
atagattgttttggtggccttccct

SEQ ID NO: 16687 - DNA, 25 bp, Canis familiaris
atagaagcttttgctttccttgtcc

SEQ ID NO: 16688 - DNA, 25 bp, Canis familiaris
ataggtggtcttgatcaccctttcg

SEQ ID NO: 16689 - DNA, 25 bp, Canis familiaris
ctgaagtttagtctaccctctttgt

SEQ ID NO: 16690 - DNA, 25 bp, Canis familiaris
ataactttctgtctactccagttta

SEQ ID NO: 16691 - DNA, 25 bp, Canis familiaris
atacaagtgcttggggacgcctttt

SEQ ID NO: 16692 - DNA, 25 bp, Canis familiaris
atatgacagactactggcttcccgc

SEQ ID NO: 16693 - DNA, 25 bp, Canis familiaris
atagaaagcttttgtctgcaccctg

SEQ ID NO: 16694 - DNA, 25 bp, Canis familiaris
atagtgcaggcttttgttcatccca

SEQ ID NO: 16695 - DNA, 25 bp, Canis familiaris
atagtggggactggtgatcacctca

SEQ ID NO: 16696 - DNA, 25 bp, Canis familiaris
atacgggggctttatactcatgcat

SEQ ID NO: 16697 - DNA, 25 bp, Canis familiaris
ataggggttctttagatgtctctac

SEQ ID NO: 16698 - DNA, 25 bp, Canis familiaris
atagggcctttaaaaatctgcatat

SEQ ID NO: 16699 - DNA, 25 bp, Canis familiaris
ataggctgtttttaaaatgccatat

SEQ ID NO: 16700 - DNA, 25 bp, Canis familiaris
ataggcgatttggacacacctggct

SEQ ID NO: 16701 - DNA, 25 bp, Canis familiaris
atagtctcacgggaaaaaggccaag

SEQ ID NO: 16702 - DNA, 25 bp, Canis familiaris
atacccgattgataaagaggccctg

SEQ ID NO: 16703 - DNA, 25 bp, Canis familiaris
atgaccttggaataaaaaacgctga

SEQ ID NO: 16704 - DNA, 25 bp, Canis familiaris
atatcccttcagtgaatgcaaaact

SEQ ID NO: 16705 - DNA, 25 bp, Canis familiaris
atacctgttcaataaaaatcatctt

SEQ ID NO: 16706 - DNA, 25 bp, Canis familiaris
atgaaattaatctcaaccaattcgt

SEQ ID NO: 16707 - DNA, 25 bp, Canis familiaris
atgtccatttatttctcccataaag

SEQ ID NO: 16708 - DNA, 25 bp, Canis familiaris
atatccatcctatacctcatataat

SEQ ID NO: 16709 - DNA, 25 bp, Canis familiaris
atatccaatccatgcattttaagtt

SEQ ID NO: 16710 - DNA, 25 bp, Canis familiaris
atactcacaagctttatttaaatta

SEQ ID NO: 16711 - DNA, 25 bp, Canis familiaris
ataccaatagtgtttatgtccaatt

SEQ ID NO: 16712 - DNA, 25 bp, Canis familiaris
atatggcactgaattcttaacctat

SEQ ID NO: 16713 - DNA, 25 bp, Canis familiaris
atatgtgcctgttgctgttaacttt

SEQ ID NO: 16714 - DNA, 25 bp, Canis familiaris
atatgccttgtgctttagagcttta

SEQ ID NO: 16715 - DNA, 25 bp, Canis familiaris
atatgcacatttcttttctgcgtgt

SEQ ID NO: 16716 - DNA, 25 bp, Canis familiaris
atagccatacttgttttgatgtcta

SEQ ID NO: 16717 - DNA, 25 bp, Canis familiaris
ataggatacatgtggcttttatcta

SEQ ID NO: 16718 - DNA, 25 bp, Canis familiaris
atatgtattctgttccttttggata

SEQ ID NO: 16719 - DNA, 25 bp, Canis familiaris
atatgtagtgcaactgcctctctct

SEQ ID NO: 16720 - DNA, 25 bp, Canis familiaris
atatggcaatgaagtgtcctatgaa

SEQ ID NO: 16721 - DNA, 25 bp, Canis familiaris
atatgccatcaaatttgcctgtgta

SEQ ID NO: 16722 - DNA, 25 bp, Canis familiaris
atatcctagattactgagctggtct

SEQ ID NO: 16723 - DNA, 25 bp, Canis familiaris
ataccgacacgcaaggctgtgagac

SEQ ID NO: 16724 - DNA, 25 bp, Canis familiaris
ataccaagcctgcagttgatcagca

SEQ ID NO: 16725 - DNA, 25 bp, Canis familiaris
ataccaaccagctgtgtgcaacgag

SEQ ID NO: 16726 - DNA, 25 bp, Canis familiaris
atacctaccatttacatcgacatgg

SEQ ID NO: 16727 - DNA, 25 bp, Canis familiaris
atagtaaacacttagcatccatgct

SEQ ID NO: 16728 - DNA, 25 bp, Canis familiaris
ataggaataccattatgattcagta

SEQ ID NO: 16729 - DNA, 25 bp, Canis familiaris
atagtactactattgttccatataa

SEQ ID NO: 16730 - DNA, 25 bp, Canis familiaris
atagtttggctcttgtggaccttgc

SEQ ID NO: 16731 - DNA, 25 bp, Canis familiaris
atagtctggtgtgtgtggtctttct

SEQ ID NO: 16732 - DNA, 25 bp, Canis familiaris
atagttcctgctgtgaggactttaa

SEQ ID NO: 16733 - DNA, 25 bp, Canis familiaris
ataggtgtgtctagtagtacttctt

SEQ ID NO: 16734 - DNA, 25 bp, Canis familiaris
ataccctgttctcagtactttcatc

SEQ ID NO: 16735 - DNA, 25 bp, Canis familiaris
ataccctatcggtgtgacccatatg

SEQ ID NO: 16736 - DNA, 25 bp, Canis familiaris
atacatgccgacgggcgctgacccc

SEQ ID NO: 16737 - DNA, 25 bp, Canis familiaris
atactcaggacttggtctaccttcc

SEQ ID NO: 16738 - DNA, 25 bp, Canis familiaris
atactagtagtaggactgtttcgac

SEQ ID NO: 16739 - DNA, 25 bp, Canis familiaris
atacacaataggtgaatttcccaaa

SEQ ID NO: 16740 - DNA, 25 bp, Canis familiaris
atacattacttataatcctcccaag

SEQ ID NO: 16741 - DNA, 25 bp, Canis familiaris
atatgcattgccctttatatcttcc

SEQ ID NO: 16742 - DNA, 25 bp, Canis familiaris
atagattcggctacatccatctgtc

SEQ ID NO: 16743 - DNA, 25 bp, Canis familiaris
atagatatgcgtgatcctctgtgag

SEQ ID NO: 16744 - DNA, 25 bp, Canis familiaris
atatgattattgtccttctctgatg

SEQ ID NO: 16745 - DNA, 25 bp, Canis familiaris
atatgcctcttgtacttcttgaaat

SEQ ID NO: 16746 - DNA, 25 bp, Canis familiaris
atagcctattgatctgcaatctaca

SEQ ID NO: 16747 - DNA, 25 bp, Canis familiaris
atatggctgtgggcccaatcgactt

SEQ ID NO: 16748 - DNA, 25 bp, Canis familiaris
ataggctgtgaaggtcctcgcacaa

SEQ ID NO: 16749 - DNA, 25 bp, Canis familiaris
atatgcctgatattttccctgaata

SEQ ID NO: 16750 - DNA, 25 bp, Canis familiaris
atatgggtacaattcctctggtaaa

SEQ ID NO: 16751 - DNA, 25 bp, Canis familiaris
atatgttatatcaaccctctggtaa

SEQ ID NO: 16752 - DNA, 25 bp, Canis familiaris
atatgtattctctaacaccgcgtta

SEQ ID NO: 16753 - DNA, 25 bp, Canis familiaris
atatgttctctgtattagccagtgt

SEQ ID NO: 16754 - DNA, 25 bp, Canis familiaris
atatgtttgcattactaggctagat

SEQ ID NO: 16755 - DNA, 25 bp, Canis familiaris
atatggggctgttctatactatgaa

SEQ ID NO: 16756 - DNA, 25 bp, Canis familiaris
atatggggatggttccactagaaat

SEQ ID NO: 16757 - DNA, 25 bp, Canis familiaris
atatggaacggctctcagcggagca

SEQ ID NO: 16758 - DNA, 25 bp, Canis familiaris
atagtggaggtctctgcttgtcaga

SEQ ID NO: 16759 - DNA, 25 bp, Canis familiaris
atagattgatcgtgcaccgtgtcca

SEQ ID NO: 16760 - DNA, 25 bp, Canis familiaris
ataggaaccaggccctgtgtccagt

SEQ ID NO: 16761 - DNA, 25 bp, Canis familiaris
ataggcaaccattaactgtgtacat

SEQ ID NO: 16762 - DNA, 25 bp, Canis familiaris
ataccaccactgttacggtcactac

SEQ ID NO: 16763 - DNA, 25 bp, Canis familiaris
aaagcaaactgatacggaacgagac

SEQ ID NO: 16764 - DNA, 25 bp, Canis familiaris
atgaagaaagtacaccagacacgga

SEQ ID NO: 16765 - DNA, 25 bp, Canis familiaris
atagagcatcaagtggaatccatta

SEQ ID NO: 16766 - DNA, 25 bp, Canis familiaris
atatgcagacagcctggagagcaag

SEQ ID NO: 16767 - DNA, 25 bp, Canis familiaris
atagatgcagccgttgcaggcgaag

SEQ ID NO: 16768 - DNA, 25 bp, Canis familiaris
atagtgacccagactggccacatta

SEQ ID NO: 16769 - DNA, 25 bp, Canis familiaris
ataggatcccagatcatcctatccg

SEQ ID NO: 16770 - DNA, 25 bp, Canis familiaris
atatgagacatctgatctttctatt

SEQ ID NO: 16771 - DNA, 25 bp, Canis familiaris
atatgaatcatcctgtttataagtg

SEQ ID NO: 16772 - DNA, 25 bp, Canis familiaris
atagatattgccaccctaatgatgt

SEQ ID NO: 16773 - DNA, 25 bp, Canis familiaris
atatggattccaacccaatagtaaa

SEQ ID NO: 16774 - DNA, 25 bp, Canis familiaris
atacgtgtgccatcccaaagaaaac

SEQ ID NO: 16775 - DNA, 25 bp, Canis familiaris
atactgtgtacctccaatgaaatgc

SEQ ID NO: 16776 - DNA, 25 bp, Canis familiaris
atagcggaacacacacagtcttaga

SEQ ID NO: 16777 - DNA, 25 bp, Canis familiaris
atacaggaccctcagcagaatctgg

SEQ ID NO: 16778 - DNA, 25 bp, Canis familiaris
atagcgttggccactcaaatccagt

SEQ ID NO: 16779 - DNA, 25 bp, Canis familiaris
ataactatggttgctgaaatgggaa

SEQ ID NO: 16780 - DNA, 25 bp, Canis familiaris
ataattcaagtggcctgcaactggg

SEQ ID NO: 16781 - DNA, 25 bp, Canis familiaris
atagcaatcaacacgatgaaggggt

SEQ ID NO: 16782 - DNA, 25 bp, Canis familiaris
atatgcacaagattcagcggagagt

SEQ ID NO: 16783 - DNA, 25 bp, Canis familiaris
atatgcacctgtgctgggattgtca

SEQ ID NO: 16784 - DNA, 25 bp, Canis familiaris
atagcaactgatggtgcttgctttc

SEQ ID NO: 16785 - DNA, 25 bp, Canis familiaris
atatgaactttcgttccctcaacat

SEQ ID NO: 16786 - DNA, 25 bp, Canis familiaris
atgataattcaaaaatccccaaccg

SEQ ID NO: 16787 - DNA, 25 bp, Canis familiaris
atagattacaatacccctcaaacca

SEQ ID NO: 16788 - DNA, 25 bp, Canis familiaris
atagtatgaaagttcctccaaaaat

SEQ ID NO: 16789 - DNA, 25 bp, Canis familiaris
ataggtaacactaaacgcaaactgt

SEQ ID NO: 16790 - DNA, 25 bp, Canis familiaris
ataggtaacacctaaagcaaactgt

SEQ ID NO: 16791 - DNA, 25 bp, Canis familiaris
atggggaaatccagacccaagtgga

SEQ ID NO: 16792 - DNA, 25 bp, Canis familiaris
atatgaggtaatgaagtccctggga

SEQ ID NO: 16793 - DNA, 25 bp, Canis familiaris
atatgaattagttagatgtttgtgg

SEQ ID NO: 16794 - DNA, 25 bp, Canis familiaris
atatgtaggagtatgtgtgtctgtg

SEQ ID NO: 16795 - DNA, 25 bp, Canis familiaris
atagtgaacaaactggtgtttacca

SEQ ID NO: 16796 - DNA, 25 bp, Canis familiaris
atagtactcaacctgaatcctaccc

SEQ ID NO: 16797 - DNA, 25 bp, Canis familiaris
atagccaccaacctgaagtggccca

SEQ ID NO: 16798 - DNA, 25 bp, Canis familiaris
ataggcactcagtcacagaaggggt

SEQ ID NO: 16799 - DNA, 25 bp, Canis familiaris
atagctcactactgccagagaggca

SEQ ID NO: 16800 - DNA, 25 bp, Canis familiaris
atagcttctaccccaaagacatcaa

SEQ ID NO: 16801 - DNA, 25 bp, Canis familiaris
atagttatattccagtgctaagcca

SEQ ID NO: 16802 - DNA, 25 bp, Canis familiaris
atatgtatatacacacttatacaca

SEQ ID NO: 16803 - DNA, 25 bp, Canis familiaris
ataggtgcacacagcttctaataat

SEQ ID NO: 16804 - DNA, 25 bp, Canis familiaris
atatggtgacagtggggatggctat

SEQ ID NO: 16805 - DNA, 25 bp, Canis familiaris
ataggtgcacacttgggagtcgcta

SEQ ID NO: 16806 - DNA, 25 bp, Canis familiaris
ataggcatagaccgaggaggctctt

SEQ ID NO: 16807 - DNA, 25 bp, Canis familiaris
atatgtgcgcagattccgagagctc

SEQ ID NO: 16808 - DNA, 25 bp, Canis familiaris
atatgattgcagatgtgatggaaca

SEQ ID NO: 16809 - DNA, 25 bp, Canis familiaris
atagatgctatgaatgtgtcgaaaa

SEQ ID NO: 16810 - DNA, 25 bp, Canis familiaris
atatgtcagacaagttcagtaaagc

SEQ ID NO: 16811 - DNA, 25 bp, Canis familiaris
atatgtcacaccattcagtataagc

SEQ ID NO: 16812 - DNA, 25 bp, Canis familiaris
atagtcacatactttcagtcaaata

SEQ ID NO: 16813 - DNA, 25 bp, Canis familiaris
atagaccatacatacgatcagcaaa

SEQ ID NO: 16814 - DNA, 25 bp, Canis familiaris
atagcagcctagatccagagccaac

SEQ ID NO: 16815 - DNA, 25 bp, Canis familiaris
atacatgccctagatcagaccaaca

SEQ ID NO: 16816 - DNA, 25 bp, Canis familiaris
atacatgcaccatacactatccaca

SEQ ID NO: 16817 - DNA, 25 bp, Canis familiaris
atactcagtttccgccatctcagtc

SEQ ID NO: 16818 - DNA, 25 bp, Canis familiaris
atactaagttcagattcatgcagct

SEQ ID NO: 16819 - DNA, 25 bp, Canis familiaris
atacctagtagcgcattggatcata

SEQ ID NO: 16820 - DNA, 25 bp, Canis familiaris
atactctagtaaacaaggatttcca

SEQ ID NO: 16821 - DNA, 25 bp, Canis familiaris
ataccactttgatcacgttttccag

SEQ ID NO: 16822 - DNA, 25 bp, Canis familiaris
atagccactggattccacggattac

SEQ ID NO: 16823 - DNA, 25 bp, Canis familiaris
atagaccctactccaaggttcactc

SEQ ID NO: 16824 - DNA, 25 bp, Canis familiaris
atgggccagtacgccgttgtatgct

SEQ ID NO: 16825 - DNA, 25 bp, Canis familiaris
ataggcttgtacttcttgttgcgtt

SEQ ID NO: 16826 - DNA, 25 bp, Canis familiaris
atagttggatcatctcattcgaggt

SEQ ID NO: 16827 - DNA, 25 bp, Canis familiaris
atagttctgtcacgatatgctctag

SEQ ID NO: 16828 - DNA, 25 bp, Canis familiaris
atagttcttcattattgcctagccc

SEQ ID NO: 16829 - DNA, 25 bp, Canis familiaris
atatgttattctcatttagtgccct

SEQ ID NO: 16830 - DNA, 25 bp, Canis familiaris
atatgtttccgtttctgagagactt

SEQ ID NO: 16831 - DNA, 25 bp, Canis familiaris
atagctttagccatgtcgcgggcat

SEQ ID NO: 16832 - DNA, 25 bp, Canis familiaris
atagagagtaccagacccatgtgcc

SEQ ID NO: 16833 - DNA, 25 bp, Canis familiaris
atagagcttcctatgacccagtgat

SEQ ID NO: 16834 - DNA, 25 bp, Canis familiaris
atagagtctcctcgtagagagagta

SEQ ID NO: 16835 - DNA, 25 bp, Canis familiaris
ataggcttccagttatggaatgaat

SEQ ID NO: 16836 - DNA, 25 bp, Canis familiaris
atatggtgtcctctcggaatgactg

SEQ ID NO: 16837 - DNA, 25 bp, Canis familiaris
atatggctgtttctgtatatatgaa

SEQ ID NO: 16838 - DNA, 25 bp, Canis familiaris
atagcattgctttcgtgtaaattat

SEQ ID NO: 16839 - DNA, 25 bp, Canis familiaris
atatgattgctctcatatgtgggat

SEQ ID NO: 16840 - DNA, 25 bp, Canis familiaris
atatgattccacccatggcaaattc

SEQ ID NO: 16841 - DNA, 25 bp, Canis familiaris
atagatgtgcctaccatggaagaat

SEQ ID NO: 16842 - DNA, 25 bp, Canis familiaris
atagtggctgccacgtagcagaatg

SEQ ID NO: 16843 - DNA, 25 bp, Canis familiaris
atacgtgctgccagatacgctgcaa

SEQ ID NO: 16844 - DNA, 25 bp, Canis familiaris
atacgtgccgatcaccggacacaat

SEQ ID NO: 16845 - DNA, 25 bp, Canis familiaris
atacactggccttacccaggaatat

SEQ ID NO: 16846 - DNA, 25 bp, Canis familiaris
atacctagcctacacacattaaatg

SEQ ID NO: 16847 - DNA, 25 bp, Canis familiaris
atacctgggtattacactttggatg

SEQ ID NO: 16848 - DNA, 25 bp, Canis familiaris
ataccggtgcatcgtacatctcggg

SEQ ID NO: 16849 - DNA, 25 bp, Canis familiaris
atcaccttggagctttcgaggagtc

SEQ ID NO: 16850 - DNA, 25 bp, Canis familiaris
ataccctacaggttcatagcaggaa

SEQ ID NO: 16851 - DNA, 25 bp, Canis familiaris
ataccgtgaaggtcctgggtcaagg

SEQ ID NO: 16852 - DNA, 25 bp, Canis familiaris
ataccttaaatgtgggagatcggga

SEQ ID NO: 16853 - DNA, 25 bp, Canis familiaris
ataggtctgtaatttgtcaaatggg

SEQ ID NO: 16854 - DNA, 25 bp, Canis familiaris
ataggtctattcttttaacatgtga

SEQ ID NO: 16855 - DNA, 25 bp, Canis familiaris
atagttatatatattctgaagggaa

SEQ ID NO: 16856 - DNA, 25 bp, Canis familiaris
atatgtatagattgcatttcttagg

SEQ ID NO: 16857 - DNA, 25 bp, Canis familiaris
atagtcataaatgtattgtagcgag

SEQ ID NO: 16858 - DNA, 25 bp, Canis familiaris
atagtcatatatgtattttagcgag

SEQ ID NO: 16859 - DNA, 25 bp, Canis familiaris
atatgtatctattctgtttcttgga

SEQ ID NO: 16860 - DNA, 25 bp, Canis familiaris
atagctcttcattccagtgacttgg

SEQ ID NO: 16861 - DNA, 25 bp, Canis familiaris
atagctcctgaaccatgtgatgcct

SEQ ID NO: 16862 - DNA, 25 bp, Canis familiaris
atagcaacagcatcagcggcagcct

SEQ ID NO: 16863 - DNA, 25 bp, Canis familiaris
atagcaagctgaacgagcacgttaa

SEQ ID NO: 16864 - DNA, 25 bp, Canis familiaris
atagggatgactcaacgcccaagtc

SEQ ID NO: 16865 - DNA, 25 bp, Canis familiaris
atagggatgactcaagccaagttgc

SEQ ID NO: 16866 - DNA, 25 bp, Canis familiaris
atagggagacagcaaccatcgcctg

SEQ ID NO: 16867 - DNA, 25 bp, Canis familiaris
ataggaaggacgatatctgccgctc

SEQ ID NO: 16868 - DNA, 25 bp, Canis familiaris
ataggagaaatagttttgcctgcca

SEQ ID NO: 16869 - DNA, 25 bp, Canis familiaris
ataaacacaggacgtcattgcccgc

SEQ ID NO: 16870 - DNA, 25 bp, Canis familiaris
atagaccaagggcgctacagcccct

SEQ ID NO: 16871 - DNA, 25 bp, Canis familiaris
atagccgacagggtgacttaccctg

SEQ ID NO: 16872 - DNA, 25 bp, Canis familiaris
atagctcgacgtgaaggaactcctt

SEQ ID NO: 16873 - DNA, 25 bp, Canis familiaris
ataccgactgtcaatgagaaccttg

SEQ ID NO: 16874 - DNA, 25 bp, Canis familiaris
atagccgttggatagcagagctttg

SEQ ID NO: 16875 - DNA, 25 bp, Canis familiaris
atagaagattggtctggcagccttt

SEQ ID NO: 16876 - DNA, 25 bp, Canis familiaris
atagtagctatgaatatggcgccca

SEQ ID NO: 16877 - DNA, 25 bp, Canis familiaris
atagtacattatttgggctcacagt

SEQ ID NO: 16878 - DNA, 25 bp, Canis familiaris
atagctacccatttgtactcacgtg

SEQ ID NO: 16879 - DNA, 25 bp, Canis familiaris
atagtatccactaggtatttcagat

SEQ ID NO: 16880 - DNA, 25 bp, Canis familiaris
atagtacaagctcctgtgtgttcct

SEQ ID NO: 16881 - DNA, 25 bp, Canis familiaris
atgtggaaagacgcgtgttccccac

SEQ ID NO: 16882 - DNA, 25 bp, Canis familiaris
atctagaatcgtgtggttatcccct

SEQ ID NO: 16883 - DNA, 25 bp, Canis familiaris
actagttctttgtgttcgtcttcta

SEQ ID NO: 16884 - DNA, 25 bp, Canis familiaris
acaacgtcctggtgactttcagtcc

SEQ ID NO: 16885 - DNA, 25 bp, Canis familiaris
atagacgtacggcgagtcatacccc

SEQ ID NO: 16886 - DNA, 25 bp, Canis familiaris
ataactgtacagagccgcgataccc

SEQ ID NO: 16887 - DNA, 25 bp, Canis familiaris
ataccttcacagagagggctcccat

SEQ ID NO: 16888 - DNA, 25 bp, Canis familiaris
atagactgtccactatttggtctga

SEQ ID NO: 16889 - DNA, 25 bp, Canis familiaris
ataggcatggccatcataagggggg

SEQ ID NO: 16890 - DNA, 25 bp, Canis familiaris
atacgcatgactacattacaacggg

SEQ ID NO: 16891 - DNA, 25 bp, Canis familiaris
atacctacttgcacacgagagacgt

SEQ ID NO: 16892 - DNA, 25 bp, Canis familiaris
atactctgacttaccccagagtgca

SEQ ID NO: 16893 - DNA, 25 bp, Canis familiaris
atagttatcttgagtcctgagacat

SEQ ID NO: 16894 - DNA, 25 bp, Canis familiaris
atagatgcccttatgatgcttagaa

SEQ ID NO: 16895 - DNA, 25 bp, Canis familiaris
atagaggcctcttttcatgtgaaat

SEQ ID NO: 16896 - DNA, 25 bp, Canis familiaris
atagaggaattacaaggatacacat

SEQ ID NO: 16897 - DNA, 25 bp, Canis familiaris
agaagggttgggaggtctctcttgc

SEQ ID NO: 16898 - DNA, 25 bp, Canis familiaris
atagaggtttctgtaggtctgtcta

SEQ ID NO: 16899 - DNA, 25 bp, Canis familiaris
atagatgtttactctcagatcttga

SEQ ID NO: 16900 - DNA, 25 bp, Canis familiaris
atactgttgtttaccagtctccctg

SEQ ID NO: 16901 - DNA, 25 bp, Canis familiaris
atacctatttataacctggctccat

SEQ ID NO: 16902 - DNA, 25 bp, Canis familiaris
atagtttgcaaatactgctggtgga

SEQ ID NO: 16903 - DNA, 25 bp, Canis familiaris
ataggttgcaaaatcactgtgaggg

SEQ ID NO: 16904 - DNA, 25 bp, Canis familiaris
ataggtctcaaaattctgtgacaga

SEQ ID NO: 16905 - DNA, 25 bp, Canis familiaris
ataggtctaataatagctctggagc

SEQ ID NO: 16906 - DNA, 25 bp, Canis familiaris
atagttatgaatcttgtctgggaaa

SEQ ID NO: 16907 - DNA, 25 bp, Canis familiaris
atagtatttatttttgctgggtcaa

SEQ ID NO: 16908 - DNA, 25 bp, Canis familiaris
atagttcttatgtctttcctggttg

SEQ ID NO: 16909 - DNA, 25 bp, Canis familiaris
atagtaccatagtattctgactgga

SEQ ID NO: 16910 - DNA, 25 bp, Canis familiaris
atagtgacctcactcaatctctttg

SEQ ID NO: 16911 - DNA, 25 bp, Canis familiaris
atacgagacccattcattctttggc

SEQ ID NO: 16912 - DNA, 25 bp, Canis familiaris
ataagattccacgcttttgggcagc

SEQ ID NO: 16913 - DNA, 25 bp, Canis familiaris
ataggatttggtgctttctgtgata

SEQ ID NO: 16914 - DNA, 25 bp, Canis familiaris
ataaattgtcttgctgttttgtaaa

SEQ ID NO: 16915 - DNA, 25 bp, Canis familiaris
atagcagtgtccccttgaagtttaa

SEQ ID NO: 16916 - DNA, 25 bp, Canis familiaris
ataggtgcacaactctggtcatttt

SEQ ID NO: 16917 - DNA, 25 bp, Canis familiaris
ataggcctctagttggttttttcat

SEQ ID NO: 16918 - DNA, 25 bp, Canis familiaris
atagagcctatcacggtattcttct

SEQ ID NO: 16919 - DNA, 25 bp, Canis familiaris
atagccctgaaacagcttgtgcctt

SEQ ID NO: 16920 - DNA, 25 bp, Canis familiaris
ataggtctaacacaccatctctcat

SEQ ID NO: 16921 - DNA, 25 bp, Canis familiaris
ataggtataaaatgctctctctgac

SEQ ID NO: 16922 - DNA, 25 bp, Canis familiaris
atactttacaagggctccgtgcagc

SEQ ID NO: 16923 - DNA, 25 bp, Canis familiaris
atacaagttaccagcacacgtgagt

SEQ ID NO: 16924 - DNA, 25 bp, Canis familiaris
ataccttcttcctgagcaaatacat

SEQ ID NO: 16925 - DNA, 25 bp, Canis familiaris
ataaattggccctggcaaatggcta

SEQ ID NO: 16926 - DNA, 25 bp, Canis familiaris
ataagcttggcttgcactggaaaga

SEQ ID NO: 16927 - DNA, 25 bp, Canis familiaris
atgaagtctggcaactcggacgtgt

SEQ ID NO: 16928 - DNA, 25 bp, Canis familiaris
atagcagcctggaacacgagagtgt

SEQ ID NO: 16929 - DNA, 25 bp, Canis familiaris
atagctgttgctgaaggatggctgc

SEQ ID NO: 16930 - DNA, 25 bp, Canis familiaris
atagcggtcgcagagctgcatcacc

SEQ ID NO: 16931 - DNA, 25 bp, Canis familiaris
atacaggatcctgagctcaccatgt

SEQ ID NO: 16932 - DNA, 25 bp, Canis familiaris
ataggggcacaatccaatcatgagg

SEQ ID NO: 16933 - DNA, 25 bp, Canis familiaris
atagtaggctctttgctcaatgtgg

SEQ ID NO: 16934 - DNA, 25 bp, Canis familiaris
atagctattacattatctttgtgga

SEQ ID NO: 16935 - DNA, 25 bp, Canis familiaris
atagctagtacttcaccattgctgt

SEQ ID NO: 16936 - DNA, 25 bp, Canis familiaris
atagctgatggaaagcccttgtgtg

SEQ ID NO: 16937 - DNA, 25 bp, Canis familiaris
atagtgcatggagttcccttttctc

SEQ ID NO: 16938 - DNA, 25 bp, Canis familiaris
atagatcaaactactcactgtggtt

SEQ ID NO: 16939 - DNA, 25 bp, Canis familiaris
atagtcaagttgctcctgctggtta

SEQ ID NO: 16940 - DNA, 25 bp, Canis familiaris
atagtgaaatctctagcctctttgt

SEQ ID NO: 16941 - DNA, 25 bp, Canis familiaris
ataggagagtgacacccctttgtgg

SEQ ID NO: 16942 - DNA, 25 bp, Canis familiaris
atagactaggaaaccccattgagct

SEQ ID NO: 16943 - DNA, 25 bp, Canis familiaris
atagaagggtaatctgccagacact

SEQ ID NO: 16944 - DNA, 25 bp, Canis familiaris
atagcatcaagtgaaacttcccaga

SEQ ID NO: 16945 - DNA, 25 bp, Canis familiaris
atagcaaagtcatgaaacatcccgt

SEQ ID NO: 16946 - DNA, 25 bp, Canis familiaris
ataattgaaaatagaaactgccgtt

SEQ ID NO: 16947 - DNA, 25 bp, Canis familiaris
atgaatttaaattcagcaaagtctg

SEQ ID NO: 16948 - DNA, 25 bp, Canis familiaris
atctcagtaaaaagccaacagtgga

SEQ ID NO: 16949 - DNA, 25 bp, Canis familiaris
atcacgtaaaaaccacacgaggatt

SEQ ID NO: 16950 - DNA, 25 bp, Canis familiaris
atcaccttaaagtcctcagtaaaag

SEQ ID NO: 16951 - DNA, 25 bp, Canis familiaris
atagccttaatggtaccgtaataat

SEQ ID NO: 16952 - DNA, 25 bp, Canis familiaris
atacctcaagaggaatgactgttta

SEQ ID NO: 16953 - DNA, 25 bp, Canis familiaris
ataccgcagctaggaataatggaat

SEQ ID NO: 16954 - DNA, 25 bp, Canis familiaris
atagtagggaggtatgaggcagata

SEQ ID NO: 16955 - DNA, 25 bp, Canis familiaris
ataggatgggcccgatgcaggaatt

SEQ ID NO: 16956 - DNA, 25 bp, Canis familiaris
atagggtggtctcatggaatagctg

SEQ ID NO: 16957 - DNA, 25 bp, Canis familiaris
ataaagcaggtctgtgtaccggtcc

SEQ ID NO: 16958 - DNA, 25 bp, Canis familiaris
ataggacggtccactaccagagaca

SEQ ID NO: 16959 - DNA, 25 bp, Canis familiaris
atagagaagtgtgcccaagcccaga

SEQ ID NO: 16960 - DNA, 25 bp, Canis familiaris
atagcagcaattagccacaatagcc

SEQ ID NO: 16961 - DNA, 25 bp, Canis familiaris
atagcaggcaaactacaaagggcat

SEQ ID NO: 16962 - DNA, 25 bp, Canis familiaris
atagcagatcaatcatgccacctgg

SEQ ID NO: 16963 - DNA, 25 bp, Canis familiaris
atagcagccaatgttcgccagatgt

SEQ ID NO: 16964 - DNA, 25 bp, Canis familiaris
ataggagcagtgtttggccaatgat

SEQ ID NO: 16965 - DNA, 25 bp, Canis familiaris
ataaatgcagctctgtgcccaagtg

SEQ ID NO: 16966 - DNA, 25 bp, Canis familiaris
atagcatggggcttggctccaagtt

SEQ ID NO: 16967 - DNA, 25 bp, Canis familiaris
atagctgtggactggttccttgacc

SEQ ID NO: 16968 - DNA, 25 bp, Canis familiaris
atagctgggcaatggttactactca

SEQ ID NO: 16969 - DNA, 25 bp, Canis familiaris
atacttaacatagggctcaaactca

SEQ ID NO: 16970 - DNA, 25 bp, Canis familiaris
atagccaaactgaatgtccaaagta

SEQ ID NO: 16971 - DNA, 25 bp, Canis familiaris
ataccagaagtaatttgcaacatgt

SEQ ID NO: 16972 - DNA, 25 bp, Canis familiaris
atacctggcctggtctggacacagt

SEQ ID NO: 16973 - DNA, 25 bp, Canis familiaris
atagcacatgtgtagctttgggcaa

SEQ ID NO: 16974 - DNA, 25 bp, Canis familiaris
atagaatgtgtcttcctgcaggaga

SEQ ID NO: 16975 - DNA, 25 bp, Canis familiaris
ataagatatttcaggaggagactcc

SEQ ID NO: 16976 - DNA, 25 bp, Canis familiaris
atagtaattacatgaaggaccattc

SEQ ID NO: 16977 - DNA, 25 bp, Canis familiaris
atagtattctaacgacagtcaccat

SEQ ID NO: 16978 - DNA, 25 bp, Canis familiaris
atagtttgcttaggacactcacttg

SEQ ID NO: 16979 - DNA, 25 bp, Canis familiaris
atagtttgctggatatacctgtatg

SEQ ID NO: 16980 - DNA, 25 bp, Canis familiaris
atagtattgttcttggacctgtatc

SEQ ID NO: 16981 - DNA, 25 bp, Canis familiaris
atagtcttttcattggacatctttt

SEQ ID NO: 16982 - DNA, 25 bp, Canis familiaris
atactggtctttggtagtgcttctt

SEQ ID NO: 16983 - DNA, 25 bp, Canis familiaris
atactgtctcagtactgggtgttta

SEQ ID NO: 16984 - DNA, 25 bp, Canis familiaris
atactggctcaggcaaggtggttgt

SEQ ID NO: 16985 - DNA, 25 bp, Canis familiaris
atactggccagcgagctgtgctgaa

SEQ ID NO: 16986 - DNA, 25 bp, Canis familiaris
atacaagcgcagccaccattgagaa

SEQ ID NO: 16987 - DNA, 25 bp, Canis familiaris
atagtcacagcagaggcaatcaaac

SEQ ID NO: 16988 - DNA, 25 bp, Canis familiaris
atagtctcacacgaggacacagcta

SEQ ID NO: 16989 - DNA, 25 bp, Canis familiaris
atagcatcgcatcaagaaacactct

SEQ ID NO: 16990 - DNA, 25 bp, Canis familiaris
atagctcctctcaaaaacaccttgt

SEQ ID NO: 16991 - DNA, 25 bp, Canis familiaris
ataccactcagagagaaccacttct

SEQ ID NO: 16992 - DNA, 25 bp, Canis familiaris
ataaatcaaagccaggaccagtcct

SEQ ID NO: 16993 - DNA, 25 bp, Canis familiaris
atacagacaagacaagcccctacga

SEQ ID NO: 16994 - DNA, 25 bp, Canis familiaris
atagcaatcaagaaactgtcacatc

SEQ ID NO: 16995 - DNA, 25 bp, Canis familiaris
atagcaggagaaatgccatatacat

SEQ ID NO: 16996 - DNA, 25 bp, Canis familiaris
atagaagagcaactgccagacccgt

SEQ ID NO: 16997 - DNA, 25 bp, Canis familiaris
atcagcaaggagtacctgcccaagg

SEQ ID NO: 16998 - DNA, 25 bp, Canis familiaris
atagaaggagtcctgctgcgtcaca

SEQ ID NO: 16999 - DNA, 25 bp, Canis familiaris
atagagtcgagtcatgcgcatccac

SEQ ID NO: 17000 - DNA, 25 bp, Canis familiaris
atagagggaggactgccacccacta

SEQ ID NO: 17001 - DNA, 25 bp, Canis familiaris
atagagaaggacttgccctgctacc

SEQ ID NO: 17002 - DNA, 25 bp, Canis familiaris
atagataacactttgacctccttca

SEQ ID NO: 17003 - DNA, 25 bp, Canis familiaris
atagaaacacctagtctccatttat

SEQ ID NO: 17004 - DNA, 25 bp, Canis familiaris
atagaactcaagattcccagtctct

SEQ ID NO: 17005 - DNA, 25 bp, Canis familiaris
aaataccagaccactaagttatagt

SEQ ID NO: 17006 - DNA, 25 bp, Canis familiaris
ataatagccccctgggatgcattaa

SEQ ID NO: 17007 - DNA, 25 bp, Canis familiaris
atagaaccaccctatggtccagaaa

SEQ ID NO: 17008 - DNA, 25 bp, Canis familiaris
atagttatcctatttggtacaagaa

SEQ ID NO: 17009 - DNA, 25 bp, Canis familiaris
atagtcttaagtcatgctgtaaatg

SEQ ID NO: 17010 - DNA, 25 bp, Canis familiaris
ataccttgaatctgcagttagaaga

SEQ ID NO: 17011 - DNA, 25 bp, Canis familiaris
atagccattagtgacactatagaca

SEQ ID NO: 17012 - DNA, 25 bp, Canis familiaris
atagctatttgtggaccttagacag

SEQ ID NO: 17013 - DNA, 25 bp, Canis familiaris
atactgctttgatattctccaagag

SEQ ID NO: 17014 - DNA, 25 bp, Canis familiaris
atacatttctgaggttactaagctg

SEQ ID NO: 17015 - DNA, 25 bp, Canis familiaris
atacagatagtacattcacggcaat

SEQ ID NO: 17016 - DNA, 25 bp, Canis familiaris
atcaccataaacaattaccagccat

SEQ ID NO: 17017 - DNA, 25 bp, Canis familiaris
atagccatgaagaaaccactccacc

SEQ ID NO: 17018 - DNA, 25 bp, Canis familiaris
atagcacagagagtgacccaccaac

SEQ ID NO: 17019 - DNA, 25 bp, Canis familiaris
atagccaagatggatgccacagcca

SEQ ID NO: 17020 - DNA, 25 bp, Canis familiaris
atagccaagatgtggaagcagccta

SEQ ID NO: 17021 - DNA, 25 bp, Canis familiaris
atagccaggcgatggaactgcttcc

SEQ ID NO: 17022 - DNA, 25 bp, Canis familiaris
atagaagggaggcttctctctccag

SEQ ID NO: 17023 - DNA, 25 bp, Canis familiaris
ataaatggagggccagtacattcct

SEQ ID NO: 17024 - DNA, 25 bp, Canis familiaris
atagaagagtgccctcggtcattcc

SEQ ID NO: 17025 - DNA, 25 bp, Canis familiaris
atagaagagtggcctcgtcattcct

SEQ ID NO: 17026 - DNA, 25 bp, Canis familiaris
atagtagagatagccctcttcctgg

SEQ ID NO: 17027 - DNA, 25 bp, Canis familiaris
atcagtgaaattgaccttcccgtga

SEQ ID NO: 17028 - DNA, 25 bp, Canis familiaris
atagaaagttcttcagttcctcctg

SEQ ID NO: 17029 - DNA, 25 bp, Canis familiaris
atagcataaactacacaggtcccct

SEQ ID NO: 17030 - DNA, 25 bp, Canis familiaris
atagcaagacgttcttcgtcccttc

SEQ ID NO: 17031 - DNA, 25 bp, Canis familiaris
atagctatatcagtacttcctctcc

SEQ ID NO: 17032 - DNA, 25 bp, Canis familiaris
atagatatatatacacttcaccata

SEQ ID NO: 17033 - DNA, 25 bp, Canis familiaris
atacgtatacacgatgccaactatt

SEQ ID NO: 17034 - DNA, 25 bp, Canis familiaris
atacttcacgctgctgtcaagattt

SEQ ID NO: 17035 - DNA, 25 bp, Canis familiaris
atacctcctctgggcaaattttctg

SEQ ID NO: 17036 - DNA, 25 bp, Canis familiaris
atagcctccctgttcatacaatggg

SEQ ID NO: 17037 - DNA, 25 bp, Canis familiaris
ataacctccatctcaacattgggat

SEQ ID NO: 17038 - DNA, 25 bp, Canis familiaris
ataccaccactataatctatcgagt

SEQ ID NO: 17039 - DNA, 25 bp, Canis familiaris
atagaccgactaacagttgtccagt

SEQ ID NO: 17040 - DNA, 25 bp, Canis familiaris
atagacctcctaactgatttgcaaa

SEQ ID NO: 17041 - DNA, 25 bp, Canis familiaris
atagacatacaaaactgcattataa

SEQ ID NO: 17042 - DNA, 25 bp, Canis familiaris
atagatcgaaagtacctctgtagta

SEQ ID NO: 17043 - DNA, 25 bp, Canis familiaris
atagtcctatagttccctgatactt

SEQ ID NO: 17044 - DNA, 25 bp, Canis familiaris
atagctagctacttgattcctttct

SEQ ID NO: 17045 - DNA, 25 bp, Canis familiaris
atagaactgatctttttcttttgtt

SEQ ID NO: 17046 - DNA, 25 bp, Canis familiaris
atactggttcatgtttcctttgttt

SEQ ID NO: 17047 - DNA, 25 bp, Canis familiaris
atacttgtcattgttcctttgtttg

SEQ ID NO: 17048 - DNA, 25 bp, Canis familiaris
atagctttgtatgttactcttattt

SEQ ID NO: 17049 - DNA, 25 bp, Canis familiaris
atagtgctattatcttcattttata

SEQ ID NO: 17050 - DNA, 25 bp, Canis familiaris
acctgtttcaagcaactttaatgtt

SEQ ID NO: 17051 - DNA, 25 bp, Canis familiaris
acgattagtaatcaactgttttgta

SEQ ID NO: 17052 - DNA, 25 bp, Canis familiaris
atcccaagtacagctttgtttatta

SEQ ID NO: 17053 - DNA, 25 bp, Canis familiaris
ataccacgcaacactctggttgctt

SEQ ID NO: 17054 - DNA, 25 bp, Canis familiaris
ataaacgaactcagtgtgccacttg

SEQ ID NO: 17055 - DNA, 25 bp, Canis familiaris
atgtatactaggggggatccctggg

SEQ ID NO: 17056 - DNA, 25 bp, Canis familiaris
atacaaataggggggcacctgggtg

SEQ ID NO: 17057 - DNA, 25 bp, Canis familiaris
atagcaacaagggcagggactctga

SEQ ID NO: 17058 - DNA, 25 bp, Canis familiaris
atagcaaaagtggtgttggttgaat

SEQ ID NO: 17059 - DNA, 25 bp, Canis familiaris
atagcactaagtccatgatttactg

SEQ ID NO: 17060 - DNA, 25 bp, Canis familiaris
atagatccaagtccatgtatcccca

SEQ ID NO: 17061 - DNA, 25 bp, Canis familiaris
atagataatgtcccatgaagccctc

SEQ ID NO: 17062 - DNA, 25 bp, Canis familiaris
atagtagatgttgtatcccactatg

SEQ ID NO: 17063 - DNA, 25 bp, Canis familiaris
atcagtaaattgcttggcgcccaga

SEQ ID NO: 17064 - DNA, 25 bp, Canis familiaris
ataccaactttggtgtctgccacga

SEQ ID NO: 17065 - DNA, 25 bp, Canis familiaris
atagcagcaatcccatcattgtctc

SEQ ID NO: 17066 - DNA, 25 bp, Canis familiaris
atagatactctgacatcatgcccca

SEQ ID NO: 17067 - DNA, 25 bp, Canis familiaris
atagcatattcggttgcatcttcta

SEQ ID NO: 17068 - DNA, 25 bp, Canis familiaris
atagatattcgggctgtttctctct

SEQ ID NO: 17069 - DNA, 25 bp, Canis familiaris
atagaattgggcttttgtcatttca

SEQ ID NO: 17070 - DNA, 25 bp, Canis familiaris
atagcaaccgtctttatactgttcg

SEQ ID NO: 17071 - DNA, 25 bp, Canis familiaris
atagcacctctatatggatactccc

SEQ ID NO: 17072 - DNA, 25 bp, Canis familiaris
atagcaccttcatgcttttctcatc

SEQ ID NO: 17073 - DNA, 25 bp, Canis familiaris
atagctcacccaagtcattgcgcta

SEQ ID NO: 17074 - DNA, 25 bp, Canis familiaris
atactcagcccagggatgtgccaat

SEQ ID NO: 17075 - DNA, 25 bp, Canis familiaris
atcatcggcaccaggttccatgttt

SEQ ID NO: 17076 - DNA, 25 bp, Canis familiaris
atcatcggcaccaggttccatgttt

SEQ ID NO: 17077 - DNA, 25 bp, Canis familiaris
atcatcggcaccaggttccatgttt

SEQ ID NO: 17078 - DNA, 25 bp, Canis familiaris
atacggacctgagggcgccgttaat

SEQ ID NO: 17079 - DNA, 25 bp, Canis familiaris
atagagtcaccgggtcgacgtcggt

SEQ ID NO: 17080 - DNA, 25 bp, Canis familiaris
aaagtcctcgtgtggcctttggact

SEQ ID NO: 17081 - DNA, 25 bp, Canis familiaris
ataaatcctatttgcgaccctatgg

SEQ ID NO: 17082 - DNA, 25 bp, Canis familiaris
ataagaatgtacccgaccttgaggc

SEQ ID NO: 17083 - DNA, 25 bp, Canis familiaris
atagagaaattccagagatccttga

SEQ ID NO: 17084 - DNA, 25 bp, Canis familiaris
atagcaacatcagtgcccagatcct

SEQ ID NO: 17085 - DNA, 25 bp, Canis familiaris
agtgaagatcaagctcggccggaaa

SEQ ID NO: 17086 - DNA, 25 bp, Canis familiaris
cgtaaaaaccacacgaggattatat

SEQ ID NO: 17087 - DNA, 25 bp, Canis familiaris
agggaaaaccacacctggattcact

SEQ ID NO: 17088 - DNA, 25 bp, Canis familiaris
aggtacagacccattccagaagata

SEQ ID NO: 17089 - DNA, 25 bp, Canis familiaris
atacccacacccattaataagatca

SEQ ID NO: 17090 - DNA, 25 bp, Canis familiaris
atacgctccgcctggaatctgaaaa

SEQ ID NO: 17091 - DNA, 25 bp, Canis familiaris
ataccaccttccagcatatgctaaa

SEQ ID NO: 17092 - DNA, 25 bp, Canis familiaris
atacgtccattccacagttgtaaat

SEQ ID NO: 17093 - DNA, 25 bp, Canis familiaris
ataattgccaattgaagccctaaat

SEQ ID NO: 17094 - DNA, 25 bp, Canis familiaris
ataactggcacctgacacactggaa

SEQ ID NO: 17095 - DNA, 25 bp, Canis familiaris
ataacttgcctctgaatccaaactt

SEQ ID NO: 17096 - DNA, 25 bp, Canis familiaris
ataacttgcccactggtttaacatc

SEQ ID NO: 17097 - DNA, 25 bp, Canis familiaris
ataagtttcccgtatggtcacacat

SEQ ID NO: 17098 - DNA, 25 bp, Canis familiaris
atagagttcactcagtagagtccac

SEQ ID NO: 17099 - DNA, 25 bp, Canis familiaris
atagcagccacagccaaaagaccct

SEQ ID NO: 17100 - DNA, 25 bp, Canis familiaris
atacacatgcacacaaaaccaacca

SEQ ID NO: 17101 - DNA, 25 bp, Canis familiaris
atagacatctacagaacaccaccca

SEQ ID NO: 17102 - DNA, 25 bp, Canis familiaris
atagaactatctgcattatctatgc

SEQ ID NO: 17103 - DNA, 25 bp, Canis familiaris
atagatactatctgcactcatttat

SEQ ID NO: 17104 - DNA, 25 bp, Canis familiaris
atagatactcttcactgttttccaa

SEQ ID NO: 17105 - DNA, 25 bp, Canis familiaris
ataaaggcgtgttcagttttgcaaa

SEQ ID NO: 17106 - DNA, 25 bp, Canis familiaris
ataaaacaggcttcatttattaata

SEQ ID NO: 17107 - DNA, 25 bp, Canis familiaris
ataaataagagttttgatcaggaaa

SEQ ID NO: 17108 - DNA, 25 bp, Canis familiaris
atagcccatatgtaccaaaagatta

SEQ ID NO: 17109 - DNA, 25 bp, Canis familiaris
atagcccagatatccagaatattgt

SEQ ID NO: 17110 - DNA, 25 bp, Canis familiaris
atagcccaagaatcagtgtcaagaa

SEQ ID NO: 17111 - DNA, 25 bp, Canis familiaris
atacctatgaggggcgatgtccgca

SEQ ID NO: 17112 - DNA, 25 bp, Canis familiaris
ataccagtaggttggattcctaagt

SEQ ID NO: 17113 - DNA, 25 bp, Canis familiaris
ataccaggatggtcacgactgtaaa

SEQ ID NO: 17114 - DNA, 25 bp, Canis familiaris
ataccagattattatcacagcttaa

SEQ ID NO: 17115 - DNA, 25 bp, Canis familiaris
atagccatggttatgccactgatta

SEQ ID NO: 17116 - DNA, 25 bp, Canis familiaris
atagcaccacttagttcacatttat

SEQ ID NO: 17117 - DNA, 25 bp, Canis familiaris
atagctgtcctttgtgaacttttca

SEQ ID NO: 17118 - DNA, 25 bp, Canis familiaris
atacagtctttctcagatttttagt

SEQ ID NO: 17119 - DNA, 25 bp, Canis familiaris
atactgtttggatataattttagcc

SEQ ID NO: 17120 - DNA, 25 bp, Canis familiaris
agaccttatggattcaaaacttaga

SEQ ID NO: 17121 - DNA, 25 bp, Canis familiaris
agaccgttgcagatcctgaacttcc

SEQ ID NO: 17122 - DNA, 25 bp, Canis familiaris
atacgggtccttactgaacccacag

SEQ ID NO: 17123 - DNA, 25 bp, Canis familiaris
ataaaagtacccagaaccagccatg

SEQ ID NO: 17124 - DNA, 25 bp, Canis familiaris
ataaaggtacctaaccacgcagcca

SEQ ID NO: 17125 - DNA, 25 bp, Canis familiaris
ataaatgtttaggcaaccccatggc

SEQ ID NO: 17126 - DNA, 25 bp, Canis familiaris
atagcctgttagtgcaacccagtgc

SEQ ID NO: 17127 - DNA, 25 bp, Canis familiaris
atagcactggtggtcagacaccccg

SEQ ID NO: 17128 - DNA, 25 bp, Canis familiaris
atagcatctagcctgaaacatcccc

SEQ ID NO: 17129 - DNA, 25 bp, Canis familiaris
atacttttgtcaaactgcaccctcg

SEQ ID NO: 17130 - DNA, 25 bp, Canis familiaris
atacgtctatgggcaacgcatcctc

SEQ ID NO: 17131 - DNA, 25 bp, Canis familiaris
atacgtcaagaccaacactaccatt

SEQ ID NO: 17132 - DNA, 25 bp, Canis familiaris
atactggaaaacacatctgtacttg

SEQ ID NO: 17133 - DNA, 25 bp, Canis familiaris
atactgaggaaatcccttcactctc

SEQ ID NO: 17134 - DNA, 25 bp, Canis familiaris
atagctattaaatgctcaccttttc

SEQ ID NO: 17135 - DNA, 25 bp, Canis familiaris
atagctattttatcacgttgtgttt

SEQ ID NO: 17136 - DNA, 25 bp, Canis familiaris
atagcttgttactcacagtttcttt

SEQ ID NO: 17137 - DNA, 25 bp, Canis familiaris
atagattttctcttgcctgtgtttt

SEQ ID NO: 17138 - DNA, 25 bp, Canis familiaris
atagattgcatttcttaggtgtttt

SEQ ID NO: 17139 - DNA, 25 bp, Canis familiaris
atagctatcattttaagtactcgtt

SEQ ID NO: 17140 - DNA, 25 bp, Canis familiaris
atagcttcctagtgagcttcctgtc

SEQ ID NO: 17141 - DNA, 25 bp, Canis familiaris
atagagtccttgtacagtggcgcgc

SEQ ID NO: 17142 - DNA, 25 bp, Canis familiaris
atagaacctcaggtctgttcagcct

SEQ ID NO: 17143 - DNA, 25 bp, Canis familiaris
atagaccacatctttctttatccat

SEQ ID NO: 17144 - DNA, 25 bp, Canis familiaris
atagccgaacgtgatttgctgctgt

SEQ ID NO: 17145 - DNA, 25 bp, Canis familiaris
ataacgaacgagactctggcatgct

SEQ ID NO: 17146 - DNA, 25 bp, Canis familiaris
ataacgaacaacagcaacgtcttga

SEQ ID NO: 17147 - DNA, 25 bp, Canis familiaris
ataaataaatagaggcacgtgcaaa

SEQ ID NO: 17148 - DNA, 25 bp, Canis familiaris
ataaacacaaacagacacaacaaac

SEQ ID NO: 17149 - DNA, 25 bp, Canis familiaris
ataaacttcaaatccacactcaacc

SEQ ID NO: 17150 - DNA, 25 bp, Canis familiaris
aaactcattaaatccaacgttcctg

SEQ ID NO: 17151 - DNA, 25 bp, Canis familiaris
aaaatatttacctctacgatactat

SEQ ID NO: 17152 - DNA, 25 bp, Canis familiaris
aaggttattaactcatgcccaaaat

SEQ ID NO: 17153 - DNA, 25 bp, Canis familiaris
aacggatacaaatcctgccaaaaat

SEQ ID NO: 17154 - DNA, 25 bp, Canis familiaris
agacgaaaccactacatactccaat

SEQ ID NO: 17155 - DNA, 25 bp, Canis familiaris
ataaaacccagcacatttcaatgat

SEQ ID NO: 17156 - DNA, 25 bp, Canis familiaris
ataaataccatactccatttccctt

SEQ ID NO: 17157 - DNA, 25 bp, Canis familiaris
atacactaaccatggcatttacctg

SEQ ID NO: 17158 - DNA, 25 bp, Canis familiaris
atacctaagcacaaggcatcattta

SEQ ID NO: 17159 - DNA, 25 bp, Canis familiaris
ataccagcaactaagtgctcaagta

SEQ ID NO: 17160 - DNA, 25 bp, Canis familiaris
agaccactggccagtccaagggttt

SEQ ID NO: 17161 - DNA, 25 bp, Canis familiaris
ataccaccccacttgccagtgggtt

SEQ ID NO: 17162 - DNA, 25 bp, Canis familiaris
ataaactagtaattgccagatggga

SEQ ID NO: 17163 - DNA, 25 bp, Canis familiaris
ataaactttagctcatcctggtggc

SEQ ID NO: 17164 - DNA, 25 bp, Canis familiaris
ataccatttaacttccactttagct

SEQ ID NO: 17165 - DNA, 25 bp, Canis familiaris
atacccatttatttgcccatttatt

SEQ ID NO: 17166 - DNA, 25 bp, Canis familiaris
atagaccacgttttgttcatacatt

SEQ ID NO: 17167 - DNA, 25 bp, Canis familiaris
atagagtcctatcttttcttcttgc

SEQ ID NO: 17168 - DNA, 25 bp, Canis familiaris
ataattttcattttttggttgtgca

SEQ ID NO: 17169 - DNA, 25 bp, Canis familiaris
ataaggttcatttcttggtattcaa

SEQ ID NO: 17170 - DNA, 25 bp, Canis familiaris
atcgaggcttcagatcggaggtgga

SEQ ID NO: 17171 - DNA, 25 bp, Canis familiaris
atagcaaattccctgggagctagga

SEQ ID NO: 17172 - DNA, 25 bp, Canis familiaris
ataaggttcacacctgtggatcagg

SEQ ID NO: 17173 - DNA, 25 bp, Canis familiaris
atcaagtttctacaggaccacggtt

SEQ ID NO: 17174 - DNA, 25 bp, Canis familiaris
atcttctttcagtaagtaccaccag

SEQ ID NO: 17175 - DNA, 25 bp, Canis familiaris
atgatcctttgcagaaatgactaca

SEQ ID NO: 17176 - DNA, 25 bp, Canis familiaris
atacctcttaaaaatgcagcatgga

SEQ ID NO: 17177 - DNA, 25 bp, Canis familiaris
atacctccgcaataatctcagtgcg

SEQ ID NO: 17178 - DNA, 25 bp, Canis familiaris
ataccttggtattaattcagatgga

SEQ ID NO: 17179 - DNA, 25 bp, Canis familiaris
ataccctgtgacaccttagagagac

SEQ ID NO: 17180 - DNA, 25 bp, Canis familiaris
ataccacgctaacctgtatcaaacc

SEQ ID NO: 17181 - DNA, 25 bp, Canis familiaris
atagacatcgtaactgatttgcaaa

SEQ ID NO: 17182 - DNA, 25 bp, Canis familiaris
atacacatagtcgtgcatatttcaa

SEQ ID NO: 17183 - DNA, 25 bp, Canis familiaris
atagccaattctacattcttcagga

SEQ ID NO: 17184 - DNA, 25 bp, Canis familiaris
atagcacagtattttcagattcatg

SEQ ID NO: 17185 - DNA, 25 bp, Canis familiaris
atagcatcgtttatggatatcacca

SEQ ID NO: 17186 - DNA, 25 bp, Canis familiaris
atagaatgtcttttccatatcctct

SEQ ID NO: 17187 - DNA, 25 bp, Canis familiaris
atacagtactagtttctgaccttga

SEQ ID NO: 17188 - DNA, 25 bp, Canis familiaris
atagccttagagatgatccccttgg

SEQ ID NO: 17189 - DNA, 25 bp, Canis familiaris
ataccatatatggtttccttgcttg

SEQ ID NO: 17190 - DNA, 25 bp, Canis familiaris
atagcccattgcttgtacgtatgat

SEQ ID NO: 17191 - DNA, 25 bp, Canis familiaris
atagcatgccatgttggaaggtgat

SEQ ID NO: 17192 - DNA, 25 bp, Canis familiaris
atacatcacttggtggcacgggcaa

SEQ ID NO: 17193 - DNA, 25 bp, Canis familiaris
atagccactctggataacagtctgg

SEQ ID NO: 17194 - DNA, 25 bp, Canis familiaris
atagcccccgtatagtcgtatatta

SEQ ID NO: 17195 - DNA, 25 bp, Canis familiaris
atacctcctccacagagtcggagtt

SEQ ID NO: 17196 - DNA, 25 bp, Canis familiaris
ataaccaaccactgtgtcgaactcc

SEQ ID NO: 17197 - DNA, 25 bp, Canis familiaris
aaatacccacactgtctgggtccct

SEQ ID NO: 17198 - DNA, 25 bp, Canis familiaris
ataataaaccgctgtcgtgggactt

SEQ ID NO: 17199 - DNA, 25 bp, Canis familiaris
atacacgtcctgggttcgtggaact

SEQ ID NO: 17200 - DNA, 25 bp, Canis familiaris
ataactacctgttttgccgggtcag

SEQ ID NO: 17201 - DNA, 25 bp, Canis familiaris
ataacattaccttactgtggaggaa

SEQ ID NO: 17202 - DNA, 25 bp, Canis familiaris
ataactattttatgcactggcagcg

SEQ ID NO: 17203 - DNA, 25 bp, Canis familiaris
ataactagtaaatctcagccacctt

SEQ ID NO: 17204 - DNA, 25 bp, Canis familiaris
atacctatgtaatcaccactgcagt

SEQ ID NO: 17205 - DNA, 25 bp, Canis familiaris
atagcagctatttttcaccttcagt

SEQ ID NO: 17206 - DNA, 25 bp, Canis familiaris
atagcagcattttttacaacctaaa

SEQ ID NO: 17207 - DNA, 25 bp, Canis familiaris
atagcttgttgcattaacacctgta

SEQ ID NO: 17208 - DNA, 25 bp, Canis familiaris
atactggctaaattcaaatcctgga

SEQ ID NO: 17209 - DNA, 25 bp, Canis familiaris
atacatgtgtataaccaaaacggaa

SEQ ID NO: 17210 - DNA, 25 bp, Canis familiaris
ataactgtacagaccgcaataccca

SEQ ID NO: 17211 - DNA, 25 bp, Canis familiaris
ataactaacatgtcctgcctgtcat

SEQ ID NO: 17212 - DNA, 25 bp, Canis familiaris
ataactgaatcaccttggcctaggc

SEQ ID NO: 17213 - DNA, 25 bp, Canis familiaris
ataacttcacaacgtacactattcg

SEQ ID NO: 17214 - DNA, 25 bp, Canis familiaris
atacaccatcacgacgtcaacctat

SEQ ID NO: 17215 - DNA, 25 bp, Canis familiaris
ataaacatctctcaccaacaaattc

SEQ ID NO: 17216 - DNA, 25 bp, Canis familiaris
ataacaccgcatgtccaaacaattg

SEQ ID NO: 17217 - DNA, 25 bp, Canis familiaris
ataaatactgagctgccaaaacttt

SEQ ID NO: 17218 - DNA, 25 bp, Canis familiaris
ataatgaactagccagaaacaactt

SEQ ID NO: 17219 - DNA, 25 bp, Canis familiaris
ataagaagctagaaggacatacact

SEQ ID NO: 17220 - DNA, 25 bp, Canis familiaris
atcacataagcacgtgggaaatgca

SEQ ID NO: 17221 - DNA, 25 bp, Canis familiaris
atcagggacatgctgctggccaata

SEQ ID NO: 17222 - DNA, 25 bp, Canis familiaris
atagcaaaatgcattgaccactaca

SEQ ID NO: 17223 - DNA, 25 bp, Canis familiaris
atagcaaatataattggcacacata

SEQ ID NO: 17224 - DNA, 25 bp, Canis familiaris
atactactgtacttggccatgtcta

SEQ ID NO: 17225 - DNA, 25 bp, Canis familiaris
atactgttgaaaggtggcattcata

SEQ ID NO: 17226 - DNA, 25 bp, Canis familiaris
atactgtcgcacacgcgtatatata

SEQ ID NO: 17227 - DNA, 25 bp, Canis familiaris
atactgaagccgccactatcatgat

SEQ ID NO: 17228 - DNA, 25 bp, Canis familiaris
atacttgacctggactgttacaccc

SEQ ID NO: 17229 - DNA, 25 bp, Canis familiaris
atagcttcaacgcgcttattcactt

SEQ ID NO: 17230 - DNA, 25 bp, Canis familiaris
atacattaacttatttacctcattt

SEQ ID NO: 17231 - DNA, 25 bp, Canis familiaris
atagctttcactttgatttcacttt

SEQ ID NO: 17232 - DNA, 25 bp, Canis familiaris
atagctctgctagtaattgatttat

SEQ ID NO: 17233 - DNA, 25 bp, Canis familiaris
atagctcatgcgtgtgttcatatcc

SEQ ID NO: 17234 - DNA, 25 bp, Canis familiaris
atacagcgcagtttgaacataccat

SEQ ID NO: 17235 - DNA, 25 bp, Canis familiaris
atacgcaactacacacatacatact

SEQ ID NO: 17236 - DNA, 25 bp, Canis familiaris
ataccctctactacatataatttag

SEQ ID NO: 17237 - DNA, 25 bp, Canis familiaris
ataccatactcaccagctttattta

SEQ ID NO: 17238 - DNA, 25 bp, Canis familiaris
atactcatactcacatttcatattg

SEQ ID NO: 17239 - DNA, 25 bp, Canis familiaris
atacgtcctgcaacatctgtactag

SEQ ID NO: 17240 - DNA, 25 bp, Canis familiaris
atacctccagaactgctgctcaata

SEQ ID NO: 17241 - DNA, 25 bp, Canis familiaris
ataaccaagcatctgttaaaccctc

SEQ ID NO: 17242 - DNA, 25 bp, Canis familiaris
ataaccaatgcgttttactacctgc

SEQ ID NO: 17243 - DNA, 25 bp, Canis familiaris
ataagccctggtggggattacttga

SEQ ID NO: 17244 - DNA, 25 bp, Canis familiaris
ataccggcgagtgtgttgtcactta

SEQ ID NO: 17245 - DNA, 25 bp, Canis familiaris
ataccatatgtgttcctttgtgact

SEQ ID NO: 17246 - DNA, 25 bp, Canis familiaris
ataccattagtttaagttgcctttg

SEQ ID NO: 17247 - DNA, 25 bp, Canis familiaris
atacccgagcaaatacagtccctct

SEQ ID NO: 17248 - DNA, 25 bp, Canis familiaris
ataccaaggccaaacctgatctctc

SEQ ID NO: 17249 - DNA, 25 bp, Canis familiaris
atactgcagagggccaacctgctct

SEQ ID NO: 17250 - DNA, 25 bp, Canis familiaris
atagccatgtggttcattagatgcc

SEQ ID NO: 17251 - DNA, 25 bp, Canis familiaris
ataccatgctctatcaaattccaag

SEQ ID NO: 17252 - DNA, 25 bp, Canis familiaris
ataccacctttatttccaccatagg

SEQ ID NO: 17253 - DNA, 25 bp, Canis familiaris
ataacgacttttctatgtgccatag

SEQ ID NO: 17254 - DNA, 25 bp, Canis familiaris
ataagtaccgtccggatctgcgcat

SEQ ID NO: 17255 - DNA, 25 bp, Canis familiaris
ataagtcccagagccgattcgatgt

SEQ ID NO: 17256 - DNA, 25 bp, Canis familiaris
ataactcccgggaatgttcagattc

SEQ ID NO: 17257 - DNA, 25 bp, Canis familiaris
ataattgcccctggtttacagtcct

SEQ ID NO: 17258 - DNA, 25 bp, Canis familiaris
ataatagccaccaggttcagacccc

SEQ ID NO: 17259 - DNA, 25 bp, Canis familiaris
ataaggcctccgtgaggccatcccc

SEQ ID NO: 17260 - DNA, 25 bp, Canis familiaris
ataaattgtccgttgcaggcaatcc

SEQ ID NO: 17261 - DNA, 25 bp, Canis familiaris
ataagttgtcccttagtgcgtcttg

SEQ ID NO: 17262 - DNA, 25 bp, Canis familiaris
ataaattgttccttagtgatggtca

SEQ ID NO: 17263 - DNA, 25 bp, Canis familiaris
atcagaatttggattgaagttgtcc

SEQ ID NO: 17264 - DNA, 25 bp, Canis familiaris
atcgaccctggctttaggatcggcc

SEQ ID NO: 17265 - DNA, 25 bp, Canis familiaris
ataaaatccgctactcaggacgtcc

SEQ ID NO: 17266 - DNA, 25 bp, Canis familiaris
ataaaatgccgaacggggcgctgac

SEQ ID NO: 17267 - DNA, 25 bp, Canis familiaris
ataaagtctggattcgttgccctcc

SEQ ID NO: 17268 - DNA, 25 bp, Canis familiaris
ataagcagtctagcagcgcttcctt

SEQ ID NO: 17269 - DNA, 25 bp, Canis familiaris
atacttgtatagaatggcatatcct

SEQ ID NO: 17270 - DNA, 25 bp, Canis familiaris
ataccttgattttgttatcccgcaa

SEQ ID NO: 17271 - DNA, 25 bp, Canis familiaris
atacaggaatgattagtttcaccca

SEQ ID NO: 17272 - DNA, 25 bp, Canis familiaris
atacggagtttcttcctaagtgcag

SEQ ID NO: 17273 - DNA, 25 bp, Canis familiaris
atagcccacttttatgtttcgtgcc

SEQ ID NO: 17274 - DNA, 25 bp, Canis familiaris
atagccaaattttatgtttctacag

SEQ ID NO: 17275 - DNA, 25 bp, Canis familiaris
atacccaattgcatttgaactcact

SEQ ID NO: 17276 - DNA, 25 bp, Canis familiaris
ataccagcttctgctctagaactac

SEQ ID NO: 17277 - DNA, 25 bp, Canis familiaris
atactcgctgttatataccacatca

SEQ ID NO: 17278 - DNA, 25 bp, Canis familiaris
ataccacattatattatccactcat

SEQ ID NO: 17279 - DNA, 25 bp, Canis familiaris
ataccttgtgtactgtgagtattta

SEQ ID NO: 17280 - DNA, 25 bp, Canis familiaris
atacttttgtgaactgtgttttatg

SEQ ID NO: 17281 - DNA, 25 bp, Canis familiaris
atactctttttcaattgtttctacg

SEQ ID NO: 17282 - DNA, 25 bp, Canis familiaris
atactgtatatgcgcttttcttctg

SEQ ID NO: 17283 - DNA, 25 bp, Canis familiaris
atactgtcaaggcttatcccttcat

SEQ ID NO: 17284 - DNA, 25 bp, Canis familiaris
atacctcagggacctactactggca

SEQ ID NO: 17285 - DNA, 25 bp, Canis familiaris
agacctcatggaagccattcggttc

SEQ ID NO: 17286 - DNA, 25 bp, Canis familiaris
atagccgcttatggccattttgtac

SEQ ID NO: 17287 - DNA, 25 bp, Canis familiaris
atagccctgattggctttttgggat

SEQ ID NO: 17288 - DNA, 25 bp, Canis familiaris
atacctctcattatttattgacgat

SEQ ID NO: 17289 - DNA, 25 bp, Canis familiaris
atactgtctttcatttttatccatt

SEQ ID NO: 17290 - DNA, 25 bp, Canis familiaris
atacattcttaaattccttacacat

SEQ ID NO: 17291 - DNA, 25 bp, Canis familiaris
ataaactattaatcatctataaatg

SEQ ID NO: 17292 - DNA, 25 bp, Canis familiaris
ataaaagattggttcctacacaagg

SEQ ID NO: 17293 - DNA, 25 bp, Canis familiaris
gataaaaatctctccctaacctagt

SEQ ID NO: 17294 - DNA, 25 bp, Canis familiaris
ataaacacccaagctgtttcccagt

SEQ ID NO: 17295 - DNA, 25 bp, Canis familiaris
ataccaacacaatcctgttttcctt

SEQ ID NO: 17296 - DNA, 25 bp, Canis familiaris
ataaagaccaaccttagttaagcat

SEQ ID NO: 17297 - DNA, 25 bp, Canis familiaris
ataaacccaacccaagtgtgacatt

SEQ ID NO: 17298 - DNA, 25 bp, Canis familiaris
atcgaatcccacatcgggcttcgat

SEQ ID NO: 17299 - DNA, 25 bp, Canis familiaris
atctacacccataggggagaacctg

SEQ ID NO: 17300 - DNA, 25 bp, Canis familiaris
atacatcaacctcaggggacccatc

SEQ ID NO: 17301 - DNA, 25 bp, Canis familiaris
atactaacccttggtggacggatga

SEQ ID NO: 17302 - DNA, 25 bp, Canis familiaris
atagccaaacatggtcttggacggg

SEQ ID NO: 17303 - DNA, 25 bp, Canis familiaris
atacctgagccagggctggggggtg

SEQ ID NO: 17304 - DNA, 25 bp, Canis familiaris
atagctaaataggggcgcctgggtg

SEQ ID NO: 17305 - DNA, 25 bp, Canis familiaris
atcagttttaagcaggttgggggag

SEQ ID NO: 17306 - DNA, 25 bp, Canis familiaris
ataaatctgtaactaggcttgtgtg

SEQ ID NO: 17307 - DNA, 25 bp, Canis familiaris
atcagctctcttgagaaccggttgg

SEQ ID NO: 17308 - DNA, 25 bp, Canis familiaris
atagctctcacatgagacacgcggt

SEQ ID NO: 17309 - DNA, 25 bp, Canis familiaris
atagctcacacagtcgaggctgctg

SEQ ID NO: 17310 - DNA, 25 bp, Canis familiaris
atacagccatcaagtggtcgcttat

SEQ ID NO: 17311 - DNA, 25 bp, Canis familiaris
ataccccaagctcgaggtctgagtt

SEQ ID NO: 17312 - DNA, 25 bp, Canis familiaris
atacctactaggcaattgctggatc

SEQ ID NO: 17313 - DNA, 25 bp, Canis familiaris
ataccagggatgacgaggtgggatc

SEQ ID NO: 17314 - DNA, 25 bp, Canis familiaris
atacttgtgagtccaggcgcgtagt

SEQ ID NO: 17315 - DNA, 25 bp, Canis familiaris
atagctggggcttcatgggttggga

SEQ ID NO: 17316 - DNA, 25 bp, Canis familiaris
atcagcaggcggctattggtaaacg

SEQ ID NO: 17317 - DNA, 25 bp, Canis familiaris
ataactgcccggttcaaaacacgat

SEQ ID NO: 17318 - DNA, 25 bp, Canis familiaris
ataatccaccgcctggagaaggccg

SEQ ID NO: 17319 - DNA, 25 bp, Canis familiaris
atctcattcaccgggtagcgacccg

SEQ ID NO: 17320 - DNA, 25 bp, Canis familiaris
atacttctcctatgagagggcccgg

SEQ ID NO: 17321 - DNA, 25 bp, Canis familiaris
atacgtgcaccatcaaggggcatcc

SEQ ID NO: 17322 - DNA, 25 bp, Canis familiaris
atacctgagcgtgcagggccagctt

SEQ ID NO: 17323 - DNA, 25 bp, Canis familiaris
ataacaagctgtccagggtgccttc

SEQ ID NO: 17324 - DNA, 25 bp, Canis familiaris
ataaaatttccatggctcttctcct

SEQ ID NO: 17325 - DNA, 25 bp, Canis familiaris
ataaaatattatcaccctccttctg

SEQ ID NO: 17326 - DNA, 25 bp, Canis familiaris
ataaagattataccagcccctgttc

SEQ ID NO: 17327 - DNA, 25 bp, Canis familiaris
ataatttcaaaggcgcccgtgttag

SEQ ID NO: 17328 - DNA, 25 bp, Canis familiaris
ataacgtcagggggactccgtatca

SEQ ID NO: 17329 - DNA, 25 bp, Canis familiaris
ataatcaggagtcggagaccctctt

SEQ ID NO: 17330 - DNA, 25 bp, Canis familiaris
ataccagcgatgacgagacgcgccc

SEQ ID NO: 17331 - DNA, 25 bp, Canis familiaris
ataacacttgaccaatccagctgct

SEQ ID NO: 17332 - DNA, 25 bp, Canis familiaris
ataacacagaaccattcagatggct

SEQ ID NO: 17333 - DNA, 25 bp, Canis familiaris
ataaaacccgcttcaaggcttcaag

SEQ ID NO: 17334 - DNA, 25 bp, Canis familiaris
atacagaacacaggcttttgtctct

SEQ ID NO: 17335 - DNA, 25 bp, Canis familiaris
atactaatatcaccatagttggctt

SEQ ID NO: 17336 - DNA, 25 bp, Canis familiaris
atgattaagattctaaactgtttta

SEQ ID NO: 17337 - DNA, 25 bp, Canis familiaris
atcaatgtggttttaatcaatggtt

SEQ ID NO: 17338 - DNA, 25 bp, Canis familiaris
ataagggttaactcagctggcttgg

SEQ ID NO: 17339 - DNA, 25 bp, Canis familiaris
ataagggggcaaaccagaactactg

SEQ ID NO: 17340 - DNA, 25 bp, Canis familiaris
ataagctggtgtgaaaccctctcct

SEQ ID NO: 17341 - DNA, 25 bp, Canis familiaris
agaagctgtagatgaaaccaaacct

SEQ ID NO: 17342 - DNA, 25 bp, Canis familiaris
ataagcagtacaagaaggcccacct

SEQ ID NO: 17343 - DNA, 25 bp, Canis familiaris
ataagccccaagaaagaataccatt

SEQ ID NO: 17344 - DNA, 25 bp, Canis familiaris
ataagcattctaacaacaaaaccat

SEQ ID NO: 17345 - DNA, 25 bp, Canis familiaris
atacatttatatgctcccgcaacca

SEQ ID NO: 17346 - DNA, 25 bp, Canis familiaris
atacactttatgatctccgcaatca

SEQ ID NO: 17347 - DNA, 25 bp, Canis familiaris
atacactttcaaaatctgatgacta

SEQ ID NO: 17348 - DNA, 25 bp, Canis familiaris
ataccatcacattaggacttcaata

SEQ ID NO: 17349 - DNA, 25 bp, Canis familiaris
ataccattcactgggtgttgcacta

SEQ ID NO: 17350 - DNA, 25 bp, Canis familiaris
ataccttcaatgatatgtccactga

SEQ ID NO: 17351 - DNA, 25 bp, Canis familiaris
atacctgtatatgttttcctgagca

SEQ ID NO: 17352 - DNA, 25 bp, Canis familiaris
atacctgtcttgtcttattttcact

SEQ ID NO: 17353 - DNA, 25 bp, Canis familiaris
atacctgtttttgtacagtcctctt

SEQ ID NO: 17354 - DNA, 25 bp, Canis familiaris
ataacttgattccaggttgagtttt

SEQ ID NO: 17355 - DNA, 25 bp, Canis familiaris
ataaatctatgctgcaggctttttt

SEQ ID NO: 17356 - DNA, 25 bp, Canis familiaris
ataacactaaccatcttttgtcatt

SEQ ID NO: 17357 - DNA, 25 bp, Canis familiaris
ataaagtgacccctctgaatttgct

SEQ ID NO: 17358 - DNA, 25 bp, Canis familiaris
ataaggtggcccttcctatattctc

SEQ ID NO: 17359 - DNA, 25 bp, Canis familiaris
atcaagcctagtgcttcgttttgtg

SEQ ID NO: 17360 - DNA, 25 bp, Canis familiaris
ataacttatttttctggccttggat

SEQ ID NO: 17361 - DNA, 25 bp, Canis familiaris
atacactaattttgatgctgagcgt

SEQ ID NO: 17362 - DNA, 25 bp, Canis familiaris
atacagctcagtgttgtgtgcccat

SEQ ID NO: 17363 - DNA, 25 bp, Canis familiaris
atacgctggccattggtgtgaccat

SEQ ID NO: 17364 - DNA, 25 bp, Canis familiaris
atacctgacatcttgggtcccaaat

SEQ ID NO: 17365 - DNA, 25 bp, Canis familiaris
atacctgacataatatctaccctaa

SEQ ID NO: 17366 - DNA, 25 bp, Canis familiaris
atactgaatcacttatcttccctac

SEQ ID NO: 17367 - DNA, 25 bp, Canis familiaris
atacaacatcacttattgatccaat

SEQ ID NO: 17368 - DNA, 25 bp, Canis familiaris
atacttgcaccaaatatgatcaaat

SEQ ID NO: 17369 - DNA, 25 bp, Canis familiaris
atacttccattttatgatttcttat

SEQ ID NO: 17370 - DNA, 25 bp, Canis familiaris
atacttctccatctagtttcttaaa

SEQ ID NO: 17371 - DNA, 25 bp, Canis familiaris
atactgttccttaaatgttctttat

SEQ ID NO: 17372 - DNA, 25 bp, Canis familiaris
atactctttcttaattggtctttct

SEQ ID NO: 17373 - DNA, 25 bp, Canis familiaris
atacgtcctctcattgggtgttgtc

SEQ ID NO: 17374 - DNA, 25 bp, Canis familiaris
atacttctctcaggtccaggtgttc

SEQ ID NO: 17375 - DNA, 25 bp, Canis familiaris
ataccccaagtggccgagatgttcc

SEQ ID NO: 17376 - DNA, 25 bp, Canis familiaris
ataccgcctatgcgtcggatgtcta

SEQ ID NO: 17377 - DNA, 25 bp, Canis familiaris
ataaagccaaaaccagttctctgaa

SEQ ID NO: 17378 - DNA, 25 bp, Canis familiaris
ataaaggcctaaacaattcttagca

SEQ ID NO: 17379 - DNA, 25 bp, Canis familiaris
ataaagcactaataacagatgttaa

SEQ ID NO: 17380 - DNA, 25 bp, Canis familiaris
ataaacgtcatctgtaagagccaaa

SEQ ID NO: 17381 - DNA, 25 bp, Canis familiaris
atacagggtcacatgccaaggccat

SEQ ID NO: 17382 - DNA, 25 bp, Canis familiaris
atcaagtcgtacagcccggagctga

SEQ ID NO: 17383 - DNA, 25 bp, Canis familiaris
ataaggcggcagcagctttagaatg

SEQ ID NO: 17384 - DNA, 25 bp, Canis familiaris
atacgacaggcccgcaattacacat

SEQ ID NO: 17385 - DNA, 25 bp, Canis familiaris
atacaccggccggcacagtgttatc

SEQ ID NO: 17386 - DNA, 25 bp, Canis familiaris
atcacctggccaggccatatgtccc

SEQ ID NO: 17387 - DNA, 25 bp, Canis familiaris
atactctggcaatgcctacggccac

SEQ ID NO: 17388 - DNA, 25 bp, Canis familiaris
atacctgtgcaattaccactggatg

SEQ ID NO: 17389 - DNA, 25 bp, Canis familiaris
ataccatgtgatttcattcatgtgg

SEQ ID NO: 17390 - DNA, 25 bp, Canis familiaris
atacctgtgacaatcctctgagagt

SEQ ID NO: 17391 - DNA, 25 bp, Canis familiaris
atactttatttctgctgtagttagc

SEQ ID NO: 17392 - DNA, 25 bp, Canis familiaris
atactctctagtaccctctagtacc

SEQ ID NO: 17393 - DNA, 25 bp, Canis familiaris
atactctctagttcatccacataat

SEQ ID NO: 17394 - DNA, 25 bp, Canis familiaris
ataagcgctatggaattgcacagaa

SEQ ID NO: 17395 - DNA, 25 bp, Canis familiaris
ataccctcggcaagacatcaggaca

SEQ ID NO: 17396 - DNA, 25 bp, Canis familiaris
atacccagggcaactaagcgcagag

SEQ ID NO: 17397 - DNA, 25 bp, Canis familiaris
ataccctctgaggacggagctgcag

SEQ ID NO: 17398 - DNA, 25 bp, Canis familiaris
ataccacgtgatgacgaggatgtga

SEQ ID NO: 17399 - DNA, 25 bp, Canis familiaris
atacccctgagaacagatggcttgt

SEQ ID NO: 17400 - DNA, 25 bp, Canis familiaris
atacccacttgagtcagattgtcat

SEQ ID NO: 17401 - DNA, 25 bp, Canis familiaris
atcaccccttgaggaaagtagccgg

SEQ ID NO: 17402 - DNA, 25 bp, Canis familiaris
agctccccaaagttccaggacggag

SEQ ID NO: 17403 - DNA, 25 bp, Canis familiaris
atcccccaaacctcaggactggatg

SEQ ID NO: 17404 - DNA, 25 bp, Canis familiaris
atctaacacgtatagacaggacggt

SEQ ID NO: 17405 - DNA, 25 bp, Canis familiaris
atcgaaccgctttgagccaggaact

SEQ ID NO: 17406 - DNA, 25 bp, Canis familiaris
ataaagccactttgagggtagactt

SEQ ID NO: 17407 - DNA, 25 bp, Canis familiaris
ataaaagcgctttacctacagactt

SEQ ID NO: 17408 - DNA, 25 bp, Canis familiaris
ataaacactgtgctctttaaacttc

SEQ ID NO: 17409 - DNA, 25 bp, Canis familiaris
ataaacattgggactacatcaaaat

SEQ ID NO: 17410 - DNA, 25 bp, Canis familiaris
ataagactttggctacaagatcacc

SEQ ID NO: 17411 - DNA, 25 bp, Canis familiaris
ataagagattgtcccccaagtacct

SEQ ID NO: 17412 - DNA, 25 bp, Canis familiaris
ataacagatacaccctaaagacact

SEQ ID NO: 17413 - DNA, 25 bp, Canis familiaris
ataccatgtaccctctactgatgaa

SEQ ID NO: 17414 - DNA, 25 bp, Canis familiaris
atacgttacctgtcatacgtgccga

SEQ ID NO: 17415 - DNA, 25 bp, Canis familiaris
taagcgttccctgaaggttggtaca

SEQ ID NO: 17416 - DNA, 25 bp, Canis familiaris
actcgaggccctgtaaatcgcctac

SEQ ID NO: 17417 - DNA, 25 bp, Canis familiaris
atcgggatccctgtctcaatgggga

SEQ ID NO: 17418 - DNA, 25 bp, Canis familiaris
ataattatcgctattccaacgggag

SEQ ID NO: 17419 - DNA, 25 bp, Canis familiaris
ataaatacacatatggccctcggga

SEQ ID NO: 17420 - DNA, 25 bp, Canis familiaris
ataaaagcatctccgttcttcgggg

SEQ ID NO: 17421 - DNA, 25 bp, Canis familiaris
atcaacggaccctctgttcagggag

SEQ ID NO: 17422 - DNA, 25 bp, Canis familiaris
ataacaatacaggactctttcgagg

SEQ ID NO: 17423 - DNA, 25 bp, Canis familiaris
atcaaagtaaccttgctgttcatag

SEQ ID NO: 17424 - DNA, 25 bp, Canis familiaris
ataaactgactttactgttcaagca

SEQ ID NO: 17425 - DNA, 25 bp, Canis familiaris
ataaatcccatttactataataatg

SEQ ID NO: 17426 - DNA, 25 bp, Canis familiaris
atacacatacaaaatcctaaacaga

SEQ ID NO: 17427 - DNA, 25 bp, Canis familiaris
atcacgataaagcaccaggaatagt

SEQ ID NO: 17428 - DNA, 25 bp, Canis familiaris
atccgaaaaccaaatgaaggtgctg

SEQ ID NO: 17429 - DNA, 25 bp, Canis familiaris
atccgtaacaccaatgacaaaggtc

SEQ ID NO: 17430 - DNA, 25 bp, Canis familiaris
atctcgttgtatcctattacacggg

SEQ ID NO: 17431 - DNA, 25 bp, Canis familiaris
atacgtctatgaactttggcgcggg

SEQ ID NO: 17432 - DNA, 25 bp, Canis familiaris
atacatgtgtaagtttgtgtgtgtg

SEQ ID NO: 17433 - DNA, 25 bp, Canis familiaris
atacagaaccacgtctgctgtctgg

SEQ ID NO: 17434 - DNA, 25 bp, Canis familiaris
atacaacacgccggactgactctgg

SEQ ID NO: 17435 - DNA, 25 bp, Canis familiaris
atcaagacaccctgaaggctgcggc

SEQ ID NO: 17436 - DNA, 25 bp, Canis familiaris
ataacaccctcatgtgagctgtggt

SEQ ID NO: 17437 - DNA, 25 bp, Canis familiaris
ataacactgcaccaaaacagtttgg

SEQ ID NO: 17438 - DNA, 25 bp, Canis familiaris
atacacatctaccaagtacagtgat

SEQ ID NO: 17439 - DNA, 25 bp, Canis familiaris
atacgcatctaccacaggcatgtgc

SEQ ID NO: 17440 - DNA, 25 bp, Canis familiaris
ataccctacccactcattaatataa

SEQ ID NO: 17441 - DNA, 25 bp, Canis familiaris
atacctccaccctctaattataaga

SEQ ID NO: 17442 - DNA, 25 bp, Canis familiaris
atacctccaccgtggagctcgtcga

SEQ ID NO: 17443 - DNA, 25 bp, Canis familiaris
ataactcagaccgtggttcctgtgc

SEQ ID NO: 17444 - DNA, 25 bp, Canis familiaris
ataacagatgaccggagtggcctga

SEQ ID NO: 17445 - DNA, 25 bp, Canis familiaris
ataagagagtcaccaggggcccagg

SEQ ID NO: 17446 - DNA, 25 bp, Canis familiaris
atacactgggcacctgtgaagcagg

SEQ ID NO: 17447 - DNA, 25 bp, Canis familiaris
atacctggtgcatggtaggcatcgg

SEQ ID NO: 17448 - DNA, 25 bp, Canis familiaris
atacctgggtctttctgatgcttgg

SEQ ID NO: 17449 - DNA, 25 bp, Canis familiaris
atactttttctgtcttattctggta

SEQ ID NO: 17450 - DNA, 25 bp, Canis familiaris
atacttttctcttatttctggtgtt

SEQ ID NO: 17451 - DNA, 25 bp, Canis familiaris
atactaatctccagttccaagtcta

SEQ ID NO: 17452 - DNA, 25 bp, Canis familiaris
atcacacaacccaagtgtccaacct

SEQ ID NO: 17453 - DNA, 25 bp, Canis familiaris
atacaaggccatagacttctcacac

SEQ ID NO: 17454 - DNA, 25 bp, Canis familiaris
atacagactgcctactatatgccaa

SEQ ID NO: 17455 - DNA, 25 bp, Canis familiaris
atacgagctccatctacagctgagc

SEQ ID NO: 17456 - DNA, 25 bp, Canis familiaris
atacctgatgcctctaagctgcagt

SEQ ID NO: 17457 - DNA, 25 bp, Canis familiaris
ataccgatatctggctatgtgctgc

SEQ ID NO: 17458 - DNA, 25 bp, Canis familiaris
atacctgtgttgccgagatgtgatc

SEQ ID NO: 17459 - DNA, 25 bp, Canis familiaris
atacctctggtggctgagcggttta

SEQ ID NO: 17460 - DNA, 25 bp, Canis familiaris
ataccctgatgacctgtgaaatgtt

SEQ ID NO: 17461 - DNA, 25 bp, Canis familiaris
ataccctaagggcaagtcttcgaat

SEQ ID NO: 17462 - DNA, 25 bp, Canis familiaris
atacccaaaggccaaatgttactga

SEQ ID NO: 17463 - DNA, 25 bp, Canis familiaris
atacccagctagcaaatattatgtt

SEQ ID NO: 17464 - DNA, 25 bp, Canis familiaris
atactgggctcatacaacattttgt

SEQ ID NO: 17465 - DNA, 25 bp, Canis familiaris
atactgagctgccaaaactttttat

SEQ ID NO: 17466 - DNA, 25 bp, Canis familiaris
atactgcacccatgtactataccat

SEQ ID NO: 17467 - DNA, 25 bp, Canis familiaris
atcttcaggccatatgtttactcag

SEQ ID NO: 17468 - DNA, 25 bp, Canis familiaris
ataatcgtcctattttaacatcagt

SEQ ID NO: 17469 - DNA, 25 bp, Canis familiaris
ataacctctccattttcaggacttt

SEQ ID NO: 17470 - DNA, 25 bp, Canis familiaris
ataagcacatccccagattgaggcc

SEQ ID NO: 17471 - DNA, 25 bp, Canis familiaris
ataaaatcctgccagttgccatcca

SEQ ID NO: 17472 - DNA, 25 bp, Canis familiaris
ataaacgctctatgcattgccgata

SEQ ID NO: 17473 - DNA, 25 bp, Canis familiaris
ataagaactctctcttgggatccct

SEQ ID NO: 17474 - DNA, 25 bp, Canis familiaris
ataaattcttggtctctgtgtgagg

SEQ ID NO: 17475 - DNA, 25 bp, Canis familiaris
ataagatggattgtctttttggctt

SEQ ID NO: 17476 - DNA, 25 bp, Canis familiaris
atacagcaggttgtctcattttccc

SEQ ID NO: 17477 - DNA, 25 bp, Canis familiaris
atacaggagctgttattctggattc

SEQ ID NO: 17478 - DNA, 25 bp, Canis familiaris
atcaagggtatgtcattattactca

SEQ ID NO: 17479 - DNA, 25 bp, Canis familiaris
atcaaggagactcctttacctccct

SEQ ID NO: 17480 - DNA, 25 bp, Canis familiaris
ataaggcactctccgttagttttct

SEQ ID NO: 17481 - DNA, 25 bp, Canis familiaris
ataaggcccgggtggtcattctgat

SEQ ID NO: 17482 - DNA, 25 bp, Canis familiaris
ataagggctggtatttctcctctgt

SEQ ID NO: 17483 - DNA, 25 bp, Canis familiaris
atacagggatgctgtttttccattc

SEQ ID NO: 17484 - DNA, 25 bp, Canis familiaris
atacctgggtcattgattttatctt

SEQ ID NO: 17485 - DNA, 25 bp, Canis familiaris
atacctgggagatgtcttgagatgt

SEQ ID NO: 17486 - DNA, 25 bp, Canis familiaris
atacgtggtgcgaaatcattggtgg

SEQ ID NO: 17487 - DNA, 25 bp, Canis familiaris
atgaccggaggccgatgtcggggtg

SEQ ID NO: 17488 - DNA, 25 bp, Canis familiaris
atacgtacaggccagatgtggggga

SEQ ID NO: 17489 - DNA, 25 bp, Canis familiaris
atacccaagggatgtgctggagtgt

SEQ ID NO: 17490 - DNA, 25 bp, Canis familiaris
ataccgccacggaggtggagctcgc

SEQ ID NO: 17491 - DNA, 25 bp, Canis familiaris
ataccctcataggtttgtgaactcc

SEQ ID NO: 17492 - DNA, 25 bp, Canis familiaris
atactggcatcctgtttgtgatact

SEQ ID NO: 17493 - DNA, 25 bp, Canis familiaris
atcgtggatcctcttttatccgact

SEQ ID NO: 17494 - DNA, 25 bp, Canis familiaris
atccgagaactagttttctggagtt

SEQ ID NO: 17495 - DNA, 25 bp, Canis familiaris
atcaagagacttactttttagaaat

SEQ ID NO: 17496 - DNA, 25 bp, Canis familiaris
atacttggtctttttttccagcaat

SEQ ID NO: 17497 - DNA, 25 bp, Canis familiaris
atactgcattgttgtttctttccaa

SEQ ID NO: 17498 - DNA, 25 bp, Canis familiaris
atacagcattggttcctctagatct

SEQ ID NO: 17499 - DNA, 25 bp, Canis familiaris
atacacaggctgtccagagtgagat

SEQ ID NO: 17500 - DNA, 25 bp, Canis familiaris
atacacacatgcacgcaggctacta

SEQ ID NO: 17501 - DNA, 25 bp, Canis familiaris
ataatcagcatcacggacagtccgt

SEQ ID NO: 17502 - DNA, 25 bp, Canis familiaris
atacatagacacattacacctcctg

SEQ ID NO: 17503 - DNA, 25 bp, Canis familiaris
ataataaacggtcacttgtcatgca

SEQ ID NO: 17504 - DNA, 25 bp, Canis familiaris
ataaagaacggcaacacactgtgat

SEQ ID NO: 17505 - DNA, 25 bp, Canis familiaris
atacacaaacggacacacacccaat

SEQ ID NO: 17506 - DNA, 25 bp, Canis familiaris
ataacaaaaacactccagccgcata

SEQ ID NO: 17507 - DNA, 25 bp, Canis familiaris
ataaaaatgtatcgcttcccagaag

SEQ ID NO: 17508 - DNA, 25 bp, Canis familiaris
ataagtctagttacatctcccagtc

SEQ ID NO: 17509 - DNA, 25 bp, Canis familiaris
atactgtatttctatattctccttt

SEQ ID NO: 17510 - DNA, 25 bp, Canis familiaris
atacttggtatatttcttactattt

SEQ ID NO: 17511 - DNA, 25 bp, Canis familiaris
atactgttgtcttttatcatgactt

SEQ ID NO: 17512 - DNA, 25 bp, Canis familiaris
atacgtggtccttctagatcactgt

SEQ ID NO: 17513 - DNA, 25 bp, Canis familiaris
atacgtgtctactccaatatctgtt

SEQ ID NO: 17514 - DNA, 25 bp, Canis familiaris
atacgagtgccatgcatccaattcc

SEQ ID NO: 17515 - DNA, 25 bp, Canis familiaris
atactgatgcatcaactccagaatc

SEQ ID NO: 17516 - DNA, 25 bp, Canis familiaris
atactgcatgcacaactggcttctc

SEQ ID NO: 17517 - DNA, 25 bp, Canis familiaris
atactctgagcctagtgtttgtcca

SEQ ID NO: 17518 - DNA, 25 bp, Canis familiaris
atactcaacagctcagtctttgcct

SEQ ID NO: 17519 - DNA, 25 bp, Canis familiaris
ataacaaggcacagcctttgcccca

SEQ ID NO: 17520 - DNA, 25 bp, Canis familiaris
ataaacattcactggctttcctcca

SEQ ID NO: 17521 - DNA, 25 bp, Canis familiaris
ataagatttgagtgtcttccctcct

SEQ ID NO: 17522 - DNA, 25 bp, Canis familiaris
ataagtttcagggtcatcctcggtc

SEQ ID NO: 17523 - DNA, 25 bp, Canis familiaris
ataagccattcagggctgccacatc

SEQ ID NO: 17524 - DNA, 25 bp, Canis familiaris
ataaccataacaacaggcacttact

SEQ ID NO: 17525 - DNA, 25 bp, Canis familiaris
ataagttcacagtaaggccttcaca

SEQ ID NO: 17526 - DNA, 25 bp, Canis familiaris
atacaaaccagtgtacctctgacct

SEQ ID NO: 17527 - DNA, 25 bp, Canis familiaris
atgatgccaacctcttacgtgcgcc

SEQ ID NO: 17528 - DNA, 25 bp, Canis familiaris
atgtgtgaagccccttgacacggct

SEQ ID NO: 17529 - DNA, 25 bp, Canis familiaris
ataataaccgcagtctacacagagt

SEQ ID NO: 17530 - DNA, 25 bp, Canis familiaris
ataaaatcggcacccagccactatt

SEQ ID NO: 17531 - DNA, 25 bp, Canis familiaris
ataaactcatggtcctgcgtgacta

SEQ ID NO: 17532 - DNA, 25 bp, Canis familiaris
ataaagcgcttgtttgcagataaaa

SEQ ID NO: 17533 - DNA, 25 bp, Canis familiaris
ataaccacaatgcattcgtaaaacc

SEQ ID NO: 17534 - DNA, 25 bp, Canis familiaris
atacaccacataagatacggagtac

SEQ ID NO: 17535 - DNA, 25 bp, Canis familiaris
ataatggaataggaccgcggttcta

SEQ ID NO: 17536 - DNA, 25 bp, Canis familiaris
ataatggaataggaccgcggttcta

SEQ ID NO: 17537 - DNA, 25 bp, Canis familiaris
ataatgtgaagggaccactctttcg

SEQ ID NO: 17538 - DNA, 25 bp, Canis familiaris
ataagtgaggtggtccctcttcctg

SEQ ID NO: 17539 - DNA, 25 bp, Canis familiaris
ataaattcttggtcaccttctccat

SEQ ID NO: 17540 - DNA, 25 bp, Canis familiaris
ataaattcgggctcattctccctag

SEQ ID NO: 17541 - DNA, 25 bp, Canis familiaris
ataaactgtgagccttgcttaccct

SEQ ID NO: 17542 - DNA, 25 bp, Canis familiaris
ataaatgtttctcacttacacgccc

SEQ ID NO: 17543 - DNA, 25 bp, Canis familiaris
ataagattttcatagctcagtcagc

SEQ ID NO: 17544 - DNA, 25 bp, Canis familiaris
ataacgatttcacaccaggaacagc

SEQ ID NO: 17545 - DNA, 25 bp, Canis familiaris
ataaccttctaaacctggatataag

SEQ ID NO: 17546 - DNA, 25 bp, Canis familiaris
atcaaatttaacacctgccaccaag

SEQ ID NO: 17547 - DNA, 25 bp, Canis familiaris
ataaactctaacaccacaactgaag

SEQ ID NO: 17548 - DNA, 25 bp, Canis familiaris
ataaactctagttgttcataagcta

SEQ ID NO: 17549 - DNA, 25 bp, Canis familiaris
atacaactccctgtatcttgtgctg

SEQ ID NO: 17550 - DNA, 25 bp, Canis familiaris
ataaattggcctctatctttgctgc

SEQ ID NO: 17551 - DNA, 25 bp, Canis familiaris
ataaaggcagctgttgtctcttctc

SEQ ID NO: 17552 - DNA, 25 bp, Canis familiaris
ataaactgctcttcttgatccttta

SEQ ID NO: 17553 - DNA, 25 bp, Canis familiaris
ataagttggttttgtcagattctga

SEQ ID NO: 17554 - DNA, 25 bp, Canis familiaris
atacatggctcgtttagtaatgttg

SEQ ID NO: 17555 - DNA, 25 bp, Canis familiaris
atacagaccttgttactacagttgg

SEQ ID NO: 17556 - DNA, 25 bp, Canis familiaris
ataagcccttgacattatttcgggt

SEQ ID NO: 17557 - DNA, 25 bp, Canis familiaris
ataaccctatgagctttcttctttg

SEQ ID NO: 17558 - DNA, 25 bp, Canis familiaris
atacacctaagttatattctatttt

SEQ ID NO: 17559 - DNA, 25 bp, Canis familiaris
atacagtgcttataaattgcaatgt

SEQ ID NO: 17560 - DNA, 25 bp, Canis familiaris
ataagcttgatatcgaattcggcac

SEQ ID NO: 17561 - DNA, 25 bp, Canis familiaris
ataagatttgcactcgcctttggca

SEQ ID NO: 17562 - DNA, 25 bp, Canis familiaris
atacaatttccccctgaaagaccat

SEQ ID NO: 17563 - DNA, 25 bp, Canis familiaris
ataatatttcccacagaaagccctc

SEQ ID NO: 17564 - DNA, 25 bp, Canis familiaris
ataacttttccaagctgaactccct

SEQ ID NO: 17565 - DNA, 25 bp, Canis familiaris
ataaattctttaagccacctctctc

SEQ ID NO: 17566 - DNA, 25 bp, Canis familiaris
atacattgtcgtaacagccaccgtc

SEQ ID NO: 17567 - DNA, 25 bp, Canis familiaris
atactgtgtatcttaagcgcctgct

SEQ ID NO: 17568 - DNA, 25 bp, Canis familiaris
atacgtgagcaccttgtggcttgta

SEQ ID NO: 17569 - DNA, 25 bp, Canis familiaris
atacagtgactcctattgatctagt

SEQ ID NO: 17570 - DNA, 25 bp, Canis familiaris
atcaagatggccaagatgtgtcaag

SEQ ID NO: 17571 - DNA, 25 bp, Canis familiaris
atacagggcctgatgcatatgaaga

SEQ ID NO: 17572 - DNA, 25 bp, Canis familiaris
atacagctctctctagctgagaatg

SEQ ID NO: 17573 - DNA, 25 bp, Canis familiaris
atacaacccagtagctagcctgtgc

SEQ ID NO: 17574 - DNA, 25 bp, Canis familiaris
atcacgacccagactaattaggcct

SEQ ID NO: 17575 - DNA, 25 bp, Canis familiaris
atcggcatcccgaagtttgacttct

SEQ ID NO: 17576 - DNA, 25 bp, Canis familiaris
atcaaagccctgagttgggttctat

SEQ ID NO: 17577 - DNA, 25 bp, Canis familiaris
atcacatacgggctttggggtcaaa

SEQ ID NO: 17578 - DNA, 25 bp, Canis familiaris
atcaaataattgcgtctggggtaaa

SEQ ID NO: 17579 - DNA, 25 bp, Canis familiaris
ataagcaacaggcaccatggggtta

SEQ ID NO: 17580 - DNA, 25 bp, Canis familiaris
atcagtcaacaaaaccgtccgtcat

SEQ ID NO: 17581 - DNA, 25 bp, Canis familiaris
atcgtcgacagagacacccagagtc

SEQ ID NO: 17582 - DNA, 25 bp, Canis familiaris
atcagatcaaaaccaacccggtcag

SEQ ID NO: 17583 - DNA, 25 bp, Canis familiaris
atcagaacaccgaaacccaagacac

SEQ ID NO: 17584 - DNA, 25 bp, Canis familiaris
ataaagcacagagagaggacagaag

SEQ ID NO: 17585 - DNA, 25 bp, Canis familiaris
ataaccaaagtcaagagatacatag

SEQ ID NO: 17586 - DNA, 25 bp, Canis familiaris
ataactaagcttcagagacaaagta

SEQ ID NO: 17587 - DNA, 25 bp, Canis familiaris
ataagctaaatccaacaacaacaat

SEQ ID NO: 17588 - DNA, 25 bp, Canis familiaris
ataatgtaaatccacccactaacct

SEQ ID NO: 17589 - DNA, 25 bp, Canis familiaris
atacagtgtatatccccaataacct

SEQ ID NO: 17590 - DNA, 25 bp, Canis familiaris
atactggcttgaccaccactgtaaa

SEQ ID NO: 17591 - DNA, 25 bp, Canis familiaris
atactcgcaggacgcttacatctaa

SEQ ID NO: 17592 - DNA, 25 bp, Canis familiaris
atacacagaggtccttcagacccag

SEQ ID NO: 17593 - DNA, 25 bp, Canis familiaris
atactctgggctcagtgcaaggaca

SEQ ID NO: 17594 - DNA, 25 bp, Canis familiaris
atactgctgtggtctgggagcaaag

SEQ ID NO: 17595 - DNA, 25 bp, Canis familiaris
atcaaggtggccaaggaaaatggtg

SEQ ID NO: 17596 - DNA, 25 bp, Canis familiaris
atcaacgggacttgtccaaagtgtc

SEQ ID NO: 17597 - DNA, 25 bp, Canis familiaris
atcaaatggtgtggagcccaaaggt

SEQ ID NO: 17598 - DNA, 25 bp, Canis familiaris
ataacacattattcacccaaaggct

SEQ ID NO: 17599 - DNA, 25 bp, Canis familiaris
ataagcacttatttccagcagggtt

SEQ ID NO: 17600 - DNA, 25 bp, Canis familiaris
ataacatcttacttcaactgaggct

SEQ ID NO: 17601 - DNA, 25 bp, Canis familiaris
ataaactgttcattctttgggctag

SEQ ID NO: 17602 - DNA, 25 bp, Canis familiaris
ataaagggacgccgggtggctcagt

SEQ ID NO: 17603 - DNA, 25 bp, Canis familiaris
ataaaggaggtgcctaggtggctca

SEQ ID NO: 17604 - DNA, 25 bp, Canis familiaris
atactctgggagtgcatgggtggct

SEQ ID NO: 17605 - DNA, 25 bp, Canis familiaris
atcagttaggcccggtggtggtggt

SEQ ID NO: 17606 - DNA, 25 bp, Canis familiaris
atcagtaaagcctgttagtggttca

SEQ ID NO: 17607 - DNA, 25 bp, Canis familiaris
atactaacccattatctgacatttc

SEQ ID NO: 17608 - DNA, 25 bp, Canis familiaris
atacttacctcttcgctgataaatt

SEQ ID NO: 17609 - DNA, 25 bp, Canis familiaris
atacttgacctatcctatactgcta

SEQ ID NO: 17610 - DNA, 25 bp, Canis familiaris
atacttccagcctccagaactgtaa

SEQ ID NO: 17611 - DNA, 25 bp, Canis familiaris
atacttctatactgggacacattta

SEQ ID NO: 17612 - DNA, 25 bp, Canis familiaris
atacattttcattactggagaattt

SEQ ID NO: 17613 - DNA, 25 bp, Canis familiaris
atacatttgtcattactgaaaattt

SEQ ID NO: 17614 - DNA, 25 bp, Canis familiaris
atactgctggatcctacaactcact

SEQ ID NO: 17615 - DNA, 25 bp, Canis familiaris
atactgctaattcacaatctatttt

SEQ ID NO: 17616 - DNA, 25 bp, Canis familiaris
atacttatatctagactttattcat

SEQ ID NO: 17617 - DNA, 25 bp, Canis familiaris
atacatatatatctaagtctctgaa

SEQ ID NO: 17618 - DNA, 25 bp, Canis familiaris
atacattatttcttcagctgttata

SEQ ID NO: 17619 - DNA, 25 bp, Canis familiaris
atacatctattaaatatgcatcatt

SEQ ID NO: 17620 - DNA, 25 bp, Canis familiaris
atacatatttttatcagcgcttggt

SEQ ID NO: 17621 - DNA, 25 bp, Canis familiaris
atacttgttatacttactgtctggt

SEQ ID NO: 17622 - DNA, 25 bp, Canis familiaris
atactattaatcacaccgcatgctg

SEQ ID NO: 17623 - DNA, 25 bp, Canis familiaris
atactttcagtcaaatatggaggat

SEQ ID NO: 17624 - DNA, 25 bp, Canis familiaris
atacttgccagtaccagggagtggt

SEQ ID NO: 17625 - DNA, 25 bp, Canis familiaris
atcacgtcacgttccacaggacggg

SEQ ID NO: 17626 - DNA, 25 bp, Canis familiaris
ataattcaggtcccaaggccaagcc

SEQ ID NO: 17627 - DNA, 25 bp, Canis familiaris
ataagtgatttccaaagagcccaga

SEQ ID NO: 17628 - DNA, 25 bp, Canis familiaris
atacaggactatgtcaagagccaaa

SEQ ID NO: 17629 - DNA, 25 bp, Canis familiaris
atacatgcatacttcagtgaaactc

SEQ ID NO: 17630 - DNA, 25 bp, Canis familiaris
ataagatcagcctgtgacaaccccc

SEQ ID NO: 17631 - DNA, 25 bp, Canis familiaris
ataagatacggagtacatcctcttc

SEQ ID NO: 17632 - DNA, 25 bp, Canis familiaris
atcagcagcataaggcagttatcca

SEQ ID NO: 17633 - DNA, 25 bp, Canis familiaris
atcgtgaagggacatcatccacgga

SEQ ID NO: 17634 - DNA, 25 bp, Canis familiaris
atgagggccggacaatcccggtttg

SEQ ID NO: 17635 - DNA, 25 bp, Canis familiaris
ataaggccgagacgtacctgcgggt

SEQ ID NO: 17636 - DNA, 25 bp, Canis familiaris
ataaggaggaacacgccgagcggct

SEQ ID NO: 17637 - DNA, 25 bp, Canis familiaris
ataaggaggggcaggcctgggcatc

SEQ ID NO: 17638 - DNA, 25 bp, Canis familiaris
ataagcgagtggaccggcttcgcca

SEQ ID NO: 17639 - DNA, 25 bp, Canis familiaris
ataaggggagcaccaaggcacccac

SEQ ID NO: 17640 - DNA, 25 bp, Canis familiaris
ataagggagatgcctactgtgcctc

SEQ ID NO: 17641 - DNA, 25 bp, Canis familiaris
ataaaggaggtctcatatgctctcg

SEQ ID NO: 17642 - DNA, 25 bp, Canis familiaris
ataaagtagagcatccactccatcc

SEQ ID NO: 17643 - DNA, 25 bp, Canis familiaris
ataaaataacctccatctcaacatt

SEQ ID NO: 17644 - DNA, 25 bp, Canis familiaris
ataaatctcacaacgtattaaaaca

SEQ ID NO: 17645 - DNA, 25 bp, Canis familiaris
ataatgttccatcacgttccaaata

SEQ ID NO: 17646 - DNA, 25 bp, Canis familiaris
ataagcttcacaaaggtaccaaagt

SEQ ID NO: 17647 - DNA, 25 bp, Canis familiaris
ataacttaaggactctaccatggaa

SEQ ID NO: 17648 - DNA, 25 bp, Canis familiaris
atcacctctaggtccttgaagtgga

SEQ ID NO: 17649 - DNA, 25 bp, Canis familiaris
atcactcctgggacccaatttgatc

SEQ ID NO: 17650 - DNA, 25 bp, Canis familiaris
atacatccctgtacccaataatatg

SEQ ID NO: 17651 - DNA, 25 bp, Canis familiaris
atcacttcctctagtctgttcaaag

SEQ ID NO: 17652 - DNA, 25 bp, Canis familiaris
atactataccatcttgttcaattgt

SEQ ID NO: 17653 - DNA, 25 bp, Canis familiaris
atacattcccagcttttcaacttta

SEQ ID NO: 17654 - DNA, 25 bp, Canis familiaris
atacttccaagccttattcagtgac

SEQ ID NO: 17655 - DNA, 25 bp, Canis familiaris
atacttcaaagccgtaattcattac

SEQ ID NO: 17656 - DNA, 25 bp, Canis familiaris
atacacacacacagaataattagaa

SEQ ID NO: 17657 - DNA, 25 bp, Canis familiaris
atacacaccaccttatcaatatctg

SEQ ID NO: 17658 - DNA, 25 bp, Canis familiaris
ataacaccatactgaccaccattat

SEQ ID NO: 17659 - DNA, 25 bp, Canis familiaris
ataacagcactagtaatcccactta

SEQ ID NO: 17660 - DNA, 25 bp, Canis familiaris
ataatctgcactgtgatttcccttc

SEQ ID NO: 17661 - DNA, 25 bp, Canis familiaris
atacatctgctctgtgtattcccac

SEQ ID NO: 17662 - DNA, 25 bp, Canis familiaris
atacatctgtgatatttaccccaag

SEQ ID NO: 17663 - DNA, 25 bp, Canis familiaris
atacttgcaatagttaacccagaac

SEQ ID NO: 17664 - DNA, 25 bp, Canis familiaris
ataattatatagatcccccagtagg

SEQ ID NO: 17665 - DNA, 25 bp, Canis familiaris
ataattacaggatcactccccattg

SEQ ID NO: 17666 - DNA, 25 bp, Canis familiaris
ataaatctactacacctaccattga

SEQ ID NO: 17667 - DNA, 25 bp, Canis familiaris
ataaatatactcccgttgaccacga

SEQ ID NO: 17668 - DNA, 25 bp, Canis familiaris
atcaacaatagggtttatgacctcg

SEQ ID NO: 17669 - DNA, 25 bp, Canis familiaris
atcactaacagatatattaaccacg

SEQ ID NO: 17670 - DNA, 25 bp, Canis familiaris
atcaataaataacatcaaacaccgg

SEQ ID NO: 17671 - DNA, 25 bp, Canis familiaris
atacaaacataaacacaacacaaca

SEQ ID NO: 17672 - DNA, 25 bp, Canis familiaris
atacatctatcatcacacacaacat

SEQ ID NO: 17673 - DNA, 25 bp, Canis familiaris
ataatatcatgctccaaatatttaa

SEQ ID NO: 17674 - DNA, 25 bp, Canis familiaris
ataacctgatctaccaagtggctaa

SEQ ID NO: 17675 - DNA, 25 bp, Canis familiaris
ataacttctctataagggctaaact

SEQ ID NO: 17676 - DNA, 25 bp, Canis familiaris
ataacttctcattataagccctata

SEQ ID NO: 17677 - DNA, 25 bp, Canis familiaris
ataactctacatttctatatccttt

SEQ ID NO: 17678 - DNA, 25 bp, Canis familiaris
ataatattacatttcgtttcttcga

SEQ ID NO: 17679 - DNA, 25 bp, Canis familiaris
ataacaacaattgccgttttggaca

SEQ ID NO: 17680 - DNA, 25 bp, Canis familiaris
ataaccaaatctgctcaaattgcgg

SEQ ID NO: 17681 - DNA, 25 bp, Canis familiaris
ataacctacatcttcccaaactgga

SEQ ID NO: 17682 - DNA, 25 bp, Canis familiaris
ataaacttgccaacccaattgtgcc

SEQ ID NO: 17683 - DNA, 25 bp, Canis familiaris
ataaaagtgccatctaccttctgtc

SEQ ID NO: 17684 - DNA, 25 bp, Canis familiaris
ataaatgatgccaaaccaccgtttc

SEQ ID NO: 17685 - DNA, 25 bp, Canis familiaris
ataaatgactaccatcacccttttc

SEQ ID NO: 17686 - DNA, 25 bp, Canis familiaris
ataacttctacattatcctttgttt

SEQ ID NO: 17687 - DNA, 25 bp, Canis familiaris
ataactcttggatttcctgttgtac

SEQ ID NO: 17688 - DNA, 25 bp, Canis familiaris
ataaatttaatatcctttctagaat

SEQ ID NO: 17689 - DNA, 25 bp, Canis familiaris
ataagtttagagagcactgttttaa

SEQ ID NO: 17690 - DNA, 25 bp, Canis familiaris
ataattactaacacattgctttttt

SEQ ID NO: 17691 - DNA, 25 bp, Canis familiaris
atacatctaatgcacacctggtttt

SEQ ID NO: 17692 - DNA, 25 bp, Canis familiaris
atacatcggatccatattttgttat

SEQ ID NO: 17693 - DNA, 25 bp, Canis familiaris
atacacggatagccccgatgttgta

SEQ ID NO: 17694 - DNA, 25 bp, Canis familiaris
atacaatggtgccacatccgttctg

SEQ ID NO: 17695 - DNA, 25 bp, Canis familiaris
atacaagacaccacctgtgctcatg

SEQ ID NO: 17696 - DNA, 25 bp, Canis familiaris
ataaattcactcagcacttgattga

SEQ ID NO: 17697 - DNA, 25 bp, Canis familiaris
atacataatatgccaagatttgtta

SEQ ID NO: 17698 - DNA, 25 bp, Canis familiaris
ataataaagcgcttgtttgcagata

SEQ ID NO: 17699 - DNA, 25 bp, Canis familiaris
ataataaacatgtctgaagtcaaaa

SEQ ID NO: 17700 - DNA, 25 bp, Canis familiaris
ataataaacatctctcaccaacaaa

SEQ ID NO: 17701 - DNA, 25 bp, Canis familiaris
ataataaatttgcctcaccacttaa

SEQ ID NO: 17702 - DNA, 25 bp, Canis familiaris
ataaaactttgaatgacctctggaa

SEQ ID NO: 17703 - DNA, 25 bp, Canis familiaris
ataaaacgtgcttttctctcttgaa

SEQ ID NO: 17704 - DNA, 25 bp, Canis familiaris
ataaaattgtttcctccattctgag

SEQ ID NO: 17705 - DNA, 25 bp, Canis familiaris
ataataattgcctttcatggtgtat

SEQ ID NO: 17706 - DNA, 25 bp, Canis familiaris
ataatagatgtctgttcatgtgtta

SEQ ID NO: 17707 - DNA, 25 bp, Canis familiaris
ataaatatgcccttgtcctgttaaa

SEQ ID NO: 17708 - DNA, 25 bp, Canis familiaris
atacaagcacccttatgtttatagc

SEQ ID NO: 17709 - DNA, 25 bp, Canis familiaris
atacatggcaccactgtgtcttatg

SEQ ID NO: 17710 - DNA, 25 bp, Canis familiaris
atacatcctggcagctggacttcac

SEQ ID NO: 17711 - DNA, 25 bp, Canis familiaris
atacatcctggcagctggacttcac

SEQ ID NO: 17712 - DNA, 25 bp, Canis familiaris
atacatcctggcagctggacttcac

SEQ ID NO: 17713 - DNA, 25 bp, Canis familiaris
atacatggtgacggggacttctcgg

SEQ ID NO: 17714 - DNA, 25 bp, Canis familiaris
atcactgaggaagggcccttgatgc

SEQ ID NO: 17715 - DNA, 25 bp, Canis familiaris
atccgagggaagggctttgactggc

SEQ ID NO: 17716 - DNA, 25 bp, Canis familiaris
accagtacgtacgcttcgacagcga

SEQ ID NO: 17717 - DNA, 25 bp, Canis familiaris
atcagagcttcgaggtttcgtcagg

SEQ ID NO: 17718 - DNA, 25 bp, Canis familiaris
atacagctcaccatggaactttccc

SEQ ID NO: 17719 - DNA, 25 bp, Canis familiaris
ataatgtccctgtgactgcttttgc

SEQ ID NO: 17720 - DNA, 25 bp, Canis familiaris
atacaacattctttacctctggtct

SEQ ID NO: 17721 - DNA, 25 bp, Canis familiaris
atacaagttcgtggcacacttggac

SEQ ID NO: 17722 - DNA, 25 bp, Canis familiaris
atcactaggtctgggcatcatcctg

SEQ ID NO: 17723 - DNA, 25 bp, Canis familiaris
atcaaagcgctggcaggctgcgact

SEQ ID NO: 17724 - DNA, 25 bp, Canis familiaris
atacagtcagataatgcgcatgcgt

SEQ ID NO: 17725 - DNA, 25 bp, Canis familiaris
atcacaggaataagtcatccacggt

SEQ ID NO: 17726 - DNA, 25 bp, Canis familiaris
atcaaagcaaactgcccacgctgaa

SEQ ID NO: 17727 - DNA, 25 bp, Canis familiaris
ataaacagaatcgtctccctgaaaa

SEQ ID NO: 17728 - DNA, 25 bp, Canis familiaris
ataacagcaatgccttcaccctaat

SEQ ID NO: 17729 - DNA, 25 bp, Canis familiaris
ataactccagctgttgtctctgaga

SEQ ID NO: 17730 - DNA, 25 bp, Canis familiaris
atacaatctgaggcctcctctctca

SEQ ID NO: 17731 - DNA, 25 bp, Canis familiaris
ataataaaggcgtctgctcccagtt

SEQ ID NO: 17732 - DNA, 25 bp, Canis familiaris
ataaacaatcggttctacacagaaa

SEQ ID NO: 17733 - DNA, 25 bp, Canis familiaris
ataaacacacggtcttacctccaga

SEQ ID NO: 17734 - DNA, 25 bp, Canis familiaris
ataaaatcatccacttgtcccgaat

SEQ ID NO: 17735 - DNA, 25 bp, Canis familiaris
ataatgttaccaacttgacccctat

SEQ ID NO: 17736 - DNA, 25 bp, Canis familiaris
ataagttcccagtgaattcctctat

SEQ ID NO: 17737 - DNA, 25 bp, Canis familiaris
ataagttctcagtaaaagatcttct

SEQ ID NO: 17738 - DNA, 25 bp, Canis familiaris
atacagttttatttaagacattgca

SEQ ID NO: 17739 - DNA, 25 bp, Canis familiaris
atacaattttataaacacacacaca

SEQ ID NO: 17740 - DNA, 25 bp, Canis familiaris
atacagtttgtgttagatccaacca

SEQ ID NO: 17741 - DNA, 25 bp, Canis familiaris
ataatcacttgggtaattacaggaa

SEQ ID NO: 17742 - DNA, 25 bp, Canis familiaris
ataatccttctgctttatctcaaaa

SEQ ID NO: 17743 - DNA, 25 bp, Canis familiaris
ataatccgacttcctgtacagaaaa

SEQ ID NO: 17744 - DNA, 25 bp, Canis familiaris
ataaatcctgcttcctgtcaaaaaa

SEQ ID NO: 17745 - DNA, 25 bp, Canis familiaris
ataaatacagtgtcacgttcaaaaa

SEQ ID NO: 17746 - DNA, 25 bp, Canis familiaris
ataaatcaccttcccagtagcatga

SEQ ID NO: 17747 - DNA, 25 bp, Canis familiaris
atacacacacatacccacacgtatg

SEQ ID NO: 17748 - DNA, 25 bp, Canis familiaris
atacacccattctacacctgtagga

SEQ ID NO: 17749 - DNA, 25 bp, Canis familiaris
ataaccagtacgtacgcttcgacag

SEQ ID NO: 17750 - DNA, 25 bp, Canis familiaris
ataaccggagtagctgcttcgacag

SEQ ID NO: 17751 - DNA, 25 bp, Canis familiaris
ataaccgaagcatccatcttaagaa

SEQ ID NO: 17752 - DNA, 25 bp, Canis familiaris
ataaccgtgctaacctgattcaaaa

SEQ ID NO: 17753 - DNA, 25 bp, Canis familiaris
ataaagcttttacctattgaatgaa

SEQ ID NO: 17754 - DNA, 25 bp, Canis familiaris
ataaaattgtatgctttcagaataa

SEQ ID NO: 17755 - DNA, 25 bp, Canis familiaris
ataagacattaagcctcttgtcaca

SEQ ID NO: 17756 - DNA, 25 bp, Canis familiaris
ataagtcattacagtctccttgcca

SEQ ID NO: 17757 - DNA, 25 bp, Canis familiaris
ataactagtaccattgacttccaat

SEQ ID NO: 17758 - DNA, 25 bp, Canis familiaris
ataacattttttctatttccactgt

SEQ ID NO: 17759 - DNA, 25 bp, Canis familiaris
atacaagtttttttatcttctcaag

SEQ ID NO: 17760 - DNA, 25 bp, Canis familiaris
atcacatataattttttactcccca

SEQ ID NO: 17761 - DNA, 25 bp, Canis familiaris
ataatataagtcatgtcccttcgta

SEQ ID NO: 17762 - DNA, 25 bp, Canis familiaris
ataatgtgggatcttcctcatcctg

SEQ ID NO: 17763 - DNA, 25 bp, Canis familiaris
ataagatgtattgcttcccactgct

SEQ ID NO: 17764 - DNA, 25 bp, Canis familiaris
ataaagtgattcctagccaccagtg

SEQ ID NO: 17765 - DNA, 25 bp, Canis familiaris
ataaatgtgcatacttcaccccagc

SEQ ID NO: 17766 - DNA, 25 bp, Canis familiaris
ataactataagtacacccacacagt

SEQ ID NO: 17767 - DNA, 25 bp, Canis familiaris
ataaatctaggtaaccgatgcctta

SEQ ID NO: 17768 - DNA, 25 bp, Canis familiaris
atacaagccaggccaaagcgcacct

SEQ ID NO: 17769 - DNA, 25 bp, Canis familiaris
ataatgaccgtgcctcaacgacatc

SEQ ID NO: 17770 - DNA, 25 bp, Canis familiaris
ataatgtcgttgcacaccagttctc

SEQ ID NO: 17771 - DNA, 25 bp, Canis familiaris
atcgtacggaggacaccaactctga

SEQ ID NO: 17772 - DNA, 25 bp, Canis familiaris
atcaagatcggacaacccactgttt

SEQ ID NO: 17773 - DNA, 25 bp, Canis familiaris
atcacattgggagaaccgcctgggt

SEQ ID NO: 17774 - DNA, 25 bp, Canis familiaris
atcagttgtggatctgacctgccgc

SEQ ID NO: 17775 - DNA, 25 bp, Canis familiaris
atcaagtgggacttcaccagttcct

SEQ ID NO: 17776 - DNA, 25 bp, Canis familiaris
ataatgttggtttcccagctgcttt

SEQ ID NO: 17777 - DNA, 25 bp, Canis familiaris
ataataggtttcttgccggctgttt

SEQ ID NO: 17778 - DNA, 25 bp, Canis familiaris
ataattggtgaatggcttgagctta

SEQ ID NO: 17779 - DNA, 25 bp, Canis familiaris
ataattcctgtatcctgtggctatt

SEQ ID NO: 17780 - DNA, 25 bp, Canis familiaris
ataatctcctggatatttactactt

SEQ ID NO: 17781 - DNA, 25 bp, Canis familiaris
ataagccctcagatctgttaccaca

SEQ ID NO: 17782 - DNA, 25 bp, Canis familiaris
ataaccctcatgtatttatgcctaa

SEQ ID NO: 17783 - DNA, 25 bp, Canis familiaris
ataacccctgaactatgacctgagg

SEQ ID NO: 17784 - DNA, 25 bp, Canis familiaris
ataacctgaacagccaagccgagga

SEQ ID NO: 17785 - DNA, 25 bp, Canis familiaris
atacacacgaactcctagggcagct

SEQ ID NO: 17786 - DNA, 25 bp, Canis familiaris
atgaggtacaagttccatagggcac

SEQ ID NO: 17787 - DNA, 25 bp, Canis familiaris
atcaggtacaattccaagaggagac

SEQ ID NO: 17788 - DNA, 25 bp, Canis familiaris
ataatgtaaagaaatcgcaagaaca

SEQ ID NO: 17789 - DNA, 25 bp, Canis familiaris
ataaatacataaaatctctaaaaga

SEQ ID NO: 17790 - DNA, 25 bp, Canis familiaris
ataaatacatcattcatcctcccaa

SEQ ID NO: 17791 - DNA, 25 bp, Canis familiaris
ataaatacaaaaccgccacagaact

SEQ ID NO: 17792 - DNA, 25 bp, Canis familiaris
atgaaataaataccccccagaaatg

SEQ ID NO: 17793 - DNA, 25 bp, Canis familiaris
ataagttcattaccccttagcaaag

SEQ ID NO: 17794 - DNA, 25 bp, Canis familiaris
ataaaatcagtactcctctagccag

SEQ ID NO: 17795 - DNA, 25 bp, Canis familiaris
ataattgcacaaactccttagcgcc

SEQ ID NO: 17796 - DNA, 25 bp, Canis familiaris
ataacatgccaacccctgaatgatt

SEQ ID NO: 17797 - DNA, 25 bp, Canis familiaris
ataacagcagcaaacagagataatg

SEQ ID NO: 17798 - DNA, 25 bp, Canis familiaris
atcaacgatgcccatcaggtcactc

SEQ ID NO: 17799 - DNA, 25 bp, Canis familiaris
atcaccacatggcaagaccctagga

SEQ ID NO: 17800 - DNA, 25 bp, Canis familiaris
atcactccagtagagatcccatacc

SEQ ID NO: 17801 - DNA, 25 bp, Canis familiaris
atcaccctttgtgacttcatcgtgc

SEQ ID NO: 17802 - DNA, 25 bp, Canis familiaris
atcaccatctttggaacacgaagtg

SEQ ID NO: 17803 - DNA, 25 bp, Canis familiaris
atcaccattttgtaatgtccaatgc

SEQ ID NO: 17804 - DNA, 25 bp, Canis familiaris
ataacaattgtctagcatcctcaaa

SEQ ID NO: 17805 - DNA, 25 bp, Canis familiaris
ataacatatcttgagcattcttgac

SEQ ID NO: 17806 - DNA, 25 bp, Canis familiaris
acgattgtccttcatttgtacggaa

SEQ ID NO: 17807 - DNA, 25 bp, Canis familiaris
atctgaaattttgtttgtacgtgta

SEQ ID NO: 17808 - DNA, 25 bp, Canis familiaris
atctgaagttcttactggtctccgt

SEQ ID NO: 17809 - DNA, 25 bp, Canis familiaris
atcgaaaatcttgggcagcctgggt

SEQ ID NO: 17810 - DNA, 25 bp, Canis familiaris
atcagagaagacatccgcaagggag

SEQ ID NO: 17811 - DNA, 25 bp, Canis familiaris
atccaaacatcaacccgacgatagg

SEQ ID NO: 17812 - DNA, 25 bp, Canis familiaris
atcctcaacctttcggatccaaggt

SEQ ID NO: 17813 - DNA, 25 bp, Canis familiaris
atcactaacgtttgggaccgactgt

SEQ ID NO: 17814 - DNA, 25 bp, Canis familiaris
atcagttcatttttcggaccagttg

SEQ ID NO: 17815 - DNA, 25 bp, Canis familiaris
ataaactttcttactgatgccagct

SEQ ID NO: 17816 - DNA, 25 bp, Canis familiaris
ataacacgtttaactgtcagatctc

SEQ ID NO: 17817 - DNA, 25 bp, Canis familiaris
ataatagctttgttccttcagtgcc

SEQ ID NO: 17818 - DNA, 25 bp, Canis familiaris
ataaagcctcttggatttcattgca

SEQ ID NO: 17819 - DNA, 25 bp, Canis familiaris
ataacctgtctttgtttttgatgtt

SEQ ID NO: 17820 - DNA, 25 bp, Canis familiaris
ataaccagtttcttttcatccagtc

SEQ ID NO: 17821 - DNA, 25 bp, Canis familiaris
ataaccgtgcttctttcatgtcagg

SEQ ID NO: 17822 - DNA, 25 bp, Canis familiaris
ataacgcgtgtctttttagagcaag

SEQ ID NO: 17823 - DNA, 25 bp, Canis familiaris
ataacaggatgaagtttctcaaaca

SEQ ID NO: 17824 - DNA, 25 bp, Canis familiaris
atcatgaagcctaagtttaagaact

SEQ ID NO: 17825 - DNA, 25 bp, Canis familiaris
atcaaacctgaactattactcattg

SEQ ID NO: 17826 - DNA, 25 bp, Canis familiaris
atcaaatacaatgcatttcccactg

SEQ ID NO: 17827 - DNA, 25 bp, Canis familiaris
ataaatacatctgtgggcctgctct

SEQ ID NO: 17828 - DNA, 25 bp, Canis familiaris
ataactatagctttggtcccatctt

SEQ ID NO: 17829 - DNA, 25 bp, Canis familiaris
ataagcacatcacgtggttcgccac

SEQ ID NO: 17830 - DNA, 25 bp, Canis familiaris
ataacacccagggctcattccatca

SEQ ID NO: 17831 - DNA, 25 bp, Canis familiaris
ataaaccagtggacgcttctgctct

SEQ ID NO: 17832 - DNA, 25 bp, Canis familiaris
ataaggccaggtggcctgctccttt

SEQ ID NO: 17833 - DNA, 25 bp, Canis familiaris
ataacccgcagtgaatgtcgctgtt

SEQ ID NO: 17834 - DNA, 25 bp, Canis familiaris
ataaccccaatcaatgtttctggtc

SEQ ID NO: 17835 - DNA, 25 bp, Canis familiaris
ataatgactccaacgtgatttcccc

SEQ ID NO: 17836 - DNA, 25 bp, Canis familiaris
ataatatcgacacagtgctttccgt

SEQ ID NO: 17837 - DNA, 25 bp, Canis familiaris
ataactctcactcagctgtagtcac

SEQ ID NO: 17838 - DNA, 25 bp, Canis familiaris
ataacattcacttactgctgaccgg

SEQ ID NO: 17839 - DNA, 25 bp, Canis familiaris
ataacatgaacttacttgactagta

SEQ ID NO: 17840 - DNA, 25 bp, Canis familiaris
ataacagaactctcttgctgatagt

SEQ ID NO: 17841 - DNA, 25 bp, Canis familiaris
ataacagtgacctttctgcgtgacc

SEQ ID NO: 17842 - DNA, 25 bp, Canis familiaris
ataacagatgttcttcacgtgtcat

SEQ ID NO: 17843 - DNA, 25 bp, Canis familiaris
ataagtttcatgattccgattcctg

SEQ ID NO: 17844 - DNA, 25 bp, Canis familiaris
ataagtattagttcgggcagccctg

SEQ ID NO: 17845 - DNA, 25 bp, Canis familiaris
ataattttattatggacctcctgag

SEQ ID NO: 17846 - DNA, 25 bp, Canis familiaris
ataattttatagtgatgcagcgatc

SEQ ID NO: 17847 - DNA, 25 bp, Canis familiaris
ataacctttatgcagaagcagagaa

SEQ ID NO: 17848 - DNA, 25 bp, Canis familiaris
ataaccttcaggccacaaataaaag

SEQ ID NO: 17849 - DNA, 25 bp, Canis familiaris
ataaccttaggaccaattgcaaata

SEQ ID NO: 17850 - DNA, 25 bp, Canis familiaris
ataactcaatagccctacttacatt

SEQ ID NO: 17851 - DNA, 25 bp, Canis familiaris
ataactcgatatccctacttacatt

SEQ ID NO: 17852 - DNA, 25 bp, Canis familiaris
atcaccataacaacctacattccat

SEQ ID NO: 17853 - DNA, 25 bp, Canis familiaris
atcaccacagacatactaaccagca

SEQ ID NO: 17854 - DNA, 25 bp, Canis familiaris
atcagccaccatcctattgcaaagg

SEQ ID NO: 17855 - DNA, 25 bp, Canis familiaris
atcacagatccattcatgcttgcag

SEQ ID NO: 17856 - DNA, 25 bp, Canis familiaris
atcaatgcatgggctgctgcttctc

SEQ ID NO: 17857 - DNA, 25 bp, Canis familiaris
ataatgcagacaccctattgctacc

SEQ ID NO: 17858 - DNA, 25 bp, Canis familiaris
atcaatagccagttctcattcttgc

SEQ ID NO: 17859 - DNA, 25 bp, Canis familiaris
ataaaggcacaggctactcatgatg

SEQ ID NO: 17860 - DNA, 25 bp, Canis familiaris
ataaaacaactgaatcctgaggaat

SEQ ID NO: 17861 - DNA, 25 bp, Canis familiaris
ataaaaaattcttctcagacatgaa

SEQ ID NO: 17862 - DNA, 25 bp, Canis familiaris
ataaccagagatcctgcttcgacag

SEQ ID NO: 17863 - DNA, 25 bp, Canis familiaris
atcaagcctaacgtggacgacagca

SEQ ID NO: 17864 - DNA, 25 bp, Canis familiaris
atcacaggtactgggagaagttaaa

SEQ ID NO: 17865 - DNA, 25 bp, Canis familiaris
ataagaatactggcctgaatgttat

SEQ ID NO: 17866 - DNA, 25 bp, Canis familiaris
atcatcgaatacccctttgacttac

SEQ ID NO: 17867 - DNA, 25 bp, Canis familiaris
ataagctctacggcttttgtcctac

SEQ ID NO: 17868 - DNA, 25 bp, Canis familiaris
ataacttaagatattctcatcctgt

SEQ ID NO: 17869 - DNA, 25 bp, Canis familiaris
ataacttcactaaatctaatcttgt

SEQ ID NO: 17870 - DNA, 25 bp, Canis familiaris
ataatctctcctaattcctaattta

SEQ ID NO: 17871 - DNA, 25 bp, Canis familiaris
ataatgtccagcatttcctcacttt

SEQ ID NO: 17872 - DNA, 25 bp, Canis familiaris
ataatggcaagcatctacaccctga

SEQ ID NO: 17873 - DNA, 25 bp, Canis familiaris
ataatggcagcatctacaaccctga

SEQ ID NO: 17874 - DNA, 25 bp, Canis familiaris
ataatagccatttaaatccactgaa

SEQ ID NO: 17875 - DNA, 25 bp, Canis familiaris
ataatagtccttaacacatcctgta

SEQ ID NO: 17876 - DNA, 25 bp, Canis familiaris
ataaactttttctacatttgtatgc

SEQ ID NO: 17877 - DNA, 25 bp, Canis familiaris
ataaacatttgttcagcctgtatta

SEQ ID NO: 17878 - DNA, 25 bp, Canis familiaris
atcaacatcacaattgggcggatta

SEQ ID NO: 17879 - DNA, 25 bp, Canis familiaris
ataaccccgtgggcttcatgtaatc

SEQ ID NO: 17880 - DNA, 25 bp, Canis familiaris
ataagctccaggatgccttttcctc

SEQ ID NO: 17881 - DNA, 25 bp, Canis familiaris
ataagttagcgcaggcttctatgtt

SEQ ID NO: 17882 - DNA, 25 bp, Canis familiaris
ataagctgtacaatcgtttcatcat

SEQ ID NO: 17883 - DNA, 25 bp, Canis familiaris
ataactttattgcctgaacatgcaa

SEQ ID NO: 17884 - DNA, 25 bp, Canis familiaris
ataacttcgttactgagtgctcaca

SEQ ID NO: 17885 - DNA, 25 bp, Canis familiaris
ataactcatcagcaataagctctgc

SEQ ID NO: 17886 - DNA, 25 bp, Canis familiaris
ataatccatcagcacagagcggcca

SEQ ID NO: 17887 - DNA, 25 bp, Canis familiaris
ataatggagatgcagcagcctcgct

SEQ ID NO: 17888 - DNA, 25 bp, Canis familiaris
atcagtgctggatatgcacctgtgc

SEQ ID NO: 17889 - DNA, 25 bp, Canis familiaris
atcagggtcaagacaaatctgccta

SEQ ID NO: 17890 - DNA, 25 bp, Canis familiaris
atcaccatgtgctagaaactcccaa

SEQ ID NO: 17891 - DNA, 25 bp, Canis familiaris
atcagagagtgatagaacttgtaca

SEQ ID NO: 17892 - DNA, 25 bp, Canis familiaris
ataagcctgatataacttctcatta

SEQ ID NO: 17893 - DNA, 25 bp, Canis familiaris
ataacccacatctatacgtgctaat

SEQ ID NO: 17894 - DNA, 25 bp, Canis familiaris
ataaacccattattcgtcttacatt

SEQ ID NO: 17895 - DNA, 25 bp, Canis familiaris
ataaaactttattctgtcccatcaa

SEQ ID NO: 17896 - DNA, 25 bp, Canis familiaris
ataatctagcttttgacttctccac

SEQ ID NO: 17897 - DNA, 25 bp, Canis familiaris
ataatctcgattgtgccactgctct

SEQ ID NO: 17898 - DNA, 25 bp, Canis familiaris
ataactgctgcgttatgtcctgtct

SEQ ID NO: 17899 - DNA, 25 bp, Canis familiaris
atcaagttgtggaatcatctggtct

SEQ ID NO: 17900 - DNA, 25 bp, Canis familiaris
ataatgttgtagcctcattttcacc

SEQ ID NO: 17901 - DNA, 25 bp, Canis familiaris
atcactttgattccttactgtaccc

SEQ ID NO: 17902 - DNA, 25 bp, Canis familiaris
atcgacctgtgtgtaaatgtaccac

SEQ ID NO: 17903 - DNA, 25 bp, Canis familiaris
atcaacctttgaatgaagattgtcc

SEQ ID NO: 17904 - DNA, 25 bp, Canis familiaris
ataaccatccaaacgcagttgttcg

SEQ ID NO: 17905 - DNA, 25 bp, Canis familiaris
ataacagtccaaacgccattgcttc

SEQ ID NO: 17906 - DNA, 25 bp, Canis familiaris
ataatcagttgccacttgtcggttc

SEQ ID NO: 17907 - DNA, 25 bp, Canis familiaris
ataattggctcgactggccggtagc

SEQ ID NO: 17908 - DNA, 25 bp, Canis familiaris
ataatgattcctcaggccatcgtca

SEQ ID NO: 17909 - DNA, 25 bp, Canis familiaris
ataagtgacctctagcctatcagct

SEQ ID NO: 17910 - DNA, 25 bp, Canis familiaris
ataaggatgctctgagtcttcggta

SEQ ID NO: 17911 - DNA, 25 bp, Canis familiaris
atcagcactgttttggtcttgggga

SEQ ID NO: 17912 - DNA, 25 bp, Canis familiaris
atcaactgtctttcaagtattggga

SEQ ID NO: 17913 - DNA, 25 bp, Canis familiaris
atcaagcaccttgccagatacgtcc

SEQ ID NO: 17914 - DNA, 25 bp, Canis familiaris
ataagcacgtcgactttcctgtgcc

SEQ ID NO: 17915 - DNA, 25 bp, Canis familiaris
ataagcacagattcacttcttcttc

SEQ ID NO: 17916 - DNA, 25 bp, Canis familiaris
ataaccattatgtctttctcaatca

SEQ ID NO: 17917 - DNA, 25 bp, Canis familiaris
ataacgtctgcatcttctaaatcat

SEQ ID NO: 17918 - DNA, 25 bp, Canis familiaris
ataatgctgacgttcttgcttttgg

SEQ ID NO: 17919 - DNA, 25 bp, Canis familiaris
ataatgctcggaatttttttcaacg

SEQ ID NO: 17920 - DNA, 25 bp, Canis familiaris
ataacccttatgtctttttccatca

SEQ ID NO: 17921 - DNA, 25 bp, Canis familiaris
ataacacattcttgtcttttctctt

SEQ ID NO: 17922 - DNA, 25 bp, Canis familiaris
ataagccagcttatgcttcttctta

SEQ ID NO: 17923 - DNA, 25 bp, Canis familiaris
atcaatatctgaatgggttctttta

SEQ ID NO: 17924 - DNA, 25 bp, Canis familiaris
atcagctgacatcgatgccagttca

SEQ ID NO: 17925 - DNA, 25 bp, Canis familiaris
atcagcgacaagatgcacttctccc

SEQ ID NO: 17926 - DNA, 25 bp, Canis familiaris
atcaatggcaaactatttcttccaa

SEQ ID NO: 17927 - DNA, 25 bp, Canis familiaris
atcactgggatgtcttgctcatttc

SEQ ID NO: 17928 - DNA, 25 bp, Canis familiaris
atcactggggttcttttgaagtctt

SEQ ID NO: 17929 - DNA, 25 bp, Canis familiaris
atcaccggtggtaccttgagaaatt

SEQ ID NO: 17930 - DNA, 25 bp, Canis familiaris
atccgaggctgatccctcgtcaaat

SEQ ID NO: 17931 - DNA, 25 bp, Canis familiaris
atcactatattgtacccctggaatt

SEQ ID NO: 17932 - DNA, 25 bp, Canis familiaris
atcaacaagttcacgccttattgtc

SEQ ID NO: 17933 - DNA, 25 bp, Canis familiaris
ataaaagatccagcactttttccat

SEQ ID NO: 17934 - DNA, 25 bp, Canis familiaris
ataaaagccaccgtcatacttcacc

SEQ ID NO: 17935 - DNA, 25 bp, Canis familiaris
atcgaaacgaaccataacctgccac

SEQ ID NO: 17936 - DNA, 25 bp, Canis familiaris
atcaggaacgcctcgatacgctgga

SEQ ID NO: 17937 - DNA, 25 bp, Canis familiaris
atcggataccaatcctgccaaaaat

SEQ ID NO: 17938 - DNA, 25 bp, Canis familiaris
atcgttaccaagtcctggaggccaa

SEQ ID NO: 17939 - DNA, 25 bp, Canis familiaris
atctgtgaaccactgggggggctac

SEQ ID NO: 17940 - DNA, 25 bp, Canis familiaris
atcaccatcaccttggggggggtgc

SEQ ID NO: 17941 - DNA, 25 bp, Canis familiaris
atccgtacgtgtggggtgggttgcg

SEQ ID NO: 17942 - DNA, 25 bp, Canis familiaris
atcacggagtggagggggggctgga

SEQ ID NO: 17943 - DNA, 25 bp, Canis familiaris
atcataagagggggcttggggggag

SEQ ID NO: 17944 - DNA, 25 bp, Canis familiaris
atctaagggggcttggctggggtag

SEQ ID NO: 17945 - DNA, 25 bp, Canis familiaris
atcttccaggggaaggctggggcgg

SEQ ID NO: 17946 - DNA, 25 bp, Canis familiaris
atcactgccacccagaagactgtgg

SEQ ID NO: 17947 - DNA, 25 bp, Canis familiaris
atcactgccacccagaagactgtgg

SEQ ID NO: 17948 - DNA, 25 bp, Canis familiaris
atcactgccgctttgggctattgta

SEQ ID NO: 17949 - DNA, 25 bp, Canis familiaris
atcactcccatgatgggtgtcctag

SEQ ID NO: 17950 - DNA, 25 bp, Canis familiaris
atcacgcagactaaggccttgccat

SEQ ID NO: 17951 - DNA, 25 bp, Canis familiaris
atcaccaaggtgtctgtctgtgtca

SEQ ID NO: 17952 - DNA, 25 bp, Canis familiaris
atcacctgaggtcaggagttcaaga

SEQ ID NO: 17953 - DNA, 25 bp, Canis familiaris
atcacgctggagcccatggaaatcc

SEQ ID NO: 17954 - DNA, 25 bp, Canis familiaris
atcagcgactgtgggcatgggaacc

SEQ ID NO: 17955 - DNA, 25 bp, Canis familiaris
atcacttcctgggcagcccagacta

SEQ ID NO: 17956 - DNA, 25 bp, Canis familiaris
atcaatccctgaggaggccaggcaa

SEQ ID NO: 17957 - DNA, 25 bp, Canis familiaris
atcaacattctggcgagttcgacag

SEQ ID NO: 17958 - DNA, 25 bp, Canis familiaris
atcaacttgaggaacgtgtagcagc

SEQ ID NO: 17959 - DNA, 25 bp, Canis familiaris
atcaagggcatcgtgaagggacatc

SEQ ID NO: 17960 - DNA, 25 bp, Canis familiaris
atcacagtgatgcaggagagggagt

SEQ ID NO: 17961 - DNA, 25 bp, Canis familiaris
atcacaggcaaggaagatgctgcca

SEQ ID NO: 17962 - DNA, 25 bp, Canis familiaris
atcaaagacagcgcagagatgaact

SEQ ID NO: 17963 - DNA, 25 bp, Canis familiaris
ataatagcccgtgcttgacacattg

SEQ ID NO: 17964 - DNA, 25 bp, Canis familiaris
ataatcggttgggcatctgactctt

SEQ ID NO: 17965 - DNA, 25 bp, Canis familiaris
ataatccaggtggccgtgactcttt

SEQ ID NO: 17966 - DNA, 25 bp, Canis familiaris
ataatcctggtagccagtctcctca

SEQ ID NO: 17967 - DNA, 25 bp, Canis familiaris
ataatctgtgagtgaaagttgccat

SEQ ID NO: 17968 - DNA, 25 bp, Canis familiaris
atcactctggattcgctgaagttta

SEQ ID NO: 17969 - DNA, 25 bp, Canis familiaris
atcaccagaagacctcaagagcgtt

SEQ ID NO: 17970 - DNA, 25 bp, Canis familiaris
atcacgtaaaacaacagaggattat

SEQ ID NO: 17971 - DNA, 25 bp, Canis familiaris
atcacgaaaaagcaccaggaaagag

SEQ ID NO: 17972 - DNA, 25 bp, Canis familiaris
ataagattaaacccatatcgaatta

SEQ ID NO: 17973 - DNA, 25 bp, Canis familiaris
ataatgaataaactcctctagattt

SEQ ID NO: 17974 - DNA, 25 bp, Canis familiaris
aggtcaaaacctgctccgaggtgga

SEQ ID NO: 17975 - DNA, 25 bp, Canis familiaris
aggctgggaaacggccgagggtgct

SEQ ID NO: 17976 - DNA, 25 bp, Canis familiaris
gacttgggtaacatctcgttcgtcc

SEQ ID NO: 17977 - DNA, 25 bp, Canis familiaris
acttggggatccacccagagttcgc

SEQ ID NO: 17978 - DNA, 25 bp, Canis familiaris
atcaatggtgtgagccccaaggttc

SEQ ID NO: 17979 - DNA, 25 bp, Canis familiaris
atctttgttgaccccctagaggtat

SEQ ID NO: 17980 - DNA, 25 bp, Canis familiaris
atcacaggtgatcataccctatcgg

SEQ ID NO: 17981 - DNA, 25 bp, Canis familiaris
ataagagcctgcaataacctatagc

SEQ ID NO: 17982 - DNA, 25 bp, Canis familiaris
ataagcctcaagaaaccatcaatcc

SEQ ID NO: 17983 - DNA, 25 bp, Canis familiaris
ataagcctgcaaagcaatcctgtta

SEQ ID NO: 17984 - DNA, 25 bp, Canis familiaris
ataatcttaagtcatcctgtctagt

SEQ ID NO: 17985 - DNA, 25 bp, Canis familiaris
atcacacctaatatcatcgctacta

SEQ ID NO: 17986 - DNA, 25 bp, Canis familiaris
atcagcccaaatatcacagttcatc

SEQ ID NO: 17987 - DNA, 25 bp, Canis familiaris
atcttcgacaacaccttttccaggt

SEQ ID NO: 17988 - DNA, 25 bp, Canis familiaris
ataacgacacgtgctttactcaagg

SEQ ID NO: 17989 - DNA, 25 bp, Canis familiaris
ataacgtactgagatttgcactaaa

SEQ ID NO: 17990 - DNA, 25 bp, Canis familiaris
ataattttctgataagtcctactat

SEQ ID NO: 17991 - DNA, 25 bp, Canis familiaris
ataactgttttttaagcactcactt

SEQ ID NO: 17992 - DNA, 25 bp, Canis familiaris
ataactgttttcattggcattcata

SEQ ID NO: 17993 - DNA, 25 bp, Canis familiaris
ataactgtgtcaaaatgtgtattca

SEQ ID NO: 17994 - DNA, 25 bp, Canis familiaris
ataacttagcacacaatgatttcat

SEQ ID NO: 17995 - DNA, 25 bp, Canis familiaris
ataacttactcatcatatgctatat

SEQ ID NO: 17996 - DNA, 25 bp, Canis familiaris
ataagttgattctctggcatctatt

SEQ ID NO: 17997 - DNA, 25 bp, Canis familiaris
ataagtcgcagatctcggcatgtca

SEQ ID NO: 17998 - DNA, 25 bp, Canis familiaris
ataactgcatgctacctgaggatgt

SEQ ID NO: 17999 - DNA, 25 bp, Canis familiaris
atcacacgcgtgtacggtggttcct

SEQ ID NO: 18000 - DNA, 25 bp, Canis familiaris
atcacagggtcttcggtgttcctgg

SEQ ID NO: 18001 - DNA, 25 bp, Canis familiaris
atcaaggtgtccggaggctatgctg

SEQ ID NO: 18002 - DNA, 25 bp, Canis familiaris
ataagtctgtcctggcgtcacttat

SEQ ID NO: 18003 - DNA, 25 bp, Canis familiaris
ataactgtgtacttctggtgactgt

SEQ ID NO: 18004 - DNA, 25 bp, Canis familiaris
ataatctgttactattgacaggtgt

SEQ ID NO: 18005 - DNA, 25 bp, Canis familiaris
ataattgcctaccattaacaaatat

SEQ ID NO: 18006 - DNA, 25 bp, Canis familiaris
ataattcactgatctatcaacagta

SEQ ID NO: 18007 - DNA, 25 bp, Canis familiaris
ataagaccatgatttgtaaagtgca

SEQ ID NO: 18008 - DNA, 25 bp, Canis familiaris
ataagcacgtgatctaaacagagca

SEQ ID NO: 18009 - DNA, 25 bp, Canis familiaris
ataagacagtgtatcaatcctatga

SEQ ID NO: 18010 - DNA, 25 bp, Canis familiaris
ataactagtatttcatatgccctat

SEQ ID NO: 18011 - DNA, 25 bp, Canis familiaris
atcaagatgactattctaggcctat

SEQ ID NO: 18012 - DNA, 25 bp, Canis familiaris
atcaagcacactcttaagtagctca

SEQ ID NO: 18013 - DNA, 25 bp, Canis familiaris
ataagcccatcaagaaagtcatggt

SEQ ID NO: 18014 - DNA, 25 bp, Canis familiaris
ataagccctttgtatagtcattttc

SEQ ID NO: 18015 - DNA, 25 bp, Canis familiaris
ataaccctttatattctctgaacgt

SEQ ID NO: 18016 - DNA, 25 bp, Canis familiaris
ataactacttttacattctttaatg

SEQ ID NO: 18017 - DNA, 25 bp, Canis familiaris
ataactacttctaatctaatcacta

SEQ ID NO: 18018 - DNA, 25 bp, Canis familiaris
ataagtacattcccctcaagacgaa

SEQ ID NO: 18019 - DNA, 25 bp, Canis familiaris
ataactcagtttccacaaagaccaa

SEQ ID NO: 18020 - DNA, 25 bp, Canis familiaris
ataactaattgtgccctagactgaa

SEQ ID NO: 18021 - DNA, 25 bp, Canis familiaris
ataaccactgtcactgttagcctga

SEQ ID NO: 18022 - DNA, 25 bp, Canis familiaris
ataaccaggccatcatgttcagaaa

SEQ ID NO: 18023 - DNA, 25 bp, Canis familiaris
atgtgaccgacctcaatttgtactt

SEQ ID NO: 18024 - DNA, 25 bp, Canis familiaris
atcggcggacgcctaattggttctc

SEQ ID NO: 18025 - DNA, 25 bp, Canis familiaris
atcttgccgaaggcctttgcgtttc

SEQ ID NO: 18026 - DNA, 25 bp, Canis familiaris
atcttgccccagaccggcagcctgg

SEQ ID NO: 18027 - DNA, 25 bp, Canis familiaris
atcggctcgcaaatctttgatacgg

SEQ ID NO: 18028 - DNA, 25 bp, Canis familiaris
atcagttgagacgtttctgcaagcg

SEQ ID NO: 18029 - DNA, 25 bp, Canis familiaris
atcgttaatcggagtcaagtctaga

SEQ ID NO: 18030 - DNA, 25 bp, Canis familiaris
atcagtccaacggtcccaaataact

SEQ ID NO: 18031 - DNA, 25 bp, Canis familiaris
atcactactattatccacataaacc

SEQ ID NO: 18032 - DNA, 25 bp, Canis familiaris
atcacaagtcctaaacacagaccac

SEQ ID NO: 18033 - DNA, 25 bp, Canis familiaris
atcacacagcagagaaacaccccac

SEQ ID NO: 18034 - DNA, 25 bp, Canis familiaris
atcaaacagcaagccatcacctaca

SEQ ID NO: 18035 - DNA, 25 bp, Canis familiaris
atcagagcaccatgtgcccagacta

SEQ ID NO: 18036 - DNA, 25 bp, Canis familiaris
atcaaacgctggtcccaggtttaat

SEQ ID NO: 18037 - DNA, 25 bp, Canis familiaris
atcaacatcctgcaccagagcagta

SEQ ID NO: 18038 - DNA, 25 bp, Canis familiaris
atcacctcacattagccagcatgat

SEQ ID NO: 18039 - DNA, 25 bp, Canis familiaris
atcaccaccatgttcgaggagaccc

SEQ ID NO: 18040 - DNA, 25 bp, Canis familiaris
atcaggctccccacaggaagcctgc

SEQ ID NO: 18041 - DNA, 25 bp, Canis familiaris
atcaggctccccacaggaagcctgc

SEQ ID NO: 18042 - DNA, 25 bp, Canis familiaris
atcatcgttccccacaggaagggac

SEQ ID NO: 18043 - DNA, 25 bp, Canis familiaris
atcataaatcggtcacgtgaagggt

SEQ ID NO: 18044 - DNA, 25 bp, Canis familiaris
ataagactacggagtgtgtgtgtgt

SEQ ID NO: 18045 - DNA, 25 bp, Canis familiaris
ataagtaggtggaggtgatgatggt

SEQ ID NO: 18046 - DNA, 25 bp, Canis familiaris
ataagaacggcacccctgtgatgta

SEQ ID NO: 18047 - DNA, 25 bp, Canis familiaris
atcaaggacgaggaccagctggagg

SEQ ID NO: 18048 - DNA, 25 bp, Canis familiaris
ataataaagagagcagactggggat

SEQ ID NO: 18049 - DNA, 25 bp, Canis familiaris
ataatgagactatcacttcgggtga

SEQ ID NO: 18050 - DNA, 25 bp, Canis familiaris
ataatgagagctaaccttagctgct

SEQ ID NO: 18051 - DNA, 25 bp, Canis familiaris
ataatggcttttgttctgctgctct

SEQ ID NO: 18052 - DNA, 25 bp, Canis familiaris
atggagtttactgtttatgcctgac

SEQ ID NO: 18053 - DNA, 25 bp, Canis familiaris
aaggtttcctccataatgaagtcca

SEQ ID NO: 18054 - DNA, 25 bp, Canis familiaris
acggtatacccgagatacacgtcca

SEQ ID NO: 18055 - DNA, 25 bp, Canis familiaris
atcgtggtccccttggaccaatgga

SEQ ID NO: 18056 - DNA, 25 bp, Canis familiaris
atcggcttccggggagatccgtaga

SEQ ID NO: 18057 - DNA, 25 bp, Canis familiaris
atcagccgtaccgggcgatgcttgt

SEQ ID NO: 18058 - DNA, 25 bp, Canis familiaris
atctgggaatcccaggtgactcctg

SEQ ID NO: 18059 - DNA, 25 bp, Canis familiaris
atcatatggatacccactggactcc

SEQ ID NO: 18060 - DNA, 25 bp, Canis familiaris
atcacacaaatcgacactgttcccc

SEQ ID NO: 18061 - DNA, 25 bp, Canis familiaris
atcaacaattctggcaatttcttac

SEQ ID NO: 18062 - DNA, 25 bp, Canis familiaris
atcaaataactttacttgcctaaca

SEQ ID NO: 18063 - DNA, 25 bp, Canis familiaris
atcacaaacacttctaattacaaca

SEQ ID NO: 18064 - DNA, 25 bp, Canis familiaris
atcacagtacaagcatccattcaaa

SEQ ID NO: 18065 - DNA, 25 bp, Canis familiaris
atcactgaccaagtcatcctggatt

SEQ ID NO: 18066 - DNA, 25 bp, Canis familiaris
atcactttaatcgtctcatgagcat

SEQ ID NO: 18067 - DNA, 25 bp, Canis familiaris
atcactttacacttatataccctgt

SEQ ID NO: 18068 - DNA, 25 bp, Canis familiaris
atcaccttggactttgcatacttct

SEQ ID NO: 18069 - DNA, 25 bp, Canis familiaris
atcacctccagtttattgggtttgt

SEQ ID NO: 18070 - DNA, 25 bp, Canis familiaris
atcacttcctttttggtggacttct

SEQ ID NO: 18071 - DNA, 25 bp, Canis familiaris
atcaattcttattttcgttgtcttt

SEQ ID NO: 18072 - DNA, 25 bp, Canis familiaris
atcaagctctgcatacttcttcatg

SEQ ID NO: 18073 - DNA, 25 bp, Canis familiaris
atcacagatcatactcagtgtcttg

SEQ ID NO: 18074 - DNA, 25 bp, Canis familiaris
atcaagatgtcccaggtcctgggaa

SEQ ID NO: 18075 - DNA, 25 bp, Canis familiaris
atcaaagtcccacccaagactgtga

SEQ ID NO: 18076 - DNA, 25 bp, Canis familiaris
atcaagtgcccctactatgagatta

SEQ ID NO: 18077 - DNA, 25 bp, Canis familiaris
atcaagctcccagatcagtgggtat

SEQ ID NO: 18078 - DNA, 25 bp, Canis familiaris
atcacagccccacacagaaaatata

SEQ ID NO: 18079 - DNA, 25 bp, Canis familiaris
accaggcaccccagaactattaaat

SEQ ID NO: 18080 - DNA, 25 bp, Canis familiaris
atcttggacccctgagagggaaaat

SEQ ID NO: 18081 - DNA, 25 bp, Canis familiaris
atctgttggcccctagggctggaag

SEQ ID NO: 18082 - DNA, 25 bp, Canis familiaris
atcgaagagtctccgaggtccgaca

SEQ ID NO: 18083 - DNA, 25 bp, Canis familiaris
atcttggagtctgaggttccgacag

SEQ ID NO: 18084 - DNA, 25 bp, Canis familiaris
atcttggagtcctgggatcgagttc

SEQ ID NO: 18085 - DNA, 25 bp, Canis familiaris
atctccaggtcacgacggtgggttc

SEQ ID NO: 18086 - DNA, 25 bp, Canis familiaris
atcaccggatgtcgacggacgggct

SEQ ID NO: 18087 - DNA, 25 bp, Canis familiaris
atcaccggtgatggaccaatctgcg

SEQ ID NO: 18088 - DNA, 25 bp, Canis familiaris
atcactccagtgggacatcgtcggt

SEQ ID NO: 18089 - DNA, 25 bp, Canis familiaris
atcaccagagtgtgagtctccgagt

SEQ ID NO: 18090 - DNA, 25 bp, Canis familiaris
atcaccagagtttgagtctcccgag

SEQ ID NO: 18091 - DNA, 25 bp, Canis familiaris
atcaccgggattggaccacggcagg

SEQ ID NO: 18092 - DNA, 25 bp, Canis familiaris
atcacaaaggcaacagaccacagga

SEQ ID NO: 18093 - DNA, 25 bp, Canis familiaris
atcaaacattgcataggcagccaag

SEQ ID NO: 18094 - DNA, 25 bp, Canis familiaris
atcaggagttgcatgtgccagccca

SEQ ID NO: 18095 - DNA, 25 bp, Canis familiaris
atctgtactacactgtaagccctgc

SEQ ID NO: 18096 - DNA, 25 bp, Canis familiaris
atcagtcactactggaactgcacaa

SEQ ID NO: 18097 - DNA, 25 bp, Canis familiaris
atcagccattggtaggcagccgctc

SEQ ID NO: 18098 - DNA, 25 bp, Canis familiaris
atcactcttgcttgaggtgcacctg

SEQ ID NO: 18099 - DNA, 25 bp, Canis familiaris
atcacatcttggtacaggaccaaac

SEQ ID NO: 18100 - DNA, 25 bp, Canis familiaris
atcaatctaaggtcgagcctcatta

SEQ ID NO: 18101 - DNA, 25 bp, Canis familiaris
atcaatctaagagtcgagcctccat

SEQ ID NO: 18102 - DNA, 25 bp, Canis familiaris
ataatgctgaaggggaccactcttt

SEQ ID NO: 18103 - DNA, 25 bp, Canis familiaris
ataatcctctggtagaccactctct

SEQ ID NO: 18104 - DNA, 25 bp, Canis familiaris
ataatcctctcctaattaactctat

SEQ ID NO: 18105 - DNA, 25 bp, Canis familiaris
ataattccaccgatctagaccttaa

SEQ ID NO: 18106 - DNA, 25 bp, Canis familiaris
ataatcctcagtctactaatcctta

SEQ ID NO: 18107 - DNA, 25 bp, Canis familiaris
atcattcccaatccttaaatccttt

SEQ ID NO: 18108 - DNA, 25 bp, Canis familiaris
atcaacaacaatggtctacgacgct

SEQ ID NO: 18109 - DNA, 25 bp, Canis familiaris
atcacataacgtgatcctgggcctt

SEQ ID NO: 18110 - DNA, 25 bp, Canis familiaris
atcacataacttgatcctggccttt

SEQ ID NO: 18111 - DNA, 25 bp, Canis familiaris
atcaattactcgtgtctgagcctcc

SEQ ID NO: 18112 - DNA, 25 bp, Canis familiaris
atcaattactagcatgtcatactga

SEQ ID NO: 18113 - DNA, 25 bp, Canis familiaris
atcagtgagatctggcttagcctgt

SEQ ID NO: 18114 - DNA, 25 bp, Canis familiaris
atcagtcaactcctgctctatgagt

SEQ ID NO: 18115 - DNA, 25 bp, Canis familiaris
atcacaataccgtctgctatggata

SEQ ID NO: 18116 - DNA, 25 bp, Canis familiaris
atcagaacccaattcttggcattct

SEQ ID NO: 18117 - DNA, 25 bp, Canis familiaris
atcaatgaccccttcattgacctca

SEQ ID NO: 18118 - DNA, 25 bp, Canis familiaris
ataagaccaccaagattatctgcat

SEQ ID NO: 18119 - DNA, 25 bp, Canis familiaris
ataagacacctaagaacccatactg

SEQ ID NO: 18120 - DNA, 25 bp, Canis familiaris
ataagatcacttttttcccatttgt

SEQ ID NO: 18121 - DNA, 25 bp, Canis familiaris
ataagacaatagtatttctcctttg

SEQ ID NO: 18122 - DNA, 25 bp, Canis familiaris
ataagaatatattccatttccatat

SEQ ID NO: 18123 - DNA, 25 bp, Canis familiaris
ataatttctatgaaatcgtcgcttc

SEQ ID NO: 18124 - DNA, 25 bp, Canis familiaris
ataattagcctgaaatgcattctgt

SEQ ID NO: 18125 - DNA, 25 bp, Canis familiaris
ataagtagacaccaagcatccttgt

SEQ ID NO: 18126 - DNA, 25 bp, Canis familiaris
ataagctggcaaaaggctccttcaa

SEQ ID NO: 18127 - DNA, 25 bp, Canis familiaris
atcactgtaggaagggcccttgaag

SEQ ID NO: 18128 - DNA, 25 bp, Canis familiaris
atcactggtgagaagagggtcggac

SEQ ID NO: 18129 - DNA, 25 bp, Canis familiaris
atcaccggacaccgatggtccagat

SEQ ID NO: 18130 - DNA, 25 bp, Canis familiaris
atcagactggctacgttggtcaata

SEQ ID NO: 18131 - DNA, 25 bp, Canis familiaris
atcaggtggcactgtgctggtcacc

SEQ ID NO: 18132 - DNA, 25 bp, Canis familiaris
atcaggtgaacgtcttagtgtccgt

SEQ ID NO: 18133 - DNA, 25 bp, Canis familiaris
atcagggaacttctggagtcagcaa

SEQ ID NO: 18134 - DNA, 25 bp, Canis familiaris
ataataaccttgtttgagtcagcaa

SEQ ID NO: 18135 - DNA, 25 bp, Canis familiaris
ataatctacttttttcaagagcaat

SEQ ID NO: 18136 - DNA, 25 bp, Canis familiaris
ataatctaggatttgttatatgcaa

SEQ ID NO: 18137 - DNA, 25 bp, Canis familiaris
ataatcttggatgagcttggaaata

SEQ ID NO: 18138 - DNA, 25 bp, Canis familiaris
ataatattttggacatgccaataaa

SEQ ID NO: 18139 - DNA, 25 bp, Canis familiaris
ataataacttccaatcaaatcagat

SEQ ID NO: 18140 - DNA, 25 bp, Canis familiaris
atcgtaccctacaaaccatgagcta

SEQ ID NO: 18141 - DNA, 25 bp, Canis familiaris
atcagtacccaaggagaaagctctc

SEQ ID NO: 18142 - DNA, 25 bp, Canis familiaris
atcatcaacccagggagacagacct

SEQ ID NO: 18143 - DNA, 25 bp, Canis familiaris
atcacaagaccaggagccacagcta

SEQ ID NO: 18144 - DNA, 25 bp, Canis familiaris
atcagagaaaatgtggcacagcata

SEQ ID NO: 18145 - DNA, 25 bp, Canis familiaris
atcagaaagtgtttggcccctacta

SEQ ID NO: 18146 - DNA, 25 bp, Canis familiaris
atcagaactgagaactcccaccatt

SEQ ID NO: 18147 - DNA, 25 bp, Canis familiaris
atcagataagagcaccagccttgtt

SEQ ID NO: 18148 - DNA, 25 bp, Canis familiaris
atcaatagagacgatgtcacgtatt

SEQ ID NO: 18149 - DNA, 25 bp, Canis familiaris
atcaaagatatgccttcacctcagt

SEQ ID NO: 18150 - DNA, 25 bp, Canis familiaris
atcataatgtcatcttaaacaggga

SEQ ID NO: 18151 - DNA, 25 bp, Canis familiaris
atcattatgtcattcgtccaacttg

SEQ ID NO: 18152 - DNA, 25 bp, Canis familiaris
atcaacatcatattcagcccatcac

SEQ ID NO: 18153 - DNA, 25 bp, Canis familiaris
atcaacatcatattcagcccatcac

SEQ ID NO: 18154 - DNA, 25 bp, Canis familiaris
atcaacatgctttctgtacatcctc

SEQ ID NO: 18155 - DNA, 25 bp, Canis familiaris
atcttcataattagtagctccccca

SEQ ID NO: 18156 - DNA, 25 bp, Canis familiaris
atcttcatgaagggcgcgacccgcg

SEQ ID NO: 18157 - DNA, 25 bp, Canis familiaris
atcttcatggccgtgcggaacacgt

SEQ ID NO: 18158 - DNA, 25 bp, Canis familiaris
ataatctagatctcggagccacagt

SEQ ID NO: 18159 - DNA, 25 bp, Canis familiaris
atcagattaatcactgtgtcgactt

SEQ ID NO: 18160 - DNA, 25 bp, Canis familiaris
atcacttcattcagtgtacacctta

SEQ ID NO: 18161 - DNA, 25 bp, Canis familiaris
ataattcatttctgtcaaactgtaa

SEQ ID NO: 18162 - DNA, 25 bp, Canis familiaris
ataatgtttatctgaaatatttaca

SEQ ID NO: 18163 - DNA, 25 bp, Canis familiaris
ataatgcttaaacaaacttccaggg

SEQ ID NO: 18164 - DNA, 25 bp, Canis familiaris
ataagttaaataatagactgtctcc

SEQ ID NO: 18165 - DNA, 25 bp, Canis familiaris
atcagccttaatgacaaactgtctc

SEQ ID NO: 18166 - DNA, 25 bp, Canis familiaris
atcatggaaaatgccaacgttctgg

SEQ ID NO: 18167 - DNA, 25 bp, Canis familiaris
atctggaaaagcccaagccatttag

SEQ ID NO: 18168 - DNA, 25 bp, Canis familiaris
atcttcatataagcccatcaactgt

SEQ ID NO: 18169 - DNA, 25 bp, Canis familiaris
atcaatcattcctccatctgtaggt

SEQ ID NO: 18170 - DNA, 25 bp, Canis familiaris
atcaatcatcagccattcctagaga

SEQ ID NO: 18171 - DNA, 25 bp, Canis familiaris
atcaactcacgcataaaatcaaggt

SEQ ID NO: 18172 - DNA, 25 bp, Canis familiaris
atcaactcacgcatataaatgcaag

SEQ ID NO: 18173 - DNA, 25 bp, Canis familiaris
atcacactaccacctaaatgactta

SEQ ID NO: 18174 - DNA, 25 bp, Canis familiaris
atcacgatactcttctagtaggctt

SEQ ID NO: 18175 - DNA, 25 bp, Canis familiaris
ataagtagctctctggtagccttgg

SEQ ID NO: 18176 - DNA, 25 bp, Canis familiaris
atcaagaagttccgagctggcctca

SEQ ID NO: 18177 - DNA, 25 bp, Canis familiaris
atcaaacacatatgaagttgcccaa

SEQ ID NO: 18178 - DNA, 25 bp, Canis familiaris
atcaaaccaaatcaatgtctccctt

SEQ ID NO: 18179 - DNA, 25 bp, Canis familiaris
atcacatcactatagctttgtctcc

SEQ ID NO: 18180 - DNA, 25 bp, Canis familiaris
atcatacattttctttgtcccttca

SEQ ID NO: 18181 - DNA, 25 bp, Canis familiaris
atcaacatttgtaattctctccaga

SEQ ID NO: 18182 - DNA, 25 bp, Canis familiaris
atcaactttataatacatgcaggga

SEQ ID NO: 18183 - DNA, 25 bp, Canis familiaris
atcaacagagtttttatcaggctaa

SEQ ID NO: 18184 - DNA, 25 bp, Canis familiaris
atcaactgggatactttaggctgaa

SEQ ID NO: 18185 - DNA, 25 bp, Canis familiaris
atcagaggttgatcttccggcaaca

SEQ ID NO: 18186 - DNA, 25 bp, Canis familiaris
ataatacatttgtcattactgaaaa

SEQ ID NO: 18187 - DNA, 25 bp, Canis familiaris
atcaaatcttttttactggagcaca

SEQ ID NO: 18188 - DNA, 25 bp, Canis familiaris
atcagaattcctgggggtgaagcca

SEQ ID NO: 18189 - DNA, 25 bp, Canis familiaris
atcagaattcctggtggggaagcca

SEQ ID NO: 18190 - DNA, 25 bp, Canis familiaris
ataatagtgctgtgtggtggaaaaa

SEQ ID NO: 18191 - DNA, 25 bp, Canis familiaris
ataatgaatctgtgtgtgtgcatat

SEQ ID NO: 18192 - DNA, 25 bp, Canis familiaris
ataatacacgtttgcatctgatgaa

SEQ ID NO: 18193 - DNA, 25 bp, Canis familiaris
ataatacatctcttaatcttctaat

SEQ ID NO: 18194 - DNA, 25 bp, Canis familiaris
ataatacaccttaatttctctcaat

SEQ ID NO: 18195 - DNA, 25 bp, Canis familiaris
ataatccccatggacttttctcact

SEQ ID NO: 18196 - DNA, 25 bp, Canis familiaris
ataatggccaatgagattttttctg

SEQ ID NO: 18197 - DNA, 25 bp, Canis familiaris
atcaattgccaagagttatctgttc

SEQ ID NO: 18198 - DNA, 25 bp, Canis familiaris
atcaacccacagtgtttcaggctca

SEQ ID NO: 18199 - DNA, 25 bp, Canis familiaris
atcaatcaccacttattcttaggca

SEQ ID NO: 18200 - DNA, 25 bp, Canis familiaris
atcataaccatcattgcctacagca

SEQ ID NO: 18201 - DNA, 25 bp, Canis familiaris
atcagaactctccttgtttccagag

SEQ ID NO: 18202 - DNA, 25 bp, Canis familiaris
atcaaacttctgtatttgtcctggg

SEQ ID NO: 18203 - DNA, 25 bp, Canis familiaris
atcagaacttgctcacctgacttgc

SEQ ID NO: 18204 - DNA, 25 bp, Canis familiaris
atcacaagctccttgaatctacttg

SEQ ID NO: 18205 - DNA, 25 bp, Canis familiaris
atcaatttcatcttcatagccttct

SEQ ID NO: 18206 - DNA, 25 bp, Canis familiaris
ataattaatttttgtcatcctgtca

SEQ ID NO: 18207 - DNA, 25 bp, Canis familiaris
ataatatactttaatggtggtgata

SEQ ID NO: 18208 - DNA, 25 bp, Canis familiaris
atgagatgcattgttacaggaagtc

SEQ ID NO: 18209 - DNA, 25 bp, Canis familiaris
atgaggatgcctctcgcatggaaga

SEQ ID NO: 18210 - DNA, 25 bp, Canis familiaris
ataaggcatcatcttgcatggagga

SEQ ID NO: 18211 - DNA, 25 bp, Canis familiaris
atcaaggctacaattgctggtggtg

SEQ ID NO: 18212 - DNA, 25 bp, Canis familiaris
atcactggctaagtccgtgccactg

SEQ ID NO: 18213 - DNA, 25 bp, Canis familiaris
atcaggcacatagtccctgctgaac

SEQ ID NO: 18214 - DNA, 25 bp, Canis familiaris
atcagcgcatctacttcgatctgga

SEQ ID NO: 18215 - DNA, 25 bp, Canis familiaris
atcacattcatgactgacaatcgga

SEQ ID NO: 18216 - DNA, 25 bp, Canis familiaris
atcacatctcacaagtaacggggct

SEQ ID NO: 18217 - DNA, 25 bp, Canis familiaris
atcagcagctactggtgcctgaggg

SEQ ID NO: 18218 - DNA, 25 bp, Canis familiaris
atcaggctgacgtgacgcgtgtggt

SEQ ID NO: 18219 - DNA, 25 bp, Canis familiaris
atcagatgttcggttctacgatggg

SEQ ID NO: 18220 - DNA, 25 bp, Canis familiaris
atcaggctttgagctctacctgggg

SEQ ID NO: 18221 - DNA, 25 bp, Canis familiaris
atcaggaagcgagatcccctaagct

SEQ ID NO: 18222 - DNA, 25 bp, Canis familiaris
atcacgaaggtgatggcgaccatcg

SEQ ID NO: 18223 - DNA, 25 bp, Canis familiaris
atcaccatgcagattatgcggatca

SEQ ID NO: 18224 - DNA, 25 bp, Canis familiaris
atcactatggagttcagtgtgacaa

SEQ ID NO: 18225 - DNA, 25 bp, Canis familiaris
atcactcggtgcatcaggtgcaatc

SEQ ID NO: 18226 - DNA, 25 bp, Canis familiaris
atcacggcctttggggcacacaaga

SEQ ID NO: 18227 - DNA, 25 bp, Canis familiaris
atcacaggtttacaacccggcactg

SEQ ID NO: 18228 - DNA, 25 bp, Canis familiaris
atcactggttaaaaactcacggact

SEQ ID NO: 18229 - DNA, 25 bp, Canis familiaris
atcactagtgtatgtatacccaaga

SEQ ID NO: 18230 - DNA, 25 bp, Canis familiaris
atcagccatagttatttatcccata

SEQ ID NO: 18231 - DNA, 25 bp, Canis familiaris
atcagctgatgactttattacccca

SEQ ID NO: 18232 - DNA, 25 bp, Canis familiaris
atcagcttgcagtttcatgtgacca

SEQ ID NO: 18233 - DNA, 25 bp, Canis familiaris
atcactggccacacaggagcgatgc

SEQ ID NO: 18234 - DNA, 25 bp, Canis familiaris
atcagatggcccagacaggcggcac

SEQ ID NO: 18235 - DNA, 25 bp, Canis familiaris
atcaaggagtaggagcagcccgcac

SEQ ID NO: 18236 - DNA, 25 bp, Canis familiaris
atcacctggtgagttgagcccacag

SEQ ID NO: 18237 - DNA, 25 bp, Canis familiaris
atcacgctgtggtttgatgatgcgc

SEQ ID NO: 18238 - DNA, 25 bp, Canis familiaris
atcaactgctgcaaggtgctatgag

SEQ ID NO: 18239 - DNA, 25 bp, Canis familiaris
atcaaagctgatgtgtgcttttgtc

SEQ ID NO: 18240 - DNA, 25 bp, Canis familiaris
atcaccaatcatgtgccatttgagt

SEQ ID NO: 18241 - DNA, 25 bp, Canis familiaris
atcaccccaggtggcatgattgatc

SEQ ID NO: 18242 - DNA, 25 bp, Canis familiaris
atcacccacgagagtgacgacgcgc

SEQ ID NO: 18243 - DNA, 25 bp, Canis familiaris
atcagtaccagagcgtgaggacagg

SEQ ID NO: 18244 - DNA, 25 bp, Canis familiaris
atcgtcaaagacggtggggggctcg

SEQ ID NO: 18245 - DNA, 25 bp, Canis familiaris
atctgtcaaagatgttcgtcgtggc

SEQ ID NO: 18246 - DNA, 25 bp, Canis familiaris
atgtacaaggggaccgtcgactgct

SEQ ID NO: 18247 - DNA, 25 bp, Canis familiaris
atgaacatagactcctcagtggcct

SEQ ID NO: 18248 - DNA, 25 bp, Canis familiaris
atcaaccagatctccataaatgtat

SEQ ID NO: 18249 - DNA, 25 bp, Canis familiaris
atcacaccctctccaaaaatttttg

SEQ ID NO: 18250 - DNA, 25 bp, Canis familiaris
atcattccttcaaataaagtaattt

SEQ ID NO: 18251 - DNA, 25 bp, Canis familiaris
atcttgtttcagtcctaagtatttg

SEQ ID NO: 18252 - DNA, 25 bp, Canis familiaris
atcttgccattccagactcaacatt

SEQ ID NO: 18253 - DNA, 25 bp, Canis familiaris
atcattctgaaccacaataaattta

SEQ ID NO: 18254 - DNA, 25 bp, Canis familiaris
atcaattacaccaaattatttgcca

SEQ ID NO: 18255 - DNA, 25 bp, Canis familiaris
ataattattcctacatatcattcta

SEQ ID NO: 18256 - DNA, 25 bp, Canis familiaris
ataattataaattcagtcaatctga

SEQ ID NO: 18257 - DNA, 25 bp, Canis familiaris
ataatttatttgtcatgatgctatg

SEQ ID NO: 18258 - DNA, 25 bp, Canis familiaris
ataatttctttgccaactgtaattt

SEQ ID NO: 18259 - DNA, 25 bp, Canis familiaris
atcacttgtccatgccaactgtatt

SEQ ID NO: 18260 - DNA, 25 bp, Canis familiaris
atcactctgttatccaactgcaacc

SEQ ID NO: 18261 - DNA, 25 bp, Canis familiaris
atcactttttgcccaatgtgaagca

SEQ ID NO: 18262 - DNA, 25 bp, Canis familiaris
atcactcattgcacccaaagttgga

SEQ ID NO: 18263 - DNA, 25 bp, Canis familiaris
atcagaatctgtcggccaaaagcgg

SEQ ID NO: 18264 - DNA, 25 bp, Canis familiaris
atcgaatcgcttgggcatcaatggc

SEQ ID NO: 18265 - DNA, 25 bp, Canis familiaris
atcggttggtgccactgaatggcta

SEQ ID NO: 18266 - DNA, 25 bp, Canis familiaris
atcagtcctggtctctgaggcatta

SEQ ID NO: 18267 - DNA, 25 bp, Canis familiaris
atcattcctccatctgtaggttagg

SEQ ID NO: 18268 - DNA, 25 bp, Canis familiaris
atcacaccccaggctgaaggcaatg

SEQ ID NO: 18269 - DNA, 25 bp, Canis familiaris
atcattacctgggctgaagcagatg

SEQ ID NO: 18270 - DNA, 25 bp, Canis familiaris
atcatctactcgcacttcacgtgcg

SEQ ID NO: 18271 - DNA, 25 bp, Canis familiaris
atcatgatgccaacctcttacgtgc

SEQ ID NO: 18272 - DNA, 25 bp, Canis familiaris
atcagatgagcttcctggcatacac

SEQ ID NO: 18273 - DNA, 25 bp, Canis familiaris
atcagactgatgtcctggtcacctt

SEQ ID NO: 18274 - DNA, 25 bp, Canis familiaris
atcactggattgactgcttcacctt

SEQ ID NO: 18275 - DNA, 25 bp, Canis familiaris
atcaatggaaatcccatcaccatct

SEQ ID NO: 18276 - DNA, 25 bp, Canis familiaris
atcaaatcaaggtcactctctatct

SEQ ID NO: 18277 - DNA, 25 bp, Canis familiaris
ataattctgggatgcctgtgtggct

SEQ ID NO: 18278 - DNA, 25 bp, Canis familiaris
atcttgttggtgttggcctgtgact

SEQ ID NO: 18279 - DNA, 25 bp, Canis familiaris
atcttttggctgttggattccctgt

SEQ ID NO: 18280 - DNA, 25 bp, Canis familiaris
atcttatttattgggcagccccggt

SEQ ID NO: 18281 - DNA, 25 bp, Canis familiaris
ataatattatttgggatctcacaca

SEQ ID NO: 18282 - DNA, 25 bp, Canis familiaris
ataatttgattttctattcacaaga

SEQ ID NO: 18283 - DNA, 25 bp, Canis familiaris
ataattcagattttccagactcaca

SEQ ID NO: 18284 - DNA, 25 bp, Canis familiaris
atcaatccagcaatctttagaccac

SEQ ID NO: 18285 - DNA, 25 bp, Canis familiaris
atcatactccacattattacgcaaa

SEQ ID NO: 18286 - DNA, 25 bp, Canis familiaris
atcacagcccaaattttagagagca

SEQ ID NO: 18287 - DNA, 25 bp, Canis familiaris
atcacccacaaatttcccaagagac

SEQ ID NO: 18288 - DNA, 25 bp, Canis familiaris
atcaacccgtgtttccacattggaa

SEQ ID NO: 18289 - DNA, 25 bp, Canis familiaris
atcacaccctggattcctgtagggg

SEQ ID NO: 18290 - DNA, 25 bp, Canis familiaris
atcagtcaccattttttcattacag

SEQ ID NO: 18291 - DNA, 25 bp, Canis familiaris
atcacttgctcataattatttaata

SEQ ID NO: 18292 - DNA, 25 bp, Canis familiaris
atcactttctagccaatttcttaca

SEQ ID NO: 18293 - DNA, 25 bp, Canis familiaris
atcagttcaaaccttttctatctag

SEQ ID NO: 18294 - DNA, 25 bp, Canis familiaris
atcagttcaacttttatttctccag

SEQ ID NO: 18295 - DNA, 25 bp, Canis familiaris
atcacgttagctttctaattccata

SEQ ID NO: 18296 - DNA, 25 bp, Canis familiaris
atcacaggtttatttaaatcatcta

SEQ ID NO: 18297 - DNA, 25 bp, Canis familiaris
atcactggctccatattaaaaaatg

SEQ ID NO: 18298 - DNA, 25 bp, Canis familiaris
atcaccaggtttttacacaaatatg

SEQ ID NO: 18299 - DNA, 25 bp, Canis familiaris
atcacttgggtaattacaggaaaga

SEQ ID NO: 18300 - DNA, 25 bp, Canis familiaris
atcacttgagtgtatcttccgggaa

SEQ ID NO: 18301 - DNA, 25 bp, Canis familiaris
atcaccgctgagaagtagccgggaa

SEQ ID NO: 18302 - DNA, 25 bp, Canis familiaris
atcaaccagaagctggcctcggacc

SEQ ID NO: 18303 - DNA, 25 bp, Canis familiaris
atcacttagaagcatgccccgaaca

SEQ ID NO: 18304 - DNA, 25 bp, Canis familiaris
atcttttgagtttcatggcccaagt

SEQ ID NO: 18305 - DNA, 25 bp, Canis familiaris
atcgtataggtttagggcagcacat

SEQ ID NO: 18306 - DNA, 25 bp, Canis familiaris
atcagtttgagaaaggtggtccagc

SEQ ID NO: 18307 - DNA, 25 bp, Canis familiaris
atcaccttgaagccagagggtcccc

SEQ ID NO: 18308 - DNA, 25 bp, Canis familiaris
atcaccatgtactaaagggaccctg

SEQ ID NO: 18309 - DNA, 25 bp, Canis familiaris
atcaccaaaatatagtagagctccc

SEQ ID NO: 18310 - DNA, 25 bp, Canis familiaris
atcaagcatgagttacaagcaaact

SEQ ID NO: 18311 - DNA, 25 bp, Canis familiaris
atcaagcagctgagccagaatacat

SEQ ID NO: 18312 - DNA, 25 bp, Canis familiaris
atcaacactgacacagcactgccat

SEQ ID NO: 18313 - DNA, 25 bp, Canis familiaris
atcaagctctgcctagagctccgca

SEQ ID NO: 18314 - DNA, 25 bp, Canis familiaris
atcaccatatgcttatgatgcatcc

SEQ ID NO: 18315 - DNA, 25 bp, Canis familiaris
atcagctctagcttgctttcataac

SEQ ID NO: 18316 - DNA, 25 bp, Canis familiaris
atcaatctgtgctatatatttatca

SEQ ID NO: 18317 - DNA, 25 bp, Canis familiaris
atcagtaagccaatattttcagtta

SEQ ID NO: 18318 - DNA, 25 bp, Canis familiaris
atcagtcccaatttttgccagttca

SEQ ID NO: 18319 - DNA, 25 bp, Canis familiaris
atcaccaggaatttccccatttaag

SEQ ID NO: 18320 - DNA, 25 bp, Canis familiaris
atcacaagggatttccccatttaag

SEQ ID NO: 18321 - DNA, 25 bp, Canis familiaris
atcataggggactttcacctccaaa

SEQ ID NO: 18322 - DNA, 25 bp, Canis familiaris
atcaactgggctgaacactcccgat

SEQ ID NO: 18323 - DNA, 25 bp, Canis familiaris
atcaacgggaagtccatctccatct

SEQ ID NO: 18324 - DNA, 25 bp, Canis familiaris
atctaccaggggcccctggcttact

SEQ ID NO: 18325 - DNA, 25 bp, Canis familiaris
atcacaccaggcatggttttcttcc

SEQ ID NO: 18326 - DNA, 25 bp, Canis familiaris
atcaagccctgcattgggcttcccg

SEQ ID NO: 18327 - DNA, 25 bp, Canis familiaris
atcaagctccttttggggaaatgga

SEQ ID NO: 18328 - DNA, 25 bp, Canis familiaris
atctactcctttttgggactgttgc

SEQ ID NO: 18329 - DNA, 25 bp, Canis familiaris
atcttccctaactatgatgggtgtt

SEQ ID NO: 18330 - DNA, 25 bp, Canis familiaris
atcatatccccaaacttgctgagtg

SEQ ID NO: 18331 - DNA, 25 bp, Canis familiaris
atcaatggggcagtcattagatttg

SEQ ID NO: 18332 - DNA, 25 bp, Canis familiaris
atcatcttggtactactagatgtct

SEQ ID NO: 18333 - DNA, 25 bp, Canis familiaris
atcacctgtgctacatatgccagtg

SEQ ID NO: 18334 - DNA, 25 bp, Canis familiaris
atcactgcttcaacatgctgcacat

SEQ ID NO: 18335 - DNA, 25 bp, Canis familiaris
atcactgtatgaaactcacaccatg

SEQ ID NO: 18336 - DNA, 25 bp, Canis familiaris
atcaatgtcttgtagtgctcacttc

SEQ ID NO: 18337 - DNA, 25 bp, Canis familiaris
atcaatgacctaagcatccacttta

SEQ ID NO: 18338 - DNA, 25 bp, Canis familiaris
atcaagaccctttctgcagcttgtt

SEQ ID NO: 18339 - DNA, 25 bp, Canis familiaris
atcaagaccactaaccacagccttg

SEQ ID NO: 18340 - DNA, 25 bp, Canis familiaris
atcaagcaacctatccaattctatg

SEQ ID NO: 18341 - DNA, 25 bp, Canis familiaris
atcaaagcctgtgtgacattttatg

SEQ ID NO: 18342 - DNA, 25 bp, Canis familiaris
atcagacctggtttccatttttgaa

SEQ ID NO: 18343 - DNA, 25 bp, Canis familiaris
atcaacctcgttacctatgtttaag

SEQ ID NO: 18344 - DNA, 25 bp, Canis familiaris
atcatcctgttaaccctatgtttgt

SEQ ID NO: 18345 - DNA, 25 bp, Canis familiaris
ctaggttgctaccccttggtataag

SEQ ID NO: 18346 - DNA, 25 bp, Canis familiaris
ctcagtttcccctcgggaagcaaga

SEQ ID NO: 18347 - DNA, 25 bp, Canis familiaris
atcagtttctcaggctttggggcag

SEQ ID NO: 18348 - DNA, 25 bp, Canis familiaris
atcacgtttcaccttatgttggcat

SEQ ID NO: 18349 - DNA, 25 bp, Canis familiaris
atcacgtatacacctattatgggaa

SEQ ID NO: 18350 - DNA, 25 bp, Canis familiaris
atcacttttcatcttgtatgtcgac

SEQ ID NO: 18351 - DNA, 25 bp, Canis familiaris
atcagtttatcttttgagatccaca

SEQ ID NO: 18352 - DNA, 25 bp, Canis familiaris
atcaattagatttcctagcagagca

SEQ ID NO: 18353 - DNA, 25 bp, Canis familiaris
atcaagtatgagaagcccgggtccc

SEQ ID NO: 18354 - DNA, 25 bp, Canis familiaris
atcagttatggttcctttggtcgct

SEQ ID NO: 18355 - DNA, 25 bp, Canis familiaris
atcagttatggttcctttggtcgct

SEQ ID NO: 18356 - DNA, 25 bp, Canis familiaris
atcaatggtcttttctttggtcagc

SEQ ID NO: 18357 - DNA, 25 bp, Canis familiaris
atcaatgtactctttgcctctgtat

SEQ ID NO: 18358 - DNA, 25 bp, Canis familiaris
atcagtctttttcaacttattcttt

SEQ ID NO: 18359 - DNA, 25 bp, Canis familiaris
atcagtctttgtcctagcacttgtt

SEQ ID NO: 18360 - DNA, 25 bp, Canis familiaris
atcaatatatataactgacatttgt

SEQ ID NO: 18361 - DNA, 25 bp, Canis familiaris
atcaatatgattccaccatccatgt

SEQ ID NO: 18362 - DNA, 25 bp, Canis familiaris
atcaaggcatggttcctctgcatgg

SEQ ID NO: 18363 - DNA, 25 bp, Canis familiaris
atcacaggcattgtcatcctcacga

SEQ ID NO: 18364 - DNA, 25 bp, Canis familiaris
atcaatggcaggaactcctccgatg

SEQ ID NO: 18365 - DNA, 25 bp, Canis familiaris
atcagtagaagttgtcctgcctgta

SEQ ID NO: 18366 - DNA, 25 bp, Canis familiaris
atcagtcgcaatgattcagctcgct

SEQ ID NO: 18367 - DNA, 25 bp, Canis familiaris
atcagctgccacagttgctgtcagt

SEQ ID NO: 18368 - DNA, 25 bp, Canis familiaris
atcacgtggcatgttctgtcattgt

SEQ ID NO: 18369 - DNA, 25 bp, Canis familiaris
atcacggacagtccgtgtctctgcc

SEQ ID NO: 18370 - DNA, 25 bp, Canis familiaris
atcacggtgatggacaaactgcgcc

SEQ ID NO: 18371 - DNA, 25 bp, Canis familiaris
atcagtgactcaagaacaaccccca

SEQ ID NO: 18372 - DNA, 25 bp, Canis familiaris
atcagtgtctcaaagtgttcctctc

SEQ ID NO: 18373 - DNA, 25 bp, Canis familiaris
atcacttgctcaaatcttagtctcc

SEQ ID NO: 18374 - DNA, 25 bp, Canis familiaris
atcacttctctgctcattaatatct

SEQ ID NO: 18375 - DNA, 25 bp, Canis familiaris
atcacttcctctaaaatatttcctc

SEQ ID NO: 18376 - DNA, 25 bp, Canis familiaris
atcatcttctgttaatacaatgttc

SEQ ID NO: 18377 - DNA, 25 bp, Canis familiaris
atcacctgctctaagtcctagtatc

SEQ ID NO: 18378 - DNA, 25 bp, Canis familiaris
atcaccttttacagcatcggatcct

SEQ ID NO: 18379 - DNA, 25 bp, Canis familiaris
atcaccctttcaacgatgttatctc

SEQ ID NO: 18380 - DNA, 25 bp, Canis familiaris
atcactgcactcgcttatggttatt

SEQ ID NO: 18381 - DNA, 25 bp, Canis familiaris
atctgatcactgcccattttgtgga

SEQ ID NO: 18382 - DNA, 25 bp, Canis familiaris
atcaacaccaccatctgtgctggat

SEQ ID NO: 18383 - DNA, 25 bp, Canis familiaris
atcaactacagcgagctctcttcga

SEQ ID NO: 18384 - DNA, 25 bp, Canis familiaris
atcagactgatctttgaaactagca

SEQ ID NO: 18385 - DNA, 25 bp, Canis familiaris
atcagatctatctagtaaactccat

SEQ ID NO: 18386 - DNA, 25 bp, Canis familiaris
atcagaccacggaggcactgctatg

SEQ ID NO: 18387 - DNA, 25 bp, Canis familiaris
atcacaagcacacataggcacctat

SEQ ID NO: 18388 - DNA, 25 bp, Canis familiaris
atctatagatagcattccctttttt

SEQ ID NO: 18389 - DNA, 25 bp, Canis familiaris
atcaaagcccaaactcctttcttat

SEQ ID NO: 18390 - DNA, 25 bp, Canis familiaris
atcaaggggcaatatttttatctat

SEQ ID NO: 18391 - DNA, 25 bp, Canis familiaris
atcatttgtgggtgtttatattcta

SEQ ID NO: 18392 - DNA, 25 bp, Canis familiaris
atctttacctttttacaattgcttg

SEQ ID NO: 18393 - DNA, 25 bp, Canis familiaris
atgtttacactatactggaatcggt

SEQ ID NO: 18394 - DNA, 25 bp, Canis familiaris
agtttacacaaatctttatcccaag

SEQ ID NO: 18395 - DNA, 25 bp, Canis familiaris
atctttaataacctttcatacctca

SEQ ID NO: 18396 - DNA, 25 bp, Canis familiaris
atcttttatttctctaataccaact

SEQ ID NO: 18397 - DNA, 25 bp, Canis familiaris
atcatgactttatcacttttactaa

SEQ ID NO: 18398 - DNA, 25 bp, Canis familiaris
atcagtgctttttgtctttttacca

SEQ ID NO: 18399 - DNA, 25 bp, Canis familiaris
atcacattttgaattatttcgttta

SEQ ID NO: 18400 - DNA, 25 bp, Canis familiaris
atctcatggcctgattttttttttt

SEQ ID NO: 18401 - DNA, 25 bp, Canis familiaris
atcacttgacaactccttttgtttt

SEQ ID NO: 18402 - DNA, 25 bp, Canis familiaris
atcaacgacatttcctgtttctgtt

SEQ ID NO: 18403 - DNA, 25 bp, Canis familiaris
atctaatgactttcacgtccgtggt

SEQ ID NO: 18404 - DNA, 25 bp, Canis familiaris
atcatcaagattagtacgctccgtg

SEQ ID NO: 18405 - DNA, 25 bp, Canis familiaris
atctagtgtatcatatggcccagtt

SEQ ID NO: 18406 - DNA, 25 bp, Canis familiaris
atcaacatgtactttgccacgggct

SEQ ID NO: 18407 - DNA, 25 bp, Canis familiaris
atcaagatgtactttcacacgaacg

SEQ ID NO: 18408 - DNA, 25 bp, Canis familiaris
atcagtgttctctgatccacagtcc

SEQ ID NO: 18409 - DNA, 25 bp, Canis familiaris
atcagttctctgtgaccaggacatg

SEQ ID NO: 18410 - DNA, 25 bp, Canis familiaris
atcagtgcccagggcagcctgggtg

SEQ ID NO: 18411 - DNA, 25 bp, Canis familiaris
atcagtcattcgaacattgcgaggt

SEQ ID NO: 18412 - DNA, 25 bp, Canis familiaris
atcactattggcaacgagcggttcc

SEQ ID NO: 18413 - DNA, 25 bp, Canis familiaris
atcactattggcaacgagcggttcc

SEQ ID NO: 18414 - DNA, 25 bp, Canis familiaris
atcagtggtggaagaacggttctca

SEQ ID NO: 18415 - DNA, 25 bp, Canis familiaris
atcagatggtggtcaacacggggct

SEQ ID NO: 18416 - DNA, 25 bp, Canis familiaris
atcactgggcaggcaattcagaggc

SEQ ID NO: 18417 - DNA, 25 bp, Canis familiaris
atcagcttggtggcactctctgagt

SEQ ID NO: 18418 - DNA, 25 bp, Canis familiaris
atcacaggtgctggctgctttggta

SEQ ID NO: 18419 - DNA, 25 bp, Canis familiaris
atcacaggcgcggctcctgtggaag

SEQ ID NO: 18420 - DNA, 25 bp, Canis familiaris
atcacagcaggcgcaaggcatgggg

SEQ ID NO: 18421 - DNA, 25 bp, Canis familiaris
atcaggcggccagagtgaggaggag

SEQ ID NO: 18422 - DNA, 25 bp, Canis familiaris
atcacgccgcccagtgagtgagtag

SEQ ID NO: 18423 - DNA, 25 bp, Canis familiaris
atcactgcacttgaggcatggggta

SEQ ID NO: 18424 - DNA, 25 bp, Canis familiaris
atcaccttcaggtgctggggtgcac

SEQ ID NO: 18425 - DNA, 25 bp, Canis familiaris
atcactgttcagcaggctgttggaa

SEQ ID NO: 18426 - DNA, 25 bp, Canis familiaris
atcagtgtgtcttgcagaatcttgg

SEQ ID NO: 18427 - DNA, 25 bp, Canis familiaris
atcatgatgaacaagcagttccgga

SEQ ID NO: 18428 - DNA, 25 bp, Canis familiaris
atcagataactgtcacatctctccc

SEQ ID NO: 18429 - DNA, 25 bp, Canis familiaris
atcatcatataagcacatccccaga

SEQ ID NO: 18430 - DNA, 25 bp, Canis familiaris
atcattaaattctacccctgaaact

SEQ ID NO: 18431 - DNA, 25 bp, Canis familiaris
atcattttcattctcaccgggagtc

SEQ ID NO: 18432 - DNA, 25 bp, Canis familiaris
atctagtaagtgcagacccagggtc

SEQ ID NO: 18433 - DNA, 25 bp, Canis familiaris
atgtggccaagtgcaacctaggaac

SEQ ID NO: 18434 - DNA, 25 bp, Canis familiaris
atcaggctaagttccgcgctaataa

SEQ ID NO: 18435 - DNA, 25 bp, Canis familiaris
atcaggctcagtaatccgtgcattt

SEQ ID NO: 18436 - DNA, 25 bp, Canis familiaris
atcatactcagtttccgccatctca

SEQ ID NO: 18437 - DNA, 25 bp, Canis familiaris
atctattacttgagcccctcatagt

SEQ ID NO: 18438 - DNA, 25 bp, Canis familiaris
atcacttacatgatagaccccctgt

SEQ ID NO: 18439 - DNA, 25 bp, Canis familiaris
atcacctaaatgtagactctgccct

SEQ ID NO: 18440 - DNA, 25 bp, Canis familiaris
atcacctggaaatgagtctacactg

SEQ ID NO: 18441 - DNA, 25 bp, Canis familiaris
atcaccaggtatacacagtctacac

SEQ ID NO: 18442 - DNA, 25 bp, Canis familiaris
atcaccaggtaccacatgctttaga

SEQ ID NO: 18443 - DNA, 25 bp, Canis familiaris
atcaactggcattccactatattaa

SEQ ID NO: 18444 - DNA, 25 bp, Canis familiaris
atcaaactgcattccacatattatt

SEQ ID NO: 18445 - DNA, 25 bp, Canis familiaris
atcaaactgttgtcctgaccttctt

SEQ ID NO: 18446 - DNA, 25 bp, Canis familiaris
atcagaactgtttcctcaggcactc

SEQ ID NO: 18447 - DNA, 25 bp, Canis familiaris
atcaaagtctgttctggcggcattg

SEQ ID NO: 18448 - DNA, 25 bp, Canis familiaris
atcatacaggtcacgagcggtgggt

SEQ ID NO: 18449 - DNA, 25 bp, Canis familiaris
atcacgccactactgcgagggtggg

SEQ ID NO: 18450 - DNA, 25 bp, Canis familiaris
atcatcgctactatgcttagagggc

SEQ ID NO: 18451 - DNA, 25 bp, Canis familiaris
atctcttatcctacttagtggggtt

SEQ ID NO: 18452 - DNA, 25 bp, Canis familiaris
atcacttcatctctctgggatggag

SEQ ID NO: 18453 - DNA, 25 bp, Canis familiaris
atcactcacttgtcctaggtggggc

SEQ ID NO: 18454 - DNA, 25 bp, Canis familiaris
atcaaactatacttgtgtggggtgc

SEQ ID NO: 18455 - DNA, 25 bp, Canis familiaris
atcattgactttttcttgggggcgt

SEQ ID NO: 18456 - DNA, 25 bp, Canis familiaris
atcagccacgtttttctggaggagc

SEQ ID NO: 18457 - DNA, 25 bp, Canis familiaris
atctactcgtatgtgttggagaggc

SEQ ID NO: 18458 - DNA, 25 bp, Canis familiaris
atcttcgttcccgttggagaggcgg

SEQ ID NO: 18459 - DNA, 25 bp, Canis familiaris
atgcgtctgtccgcgtttaagggga

SEQ ID NO: 18460 - DNA, 25 bp, Canis familiaris
atcagccttcccagtttgaaaacca

SEQ ID NO: 18461 - DNA, 25 bp, Canis familiaris
atcagcgcttggttggttttaaata

SEQ ID NO: 18462 - DNA, 25 bp, Canis familiaris
atcacctggctgtggcttcaataaa

SEQ ID NO: 18463 - DNA, 25 bp, Canis familiaris
atcacattgcctttgtgttaatggt

SEQ ID NO: 18464 - DNA, 25 bp, Canis familiaris
atcaccatacttatttaatgagtgt

SEQ ID NO: 18465 - DNA, 25 bp, Canis familiaris
atcaccaacctgactttgccaaata

SEQ ID NO: 18466 - DNA, 25 bp, Canis familiaris
atcactccaggctactgttgccttt

SEQ ID NO: 18467 - DNA, 25 bp, Canis familiaris
atcagaccaagttctgtgtgcccct

SEQ ID NO: 18468 - DNA, 25 bp, Canis familiaris
atcagagccaagagctgtaccctcc

SEQ ID NO: 18469 - DNA, 25 bp, Canis familiaris
atcagaacagcaacttctactgcct

SEQ ID NO: 18470 - DNA, 25 bp, Canis familiaris
atcagaagatgccctttgacgtgtt

SEQ ID NO: 18471 - DNA, 25 bp, Canis familiaris
atcgcaacatgggttaaggctttct

SEQ ID NO: 18472 - DNA, 25 bp, Canis familiaris
atcatattatgggttataggtcgga

SEQ ID NO: 18473 - DNA, 25 bp, Canis familiaris
atcatttaccgactgtatcgcctgc

SEQ ID NO: 18474 - DNA, 25 bp, Canis familiaris
atctcttggcagtaggtttctctct

SEQ ID NO: 18475 - DNA, 25 bp, Canis familiaris
atcatttgggcccaatttgccgcta

SEQ ID NO: 18476 - DNA, 25 bp, Canis familiaris
atcatttgggcccatattgcgccgt

SEQ ID NO: 18477 - DNA, 25 bp, Canis familiaris
atcagtagtaccaagttccagggct

SEQ ID NO: 18478 - DNA, 25 bp, Canis familiaris
atcacacagctagcaggtgtccagg

SEQ ID NO: 18479 - DNA, 25 bp, Canis familiaris
atcacacagctagtaagtggcctgc

SEQ ID NO: 18480 - DNA, 25 bp, Canis familiaris
atcagcacagctgtggagctagggt

SEQ ID NO: 18481 - DNA, 25 bp, Canis familiaris
atcacacagctcctgagtggcagag

SEQ ID NO: 18482 - DNA, 25 bp, Canis familiaris
atctaagcccatgtggtagcccagg

SEQ ID NO: 18483 - DNA, 25 bp, Canis familiaris
atctagagtcacacggtgagcccct

SEQ ID NO: 18484 - DNA, 25 bp, Canis familiaris
atcagtattccgagggagcctccca

SEQ ID NO: 18485 - DNA, 25 bp, Canis familiaris
atcagctttcctgggaagagcctgc

SEQ ID NO: 18486 - DNA, 25 bp, Canis familiaris
atcacgatttctagataagtcacag

SEQ ID NO: 18487 - DNA, 25 bp, Canis familiaris
atcacagttttgaagaaagtcagaa

SEQ ID NO: 18488 - DNA, 25 bp, Canis familiaris
atctagtttgagtagcaagcgaaaa

SEQ ID NO: 18489 - DNA, 25 bp, Canis familiaris
atcttgcctggagccaaggatatca

SEQ ID NO: 18490 - DNA, 25 bp, Canis familiaris
atcttctgcaagtcaccacgagaga

SEQ ID NO: 18491 - DNA, 25 bp, Canis familiaris
atcatcctctgatttccctgagaaa

SEQ ID NO: 18492 - DNA, 25 bp, Canis familiaris
atcacttgctgtgtcaactgcatga

SEQ ID NO: 18493 - DNA, 25 bp, Canis familiaris
atcactggtttgtcatagctgtcaa

SEQ ID NO: 18494 - DNA, 25 bp, Canis familiaris
atcatcagagccacagctagcttga

SEQ ID NO: 18495 - DNA, 25 bp, Canis familiaris
atcagatcatctaccagctacagga

SEQ ID NO: 18496 - DNA, 25 bp, Canis familiaris
atcagtatgtcaaattcacagatga

SEQ ID NO: 18497 - DNA, 25 bp, Canis familiaris
atcagtcatgtattgttgtccagca

SEQ ID NO: 18498 - DNA, 25 bp, Canis familiaris
atcagaatgcatcaggttccacggc

SEQ ID NO: 18499 - DNA, 25 bp, Canis familiaris
atcagcattattctttccacagtgg

SEQ ID NO: 18500 - DNA, 25 bp, Canis familiaris
atcagacacttcattgtaccagaga

SEQ ID NO: 18501 - DNA, 25 bp, Canis familiaris
atcagatgcctcaaatttcctcaag

SEQ ID NO: 18502 - DNA, 25 bp, Canis familiaris
atcagtgctctcatattaattaata

SEQ ID NO: 18503 - DNA, 25 bp, Canis familiaris
atcatgtttcattttcacgtttaaa

SEQ ID NO: 18504 - DNA, 25 bp, Canis familiaris
atcaggataatcttgtacttttcaa

SEQ ID NO: 18505 - DNA, 25 bp, Canis familiaris
atcagagtgccatttttttgttcaa

SEQ ID NO: 18506 - DNA, 25 bp, Canis familiaris
atcacatatacacttttcctgcttc

SEQ ID NO: 18507 - DNA, 25 bp, Canis familiaris
atctataaccagagatcctgcttcg

SEQ ID NO: 18508 - DNA, 25 bp, Canis familiaris
atcagttccgagagatcatcgttct

SEQ ID NO: 18509 - DNA, 25 bp, Canis familiaris
atcagcactccggaagactggattt

SEQ ID NO: 18510 - DNA, 25 bp, Canis familiaris
atcacctccagcaagaacgtcactg

SEQ ID NO: 18511 - DNA, 25 bp, Canis familiaris
atcactaccacccaaagtgcacggt

SEQ ID NO: 18512 - DNA, 25 bp, Canis familiaris
atccaggccagatcaaagtccggtg

SEQ ID NO: 18513 - DNA, 25 bp, Canis familiaris
atctcggtagttaaagtctcgtcag

SEQ ID NO: 18514 - DNA, 25 bp, Canis familiaris
atctcgtgttcttttcgttcgtagt

SEQ ID NO: 18515 - DNA, 25 bp, Canis familiaris
atctattttctgtatgcacctgtcg

SEQ ID NO: 18516 - DNA, 25 bp, Canis familiaris
atcagtattttgtatatccgtgcat

SEQ ID NO: 18517 - DNA, 25 bp, Canis familiaris
atcagaattcggaagaccttgtaac

SEQ ID NO: 18518 - DNA, 25 bp, Canis familiaris
atcagcacttagatggaccttacta

SEQ ID NO: 18519 - DNA, 25 bp, Canis familiaris
atcacctttgtgaggctctttctat

SEQ ID NO: 18520 - DNA, 25 bp, Canis familiaris
atcagcctgttgcttgtttttgctc

SEQ ID NO: 18521 - DNA, 25 bp, Canis familiaris
atcacctgtctggttgtggatctgg

SEQ ID NO: 18522 - DNA, 25 bp, Canis familiaris
atcactctcttggtagtcaatgcga

SEQ ID NO: 18523 - DNA, 25 bp, Canis familiaris
atcactcatcatcagggaaatggca

SEQ ID NO: 18524 - DNA, 25 bp, Canis familiaris
atcactgctcagcaacctggaggaa

SEQ ID NO: 18525 - DNA, 25 bp, Canis familiaris
atcacgcagagctatgagcctggaa

SEQ ID NO: 18526 - DNA, 25 bp, Canis familiaris
atctctctatgccatgtgcactgaa

SEQ ID NO: 18527 - DNA, 25 bp, Canis familiaris
atcatgtcatagccatgtggttcat

SEQ ID NO: 18528 - DNA, 25 bp, Canis familiaris
atcatgcaaatgctgtattcttctt

SEQ ID NO: 18529 - DNA, 25 bp, Canis familiaris
atcagatggatgcagacattatctt

SEQ ID NO: 18530 - DNA, 25 bp, Canis familiaris
atcaggtgtggccaacatctgcttc

SEQ ID NO: 18531 - DNA, 25 bp, Canis familiaris
atcacttgtgcaccacagatctgct

SEQ ID NO: 18532 - DNA, 25 bp, Canis familiaris
atcagcctagcacagagagcgtcta

SEQ ID NO: 18533 - DNA, 25 bp, Canis familiaris
atcaccaaacacaaagcctatttta

SEQ ID NO: 18534 - DNA, 25 bp, Canis familiaris
atcactcaacgtgaacacttgatgc

SEQ ID NO: 18535 - DNA, 25 bp, Canis familiaris
atcactctatcgtgtcacacttgat

SEQ ID NO: 18536 - DNA, 25 bp, Canis familiaris
atcacatccacgtagactcagttct

SEQ ID NO: 18537 - DNA, 25 bp, Canis familiaris
atcacatcaattttatctcatttct

SEQ ID NO: 18538 - DNA, 25 bp, Canis familiaris
atcatacagagttttattttcagtt

SEQ ID NO: 18539 - DNA, 25 bp, Canis familiaris
atcatatagatgcttggttttggag

SEQ ID NO: 18540 - DNA, 25 bp, Canis familiaris
atcataagcatgccctgtttttccc

SEQ ID NO: 18541 - DNA, 25 bp, Canis familiaris
atcataaagccgtttattcttcctt

SEQ ID NO: 18542 - DNA, 25 bp, Canis familiaris
atctataaccggagtagctgcttcg

SEQ ID NO: 18543 - DNA, 25 bp, Canis familiaris
atctataaccagtacgtacgcttcg

SEQ ID NO: 18544 - DNA, 25 bp, Canis familiaris
atcttctcccatttctgtaggttgc

SEQ ID NO: 18545 - DNA, 25 bp, Canis familiaris
atcttggaccttccaggcaggtacc

SEQ ID NO: 18546 - DNA, 25 bp, Canis familiaris
atctttcaaccttctggaggtcacc

SEQ ID NO: 18547 - DNA, 25 bp, Canis familiaris
atctttgaacctctgtgccaacagc

SEQ ID NO: 18548 - DNA, 25 bp, Canis familiaris
atcagcttacccaggctatcttgac

SEQ ID NO: 18549 - DNA, 25 bp, Canis familiaris
atcatgcttaactattccttttggg

SEQ ID NO: 18550 - DNA, 25 bp, Canis familiaris
atcatgttgaacgaccagtacttgg

SEQ ID NO: 18551 - DNA, 25 bp, Canis familiaris
atcagggcagattccaagaacatta

SEQ ID NO: 18552 - DNA, 25 bp, Canis familiaris
atcagtggctgcctgtcatacacac

SEQ ID NO: 18553 - DNA, 25 bp, Canis familiaris
atcagtcggagactcatctcgacgg

SEQ ID NO: 18554 - DNA, 25 bp, Canis familiaris
atcagcacaatatgctctttacgga

SEQ ID NO: 18555 - DNA, 25 bp, Canis familiaris
atcaccgattgcccttgtcaactca

SEQ ID NO: 18556 - DNA, 25 bp, Canis familiaris
atcaccagtatcctttgcttaatat

SEQ ID NO: 18557 - DNA, 25 bp, Canis familiaris
atcactcgatggcttacttgactta

SEQ ID NO: 18558 - DNA, 25 bp, Canis familiaris
atcacttttttcccttgaattcaca

SEQ ID NO: 18559 - DNA, 25 bp, Canis familiaris
atcactccttttggcttagaatttt

SEQ ID NO: 18560 - DNA, 25 bp, Canis familiaris
atcactgcctttgtttatatttttt

SEQ ID NO: 18561 - DNA, 25 bp, Canis familiaris
atcactactgttattactatattat

SEQ ID NO: 18562 - DNA, 25 bp, Canis familiaris
atcactaattctatttattggctca

SEQ ID NO: 18563 - DNA, 25 bp, Canis familiaris
atcacgaagtattgtttctcttcca

SEQ ID NO: 18564 - DNA, 25 bp, Canis familiaris
atcaggaagtaattttccttgcagg

SEQ ID NO: 18565 - DNA, 25 bp, Canis familiaris
atcagtaagtatttgtcttttgcag

SEQ ID NO: 18566 - DNA, 25 bp, Canis familiaris
atcagccggattttgttattgatat

SEQ ID NO: 18567 - DNA, 25 bp, Canis familiaris
atcactcttgatttctttatttcat

SEQ ID NO: 18568 - DNA, 25 bp, Canis familiaris
atcaccattgatatctccctgtgga

SEQ ID NO: 18569 - DNA, 25 bp, Canis familiaris
atcaccattgatatctccctgtgga

SEQ ID NO: 18570 - DNA, 25 bp, Canis familiaris
atcacctagattgtacgctctctga

SEQ ID NO: 18571 - DNA, 25 bp, Canis familiaris
atcactgtaattatcactttctttt

SEQ ID NO: 18572 - DNA, 25 bp, Canis familiaris
atcggtatagttctcttttatcgta

SEQ ID NO: 18573 - DNA, 25 bp, Canis familiaris
atcgttacgtggctattgttcatcc

SEQ ID NO: 18574 - DNA, 25 bp, Canis familiaris
atcggaacgctcggtttcttgagtc

SEQ ID NO: 18575 - DNA, 25 bp, Canis familiaris
atcaggaactcatctggttcttctt

SEQ ID NO: 18576 - DNA, 25 bp, Canis familiaris
atcaggaacatgggcagccttccct

SEQ ID NO: 18577 - DNA, 25 bp, Canis familiaris
atcaggataaagtgtcattgccatt

SEQ ID NO: 18578 - DNA, 25 bp, Canis familiaris
atcacggactagtgacaagctctgc

SEQ ID NO: 18579 - DNA, 25 bp, Canis familiaris
atcatcgtcactacatagacaccat

SEQ ID NO: 18580 - DNA, 25 bp, Canis familiaris
atcacgtgatgctatctatgacccg

SEQ ID NO: 18581 - DNA, 25 bp, Canis familiaris
atcacggagcgcatgatgtgcgcgg

SEQ ID NO: 18582 - DNA, 25 bp, Canis familiaris
atcacggcaatgcggctgcactggt

SEQ ID NO: 18583 - DNA, 25 bp, Canis familiaris
atctccaatgtggggtgcctgagtg

SEQ ID NO: 18584 - DNA, 25 bp, Canis familiaris
atcttcaaatgccagggtgcagcct

SEQ ID NO: 18585 - DNA, 25 bp, Canis familiaris
atcatacccagccagatcaggcagc

SEQ ID NO: 18586 - DNA, 25 bp, Canis familiaris
atctacctctgccgcatatgtatgt

SEQ ID NO: 18587 - DNA, 25 bp, Canis familiaris
atcttcttctgggatgggagtccat

SEQ ID NO: 18588 - DNA, 25 bp, Canis familiaris
atcactcagttctgtggctgaccct

SEQ ID NO: 18589 - DNA, 25 bp, Canis familiaris
atcttcagcgtcttgtagtacagcc

SEQ ID NO: 18590 - DNA, 25 bp, Canis familiaris
atcagccctgccttgaagatgacac

SEQ ID NO: 18591 - DNA, 25 bp, Canis familiaris
atcagttctggccatgagaggaact

SEQ ID NO: 18592 - DNA, 25 bp, Canis familiaris
atcagtctctgggcggggagagccc

SEQ ID NO: 18593 - DNA, 25 bp, Canis familiaris
atctctgtagcgggagggacgcctc

SEQ ID NO: 18594 - DNA, 25 bp, Canis familiaris
atcatctacatcgaggaggcgcacc

SEQ ID NO: 18595 - DNA, 25 bp, Canis familiaris
atcaccatgctccaagatgctggcc

SEQ ID NO: 18596 - DNA, 25 bp, Canis familiaris
atcaccattggcaatgagcggttcc

SEQ ID NO: 18597 - DNA, 25 bp, Canis familiaris
atcacctgcgagccatgggggatat

SEQ ID NO: 18598 - DNA, 25 bp, Canis familiaris
atcagcttgcagtttggtggtgact

SEQ ID NO: 18599 - DNA, 25 bp, Canis familiaris
atcacctgcattccggataggcagc

SEQ ID NO: 18600 - DNA, 25 bp, Canis familiaris
atcacgccatgagccaaaggcagcc

SEQ ID NO: 18601 - DNA, 25 bp, Canis familiaris
atcaccacacaggctcaagtgtccc

SEQ ID NO: 18602 - DNA, 25 bp, Canis familiaris
atgcatctatgcaggctacaggtgc

SEQ ID NO: 18603 - DNA, 25 bp, Canis familiaris
atcatgcagcgtctgccagcaggag

SEQ ID NO: 18604 - DNA, 25 bp, Canis familiaris
atcacgcgatgttgactgcacaggt

SEQ ID NO: 18605 - DNA, 25 bp, Canis familiaris
atcatcaccattagaccaagctgtc

SEQ ID NO: 18606 - DNA, 25 bp, Canis familiaris
atcacctctgtgacatcaatactgt

SEQ ID NO: 18607 - DNA, 25 bp, Canis familiaris
atcactccttgaaattacatgttgt

SEQ ID NO: 18608 - DNA, 25 bp, Canis familiaris
atcaccctatatataccatgagctt

SEQ ID NO: 18609 - DNA, 25 bp, Canis familiaris
atctccacccaaaatccagactaaa

SEQ ID NO: 18610 - DNA, 25 bp, Canis familiaris
atctagcctagaaacaccaagtaaa

SEQ ID NO: 18611 - DNA, 25 bp, Canis familiaris
atctgatgactataaccttatttta

SEQ ID NO: 18612 - DNA, 25 bp, Canis familiaris
atcgatattaacatcccaattttga

SEQ ID NO: 18613 - DNA, 25 bp, Canis familiaris
atcctactaattctcgcaaatggga

SEQ ID NO: 18614 - DNA, 25 bp, Canis familiaris
agcgtacttttctccagggaggcct

SEQ ID NO: 18615 - DNA, 25 bp, Canis familiaris
atgttacttttctccgagggacgct

SEQ ID NO: 18616 - DNA, 25 bp, Canis familiaris
atctctccgtttcaacgaaggactc

SEQ ID NO: 18617 - DNA, 25 bp, Canis familiaris
atctttgcctttcaactggagagtt

SEQ ID NO: 18618 - DNA, 25 bp, Canis familiaris
atcttaggtttttagctgggactct

SEQ ID NO: 18619 - DNA, 25 bp, Canis familiaris
atcttcacgtttactccatgaggca

SEQ ID NO: 18620 - DNA, 25 bp, Canis familiaris
atcgatcccatgttgaccgagaggc

SEQ ID NO: 18621 - DNA, 25 bp, Canis familiaris
atctatcctcagtctggccagagat

SEQ ID NO: 18622 - DNA, 25 bp, Canis familiaris
actatccccgatgaaggatcgtttt

SEQ ID NO: 18623 - DNA, 25 bp, Canis familiaris
atctgtcccggagaaggcatcctcc

SEQ ID NO: 18624 - DNA, 25 bp, Canis familiaris
atcagctcccaggtaaagccatcta

SEQ ID NO: 18625 - DNA, 25 bp, Canis familiaris
atcttcccactatagatcctttagg

SEQ ID NO: 18626 - DNA, 25 bp, Canis familiaris
atcttctaccttcattcttctaagg

SEQ ID NO: 18627 - DNA, 25 bp, Canis familiaris
atctaccaactttatcttccttaat

SEQ ID NO: 18628 - DNA, 25 bp, Canis familiaris
atctacccttaattcttcctaatat

SEQ ID NO: 18629 - DNA, 25 bp, Canis familiaris
atcatttctttatatttccgtttgt

SEQ ID NO: 18630 - DNA, 25 bp, Canis familiaris
atctaacttggatatttcacaattt

SEQ ID NO: 18631 - DNA, 25 bp, Canis familiaris
atctgaactttttcagtttatatgt

SEQ ID NO: 18632 - DNA, 25 bp, Canis familiaris
atcagatacgtcctatcgtttgatc

SEQ ID NO: 18633 - DNA, 25 bp, Canis familiaris
atcagagtcaggcaacgcttggata

SEQ ID NO: 18634 - DNA, 25 bp, Canis familiaris
atcagagccgcagataccaataact

SEQ ID NO: 18635 - DNA, 25 bp, Canis familiaris
atcagacctcatgaatctcctgtcc

SEQ ID NO: 18636 - DNA, 25 bp, Canis familiaris
atcagattgtcaaagctcttcatgt

SEQ ID NO: 18637 - DNA, 25 bp, Canis familiaris
atcagcattctctaacttgtttggt

SEQ ID NO: 18638 - DNA, 25 bp, Canis familiaris
atctagctcccatctgggcttgagt

SEQ ID NO: 18639 - DNA, 25 bp, Canis familiaris
atctcagcttcttcaggcggtagct

SEQ ID NO: 18640 - DNA, 25 bp, Canis familiaris
atcttgctcttctgggaaagctcat

SEQ ID NO: 18641 - DNA, 25 bp, Canis familiaris
atctctctgggatggagaaacattc

SEQ ID NO: 18642 - DNA, 25 bp, Canis familiaris
atctttggaacacgaagtgtgtctc

SEQ ID NO: 18643 - DNA, 25 bp, Canis familiaris
atctttgccaacacatactgttttc

SEQ ID NO: 18644 - DNA, 25 bp, Canis familiaris
atcaccgctctacttaacttatatt

SEQ ID NO: 18645 - DNA, 25 bp, Canis familiaris
atcacctgccttatgaaattcacat

SEQ ID NO: 18646 - DNA, 25 bp, Canis familiaris
atcaccatgcttcaagaaaccatca

SEQ ID NO: 18647 - DNA, 25 bp, Canis familiaris
atcacgcccggagtagaagcgcata

SEQ ID NO: 18648 - DNA, 25 bp, Canis familiaris
atcacgtctgggtggtcatcagcat

SEQ ID NO: 18649 - DNA, 25 bp, Canis familiaris
atcaggtgtggtttggtgctacttt

SEQ ID NO: 18650 - DNA, 25 bp, Canis familiaris
atcagggttttgtagatgctattac

SEQ ID NO: 18651 - DNA, 25 bp, Canis familiaris
atcaccttctttggatttcatctac

SEQ ID NO: 18652 - DNA, 25 bp, Canis familiaris
atcacctttttgcatcaggctctat

SEQ ID NO: 18653 - DNA, 25 bp, Canis familiaris
atcaccttgttttcattgtgccgat

SEQ ID NO: 18654 - DNA, 25 bp, Canis familiaris
atcaccttcaatttatggctctcgg

SEQ ID NO: 18655 - DNA, 25 bp, Canis familiaris
atcagcctaatgtgtatgtcctgcc

SEQ ID NO: 18656 - DNA, 25 bp, Canis familiaris
atcatagtattgctgttgtcatccc

SEQ ID NO: 18657 - DNA, 25 bp, Canis familiaris
atcacctattttacatacaccctac

SEQ ID NO: 18658 - DNA, 25 bp, Canis familiaris
atcgtttttatgaccaccaaccacg

SEQ ID NO: 18659 - DNA, 25 bp, Canis familiaris
atcggtgttgtgagctgtccaccca

SEQ ID NO: 18660 - DNA, 25 bp, Canis familiaris
atctggctttggaacgtaagcaacc

SEQ ID NO: 18661 - DNA, 25 bp, Canis familiaris
atcatgaccgggtccgtaacacact

SEQ ID NO: 18662 - DNA, 25 bp, Canis familiaris
atcatgaccgggtcctactacaact

SEQ ID NO: 18663 - DNA, 25 bp, Canis familiaris
atcagcccgcgggcagtttggcagt

SEQ ID NO: 18664 - DNA, 25 bp, Canis familiaris
atcgatccgcgaccaggtcggtggg

SEQ ID NO: 18665 - DNA, 25 bp, Canis familiaris
atcgtcatcagggccaagttcgtgg

SEQ ID NO: 18666 - DNA, 25 bp, Canis familiaris
atcagtgctagtgctcaacattcct

SEQ ID NO: 18667 - DNA, 25 bp, Canis familiaris
atcgttaattcctcattactgacaa

SEQ ID NO: 18668 - DNA, 25 bp, Canis familiaris
atcttcataattccaacaaacaaac

SEQ ID NO: 18669 - DNA, 25 bp, Canis familiaris
atcttccagattttcaacaaccgtc

SEQ ID NO: 18670 - DNA, 25 bp, Canis familiaris
atcttccctcgtacataagggcctc

SEQ ID NO: 18671 - DNA, 25 bp, Canis familiaris
atcacctcctcagtcaagacaggga

SEQ ID NO: 18672 - DNA, 25 bp, Canis familiaris
atcagaccccgtggaagcagtgcga

SEQ ID NO: 18673 - DNA, 25 bp, Canis familiaris
agccaccccggtgacgataagactt

SEQ ID NO: 18674 - DNA, 25 bp, Canis familiaris
atcccccgggctgaggtttgaaatg

SEQ ID NO: 18675 - DNA, 25 bp, Canis familiaris
atcaccccgaaccgaagcttgtata

SEQ ID NO: 18676 - DNA, 25 bp, Canis familiaris
atcacccccacagtgagaaccatgg

SEQ ID NO: 18677 - DNA, 25 bp, Canis familiaris
atcaccccagaagtgttagcctgtg

SEQ ID NO: 18678 - DNA, 25 bp, Canis familiaris
atcatcggccattcagttaacaatt

SEQ ID NO: 18679 - DNA, 25 bp, Canis familiaris
atcatctggcgctgcatgaggacaa

SEQ ID NO: 18680 - DNA, 25 bp, Canis familiaris
atcatcagcgcgcaagagggcagac

SEQ ID NO: 18681 - DNA, 25 bp, Canis familiaris
atcatctacggcaacacgctgcagt

SEQ ID NO: 18682 - DNA, 25 bp, Canis familiaris
atcatattcagcccatcacgctgtg

SEQ ID NO: 18683 - DNA, 25 bp, Canis familiaris
atcagcactcatgtatgtagagtgt

SEQ ID NO: 18684 - DNA, 25 bp, Canis familiaris
atcagccacatgttcagctaggtgt

SEQ ID NO: 18685 - DNA, 25 bp, Canis familiaris
atcagtcgatgggcactgggctgct

SEQ ID NO: 18686 - DNA, 25 bp, Canis familiaris
atcatgttatgagactggatcttac

SEQ ID NO: 18687 - DNA, 25 bp, Canis familiaris
atcatgtatgtgtccattggccttg

SEQ ID NO: 18688 - DNA, 25 bp, Canis familiaris
atcgatgagctgttacaggccctga

SEQ ID NO: 18689 - DNA, 25 bp, Canis familiaris
atcagagcacttaacacctctcgac

SEQ ID NO: 18690 - DNA, 25 bp, Canis familiaris
atctaggttacctactcttggcctt

SEQ ID NO: 18691 - DNA, 25 bp, Canis familiaris
atctgttttaactctgcttcttttc

SEQ ID NO: 18692 - DNA, 25 bp, Canis familiaris
actttctgaaactcctggacttcca

SEQ ID NO: 18693 - DNA, 25 bp, Canis familiaris
atcttcctgaaaataagggcctaca

SEQ ID NO: 18694 - DNA, 25 bp, Canis familiaris
atctttctaaggagcggccctcaag

SEQ ID NO: 18695 - DNA, 25 bp, Canis familiaris
atcttcctaagccacgaggatcgtc

SEQ ID NO: 18696 - DNA, 25 bp, Canis familiaris
atcttcgaaatttcagaggccgacc

SEQ ID NO: 18697 - DNA, 25 bp, Canis familiaris
atcttcgtagaatcattgttgtacc

SEQ ID NO: 18698 - DNA, 25 bp, Canis familiaris
atcttcagtatgatcctgtgctgtg

SEQ ID NO: 18699 - DNA, 25 bp, Canis familiaris
atcatctgcagttctaccagtctgt

SEQ ID NO: 18700 - DNA, 25 bp, Canis familiaris
atcccaattcttccagtggttcttc

SEQ ID NO: 18701 - DNA, 25 bp, Canis familiaris
atcagaaactttcacatcgtctccc

SEQ ID NO: 18702 - DNA, 25 bp, Canis familiaris
atcagaaactgtcaacatctctccc

SEQ ID NO: 18703 - DNA, 25 bp, Canis familiaris
atcagaaacgggtcacatctcttcc

SEQ ID NO: 18704 - DNA, 25 bp, Canis familiaris
atcagaggacggcctcgcatacttc

SEQ ID NO: 18705 - DNA, 25 bp, Canis familiaris
atcagatggattgcccgaactgtct

SEQ ID NO: 18706 - DNA, 25 bp, Canis familiaris
atcaggtgtcccaggaacttcgtct

SEQ ID NO: 18707 - DNA, 25 bp, Canis familiaris
atcagtttccacagacaaagccagg

SEQ ID NO: 18708 - DNA, 25 bp, Canis familiaris
atcagtttccgcatctacaagtctg

SEQ ID NO: 18709 - DNA, 25 bp, Canis familiaris
atcagttttctgatcaccaacttcc

SEQ ID NO: 18710 - DNA, 25 bp, Canis familiaris
atcagtcgtttgaaaccacgattca

SEQ ID NO: 18711 - DNA, 25 bp, Canis familiaris
atcagggttctgattcccgagaagg

SEQ ID NO: 18712 - DNA, 25 bp, Canis familiaris
atcggtgttcgacttccggatgagg

SEQ ID NO: 18713 - DNA, 25 bp, Canis familiaris
atctacttaccacttaatggctgat

SEQ ID NO: 18714 - DNA, 25 bp, Canis familiaris
atctacttaccaggcataacatttc

SEQ ID NO: 18715 - DNA, 25 bp, Canis familiaris
atctgaaccccagcaaaatttcaca

SEQ ID NO: 18716 - DNA, 25 bp, Canis familiaris
atgtcaatagcccaaaaactttcga

SEQ ID NO: 18717 - DNA, 25 bp, Canis familiaris
atctaacgcccaaagcaagtctgtg

SEQ ID NO: 18718 - DNA, 25 bp, Canis familiaris
atctgtcccccaaaaatgtcatgtt

SEQ ID NO: 18719 - DNA, 25 bp, Canis familiaris
atcatgtttccaagtaaaggcttta

SEQ ID NO: 18720 - DNA, 25 bp, Canis familiaris
atcatttttctcctaacattctgtt

SEQ ID NO: 18721 - DNA, 25 bp, Canis familiaris
atctttcttccttacataacttgac

SEQ ID NO: 18722 - DNA, 25 bp, Canis familiaris
atcttctttccttgagaacactttt

SEQ ID NO: 18723 - DNA, 25 bp, Canis familiaris
atctctttatactggaaaacacatc

SEQ ID NO: 18724 - DNA, 25 bp, Canis familiaris
atctgttttgtctctgaaattccac

SEQ ID NO: 18725 - DNA, 25 bp, Canis familiaris
atcagttttattttgcaattgccca

SEQ ID NO: 18726 - DNA, 25 bp, Canis familiaris
atcgtgccttttctaactggaactg

SEQ ID NO: 18727 - DNA, 25 bp, Canis familiaris
atctaccgggatctgaagctggaca

SEQ ID NO: 18728 - DNA, 25 bp, Canis familiaris
atctcccgggagttccacaggaaat

SEQ ID NO: 18729 - DNA, 25 bp, Canis familiaris
atccaggaggaacttccaaggtcca

SEQ ID NO: 18730 - DNA, 25 bp, Canis familiaris
accagggagtaggcccatagttcct

SEQ ID NO: 18731 - DNA, 25 bp, Canis familiaris
atctcggttctaggatccaacttcc

SEQ ID NO: 18732 - DNA, 25 bp, Canis familiaris
atcttgcgttgtatgttgaaaatca

SEQ ID NO: 18733 - DNA, 25 bp, Canis familiaris
atcttggtctcggtttggaaatgtt

SEQ ID NO: 18734 - DNA, 25 bp, Canis familiaris
atctttcctcgaaggttgagaactt

SEQ ID NO: 18735 - DNA, 25 bp, Canis familiaris
atcatttcatgtcatccagttggca

SEQ ID NO: 18736 - DNA, 25 bp, Canis familiaris
atcatcttctgtgtagccttgagcg

SEQ ID NO: 18737 - DNA, 25 bp, Canis familiaris
atcatctgtgggatcacctcggtgt

SEQ ID NO: 18738 - DNA, 25 bp, Canis familiaris
atcatatttatgaatcccgtcggta

SEQ ID NO: 18739 - DNA, 25 bp, Canis familiaris
atctgagtttgcatcaacagggtca

SEQ ID NO: 18740 - DNA, 25 bp, Canis familiaris
atcatggctactgttactggctcta

SEQ ID NO: 18741 - DNA, 25 bp, Canis familiaris
atctccaactggtgaatccctgaat

SEQ ID NO: 18742 - DNA, 25 bp, Canis familiaris
atcttaactgactgaatgaccctaa

SEQ ID NO: 18743 - DNA, 25 bp, Canis familiaris
atcttatcaatatggaaacatcctt

SEQ ID NO: 18744 - DNA, 25 bp, Canis familiaris
atcattacacttttgaggaattcta

SEQ ID NO: 18745 - DNA, 25 bp, Canis familiaris
atcatgctccaaatatttaaatatg

SEQ ID NO: 18746 - DNA, 25 bp, Canis familiaris
atcaccacactatagtaatacatgt

SEQ ID NO: 18747 - DNA, 25 bp, Canis familiaris
atcaccacaattgttgttcacattt

SEQ ID NO: 18748 - DNA, 25 bp, Canis familiaris
atctcattccttggacttacactct

SEQ ID NO: 18749 - DNA, 25 bp, Canis familiaris
atctattaccatgaactgacccctc

SEQ ID NO: 18750 - DNA, 25 bp, Canis familiaris
atctattcacgagagacacacacac

SEQ ID NO: 18751 - DNA, 25 bp, Canis familiaris
atctttcaatgactcgtacacccaa

SEQ ID NO: 18752 - DNA, 25 bp, Canis familiaris
atctgttgaattctctaataccaac

SEQ ID NO: 18753 - DNA, 25 bp, Canis familiaris
atctggtaaccactgctaataacta

SEQ ID NO: 18754 - DNA, 25 bp, Canis familiaris
atctcttagtcagctctttcaacaa

SEQ ID NO: 18755 - DNA, 25 bp, Canis familiaris
atctatgtagacactctttgttaca

SEQ ID NO: 18756 - DNA, 25 bp, Canis familiaris
atctgatgaaagctcggtctttaaa

SEQ ID NO: 18757 - DNA, 25 bp, Canis familiaris
atctcatgaaggtatggtatcctat

SEQ ID NO: 18758 - DNA, 25 bp, Canis familiaris
atcatcaacaggctcagttagctga

SEQ ID NO: 18759 - DNA, 25 bp, Canis familiaris
atcatagacaggtcaagttatggat

SEQ ID NO: 18760 - DNA, 25 bp, Canis familiaris
atctagagcagttacagtttccatt

SEQ ID NO: 18761 - DNA, 25 bp, Canis familiaris
atctagtggttaatttcccattcgt

SEQ ID NO: 18762 - DNA, 25 bp, Canis familiaris
atcttgtggatcctgcatttcttct

SEQ ID NO: 18763 - DNA, 25 bp, Canis familiaris
atctggggtctgaaatcttgctctt

SEQ ID NO: 18764 - DNA, 25 bp, Canis familiaris
atcagggagtctacttctccttctc

SEQ ID NO: 18765 - DNA, 25 bp, Canis familiaris
atcagggcaggccagctggccctgt

SEQ ID NO: 18766 - DNA, 25 bp, Canis familiaris
atcagctgggagggtgcgctccagc

SEQ ID NO: 18767 - DNA, 25 bp, Canis familiaris
atcaggggaactcgacgcgagatgt

SEQ ID NO: 18768 - DNA, 25 bp, Canis familiaris
atgctggggtcattgggggaggggg

SEQ ID NO: 18769 - DNA, 25 bp, Canis familiaris
atcagcgaggtctctgggtgcagga

SEQ ID NO: 18770 - DNA, 25 bp, Canis familiaris
atcagctcgagtggggacagtggga

SEQ ID NO: 18771 - DNA, 25 bp, Canis familiaris
atcagcgcgcaagagggcagaccga

SEQ ID NO: 18772 - DNA, 25 bp, Canis familiaris
atgcgtggcagagaggggacaggga

SEQ ID NO: 18773 - DNA, 25 bp, Canis familiaris
atcgaccactacctgggcaaggaga

SEQ ID NO: 18774 - DNA, 25 bp, Canis familiaris
atctgttccaacccagtcatagcat

SEQ ID NO: 18775 - DNA, 25 bp, Canis familiaris
atctttcggacatctgtgtgcagct

SEQ ID NO: 18776 - DNA, 25 bp, Canis familiaris
atcttttgggctttgcattaggtca

SEQ ID NO: 18777 - DNA, 25 bp, Canis familiaris
atctgatctgtcaccttgcttaaga

SEQ ID NO: 18778 - DNA, 25 bp, Canis familiaris
atcatgtacctctctagtcgaagtg

SEQ ID NO: 18779 - DNA, 25 bp, Canis familiaris
atctgaacagcctctgaaggtaatg

SEQ ID NO: 18780 - DNA, 25 bp, Canis familiaris
atctgaccaggttggatcaagaaat

SEQ ID NO: 18781 - DNA, 25 bp, Canis familiaris
gtccaaagtgtccgtaacaactccg

SEQ ID NO: 18782 - DNA, 25 bp, Canis familiaris
atcagcaaaagtcatgtaacatccc

SEQ ID NO: 18783 - DNA, 25 bp, Canis familiaris
atctgcacaagtgtttcaacctgtc

SEQ ID NO: 18784 - DNA, 25 bp, Canis familiaris
atctaacagatctcattcaccctaa

SEQ ID NO: 18785 - DNA, 25 bp, Canis familiaris
atctaagagtcgagcctccattaaa

SEQ ID NO: 18786 - DNA, 25 bp, Canis familiaris
atcatgattggctgggcctgctgct

SEQ ID NO: 18787 - DNA, 25 bp, Canis familiaris
atcataggagtgcggctgctggctt

SEQ ID NO: 18788 - DNA, 25 bp, Canis familiaris
atcatggggctgatgtggcctgtgg

SEQ ID NO: 18789 - DNA, 25 bp, Canis familiaris
atcttggggatgtggccacttggct

SEQ ID NO: 18790 - DNA, 25 bp, Canis familiaris
atcttgggcttgtagagacctcaga

SEQ ID NO: 18791 - DNA, 25 bp, Canis familiaris
atctatctgtgctatgccaggaccc

SEQ ID NO: 18792 - DNA, 25 bp, Canis familiaris
atcatcatcgtcgacagagacaccc

SEQ ID NO: 18793 - DNA, 25 bp, Canis familiaris
atcatccttcaaaatatagcacagc

SEQ ID NO: 18794 - DNA, 25 bp, Canis familiaris
atcatatatatagttatacacacac

SEQ ID NO: 18795 - DNA, 25 bp, Canis familiaris
atcatttctacttctaacacaccta

SEQ ID NO: 18796 - DNA, 25 bp, Canis familiaris
atctgatgtctgacaatctaacata

SEQ ID NO: 18797 - DNA, 25 bp, Canis familiaris
atcatgagtcatgggcatttacgaa

SEQ ID NO: 18798 - DNA, 25 bp, Canis familiaris
atcagatgctcagatcactgcctcg

SEQ ID NO: 18799 - DNA, 25 bp, Canis familiaris
atcatgtgtataatcaggctgctca

SEQ ID NO: 18800 - DNA, 25 bp, Canis familiaris
atcatgttgataatgctcggaattt

SEQ ID NO: 18801 - DNA, 25 bp, Canis familiaris
atcttcattatgaatgggaattcgt

SEQ ID NO: 18802 - DNA, 25 bp, Canis familiaris
atcatgggtcagaatgttgcagatt

SEQ ID NO: 18803 - DNA, 25 bp, Canis familiaris
atcgcctggaggttctcaactttat

SEQ ID NO: 18804 - DNA, 25 bp, Canis familiaris
atctgccgtgtttgttactgtttct

SEQ ID NO: 18805 - DNA, 25 bp, Canis familiaris
atctggctggaatggttgcgttttc

SEQ ID NO: 18806 - DNA, 25 bp, Canis familiaris
atctcgcttaaagccggtgatgctt

SEQ ID NO: 18807 - DNA, 25 bp, Canis familiaris
atcttcttaataccacgtgacgcat

SEQ ID NO: 18808 - DNA, 25 bp, Canis familiaris
atcttcttgaatcaattgaatcctt

SEQ ID NO: 18809 - DNA, 25 bp, Canis familiaris
atctttgtcccgatcataatccttc

SEQ ID NO: 18810 - DNA, 25 bp, Canis familiaris
atctctttcgggatctgatgacgag

SEQ ID NO: 18811 - DNA, 25 bp, Canis familiaris
atccgtgcccggaaatttcgcagta

SEQ ID NO: 18812 - DNA, 25 bp, Canis familiaris
atctcagtctccaggaaaccgaata

SEQ ID NO: 18813 - DNA, 25 bp, Canis familiaris
atcagactccctgtgagaagcctgc

SEQ ID NO: 18814 - DNA, 25 bp, Canis familiaris
atcaggctctccacagggagcttgc

SEQ ID NO: 18815 - DNA, 25 bp, Canis familiaris
atcaggacctacgaggtggcttcag

SEQ ID NO: 18816 - DNA, 25 bp, Canis familiaris
atcaggtcactagggtgctgcccaa

SEQ ID NO: 18817 - DNA, 25 bp, Canis familiaris
atcaggccatttggctgctgtgcac

SEQ ID NO: 18818 - DNA, 25 bp, Canis familiaris
atcaggccatttggctgctgtgcac

SEQ ID NO: 18819 - DNA, 25 bp, Canis familiaris
atcaggtctttggctttagggtcag

SEQ ID NO: 18820 - DNA, 25 bp, Canis familiaris
atcagagtgcggttctacgagggtc

SEQ ID NO: 18821 - DNA, 25 bp, Canis familiaris
atcagagtgcggttctacgagggtc

SEQ ID NO: 18822 - DNA, 25 bp, Canis familiaris
atcagagtgcggttctacgagggtc

SEQ ID NO: 18823 - DNA, 25 bp, Canis familiaris
atcagagtgcggttctacgagggtc

SEQ ID NO: 18824 - DNA, 25 bp, Canis familiaris
atcaggtcttgatcttagagttgtg

SEQ ID NO: 18825 - DNA, 25 bp, Canis familiaris
atcagagtccttgcggagcgtgtgg

SEQ ID NO: 18826 - DNA, 25 bp, Canis familiaris
atcagtctgccttgcagggagcctg

SEQ ID NO: 18827 - DNA, 25 bp, Canis familiaris
atcatgctatttttggcgatgcctg

SEQ ID NO: 18828 - DNA, 25 bp, Canis familiaris
atcatctggtctttctggatacagg

SEQ ID NO: 18829 - DNA, 25 bp, Canis familiaris
atcatcgacatctttcttgtacatc

SEQ ID NO: 18830 - DNA, 25 bp, Canis familiaris
atcatcaacatgctttctgtacatc

SEQ ID NO: 18831 - DNA, 25 bp, Canis familiaris
atcatcatactgcctatcttatata

SEQ ID NO: 18832 - DNA, 25 bp, Canis familiaris
atcagttctgtccatttaacaagtc

SEQ ID NO: 18833 - DNA, 25 bp, Canis familiaris
atcagattcttctatattgtacaga

SEQ ID NO: 18834 - DNA, 25 bp, Canis familiaris
atcatgactcgttctgtaggagaga

SEQ ID NO: 18835 - DNA, 25 bp, Canis familiaris
atcatgacctgaaccaaagggagac

SEQ ID NO: 18836 - DNA, 25 bp, Canis familiaris
atcatagcccagccaaaattggaga

SEQ ID NO: 18837 - DNA, 25 bp, Canis familiaris
atctacatcagaccaagacattgtg

SEQ ID NO: 18838 - DNA, 25 bp, Canis familiaris
atctatgcatgcacgggcacgttgt

SEQ ID NO: 18839 - DNA, 25 bp, Canis familiaris
atctatgcagcatggggtttttatt

SEQ ID NO: 18840 - DNA, 25 bp, Canis familiaris
atcatgatattgttggttttttgtt

SEQ ID NO: 18841 - DNA, 25 bp, Canis familiaris
atctcgaatgttctgattacttgtt

SEQ ID NO: 18842 - DNA, 25 bp, Canis familiaris
atctcgagtgccacagttactttgg

SEQ ID NO: 18843 - DNA, 25 bp, Canis familiaris
atctgctggtacataacttcttttg

SEQ ID NO: 18844 - DNA, 25 bp, Canis familiaris
atcatctggttttggcacttttttg

SEQ ID NO: 18845 - DNA, 25 bp, Canis familiaris
atcttagatttttcttttgttcatg

SEQ ID NO: 18846 - DNA, 25 bp, Canis familiaris
atcttattcttttgatttgtcctga

SEQ ID NO: 18847 - DNA, 25 bp, Canis familiaris
atctattttctgtgaattatcctga

SEQ ID NO: 18848 - DNA, 25 bp, Canis familiaris
atcagttgtttgtggtggtccttct

SEQ ID NO: 18849 - DNA, 25 bp, Canis familiaris
atcgggtattgggggtgtttgtgtg

SEQ ID NO: 18850 - DNA, 25 bp, Canis familiaris
atcgtcgctaagaaaggctttgctg

SEQ ID NO: 18851 - DNA, 25 bp, Canis familiaris
atgcctgcctcatggaattggtctg

SEQ ID NO: 18852 - DNA, 25 bp, Canis familiaris
atcaggcccaatcagtgctggatat

SEQ ID NO: 18853 - DNA, 25 bp, Canis familiaris
atcatccctttgcagtcaggaacct

SEQ ID NO: 18854 - DNA, 25 bp, Canis familiaris
atcatctcgcttatattgggcagac

SEQ ID NO: 18855 - DNA, 25 bp, Canis familiaris
atctccatgcatatggactggacta

SEQ ID NO: 18856 - DNA, 25 bp, Canis familiaris
atcggcatcgagctgacggattcgc

SEQ ID NO: 18857 - DNA, 25 bp, Canis familiaris
atcaggcacggattgaagaacttgg

SEQ ID NO: 18858 - DNA, 25 bp, Canis familiaris
atctggctatggaaaataccttggt

SEQ ID NO: 18859 - DNA, 25 bp, Canis familiaris
atcatggtaggacttcaaactcgtt

SEQ ID NO: 18860 - DNA, 25 bp, Canis familiaris
atcagtgaagattttagaagctttt

SEQ ID NO: 18861 - DNA, 25 bp, Canis familiaris
atcagttggcattcttggacgtcct

SEQ ID NO: 18862 - DNA, 25 bp, Canis familiaris
atcaggatgagcttctcgtgggcat

SEQ ID NO: 18863 - DNA, 25 bp, Canis familiaris
atcagtatgcattgtctcagggaac

SEQ ID NO: 18864 - DNA, 25 bp, Canis familiaris
atcatcccaatgatcagggcaacac

SEQ ID NO: 18865 - DNA, 25 bp, Canis familiaris
atctcggatacaatagaggcaaaga

SEQ ID NO: 18866 - DNA, 25 bp, Canis familiaris
atctcggatacaatagaggcaaaga

SEQ ID NO: 18867 - DNA, 25 bp, Canis familiaris
atcatcaacccaaacaagcaaagcg

SEQ ID NO: 18868 - DNA, 25 bp, Canis familiaris
atccacacccaagaagacttgcaaa

SEQ ID NO: 18869 - DNA, 25 bp, Canis familiaris
atctcaagcaccagcggaccttgga

SEQ ID NO: 18870 - DNA, 25 bp, Canis familiaris
atcatgcaagctggtggctggacca

SEQ ID NO: 18871 - DNA, 25 bp, Canis familiaris
atctcaacatcagtggcatcatagc

SEQ ID NO: 18872 - DNA, 25 bp, Canis familiaris
atctaacattgctgatcaagaaatt

SEQ ID NO: 18873 - DNA, 25 bp, Canis familiaris
atcatggagattgggccaaaaggct

SEQ ID NO: 18874 - DNA, 25 bp, Canis familiaris
atctggggtgagcccgagaagacca

SEQ ID NO: 18875 - DNA, 25 bp, Canis familiaris
ttctacggggcctgcaggaacccca

SEQ ID NO: 18876 - DNA, 25 bp, Canis familiaris
actacgtgggccgcaagcccaaggt

SEQ ID NO: 18877 - DNA, 25 bp, Canis familiaris
accccgaccagtgaagtccaatggt

SEQ ID NO: 18878 - DNA, 25 bp, Canis familiaris
atccctttcggtgtactctttgagg

SEQ ID NO: 18879 - DNA, 25 bp, Canis familiaris
atctcctttaagttttgtgcttaag

SEQ ID NO: 18880 - DNA, 25 bp, Canis familiaris
atcatgccatacaagcgtttatttt

SEQ ID NO: 18881 - DNA, 25 bp, Canis familiaris
atcaggatacaacctttattagaga

SEQ ID NO: 18882 - DNA, 25 bp, Canis familiaris
atcttgtacaatcgtccgatggggt

SEQ ID NO: 18883 - DNA, 25 bp, Canis familiaris
atctgaataagcttctccgggggtc

SEQ ID NO: 18884 - DNA, 25 bp, Canis familiaris
atctatcaagatggtgtccggggct

SEQ ID NO: 18885 - DNA, 25 bp, Canis familiaris
atcattaagtcggtccaggctgcca

SEQ ID NO: 18886 - DNA, 25 bp, Canis familiaris
atcatccaagtcctcatcaaggcag

SEQ ID NO: 18887 - DNA, 25 bp, Canis familiaris
atcatcaacactgccagcgtggctg

SEQ ID NO: 18888 - DNA, 25 bp, Canis familiaris
atcgcaaatgcttctagatcgactg

SEQ ID NO: 18889 - DNA, 25 bp, Canis familiaris
acgagaattccgataacgaacgaga

SEQ ID NO: 18890 - DNA, 25 bp, Canis familiaris
atctaggttcctatactcgtgccta

SEQ ID NO: 18891 - DNA, 25 bp, Canis familiaris
atctatttctccatctacattttaa

SEQ ID NO: 18892 - DNA, 25 bp, Canis familiaris
atcttttatcacacaattttcccat

SEQ ID NO: 18893 - DNA, 25 bp, Canis familiaris
atcttttatatcacactcttttctt

SEQ ID NO: 18894 - DNA, 25 bp, Canis familiaris
atctttttatcatcagttatcccat

SEQ ID NO: 18895 - DNA, 25 bp, Canis familiaris
atctttattatctgcagagtccaca

SEQ ID NO: 18896 - DNA, 25 bp, Canis familiaris
atctattttttcaatgggcccatcc

SEQ ID NO: 18897 - DNA, 25 bp, Canis familiaris
atcttctttgtatagtggcatcact

SEQ ID NO: 18898 - DNA, 25 bp, Canis familiaris
atcttttgtcttcatctgcatgata

SEQ ID NO: 18899 - DNA, 25 bp, Canis familiaris
atctttcttcttgccttgatgcaga

SEQ ID NO: 18900 - DNA, 25 bp, Canis familiaris
atcattttcattccacttgtgtaag

SEQ ID NO: 18901 - DNA, 25 bp, Canis familiaris
atctctcaattactcaatttgcaac

SEQ ID NO: 18902 - DNA, 25 bp, Canis familiaris
atctgtgagctctatgccaaagtgc

SEQ ID NO: 18903 - DNA, 25 bp, Canis familiaris
atctttgtcaggcaagcagtctgga

SEQ ID NO: 18904 - DNA, 25 bp, Canis familiaris
atcttcgtccagcgatggagtgtga

SEQ ID NO: 18905 - DNA, 25 bp, Canis familiaris
atcttcctgcccgttgaggatgagt

SEQ ID NO: 18906 - DNA, 25 bp, Canis familiaris
atccccaccctcagagggagctaca

SEQ ID NO: 18907 - DNA, 25 bp, Canis familiaris
atcctccgccgctggaagcggaact

SEQ ID NO: 18908 - DNA, 25 bp, Canis familiaris
atcccattcctgggaactcgggact

SEQ ID NO: 18909 - DNA, 25 bp, Canis familiaris
atctcctatcccagaacaggcgggt

SEQ ID NO: 18910 - DNA, 25 bp, Canis familiaris
atctttatcccagtgagttggctca

SEQ ID NO: 18911 - DNA, 25 bp, Canis familiaris
atctagttgcccttggtatcgacat

SEQ ID NO: 18912 - DNA, 25 bp, Canis familiaris
atctaggtggtcatgaatatctgca

SEQ ID NO: 18913 - DNA, 25 bp, Canis familiaris
atctaggatgctaagtgcacacact

SEQ ID NO: 18914 - DNA, 25 bp, Canis familiaris
atctagcacataacaggcactcaat

SEQ ID NO: 18915 - DNA, 25 bp, Canis familiaris
atctatgtgttccatgagcctcaaa

SEQ ID NO: 18916 - DNA, 25 bp, Canis familiaris
atcatgtggctggccatgagctcca

SEQ ID NO: 18917 - DNA, 25 bp, Canis familiaris
atcatctcctgggacatgtgcttcc

SEQ ID NO: 18918 - DNA, 25 bp, Canis familiaris
atcaggcgggaatgtgcctcccgtc

SEQ ID NO: 18919 - DNA, 25 bp, Canis familiaris
atcatggcagcggactggtgaccct

SEQ ID NO: 18920 - DNA, 25 bp, Canis familiaris
atcatgagccgctggatgtgtctcc

SEQ ID NO: 18921 - DNA, 25 bp, Canis familiaris
atcatgaccagaagcttgacgcacc

SEQ ID NO: 18922 - DNA, 25 bp, Canis familiaris
atcttgccatgagtgctatatgtga

SEQ ID NO: 18923 - DNA, 25 bp, Canis familiaris
atcttccagatgcttatggctcact

SEQ ID NO: 18924 - DNA, 25 bp, Canis familiaris
atctcttccagtcttgagctgatca

SEQ ID NO: 18925 - DNA, 25 bp, Canis familiaris
atcatcaaccagtctttcactaata

SEQ ID NO: 18926 - DNA, 25 bp, Canis familiaris
atcatcccacgtgtgcacttttaat

SEQ ID NO: 18927 - DNA, 25 bp, Canis familiaris
atctcccaagatgctacctgtagta

SEQ ID NO: 18928 - DNA, 25 bp, Canis familiaris
aggccctaatttctgtgtataatgt

SEQ ID NO: 18929 - DNA, 25 bp, Canis familiaris
atctgccgccaaattcttttaactt

SEQ ID NO: 18930 - DNA, 25 bp, Canis familiaris
atctcgtccgaggactttttacgat

SEQ ID NO: 18931 - DNA, 25 bp, Canis familiaris
atcttgtcccattatttctttacct

SEQ ID NO: 18932 - DNA, 25 bp, Canis familiaris
atcatttgtctctatttttcatcta

SEQ ID NO: 18933 - DNA, 25 bp, Canis familiaris
atcattcatttccatttatcaactg

SEQ ID NO: 18934 - DNA, 25 bp, Canis familiaris
atcatatcttttcattccatatcat

SEQ ID NO: 18935 - DNA, 25 bp, Canis familiaris
atctaccttctcttgtgtgcataat

SEQ ID NO: 18936 - DNA, 25 bp, Canis familiaris
atcttctcttttcagtcatcaatag

SEQ ID NO: 18937 - DNA, 25 bp, Canis familiaris
atctcccattttcatcctttagaat

SEQ ID NO: 18938 - DNA, 25 bp, Canis familiaris
atcttccattttccatgacctgtaa

SEQ ID NO: 18939 - DNA, 25 bp, Canis familiaris
atcttatctgactgaatgaccttaa

SEQ ID NO: 18940 - DNA, 25 bp, Canis familiaris
atcctaataggaattgaccttacca

SEQ ID NO: 18941 - DNA, 25 bp, Canis familiaris
atcccagaaaggaccacctgatccc

SEQ ID NO: 18942 - DNA, 25 bp, Canis familiaris
atctacaaaactggcataccgatga

SEQ ID NO: 18943 - DNA, 25 bp, Canis familiaris
atgctgacaaggttccaacagccaa

SEQ ID NO: 18944 - DNA, 25 bp, Canis familiaris
atcatcaaatactaccatacaccca

SEQ ID NO: 18945 - DNA, 25 bp, Canis familiaris
atcatcatcacatagacacgatcat

SEQ ID NO: 18946 - DNA, 25 bp, Canis familiaris
atctcagccatccagaaccaagaac

SEQ ID NO: 18947 - DNA, 25 bp, Canis familiaris
atcatcagccaaatataacatcaga

SEQ ID NO: 18948 - DNA, 25 bp, Canis familiaris
atcattgcagctaataaagctgata

SEQ ID NO: 18949 - DNA, 25 bp, Canis familiaris
atcttgagctgaatgtacagctgat

SEQ ID NO: 18950 - DNA, 25 bp, Canis familiaris
atctcatccacaatgaatgcactgt

SEQ ID NO: 18951 - DNA, 25 bp, Canis familiaris
atctcacatccaatgggaccaggtc

SEQ ID NO: 18952 - DNA, 25 bp, Canis familiaris
atcatcacatacaatcggacacgtc

SEQ ID NO: 18953 - DNA, 25 bp, Canis familiaris
atctatctgcactgctgacaacctc

SEQ ID NO: 18954 - DNA, 25 bp, Canis familiaris
atctattgcatctgtaactgtcaca

SEQ ID NO: 18955 - DNA, 25 bp, Canis familiaris
atcatatggcatctgtctttctcaa

SEQ ID NO: 18956 - DNA, 25 bp, Canis familiaris
atcatctgcttcatgtgttttcaag

SEQ ID NO: 18957 - DNA, 25 bp, Canis familiaris
atcattttcaattttctgcacaagc

SEQ ID NO: 18958 - DNA, 25 bp, Canis familiaris
atcatgattgtaatatatctctcca

SEQ ID NO: 18959 - DNA, 25 bp, Canis familiaris
atcatgatggtaactatctcgtccc

SEQ ID NO: 18960 - DNA, 25 bp, Canis familiaris
atctttgagactcaccagatccact

SEQ ID NO: 18961 - DNA, 25 bp, Canis familiaris
atcattctgagaccagactccttcc

SEQ ID NO: 18962 - DNA, 25 bp, Canis familiaris
atctacgagggctatgctctccctc

SEQ ID NO: 18963 - DNA, 25 bp, Canis familiaris
atctaccagtgtgagcttgcctatt

SEQ ID NO: 18964 - DNA, 25 bp, Canis familiaris
atctaccaggctgcaggtcaactcc

SEQ ID NO: 18965 - DNA, 25 bp, Canis familiaris
atcgaccagtgtggggacagacctg

SEQ ID NO: 18966 - DNA, 25 bp, Canis familiaris
atcgtacacattgacgactgtcacc

SEQ ID NO: 18967 - DNA, 25 bp, Canis familiaris
atcttcacctaatcatcgtgtcgcc

SEQ ID NO: 18968 - DNA, 25 bp, Canis familiaris
atcttcccatacactctgtgtgtgt

SEQ ID NO: 18969 - DNA, 25 bp, Canis familiaris
atcttccctactatgatggtgtgta

SEQ ID NO: 18970 - DNA, 25 bp, Canis familiaris
atcttctgattcctcttgggttgaa

SEQ ID NO: 18971 - DNA, 25 bp, Canis familiaris
atcattcgcatggctgtctttggct

SEQ ID NO: 18972 - DNA, 25 bp, Canis familiaris
atcttgctcttcagctaaggctagg

SEQ ID NO: 18973 - DNA, 25 bp, Canis familiaris
atcttgtcatttgtaatgccatgga

SEQ ID NO: 18974 - DNA, 25 bp, Canis familiaris
atcttctcattgtcttcaagcggtg

SEQ ID NO: 18975 - DNA, 25 bp, Canis familiaris
atcttgcactcgtttcagagctcga

SEQ ID NO: 18976 - DNA, 25 bp, Canis familiaris
atcttggctcaatgtgccagctcct

SEQ ID NO: 18977 - DNA, 25 bp, Canis familiaris
atctgtgagcactgttgacacccac

SEQ ID NO: 18978 - DNA, 25 bp, Canis familiaris
atctggaagcttgatgtcctccgtg

SEQ ID NO: 18979 - DNA, 25 bp, Canis familiaris
atcttcgcttctgtgtcttacagtg

SEQ ID NO: 18980 - DNA, 25 bp, Canis familiaris
atcattccttttaacatttcttgta

SEQ ID NO: 18981 - DNA, 25 bp, Canis familiaris
atcttcctctttctcaattgtttag

SEQ ID NO: 18982 - DNA, 25 bp, Canis familiaris
atctttttctatctgacttatttca

SEQ ID NO: 18983 - DNA, 25 bp, Canis familiaris
atcttttatcattcttttactttca

SEQ ID NO: 18984 - DNA, 25 bp, Canis familiaris
atctttctatactttcccaataaag

SEQ ID NO: 18985 - DNA, 25 bp, Canis familiaris
atcatgtatctttccatttccaata

SEQ ID NO: 18986 - DNA, 25 bp, Canis familiaris
atcttctggtatcatttcgctcaat

SEQ ID NO: 18987 - DNA, 25 bp, Canis familiaris
atcttgctggattgttgtgtttgaa

SEQ ID NO: 18988 - DNA, 25 bp, Canis familiaris
atcatcacttattgtcggggtgcaa

SEQ ID NO: 18989 - DNA, 25 bp, Canis familiaris
atctccatttcatggtggtccaatt

SEQ ID NO: 18990 - DNA, 25 bp, Canis familiaris
atcttcttatcatggctggcaggca

SEQ ID NO: 18991 - DNA, 25 bp, Canis familiaris
atctcatgataacagcccagcaggc

SEQ ID NO: 18992 - DNA, 25 bp, Canis familiaris
atgcgcatggacctagaccgcaggc

SEQ ID NO: 18993 - DNA, 25 bp, Canis familiaris
atctcaggagtcggacctgggtctg

SEQ ID NO: 18994 - DNA, 25 bp, Canis familiaris
atctagggctagtactttcgtctca

SEQ ID NO: 18995 - DNA, 25 bp, Canis familiaris
atcatagacctagttgcctttacca

SEQ ID NO: 18996 - DNA, 25 bp, Canis familiaris
atctagagcctttgacctctctatc

SEQ ID NO: 18997 - DNA, 25 bp, Canis familiaris
atcttatccttgtaacttctgagct

SEQ ID NO: 18998 - DNA, 25 bp, Canis familiaris
atctcatatttccatgaagctttga

SEQ ID NO: 18999 - DNA, 25 bp, Canis familiaris
atctaaatggaagtagctctgctaa

SEQ ID NO: 19000 - DNA, 25 bp, Canis familiaris
atctaatatgcagatatagctgaaa

SEQ ID NO: 19001 - DNA, 25 bp, Canis familiaris
atctatgtcgcacaatactgcgaac

SEQ ID NO: 19002 - DNA, 25 bp, Canis familiaris
atcatttcagcgtaatagtcgacgt

SEQ ID NO: 19003 - DNA, 25 bp, Canis familiaris
atcatctgctcactgacaatttccc

SEQ ID NO: 19004 - DNA, 25 bp, Canis familiaris
atctttcagtgccaatttctcgttc

SEQ ID NO: 19005 - DNA, 25 bp, Canis familiaris
atcttgtcgggcatcatgtccgtga

SEQ ID NO: 19006 - DNA, 25 bp, Canis familiaris
atctttccctgaatcatgtctttga

SEQ ID NO: 19007 - DNA, 25 bp, Canis familiaris
atcttgtccgtgaagatgtattgcc

SEQ ID NO: 19008 - DNA, 25 bp, Canis familiaris
atctttcttctgaactactgctgtc

SEQ ID NO: 19009 - DNA, 25 bp, Canis familiaris
atctttgcatttaaaagctttcact

SEQ ID NO: 19010 - DNA, 25 bp, Canis familiaris
atcttttctttatatgacttctcat

SEQ ID NO: 19011 - DNA, 25 bp, Canis familiaris
atctatttcctaaccagtcatttca

SEQ ID NO: 19012 - DNA, 25 bp, Canis familiaris
atctggttccttcctcagaatcatt

SEQ ID NO: 19013 - DNA, 25 bp, Canis familiaris
atcttcattccctctgataatatat

SEQ ID NO: 19014 - DNA, 25 bp, Canis familiaris
atcatctcatcaccacctatgaagt

SEQ ID NO: 19015 - DNA, 25 bp, Canis familiaris
atcatccatctgctcactggtgagt

SEQ ID NO: 19016 - DNA, 25 bp, Canis familiaris
atcatccatctgctcactggtgaga

SEQ ID NO: 19017 - DNA, 25 bp, Canis familiaris
atcatccatctgctcactggtgaga

SEQ ID NO: 19018 - DNA, 25 bp, Canis familiaris
atcatccatctgctcactggtgaga

SEQ ID NO: 19019 - DNA, 25 bp, Canis familiaris
atcatccatctgctcactggtgaga

SEQ ID NO: 19020 - DNA, 25 bp, Canis familiaris
atctactctgagggctgcgtggaga

SEQ ID NO: 19021 - DNA, 25 bp, Canis familiaris
atctactctgaggagctcttttgta

SEQ ID NO: 19022 - DNA, 25 bp, Canis familiaris
atcattgccaagctgcagcgtgtca

SEQ ID NO: 19023 - DNA, 25 bp, Canis familiaris
atcattggccaagcaggcagctcca

SEQ ID NO: 19024 - DNA, 25 bp, Canis familiaris
atcttgaccagagagagagccccca

SEQ ID NO: 19025 - DNA, 25 bp, Canis familiaris
atctgggcacgaaaggacactacaa

SEQ ID NO: 19026 - DNA, 25 bp, Canis familiaris
atcttggccagtacaaccactatcc

SEQ ID NO: 19027 - DNA, 25 bp, Canis familiaris
atgcggcggcgttattcccatgacc

SEQ ID NO: 19028 - DNA, 25 bp, Canis familiaris
atctatcagggcacacccctgagcc

SEQ ID NO: 19029 - DNA, 25 bp, Canis familiaris
atcattaggggaccctgcctgaatc

SEQ ID NO: 19030 - DNA, 25 bp, Canis familiaris
atctctagggggccaccattgatat

SEQ ID NO: 19031 - DNA, 25 bp, Canis familiaris
atcttggcccaataccagtgcatga

SEQ ID NO: 19032 - DNA, 25 bp, Canis familiaris
atctttgtacaacgactagtcatgc

SEQ ID NO: 19033 - DNA, 25 bp, Canis familiaris
atcttttccagacggcattttgcaa

SEQ ID NO: 19034 - DNA, 25 bp, Canis familiaris
atctttttctacactatttcaagtc

SEQ ID NO: 19035 - DNA, 25 bp, Canis familiaris
atctttttcccaccatgatgttata

SEQ ID NO: 19036 - DNA, 25 bp, Canis familiaris
atcattttatgctactgccttttaa

SEQ ID NO: 19037 - DNA, 25 bp, Canis familiaris
atcatttcattctgttttctgggac

SEQ ID NO: 19038 - DNA, 25 bp, Canis familiaris
atctttctattttgtttctcggtct

SEQ ID NO: 19039 - DNA, 25 bp, Canis familiaris
atctttccatttatttctatcttta

SEQ ID NO: 19040 - DNA, 25 bp, Canis familiaris
atcgttcgtgttgtggttttgtttg

SEQ ID NO: 19041 - DNA, 25 bp, Canis familiaris
atctggttagtttttggttgctgct

SEQ ID NO: 19042 - DNA, 25 bp, Canis familiaris
atctggtatttctggttttgctgga

SEQ ID NO: 19043 - DNA, 25 bp, Canis familiaris
atctactataactggctttcttggg

SEQ ID NO: 19044 - DNA, 25 bp, Canis familiaris
accactggtagcaggtttcaggatg

SEQ ID NO: 19045 - DNA, 25 bp, Canis familiaris
atgccaatggtagccctgaacagga

SEQ ID NO: 19046 - DNA, 25 bp, Canis familiaris
actgactgggccccacgaataggct

SEQ ID NO: 19047 - DNA, 25 bp, Canis familiaris
atcttctcggcctacatcaaggagg

SEQ ID NO: 19048 - DNA, 25 bp, Canis familiaris
atctactgctggctcaacgagaatt

SEQ ID NO: 19049 - DNA, 25 bp, Canis familiaris
atcatacatgctcttcacttgaaat

SEQ ID NO: 19050 - DNA, 25 bp, Canis familiaris
atctacatcttatacttgagcttcc

SEQ ID NO: 19051 - DNA, 25 bp, Canis familiaris
atcattctattttactggagcttct

SEQ ID NO: 19052 - DNA, 25 bp, Canis familiaris
atcttagatgtttccattggctgtc

SEQ ID NO: 19053 - DNA, 25 bp, Canis familiaris
atcgggatcttctaatcggcagtct

SEQ ID NO: 19054 - DNA, 25 bp, Canis familiaris
atctagaggctcctatatcaagagt

SEQ ID NO: 19055 - DNA, 25 bp, Canis familiaris
atctcaagagctgctgcagaaaagc

SEQ ID NO: 19056 - DNA, 25 bp, Canis familiaris
atcatcaaggtggccaaggagaaca

SEQ ID NO: 19057 - DNA, 25 bp, Canis familiaris
atcatcaaggtggccaaggaaaatg

SEQ ID NO: 19058 - DNA, 25 bp, Canis familiaris
atctcacattgtgcccggtaggagt

SEQ ID NO: 19059 - DNA, 25 bp, Canis familiaris
atctaatctgccccaggttcagtaa

SEQ ID NO: 19060 - DNA, 25 bp, Canis familiaris
atctcgatccccgtgggtagtcgag

SEQ ID NO: 19061 - DNA, 25 bp, Canis familiaris
atctccaccccgggggcttaagatg

SEQ ID NO: 19062 - DNA, 25 bp, Canis familiaris
atctcctccccagatttttatcaat

SEQ ID NO: 19063 - DNA, 25 bp, Canis familiaris
atctattgccccatggtgttaacat

SEQ ID NO: 19064 - DNA, 25 bp, Canis familiaris
atcgtctcgccagcatggcatgtta

SEQ ID NO: 19065 - DNA, 25 bp, Canis familiaris
atctgatcctgccaattggctaaaa

SEQ ID NO: 19066 - DNA, 25 bp, Canis familiaris
atctgcaaggctgttgagtccaata

SEQ ID NO: 19067 - DNA, 25 bp, Canis familiaris
atcatcaagatcatgttggttgcat

SEQ ID NO: 19068 - DNA, 25 bp, Canis familiaris
atctcaagaattcgttttgggaaat

SEQ ID NO: 19069 - DNA, 25 bp, Canis familiaris
atctcaagtgttctccactgggtaa

SEQ ID NO: 19070 - DNA, 25 bp, Canis familiaris
atctacggttgcccagttggtgaag

SEQ ID NO: 19071 - DNA, 25 bp, Canis familiaris
atcgacggaacgcgttggctaaccg

SEQ ID NO: 19072 - DNA, 25 bp, Canis familiaris
atcgggtgaacccgtcacgatagac

SEQ ID NO: 19073 - DNA, 25 bp, Canis familiaris
atctggctgtacacgagtatcgaaa

SEQ ID NO: 19074 - DNA, 25 bp, Canis familiaris
atctactttcttctctttcacaaag

SEQ ID NO: 19075 - DNA, 25 bp, Canis familiaris
atctacttctttcgtttgtatcatt

SEQ ID NO: 19076 - DNA, 25 bp, Canis familiaris
atcattatattttggcttttagctt

SEQ ID NO: 19077 - DNA, 25 bp, Canis familiaris
atctgttagatgtggctgttttgcg

SEQ ID NO: 19078 - DNA, 25 bp, Canis familiaris
atctttgaagtggaggcctttctta

SEQ ID NO: 19079 - DNA, 25 bp, Canis familiaris
atctctagaagtgagccctgtcctt

SEQ ID NO: 19080 - DNA, 25 bp, Canis familiaris
atcttagagagacatgcttctgtgc

SEQ ID NO: 19081 - DNA, 25 bp, Canis familiaris
atcttatatagcccatgccatctgc

SEQ ID NO: 19082 - DNA, 25 bp, Canis familiaris
atctatcatctatctatctcacatc

SEQ ID NO: 19083 - DNA, 25 bp, Canis familiaris
atcttcagcatgtgcggcctcatgc

SEQ ID NO: 19084 - DNA, 25 bp, Canis familiaris
atcttgagatgtcgcatcccgatcc

SEQ ID NO: 19085 - DNA, 25 bp, Canis familiaris
atcttgcagtgccatgacccaaatt

SEQ ID NO: 19086 - DNA, 25 bp, Canis familiaris
atctaggtagatcccataactttgg

SEQ ID NO: 19087 - DNA, 25 bp, Canis familiaris
atctcagggtgaccagataccggga

SEQ ID NO: 19088 - DNA, 25 bp, Canis familiaris
atctccaggtgcacgtacggtgggt

SEQ ID NO: 19089 - DNA, 25 bp, Canis familiaris
atctgctttggcactgtcaacgtga

SEQ ID NO: 19090 - DNA, 25 bp, Canis familiaris
atctcttcggatctgatgacgagga

SEQ ID NO: 19091 - DNA, 25 bp, Canis familiaris
atctcttcggatctgatgacgagga

SEQ ID NO: 19092 - DNA, 25 bp, Canis familiaris
atctcttcggatctgatgacgagga

SEQ ID NO: 19093 - DNA, 25 bp, Canis familiaris
atcctgtcggaaagaaggacgaatg

SEQ ID NO: 19094 - DNA, 25 bp, Canis familiaris
atcctgggctaatgaaggacctgtt

SEQ ID NO: 19095 - DNA, 25 bp, Canis familiaris
atcttgggctacactgaggaccagg

SEQ ID NO: 19096 - DNA, 25 bp, Canis familiaris
atcgtcggaacaccgtggtccggtg

SEQ ID NO: 19097 - DNA, 25 bp, Canis familiaris
atcattccgaacccggcaaggcggg

SEQ ID NO: 19098 - DNA, 25 bp, Canis familiaris
acttaccaaccgtgaagcacaagac

SEQ ID NO: 19099 - DNA, 25 bp, Canis familiaris
atctgtcccaaggccaaacaacgag

SEQ ID NO: 19100 - DNA, 25 bp, Canis familiaris
atctttccatttgcaacaacatgga

SEQ ID NO: 19101 - DNA, 25 bp, Canis familiaris
atctttcgtgccggaccacaaggca

SEQ ID NO: 19102 - DNA, 25 bp, Canis familiaris
atcattcatcctcccaactaaatta

SEQ ID NO: 19103 - DNA, 25 bp, Canis familiaris
atcattcaactcctaacatttaaaa

SEQ ID NO: 19104 - DNA, 25 bp, Canis familiaris
atcttaactcgaacatcatgtctaa

SEQ ID NO: 19105 - DNA, 25 bp, Canis familiaris
atcgattatctctccacgttatcat

SEQ ID NO: 19106 - DNA, 25 bp, Canis familiaris
atcgagtactaagtgtagttacaca

SEQ ID NO: 19107 - DNA, 25 bp, Canis familiaris
atcgaggtctactgtggggaacaca

SEQ ID NO: 19108 - DNA, 25 bp, Canis familiaris
atctgcggatcatactgggggccaa

SEQ ID NO: 19109 - DNA, 25 bp, Canis familiaris
atcccagatggctgtggggtcaaat

SEQ ID NO: 19110 - DNA, 25 bp, Canis familiaris
atcccaaggctttgaaggatgtgaa

SEQ ID NO: 19111 - DNA, 25 bp, Canis familiaris
atctaaaggcttggcatcaggcttg

SEQ ID NO: 19112 - DNA, 25 bp, Canis familiaris
atcttattggttggcatggcacata

SEQ ID NO: 19113 - DNA, 25 bp, Canis familiaris
atcttagggactggatgcctctgcc

SEQ ID NO: 19114 - DNA, 25 bp, Canis familiaris
atcttagggctacatcagctcccat

SEQ ID NO: 19115 - DNA, 25 bp, Canis familiaris
cacttagtagtagctaggccgattc

SEQ ID NO: 19116 - DNA, 25 bp, Canis familiaris
atcccagaggtaactaggccgatct

SEQ ID NO: 19117 - DNA, 25 bp, Canis familiaris
atctccgaggtgaagatggatgccg

SEQ ID NO: 19118 - DNA, 25 bp, Canis familiaris
atctccgatggggtatatggatcta

SEQ ID NO: 19119 - DNA, 25 bp, Canis familiaris
atctccgtgtgggtcacaggcagga

SEQ ID NO: 19120 - DNA, 25 bp, Canis familiaris
atctcatcattcaaggacaaggcac

SEQ ID NO: 19121 - DNA, 25 bp, Canis familiaris
atccatgttccccaatatggaccct

SEQ ID NO: 19122 - DNA, 25 bp, Canis familiaris
atctctgagctccttaatttgaccc

SEQ ID NO: 19123 - DNA, 25 bp, Canis familiaris
atctctgcctcaatcaaaatcaccc

SEQ ID NO: 19124 - DNA, 25 bp, Canis familiaris
atcttcagtttctgaatccctctgc

SEQ ID NO: 19125 - DNA, 25 bp, Canis familiaris
atcttggtgttctgaactgttcagt

SEQ ID NO: 19126 - DNA, 25 bp, Canis familiaris
atcttgggtgtcacaacgtcactat

SEQ ID NO: 19127 - DNA, 25 bp, Canis familiaris
atctgttgctgtgacccactgtaaa

SEQ ID NO: 19128 - DNA, 25 bp, Canis familiaris
atcttgcctgtggacaccttgagat

SEQ ID NO: 19129 - DNA, 25 bp, Canis familiaris
atcattgttgtaccaccttacatga

SEQ ID NO: 19130 - DNA, 25 bp, Canis familiaris
atcttggtgatatgccctatactgg

SEQ ID NO: 19131 - DNA, 25 bp, Canis familiaris
atcttgggtagactggctgacacat

SEQ ID NO: 19132 - DNA, 25 bp, Canis familiaris
atcattgggaagactagcgtgcatc

SEQ ID NO: 19133 - DNA, 25 bp, Canis familiaris
atctctggaagcccaagcggacaag

SEQ ID NO: 19134 - DNA, 25 bp, Canis familiaris
atctctgtatagaatcagacggagc

SEQ ID NO: 19135 - DNA, 25 bp, Canis familiaris
atcttctatatcttcaggcgcgcgg

SEQ ID NO: 19136 - DNA, 25 bp, Canis familiaris
atcttatatataacacccagggctc

SEQ ID NO: 19137 - DNA, 25 bp, Canis familiaris
atcgttatgtacaacccgagtccgt

SEQ ID NO: 19138 - DNA, 25 bp, Canis familiaris
atctgtccatttaaccatccaatct

SEQ ID NO: 19139 - DNA, 25 bp, Canis familiaris
atctctccatcaattaacactaacc

SEQ ID NO: 19140 - DNA, 25 bp, Canis familiaris
atctatcccttttaacatgacacct

SEQ ID NO: 19141 - DNA, 25 bp, Canis familiaris
atctgtcccttttaattagttgcct

SEQ ID NO: 19142 - DNA, 25 bp, Canis familiaris
acgtacatttttgttggttgcctat

SEQ ID NO: 19143 - DNA, 25 bp, Canis familiaris
atcggactttttgctgtgtgttcac

SEQ ID NO: 19144 - DNA, 25 bp, Canis familiaris
atcggttccctatcattgttacaca

SEQ ID NO: 19145 - DNA, 25 bp, Canis familiaris
atcttcttccatgagacactttacc

SEQ ID NO: 19146 - DNA, 25 bp, Canis familiaris
atcttttcatctgcgaattctttgt

SEQ ID NO: 19147 - DNA, 25 bp, Canis familiaris
atcttgttccttggacttgttctgc

SEQ ID NO: 19148 - DNA, 25 bp, Canis familiaris
atctttttctgagtactgatttctc

SEQ ID NO: 19149 - DNA, 25 bp, Canis familiaris
atctatttgggggcttgctttctct

SEQ ID NO: 19150 - DNA, 25 bp, Canis familiaris
atctgtttcggggttgtcattgttg

SEQ ID NO: 19151 - DNA, 25 bp, Canis familiaris
atctctttcaaacatttcagttttc

SEQ ID NO: 19152 - DNA, 25 bp, Canis familiaris
atcttttactagcttgacgtgtgga

SEQ ID NO: 19153 - DNA, 25 bp, Canis familiaris
atctttctaaagactatcccttgga

SEQ ID NO: 19154 - DNA, 25 bp, Canis familiaris
atctttttacaactcatccgactgg

SEQ ID NO: 19155 - DNA, 25 bp, Canis familiaris
atctgaacctgacgactcatcacga

SEQ ID NO: 19156 - DNA, 25 bp, Canis familiaris
atctgaagcgtgtagcagctccaaa

SEQ ID NO: 19157 - DNA, 25 bp, Canis familiaris
atctaggttgattagtacattcact

SEQ ID NO: 19158 - DNA, 25 bp, Canis familiaris
atctacgctattttctaatgcccta

SEQ ID NO: 19159 - DNA, 25 bp, Canis familiaris
atctaccttgtttgtatagccactg

SEQ ID NO: 19160 - DNA, 25 bp, Canis familiaris
atcttcactagtaatgataagcaga

SEQ ID NO: 19161 - DNA, 25 bp, Canis familiaris
atcttcctggagggtcatcagcagc

SEQ ID NO: 19162 - DNA, 25 bp, Canis familiaris
atcttgcctggaggtctcgatagaa

SEQ ID NO: 19163 - DNA, 25 bp, Canis familiaris
atcttcgggatggtcatgaaaaaaa

SEQ ID NO: 19164 - DNA, 25 bp, Canis familiaris
atcttcccagtgtttgtgaaataaa

SEQ ID NO: 19165 - DNA, 25 bp, Canis familiaris
atcttctcaacttgccttaaatatt

SEQ ID NO: 19166 - DNA, 25 bp, Canis familiaris
atctactcgcactgctgactacaat

SEQ ID NO: 19167 - DNA, 25 bp, Canis familiaris
atctacatacgcaactacacacata

SEQ ID NO: 19168 - DNA, 25 bp, Canis familiaris
atctcacagacggacgactgctgat

SEQ ID NO: 19169 - DNA, 25 bp, Canis familiaris
atctcactggcttaagactgcttac

SEQ ID NO: 19170 - DNA, 25 bp, Canis familiaris
atctcactggcttaagactgcttac

SEQ ID NO: 19171 - DNA, 25 bp, Canis familiaris
atcccatggccactcaagttgatta

SEQ ID NO: 19172 - DNA, 25 bp, Canis familiaris
atcttgcatccccaaaggtcattgt

SEQ ID NO: 19173 - DNA, 25 bp, Canis familiaris
atctctcaccaacaaattctattct

SEQ ID NO: 19174 - DNA, 25 bp, Canis familiaris
atctactctaactctttttctttat

SEQ ID NO: 19175 - DNA, 25 bp, Canis familiaris
atctgtaaacactcttttcgttctt

SEQ ID NO: 19176 - DNA, 25 bp, Canis familiaris
atcttaactgcagacttttcacctc

SEQ ID NO: 19177 - DNA, 25 bp, Canis familiaris
atctaaactgttttgtttcagcagc

SEQ ID NO: 19178 - DNA, 25 bp, Canis familiaris
atctaaactgttttgtttcagcagc

SEQ ID NO: 19179 - DNA, 25 bp, Canis familiaris
atctcacaaggttcttcttttcagt

SEQ ID NO: 19180 - DNA, 25 bp, Canis familiaris
atctcgccaggtgggtttgttctgt

SEQ ID NO: 19181 - DNA, 25 bp, Canis familiaris
atctggcaaggtggggttatggtat

SEQ ID NO: 19182 - DNA, 25 bp, Canis familiaris
atctggtatcgtgtgttaatggttt

SEQ ID NO: 19183 - DNA, 25 bp, Canis familiaris
atctggatgaagccatttctaagca

SEQ ID NO: 19184 - DNA, 25 bp, Canis familiaris
atctcagagacgcatattctcgaga

SEQ ID NO: 19185 - DNA, 25 bp, Canis familiaris
atctaggacccatatctcaacacaa

SEQ ID NO: 19186 - DNA, 25 bp, Canis familiaris
atcctggaccgatactacacaccaa

SEQ ID NO: 19187 - DNA, 25 bp, Canis familiaris
atccggaccaattaccactgacaga

SEQ ID NO: 19188 - DNA, 25 bp, Canis familiaris
atcgtccagaataccaccactgaag

SEQ ID NO: 19189 - DNA, 25 bp, Canis familiaris
atcttgccacttgcaacaacatgga

SEQ ID NO: 19190 - DNA, 25 bp, Canis familiaris
atcttcacatttgcaccaacataga

SEQ ID NO: 19191 - DNA, 25 bp, Canis familiaris
atcttcgtatcaatcccatagcaaa

SEQ ID NO: 19192 - DNA, 25 bp, Canis familiaris
atctatctatacctgcttcaaagaa

SEQ ID NO: 19193 - DNA, 25 bp, Canis familiaris
atctcattattgtcatcttaaacta

SEQ ID NO: 19194 - DNA, 25 bp, Canis familiaris
atccatactatgtcctaactactgt

SEQ ID NO: 19195 - DNA, 25 bp, Canis familiaris
atctcgacatgtacattaacaactt

SEQ ID NO: 19196 - DNA, 25 bp, Canis familiaris
atctctgggttcattcaatcagttg

SEQ ID NO: 19197 - DNA, 25 bp, Canis familiaris
atctctctctttagtccattagttg

SEQ ID NO: 19198 - DNA, 25 bp, Canis familiaris
atcgtgacttgctagtagattagtt

SEQ ID NO: 19199 - DNA, 25 bp, Canis familiaris
atctctgactgcctgaagcggtttt

SEQ ID NO: 19200 - DNA, 25 bp, Canis familiaris
atctctgcgtgccttaggtttgagg

SEQ ID NO: 19201 - DNA, 25 bp, Canis familiaris
atcttcaggtgtaaagtttgcaaat

SEQ ID NO: 19202 - DNA, 25 bp, Canis familiaris
atctgatttcttcagttattcaaat

SEQ ID NO: 19203 - DNA, 25 bp, Canis familiaris
atctattattctccgttcttctgat

SEQ ID NO: 19204 - DNA, 25 bp, Canis familiaris
atctaattactgactatctcttctt

SEQ ID NO: 19205 - DNA, 25 bp, Canis familiaris
atctcactctgcaagacatttctcc

SEQ ID NO: 19206 - DNA, 25 bp, Canis familiaris
atctacctagcaactgtcttcatca

SEQ ID NO: 19207 - DNA, 25 bp, Canis familiaris
atctagactgacttgttcttcttcc

SEQ ID NO: 19208 - DNA, 25 bp, Canis familiaris
atctatgcaatattcttacttctcg

SEQ ID NO: 19209 - DNA, 25 bp, Canis familiaris
atctatgcacatatgtctcatctgt

SEQ ID NO: 19210 - DNA, 25 bp, Canis familiaris
atctatgctcagttgtgttctgtcc

SEQ ID NO: 19211 - DNA, 25 bp, Canis familiaris
atctgagtcagtgtttctagttctt

SEQ ID NO: 19212 - DNA, 25 bp, Canis familiaris
atctagtgtgtgttacttttgcttt

SEQ ID NO: 19213 - DNA, 25 bp, Canis familiaris
atctgaagatggacccctttgtgtt

SEQ ID NO: 19214 - DNA, 25 bp, Canis familiaris
atctggattctgatgcccaagggtt

SEQ ID NO: 19215 - DNA, 25 bp, Canis familiaris
atctggattcgaatcccagctctct

SEQ ID NO: 19216 - DNA, 25 bp, Canis familiaris
atctagttctagccaatcacgctct

SEQ ID NO: 19217 - DNA, 25 bp, Canis familiaris
atcttctttgagccacagcatctct

SEQ ID NO: 19218 - DNA, 25 bp, Canis familiaris
atctatgttaggcccagctctgggc

SEQ ID NO: 19219 - DNA, 25 bp, Canis familiaris
atctcatttgagcctcatatctgct

SEQ ID NO: 19220 - DNA, 25 bp, Canis familiaris
atctcaggctgactgtgctgtcctg

SEQ ID NO: 19221 - DNA, 25 bp, Canis familiaris
atctcatggaagtatggatcctgat

SEQ ID NO: 19222 - DNA, 25 bp, Canis familiaris
atctctcgatcgtcagttcacggac

SEQ ID NO: 19223 - DNA, 25 bp, Canis familiaris
atctctgctgtggtcatgtcatatc

SEQ ID NO: 19224 - DNA, 25 bp, Canis familiaris
atctatgtgtctgtgttcatctgta

SEQ ID NO: 19225 - DNA, 25 bp, Canis familiaris
atctattgtcatctatgttctgttc

SEQ ID NO: 19226 - DNA, 25 bp, Canis familiaris
atctcatagatctcttgatttccat

SEQ ID NO: 19227 - DNA, 25 bp, Canis familiaris
atctatcaacagactatttctccaa

SEQ ID NO: 19228 - DNA, 25 bp, Canis familiaris
atcttcagcacagtcttcttacaca

SEQ ID NO: 19229 - DNA, 25 bp, Canis familiaris
atcttcacagaccactctggcagac

SEQ ID NO: 19230 - DNA, 25 bp, Canis familiaris
atctttcagaccttctgccaatggg

SEQ ID NO: 19231 - DNA, 25 bp, Canis familiaris
atctatgtagaagtcctggaatgca

SEQ ID NO: 19232 - DNA, 25 bp, Canis familiaris
atctattgatgaacacttggactgc

SEQ ID NO: 19233 - DNA, 25 bp, Canis familiaris
atctaatgattctatgcttgggctg

SEQ ID NO: 19234 - DNA, 25 bp, Canis familiaris
atctaattgttcgtgtggtgtccca

SEQ ID NO: 19235 - DNA, 25 bp, Canis familiaris
atctactctttgagctggttaccga

SEQ ID NO: 19236 - DNA, 25 bp, Canis familiaris
atctgcccctttcctggtaaacaga

SEQ ID NO: 19237 - DNA, 25 bp, Canis familiaris
atctatcctttctctggtgacaaaa

SEQ ID NO: 19238 - DNA, 25 bp, Canis familiaris
atctacactaactacgaggcaggaa

SEQ ID NO: 19239 - DNA, 25 bp, Canis familiaris
atctaagtgaactcgcgctaccaat

SEQ ID NO: 19240 - DNA, 25 bp, Canis familiaris
atctcaagtgagtcatctcaggtga

SEQ ID NO: 19241 - DNA, 25 bp, Canis familiaris
atctactgtgactctatgttgttct

SEQ ID NO: 19242 - DNA, 25 bp, Canis familiaris
atctccagcttatgctatgagcttt

SEQ ID NO: 19243 - DNA, 25 bp, Canis familiaris
atctcagcgttccactcatggatgt

SEQ ID NO: 19244 - DNA, 25 bp, Canis familiaris
atctcaccactccagctgttggtgg

SEQ ID NO: 19245 - DNA, 25 bp, Canis familiaris
atctccgatctcaggttgagtccag

SEQ ID NO: 19246 - DNA, 25 bp, Canis familiaris
atctgccgtccttttaagatgccag

SEQ ID NO: 19247 - DNA, 25 bp, Canis familiaris
atctgtcctccattttaactgggat

SEQ ID NO: 19248 - DNA, 25 bp, Canis familiaris
atctggccaagatcttcgagcgggt

SEQ ID NO: 19249 - DNA, 25 bp, Canis familiaris
atctgggaataccctcggttcgata

SEQ ID NO: 19250 - DNA, 25 bp, Canis familiaris
atctttaaactcttgctggatttaa

SEQ ID NO: 19251 - DNA, 25 bp, Canis familiaris
atctttccaatttcatgttctttaa

SEQ ID NO: 19252 - DNA, 25 bp, Canis familiaris
atctttctcttatctgttatttatc

SEQ ID NO: 19253 - DNA, 25 bp, Canis familiaris
atctttctcttatctgttatttatc

SEQ ID NO: 19254 - DNA, 25 bp, Canis familiaris
atctttctcttatctgttatttatc

SEQ ID NO: 19255 - DNA, 25 bp, Canis familiaris
atctttctgttaactactatcttga

SEQ ID NO: 19256 - DNA, 25 bp, Canis familiaris
atctttgctttaaatctgtcctgta

SEQ ID NO: 19257 - DNA, 25 bp, Canis familiaris
atctttgtagatatcttcaggtgta

SEQ ID NO: 19258 - DNA, 25 bp, Canis familiaris
atctttgggatcctctcagcagagg

SEQ ID NO: 19259 - DNA, 25 bp, Canis familiaris
atctttgtgggcctccagagaattg

SEQ ID NO: 19260 - DNA, 25 bp, Canis familiaris
atcttttgggctaccaggacaggct

SEQ ID NO: 19261 - DNA, 25 bp, Canis familiaris
atctttggctacacaaggacaggct

SEQ ID NO: 19262 - DNA, 25 bp, Canis familiaris
atctcatctggatctacaaggacga

SEQ ID NO: 19263 - DNA, 25 bp, Canis familiaris
atctctctgtgcttctggagggaag

SEQ ID NO: 19264 - DNA, 25 bp, Canis familiaris
atctctcttccacgggatctggatg

SEQ ID NO: 19265 - DNA, 25 bp, Canis familiaris
atctcttttccacgaatctgtatca

SEQ ID NO: 19266 - DNA, 25 bp, Canis familiaris
atctcatttttaacatatcttccaa

SEQ ID NO: 19267 - DNA, 25 bp, Canis familiaris
atctagttcataagactatctatcc

SEQ ID NO: 19268 - DNA, 25 bp, Canis familiaris
atctacatctcattgtgacttctaa

SEQ ID NO: 19269 - DNA, 25 bp, Canis familiaris
atctatattccattaccatcagcaa

SEQ ID NO: 19270 - DNA, 25 bp, Canis familiaris
atctacatcaccttacttatgctga

SEQ ID NO: 19271 - DNA, 25 bp, Canis familiaris
atctatgctgcaggcttttttggct

SEQ ID NO: 19272 - DNA, 25 bp, Canis familiaris
atctagccgccaatattttattctg

SEQ ID NO: 19273 - DNA, 25 bp, Canis familiaris
atctcactccctaactaaattttct

SEQ ID NO: 19274 - DNA, 25 bp, Canis familiaris
atctggctcggttccatggagattt

SEQ ID NO: 19275 - DNA, 25 bp, Canis familiaris
atctctgtccgatctagtatgttgg

SEQ ID NO: 19276 - DNA, 25 bp, Canis familiaris
atctctggccgaatctagagccttc

SEQ ID NO: 19277 - DNA, 25 bp, Canis familiaris
atctctgtgactgaatggactttgc

SEQ ID NO: 19278 - DNA, 25 bp, Canis familiaris
atctggtggctttaggagcattgta

SEQ ID NO: 19279 - DNA, 25 bp, Canis familiaris
atctgtgtgtgtgcatatgaatgca

SEQ ID NO: 19280 - DNA, 25 bp, Canis familiaris
atcggggatgacaggatgctacttc

SEQ ID NO: 19281 - DNA, 25 bp, Canis familiaris
atcggtggatacttgggctgttttt

SEQ ID NO: 19282 - DNA, 25 bp, Canis familiaris
atctgtttgaactggtctactttgt

SEQ ID NO: 19283 - DNA, 25 bp, Canis familiaris
atctctgcttaagttgtaacctttt

SEQ ID NO: 19284 - DNA, 25 bp, Canis familiaris
atctagccttgatgctgtaacctgt

SEQ ID NO: 19285 - DNA, 25 bp, Canis familiaris
atcgactctctttcggaatccagtc

SEQ ID NO: 19286 - DNA, 25 bp, Canis familiaris
atcggagttcactggaatactgcat

SEQ ID NO: 19287 - DNA, 25 bp, Canis familiaris
atcgggttcccggcataaagcctgt

SEQ ID NO: 19288 - DNA, 25 bp, Canis familiaris
atctgggtggctcaggcaataaagt

SEQ ID NO: 19289 - DNA, 25 bp, Canis familiaris
atctggtctttctggatacagggta

SEQ ID NO: 19290 - DNA, 25 bp, Canis familiaris
atctttgcgttggggagaaagggca

SEQ ID NO: 19291 - DNA, 25 bp, Canis familiaris
atctgttctgtatgggaggccgggt

SEQ ID NO: 19292 - DNA, 25 bp, Canis familiaris
atctgcttttatgggtgaacttggc

SEQ ID NO: 19293 - DNA, 25 bp, Canis familiaris
atctcaccgtgaatgggacctgtgg

SEQ ID NO: 19294 - DNA, 25 bp, Canis familiaris
atctatcttgtgcgtgtgacacgag

SEQ ID NO: 19295 - DNA, 25 bp, Canis familiaris
atctttgttgtgtctctgactcaga

SEQ ID NO: 19296 - DNA, 25 bp, Canis familiaris
atcgtgatgggccacatctaccata

SEQ ID NO: 19297 - DNA, 25 bp, Canis familiaris
atctgtgggtgcctttggccaaatg

SEQ ID NO: 19298 - DNA, 25 bp, Canis familiaris
atctggggatccaatatgaccccag

SEQ ID NO: 19299 - DNA, 25 bp, Canis familiaris
atctacggactttcagaactcagca

SEQ ID NO: 19300 - DNA, 25 bp, Canis familiaris
atctgacgcagagggttgaaccaaa

SEQ ID NO: 19301 - DNA, 25 bp, Canis familiaris
atctgagggaggctgttgaccacgg

SEQ ID NO: 19302 - DNA, 25 bp, Canis familiaris
atcgagggacaggcaggcttaccag

SEQ ID NO: 19303 - DNA, 25 bp, Canis familiaris
atctggaggactcaggccatactct

SEQ ID NO: 19304 - DNA, 25 bp, Canis familiaris
atcgggatgggtcgcaccatcctct

SEQ ID NO: 19305 - DNA, 25 bp, Canis familiaris
atcgagaacagcgtcatgacctcct

SEQ ID NO: 19306 - DNA, 25 bp, Canis familiaris
atcccaaacccacaatccattgtga

SEQ ID NO: 19307 - DNA, 25 bp, Canis familiaris
atgtccaaatctctatattcccggt

SEQ ID NO: 19308 - DNA, 25 bp, Canis familiaris
atctcccttctgcttcaaggggcgt

SEQ ID NO: 19309 - DNA, 25 bp, Canis familiaris
atctacattcctgttgaagggacca

SEQ ID NO: 19310 - DNA, 25 bp, Canis familiaris
atctacagccctgggaagcgtggag

SEQ ID NO: 19311 - DNA, 25 bp, Canis familiaris
atcccagcactttgggaggccgagg

SEQ ID NO: 19312 - DNA, 25 bp, Canis familiaris
atcctccggaggcccaggccggagg

SEQ ID NO: 19313 - DNA, 25 bp, Canis familiaris
atctctccaagatcccagaagggga

SEQ ID NO: 19314 - DNA, 25 bp, Canis familiaris
atctcccagagtgccggacaggggt

SEQ ID NO: 19315 - DNA, 25 bp, Canis familiaris
atctccccaaaatgtatagtgcctt

SEQ ID NO: 19316 - DNA, 25 bp, Canis familiaris
atctcctccaggcttgatttgggca

SEQ ID NO: 19317 - DNA, 25 bp, Canis familiaris
atctcctaggagctcagcaatctga

SEQ ID NO: 19318 - DNA, 25 bp, Canis familiaris
atctcaccaggacgaggccatgtca

SEQ ID NO: 19319 - DNA, 25 bp, Canis familiaris
atctcactcaggtatggtgatcata

SEQ ID NO: 19320 - DNA, 25 bp, Canis familiaris
atctatgtgcaggagaaggatgatg

SEQ ID NO: 19321 - DNA, 25 bp, Canis familiaris
atctctgctcaggctgctggaattg

SEQ ID NO: 19322 - DNA, 25 bp, Canis familiaris
atctcatcagcatctgggaatctgc

SEQ ID NO: 19323 - DNA, 25 bp, Canis familiaris
atctgtcagtgagtcaagctttgcg

SEQ ID NO: 19324 - DNA, 25 bp, Canis familiaris
atctgctgtgtattaatgctgctgg

SEQ ID NO: 19325 - DNA, 25 bp, Canis familiaris
atctgcagttctaccagtctgtggt

SEQ ID NO: 19326 - DNA, 25 bp, Canis familiaris
atctcagttctgttcatggcttttt

SEQ ID NO: 19327 - DNA, 25 bp, Canis familiaris
atctacacctggatactgcctgtat

SEQ ID NO: 19328 - DNA, 25 bp, Canis familiaris
atctagcacgtacgtacgtctgatg

SEQ ID NO: 19329 - DNA, 25 bp, Canis familiaris
atctagcattgtaccacaacttagt

SEQ ID NO: 19330 - DNA, 25 bp, Canis familiaris
atctagaatataacaccgcttctgt

SEQ ID NO: 19331 - DNA, 25 bp, Canis familiaris
atctcgatagaaaccctgttttatt

SEQ ID NO: 19332 - DNA, 25 bp, Canis familiaris
atgcctttagagaccctgttcttaa

SEQ ID NO: 19333 - DNA, 25 bp, Canis familiaris
atctctagataacaccatttcccaa

SEQ ID NO: 19334 - DNA, 25 bp, Canis familiaris
atctcaatgaaatcaaaccccctat

SEQ ID NO: 19335 - DNA, 25 bp, Canis familiaris
atctaatatcgcagcataaccccac

SEQ ID NO: 19336 - DNA, 25 bp, Canis familiaris
atctacagtctgggaaatcacaaat

SEQ ID NO: 19337 - DNA, 25 bp, Canis familiaris
atctctcagatgctcaaaaccaagg

SEQ ID NO: 19338 - DNA, 25 bp, Canis familiaris
atcgccagcttcgataaggccaagc

SEQ ID NO: 19339 - DNA, 25 bp, Canis familiaris
atcggcctgacgcaaagcgcagacc

SEQ ID NO: 19340 - DNA, 25 bp, Canis familiaris
atcgggctcccggtgcatggagcct

SEQ ID NO: 19341 - DNA, 25 bp, Canis familiaris
atcgatggcatcctgagggctggcc

SEQ ID NO: 19342 - DNA, 25 bp, Canis familiaris
atctgatttctgccaggagcctcat

SEQ ID NO: 19343 - DNA, 25 bp, Canis familiaris
atctgcatgtattggctgtggtcct

SEQ ID NO: 19344 - DNA, 25 bp, Canis familiaris
atctgagatttggatggggccttca

SEQ ID NO: 19345 - DNA, 25 bp, Canis familiaris
atcggattcatcatcggatccctca

SEQ ID NO: 19346 - DNA, 25 bp, Canis familiaris
atcggagccatcatcgcgccaaatt

SEQ ID NO: 19347 - DNA, 25 bp, Canis familiaris
atcgggtctagagcccacatatcca

SEQ ID NO: 19348 - DNA, 25 bp, Canis familiaris
atcgggccacgagcccacaagatac

SEQ ID NO: 19349 - DNA, 25 bp, Canis familiaris
atcgagctgccccttaaagaagaaa

SEQ ID NO: 19350 - DNA, 25 bp, Canis familiaris
atcggctacctcattgcaggaagaa

SEQ ID NO: 19351 - DNA, 25 bp, Canis familiaris
atctgagcccgccaaggaggaggat

SEQ ID NO: 19352 - DNA, 25 bp, Canis familiaris
atctgagatcctcgcacagagatgg

SEQ ID NO: 19353 - DNA, 25 bp, Canis familiaris
atctagatcatctgaggaagaataa

SEQ ID NO: 19354 - DNA, 25 bp, Canis familiaris
atctccttcatggaaaagatgtaat

SEQ ID NO: 19355 - DNA, 25 bp, Canis familiaris
atctccaccatgataaacatggaac

SEQ ID NO: 19356 - DNA, 25 bp, Canis familiaris
atctgctaccaaatacatcctggat

SEQ ID NO: 19357 - DNA, 25 bp, Canis familiaris
atctggacacaatgaccttggcacc

SEQ ID NO: 19358 - DNA, 25 bp, Canis familiaris
atctgtgacctatgatgactcctgc

SEQ ID NO: 19359 - DNA, 25 bp, Canis familiaris
atctgccataaattgaaccacctga

SEQ ID NO: 19360 - DNA, 25 bp, Canis familiaris
atctccattccctaaataccttgag

SEQ ID NO: 19361 - DNA, 25 bp, Canis familiaris
atctccgtccagatcaaacctggag

SEQ ID NO: 19362 - DNA, 25 bp, Canis familiaris
atccgagtgtaaacaaccgctccag

SEQ ID NO: 19363 - DNA, 25 bp, Canis familiaris
atgccgtttaaataattgcctacca

SEQ ID NO: 19364 - DNA, 25 bp, Canis familiaris
atcggatttcaataattacacacac

SEQ ID NO: 19365 - DNA, 25 bp, Canis familiaris
atctggacagtgcacaagttaaata

SEQ ID NO: 19366 - DNA, 25 bp, Canis familiaris
atctctacggtaacattgtcaacaa

SEQ ID NO: 19367 - DNA, 25 bp, Canis familiaris
acaaaccgtctgcacattcaaaacc

SEQ ID NO: 19368 - DNA, 25 bp, Canis familiaris
atctcgtccgttgctcattaaaatc

SEQ ID NO: 19369 - DNA, 25 bp, Canis familiaris
atctaccctcttcatcacaaaaatc

SEQ ID NO: 19370 - DNA, 25 bp, Canis familiaris
atctcattcacctcgatccgaaaga

SEQ ID NO: 19371 - DNA, 25 bp, Canis familiaris
atctcttactatccgattgaaaata

SEQ ID NO: 19372 - DNA, 25 bp, Canis familiaris
atctgctttctctggatttaggaca

SEQ ID NO: 19373 - DNA, 25 bp, Canis familiaris
atctgttaccttaattttgcatggg

SEQ ID NO: 19374 - DNA, 25 bp, Canis familiaris
atcggttggttaactgcttgcatgt

SEQ ID NO: 19375 - DNA, 25 bp, Canis familiaris
atctatgttggttcacctgtagtgt

SEQ ID NO: 19376 - DNA, 25 bp, Canis familiaris
atctcattttgatgcccagtcaggg

SEQ ID NO: 19377 - DNA, 25 bp, Canis familiaris
atctctattcgctccagcggagtga

SEQ ID NO: 19378 - DNA, 25 bp, Canis familiaris
atctctggcctgagctactggagta

SEQ ID NO: 19379 - DNA, 25 bp, Canis familiaris
atctcgaactgagtctcttggactt

SEQ ID NO: 19380 - DNA, 25 bp, Canis familiaris
atctccaagctgggctttgtggcag

SEQ ID NO: 19381 - DNA, 25 bp, Canis familiaris
atctctatagtcagtgtggggcttg

SEQ ID NO: 19382 - DNA, 25 bp, Canis familiaris
atctctatacccaatgtggggctca

SEQ ID NO: 19383 - DNA, 25 bp, Canis familiaris
atctctcatatctcaagtgagtcat

SEQ ID NO: 19384 - DNA, 25 bp, Canis familiaris
atctctcaagatggaaatctctatc

SEQ ID NO: 19385 - DNA, 25 bp, Canis familiaris
atctccaagtcattttcctacattt

SEQ ID NO: 19386 - DNA, 25 bp, Canis familiaris
atctccaaaccatttctataccttt

SEQ ID NO: 19387 - DNA, 25 bp, Canis familiaris
atctcctagaaaaacttcactggtt

SEQ ID NO: 19388 - DNA, 25 bp, Canis familiaris
atctccacaggaaacacttcagtct

SEQ ID NO: 19389 - DNA, 25 bp, Canis familiaris
atctctacaaattactatgccagcc

SEQ ID NO: 19390 - DNA, 25 bp, Canis familiaris
atctcgacacatatatcttctagcc

SEQ ID NO: 19391 - DNA, 25 bp, Canis familiaris
atccgaccaatgtctgtaaagtgct

SEQ ID NO: 19392 - DNA, 25 bp, Canis familiaris
atccgacaggatcattcaacgtgat

SEQ ID NO: 19393 - DNA, 25 bp, Canis familiaris
atctctgcgggacatgaagacctac

SEQ ID NO: 19394 - DNA, 25 bp, Canis familiaris
atctcatgaaagttatgggaatccc

SEQ ID NO: 19395 - DNA, 25 bp, Canis familiaris
atctcattaatgtttgtggcctcca

SEQ ID NO: 19396 - DNA, 25 bp, Canis familiaris
atctaaatagacttgcttcctccat

SEQ ID NO: 19397 - DNA, 25 bp, Canis familiaris
atgattaatggggttcccgcctact

SEQ ID NO: 19398 - DNA, 25 bp, Canis familiaris
atcctaggaggccttactccgtact

SEQ ID NO: 19399 - DNA, 25 bp, Canis familiaris
atcgttggattttacacccttagca

SEQ ID NO: 19400 - DNA, 25 bp, Canis familiaris
atctgttgaattctcagtccgtaaa

SEQ ID NO: 19401 - DNA, 25 bp, Canis familiaris
atctctggaattctaagctcctatg

SEQ ID NO: 19402 - DNA, 25 bp, Canis familiaris
atctcagtaatacaaggcaccttcc

SEQ ID NO: 19403 - DNA, 25 bp, Canis familiaris
atctcagagagaaggcagcagcccc

SEQ ID NO: 19404 - DNA, 25 bp, Canis familiaris
atctgctgaagacactggccagccc

SEQ ID NO: 19405 - DNA, 25 bp, Canis familiaris
atctgtgagtgagagctagccccta

SEQ ID NO: 19406 - DNA, 25 bp, Canis familiaris
atgctggagcgagactgagccagca

SEQ ID NO: 19407 - DNA, 25 bp, Canis familiaris
atctgggcgattctgagccatgccg

SEQ ID NO: 19408 - DNA, 25 bp, Canis familiaris
atctcagggcttatgaaatgtagtt

SEQ ID NO: 19409 - DNA, 25 bp, Canis familiaris
atcgagggcaggttgaaatgtaatc

SEQ ID NO: 19410 - DNA, 25 bp, Canis familiaris
atcggggttgggagagcatatcaca

SEQ ID NO: 19411 - DNA, 25 bp, Canis familiaris
atcggccgttgagtggggaacagcg

SEQ ID NO: 19412 - DNA, 25 bp, Canis familiaris
atctggccctggggtgggcagacag

SEQ ID NO: 19413 - DNA, 25 bp, Canis familiaris
atcctcccggaagtcggcagtgagc

SEQ ID NO: 19414 - DNA, 25 bp, Canis familiaris
atctcctttggaagctggccaggtc

SEQ ID NO: 19415 - DNA, 25 bp, Canis familiaris
atctcctgttgactatttccagagc

SEQ ID NO: 19416 - DNA, 25 bp, Canis familiaris
atctcacacattagtcattcccagg

SEQ ID NO: 19417 - DNA, 25 bp, Canis familiaris
atctcaaatctcagtctccaggaaa

SEQ ID NO: 19418 - DNA, 25 bp, Canis familiaris
atctcgcaaattcgtcgccaaaaat

SEQ ID NO: 19419 - DNA, 25 bp, Canis familiaris
atcccaaagtgccttccaaactatc

SEQ ID NO: 19420 - DNA, 25 bp, Canis familiaris
atcccaaagttgttgtaacctgctg

SEQ ID NO: 19421 - DNA, 25 bp, Canis familiaris
atcccaaaactggatacaagcgggt

SEQ ID NO: 19422 - DNA, 25 bp, Canis familiaris
atcccaagatcaagagtcacaggct

SEQ ID NO: 19423 - DNA, 25 bp, Canis familiaris
atctcaagagactcaccacgagtat

SEQ ID NO: 19424 - DNA, 25 bp, Canis familiaris
atctacgagagttgccactcgctgt

SEQ ID NO: 19425 - DNA, 25 bp, Canis familiaris
atctccaggagggccatctgggacc

SEQ ID NO: 19426 - DNA, 25 bp, Canis familiaris
atctgtgcagagtgggacatgggag

SEQ ID NO: 19427 - DNA, 25 bp, Canis familiaris
atctgtggtgggacggcagggcgag

SEQ ID NO: 19428 - DNA, 25 bp, Canis familiaris
atctggcgggggtgaggccgcagct

SEQ ID NO: 19429 - DNA, 25 bp, Canis familiaris
atgctgggggcaggaagactctccc

SEQ ID NO: 19430 - DNA, 25 bp, Canis familiaris
atctggggcgagatagccctcacct

SEQ ID NO: 19431 - DNA, 25 bp, Canis familiaris
atctctggtcaaaatatccctcaac

SEQ ID NO: 19432 - DNA, 25 bp, Canis familiaris
atctcttctagataagcacgtcgac

SEQ ID NO: 19433 - DNA, 25 bp, Canis familiaris
atctgttgctacacaaaaccgatca

SEQ ID NO: 19434 - DNA, 25 bp, Canis familiaris
atctcgtgtctcatctaacagtttc

SEQ ID NO: 19435 - DNA, 25 bp, Canis familiaris
atctcagtgtccttatgccacagga

SEQ ID NO: 19436 - DNA, 25 bp, Canis familiaris
atctgttgaccatttgccatagcac

SEQ ID NO: 19437 - DNA, 25 bp, Canis familiaris
atctgcttatatttagccaggcttc

SEQ ID NO: 19438 - DNA, 25 bp, Canis familiaris
atctgcttatatttagccaggcttc

SEQ ID NO: 19439 - DNA, 25 bp, Canis familiaris
atctcgcttatattgggcagacctc

SEQ ID NO: 19440 - DNA, 25 bp, Canis familiaris
atctggctgataatctttgatgaaa

SEQ ID NO: 19441 - DNA, 25 bp, Canis familiaris
atctgcctgcagactgttgccagaa

SEQ ID NO: 19442 - DNA, 25 bp, Canis familiaris
atctgcctgctgagtctcaacagac

SEQ ID NO: 19443 - DNA, 25 bp, Canis familiaris
atgctgtctgccagtacatgggccc

SEQ ID NO: 19444 - DNA, 25 bp, Canis familiaris
atctctctgcttctacaggtggtca

SEQ ID NO: 19445 - DNA, 25 bp, Canis familiaris
atctctcatcttgaccgaggaccat

SEQ ID NO: 19446 - DNA, 25 bp, Canis familiaris
atctcctgtgctgacttgtgcaaca

SEQ ID NO: 19447 - DNA, 25 bp, Canis familiaris
atctctctggccactttaagcaact

SEQ ID NO: 19448 - DNA, 25 bp, Canis familiaris
atctcttcctagtctctgttacagg

SEQ ID NO: 19449 - DNA, 25 bp, Canis familiaris
atctctgtctccatgtgtgtgtata

SEQ ID NO: 19450 - DNA, 25 bp, Canis familiaris
atctctgttccttttagttctaata

SEQ ID NO: 19451 - DNA, 25 bp, Canis familiaris
atctcgtcgccttcttagagtttta

SEQ ID NO: 19452 - DNA, 25 bp, Canis familiaris
atctcccacctgtctaagaggtatt

SEQ ID NO: 19453 - DNA, 25 bp, Canis familiaris
atcccccgagtcaaaggcttatttg

SEQ ID NO: 19454 - DNA, 25 bp, Canis familiaris
acccgatcggcggacgcctaattgg

SEQ ID NO: 19455 - DNA, 25 bp, Canis familiaris
accccaagtccctgactacattggg

SEQ ID NO: 19456 - DNA, 25 bp, Canis familiaris
atccccaagcccaggaattctgttg

SEQ ID NO: 19457 - DNA, 25 bp, Canis familiaris
atcccacttcccatggaatggtttt

SEQ ID NO: 19458 - DNA, 25 bp, Canis familiaris
atctctccatgaactcctgttaggt

SEQ ID NO: 19459 - DNA, 25 bp, Canis familiaris
atctcatttgttacgttcataggtt

SEQ ID NO: 19460 - DNA, 25 bp, Canis familiaris
atctgctttatttccccattgaatt

SEQ ID NO: 19461 - DNA, 25 bp, Canis familiaris
atctgcttataatttagccagggtt

SEQ ID NO: 19462 - DNA, 25 bp, Canis familiaris
atctctttgtgatttaagcagtggc

SEQ ID NO: 19463 - DNA, 25 bp, Canis familiaris
atctcatcttgttttaatggttcca

SEQ ID NO: 19464 - DNA, 25 bp, Canis familiaris
atctgtcttgttaaaatgaattgcc

SEQ ID NO: 19465 - DNA, 25 bp, Canis familiaris
atcgtcgctttcaacgatttccctt

SEQ ID NO: 19466 - DNA, 25 bp, Canis familiaris
atcgtgcgtgtttcgtgagttacaa

SEQ ID NO: 19467 - DNA, 25 bp, Canis familiaris
atctgttgttttagtgaggctctga

SEQ ID NO: 19468 - DNA, 25 bp, Canis familiaris
atctgttgtggatctctaggtctga

SEQ ID NO: 19469 - DNA, 25 bp, Canis familiaris
atctctccaggattcatccagtgtc

SEQ ID NO: 19470 - DNA, 25 bp, Canis familiaris
atctcattcagatttcaccagcttt

SEQ ID NO: 19471 - DNA, 25 bp, Canis familiaris
atcgtgtcacacttgatgtccgttt

SEQ ID NO: 19472 - DNA, 25 bp, Canis familiaris
atccttgcagcagtcagttcgggct

SEQ ID NO: 19473 - DNA, 25 bp, Canis familiaris
atccttcaactccttcaagggtctc

SEQ ID NO: 19474 - DNA, 25 bp, Canis familiaris
atctcagtacattcctccataagga

SEQ ID NO: 19475 - DNA, 25 bp, Canis familiaris
atctgagtagtactactcatttgga

SEQ ID NO: 19476 - DNA, 25 bp, Canis familiaris
atctggcattgctaggacttttggt

SEQ ID NO: 19477 - DNA, 25 bp, Canis familiaris
atctgagtcatctgggttgcttgtt

SEQ ID NO: 19478 - DNA, 25 bp, Canis familiaris
atcggttcattggtttgtcggcatt

SEQ ID NO: 19479 - DNA, 25 bp, Canis familiaris
atgcccttcattcatctttggggtt

SEQ ID NO: 19480 - DNA, 25 bp, Canis familiaris
atctctttcatatatcttccttgtg

SEQ ID NO: 19481 - DNA, 25 bp, Canis familiaris
atctcatgtgtttaacttttcgtgt

SEQ ID NO: 19482 - DNA, 25 bp, Canis familiaris
atctgttgagttgaccttctcttct

SEQ ID NO: 19483 - DNA, 25 bp, Canis familiaris
atctcttgaatttagctcttttcta

SEQ ID NO: 19484 - DNA, 25 bp, Canis familiaris
atctcttaattgcatttcttttctg

SEQ ID NO: 19485 - DNA, 25 bp, Canis familiaris
atccatctaattgctggtttccttg

SEQ ID NO: 19486 - DNA, 25 bp, Canis familiaris
atctcttgacctgtggtttctgtcc

SEQ ID NO: 19487 - DNA, 25 bp, Canis familiaris
atctcctgacttgtgggttttgctg

SEQ ID NO: 19488 - DNA, 25 bp, Canis familiaris
atctctgcccttttagttttctggg

SEQ ID NO: 19489 - DNA, 25 bp, Canis familiaris
atctcatcccttttaatggctgtgt

SEQ ID NO: 19490 - DNA, 25 bp, Canis familiaris
atctcacaccaaatttgtgttgtgt

SEQ ID NO: 19491 - DNA, 25 bp, Canis familiaris
atctcacccaccgtggggcaatctc

SEQ ID NO: 19492 - DNA, 25 bp, Canis familiaris
atctcagagcattttctggggcaag

SEQ ID NO: 19493 - DNA, 25 bp, Canis familiaris
atctcgagatatagtgctctgggag

SEQ ID NO: 19494 - DNA, 25 bp, Canis familiaris
atctcagcagtgttttctgctgcaa

SEQ ID NO: 19495 - DNA, 25 bp, Canis familiaris
atctgaagggtcatctgataattca

SEQ ID NO: 19496 - DNA, 25 bp, Canis familiaris
atctggcaagagaaatctataacca

SEQ ID NO: 19497 - DNA, 25 bp, Canis familiaris
atctcgcagggttttaagcacacta

SEQ ID NO: 19498 - DNA, 25 bp, Canis familiaris
atcccactgggtttaagagcatctt

SEQ ID NO: 19499 - DNA, 25 bp, Canis familiaris
atcccaggggtatgatccctctttc

SEQ ID NO: 19500 - DNA, 25 bp, Canis familiaris
agcccagtggtatgggccttttttg

SEQ ID NO: 19501 - DNA, 25 bp, Canis familiaris
atctgccttagttcaggtcctgatt

SEQ ID NO: 19502 - DNA, 25 bp, Canis familiaris
atctcctctgaatctgggagctgcc

SEQ ID NO: 19503 - DNA, 25 bp, Canis familiaris
atctcactatgttatctgggcaggt

SEQ ID NO: 19504 - DNA, 25 bp, Canis familiaris
atctcacatgagaattagggccgag

SEQ ID NO: 19505 - DNA, 25 bp, Canis familiaris
atctccatcaagttgcaagaggagg

SEQ ID NO: 19506 - DNA, 25 bp, Canis familiaris
atctccaccagcatcagagggaatc

SEQ ID NO: 19507 - DNA, 25 bp, Canis familiaris
atctccaaagccagagggcaagccc

SEQ ID NO: 19508 - DNA, 25 bp, Canis familiaris
atctcgcgaggcgctgagaaggacg

SEQ ID NO: 19509 - DNA, 25 bp, Canis familiaris
atctcgagaggcacatccaaggaca

SEQ ID NO: 19510 - DNA, 25 bp, Canis familiaris
atctcgagagctcgccacaacgaac

SEQ ID NO: 19511 - DNA, 25 bp, Canis familiaris
atctcgagagctcgccacaacgaac

SEQ ID NO: 19512 - DNA, 25 bp, Canis familiaris
atcgagaagctcgccgtggaagctc

SEQ ID NO: 19513 - DNA, 25 bp, Canis familiaris
atctgacgtgccgcctggagaaacc

SEQ ID NO: 19514 - DNA, 25 bp, Canis familiaris
atcccaggacactctgggatcacac

SEQ ID NO: 19515 - DNA, 25 bp, Canis familiaris
atcctcacggccactgtggacaatg

SEQ ID NO: 19516 - DNA, 25 bp, Canis familiaris
atccccttctctgtgtaaaatcgca

SEQ ID NO: 19517 - DNA, 25 bp, Canis familiaris
atccgttctactgtttggtatctga

SEQ ID NO: 19518 - DNA, 25 bp, Canis familiaris
atcggtttgaccatctttgattgat

SEQ ID NO: 19519 - DNA, 25 bp, Canis familiaris
atcggacgaactatttgtagctgat

SEQ ID NO: 19520 - DNA, 25 bp, Canis familiaris
atctgggcctcagttttgtgggctt

SEQ ID NO: 19521 - DNA, 25 bp, Canis familiaris
atctgctacctggattttcctgggt

SEQ ID NO: 19522 - DNA, 25 bp, Canis familiaris
atctgcttcttgctctattactggt

SEQ ID NO: 19523 - DNA, 25 bp, Canis familiaris
atctcctttggcctttagcagtttt

SEQ ID NO: 19524 - DNA, 25 bp, Canis familiaris
atctctcttccgtattgggagtttt

SEQ ID NO: 19525 - DNA, 25 bp, Canis familiaris
atccttcctgaaattgggcacttta

SEQ ID NO: 19526 - DNA, 25 bp, Canis familiaris
atctccctctaaagtgaggccttcc

SEQ ID NO: 19527 - DNA, 25 bp, Canis familiaris
acccctatacgtgaggaatcccaag

SEQ ID NO: 19528 - DNA, 25 bp, Canis familiaris
accaggttccttgagttacctcagc

SEQ ID NO: 19529 - DNA, 25 bp, Canis familiaris
atctcggtttcatttaatttcccag

SEQ ID NO: 19530 - DNA, 25 bp, Canis familiaris
atctcggtgttctatttatttattg

SEQ ID NO: 19531 - DNA, 25 bp, Canis familiaris
atctcttggttcctcatgattttct

SEQ ID NO: 19532 - DNA, 25 bp, Canis familiaris
atctctgtaattatcgatttaatca

SEQ ID NO: 19533 - DNA, 25 bp, Canis familiaris
atctcttttctctttgattcataaa

SEQ ID NO: 19534 - DNA, 25 bp, Canis familiaris
atctgcttttgtttttgtctatcta

SEQ ID NO: 19535 - DNA, 25 bp, Canis familiaris
atctgttatttagttgtttatcttc

SEQ ID NO: 19536 - DNA, 25 bp, Canis familiaris
atctgttttgtactttttatactgt

SEQ ID NO: 19537 - DNA, 25 bp, Canis familiaris
atctgttttctactttatgtgagca

SEQ ID NO: 19538 - DNA, 25 bp, Canis familiaris
atctgtttcattgctttgtgatcgc

SEQ ID NO: 19539 - DNA, 25 bp, Canis familiaris
atctgccttattggattttcaccca

SEQ ID NO: 19540 - DNA, 25 bp, Canis familiaris
atctgccttattggagacgtcaccc

SEQ ID NO: 19541 - DNA, 25 bp, Canis familiaris
atccctgtagtgggactcagctccc

SEQ ID NO: 19542 - DNA, 25 bp, Canis familiaris
atcccagccagtgtggcgagtgctc

SEQ ID NO: 19543 - DNA, 25 bp, Canis familiaris
atccctgagctgaacgggaagctca

SEQ ID NO: 19544 - DNA, 25 bp, Canis familiaris
atcccagagctgaacgggaagctca

SEQ ID NO: 19545 - DNA, 25 bp, Canis familiaris
atctccgactctcagggaagcgaca

SEQ ID NO: 19546 - DNA, 25 bp, Canis familiaris
atctcgcgcctcgaggagaaagtga

SEQ ID NO: 19547 - DNA, 25 bp, Canis familiaris
atctgccctcctgaagagcaagctg

SEQ ID NO: 19548 - DNA, 25 bp, Canis familiaris
atctgctccttttcaaagccagtgc

SEQ ID NO: 19549 - DNA, 25 bp, Canis familiaris
atcgtgctgttttcacgaccaacac

SEQ ID NO: 19550 - DNA, 25 bp, Canis familiaris
atcgtggctgttttcacaaccacac

SEQ ID NO: 19551 - DNA, 25 bp, Canis familiaris
atctgaagcttcactgcacagtacc

SEQ ID NO: 19552 - DNA, 25 bp, Canis familiaris
atctgaagacatcagccacattaca

SEQ ID NO: 19553 - DNA, 25 bp, Canis familiaris
atcgagcagcaaaggcgccatacac

SEQ ID NO: 19554 - DNA, 25 bp, Canis familiaris
atgctgggcgcaatctgcgcctacc

SEQ ID NO: 19555 - DNA, 25 bp, Canis familiaris
atctgccagtgttgatgcgactacc

SEQ ID NO: 19556 - DNA, 25 bp, Canis familiaris
atctgcacggtggatggtgtcccgg

SEQ ID NO: 19557 - DNA, 25 bp, Canis familiaris
atctgtgaagaggtgggtcccgggt

SEQ ID NO: 19558 - DNA, 25 bp, Canis familiaris
atctggctagagagggatccctggg

SEQ ID NO: 19559 - DNA, 25 bp, Canis familiaris
atctggtgagggtgtgctcccatgt

SEQ ID NO: 19560 - DNA, 25 bp, Canis familiaris
atctggggaagacttgctactatga

SEQ ID NO: 19561 - DNA, 25 bp, Canis familiaris
atctgtggagaaaccttgccttggc

SEQ ID NO: 19562 - DNA, 25 bp, Canis familiaris
atctgctggggtggcctatgccaat

SEQ ID NO: 19563 - DNA, 25 bp, Canis familiaris
atctctggagtgactgttagctaat

SEQ ID NO: 19564 - DNA, 25 bp, Canis familiaris
atctctcacaggcctgattgacttg

SEQ ID NO: 19565 - DNA, 25 bp, Canis familiaris
atctctcaccagttttacttgtgtc

SEQ ID NO: 19566 - DNA, 25 bp, Canis familiaris
atctgaccataattttccctgtata

SEQ ID NO: 19567 - DNA, 25 bp, Canis familiaris
atctgcccaattttctcgaagcaat

SEQ ID NO: 19568 - DNA, 25 bp, Canis familiaris
atctctccacgttatcatcgtagca

SEQ ID NO: 19569 - DNA, 25 bp, Canis familiaris
atctctccttgttattcctaataca

SEQ ID NO: 19570 - DNA, 25 bp, Canis familiaris
atcccccaggaagtctgctatcaaa

SEQ ID NO: 19571 - DNA, 25 bp, Canis familiaris
atctcctttgagaacttatgactaa

SEQ ID NO: 19572 - DNA, 25 bp, Canis familiaris
atcgtcggtgggttctcatgacttc

SEQ ID NO: 19573 - DNA, 25 bp, Canis familiaris
atctgaaggcttcttctctgacttc

SEQ ID NO: 19574 - DNA, 25 bp, Canis familiaris
atcgattctattcatttctagtcct

SEQ ID NO: 19575 - DNA, 25 bp, Canis familiaris
atgcctttgtttagttctaaccttg

SEQ ID NO: 19576 - DNA, 25 bp, Canis familiaris
atctctttgtctccaatgtctaacc

SEQ ID NO: 19577 - DNA, 25 bp, Canis familiaris
atctcttatataacaattctacata

SEQ ID NO: 19578 - DNA, 25 bp, Canis familiaris
atccgtaaggacctgtatgccaaca

SEQ ID NO: 19579 - DNA, 25 bp, Canis familiaris
atccgaggaaaactgtgggcaccac

SEQ ID NO: 19580 - DNA, 25 bp, Canis familiaris
aaagaaaaagccttagcgccacctg

SEQ ID NO: 19581 - DNA, 25 bp, Canis familiaris
aagcaaaaaaggctaagcaagcatc

SEQ ID NO: 19582 - DNA, 25 bp, Canis familiaris
atcgcaaaaatccctttcaaacacg

SEQ ID NO: 19583 - DNA, 25 bp, Canis familiaris
atctgctcaaaatatctttatacca

SEQ ID NO: 19584 - DNA, 25 bp, Canis familiaris
atctccactgaaggattcttaagtc

SEQ ID NO: 19585 - DNA, 25 bp, Canis familiaris
atctctcccaaggcttctagaagtc

SEQ ID NO: 19586 - DNA, 25 bp, Canis familiaris
atctctcctaatattcggctagctc

SEQ ID NO: 19587 - DNA, 25 bp, Canis familiaris
atctgcctgctttgttacgtaagtt

SEQ ID NO: 19588 - DNA, 25 bp, Canis familiaris
atctcctttgtttagattttgtctg

SEQ ID NO: 19589 - DNA, 25 bp, Canis familiaris
atctctcttttttgacattttatgg

SEQ ID NO: 19590 - DNA, 25 bp, Canis familiaris
atcccttttctggactgttctggag

SEQ ID NO: 19591 - DNA, 25 bp, Canis familiaris
atctccttacctccgttgtatggat

SEQ ID NO: 19592 - DNA, 25 bp, Canis familiaris
atctgttctacctcggtgtgtgtgt

SEQ ID NO: 19593 - DNA, 25 bp, Canis familiaris
atcgtgtgctacctctttgagtttg

SEQ ID NO: 19594 - DNA, 25 bp, Canis familiaris
atctgtgttaacttttgattacctc

SEQ ID NO: 19595 - DNA, 25 bp, Canis familiaris
atcgtttgacatatttgacttcctt

SEQ ID NO: 19596 - DNA, 25 bp, Canis familiaris
atcgaaggctaaattcttcccctct

SEQ ID NO: 19597 - DNA, 25 bp, Canis familiaris
atcgggtacaatagtcccaacctgc

SEQ ID NO: 19598 - DNA, 25 bp, Canis familiaris
atcggtcgaagaagctccatcaccc

SEQ ID NO: 19599 - DNA, 25 bp, Canis familiaris
atcgtgcgggaaacccattgtccac

SEQ ID NO: 19600 - DNA, 25 bp, Canis familiaris
atcgatgggggatgcttcgtgtgaa

SEQ ID NO: 19601 - DNA, 25 bp, Canis familiaris
atcgattcggattagttctgtttat

SEQ ID NO: 19602 - DNA, 25 bp, Canis familiaris
atcgtctggatgttagttcttccca

SEQ ID NO: 19603 - DNA, 25 bp, Canis familiaris
atcgtccgatgagaggtccatcctc

SEQ ID NO: 19604 - DNA, 25 bp, Canis familiaris
atctgctcaaattgcgggtcaacat

SEQ ID NO: 19605 - DNA, 25 bp, Canis familiaris
atctccacattagtgtggtgctaca

SEQ ID NO: 19606 - DNA, 25 bp, Canis familiaris
atctctccagtactcatttgcaact

SEQ ID NO: 19607 - DNA, 25 bp, Canis familiaris
atgccatcctgtttctgtacggtat

SEQ ID NO: 19608 - DNA, 25 bp, Canis familiaris
atctctctgactttttttggtcata

SEQ ID NO: 19609 - DNA, 25 bp, Canis familiaris
atctgcactgaccatctcatttatt

SEQ ID NO: 19610 - DNA, 25 bp, Canis familiaris
atctgacgcacttatgattctttag

SEQ ID NO: 19611 - DNA, 25 bp, Canis familiaris
atctgcatgctctttatgattcgct

SEQ ID NO: 19612 - DNA, 25 bp, Canis familiaris
atctctctgcttccaattgcattta

SEQ ID NO: 19613 - DNA, 25 bp, Canis familiaris
atctctctcacaacaactattcata

SEQ ID NO: 19614 - DNA, 25 bp, Canis familiaris
atctctgccagatactctctgatct

SEQ ID NO: 19615 - DNA, 25 bp, Canis familiaris
atctctgcagatcagactctcctga

SEQ ID NO: 19616 - DNA, 25 bp, Canis familiaris
atctgcgcatggctgccattcgcag

SEQ ID NO: 19617 - DNA, 25 bp, Canis familiaris
atctcctggcgtccattgggaaggg

SEQ ID NO: 19618 - DNA, 25 bp, Canis familiaris
atctgccaccctctttgtgaaggtg

SEQ ID NO: 19619 - DNA, 25 bp, Canis familiaris
atgcccacccttgtgttgtagtgag

SEQ ID NO: 19620 - DNA, 25 bp, Canis familiaris
atctccccagttgttttattttcag

SEQ ID NO: 19621 - DNA, 25 bp, Canis familiaris
atctctcctcgtatattgttttttc

SEQ ID NO: 19622 - DNA, 25 bp, Canis familiaris
atcgtatcacgaagtattgtttctc

SEQ ID NO: 19623 - DNA, 25 bp, Canis familiaris
atcgtatccgattcttttagctact

SEQ ID NO: 19624 - DNA, 25 bp, Canis familiaris
atctgttctgttttttattgcatac

SEQ ID NO: 19625 - DNA, 25 bp, Canis familiaris
atctgcttcatgtgttttcaagaag

SEQ ID NO: 19626 - DNA, 25 bp, Canis familiaris
atctgccttatcctgtgtctagaaa

SEQ ID NO: 19627 - DNA, 25 bp, Canis familiaris
atctgccttcacttattaaacaaac

SEQ ID NO: 19628 - DNA, 25 bp, Canis familiaris
atctgccttttatgtcatggtccaa

SEQ ID NO: 19629 - DNA, 25 bp, Canis familiaris
atcccaattaaaccagtatccactc

SEQ ID NO: 19630 - DNA, 25 bp, Canis familiaris
atgcctccatttaaaagtacgaagt

SEQ ID NO: 19631 - DNA, 25 bp, Canis familiaris
atgccccaacctgaagctgaagaag

SEQ ID NO: 19632 - DNA, 25 bp, Canis familiaris
atcgccgcgaccaaaagtctttcag

SEQ ID NO: 19633 - DNA, 25 bp, Canis familiaris
atcccctgaagtaacatgtgttccg

SEQ ID NO: 19634 - DNA, 25 bp, Canis familiaris
atccccgaggttcatgttgtgggct

SEQ ID NO: 19635 - DNA, 25 bp, Canis familiaris
atccaccgaggaaactactggtaca

SEQ ID NO: 19636 - DNA, 25 bp, Canis familiaris
atccatctggagcttactttgcctg

SEQ ID NO: 19637 - DNA, 25 bp, Canis familiaris
atctccaagagagtctcctttccga

SEQ ID NO: 19638 - DNA, 25 bp, Canis familiaris
atctccaaggacttacattctgaag

SEQ ID NO: 19639 - DNA, 25 bp, Canis familiaris
atgcggaagaaataagttgaaacgg

SEQ ID NO: 19640 - DNA, 25 bp, Canis familiaris
atgcggacgaatttgaagatatggt

SEQ ID NO: 19641 - DNA, 25 bp, Canis familiaris
atcggaatagatcttatattgtggc

SEQ ID NO: 19642 - DNA, 25 bp, Canis familiaris
atctgagatcattgactttttcttg

SEQ ID NO: 19643 - DNA, 25 bp, Canis familiaris
atctgagatctcgacttttcttggg

SEQ ID NO: 19644 - DNA, 25 bp, Canis familiaris
atctgatactccatttgatcattgt

SEQ ID NO: 19645 - DNA, 25 bp, Canis familiaris
atcgatacgcatgtggagatattca

SEQ ID NO: 19646 - DNA, 25 bp, Canis familiaris
atctgaacgagcatggtgaaatcca

SEQ ID NO: 19647 - DNA, 25 bp, Canis familiaris
atcgaaaacaatcaaagtccaggag

SEQ ID NO: 19648 - DNA, 25 bp, Canis familiaris
atcgaaaaactgaatggtgttctca

SEQ ID NO: 19649 - DNA, 25 bp, Canis familiaris
atcggcagcactttttgttttccat

SEQ ID NO: 19650 - DNA, 25 bp, Canis familiaris
atctggcctgcttttttaaagccta

SEQ ID NO: 19651 - DNA, 25 bp, Canis familiaris
atctggctgtcctttttataatgca

SEQ ID NO: 19652 - DNA, 25 bp, Canis familiaris
atctgcctcccaatttaaaatcact

SEQ ID NO: 19653 - DNA, 25 bp, Canis familiaris
atccctcccaaaatctggaatactt

SEQ ID NO: 19654 - DNA, 25 bp, Canis familiaris
atgcgcctaccagatcctggtacag

SEQ ID NO: 19655 - DNA, 25 bp, Canis familiaris
atctccatcacttgggcacttgtga

SEQ ID NO: 19656 - DNA, 25 bp, Canis familiaris
atctgctctcaatgcatgtagggat

SEQ ID NO: 19657 - DNA, 25 bp, Canis familiaris
atctgcctctattcattggagagtt

SEQ ID NO: 19658 - DNA, 25 bp, Canis familiaris
atctccatctgaaatgctgctatag

SEQ ID NO: 19659 - DNA, 25 bp, Canis familiaris
atctcctctgtggatgacttcacgg

SEQ ID NO: 19660 - DNA, 25 bp, Canis familiaris
atcgtccatatcaatcatcagccat

SEQ ID NO: 19661 - DNA, 25 bp, Canis familiaris
atcgtcgcacatcgaacaggatatc

SEQ ID NO: 19662 - DNA, 25 bp, Canis familiaris
atcgtgctctcataagattgatctg

SEQ ID NO: 19663 - DNA, 25 bp, Canis familiaris
atctgtttcacttacactacataaa

SEQ ID NO: 19664 - DNA, 25 bp, Canis familiaris
atctgctttgcatcattcaacactt

SEQ ID NO: 19665 - DNA, 25 bp, Canis familiaris
atctccagagcatatatatcatcct

SEQ ID NO: 19666 - DNA, 25 bp, Canis familiaris
atctcctgagtctaattcacacaga

SEQ ID NO: 19667 - DNA, 25 bp, Canis familiaris
atctccggtagactccacacaagag

SEQ ID NO: 19668 - DNA, 25 bp, Canis familiaris
atctccagggggtccagcaagaatc

SEQ ID NO: 19669 - DNA, 25 bp, Canis familiaris
atcccagggagggccaagtcagcag

SEQ ID NO: 19670 - DNA, 25 bp, Canis familiaris
atccatttggatagccagaagtaga

SEQ ID NO: 19671 - DNA, 25 bp, Canis familiaris
atctccctggctaatagatcctaga

SEQ ID NO: 19672 - DNA, 25 bp, Canis familiaris
atcgcgggtatcaatatatcttgga

SEQ ID NO: 19673 - DNA, 25 bp, Canis familiaris
atcgttgttgactaatcctgtgtgc

SEQ ID NO: 19674 - DNA, 25 bp, Canis familiaris
atctgtttagcaagaacctgtggat

SEQ ID NO: 19675 - DNA, 25 bp, Canis familiaris
atctgttcggggttgcattgtggat

SEQ ID NO: 19676 - DNA, 25 bp, Canis familiaris
atctgttctgggtgcatttgcttgt

SEQ ID NO: 19677 - DNA, 25 bp, Canis familiaris
atctgttctggtgcatttgcgttgt

SEQ ID NO: 19678 - DNA, 25 bp, Canis familiaris
atcgttctgtgtcctgtagggggtg

SEQ ID NO: 19679 - DNA, 25 bp, Canis familiaris
atcgacgcgcttctgtatgggcgcg

SEQ ID NO: 19680 - DNA, 25 bp, Canis familiaris
atcgtcagtttcagttggggcgggt

SEQ ID NO: 19681 - DNA, 25 bp, Canis familiaris
tcacggtttccgaggggctcgggtg

SEQ ID NO: 19682 - DNA, 25 bp, Canis familiaris
agcacagttcccaggggactcgggt

SEQ ID NO: 19683 - DNA, 25 bp, Canis familiaris
acaccgggacggtggactgctggag

SEQ ID NO: 19684 - DNA, 25 bp, Canis familiaris
aggcctgggagggccggagggtgag

SEQ ID NO: 19685 - DNA, 25 bp, Canis familiaris
atgtattggctacaccagggtggtg

SEQ ID NO: 19686 - DNA, 25 bp, Canis familiaris
atgttttggacggtcagggtgtctg

SEQ ID NO: 19687 - DNA, 25 bp, Canis familiaris
cagtttgggtcgctccagagtacga

SEQ ID NO: 19688 - DNA, 25 bp, Canis familiaris
agcttttgttagtttcaggtcctca

SEQ ID NO: 19689 - DNA, 25 bp, Canis familiaris
atccgtttttatgaaggtctgcgaa

SEQ ID NO: 19690 - DNA, 25 bp, Canis familiaris
atcctggttttacagcagtgccctg

SEQ ID NO: 19691 - DNA, 25 bp, Canis familiaris
atcgcggtttttgcagtacatccat

SEQ ID NO: 19692 - DNA, 25 bp, Canis familiaris
atccggttccatttggatactctat

SEQ ID NO: 19693 - DNA, 25 bp, Canis familiaris
atccgttatccacgtagtctgctgt

SEQ ID NO: 19694 - DNA, 25 bp, Canis familiaris
atccttaattcatgtcactcagttt

SEQ ID NO: 19695 - DNA, 25 bp, Canis familiaris
atcctgcataatcctgcaatgaatc

SEQ ID NO: 19696 - DNA, 25 bp, Canis familiaris
atcgcagattatcccactgttgaat

SEQ ID NO: 19697 - DNA, 25 bp, Canis familiaris
atccttctaagggctgtctaatatt

SEQ ID NO: 19698 - DNA, 25 bp, Canis familiaris
atccttcttcgctcgttaaacatcg

SEQ ID NO: 19699 - DNA, 25 bp, Canis familiaris
atccccttccagtggttactgacag

SEQ ID NO: 19700 - DNA, 25 bp, Canis familiaris
atccccttcctgcagaatgttctca

SEQ ID NO: 19701 - DNA, 25 bp, Canis familiaris
atccccttcctgcgaaatacaatta

SEQ ID NO: 19702 - DNA, 25 bp, Canis familiaris
atcgtccttcaccggcaagtgagag

SEQ ID NO: 19703 - DNA, 25 bp, Canis familiaris
atctgtccttaactcgcgtgagtgt

SEQ ID NO: 19704 - DNA, 25 bp, Canis familiaris
atctgtgcaactcactgcgcttaat

SEQ ID NO: 19705 - DNA, 25 bp, Canis familiaris
atctgtctactaattggctctaacc

SEQ ID NO: 19706 - DNA, 25 bp, Canis familiaris
atctgaacactgtattgcagtctat

SEQ ID NO: 19707 - DNA, 25 bp, Canis familiaris
atctgcgatctcaaattgcctctga

SEQ ID NO: 19708 - DNA, 25 bp, Canis familiaris
atctgcgagccctatgtggtcgggt

SEQ ID NO: 19709 - DNA, 25 bp, Canis familiaris
atccgagccgctgggattctgggat

SEQ ID NO: 19710 - DNA, 25 bp, Canis familiaris
atcctgggtcggggactggtgatcc

SEQ ID NO: 19711 - DNA, 25 bp, Canis familiaris
atcctggagacccgggatcgaatcc

SEQ ID NO: 19712 - DNA, 25 bp, Canis familiaris
atcctggatatcgcgggtatcaata

SEQ ID NO: 19713 - DNA, 25 bp, Canis familiaris
atctggggatctgccatggttgata

SEQ ID NO: 19714 - DNA, 25 bp, Canis familiaris
atcgattaactggctctgtgtatag

SEQ ID NO: 19715 - DNA, 25 bp, Canis familiaris
atctgaccaaatgagctgcttaagt

SEQ ID NO: 19716 - DNA, 25 bp, Canis familiaris
atctgacccactggcagtgctcagc

SEQ ID NO: 19717 - DNA, 25 bp, Canis familiaris
atctgcacaacaggggcgagcgcac

SEQ ID NO: 19718 - DNA, 25 bp, Canis familiaris
atctgacatcactgtggctcagttc

SEQ ID NO: 19719 - DNA, 25 bp, Canis familiaris
atcgtctacaagagcagcattgatc

SEQ ID NO: 19720 - DNA, 25 bp, Canis familiaris
atcggctatcaactttcatctgcat

SEQ ID NO: 19721 - DNA, 25 bp, Canis familiaris
atctggtgatcaacatttcttctcg

SEQ ID NO: 19722 - DNA, 25 bp, Canis familiaris
atcgatgagctaccatatgttaccg

SEQ ID NO: 19723 - DNA, 25 bp, Canis familiaris
atccatgactggtattgcctaacat

SEQ ID NO: 19724 - DNA, 25 bp, Canis familiaris
atcctcattggatcgcaaattgctt

SEQ ID NO: 19725 - DNA, 25 bp, Canis familiaris
atccgtttgatcgtcaaagtcctta

SEQ ID NO: 19726 - DNA, 25 bp, Canis familiaris
atctccatttggctgtaggtcctgt

SEQ ID NO: 19727 - DNA, 25 bp, Canis familiaris
atcgacattacccgtggagtctcat

SEQ ID NO: 19728 - DNA, 25 bp, Canis familiaris
atcgtctgccacgggatggtgtata

SEQ ID NO: 19729 - DNA, 25 bp, Canis familiaris
atctgtgtcacactcgtgggataca

SEQ ID NO: 19730 - DNA, 25 bp, Canis familiaris
atcgctgtgcatttagctgagacat

SEQ ID NO: 19731 - DNA, 25 bp, Canis familiaris
atctgcgatgaagtctcgatcctga

SEQ ID NO: 19732 - DNA, 25 bp, Canis familiaris
atgactgataattctcatgcacaga

SEQ ID NO: 19733 - DNA, 25 bp, Canis familiaris
aggctggatatccataccatatggg

SEQ ID NO: 19734 - DNA, 25 bp, Canis familiaris
agaagggcacatcactttggggggt

SEQ ID NO: 19735 - DNA, 25 bp, Canis familiaris
agaccgggatcgtgttcgggagctt

SEQ ID NO: 19736 - DNA, 25 bp, Canis familiaris
agaaagacgccctctttggaactgc

SEQ ID NO: 19737 - DNA, 25 bp, Canis familiaris
atgaacacccccacaggtagaagtg

SEQ ID NO: 19738 - DNA, 25 bp, Canis familiaris
ttaagacccccacactaggagacaa

SEQ ID NO: 19739 - DNA, 25 bp, Canis familiaris
caatagggccccgccataggaagac

SEQ ID NO: 19740 - DNA, 25 bp, Canis familiaris
aacggctaccacatccaaggaaggc

SEQ ID NO: 19741 - DNA, 25 bp, Canis familiaris
atccgccccaacatctttgtgggcc

SEQ ID NO: 19742 - DNA, 25 bp, Canis familiaris
atccccccagatgttttgaggagct

SEQ ID NO: 19743 - DNA, 25 bp, Canis familiaris
atcggtttcagtactttgtgagggc

SEQ ID NO: 19744 - DNA, 25 bp, Canis familiaris
atctgagtgttgtgaatatggtgca

SEQ ID NO: 19745 - DNA, 25 bp, Canis familiaris
atctgtggttgggcgtaatcatgca

SEQ ID NO: 19746 - DNA, 25 bp, Canis familiaris
atctgctggtctgctcagtgacaga

SEQ ID NO: 19747 - DNA, 25 bp, Canis familiaris
atctgccagacaactcaggagccat

SEQ ID NO: 19748 - DNA, 25 bp, Canis familiaris
atctgccacattaccatgggctgta

SEQ ID NO: 19749 - DNA, 25 bp, Canis familiaris
atctgcaatgatgttctggagctgt

SEQ ID NO: 19750 - DNA, 25 bp, Canis familiaris
atctgaagtgttttatgtgtgcatt

SEQ ID NO: 19751 - DNA, 25 bp, Canis familiaris
atctgcgactgtgcaaatgatgtgc

SEQ ID NO: 19752 - DNA, 25 bp, Canis familiaris
atctgctcactggccacaattcaga

SEQ ID NO: 19753 - DNA, 25 bp, Canis familiaris
atctgccgctcgtagacatggctga

SEQ ID NO: 19754 - DNA, 25 bp, Canis familiaris
atctgctcgtggtctgtgagagcca

SEQ ID NO: 19755 - DNA, 25 bp, Canis familiaris
atcctcgtcaggtgcaggtcagcac

SEQ ID NO: 19756 - DNA, 25 bp, Canis familiaris
atcgtctttgccactggatacacct

SEQ ID NO: 19757 - DNA, 25 bp, Canis familiaris
atcgctctggtgggtcagtgtacag

SEQ ID NO: 19758 - DNA, 25 bp, Canis familiaris
atcgccgtgtgaagtcaggaccatg

SEQ ID NO: 19759 - DNA, 25 bp, Canis familiaris
atcgggctggcggtcatgggccaga

SEQ ID NO: 19760 - DNA, 25 bp, Canis familiaris
atcggtgtggtgggtgtgtccgacc

SEQ ID NO: 19761 - DNA, 25 bp, Canis familiaris
atctgcagtgtggtggagagctccc

SEQ ID NO: 19762 - DNA, 25 bp, Canis familiaris
atctgcgcattgtctgaaagcctcc

SEQ ID NO: 19763 - DNA, 25 bp, Canis familiaris
atctgtgtggatcacacacctctcc

SEQ ID NO: 19764 - DNA, 25 bp, Canis familiaris
atgcttgggaggtaccagcttgcct

SEQ ID NO: 19765 - DNA, 25 bp, Canis familiaris
atccggtgtaggcacagctctccta

SEQ ID NO: 19766 - DNA, 25 bp, Canis familiaris
atcctgggaatgagaatgcttacct

SEQ ID NO: 19767 - DNA, 25 bp, Canis familiaris
atcctgtggacgagtggtccctgct

SEQ ID NO: 19768 - DNA, 25 bp, Canis familiaris
atcctggagatccggtggaaccact

SEQ ID NO: 19769 - DNA, 25 bp, Canis familiaris
atcctggtctggggattgaatccct

SEQ ID NO: 19770 - DNA, 25 bp, Canis familiaris
atcgtgggctggtgggagcaccgtg

SEQ ID NO: 19771 - DNA, 25 bp, Canis familiaris
atcgcggggtgaggtgagagcaggc

SEQ ID NO: 19772 - DNA, 25 bp, Canis familiaris
atccgggggccgggatgaaggtgct

SEQ ID NO: 19773 - DNA, 25 bp, Canis familiaris
atcgtggaggacaagctggtggagg

SEQ ID NO: 19774 - DNA, 25 bp, Canis familiaris
atccggattagcaccctgagggaag

SEQ ID NO: 19775 - DNA, 25 bp, Canis familiaris
atcgcccaaagcacccgagaggaat

SEQ ID NO: 19776 - DNA, 25 bp, Canis familiaris
atccccatgggtttgcccaaggaca

SEQ ID NO: 19777 - DNA, 25 bp, Canis familiaris
atccccttgttcttccagcaaggga

SEQ ID NO: 19778 - DNA, 25 bp, Canis familiaris
atcctccttcaagaccaacagcgga

SEQ ID NO: 19779 - DNA, 25 bp, Canis familiaris
atccccttgggatatgcaacaccga

SEQ ID NO: 19780 - DNA, 25 bp, Canis familiaris
atcccgttcgagtaacaggagaaat

SEQ ID NO: 19781 - DNA, 25 bp, Canis familiaris
atctggccctcatgtcagacatgga

SEQ ID NO: 19782 - DNA, 25 bp, Canis familiaris
atcggcacccgctagaaatgatggc

SEQ ID NO: 19783 - DNA, 25 bp, Canis familiaris
atcgtcaagcccaaacacagatgag

SEQ ID NO: 19784 - DNA, 25 bp, Canis familiaris
atctgtgcccctggaggacttgatg

SEQ ID NO: 19785 - DNA, 25 bp, Canis familiaris
atctgtagacgttaggcacttttga

SEQ ID NO: 19786 - DNA, 25 bp, Canis familiaris
atctgaaaccatcaagcagtgcttt

SEQ ID NO: 19787 - DNA, 25 bp, Canis familiaris
atcggagatccagagccagtttttc

SEQ ID NO: 19788 - DNA, 25 bp, Canis familiaris
atctgttatccctgctggatttttt

SEQ ID NO: 19789 - DNA, 25 bp, Canis familiaris
atctgatcttctaagtgtttttttt

SEQ ID NO: 19790 - DNA, 25 bp, Canis familiaris
atctgttgtctatcagtaccgtctt

SEQ ID NO: 19791 - DNA, 25 bp, Canis familiaris
atcgtgtgttcttcgatatgccctt

SEQ ID NO: 19792 - DNA, 25 bp, Canis familiaris
atccctgtttatggtatcagccttg

SEQ ID NO: 19793 - DNA, 25 bp, Canis familiaris
atctgcaatcatttagaattcacca

SEQ ID NO: 19794 - DNA, 25 bp, Canis familiaris
atctgatatttgagacattcaccat

SEQ ID NO: 19795 - DNA, 25 bp, Canis familiaris
atctgttgctagtaagtgatccaat

SEQ ID NO: 19796 - DNA, 25 bp, Canis familiaris
atctgtcgtagaaacctcgatattg

SEQ ID NO: 19797 - DNA, 25 bp, Canis familiaris
atctgaggtagtactactcaatttg

SEQ ID NO: 19798 - DNA, 25 bp, Canis familiaris
atcgggatcagttttgccaagtcaa

SEQ ID NO: 19799 - DNA, 25 bp, Canis familiaris
atccctgtatctgttgacaagtcca

SEQ ID NO: 19800 - DNA, 25 bp, Canis familiaris
atcgggctctctgcttagcaaaaag

SEQ ID NO: 19801 - DNA, 25 bp, Canis familiaris
atcctgcccttgttattaaaaagat

SEQ ID NO: 19802 - DNA, 25 bp, Canis familiaris
atctgatccctttatattaaatcta

SEQ ID NO: 19803 - DNA, 25 bp, Canis familiaris
atcgctctgacttctctttaaacat

SEQ ID NO: 19804 - DNA, 25 bp, Canis familiaris
atccatcaagcccctttaacatttt

SEQ ID NO: 19805 - DNA, 25 bp, Canis familiaris
atcgccagaccgtccgaaataggca

SEQ ID NO: 19806 - DNA, 25 bp, Canis familiaris
atccgcaggcaccaccaaaaagaga

SEQ ID NO: 19807 - DNA, 25 bp, Canis familiaris
atcccaacacaagaattaaagccag

SEQ ID NO: 19808 - DNA, 25 bp, Canis familiaris
atccctgacaaagcctgataacgcg

SEQ ID NO: 19809 - DNA, 25 bp, Canis familiaris
atcccagacaaacagtatacagagt

SEQ ID NO: 19810 - DNA, 25 bp, Canis familiaris
atcccgttaggaagtgtccgatgca

SEQ ID NO: 19811 - DNA, 25 bp, Canis familiaris
atcccccaaggaagtctgcttatca

SEQ ID NO: 19812 - DNA, 25 bp, Canis familiaris
atgctcccaaaacttgatttaacac

SEQ ID NO: 19813 - DNA, 25 bp, Canis familiaris
atctgaccaagctgctgtcatttcc

SEQ ID NO: 19814 - DNA, 25 bp, Canis familiaris
atcccatcaaccaatgtatttgcca

SEQ ID NO: 19815 - DNA, 25 bp, Canis familiaris
atccttcccctggtgaatgatgctc

SEQ ID NO: 19816 - DNA, 25 bp, Canis familiaris
atcctctcactctgtgggataccag

SEQ ID NO: 19817 - DNA, 25 bp, Canis familiaris
atcccatcgttcttccatattagag

SEQ ID NO: 19818 - DNA, 25 bp, Canis familiaris
atccccgcatgtgtcactcaggggc

SEQ ID NO: 19819 - DNA, 25 bp, Canis familiaris
atccacccataattcgtcaagaggc

SEQ ID NO: 19820 - DNA, 25 bp, Canis familiaris
atccactccatgatggttttggtgt

SEQ ID NO: 19821 - DNA, 25 bp, Canis familiaris
atgcccacaaggtgttattggtacg

SEQ ID NO: 19822 - DNA, 25 bp, Canis familiaris
atcccctaggattgtttctgtaagt

SEQ ID NO: 19823 - DNA, 25 bp, Canis familiaris
atcccgtcggtattgctttgtaact

SEQ ID NO: 19824 - DNA, 25 bp, Canis familiaris
aggcactgatctcgtaacttttact

SEQ ID NO: 19825 - DNA, 25 bp, Canis familiaris
atcccaatccgatgacttcttagtc

SEQ ID NO: 19826 - DNA, 25 bp, Canis familiaris
atcccaggcaagtgccagtttagat

SEQ ID NO: 19827 - DNA, 25 bp, Canis familiaris
atccaaggaaccaccattttgatgt

SEQ ID NO: 19828 - DNA, 25 bp, Canis familiaris
atccggtaatccaccaagaatgttg

SEQ ID NO: 19829 - DNA, 25 bp, Canis familiaris
atcccttaaccggccagatacatga

SEQ ID NO: 19830 - DNA, 25 bp, Canis familiaris
atcccttaaccagtaagcaattcaa

SEQ ID NO: 19831 - DNA, 25 bp, Canis familiaris
atcctttaacgaggacccattgctg

SEQ ID NO: 19832 - DNA, 25 bp, Canis familiaris
atccttccaatggcaaccctttggt

SEQ ID NO: 19833 - DNA, 25 bp, Canis familiaris
atcctatccatcaattatccctttg

SEQ ID NO: 19834 - DNA, 25 bp, Canis familiaris
atctgttcgatgccatttgcgtttc

SEQ ID NO: 19835 - DNA, 25 bp, Canis familiaris
atctgtgtgcttcatgttctgttat

SEQ ID NO: 19836 - DNA, 25 bp, Canis familiaris
atctgtgtctgtctgttctaagtgt

SEQ ID NO: 19837 - DNA, 25 bp, Canis familiaris
atctgtgacgctcgagtggctcaga

SEQ ID NO: 19838 - DNA, 25 bp, Canis familiaris
atcgtgcagctgtagcagcggctct

SEQ ID NO: 19839 - DNA, 25 bp, Canis familiaris
atcgctcaggtgctgcaggattcag

SEQ ID NO: 19840 - DNA, 25 bp, Canis familiaris
atctgtaggatggtctgttctctga

SEQ ID NO: 19841 - DNA, 25 bp, Canis familiaris
atctgtaatgttcctgtatcagcca

SEQ ID NO: 19842 - DNA, 25 bp, Canis familiaris
atcgtatatttgtctgttgcctggt

SEQ ID NO: 19843 - DNA, 25 bp, Canis familiaris
atcgcctacaactgttgcctggcat

SEQ ID NO: 19844 - DNA, 25 bp, Canis familiaris
atccctcacaggtggctgatgctgg

SEQ ID NO: 19845 - DNA, 25 bp, Canis familiaris
atcgcgaccaggaggatgctcggac

SEQ ID NO: 19846 - DNA, 25 bp, Canis familiaris
atcgctgacaagtgtgaatcccgtg

SEQ ID NO: 19847 - DNA, 25 bp, Canis familiaris
atcctgaacatgtttgtccgcaggg

SEQ ID NO: 19848 - DNA, 25 bp, Canis familiaris
atcgagtccatgttattctctcaca

SEQ ID NO: 19849 - DNA, 25 bp, Canis familiaris
atcgattcaggcttgatgccttgaa

SEQ ID NO: 19850 - DNA, 25 bp, Canis familiaris
atcgacttgtgttgcatcctgagca

SEQ ID NO: 19851 - DNA, 25 bp, Canis familiaris
atcgcagcgagggagctgctctgct

SEQ ID NO: 19852 - DNA, 25 bp, Canis familiaris
atctgtgagaggtcacccgcatcag

SEQ ID NO: 19853 - DNA, 25 bp, Canis familiaris
atctggagagccatcctggcacagc

SEQ ID NO: 19854 - DNA, 25 bp, Canis familiaris
atccaggccagcagcaaggctgagc

SEQ ID NO: 19855 - DNA, 25 bp, Canis familiaris
atcgagcgctacatcacgatgctga

SEQ ID NO: 19856 - DNA, 25 bp, Canis familiaris
atctgagggagactgccaatgctat

SEQ ID NO: 19857 - DNA, 25 bp, Canis familiaris
atctgatggggtcctcactgtgaat

SEQ ID NO: 19858 - DNA, 25 bp, Canis familiaris
atctgaggtgaatggcagcctgata

SEQ ID NO: 19859 - DNA, 25 bp, Canis familiaris
atcgtgtgcatggggagcagcgcgt

SEQ ID NO: 19860 - DNA, 25 bp, Canis familiaris
atcgcatggtggatgaagatctgtg

SEQ ID NO: 19861 - DNA, 25 bp, Canis familiaris
atcgctgcaggcgttccagtggtcc

SEQ ID NO: 19862 - DNA, 25 bp, Canis familiaris
atcctgcgtctggacttggctggcc

SEQ ID NO: 19863 - DNA, 25 bp, Canis familiaris
atctgttgatctgatgctcggctgt

SEQ ID NO: 19864 - DNA, 25 bp, Canis familiaris
atcgttgctcgctttgcggatgacg

SEQ ID NO: 19865 - DNA, 25 bp, Canis familiaris
atcgaagtcgctatgccagtgacct

SEQ ID NO: 19866 - DNA, 25 bp, Canis familiaris
atgctaagtggccattccaactcca

SEQ ID NO: 19867 - DNA, 25 bp, Canis familiaris
atcgatgaggtggattccctctgcg

SEQ ID NO: 19868 - DNA, 25 bp, Canis familiaris
atccatcaggttgtcttctgggctg

SEQ ID NO: 19869 - DNA, 25 bp, Canis familiaris
atcgtgctggagaagttgtggggtt

SEQ ID NO: 19870 - DNA, 25 bp, Canis familiaris
atcgtgctggagaaggtgggggttg

SEQ ID NO: 19871 - DNA, 25 bp, Canis familiaris
atctgtgagaataatggtgtggtgg

SEQ ID NO: 19872 - DNA, 25 bp, Canis familiaris
atgacgagattcatgcgtccgtcgt

SEQ ID NO: 19873 - DNA, 25 bp, Canis familiaris
atccgagtgtttcgtgcgtgcacag

SEQ ID NO: 19874 - DNA, 25 bp, Canis familiaris
atccgttctgtcttctcggacaaag

SEQ ID NO: 19875 - DNA, 25 bp, Canis familiaris
atgccgccacgatcatttggactaa

SEQ ID NO: 19876 - DNA, 25 bp, Canis familiaris
atcgcgccggattattgctgcaact

SEQ ID NO: 19877 - DNA, 25 bp, Canis familiaris
atcggtatggaatctgctggcatcc

SEQ ID NO: 19878 - DNA, 25 bp, Canis familiaris
atctggtgtggaacatcgggctcct

SEQ ID NO: 19879 - DNA, 25 bp, Canis familiaris
aggacttgaaccagggcgtctggcc

SEQ ID NO: 19880 - DNA, 25 bp, Canis familiaris
agcccagtaaccatgagcctttgga

SEQ ID NO: 19881 - DNA, 25 bp, Canis familiaris
atcccagtacacactgctggcttgt

SEQ ID NO: 19882 - DNA, 25 bp, Canis familiaris
atcccaatacttcatcattctgatg

SEQ ID NO: 19883 - DNA, 25 bp, Canis familiaris
atcctactactaatatattggcata

SEQ ID NO: 19884 - DNA, 25 bp, Canis familiaris
atcgttctgattactgcaaatggtc

SEQ ID NO: 19885 - DNA, 25 bp, Canis familiaris
atcgttcatacttgtaaagcacctt

SEQ ID NO: 19886 - DNA, 25 bp, Canis familiaris
atctggtcataatctcttagcatcc

SEQ ID NO: 19887 - DNA, 25 bp, Canis familiaris
atctgggataatgacttggagctaa

SEQ ID NO: 19888 - DNA, 25 bp, Canis familiaris
atcggaacacattcagctgctgggt

SEQ ID NO: 19889 - DNA, 25 bp, Canis familiaris
atcggaactatagtgcctgcagcgg

SEQ ID NO: 19890 - DNA, 25 bp, Canis familiaris
atcggcgacattgtcacagtgggtg

SEQ ID NO: 19891 - DNA, 25 bp, Canis familiaris
atcggcggctttcaggagcaggtgt

SEQ ID NO: 19892 - DNA, 25 bp, Canis familiaris
atcggaggcttgttttcagactgtt

SEQ ID NO: 19893 - DNA, 25 bp, Canis familiaris
atctgtagttatttttttctgtgtt

SEQ ID NO: 19894 - DNA, 25 bp, Canis familiaris
atctgggtctgatgttctgttctgt

SEQ ID NO: 19895 - DNA, 25 bp, Canis familiaris
atctgggatatatttttgcattttt

SEQ ID NO: 19896 - DNA, 25 bp, Canis familiaris
atcgtgagaacatttttgaacattt

SEQ ID NO: 19897 - DNA, 25 bp, Canis familiaris
atctgtcaagagttcttctgaccat

SEQ ID NO: 19898 - DNA, 25 bp, Canis familiaris
atctggaagtgagcattctggacaa

SEQ ID NO: 19899 - DNA, 25 bp, Canis familiaris
atctggctgattgtcaacaggtcaa

SEQ ID NO: 19900 - DNA, 25 bp, Canis familiaris
atcctcatgttactcgccagagtca

SEQ ID NO: 19901 - DNA, 25 bp, Canis familiaris
atcccgtctcctgagctgcaggagt

SEQ ID NO: 19902 - DNA, 25 bp, Canis familiaris
atccctgcccggcagtcagggcagg

SEQ ID NO: 19903 - DNA, 25 bp, Canis familiaris
atccccaccttcgattcagtggcaa

SEQ ID NO: 19904 - DNA, 25 bp, Canis familiaris
atccgtaccaatgtctgcagttaca

SEQ ID NO: 19905 - DNA, 25 bp, Canis familiaris
atccgtcacgacgattctattcttc

SEQ ID NO: 19906 - DNA, 25 bp, Canis familiaris
atcctctccgaggatttcaaattga

SEQ ID NO: 19907 - DNA, 25 bp, Canis familiaris
atccttcctggctctgacaggttgg

SEQ ID NO: 19908 - DNA, 25 bp, Canis familiaris
atcctaactctctctgacaggtgga

SEQ ID NO: 19909 - DNA, 25 bp, Canis familiaris
atgtagacaccttttacggatgggg

SEQ ID NO: 19910 - DNA, 25 bp, Canis familiaris
atgccagtcccttgtttatggttgg

SEQ ID NO: 19911 - DNA, 25 bp, Canis familiaris
atccaccacctattctaacgtttgg

SEQ ID NO: 19912 - DNA, 25 bp, Canis familiaris
atcccatcaccaacacttagcaggt

SEQ ID NO: 19913 - DNA, 25 bp, Canis familiaris
atctgtccctgcagacagttgaggt

SEQ ID NO: 19914 - DNA, 25 bp, Canis familiaris
atcgctccactcttaaaggatgctt

SEQ ID NO: 19915 - DNA, 25 bp, Canis familiaris
atcgtctagctatacctagtgtttt

SEQ ID NO: 19916 - DNA, 25 bp, Canis familiaris
atcgtctggcttaaccctgtgaaat

SEQ ID NO: 19917 - DNA, 25 bp, Canis familiaris
atcgttcgtgctctcacgggaatat

SEQ ID NO: 19918 - DNA, 25 bp, Canis familiaris
atcgttccgcctgggcgggattctg

SEQ ID NO: 19919 - DNA, 25 bp, Canis familiaris
atcgtgttggtagggaagaatttgg

SEQ ID NO: 19920 - DNA, 25 bp, Canis familiaris
atcctttggaagggcaagttctggt

SEQ ID NO: 19921 - DNA, 25 bp, Canis familiaris
atcccttaaaaaccagcttcgtctg

SEQ ID NO: 19922 - DNA, 25 bp, Canis familiaris
atccacttcaacttagacagcctgc

SEQ ID NO: 19923 - DNA, 25 bp, Canis familiaris
atccagctccctgtatggagtctgc

SEQ ID NO: 19924 - DNA, 25 bp, Canis familiaris
atcgtggtcctgggactgagtcgcc

SEQ ID NO: 19925 - DNA, 25 bp, Canis familiaris
atcgatgagtcccgagactgaacca

SEQ ID NO: 19926 - DNA, 25 bp, Canis familiaris
atccatattggcagaacgaaaacgc

SEQ ID NO: 19927 - DNA, 25 bp, Canis familiaris
atccaattggtacagagacggctct

SEQ ID NO: 19928 - DNA, 25 bp, Canis familiaris
atcctcgatgtttcggagccaggtc

SEQ ID NO: 19929 - DNA, 25 bp, Canis familiaris
atcctttgtcacgagggtgcggtct

SEQ ID NO: 19930 - DNA, 25 bp, Canis familiaris
atccttttgcctgcaggtcagttgt

SEQ ID NO: 19931 - DNA, 25 bp, Canis familiaris
atccatccagtgtctgacggtgcat

SEQ ID NO: 19932 - DNA, 25 bp, Canis familiaris
atcgagaatgtggcgtcgctctgag

SEQ ID NO: 19933 - DNA, 25 bp, Canis familiaris
atctggaattgtcatgctgtctcat

SEQ ID NO: 19934 - DNA, 25 bp, Canis familiaris
atcgcctctctgacagatgctgttc

SEQ ID NO: 19935 - DNA, 25 bp, Canis familiaris
atcgccagctctaatacgactcact

SEQ ID NO: 19936 - DNA, 25 bp, Canis familiaris
atcgtcgtgcagcaagctgacccat

SEQ ID NO: 19937 - DNA, 25 bp, Canis familiaris
atcgtcgtgcaagcagctgaccatc

SEQ ID NO: 19938 - DNA, 25 bp, Canis familiaris
atcgtcgtcaataattcatcagtcg

SEQ ID NO: 19939 - DNA, 25 bp, Canis familiaris
atcgagctgtagaggctccagctca

SEQ ID NO: 19940 - DNA, 25 bp, Canis familiaris
atccagcgcaacatgtctgccatgg

SEQ ID NO: 19941 - DNA, 25 bp, Canis familiaris
atcctgcgaacttctagctgtggtc

SEQ ID NO: 19942 - DNA, 25 bp, Canis familiaris
atcgtggaggtcctcactgaggtgc

SEQ ID NO: 19943 - DNA, 25 bp, Canis familiaris
atcgatgacagagtctctccgacct

SEQ ID NO: 19944 - DNA, 25 bp, Canis familiaris
atcgcgacaatcgacatcaagacct

SEQ ID NO: 19945 - DNA, 25 bp, Canis familiaris
atccgaaagcggtctaaccacagaa

SEQ ID NO: 19946 - DNA, 25 bp, Canis familiaris
atccgcgtggggttcaacaaactga

SEQ ID NO: 19947 - DNA, 25 bp, Canis familiaris
atccctgttgcactgttaaaaagta

SEQ ID NO: 19948 - DNA, 25 bp, Canis familiaris
atccctctcacactgtctggggaag

SEQ ID NO: 19949 - DNA, 25 bp, Canis familiaris
atcccagctactcgggaggctgagg

SEQ ID NO: 19950 - DNA, 25 bp, Canis familiaris
atcccacgccctgacaggtgaggtg

SEQ ID NO: 19951 - DNA, 25 bp, Canis familiaris
atcgccggccctagggatatggggg

SEQ ID NO: 19952 - DNA, 25 bp, Canis familiaris
atcgccgacggctacgaacaggccg

SEQ ID NO: 19953 - DNA, 25 bp, Canis familiaris
atcgggcccagattcggatcaggcc

SEQ ID NO: 19954 - DNA, 25 bp, Canis familiaris
atccggcccgtacgaggggccatat

SEQ ID NO: 19955 - DNA, 25 bp, Canis familiaris
atgacctccaggagggacgtcctca

SEQ ID NO: 19956 - DNA, 25 bp, Canis familiaris
atccctccggcagggaatgggctcc

SEQ ID NO: 19957 - DNA, 25 bp, Canis familiaris
atccctaccagcggtgagtgtggcc

SEQ ID NO: 19958 - DNA, 25 bp, Canis familiaris
atcctgaagcacacagggcctggca

SEQ ID NO: 19959 - DNA, 25 bp, Canis familiaris
atcctgaaccatcaggcccaatcag

SEQ ID NO: 19960 - DNA, 25 bp, Canis familiaris
atccatgaaacatactatacttact

SEQ ID NO: 19961 - DNA, 25 bp, Canis familiaris
atcgcaagaacataataattaaaat

SEQ ID NO: 19962 - DNA, 25 bp, Canis familiaris
atccagagaatgtaagtttgtaagc

SEQ ID NO: 19963 - DNA, 25 bp, Canis familiaris
atccagttatgatcggtctgacctg

SEQ ID NO: 19964 - DNA, 25 bp, Canis familiaris
atcccacttgaggctggttgtcttc

SEQ ID NO: 19965 - DNA, 25 bp, Canis familiaris
atcccactgttagttttctcaatcc

SEQ ID NO: 19966 - DNA, 25 bp, Canis familiaris
atccctcagatatgcttgtctctat

SEQ ID NO: 19967 - DNA, 25 bp, Canis familiaris
atcctctgagagtgtttgcccagtg

SEQ ID NO: 19968 - DNA, 25 bp, Canis familiaris
atccttgcaaatattcatgcccccc

SEQ ID NO: 19969 - DNA, 25 bp, Canis familiaris
atcgctgtgagaatgaggcctcccc

SEQ ID NO: 19970 - DNA, 25 bp, Canis familiaris
atcctgtaaaggccctcaccaattg

SEQ ID NO: 19971 - DNA, 25 bp, Canis familiaris
atcgttaatacgtcacatcttcgtc

SEQ ID NO: 19972 - DNA, 25 bp, Canis familiaris
atcggtatgaacaaaactacagata

SEQ ID NO: 19973 - DNA, 25 bp, Canis familiaris
atccgattcagactcaaatctccaa

SEQ ID NO: 19974 - DNA, 25 bp, Canis familiaris
atcggactacattgacacatacaaa

SEQ ID NO: 19975 - DNA, 25 bp, Canis familiaris
atcgtgactattcagatcatccaag

SEQ ID NO: 19976 - DNA, 25 bp, Canis familiaris
atcgtggatcagtctaaaacatatg

SEQ ID NO: 19977 - DNA, 25 bp, Canis familiaris
atcgtgcgtgacatcaaagagaagc

SEQ ID NO: 19978 - DNA, 25 bp, Canis familiaris
atcgtggccatctggaagagacagt

SEQ ID NO: 19979 - DNA, 25 bp, Canis familiaris
atcgtggtgagctggatgatcgccc

SEQ ID NO: 19980 - DNA, 25 bp, Canis familiaris
atcggtgtgatcctgagagactccc

SEQ ID NO: 19981 - DNA, 25 bp, Canis familiaris
atcgatgtgtgtcagagagatcctc

SEQ ID NO: 19982 - DNA, 25 bp, Canis familiaris
atcgtggtggccgtgatcatgatct

SEQ ID NO: 19983 - DNA, 25 bp, Canis familiaris
atcggtgatgttatgatcatgactt

SEQ ID NO: 19984 - DNA, 25 bp, Canis familiaris
atcgggcatgctattccagtgtatt

SEQ ID NO: 19985 - DNA, 25 bp, Canis familiaris
atcggggtcattgccaatgatatgg

SEQ ID NO: 19986 - DNA, 25 bp, Canis familiaris
atgcgggaactggctccaagaacgt

SEQ ID NO: 19987 - DNA, 25 bp, Canis familiaris
atcgccttcacttgtgccaatgaga

SEQ ID NO: 19988 - DNA, 25 bp, Canis familiaris
atcgcgctacacaggacagctggaa

SEQ ID NO: 19989 - DNA, 25 bp, Canis familiaris
atctggctcctcagagacctgagga

SEQ ID NO: 19990 - DNA, 25 bp, Canis familiaris
atctggctcactgctgagagcctgc

SEQ ID NO: 19991 - DNA, 25 bp, Canis familiaris
atccgctcagcaacaggcagacaga

SEQ ID NO: 19992 - DNA, 25 bp, Canis familiaris
atccgtagcttcctcaagctgtaca

SEQ ID NO: 19993 - DNA, 25 bp, Canis familiaris
atcccttctccacttactgtaatgg

SEQ ID NO: 19994 - DNA, 25 bp, Canis familiaris
atccgcgtatgctgttccagtgaat

SEQ ID NO: 19995 - DNA, 25 bp, Canis familiaris
atcccgatctaagtctctcgtgggt

SEQ ID NO: 19996 - DNA, 25 bp, Canis familiaris
atcgccagcatttcgatcctcgtca

SEQ ID NO: 19997 - DNA, 25 bp, Canis familiaris
atcccattatgaatgtgcctctatc

SEQ ID NO: 19998 - DNA, 25 bp, Canis familiaris
atcccatagtggaatgccaccacgg

SEQ ID NO: 19999 - DNA, 25 bp, Canis familiaris
atccaaaaggcatccacacctgggt

SEQ ID NO: 20000 - DNA, 25 bp, Canis familiaris
atcccaaaagaaatctccctctcag

SEQ ID NO: 20001 - DNA, 25 bp, Canis familiaris
atcccaatcacatacaaacttctca

SEQ ID NO: 20002 - DNA, 25 bp, Canis familiaris
atcgagactttctacaacacctcca

SEQ ID NO: 20003 - DNA, 25 bp, Canis familiaris
atcggagcacttcaagaccacatca

SEQ ID NO: 20004 - DNA, 25 bp, Canis familiaris
atccgactgtgaataaaccaagcat

SEQ ID NO: 20005 - DNA, 25 bp, Canis familiaris
atcccagcgttccaacaagcaaaaa

SEQ ID NO: 20006 - DNA, 25 bp, Canis familiaris
atccctgagaatcccactaataaaa

SEQ ID NO: 20007 - DNA, 25 bp, Canis familiaris
atcccatggccatgacccaaaagta

SEQ ID NO: 20008 - DNA, 25 bp, Canis familiaris
atccgcatttcaggacccaatggtt

SEQ ID NO: 20009 - DNA, 25 bp, Canis familiaris
atccctttcatcccgtcaatggata

SEQ ID NO: 20010 - DNA, 25 bp, Canis familiaris
atccttcttactgggcattatggaa

SEQ ID NO: 20011 - DNA, 25 bp, Canis familiaris
atccttaccacgctcatttagacat

SEQ ID NO: 20012 - DNA, 25 bp, Canis familiaris
atccttccctagcgctagtatcata

SEQ ID NO: 20013 - DNA, 25 bp, Canis familiaris
atccttaaaaagcctctatacatac

SEQ ID NO: 20014 - DNA, 25 bp, Canis familiaris
atcgcacatcatgaatagccaacat

SEQ ID NO: 20015 - DNA, 25 bp, Canis familiaris
atcgatccatccaataccaaagcat

SEQ ID NO: 20016 - DNA, 25 bp, Canis familiaris
atgcatgtaccgcactccagaaatc

SEQ ID NO: 20017 - DNA, 25 bp, Canis familiaris
gcagttaactggctcaaacaacctt

SEQ ID NO: 20018 - DNA, 25 bp, Canis familiaris
atgcttccacagcgtaaatacaccc

SEQ ID NO: 20019 - DNA, 25 bp, Canis familiaris
agcttaacttaatattgcccccaca

SEQ ID NO: 20020 - DNA, 25 bp, Canis familiaris
aattaactcttatcggacgaactat

SEQ ID NO: 20021 - DNA, 25 bp, Canis familiaris
agatctataccgcttgggaaacgtt

SEQ ID NO: 20022 - DNA, 25 bp, Canis familiaris
atgcttaagggatttgtggaaaccg

SEQ ID NO: 20023 - DNA, 25 bp, Canis familiaris
atgtataatcctttttgtaacccag

SEQ ID NO: 20024 - DNA, 25 bp, Canis familiaris
atgcctcaaacctgtgttaacccat

SEQ ID NO: 20025 - DNA, 25 bp, Canis familiaris
atcccattaggtttctttattccat

SEQ ID NO: 20026 - DNA, 25 bp, Canis familiaris
atccctcagaggtaactactatcct

SEQ ID NO: 20027 - DNA, 25 bp, Canis familiaris
atccctgagcctaaacacagtactt

SEQ ID NO: 20028 - DNA, 25 bp, Canis familiaris
atccctgccgttagcgactgcgacg

SEQ ID NO: 20029 - DNA, 25 bp, Canis familiaris
atcccatcagcggtgattgatcccc

SEQ ID NO: 20030 - DNA, 25 bp, Canis familiaris
atccgcacagtggctgtctactcgg

SEQ ID NO: 20031 - DNA, 25 bp, Canis familiaris
atcccagtgaggcattatcgcgctg

SEQ ID NO: 20032 - DNA, 25 bp, Canis familiaris
atcctagtggaattgaatcccgttc

SEQ ID NO: 20033 - DNA, 25 bp, Canis familiaris
atcctggttttaatgtcccgttgct

SEQ ID NO: 20034 - DNA, 25 bp, Canis familiaris
atgaagagttgacacgtccctgttg

SEQ ID NO: 20035 - DNA, 25 bp, Canis familiaris
atgctaggtttgtttctccttgggc

SEQ ID NO: 20036 - DNA, 25 bp, Canis familiaris
atgccaggtgggggtacacgggagc

SEQ ID NO: 20037 - DNA, 25 bp, Canis familiaris
atgacccttttggtacacgtagaga

SEQ ID NO: 20038 - DNA, 25 bp, Canis familiaris
atgatcctccttttagaccttggaa

SEQ ID NO: 20039 - DNA, 25 bp, Canis familiaris
agctttgcctatctaacagttgtta

SEQ ID NO: 20040 - DNA, 25 bp, Canis familiaris
accttagaatcctagaactggttca

SEQ ID NO: 20041 - DNA, 25 bp, Canis familiaris
atcccaagattccaaggccttattc

SEQ ID NO: 20042 - DNA, 25 bp, Canis familiaris
atcccaagagggcaagcagcagtat

SEQ ID NO: 20043 - DNA, 25 bp, Canis familiaris
atccacactggggagaagccgtacc

SEQ ID NO: 20044 - DNA, 25 bp, Canis familiaris
atccgcctgagggcaacagccaggt

SEQ ID NO: 20045 - DNA, 25 bp, Canis familiaris
atccgccacaggggccagatgacgt

SEQ ID NO: 20046 - DNA, 25 bp, Canis familiaris
atccgacacgacacaaggacgtcca

SEQ ID NO: 20047 - DNA, 25 bp, Canis familiaris
atccaggacacgctagtgggggcca

SEQ ID NO: 20048 - DNA, 25 bp, Canis familiaris
atccaggccacccttggagggagaa

SEQ ID NO: 20049 - DNA, 25 bp, Canis familiaris
atcgggacatcttttggaagaggag

SEQ ID NO: 20050 - DNA, 25 bp, Canis familiaris
atgctaaaccttttggccagagaat

SEQ ID NO: 20051 - DNA, 25 bp, Canis familiaris
atcccacccttatagctcagagaat

SEQ ID NO: 20052 - DNA, 25 bp, Canis familiaris
atcccacgtttatgagtcagcgact

SEQ ID NO: 20053 - DNA, 25 bp, Canis familiaris
atcccactgttgataaggcactgat

SEQ ID NO: 20054 - DNA, 25 bp, Canis familiaris
atcccattttgctttgaccacatgt

SEQ ID NO: 20055 - DNA, 25 bp, Canis familiaris
atcgagcttttatttccttgctgct

SEQ ID NO: 20056 - DNA, 25 bp, Canis familiaris
atcgagttgctagtatttcagagtt

SEQ ID NO: 20057 - DNA, 25 bp, Canis familiaris
atcccaatctcagtgttctcaattt

SEQ ID NO: 20058 - DNA, 25 bp, Canis familiaris
atcgccaacatatacttcaagcctt

SEQ ID NO: 20059 - DNA, 25 bp, Canis familiaris
atcgccaacatatacttcaagcctt

SEQ ID NO: 20060 - DNA, 25 bp, Canis familiaris
atcgcaaacatatacttcaagcctt

SEQ ID NO: 20061 - DNA, 25 bp, Canis familiaris
atcgcaaacatatacttcaagcctt

SEQ ID NO: 20062 - DNA, 25 bp, Canis familiaris
atcgcaacatagtacctgtcaagcc

SEQ ID NO: 20063 - DNA, 25 bp, Canis familiaris
atcgtcagcatagccacttagcgct

SEQ ID NO: 20064 - DNA, 25 bp, Canis familiaris
atcgatgcaatctgccttatcctgt

SEQ ID NO: 20065 - DNA, 25 bp, Canis familiaris
atcgataatctttttgtgttgtttg

SEQ ID NO: 20066 - DNA, 25 bp, Canis familiaris
atcgagtcctgtattgggctttctg

SEQ ID NO: 20067 - DNA, 25 bp, Canis familiaris
atcgtgtctgttatttgcattcttt

SEQ ID NO: 20068 - DNA, 25 bp, Canis familiaris
atcgctgtttgtgttctactaatat

SEQ ID NO: 20069 - DNA, 25 bp, Canis familiaris
atccttttttgtaatactttctatg

SEQ ID NO: 20070 - DNA, 25 bp, Canis familiaris
atcctttttgagactggcactcgcc

SEQ ID NO: 20071 - DNA, 25 bp, Canis familiaris
atcctttatattatggaccgaaatt

SEQ ID NO: 20072 - DNA, 25 bp, Canis familiaris
atccgttatatctatgttaacctca

SEQ ID NO: 20073 - DNA, 25 bp, Canis familiaris
atgcctttacatgagaagcccccat

SEQ ID NO: 20074 - DNA, 25 bp, Canis familiaris
atgccttaacacagaaaccattctc

SEQ ID NO: 20075 - DNA, 25 bp, Canis familiaris
atccctgaaatcacacacaatcttg

SEQ ID NO: 20076 - DNA, 25 bp, Canis familiaris
atccctatagccaaacatggtcttg

SEQ ID NO: 20077 - DNA, 25 bp, Canis familiaris
atcccttatgggtacagtgtctcga

SEQ ID NO: 20078 - DNA, 25 bp, Canis familiaris
atccgctctatggttactttgctgc

SEQ ID NO: 20079 - DNA, 25 bp, Canis familiaris
atgcgagtttttacctatatgtctt

SEQ ID NO: 20080 - DNA, 25 bp, Canis familiaris
atccctgtattttccaaatgatctc

SEQ ID NO: 20081 - DNA, 25 bp, Canis familiaris
atccctgagtctgacggggatgctc

SEQ ID NO: 20082 - DNA, 25 bp, Canis familiaris
atccctgagtctcccagagggtcat

SEQ ID NO: 20083 - DNA, 25 bp, Canis familiaris
atccctgctgtccaccagggacaga

SEQ ID NO: 20084 - DNA, 25 bp, Canis familiaris
atcccatgcgtcttcggtagacaag

SEQ ID NO: 20085 - DNA, 25 bp, Canis familiaris
atcctgtcccttgattaagcaagtg

SEQ ID NO: 20086 - DNA, 25 bp, Canis familiaris
atcctccccctttgtaagcatgaga

SEQ ID NO: 20087 - DNA, 25 bp, Canis familiaris
atcgctgagcccatctttgaagaat

SEQ ID NO: 20088 - DNA, 25 bp, Canis familiaris
atcgcatccctctcagtaagaaaca

SEQ ID NO: 20089 - DNA, 25 bp, Canis familiaris
atccccacctgccagtataggaatc

SEQ ID NO: 20090 - DNA, 25 bp, Canis familiaris
atcccacgctggtataataatgaat

SEQ ID NO: 20091 - DNA, 25 bp, Canis familiaris
atcccacgctaactacatatatata

SEQ ID NO: 20092 - DNA, 25 bp, Canis familiaris
atcccgactccacaataacattaat

SEQ ID NO: 20093 - DNA, 25 bp, Canis familiaris
atccctgagccctcaaattcttaag

SEQ ID NO: 20094 - DNA, 25 bp, Canis familiaris
atccctggccacaggagtctctatt

SEQ ID NO: 20095 - DNA, 25 bp, Canis familiaris
atcccctccagcttggggactgtgt

SEQ ID NO: 20096 - DNA, 25 bp, Canis familiaris
atccagcctaccatgagttattgtt

SEQ ID NO: 20097 - DNA, 25 bp, Canis familiaris
atgcctgttaacgtggttcatgtgg

SEQ ID NO: 20098 - DNA, 25 bp, Canis familiaris
atcgttttcagcttttatcactaga

SEQ ID NO: 20099 - DNA, 25 bp, Canis familiaris
atcgttttaatttccatattatcac

SEQ ID NO: 20100 - DNA, 25 bp, Canis familiaris
atcgttttctaatctgtatgcttca

SEQ ID NO: 20101 - DNA, 25 bp, Canis familiaris
atcgctctcatcttaaactgatatt

SEQ ID NO: 20102 - DNA, 25 bp, Canis familiaris
atgcccttcttcatagtgaactgta

SEQ ID NO: 20103 - DNA, 25 bp, Canis familiaris
atcccttttaacatgacacctattt

SEQ ID NO: 20104 - DNA, 25 bp, Canis familiaris
atcccagttgctacaaaagacacta

SEQ ID NO: 20105 - DNA, 25 bp, Canis familiaris
atcccagattgcactcctggagcag

SEQ ID NO: 20106 - DNA, 25 bp, Canis familiaris
atcccatttaccttctgggccagat

SEQ ID NO: 20107 - DNA, 25 bp, Canis familiaris
atccatcaattatccctttgctaat

SEQ ID NO: 20108 - DNA, 25 bp, Canis familiaris
atccattcactatacttttctaact

SEQ ID NO: 20109 - DNA, 25 bp, Canis familiaris
atccattggcaataacctgtgtacc

SEQ ID NO: 20110 - DNA, 25 bp, Canis familiaris
atcctatgtgacccaacaagggcac

SEQ ID NO: 20111 - DNA, 25 bp, Canis familiaris
atccttctgcagccgtgatcaaggg

SEQ ID NO: 20112 - DNA, 25 bp, Canis familiaris
atcctgcttgaacttgaccagtgtg

SEQ ID NO: 20113 - DNA, 25 bp, Canis familiaris
atccagcttgaaatttagggagcct

SEQ ID NO: 20114 - DNA, 25 bp, Canis familiaris
atgcccttacttgtagtggtcatcc

SEQ ID NO: 20115 - DNA, 25 bp, Canis familiaris
ctgcccaatttgggtggggttcctg

SEQ ID NO: 20116 - DNA, 25 bp, Canis familiaris
atgcgggtctgggactggggtatgc

SEQ ID NO: 20117 - DNA, 25 bp, Canis familiaris
atgcgacctaggggcatctgggtgg

SEQ ID NO: 20118 - DNA, 25 bp, Canis familiaris
atgcccttagatgtccggggctgca

SEQ ID NO: 20119 - DNA, 25 bp, Canis familiaris
atcctttagatcaatttttcctgtc

SEQ ID NO: 20120 - DNA, 25 bp, Canis familiaris
atcgttgtacatctgattcttttat

SEQ ID NO: 20121 - DNA, 25 bp, Canis familiaris
atcgtttcactctggttttctattt

SEQ ID NO: 20122 - DNA, 25 bp, Canis familiaris
atcctctgaacctgtctttttttca

SEQ ID NO: 20123 - DNA, 25 bp, Canis familiaris
atcccgtgtctctgttaatacttgt

SEQ ID NO: 20124 - DNA, 25 bp, Canis familiaris
atcccatcggtctgtgtaatatttt

SEQ ID NO: 20125 - DNA, 25 bp, Canis familiaris
atgaaatcggtcttatggtttttga

SEQ ID NO: 20126 - DNA, 25 bp, Canis familiaris
atcgatatcggtatagttctctttt

SEQ ID NO: 20127 - DNA, 25 bp, Canis familiaris
atcgcatcagaagcatttttctttg

SEQ ID NO: 20128 - DNA, 25 bp, Canis familiaris
atcgcagcagacgtaagttctttgt

SEQ ID NO: 20129 - DNA, 25 bp, Canis familiaris
atgctgccaccacagtggtctttct

SEQ ID NO: 20130 - DNA, 25 bp, Canis familiaris
atcgacagccaatctgatgctctgg

SEQ ID NO: 20131 - DNA, 25 bp, Canis familiaris
atccaatcagcattcttgatcttgg

SEQ ID NO: 20132 - DNA, 25 bp, Canis familiaris
atccactatcattgtgtcctagcct

SEQ ID NO: 20133 - DNA, 25 bp, Canis familiaris
atcgcacgtctaatgtattaacccc

SEQ ID NO: 20134 - DNA, 25 bp, Canis familiaris
atcgcaagtataatattctggcacc

SEQ ID NO: 20135 - DNA, 25 bp, Canis familiaris
atcgcaaataaaatgttgaccacta

SEQ ID NO: 20136 - DNA, 25 bp, Canis familiaris
atcctaaaattatttgatccagcat

SEQ ID NO: 20137 - DNA, 25 bp, Canis familiaris
atcctaaactgtattttgcctttgt

SEQ ID NO: 20138 - DNA, 25 bp, Canis familiaris
atcctaggagttattttcttgtttg

SEQ ID NO: 20139 - DNA, 25 bp, Canis familiaris
atcgccgggtccaatttggcattga

SEQ ID NO: 20140 - DNA, 25 bp, Canis familiaris
atcccagaggctgccttgggcatct

SEQ ID NO: 20141 - DNA, 25 bp, Canis familiaris
atccacagagtgtcccgtggggctt

SEQ ID NO: 20142 - DNA, 25 bp, Canis familiaris
atccatcagaggttgatcttccggc

SEQ ID NO: 20143 - DNA, 25 bp, Canis familiaris
atcctaaatggttccttctgggcag

SEQ ID NO: 20144 - DNA, 25 bp, Canis familiaris
atcccaaaggtacgttcatcttcag

SEQ ID NO: 20145 - DNA, 25 bp, Canis familiaris
atcccaacacgatcagttttgcttg

SEQ ID NO: 20146 - DNA, 25 bp, Canis familiaris
atcccaacactgttttgttgcttgt

SEQ ID NO: 20147 - DNA, 25 bp, Canis familiaris
atcccactactaatttgacatcttt

SEQ ID NO: 20148 - DNA, 25 bp, Canis familiaris
atcccctattgccattaaactgtta

SEQ ID NO: 20149 - DNA, 25 bp, Canis familiaris
atcccagctttcctaaagtctctgt

SEQ ID NO: 20150 - DNA, 25 bp, Canis familiaris
atcctagtcctcctagaatgaattg

SEQ ID NO: 20151 - DNA, 25 bp, Canis familiaris
atcctgagacccctcgaaggagtct

SEQ ID NO: 20152 - DNA, 25 bp, Canis familiaris
atccgtgatcacaccaaaggatggt

SEQ ID NO: 20153 - DNA, 25 bp, Canis familiaris
atcccatcacctcctcaaaggaagt

SEQ ID NO: 20154 - DNA, 25 bp, Canis familiaris
atcccccctcccagaagaagtggat

SEQ ID NO: 20155 - DNA, 25 bp, Canis familiaris
accccccaccctgataaagagagat

SEQ ID NO: 20156 - DNA, 25 bp, Canis familiaris
atcccacctcactcatttaaagaaa

SEQ ID NO: 20157 - DNA, 25 bp, Canis familiaris
atccacatcccctctagtgaaggaa

SEQ ID NO: 20158 - DNA, 25 bp, Canis familiaris
atgccaaagccctcttgtgtgagtc

SEQ ID NO: 20159 - DNA, 25 bp, Canis familiaris
atccttagtccagcatgcttgtagt

SEQ ID NO: 20160 - DNA, 25 bp, Canis familiaris
acctgcaagctctatgccattcgta

SEQ ID NO: 20161 - DNA, 25 bp, Canis familiaris
atcctgctagctgattaatgcctac

SEQ ID NO: 20162 - DNA, 25 bp, Canis familiaris
atgccatgtggctgaaaggtctaca

SEQ ID NO: 20163 - DNA, 25 bp, Canis familiaris
atccatttgcaataaggtcccagta

SEQ ID NO: 20164 - DNA, 25 bp, Canis familiaris
atccttctgcgagaagggccagagg

SEQ ID NO: 20165 - DNA, 25 bp, Canis familiaris
accttgtatgggtgggaccaggcaa

SEQ ID NO: 20166 - DNA, 25 bp, Canis familiaris
atcctgtggggtgctgggaacgcga

SEQ ID NO: 20167 - DNA, 25 bp, Canis familiaris
atccatgggggaacaggagtcagcc

SEQ ID NO: 20168 - DNA, 25 bp, Canis familiaris
atcctggcatggcaacgggctaagt

SEQ ID NO: 20169 - DNA, 25 bp, Canis familiaris
atcctggggtcgtgcgtttgagacc

SEQ ID NO: 20170 - DNA, 25 bp, Canis familiaris
atcctcggagtcctagggtcgagct

SEQ ID NO: 20171 - DNA, 25 bp, Canis familiaris
atcccgggcctcaaacaccagaggc

SEQ ID NO: 20172 - DNA, 25 bp, Canis familiaris
atcgccggggacaacatcaggccat

SEQ ID NO: 20173 - DNA, 25 bp, Canis familiaris
atccttggggaaaacatacctggct

SEQ ID NO: 20174 - DNA, 25 bp, Canis familiaris
aggttggaacaataataatcggctt

SEQ ID NO: 20175 - DNA, 25 bp, Canis familiaris
agagttaaacaatataaatgccttt

SEQ ID NO: 20176 - DNA, 25 bp, Canis familiaris
aggattaaggattctaacattgcct

SEQ ID NO: 20177 - DNA, 25 bp, Canis familiaris
atgagacccggtgctaaagtgtgag

SEQ ID NO: 20178 - DNA, 25 bp, Canis familiaris
atcccacctgtggcctagaaggggt

SEQ ID NO: 20179 - DNA, 25 bp, Canis familiaris
atgcccgccagtgtgctaactggga

SEQ ID NO: 20180 - DNA, 25 bp, Canis familiaris
atcccaggatgggtggaagccggaa

SEQ ID NO: 20181 - DNA, 25 bp, Canis familiaris
atcccgtcagggccgtagactgaac

SEQ ID NO: 20182 - DNA, 25 bp, Canis familiaris
atgcccagtcaggggtataactcag

SEQ ID NO: 20183 - DNA, 25 bp, Canis familiaris
atcccagacatacggtatacagagt

SEQ ID NO: 20184 - DNA, 25 bp, Canis familiaris
atcccctctaagtattacagatgct

SEQ ID NO: 20185 - DNA, 25 bp, Canis familiaris
atcccaccctgagattggcagatgc

SEQ ID NO: 20186 - DNA, 25 bp, Canis familiaris
atcccacctgctatgcattgtcagg

SEQ ID NO: 20187 - DNA, 25 bp, Canis familiaris
atccctgcacctactaattctggtc

SEQ ID NO: 20188 - DNA, 25 bp, Canis familiaris
atccggagcgtgatattactgcttc

SEQ ID NO: 20189 - DNA, 25 bp, Canis familiaris
atccaagtggctactactaattatc

SEQ ID NO: 20190 - DNA, 25 bp, Canis familiaris
atcgaagtggaggtgccctttgacc

SEQ ID NO: 20191 - DNA, 25 bp, Canis familiaris
aggaattggattgcccttaaccctg

SEQ ID NO: 20192 - DNA, 25 bp, Canis familiaris
agtctactgggtgcctttacaagcc

SEQ ID NO: 20193 - DNA, 25 bp, Canis familiaris
aagctactgaagtgcctttgaatta

SEQ ID NO: 20194 - DNA, 25 bp, Canis familiaris
atcgctgcactgtgactggtgggaa

SEQ ID NO: 20195 - DNA, 25 bp, Canis familiaris
atcgctccctattgcaggggggcag

SEQ ID NO: 20196 - DNA, 25 bp, Canis familiaris
atccagtcctgggcaggtgctggga

SEQ ID NO: 20197 - DNA, 25 bp, Canis familiaris
atccgcagcctgcgggatgctggac

SEQ ID NO: 20198 - DNA, 25 bp, Canis familiaris
atcgcagagccaagagggcccgagc

SEQ ID NO: 20199 - DNA, 25 bp, Canis familiaris
atcgcaaggaaaggcagcaggcgcg

SEQ ID NO: 20200 - DNA, 25 bp, Canis familiaris
atcgcatttgaacatgatggggagc

SEQ ID NO: 20201 - DNA, 25 bp, Canis familiaris
atcctatgtggtccttggggagctt

SEQ ID NO: 20202 - DNA, 25 bp, Canis familiaris
atcctatatggttaccggtggcctc

SEQ ID NO: 20203 - DNA, 25 bp, Canis familiaris
atcccaatggattaccacgtgtgct

SEQ ID NO: 20204 - DNA, 25 bp, Canis familiaris
atcccaatagattcttgtttgtgtt

SEQ ID NO: 20205 - DNA, 25 bp, Canis familiaris
atgcccaatatgttctttctagaaa

SEQ ID NO: 20206 - DNA, 25 bp, Canis familiaris
atcccaaatgattctcttataaact

SEQ ID NO: 20207 - DNA, 25 bp, Canis familiaris
atcccataatatcatgctccaaata

SEQ ID NO: 20208 - DNA, 25 bp, Canis familiaris
atccccaatgtccactcagaaacat

SEQ ID NO: 20209 - DNA, 25 bp, Canis familiaris
atccccactgctgcaccaaaataat

SEQ ID NO: 20210 - DNA, 25 bp, Canis familiaris
atccgcaactctgccgtcaaaaatt

SEQ ID NO: 20211 - DNA, 25 bp, Canis familiaris
atccaagtcattgccctcaagaaca

SEQ ID NO: 20212 - DNA, 25 bp, Canis familiaris
atccgtgtattggtccaaaaatgct

SEQ ID NO: 20213 - DNA, 25 bp, Canis familiaris
atccgtggtttttgctcagaactct

SEQ ID NO: 20214 - DNA, 25 bp, Canis familiaris
atccgttgctttggtccaagaccca

SEQ ID NO: 20215 - DNA, 25 bp, Canis familiaris
atccatgttgttgcagatgtcaaaa

SEQ ID NO: 20216 - DNA, 25 bp, Canis familiaris
atccagtgtgtgcagcagtcttcct

SEQ ID NO: 20217 - DNA, 25 bp, Canis familiaris
atccatgggattcatgtcttccccc

SEQ ID NO: 20218 - DNA, 25 bp, Canis familiaris
aacgaaattaacatatcccctcaca

SEQ ID NO: 20219 - DNA, 25 bp, Canis familiaris
aaagacgaaaccactacatactcca

SEQ ID NO: 20220 - DNA, 25 bp, Canis familiaris
atgaaaataaagcacctgtaaccca

SEQ ID NO: 20221 - DNA, 25 bp, Canis familiaris
atgccaccaaaatgaggaaaaccac

SEQ ID NO: 20222 - DNA, 25 bp, Canis familiaris
atcccctcattacaggagaaatgcc

SEQ ID NO: 20223 - DNA, 25 bp, Canis familiaris
atccccgagtgtccaggtgaaacgt

SEQ ID NO: 20224 - DNA, 25 bp, Canis familiaris
atcctgccgagatttccgtgaagca

SEQ ID NO: 20225 - DNA, 25 bp, Canis familiaris
atcgctgccaggatatacgtaatct

SEQ ID NO: 20226 - DNA, 25 bp, Canis familiaris
atccagactcagatcgacgtaatta

SEQ ID NO: 20227 - DNA, 25 bp, Canis familiaris
atccagatctgctttggggcttatc

SEQ ID NO: 20228 - DNA, 25 bp, Canis familiaris
atccattctcatttccaggttattt

SEQ ID NO: 20229 - DNA, 25 bp, Canis familiaris
atccatttttcccgtggtattactg

SEQ ID NO: 20230 - DNA, 25 bp, Canis familiaris
atccttcttcaccggtggttttatg

SEQ ID NO: 20231 - DNA, 25 bp, Canis familiaris
atcctttacctttagatgtttagag

SEQ ID NO: 20232 - DNA, 25 bp, Canis familiaris
atccttaccctttagatgtatttga

SEQ ID NO: 20233 - DNA, 25 bp, Canis familiaris
atccaaaaccttcagtttgcactaa

SEQ ID NO: 20234 - DNA, 25 bp, Canis familiaris
atccaacaatccatacaattttcta

SEQ ID NO: 20235 - DNA, 25 bp, Canis familiaris
atcccaaacctaatgaacctccttg

SEQ ID NO: 20236 - DNA, 25 bp, Canis familiaris
atccaataaaccagtatcccatctt

SEQ ID NO: 20237 - DNA, 25 bp, Canis familiaris
atcccaaagaaccgaaggccacgtg

SEQ ID NO: 20238 - DNA, 25 bp, Canis familiaris
atgcccagcaaatacagaagggccg

SEQ ID NO: 20239 - DNA, 25 bp, Canis familiaris
atccacccaagcaacaaccagggga

SEQ ID NO: 20240 - DNA, 25 bp, Canis familiaris
atccctctcaagcagaaaccctgga

SEQ ID NO: 20241 - DNA, 25 bp, Canis familiaris
atcccctagacagagttctcctgga

SEQ ID NO: 20242 - DNA, 25 bp, Canis familiaris
atcccccagaaccaggtcaatcgga

SEQ ID NO: 20243 - DNA, 25 bp, Canis familiaris
atcgcgcccagagctggaggcagac

SEQ ID NO: 20244 - DNA, 25 bp, Canis familiaris
atcccagcagctgccatggatggat

SEQ ID NO: 20245 - DNA, 25 bp, Canis familiaris
atccccatatgcccatgtaggtttt

SEQ ID NO: 20246 - DNA, 25 bp, Canis familiaris
atccactactaattgctcggtttcc

SEQ ID NO: 20247 - DNA, 25 bp, Canis familiaris
atcccaaatcaattccgttctgtac

SEQ ID NO: 20248 - DNA, 25 bp, Canis familiaris
accaacagcaaatgtcgtccgtaat

SEQ ID NO: 20249 - DNA, 25 bp, Canis familiaris
atcctatcaaaattctcgtccggtt

SEQ ID NO: 20250 - DNA, 25 bp, Canis familiaris
atcctatcaaccatttacctgagtt

SEQ ID NO: 20251 - DNA, 25 bp, Canis familiaris
atccttcacaccattctacagttgt

SEQ ID NO: 20252 - DNA, 25 bp, Canis familiaris
atcctgccaactttgctctacagat

SEQ ID NO: 20253 - DNA, 25 bp, Canis familiaris
atccatgccaaacggtcacaagtat

SEQ ID NO: 20254 - DNA, 25 bp, Canis familiaris
atccaacatggaccaactcaagtta

SEQ ID NO: 20255 - DNA, 25 bp, Canis familiaris
atccacatctggatgaagccaaggt

SEQ ID NO: 20256 - DNA, 25 bp, Canis familiaris
atccaatgctcctttgagccagcgg

SEQ ID NO: 20257 - DNA, 25 bp, Canis familiaris
atccagacactccatcaaatcacgg

SEQ ID NO: 20258 - DNA, 25 bp, Canis familiaris
atccgcatcctcatctcagatgctg

SEQ ID NO: 20259 - DNA, 25 bp, Canis familiaris
atcccatctttcctagtgcatgaga

SEQ ID NO: 20260 - DNA, 25 bp, Canis familiaris
atccctacttcattagattcacaac

SEQ ID NO: 20261 - DNA, 25 bp, Canis familiaris
atcgccaacaatatacttccaagcc

SEQ ID NO: 20262 - DNA, 25 bp, Canis familiaris
atcctcaacaaaatattagcaaacc

SEQ ID NO: 20263 - DNA, 25 bp, Canis familiaris
atcccacaacatatttcgaaatcct

SEQ ID NO: 20264 - DNA, 25 bp, Canis familiaris
atcgccctcagcatggttcataaat

SEQ ID NO: 20265 - DNA, 25 bp, Canis familiaris
atcccctacaatatcaatcagaata

SEQ ID NO: 20266 - DNA, 25 bp, Canis familiaris
atcccacttaatatcacttgctcaa

SEQ ID NO: 20267 - DNA, 25 bp, Canis familiaris
atcccacttaataatcagtgctctc

SEQ ID NO: 20268 - DNA, 25 bp, Canis familiaris
atccctcagggaatgtcagttcaat

SEQ ID NO: 20269 - DNA, 25 bp, Canis familiaris
atgcccaagtacatgaccttaatgg

SEQ ID NO: 20270 - DNA, 25 bp, Canis familiaris
atcccgagactcttatctcttatat

SEQ ID NO: 20271 - DNA, 25 bp, Canis familiaris
atcccattgcctttatttttctaat

SEQ ID NO: 20272 - DNA, 25 bp, Canis familiaris
atccctctgtgtgtgtttcttatga

SEQ ID NO: 20273 - DNA, 25 bp, Canis familiaris
atcccaagtgggacatctgctttta

SEQ ID NO: 20274 - DNA, 25 bp, Canis familiaris
atcctcagtgtgttgccatgtgttt

SEQ ID NO: 20275 - DNA, 25 bp, Canis familiaris
atcccaggtaatccatctttcacat

SEQ ID NO: 20276 - DNA, 25 bp, Canis familiaris
atgcccggtgaatatcattgctcag

SEQ ID NO: 20277 - DNA, 25 bp, Canis familiaris
atccctggatcaaagacagtgctgc

SEQ ID NO: 20278 - DNA, 25 bp, Canis familiaris
atcccagctgcctacaacagatatg

SEQ ID NO: 20279 - DNA, 25 bp, Canis familiaris
agcccagtccaataaataccttaag

SEQ ID NO: 20280 - DNA, 25 bp, Canis familiaris
atccctgtccaatgttaatccgtat

SEQ ID NO: 20281 - DNA, 25 bp, Canis familiaris
atcctctattagttttagttcggtg

SEQ ID NO: 20282 - DNA, 25 bp, Canis familiaris
atcctatttaacttttttctgcctg

SEQ ID NO: 20283 - DNA, 25 bp, Canis familiaris
atcctgagcattacaagttttcttg

SEQ ID NO: 20284 - DNA, 25 bp, Canis familiaris
atccaaaactgctagttgtttctga

SEQ ID NO: 20285 - DNA, 25 bp, Canis familiaris
atgccaaaacagtgaaatctccgca

SEQ ID NO: 20286 - DNA, 25 bp, Canis familiaris
agctaataaagctgatagaggtcaa

SEQ ID NO: 20287 - DNA, 25 bp, Canis familiaris
agtatgtactactgcgtgggtaaaa

SEQ ID NO: 20288 - DNA, 25 bp, Canis familiaris
atgctttccttctcctgggataaaa

SEQ ID NO: 20289 - DNA, 25 bp, Canis familiaris
atcctcatcctttacttagatgata

SEQ ID NO: 20290 - DNA, 25 bp, Canis familiaris
atcccatttttagttgaagacaaag

SEQ ID NO: 20291 - DNA, 25 bp, Canis familiaris
atcccttcattgaaccggagacaat

SEQ ID NO: 20292 - DNA, 25 bp, Canis familiaris
atccctgaattctacctctgaaagt

SEQ ID NO: 20293 - DNA, 25 bp, Canis familiaris
atccggactgcacaccttggaatgt

SEQ ID NO: 20294 - DNA, 25 bp, Canis familiaris
atccaaccatccaaccttgtgaaaa

SEQ ID NO: 20295 - DNA, 25 bp, Canis familiaris
atgctcacaccaacaccgtatggaa

SEQ ID NO: 20296 - DNA, 25 bp, Canis familiaris
atcctcatccatgaccgaagagaca

SEQ ID NO: 20297 - DNA, 25 bp, Canis familiaris
atcctcatcgatgagcacgaccggc

SEQ ID NO: 20298 - DNA, 25 bp, Canis familiaris
atgcctggatgggaacctgatcggt

SEQ ID NO: 20299 - DNA, 25 bp, Canis familiaris
atgcctcagcattgaaaacgtaagt

SEQ ID NO: 20300 - DNA, 25 bp, Canis familiaris
atcctgcatgccaaaaatccactca

SEQ ID NO: 20301 - DNA, 25 bp, Canis familiaris
atgcctagcctaaacagcttccaac

SEQ ID NO: 20302 - DNA, 25 bp, Canis familiaris
atccatatgagccatcagtcagagt

SEQ ID NO: 20303 - DNA, 25 bp, Canis familiaris
atccataggcagtctgtgaatcata

SEQ ID NO: 20304 - DNA, 25 bp, Canis familiaris
atcccaggactccagaatcacaacc

SEQ ID NO: 20305 - DNA, 25 bp, Canis familiaris
atcccagggtcgtgagatcaagccc

SEQ ID NO: 20306 - DNA, 25 bp, Canis familiaris
atcccagggtcccagaatcaagccc

SEQ ID NO: 20307 - DNA, 25 bp, Canis familiaris
atcccagatggcgccgaaagaccag

SEQ ID NO: 20308 - DNA, 25 bp, Canis familiaris
atcccctggcttgcagaaaatccag

SEQ ID NO: 20309 - DNA, 25 bp, Canis familiaris
atcccacggcgtggcaacagtttgc

SEQ ID NO: 20310 - DNA, 25 bp, Canis familiaris
atccgcacgaaggagcagatcgtgg

SEQ ID NO: 20311 - DNA, 25 bp, Canis familiaris
atccctctgcaacggcagcatggtg

SEQ ID NO: 20312 - DNA, 25 bp, Canis familiaris
atccgccagagcaccagctggtgct

SEQ ID NO: 20313 - DNA, 25 bp, Canis familiaris
atccaatatgaccccagcattggta

SEQ ID NO: 20314 - DNA, 25 bp, Canis familiaris
atccattaggccagcaatgcttgta

SEQ ID NO: 20315 - DNA, 25 bp, Canis familiaris
atcctctgagtccccagatgttgtg

SEQ ID NO: 20316 - DNA, 25 bp, Canis familiaris
atgcttttttggccaggtgtggggc

SEQ ID NO: 20317 - DNA, 25 bp, Canis familiaris
atccttgtcctttgcgggtgggaat

SEQ ID NO: 20318 - DNA, 25 bp, Canis familiaris
atccttgttctctggtgtggtgggt

SEQ ID NO: 20319 - DNA, 25 bp, Canis familiaris
atcctttatccatagaatcgtcggt

SEQ ID NO: 20320 - DNA, 25 bp, Canis familiaris
atcctttatccatagaatcgtcggt

SEQ ID NO: 20321 - DNA, 25 bp, Canis familiaris
atccatttcaccaagaggagctgtg

SEQ ID NO: 20322 - DNA, 25 bp, Canis familiaris
atggatctctacaccagggttaccg

SEQ ID NO: 20323 - DNA, 25 bp, Canis familiaris
atgtgggcttgatcccaggattccg

SEQ ID NO: 20324 - DNA, 25 bp, Canis familiaris
atgctgggatcgaggctcaggaccg

SEQ ID NO: 20325 - DNA, 25 bp, Canis familiaris
atgctgggatcgaggctcaggaccg

SEQ ID NO: 20326 - DNA, 25 bp, Canis familiaris
atgcattacccaaggtctgcgagcc

SEQ ID NO: 20327 - DNA, 25 bp, Canis familiaris
atgcgtgacttcgaaggcacgttcc

SEQ ID NO: 20328 - DNA, 25 bp, Canis familiaris
atgcgctggctttaaggggattcct

SEQ ID NO: 20329 - DNA, 25 bp, Canis familiaris
atccatggattaccagcgggttcct

SEQ ID NO: 20330 - DNA, 25 bp, Canis familiaris
atccaggcttagaaagggctttgtt

SEQ ID NO: 20331 - DNA, 25 bp, Canis familiaris
atccatgggccagactggtgctgtt

SEQ ID NO: 20332 - DNA, 25 bp, Canis familiaris
atcctgtacaggtagctaactttgt

SEQ ID NO: 20333 - DNA, 25 bp, Canis familiaris
atcctctagaggctgctacacatac

SEQ ID NO: 20334 - DNA, 25 bp, Canis familiaris
atccattaagtccttactgataggg

SEQ ID NO: 20335 - DNA, 25 bp, Canis familiaris
atccttgcataccttgttcgattgg

SEQ ID NO: 20336 - DNA, 25 bp, Canis familiaris
atgccttgtcccatttctaagagct

SEQ ID NO: 20337 - DNA, 25 bp, Canis familiaris
atcctgttctctaacccaaagggca

SEQ ID NO: 20338 - DNA, 25 bp, Canis familiaris
atcctgtgctgtgctatccgcagga

SEQ ID NO: 20339 - DNA, 25 bp, Canis familiaris
atgccgccttccaccagatggaagc

SEQ ID NO: 20340 - DNA, 25 bp, Canis familiaris
atgccgccttccaccagatggaagc

SEQ ID NO: 20341 - DNA, 25 bp, Canis familiaris
atgccgccttccaccagatggaagc

SEQ ID NO: 20342 - DNA, 25 bp, Canis familiaris
atgtccgtccacagggtggaaccca

SEQ ID NO: 20343 - DNA, 25 bp, Canis familiaris
atgcccttccaaagggtggtccttg

SEQ ID NO: 20344 - DNA, 25 bp, Canis familiaris
atcccattccaagcaggtactcttg

SEQ ID NO: 20345 - DNA, 25 bp, Canis familiaris
atccgtatccaaccagatgtttgtc

SEQ ID NO: 20346 - DNA, 25 bp, Canis familiaris
atccgtatctatcaagatggtgtcc

SEQ ID NO: 20347 - DNA, 25 bp, Canis familiaris
atccgaccattccaagtgtggctcc

SEQ ID NO: 20348 - DNA, 25 bp, Canis familiaris
atcctgggtcgccaggatggcgccc

SEQ ID NO: 20349 - DNA, 25 bp, Canis familiaris
atcctggagaccgcagaggagccgc

SEQ ID NO: 20350 - DNA, 25 bp, Canis familiaris
atcctggaacaggagcaggccaccg

SEQ ID NO: 20351 - DNA, 25 bp, Canis familiaris
atcctggacaccgcaggccaggagg

SEQ ID NO: 20352 - DNA, 25 bp, Canis familiaris
atccaggcacacgggggctgggagg

SEQ ID NO: 20353 - DNA, 25 bp, Canis familiaris
atccaggccaatcaggcgggatagc

SEQ ID NO: 20354 - DNA, 25 bp, Canis familiaris
atgccagaccaacagatgcggcgca

SEQ ID NO: 20355 - DNA, 25 bp, Canis familiaris
atccaagaaggacagcgcagccact

SEQ ID NO: 20356 - DNA, 25 bp, Canis familiaris
atccagaaagagtccaccttgcact

SEQ ID NO: 20357 - DNA, 25 bp, Canis familiaris
atccagaaagagtcaactctccacc

SEQ ID NO: 20358 - DNA, 25 bp, Canis familiaris
atcctgaagacttgacaccttccca

SEQ ID NO: 20359 - DNA, 25 bp, Canis familiaris
atcctgaagacttttcagctcccct

SEQ ID NO: 20360 - DNA, 25 bp, Canis familiaris
atcctgcaaattttgtatccctcca

SEQ ID NO: 20361 - DNA, 25 bp, Canis familiaris
atcctgaagtgaggctgcctgccct

SEQ ID NO: 20362 - DNA, 25 bp, Canis familiaris
atccgagagggtgcactgatcctgc

SEQ ID NO: 20363 - DNA, 25 bp, Canis familiaris
atccatggggtgtcacactgtgcct

SEQ ID NO: 20364 - DNA, 25 bp, Canis familiaris
atccatcaggggtgcttgggtggct

SEQ ID NO: 20365 - DNA, 25 bp, Canis familiaris
atcccaggaagggggcgtggcagct

SEQ ID NO: 20366 - DNA, 25 bp, Canis familiaris
atcctcggcaggtggagcgtggttg

SEQ ID NO: 20367 - DNA, 25 bp, Canis familiaris
atccctccaggctgtgagctatgcc

SEQ ID NO: 20368 - DNA, 25 bp, Canis familiaris
atccactcatcagctgatggacatt

SEQ ID NO: 20369 - DNA, 25 bp, Canis familiaris
atgctgaattcactctcaggctctg

SEQ ID NO: 20370 - DNA, 25 bp, Canis familiaris
atgcgcgtaatcgtcaggcagagca

SEQ ID NO: 20371 - DNA, 25 bp, Canis familiaris
aggcatgaccatcgtctacaagagc

SEQ ID NO: 20372 - DNA, 25 bp, Canis familiaris
atgagagagccatgtatcccgggta

SEQ ID NO: 20373 - DNA, 25 bp, Canis familiaris
atgaagtggagacagcccaggggca

SEQ ID NO: 20374 - DNA, 25 bp, Canis familiaris
atgccagtgggacatccaagtgcaa

SEQ ID NO: 20375 - DNA, 25 bp, Canis familiaris
atgaacgaggaattcccagtaagtg

SEQ ID NO: 20376 - DNA, 25 bp, Canis familiaris
atgaacccaaaggcataaatccagg

SEQ ID NO: 20377 - DNA, 25 bp, Canis familiaris
atgacgcccaaaagtaaattgtagc

SEQ ID NO: 20378 - DNA, 25 bp, Canis familiaris
atgaccgtaactataaatgctgcaa

SEQ ID NO: 20379 - DNA, 25 bp, Canis familiaris
atgcaaggtacaccgtacacggatc

SEQ ID NO: 20380 - DNA, 25 bp, Canis familiaris
atgaccgtccagcgtactgggctgg

SEQ ID NO: 20381 - DNA, 25 bp, Canis familiaris
taacgggaaggtttctgtgactggg

SEQ ID NO: 20382 - DNA, 25 bp, Canis familiaris
atccggcggagtgtttgtcaattag

SEQ ID NO: 20383 - DNA, 25 bp, Canis familiaris
atcctaagggctggtctctgctgaa

SEQ ID NO: 20384 - DNA, 25 bp, Canis familiaris
atcctcttggttctgctcagtgaat

SEQ ID NO: 20385 - DNA, 25 bp, Canis familiaris
atcctataggttgcgcctcagagct

SEQ ID NO: 20386 - DNA, 25 bp, Canis familiaris
atcctgtacagtatctgtgctgtga

SEQ ID NO: 20387 - DNA, 25 bp, Canis familiaris
atccttcatcagtttcgagatggat

SEQ ID NO: 20388 - DNA, 25 bp, Canis familiaris
atcccatagcaaattcggttgcatt

SEQ ID NO: 20389 - DNA, 25 bp, Canis familiaris
atcccgtgcacaactatggatgtgg

SEQ ID NO: 20390 - DNA, 25 bp, Canis familiaris
atccacgtgccatctgattgagacc

SEQ ID NO: 20391 - DNA, 25 bp, Canis familiaris
atcccggctgtgagatgtgcagcac

SEQ ID NO: 20392 - DNA, 25 bp, Canis familiaris
atcctggggcatcgggtgcagcagg

SEQ ID NO: 20393 - DNA, 25 bp, Canis familiaris
atccctggggcacggtgatcagagt

SEQ ID NO: 20394 - DNA, 25 bp, Canis familiaris
atccctatggaattttatcccttca

SEQ ID NO: 20395 - DNA, 25 bp, Canis familiaris
atcctctcagtgtctatttatcagc

SEQ ID NO: 20396 - DNA, 25 bp, Canis familiaris
atccctccagtcaatgatgctacca

SEQ ID NO: 20397 - DNA, 25 bp, Canis familiaris
atgccctgtatgcctgagtaactag

SEQ ID NO: 20398 - DNA, 25 bp, Canis familiaris
atgcatttgatgcttagtaattaaa

SEQ ID NO: 20399 - DNA, 25 bp, Canis familiaris
atgctcctgaatctatcctttcaaa

SEQ ID NO: 20400 - DNA, 25 bp, Canis familiaris
atgccagcatggtcagattccttct

SEQ ID NO: 20401 - DNA, 25 bp, Canis familiaris
atcctgcattgctgatgcccatata

SEQ ID NO: 20402 - DNA, 25 bp, Canis familiaris
atccgcatggcttgataccagatat

SEQ ID NO: 20403 - DNA, 25 bp, Canis familiaris
atgcctgaggattctgacacttacc

SEQ ID NO: 20404 - DNA, 25 bp, Canis familiaris
atgctcagaagatggccgtgtacgc

SEQ ID NO: 20405 - DNA, 25 bp, Canis familiaris
atgctcatgaggaagaggggaacat

SEQ ID NO: 20406 - DNA, 25 bp, Canis familiaris
atgcgcaagcgctacagtgtggaca

SEQ ID NO: 20407 - DNA, 25 bp, Canis familiaris
atgctctacttgcgagctgcaacat

SEQ ID NO: 20408 - DNA, 25 bp, Canis familiaris
atgctcgcactcttgatggtgagag

SEQ ID NO: 20409 - DNA, 25 bp, Canis familiaris
atcctgcagtgctttggctatgtgg

SEQ ID NO: 20410 - DNA, 25 bp, Canis familiaris
atccggcagaggctgcttgtggccg

SEQ ID NO: 20411 - DNA, 25 bp, Canis familiaris
atccccaacatgctgctgagtgatg

SEQ ID NO: 20412 - DNA, 25 bp, Canis familiaris
atgcccaatccacagctgaatatca

SEQ ID NO: 20413 - DNA, 25 bp, Canis familiaris
atgcctcaactaccacatatattag

SEQ ID NO: 20414 - DNA, 25 bp, Canis familiaris
atcctccactgcctgaacataatga

SEQ ID NO: 20415 - DNA, 25 bp, Canis familiaris
atccccagacattacagattatgaa

SEQ ID NO: 20416 - DNA, 25 bp, Canis familiaris
atccgctcaataaaagtgtcgagag

SEQ ID NO: 20417 - DNA, 25 bp, Canis familiaris
atccccttgagatcagtgctccaag

SEQ ID NO: 20418 - DNA, 25 bp, Canis familiaris
atccccttaaaattcttgcaaactg

SEQ ID NO: 20419 - DNA, 25 bp, Canis familiaris
atgacccttaattacctggacagtt

SEQ ID NO: 20420 - DNA, 25 bp, Canis familiaris
atgcactcgttagaaccttcacgaa

SEQ ID NO: 20421 - DNA, 25 bp, Canis familiaris
atgactagtctcttaaccctgaggc

SEQ ID NO: 20422 - DNA, 25 bp, Canis familiaris
atcctcctcttcaagtcaggctagg

SEQ ID NO: 20423 - DNA, 25 bp, Canis familiaris
atcctacagcccaaggcactataga

SEQ ID NO: 20424 - DNA, 25 bp, Canis familiaris
atccaacaccagaggactcatactg

SEQ ID NO: 20425 - DNA, 25 bp, Canis familiaris
atccaaaccaatactagccattcat

SEQ ID NO: 20426 - DNA, 25 bp, Canis familiaris
accaaaccacaacgtgaattttgca

SEQ ID NO: 20427 - DNA, 25 bp, Canis familiaris
atccaactccatgaagttttttgtt

SEQ ID NO: 20428 - DNA, 25 bp, Canis familiaris
atccacctcgataaaatacattctt

SEQ ID NO: 20429 - DNA, 25 bp, Canis familiaris
atccccgacttaatgatacttcaac

SEQ ID NO: 20430 - DNA, 25 bp, Canis familiaris
atccactcgtcaacctgatgaccta

SEQ ID NO: 20431 - DNA, 25 bp, Canis familiaris
atccgcatgctgataccatataact

SEQ ID NO: 20432 - DNA, 25 bp, Canis familiaris
atccttctggtagatggcacagcat

SEQ ID NO: 20433 - DNA, 25 bp, Canis familiaris
atcctattactagatgtcatccata

SEQ ID NO: 20434 - DNA, 25 bp, Canis familiaris
atcctagtgaattaatgcccttcat

SEQ ID NO: 20435 - DNA, 25 bp, Canis familiaris
atgccggtaagttatgctcctcatt

SEQ ID NO: 20436 - DNA, 25 bp, Canis familiaris
atccctgataaatttctgaacacat

SEQ ID NO: 20437 - DNA, 25 bp, Canis familiaris
atccttgctaatttctagatactac

SEQ ID NO: 20438 - DNA, 25 bp, Canis familiaris
atccattgctcgttggctagctaaa

SEQ ID NO: 20439 - DNA, 25 bp, Canis familiaris
atccattgcactccggatgtgctga

SEQ ID NO: 20440 - DNA, 25 bp, Canis familiaris
atccatgatcacacggattcccact

SEQ ID NO: 20441 - DNA, 25 bp, Canis familiaris
atccttctcttctgttaacacttag

SEQ ID NO: 20442 - DNA, 25 bp, Canis familiaris
atcctttctctgttttatagccttt

SEQ ID NO: 20443 - DNA, 25 bp, Canis familiaris
atcctcctgcttttcattttagttt

SEQ ID NO: 20444 - DNA, 25 bp, Canis familiaris
atccaactcttgtacatccttaata

SEQ ID NO: 20445 - DNA, 25 bp, Canis familiaris
atccagttatcttagcaatctttgt

SEQ ID NO: 20446 - DNA, 25 bp, Canis familiaris
atccagttataattgcacttggctt

SEQ ID NO: 20447 - DNA, 25 bp, Canis familiaris
atgccctaaaagccattattgccat

SEQ ID NO: 20448 - DNA, 25 bp, Canis familiaris
atgctgtctagagatggctttcccc

SEQ ID NO: 20449 - DNA, 25 bp, Canis familiaris
atgcgtgccagaggtgatggtccct

SEQ ID NO: 20450 - DNA, 25 bp, Canis familiaris
atgccttcgaagggagtcggctaca

SEQ ID NO: 20451 - DNA, 25 bp, Canis familiaris
atgcagtttaagataattgcgctac

SEQ ID NO: 20452 - DNA, 25 bp, Canis familiaris
atgcatttaacgttcagttctggaa

SEQ ID NO: 20453 - DNA, 25 bp, Canis familiaris
atgccatataaccatgtagccttgt

SEQ ID NO: 20454 - DNA, 25 bp, Canis familiaris
atgccttgaccattgtgtggctcct

SEQ ID NO: 20455 - DNA, 25 bp, Canis familiaris
atgctcttagctgagtgtcccgcgg

SEQ ID NO: 20456 - DNA, 25 bp, Canis familiaris
atccgtactggatatactgcctgac

SEQ ID NO: 20457 - DNA, 25 bp, Canis familiaris
atccgaacttgattcagacatcaat

SEQ ID NO: 20458 - DNA, 25 bp, Canis familiaris
atgcggaacttgtacattcattcat

SEQ ID NO: 20459 - DNA, 25 bp, Canis familiaris
atgcggcaattaatcagatctaagc

SEQ ID NO: 20460 - DNA, 25 bp, Canis familiaris
atccgaattgattcagacatcagtg

SEQ ID NO: 20461 - DNA, 25 bp, Canis familiaris
atgcctaatagtaagcactcagtta

SEQ ID NO: 20462 - DNA, 25 bp, Canis familiaris
atgccaattcggtggccagctttct

SEQ ID NO: 20463 - DNA, 25 bp, Canis familiaris
atcctttccagctggatttttctcc

SEQ ID NO: 20464 - DNA, 25 bp, Canis familiaris
atccaagtccttggtgatttttcca

SEQ ID NO: 20465 - DNA, 25 bp, Canis familiaris
atccagcatttccttgtgattcctt

SEQ ID NO: 20466 - DNA, 25 bp, Canis familiaris
atccaggtgtctacttgagcatctt

SEQ ID NO: 20467 - DNA, 25 bp, Canis familiaris
atccagcagtgttcctacagacaga

SEQ ID NO: 20468 - DNA, 25 bp, Canis familiaris
atccatgctgtttcacatttaaggg

SEQ ID NO: 20469 - DNA, 25 bp, Canis familiaris
atgcctttttcagtatgtgtgggag

SEQ ID NO: 20470 - DNA, 25 bp, Canis familiaris
atcctgtttctcactattctggggt

SEQ ID NO: 20471 - DNA, 25 bp, Canis familiaris
atccttcttctgattcgatcggtgg

SEQ ID NO: 20472 - DNA, 25 bp, Canis familiaris
atgcagctttttcattagttccggc

SEQ ID NO: 20473 - DNA, 25 bp, Canis familiaris
atgctgtttctcagtaaggtccagt

SEQ ID NO: 20474 - DNA, 25 bp, Canis familiaris
atgcttcatcgtcggtccgggctgc

SEQ ID NO: 20475 - DNA, 25 bp, Canis familiaris
atgcagtgcaccctggctacgggtt

SEQ ID NO: 20476 - DNA, 25 bp, Canis familiaris
atgcagatgctgtgaggggccggtt

SEQ ID NO: 20477 - DNA, 25 bp, Canis familiaris
atgctgccgcaggatgatcagtccg

SEQ ID NO: 20478 - DNA, 25 bp, Canis familiaris
atgcttagcatggagtctgcttggg

SEQ ID NO: 20479 - DNA, 25 bp, Canis familiaris
atgcttatgatgtcatcgttacagc

SEQ ID NO: 20480 - DNA, 25 bp, Canis familiaris
atgctgctatagggctgggacccat

SEQ ID NO: 20481 - DNA, 25 bp, Canis familiaris
atgcctgtagtacggctaccacatc

SEQ ID NO: 20482 - DNA, 25 bp, Canis familiaris
atcctgtcaattcttgtgccaatcc

SEQ ID NO: 20483 - DNA, 25 bp, Canis familiaris
atccagtccgttctgtgacaatctc

SEQ ID NO: 20484 - DNA, 25 bp, Canis familiaris
atccatggccagttgtgttccttta

SEQ ID NO: 20485 - DNA, 25 bp, Canis familiaris
atcctaccagatgttgtcctgtgct

SEQ ID NO: 20486 - DNA, 25 bp, Canis familiaris
atgccaacacagtgttgtctggtgg

SEQ ID NO: 20487 - DNA, 25 bp, Canis familiaris
atccatgacaactttggtatcgtgg

SEQ ID NO: 20488 - DNA, 25 bp, Canis familiaris
atccatcctacattcatctgtgatc

SEQ ID NO: 20489 - DNA, 25 bp, Canis familiaris
atccaccagagctacgcttgtcatg

SEQ ID NO: 20490 - DNA, 25 bp, Canis familiaris
atccacgagtcatcatcttgacatg

SEQ ID NO: 20491 - DNA, 25 bp, Canis familiaris
atccagcctgtctttctgaagcatg

SEQ ID NO: 20492 - DNA, 25 bp, Canis familiaris
atcctggcccagagctatagctggc

SEQ ID NO: 20493 - DNA, 25 bp, Canis familiaris
atcctggccagaccgtcagagatag

SEQ ID NO: 20494 - DNA, 25 bp, Canis familiaris
atccacctctgactcgggagaagtc

SEQ ID NO: 20495 - DNA, 25 bp, Canis familiaris
atccacactctgttcttggtgaatg

SEQ ID NO: 20496 - DNA, 25 bp, Canis familiaris
atccaagctctgcaatagcctgtat

SEQ ID NO: 20497 - DNA, 25 bp, Canis familiaris
atgctgggctgccggacaacatgtt

SEQ ID NO: 20498 - DNA, 25 bp, Canis familiaris
atgctggcgctgagtacgtcgtgga

SEQ ID NO: 20499 - DNA, 25 bp, Canis familiaris
atgctggcgcttctctcgtcggcgg

SEQ ID NO: 20500 - DNA, 25 bp, Canis familiaris
atgctgacgttcttgcttttggcgc

SEQ ID NO: 20501 - DNA, 25 bp, Canis familiaris
atgctgacgttcttgcttttggcgc

SEQ ID NO: 20502 - DNA, 25 bp, Canis familiaris
atgctgggattcccaggttcccacg

SEQ ID NO: 20503 - DNA, 25 bp, Canis familiaris
atggagggtctatgggtcccagtca

SEQ ID NO: 20504 - DNA, 25 bp, Canis familiaris
atgaaggtgttttcgaattccgtga

SEQ ID NO: 20505 - DNA, 25 bp, Canis familiaris
atgagaaggttctcgccttacttgc

SEQ ID NO: 20506 - DNA, 25 bp, Canis familiaris
atgaacagtttctcgtgcaggacca

SEQ ID NO: 20507 - DNA, 25 bp, Canis familiaris
atgaacctggctggagggctgggcc

SEQ ID NO: 20508 - DNA, 25 bp, Canis familiaris
atgcagatagggagccgggaggccg

SEQ ID NO: 20509 - DNA, 25 bp, Canis familiaris
atgcgctacgagggcgtggtcgaca

SEQ ID NO: 20510 - DNA, 25 bp, Canis familiaris
atgcctactagggagttatggacat

SEQ ID NO: 20511 - DNA, 25 bp, Canis familiaris
atcctcagctgaccgagtctcagaa

SEQ ID NO: 20512 - DNA, 25 bp, Canis familiaris
atcctcaacgtcgtgctcgagaagc

SEQ ID NO: 20513 - DNA, 25 bp, Canis familiaris
atgcctgacacattccttacagaat

SEQ ID NO: 20514 - DNA, 25 bp, Canis familiaris
atgccgaccattgaacgagtatcca

SEQ ID NO: 20515 - DNA, 25 bp, Canis familiaris
atgccaaacggtcacaagtatgcca

SEQ ID NO: 20516 - DNA, 25 bp, Canis familiaris
atgctggaacggagccatcctagct

SEQ ID NO: 20517 - DNA, 25 bp, Canis familiaris
atgctggagagagccccaggccagc

SEQ ID NO: 20518 - DNA, 25 bp, Canis familiaris
atgctgcagaaaagcccaaggcctt

SEQ ID NO: 20519 - DNA, 25 bp, Canis familiaris
atgcttacacacagaaatggccttg

SEQ ID NO: 20520 - DNA, 25 bp, Canis familiaris
atgctgtataactgtaaaatctgtg

SEQ ID NO: 20521 - DNA, 25 bp, Canis familiaris
atgctgtacaattttaaatggtagc

SEQ ID NO: 20522 - DNA, 25 bp, Canis familiaris
atgctggctgctgtttcaaagtgta

SEQ ID NO: 20523 - DNA, 25 bp, Canis familiaris
atgctgctctctgtggtctaatagc

SEQ ID NO: 20524 - DNA, 25 bp, Canis familiaris
atgctagatcatgttgctccaaatt

SEQ ID NO: 20525 - DNA, 25 bp, Canis familiaris
atgctagcaagaacgcttctgagat

SEQ ID NO: 20526 - DNA, 25 bp, Canis familiaris
atgcgagcaaagcattctcatcagt

SEQ ID NO: 20527 - DNA, 25 bp, Canis familiaris
atccagcaaacattctctcagctct

SEQ ID NO: 20528 - DNA, 25 bp, Canis familiaris
atgcctggaactactcaattcttgt

SEQ ID NO: 20529 - DNA, 25 bp, Canis familiaris
atccgggatctgctcagaactgcgg

SEQ ID NO: 20530 - DNA, 25 bp, Canis familiaris
atccgggatcgaagaatggtgtgag

SEQ ID NO: 20531 - DNA, 25 bp, Canis familiaris
atgccgggatcaaagtctgttctgg

SEQ ID NO: 20532 - DNA, 25 bp, Canis familiaris
atgccttggcgcgaaggctgcttgt

SEQ ID NO: 20533 - DNA, 25 bp, Canis familiaris
atgctttggtaatggtctctcttca

SEQ ID NO: 20534 - DNA, 25 bp, Canis familiaris
atgctcgggaagagtttgcctccac

SEQ ID NO: 20535 - DNA, 25 bp, Canis familiaris
atgtaaggagaccagttagcccgac

SEQ ID NO: 20536 - DNA, 25 bp, Canis familiaris
atgcaaagggatggtattaaaggag

SEQ ID NO: 20537 - DNA, 25 bp, Canis familiaris
atgctggctggccttgtcatacaaa

SEQ ID NO: 20538 - DNA, 25 bp, Canis familiaris
atccttggctctttccaaacatcaa

SEQ ID NO: 20539 - DNA, 25 bp, Canis familiaris
atccttttctctacctaaatatggg

SEQ ID NO: 20540 - DNA, 25 bp, Canis familiaris
atcctttttctttataactcatgtg

SEQ ID NO: 20541 - DNA, 25 bp, Canis familiaris
atccatccatttatactctagccat

SEQ ID NO: 20542 - DNA, 25 bp, Canis familiaris
atccttcttcatactagctgcattc

SEQ ID NO: 20543 - DNA, 25 bp, Canis familiaris
atccttcacgcatatcagctgatcg

SEQ ID NO: 20544 - DNA, 25 bp, Canis familiaris
atcctcttgaacatcactatcatga

SEQ ID NO: 20545 - DNA, 25 bp, Canis familiaris
atcctcgtgagaaccatgcttgggg

SEQ ID NO: 20546 - DNA, 25 bp, Canis familiaris
atccttttgtaccacctggtggtga

SEQ ID NO: 20547 - DNA, 25 bp, Canis familiaris
atccatatacagaactccctagtgg

SEQ ID NO: 20548 - DNA, 25 bp, Canis familiaris
atcctatatcaaatctctccatcaa

SEQ ID NO: 20549 - DNA, 25 bp, Canis familiaris
atccttcaaaatatagcacagcagt

SEQ ID NO: 20550 - DNA, 25 bp, Canis familiaris
atccttcccagtactcattagacat

SEQ ID NO: 20551 - DNA, 25 bp, Canis familiaris
atcctgtccacatactttgagactc

SEQ ID NO: 20552 - DNA, 25 bp, Canis familiaris
atccttcccagctactgctggtttc

SEQ ID NO: 20553 - DNA, 25 bp, Canis familiaris
atccttcccagctactgctggtttc

SEQ ID NO: 20554 - DNA, 25 bp, Canis familiaris
atccttcccagctactgctggtttc

SEQ ID NO: 20555 - DNA, 25 bp, Canis familiaris
atcctttctcgagctcggaaacttc

SEQ ID NO: 20556 - DNA, 25 bp, Canis familiaris
atcctttctcaaacacggagcccta

SEQ ID NO: 20557 - DNA, 25 bp, Canis familiaris
atccttctgtcaaaggcccagttct

SEQ ID NO: 20558 - DNA, 25 bp, Canis familiaris
atccttttgagatggcactcgccgt

SEQ ID NO: 20559 - DNA, 25 bp, Canis familiaris
atgccattgttgaaaggaagcccag

SEQ ID NO: 20560 - DNA, 25 bp, Canis familiaris
atgcttttctggtctggaagtcgat

SEQ ID NO: 20561 - DNA, 25 bp, Canis familiaris
atgctcacccgctgtggaagtggat

SEQ ID NO: 20562 - DNA, 25 bp, Canis familiaris
atgcacagcccccgatgaaaaatga

SEQ ID NO: 20563 - DNA, 25 bp, Canis familiaris
atcctgtctcccgatgaaaacatat

SEQ ID NO: 20564 - DNA, 25 bp, Canis familiaris
atccttctgcctagtacaaacaagc

SEQ ID NO: 20565 - DNA, 25 bp, Canis familiaris
atccttctgcctatacaacaagcta

SEQ ID NO: 20566 - DNA, 25 bp, Canis familiaris
atccttttcttcatacatcagactg

SEQ ID NO: 20567 - DNA, 25 bp, Canis familiaris
atgccttttattcatcaatctcctg

SEQ ID NO: 20568 - DNA, 25 bp, Canis familiaris
atgccttagttcttcaagtcctgtg

SEQ ID NO: 20569 - DNA, 25 bp, Canis familiaris
atccactagtcctaacgatcttctg

SEQ ID NO: 20570 - DNA, 25 bp, Canis familiaris
atccatacagtaggcttcgttttga

SEQ ID NO: 20571 - DNA, 25 bp, Canis familiaris
atgccagcaagttggttccttcgtg

SEQ ID NO: 20572 - DNA, 25 bp, Canis familiaris
atgccagcacagtggttcttcgtgt

SEQ ID NO: 20573 - DNA, 25 bp, Canis familiaris
atcctcatccattggttcatttttt

SEQ ID NO: 20574 - DNA, 25 bp, Canis familiaris
atcctctgccataaagtaatttctt

SEQ ID NO: 20575 - DNA, 25 bp, Canis familiaris
atcctctgccatctactataactgg

SEQ ID NO: 20576 - DNA, 25 bp, Canis familiaris
atccatcgtcatctcattataccag

SEQ ID NO: 20577 - DNA, 25 bp, Canis familiaris
atcctctgtctgtagcttaatccaa

SEQ ID NO: 20578 - DNA, 25 bp, Canis familiaris
atgcctttgatgtgcatctgaatgc

SEQ ID NO: 20579 - DNA, 25 bp, Canis familiaris
atgcccttgagcagctctgggccat

SEQ ID NO: 20580 - DNA, 25 bp, Canis familiaris
atgcgtctttattgtcagtggctag

SEQ ID NO: 20581 - DNA, 25 bp, Canis familiaris
atgctgtttttgtaaagtgcaatgt

SEQ ID NO: 20582 - DNA, 25 bp, Canis familiaris
atgctgaagttccgaacagtccatg

SEQ ID NO: 20583 - DNA, 25 bp, Canis familiaris
atccaagttccagatttctcagata

SEQ ID NO: 20584 - DNA, 25 bp, Canis familiaris
atccaagatgggctgattatccgga

SEQ ID NO: 20585 - DNA, 25 bp, Canis familiaris
atccaagtggaggttcctacagaga

SEQ ID NO: 20586 - DNA, 25 bp, Canis familiaris
atgctacctggaggtatctgccaca

SEQ ID NO: 20587 - DNA, 25 bp, Canis familiaris
atgccagaccttgtaggccatgcaa

SEQ ID NO: 20588 - DNA, 25 bp, Canis familiaris
atgccacacgccgttgaggttggag

SEQ ID NO: 20589 - DNA, 25 bp, Canis familiaris
agccgacgctactgtggttgggggc

SEQ ID NO: 20590 - DNA, 25 bp, Canis familiaris
agacgaaccagctggacgtggacgc

SEQ ID NO: 20591 - DNA, 25 bp, Canis familiaris
agaaagaccaggagatcaaggacct

SEQ ID NO: 20592 - DNA, 25 bp, Canis familiaris
atgaaggccctggaaatataaccct

SEQ ID NO: 20593 - DNA, 25 bp, Canis familiaris
atgacggcctaaaactgaaacctgt

SEQ ID NO: 20594 - DNA, 25 bp, Canis familiaris
atgcaaccctggtgtctaaagcctt

SEQ ID NO: 20595 - DNA, 25 bp, Canis familiaris
atgacactacggtgctatttacccc

SEQ ID NO: 20596 - DNA, 25 bp, Canis familiaris
atgcagccccggatgctggttacat

SEQ ID NO: 20597 - DNA, 25 bp, Canis familiaris
atcctgaccgagcgtggctacagct

SEQ ID NO: 20598 - DNA, 25 bp, Canis familiaris
atccataaccaggagtacgtgcgct

SEQ ID NO: 20599 - DNA, 25 bp, Canis familiaris
atgcctaatccaaaaccagtgccaa

SEQ ID NO: 20600 - DNA, 25 bp, Canis familiaris
atgccaagtccaaaatgtttccagt

SEQ ID NO: 20601 - DNA, 25 bp, Canis familiaris
atgccaaatgaaacaagtcagtcag

SEQ ID NO: 20602 - DNA, 25 bp, Canis familiaris
atccaattgaggacaagtgcccagg

SEQ ID NO: 20603 - DNA, 25 bp, Canis familiaris
atccagattttgaaacctctcggtg

SEQ ID NO: 20604 - DNA, 25 bp, Canis familiaris
atccagtatattaccccttcatgtc

SEQ ID NO: 20605 - DNA, 25 bp, Canis familiaris
atcctgcttataactctggtacatt

SEQ ID NO: 20606 - DNA, 25 bp, Canis familiaris
atcctgatttgacatctatcctctt

SEQ ID NO: 20607 - DNA, 25 bp, Canis familiaris
atgcctgatttatatctcatccaca

SEQ ID NO: 20608 - DNA, 25 bp, Canis familiaris
atcctgaaaaggacctccaacacag

SEQ ID NO: 20609 - DNA, 25 bp, Canis familiaris
atcctgcacaaaggacacccgactc

SEQ ID NO: 20610 - DNA, 25 bp, Canis familiaris
atcctccaaagctcatccttgaatc

SEQ ID NO: 20611 - DNA, 25 bp, Canis familiaris
atcctcagtctactaatccttaatt

SEQ ID NO: 20612 - DNA, 25 bp, Canis familiaris
atccatctgtgctaaagaccaaaca

SEQ ID NO: 20613 - DNA, 25 bp, Canis familiaris
atgcctcagctgtgagagacacacc

SEQ ID NO: 20614 - DNA, 25 bp, Canis familiaris
atgctgctggtgtgggaaaactggt

SEQ ID NO: 20615 - DNA, 25 bp, Canis familiaris
atgccggtcatcgggaagcgacatg

SEQ ID NO: 20616 - DNA, 25 bp, Canis familiaris
atccaggttgatggggaagacagat

SEQ ID NO: 20617 - DNA, 25 bp, Canis familiaris
atgaaggttgtaagagaaggatttt

SEQ ID NO: 20618 - DNA, 25 bp, Canis familiaris
atgactggcttcggggcaaagtttt

SEQ ID NO: 20619 - DNA, 25 bp, Canis familiaris
atgcaagctggtggctggaccaatg

SEQ ID NO: 20620 - DNA, 25 bp, Canis familiaris
atgctcctggtgtgacccatgagct

SEQ ID NO: 20621 - DNA, 25 bp, Canis familiaris
atgccactggttgtcatcacatatc

SEQ ID NO: 20622 - DNA, 25 bp, Canis familiaris
atcctctgtgttttataccatcatt

SEQ ID NO: 20623 - DNA, 25 bp, Canis familiaris
atcctcgcctcatggaatccaaagt

SEQ ID NO: 20624 - DNA, 25 bp, Canis familiaris
atgcccgacattgcgaactcaatag

SEQ ID NO: 20625 - DNA, 25 bp, Canis familiaris
atgccctgacagttcagatacctgt

SEQ ID NO: 20626 - DNA, 25 bp, Canis familiaris
atgccctgaagacagcatgcctttc

SEQ ID NO: 20627 - DNA, 25 bp, Canis familiaris
atgcccaatggtcagctgggattgc

SEQ ID NO: 20628 - DNA, 25 bp, Canis familiaris
atgcacccatgtcccaggtgtatgg

SEQ ID NO: 20629 - DNA, 25 bp, Canis familiaris
atgctctcctgtccagggacttgat

SEQ ID NO: 20630 - DNA, 25 bp, Canis familiaris
atgctccttcattctgttagtagat

SEQ ID NO: 20631 - DNA, 25 bp, Canis familiaris
atgctcctatatgcgtatacttata

SEQ ID NO: 20632 - DNA, 25 bp, Canis familiaris
atgccactgaatacgttgaaaaaat

SEQ ID NO: 20633 - DNA, 25 bp, Canis familiaris
atccacgattcagattgatccaaaa

SEQ ID NO: 20634 - DNA, 25 bp, Canis familiaris
atccacgctaattgattacgccaga

SEQ ID NO: 20635 - DNA, 25 bp, Canis familiaris
atgccatctgtaaaaccctccagaa

SEQ ID NO: 20636 - DNA, 25 bp, Canis familiaris
agggtgaaaatggcctcccaggtga

SEQ ID NO: 20637 - DNA, 25 bp, Canis familiaris
atgtttgtaaatacccaatcgggca

SEQ ID NO: 20638 - DNA, 25 bp, Canis familiaris
atgcccattaaaaccctaccaggat

SEQ ID NO: 20639 - DNA, 25 bp, Canis familiaris
atcctcataacaaaccctttctggt

SEQ ID NO: 20640 - DNA, 25 bp, Canis familiaris
atgccatataattaaacactttctc

SEQ ID NO: 20641 - DNA, 25 bp, Canis familiaris
atccaaacttggaatccgcatttca

SEQ ID NO: 20642 - DNA, 25 bp, Canis familiaris
atccaaatcttatattgccacttca

SEQ ID NO: 20643 - DNA, 25 bp, Canis familiaris
atccactctttattattgagcatcc

SEQ ID NO: 20644 - DNA, 25 bp, Canis familiaris
atgccactggtttcagtcggatatc

SEQ ID NO: 20645 - DNA, 25 bp, Canis familiaris
atgccatctggctagtaattaatat

SEQ ID NO: 20646 - DNA, 25 bp, Canis familiaris
atgtcctacggtctgctgagaatgg

SEQ ID NO: 20647 - DNA, 25 bp, Canis familiaris
atgcatcgtaaaaccttcagaagga

SEQ ID NO: 20648 - DNA, 25 bp, Canis familiaris
atgcatttaaactcatttgaaaaaa

SEQ ID NO: 20649 - DNA, 25 bp, Canis familiaris
atgacttactacccgattgaaaata

SEQ ID NO: 20650 - DNA, 25 bp, Canis familiaris
atgactccactcacggcaaattcaa

SEQ ID NO: 20651 - DNA, 25 bp, Canis familiaris
atgacttacccaaggccaaacataa

SEQ ID NO: 20652 - DNA, 25 bp, Canis familiaris
atccttcaccccgtggacagaaaag

SEQ ID NO: 20653 - DNA, 25 bp, Canis familiaris
atccagtctcccactgagaagataa

SEQ ID NO: 20654 - DNA, 25 bp, Canis familiaris
atgccactctactccgagaaaaagt

SEQ ID NO: 20655 - DNA, 25 bp, Canis familiaris
atgtacaaatatgcggagaaaagtt

SEQ ID NO: 20656 - DNA, 25 bp, Canis familiaris
atgtaccacaatgtaaaaccaccat

SEQ ID NO: 20657 - DNA, 25 bp, Canis familiaris
atgcatacctaaaaaatggccccca

SEQ ID NO: 20658 - DNA, 25 bp, Canis familiaris
atgaaaatattgcaacaccccccaa

SEQ ID NO: 20659 - DNA, 25 bp, Canis familiaris
atgaataatttggaacctgcccctg

SEQ ID NO: 20660 - DNA, 25 bp, Canis familiaris
atgccaaagactggatgttccccct

SEQ ID NO: 20661 - DNA, 25 bp, Canis familiaris
atgcgaaagatatatgttgaacggt

SEQ ID NO: 20662 - DNA, 25 bp, Canis familiaris
atgccatcaagttaagcttgtactg

SEQ ID NO: 20663 - DNA, 25 bp, Canis familiaris
atccacatggtttcagcttgtttgt

SEQ ID NO: 20664 - DNA, 25 bp, Canis familiaris
atccactgaggcacgcatcgttttt

SEQ ID NO: 20665 - DNA, 25 bp, Canis familiaris
atccactgaggattccagactgttt

SEQ ID NO: 20666 - DNA, 25 bp, Canis familiaris
atccacggcactccgcgagctgtat

SEQ ID NO: 20667 - DNA, 25 bp, Canis familiaris
atccacaagccgctgcaagcagtgt

SEQ ID NO: 20668 - DNA, 25 bp, Canis familiaris
atccagcaagctgtggcacactctg

SEQ ID NO: 20669 - DNA, 25 bp, Canis familiaris
atccacaagatgggcctgcctgttc

SEQ ID NO: 20670 - DNA, 25 bp, Canis familiaris
atccacaagaagtccttcgctgtcc

SEQ ID NO: 20671 - DNA, 25 bp, Canis familiaris
atccaaagattgtcctttccatcct

SEQ ID NO: 20672 - DNA, 25 bp, Canis familiaris
atccagaaatgaatcccttcctctt

SEQ ID NO: 20673 - DNA, 25 bp, Canis familiaris
atgctgaagggaaccactctttcgt

SEQ ID NO: 20674 - DNA, 25 bp, Canis familiaris
atgctgagggagtcagccacctctg

SEQ ID NO: 20675 - DNA, 25 bp, Canis familiaris
atgtgtggtgttgccccattaaaag

SEQ ID NO: 20676 - DNA, 25 bp, Canis familiaris
atgttttgttccacacctgacaaat

SEQ ID NO: 20677 - DNA, 25 bp, Canis familiaris
atgatatttttcacttccttaaagg

SEQ ID NO: 20678 - DNA, 25 bp, Canis familiaris
atgaattgcatgatcccttccaagt

SEQ ID NO: 20679 - DNA, 25 bp, Canis familiaris
atgaattgtttcaaaaccaactcat

SEQ ID NO: 20680 - DNA, 25 bp, Canis familiaris
atgaagttttctcacaggcattgct

SEQ ID NO: 20681 - DNA, 25 bp, Canis familiaris
atccacctggttcagcagtgctggt

SEQ ID NO: 20682 - DNA, 25 bp, Canis familiaris
atgcccctcccaagagaggcaggat

SEQ ID NO: 20683 - DNA, 25 bp, Canis familiaris
atgcccctcagaaccatagtcagga

SEQ ID NO: 20684 - DNA, 25 bp, Canis familiaris
atgtccaccgaaggttgtaagtcca

SEQ ID NO: 20685 - DNA, 25 bp, Canis familiaris
atgtccaccgaaggtagtaagtaca

SEQ ID NO: 20686 - DNA, 25 bp, Canis familiaris
atgccagccccaaggtttaggtaat

SEQ ID NO: 20687 - DNA, 25 bp, Canis familiaris
atccagctctccaagaggtgataag

SEQ ID NO: 20688 - DNA, 25 bp, Canis familiaris
atgccagcattccaaggctggaagt

SEQ ID NO: 20689 - DNA, 25 bp, Canis familiaris
atgcaagctctccagaggtgaaagg

SEQ ID NO: 20690 - DNA, 25 bp, Canis familiaris
atccagctctgatatgcttcgcact

SEQ ID NO: 20691 - DNA, 25 bp, Canis familiaris
atgcactgagtgaattgctacagcc

SEQ ID NO: 20692 - DNA, 25 bp, Canis familiaris
atgcactgaatttattagacaaact

SEQ ID NO: 20693 - DNA, 25 bp, Canis familiaris
atgcaatgcaatatagtaacataat

SEQ ID NO: 20694 - DNA, 25 bp, Canis familiaris
atccatgcgatcacgttgactgact

SEQ ID NO: 20695 - DNA, 25 bp, Canis familiaris
atgccatcgtcaactgtgctgagat

SEQ ID NO: 20696 - DNA, 25 bp, Canis familiaris
atgccattgtcaactgtgctgagct

SEQ ID NO: 20697 - DNA, 25 bp, Canis familiaris
atgccaatcctagtgatgcttctgt

SEQ ID NO: 20698 - DNA, 25 bp, Canis familiaris
atccacccgagactgtcattgtcga

SEQ ID NO: 20699 - DNA, 25 bp, Canis familiaris
atccatgaccgaagagacattttgg

SEQ ID NO: 20700 - DNA, 25 bp, Canis familiaris
atgccatgacccaggaagctatccg

SEQ ID NO: 20701 - DNA, 25 bp, Canis familiaris
atgcggcaccaccgaaatcacattc

SEQ ID NO: 20702 - DNA, 25 bp, Canis familiaris
atgcggcaccaccgaaatcacattc

SEQ ID NO: 20703 - DNA, 25 bp, Canis familiaris
atgctgtaccattgatgaaatcatt

SEQ ID NO: 20704 - DNA, 25 bp, Canis familiaris
atgccaacccctgaatgattttcag

SEQ ID NO: 20705 - DNA, 25 bp, Canis familiaris
atccacacgtttgtttttactggca

SEQ ID NO: 20706 - DNA, 25 bp, Canis familiaris
atgcgaggttttgtgttttgaatta

SEQ ID NO: 20707 - DNA, 25 bp, Canis familiaris
atcctttattttttatttgatatat

SEQ ID NO: 20708 - DNA, 25 bp, Canis familiaris
atccttctcattgtgttcactttaa

SEQ ID NO: 20709 - DNA, 25 bp, Canis familiaris
catttgtcaattgtgtaacccgagt

SEQ ID NO: 20710 - DNA, 25 bp, Canis familiaris
atgtcgtctactatttaccggaccg

SEQ ID NO: 20711 - DNA, 25 bp, Canis familiaris
atgttgtccaacaataaaccggaat

SEQ ID NO: 20712 - DNA, 25 bp, Canis familiaris
atgttaccaacttgacccctataat

SEQ ID NO: 20713 - DNA, 25 bp, Canis familiaris
atgttccaggttgtccataatataa

SEQ ID NO: 20714 - DNA, 25 bp, Canis familiaris
atgagtccactgtaaatcctgttaa

SEQ ID NO: 20715 - DNA, 25 bp, Canis familiaris
atgccccagttaaatttgttgaaat

SEQ ID NO: 20716 - DNA, 25 bp, Canis familiaris
atgccgtcgggtgagcttattacaa

SEQ ID NO: 20717 - DNA, 25 bp, Canis familiaris
atgacgtttggtgagctgcagtttc

SEQ ID NO: 20718 - DNA, 25 bp, Canis familiaris
atgccagcttcttgaatacaacttt

SEQ ID NO: 20719 - DNA, 25 bp, Canis familiaris
atccactatgatggaaaacagtgtc

SEQ ID NO: 20720 - DNA, 25 bp, Canis familiaris
atgctagtatgagtaacaagaacca

SEQ ID NO: 20721 - DNA, 25 bp, Canis familiaris
atgccgcttcggtgacaaacacaga

SEQ ID NO: 20722 - DNA, 25 bp, Canis familiaris
atgccgacaaggtggccacacagag

SEQ ID NO: 20723 - DNA, 25 bp, Canis familiaris
atgcctactttgctcagtaccatga

SEQ ID NO: 20724 - DNA, 25 bp, Canis familiaris
atggtaatcctgctcagtacgagag

SEQ ID NO: 20725 - DNA, 25 bp, Canis familiaris
atgatgctgagaagtttgccgagga

SEQ ID NO: 20726 - DNA, 25 bp, Canis familiaris
atgagccgacatactggcacggcga

SEQ ID NO: 20727 - DNA, 25 bp, Canis familiaris
atgcacacgcacacggatctttgat

SEQ ID NO: 20728 - DNA, 25 bp, Canis familiaris
atgccaccttcgcttgtatatgaag

SEQ ID NO: 20729 - DNA, 25 bp, Canis familiaris
atgcccctgtatttgagatgttaat

SEQ ID NO: 20730 - DNA, 25 bp, Canis familiaris
atgcctacctattctcagatgacta

SEQ ID NO: 20731 - DNA, 25 bp, Canis familiaris
atgccaacaggaaccagcagacttt

SEQ ID NO: 20732 - DNA, 25 bp, Canis familiaris
atgccccaggacacagagactttat

SEQ ID NO: 20733 - DNA, 25 bp, Canis familiaris
atgcacccgaaatatggggctatat

SEQ ID NO: 20734 - DNA, 25 bp, Canis familiaris
atgaccgtaatttttgtgcagcctg

SEQ ID NO: 20735 - DNA, 25 bp, Canis familiaris
atgaccttgaaatgttacagcatgg

SEQ ID NO: 20736 - DNA, 25 bp, Canis familiaris
atgaatttacagcattggcaaatgg

SEQ ID NO: 20737 - DNA, 25 bp, Canis familiaris
atgtctttaccgtgaataaaccatt

SEQ ID NO: 20738 - DNA, 25 bp, Canis familiaris
atgtctttgacttaaatctaaccca

SEQ ID NO: 20739 - DNA, 25 bp, Canis familiaris
atggtgctataataaataaacttca

SEQ ID NO: 20740 - DNA, 25 bp, Canis familiaris
atgttctaagcttcttgtaaactat

SEQ ID NO: 20741 - DNA, 25 bp, Canis familiaris
agtcctatagttccctgatactttt

SEQ ID NO: 20742 - DNA, 25 bp, Canis familiaris
atgtcctgatacttactggaactct

SEQ ID NO: 20743 - DNA, 25 bp, Canis familiaris
atgccctttctgtcattggaagctc

SEQ ID NO: 20744 - DNA, 25 bp, Canis familiaris
atgcccatttattctctggcaggca

SEQ ID NO: 20745 - DNA, 25 bp, Canis familiaris
atgccttttttatttgagatgcgac

SEQ ID NO: 20746 - DNA, 25 bp, Canis familiaris
atccattgtatcttactttgactac

SEQ ID NO: 20747 - DNA, 25 bp, Canis familiaris
atccacgtagaacctttgactccat

SEQ ID NO: 20748 - DNA, 25 bp, Canis familiaris
atccaggtctagctcaaaatcccat

SEQ ID NO: 20749 - DNA, 25 bp, Canis familiaris
atccatgatgcttgggtttgcaccc

SEQ ID NO: 20750 - DNA, 25 bp, Canis familiaris
atccatgtgcttgggtttgccgtga

SEQ ID NO: 20751 - DNA, 25 bp, Canis familiaris
atgccagtttggttttgtcgtcact

SEQ ID NO: 20752 - DNA, 25 bp, Canis familiaris
atgatactttgggccttggttacct

SEQ ID NO: 20753 - DNA, 25 bp, Canis familiaris
atgcctcatattaccctaggttacc

SEQ ID NO: 20754 - DNA, 25 bp, Canis familiaris
atgcttaatgccacctgaactgtac

SEQ ID NO: 20755 - DNA, 25 bp, Canis familiaris
atgcttcaagaaggcctgatggcgt

SEQ ID NO: 20756 - DNA, 25 bp, Canis familiaris
atgttgaaacacccggcgggctgcc

SEQ ID NO: 20757 - DNA, 25 bp, Canis familiaris
atgttagcccactcgtggaactgcc

SEQ ID NO: 20758 - DNA, 25 bp, Canis familiaris
atgttagctccctgggttcttacgt

SEQ ID NO: 20759 - DNA, 25 bp, Canis familiaris
atccattccacctggttttataaat

SEQ ID NO: 20760 - DNA, 25 bp, Canis familiaris
atgccactaccagacttcttttaaa

SEQ ID NO: 20761 - DNA, 25 bp, Canis familiaris
atgccacttcttgccattattttga

SEQ ID NO: 20762 - DNA, 25 bp, Canis familiaris
atccacattcttgaccacattattt

SEQ ID NO: 20763 - DNA, 25 bp, Canis familiaris
atccaagggtagagcatattcgtta

SEQ ID NO: 20764 - DNA, 25 bp, Canis familiaris
atccaaaggttgaagaattgaattt

SEQ ID NO: 20765 - DNA, 25 bp, Canis familiaris
atgccagaactgcgttgaatgttat

SEQ ID NO: 20766 - DNA, 25 bp, Canis familiaris
atccagaagcttttgtacttcttgt

SEQ ID NO: 20767 - DNA, 25 bp, Canis familiaris
atccacaccaactaggacttctgtt

SEQ ID NO: 20768 - DNA, 25 bp, Canis familiaris
atccatgaccacttcggcatcgtgg

SEQ ID NO: 20769 - DNA, 25 bp, Canis familiaris
atccatgacaactttggcattgtgg

SEQ ID NO: 20770 - DNA, 25 bp, Canis familiaris
atccatacatactcatgctcttgct

SEQ ID NO: 20771 - DNA, 25 bp, Canis familiaris
atccaggctgacatctgcttttata

SEQ ID NO: 20772 - DNA, 25 bp, Canis familiaris
atgccacttatcactccttgaaatt

SEQ ID NO: 20773 - DNA, 25 bp, Canis familiaris
atgccagctgattttatctttaaat

SEQ ID NO: 20774 - DNA, 25 bp, Canis familiaris
atccagcgttctgattcgtccatat

SEQ ID NO: 20775 - DNA, 25 bp, Canis familiaris
atccagtttccttgtctgtaaaatg

SEQ ID NO: 20776 - DNA, 25 bp, Canis familiaris
atgcctgtttagtttttaaagagtg

SEQ ID NO: 20777 - DNA, 25 bp, Canis familiaris
atgctcgttgggtctctttacaaga

SEQ ID NO: 20778 - DNA, 25 bp, Canis familiaris
atgtggttggaccctggaatccgaa

SEQ ID NO: 20779 - DNA, 25 bp, Canis familiaris
atggaaggcacagacggaaccgtcc

SEQ ID NO: 20780 - DNA, 25 bp, Canis familiaris
atccataggcctcacggaagaccac

SEQ ID NO: 20781 - DNA, 25 bp, Canis familiaris
atccatcggaactaccataaacaca

SEQ ID NO: 20782 - DNA, 25 bp, Canis familiaris
atccacgaaactaccttcaactcca

SEQ ID NO: 20783 - DNA, 25 bp, Canis familiaris
atccactggcacagactcttcaact

SEQ ID NO: 20784 - DNA, 25 bp, Canis familiaris
atgccaccagccttgtattataacc

SEQ ID NO: 20785 - DNA, 25 bp, Canis familiaris
atgccagcggacttgcttataaatc

SEQ ID NO: 20786 - DNA, 25 bp, Canis familiaris
atgctgagggagttcattactacta

SEQ ID NO: 20787 - DNA, 25 bp, Canis familiaris
atgctggacttttcaggactactca

SEQ ID NO: 20788 - DNA, 25 bp, Canis familiaris
aggcgatcactttgcatgaaaacct

SEQ ID NO: 20789 - DNA, 25 bp, Canis familiaris
aggcttgccattgaaatcgagcttt

SEQ ID NO: 20790 - DNA, 25 bp, Canis familiaris
atgccttggcatttaacacagagtt

SEQ ID NO: 20791 - DNA, 25 bp, Canis familiaris
atgcccggcagctgcaaaaggccat

SEQ ID NO: 20792 - DNA, 25 bp, Canis familiaris
atgccacaggcaggaaacaaagctc

SEQ ID NO: 20793 - DNA, 25 bp, Canis familiaris
atgccacatggcacaacagctttgc

SEQ ID NO: 20794 - DNA, 25 bp, Canis familiaris
atgacacagagctgaagcaggtggc

SEQ ID NO: 20795 - DNA, 25 bp, Canis familiaris
atgccacttctggcacacatgggga

SEQ ID NO: 20796 - DNA, 25 bp, Canis familiaris
atgctgcaatctgctgcaactggtg

SEQ ID NO: 20797 - DNA, 25 bp, Canis familiaris
atgctgtgatccccaagatgtttga

SEQ ID NO: 20798 - DNA, 25 bp, Canis familiaris
atgcattggtgcacaaattgccaga

SEQ ID NO: 20799 - DNA, 25 bp, Canis familiaris
atgcctgtgtggtgctttccagaat

SEQ ID NO: 20800 - DNA, 25 bp, Canis familiaris
atgcctgtgtggtgctttccagaat

SEQ ID NO: 20801 - DNA, 25 bp, Canis familiaris
atgccatgttgtattcatttcacgt

SEQ ID NO: 20802 - DNA, 25 bp, Canis familiaris
atgcgtttgctactttgttcaactg

SEQ ID NO: 20803 - DNA, 25 bp, Canis familiaris
atgccttttggcagccattcacaca

SEQ ID NO: 20804 - DNA, 25 bp, Canis familiaris
atgccttggtggagctgcagacaca

SEQ ID NO: 20805 - DNA, 25 bp, Canis familiaris
atgcctgggtgaaccaagaacgaac

SEQ ID NO: 20806 - DNA, 25 bp, Canis familiaris
atgcctggggacacggggtagacgt

SEQ ID NO: 20807 - DNA, 25 bp, Canis familiaris
atgcctggggacacggggtagacgt

SEQ ID NO: 20808 - DNA, 25 bp, Canis familiaris
aggcgggagtttgggggatggcatc

SEQ ID NO: 20809 - DNA, 25 bp, Canis familiaris
atggggggctttggaaactggctag

SEQ ID NO: 20810 - DNA, 25 bp, Canis familiaris
atggggggagtgtcaggacctcgaa

SEQ ID NO: 20811 - DNA, 25 bp, Canis familiaris
atgctgccggggcagagatgccctc

SEQ ID NO: 20812 - DNA, 25 bp, Canis familiaris
atgaatctggggcacagtctcacta

SEQ ID NO: 20813 - DNA, 25 bp, Canis familiaris
atgacattggggacaccacaaacag

SEQ ID NO: 20814 - DNA, 25 bp, Canis familiaris
atgaattgagggcagtacaagtcct

SEQ ID NO: 20815 - DNA, 25 bp, Canis familiaris
atgaagaagggtcctaccaggccac

SEQ ID NO: 20816 - DNA, 25 bp, Canis familiaris
atgaaaaaccatcctgaacaccttt

SEQ ID NO: 20817 - DNA, 25 bp, Canis familiaris
atgtaccaggcctctagaaactagt

SEQ ID NO: 20818 - DNA, 25 bp, Canis familiaris
atgaacgaggcctttggtgacacca

SEQ ID NO: 20819 - DNA, 25 bp, Canis familiaris
atgaagcaggagccggtgaaaccga

SEQ ID NO: 20820 - DNA, 25 bp, Canis familiaris
atccaatgggcacggtgtagagcca

SEQ ID NO: 20821 - DNA, 25 bp, Canis familiaris
atgagccatgaggcaagggctggag

SEQ ID NO: 20822 - DNA, 25 bp, Canis familiaris
atgcgcatcagagaaaatgtggcac

SEQ ID NO: 20823 - DNA, 25 bp, Canis familiaris
atgccatcgacgataatgctgcgat

SEQ ID NO: 20824 - DNA, 25 bp, Canis familiaris
atccacgacgtatcacagtcatccc

SEQ ID NO: 20825 - DNA, 25 bp, Canis familiaris
atgccaagacagttaaatgctccgc

SEQ ID NO: 20826 - DNA, 25 bp, Canis familiaris
atgcccagcaagtggagtccaccgc

SEQ ID NO: 20827 - DNA, 25 bp, Canis familiaris
atgcccaaggcttgggtacctctcc

SEQ ID NO: 20828 - DNA, 25 bp, Canis familiaris
atgcaacagagtatggaggtttcta

SEQ ID NO: 20829 - DNA, 25 bp, Canis familiaris
atgctattgagctttagggttattt

SEQ ID NO: 20830 - DNA, 25 bp, Canis familiaris
atgctattgagctgtcaccggagac

SEQ ID NO: 20831 - DNA, 25 bp, Canis familiaris
aggttcgcaagaacctgatggacat

SEQ ID NO: 20832 - DNA, 25 bp, Canis familiaris
atgaacctgagggtccttgagaata

SEQ ID NO: 20833 - DNA, 25 bp, Canis familiaris
atgaaccttgagacttgggggcaaa

SEQ ID NO: 20834 - DNA, 25 bp, Canis familiaris
atgaaccttcggcatgacggtcgac

SEQ ID NO: 20835 - DNA, 25 bp, Canis familiaris
atgactccccgagatacgagaaggc

SEQ ID NO: 20836 - DNA, 25 bp, Canis familiaris
atccagccccgagcagggagaaggc

SEQ ID NO: 20837 - DNA, 25 bp, Canis familiaris
atccaagccctgatgcgggagctgg

SEQ ID NO: 20838 - DNA, 25 bp, Canis familiaris
atgccataccagcttctctggatga

SEQ ID NO: 20839 - DNA, 25 bp, Canis familiaris
atgctgaaggcagtttcattttgca

SEQ ID NO: 20840 - DNA, 25 bp, Canis familiaris
atgccaaggagttccagctgtctgc

SEQ ID NO: 20841 - DNA, 25 bp, Canis familiaris
atgcacaggtgtcacacgcatgcgc

SEQ ID NO: 20842 - DNA, 25 bp, Canis familiaris
atgcgactgtgagcaccagcatggc

SEQ ID NO: 20843 - DNA, 25 bp, Canis familiaris
atgctccgagatgccatggtggcca

SEQ ID NO: 20844 - DNA, 25 bp, Canis familiaris
atgctccgatctgacactttgacat

SEQ ID NO: 20845 - DNA, 25 bp, Canis familiaris
atgccctagctagcctgggacttat

SEQ ID NO: 20846 - DNA, 25 bp, Canis familiaris
atgccccagctataggaaggctcta

SEQ ID NO: 20847 - DNA, 25 bp, Canis familiaris
atgccgcgagcatcgacatacggtt

SEQ ID NO: 20848 - DNA, 25 bp, Canis familiaris
atgccgagttccgacatgactcagg

SEQ ID NO: 20849 - DNA, 25 bp, Canis familiaris
atgccaagttcacagttgctaggga

SEQ ID NO: 20850 - DNA, 25 bp, Canis familiaris
atgcaccaaatccaacccgaatgga

SEQ ID NO: 20851 - DNA, 25 bp, Canis familiaris
atgcccaagattcaaccatagaagc

SEQ ID NO: 20852 - DNA, 25 bp, Canis familiaris
atgccctaagaatgtgccacaactc

SEQ ID NO: 20853 - DNA, 25 bp, Canis familiaris
atgcttcttaatgatggccaaatgc

SEQ ID NO: 20854 - DNA, 25 bp, Canis familiaris
atgccctgtgttgtggtcagcaagg

SEQ ID NO: 20855 - DNA, 25 bp, Canis familiaris
atgccagggtctttggctctggtga

SEQ ID NO: 20856 - DNA, 25 bp, Canis familiaris
atgacaggacatacttggcttgccc

SEQ ID NO: 20857 - DNA, 25 bp, Canis familiaris
atgaaggagttccggtctggtgcca

SEQ ID NO: 20858 - DNA, 25 bp, Canis familiaris
atgaaggaagagctgcccggtctca

SEQ ID NO: 20859 - DNA, 25 bp, Canis familiaris
atgagaaatggctaaccgcggtccc

SEQ ID NO: 20860 - DNA, 25 bp, Canis familiaris
atgtgaccctcgttagggttcccat

SEQ ID NO: 20861 - DNA, 25 bp, Canis familiaris
atggactcctccaaaagggttcaga

SEQ ID NO: 20862 - DNA, 25 bp, Canis familiaris
atgtatcccttccaagtgtagtgat

SEQ ID NO: 20863 - DNA, 25 bp, Canis familiaris
atgccatcacctgtacggcttgtat

SEQ ID NO: 20864 - DNA, 25 bp, Canis familiaris
atgccacacattgttttgttgtttt

SEQ ID NO: 20865 - DNA, 25 bp, Canis familiaris
atgaagagctctgtttggggccttt

SEQ ID NO: 20866 - DNA, 25 bp, Canis familiaris
atgcgagtctatatttgtgtgtgtg

SEQ ID NO: 20867 - DNA, 25 bp, Canis familiaris
atgcgaccataggagctggtgtggt

SEQ ID NO: 20868 - DNA, 25 bp, Canis familiaris
atgcgtctctcacactgagtggtat

SEQ ID NO: 20869 - DNA, 25 bp, Canis familiaris
atgccttccgattgtgatgacgtcc

SEQ ID NO: 20870 - DNA, 25 bp, Canis familiaris
atgcctgtgccctgtatcagtgata

SEQ ID NO: 20871 - DNA, 25 bp, Canis familiaris
atgcctggacttactgcatcagtaa

SEQ ID NO: 20872 - DNA, 25 bp, Canis familiaris
atgccaggcacttttacagtactta

SEQ ID NO: 20873 - DNA, 25 bp, Canis familiaris
atgcacagttgccacatttagtcct

SEQ ID NO: 20874 - DNA, 25 bp, Canis familiaris
atgagatttaatgcttgagacccct

SEQ ID NO: 20875 - DNA, 25 bp, Canis familiaris
atgcttacataatctgggaatccca

SEQ ID NO: 20876 - DNA, 25 bp, Canis familiaris
atgcctcaaaagacacggaacccag

SEQ ID NO: 20877 - DNA, 25 bp, Canis familiaris
atgcccacaagagtaggtaacccag

SEQ ID NO: 20878 - DNA, 25 bp, Canis familiaris
atgcctgaccagactggttacccgc

SEQ ID NO: 20879 - DNA, 25 bp, Canis familiaris
atgagccccatgatggaaagactta

SEQ ID NO: 20880 - DNA, 25 bp, Canis familiaris
atgcccgccagactctgaaggagca

SEQ ID NO: 20881 - DNA, 25 bp, Canis familiaris
atgctccttcagactcagggggaaa

SEQ ID NO: 20882 - DNA, 25 bp, Canis familiaris
atgccgcgctggagcaggagatgga

SEQ ID NO: 20883 - DNA, 25 bp, Canis familiaris
atgccttcgtgcacatggagcgggc

SEQ ID NO: 20884 - DNA, 25 bp, Canis familiaris
atgccttctatcactgcagagttac

SEQ ID NO: 20885 - DNA, 25 bp, Canis familiaris
atgcctgtctacaccacagagggga

SEQ ID NO: 20886 - DNA, 25 bp, Canis familiaris
atgcctgtctcacaggcggggggct

SEQ ID NO: 20887 - DNA, 25 bp, Canis familiaris
atgcctggacatctgtggcgagggg

SEQ ID NO: 20888 - DNA, 25 bp, Canis familiaris
atgccgcagaccattatctggcggg

SEQ ID NO: 20889 - DNA, 25 bp, Canis familiaris
atgacgcccagcatttcgaggtggc

SEQ ID NO: 20890 - DNA, 25 bp, Canis familiaris
atgaccccaatttctcattttggag

SEQ ID NO: 20891 - DNA, 25 bp, Canis familiaris
atgccccaaagtaccaatacttgct

SEQ ID NO: 20892 - DNA, 25 bp, Canis familiaris
atgaccctgggtacccatactattt

SEQ ID NO: 20893 - DNA, 25 bp, Canis familiaris
atgaaccggttccatcactaggttt

SEQ ID NO: 20894 - DNA, 25 bp, Canis familiaris
atgaatttggctacagcaaccgggt

SEQ ID NO: 20895 - DNA, 25 bp, Canis familiaris
atgaatacggctacagcaacagggt

SEQ ID NO: 20896 - DNA, 25 bp, Canis familiaris
atgtcaaggtgaacagagaagcatg

SEQ ID NO: 20897 - DNA, 25 bp, Canis familiaris
atgcataacttgaaagagccatgct

SEQ ID NO: 20898 - DNA, 25 bp, Canis familiaris
atgtaacagtcataagccatgtcta

SEQ ID NO: 20899 - DNA, 25 bp, Canis familiaris
atgccaacaatatcaatgcctgcct

SEQ ID NO: 20900 - DNA, 25 bp, Canis familiaris
atgccaccgatatatagccctttca

SEQ ID NO: 20901 - DNA, 25 bp, Canis familiaris
atgccagccaaatatattccttaat

SEQ ID NO: 20902 - DNA, 25 bp, Canis familiaris
atgctaccatcctcatttaattcag

SEQ ID NO: 20903 - DNA, 25 bp, Canis familiaris
atgctgccacatgttttctaattag

SEQ ID NO: 20904 - DNA, 25 bp, Canis familiaris
atgctgacagcatttatcttcagat

SEQ ID NO: 20905 - DNA, 25 bp, Canis familiaris
atgctgtccatgtttctacgtgtat

SEQ ID NO: 20906 - DNA, 25 bp, Canis familiaris
atgtgatcgcggtttttgcagtaca

SEQ ID NO: 20907 - DNA, 25 bp, Canis familiaris
atgtcactgggctttgttcctaatc

SEQ ID NO: 20908 - DNA, 25 bp, Canis familiaris
atgctcacgggtatttttcctcaaa

SEQ ID NO: 20909 - DNA, 25 bp, Canis familiaris
atgccactgggatgattgtttttga

SEQ ID NO: 20910 - DNA, 25 bp, Canis familiaris
atgccaccgcagtgttgttcttagt

SEQ ID NO: 20911 - DNA, 25 bp, Canis familiaris
atgccacactcacagtatcttacta

SEQ ID NO: 20912 - DNA, 25 bp, Canis familiaris
atgcccactgagaggagtcttctca

SEQ ID NO: 20913 - DNA, 25 bp, Canis familiaris
atgctccagaagagtgttcatcctc

SEQ ID NO: 20914 - DNA, 25 bp, Canis familiaris
atgccctgaacatgtatttcttcca

SEQ ID NO: 20915 - DNA, 25 bp, Canis familiaris
atgcccgtcacatcgatgttgcatg

SEQ ID NO: 20916 - DNA, 25 bp, Canis familiaris
atgcccagctcctgagagcggttaa

SEQ ID NO: 20917 - DNA, 25 bp, Canis familiaris
atgcccagtccaataaagtctttga

SEQ ID NO: 20918 - DNA, 25 bp, Canis familiaris
atgccctgatccaagaaaaactgtg

SEQ ID NO: 20919 - DNA, 25 bp, Canis familiaris
atgcccgcattgaagcaagaaagaa

SEQ ID NO: 20920 - DNA, 25 bp, Canis familiaris
atgccttgcattcatcagatgtgat

SEQ ID NO: 20921 - DNA, 25 bp, Canis familiaris
atgccatgccatttaaagtattttt

SEQ ID NO: 20922 - DNA, 25 bp, Canis familiaris
atgccatgccatttactttaagagc

SEQ ID NO: 20923 - DNA, 25 bp, Canis familiaris
atgcctgcctttttattagccagcc

SEQ ID NO: 20924 - DNA, 25 bp, Canis familiaris
atgcctttgattttattcgcaccat

SEQ ID NO: 20925 - DNA, 25 bp, Canis familiaris
atgcctttattttatgagctcccat

SEQ ID NO: 20926 - DNA, 25 bp, Canis familiaris
atgctttttatcttaggcttgccaa

SEQ ID NO: 20927 - DNA, 25 bp, Canis familiaris
atgctcacttcctaaatgttgtaaa

SEQ ID NO: 20928 - DNA, 25 bp, Canis familiaris
atgcgccttgtctgacagcttgaca

SEQ ID NO: 20929 - DNA, 25 bp, Canis familiaris
atgcttttctgctatgagagccggc

SEQ ID NO: 20930 - DNA, 25 bp, Canis familiaris
actgattgacagtatggaccatatg

SEQ ID NO: 20931 - DNA, 25 bp, Canis familiaris
atgcattgtgattgaaggcccttac

SEQ ID NO: 20932 - DNA, 25 bp, Canis familiaris
agattcagtagcagatgccgttcaa

SEQ ID NO: 20933 - DNA, 25 bp, Canis familiaris
atgcaggagttcatgatccttcccg

SEQ ID NO: 20934 - DNA, 25 bp, Canis familiaris
atgcaggagcttgaagcactcggct

SEQ ID NO: 20935 - DNA, 25 bp, Canis familiaris
atgcgactcagacaagagctccagt

SEQ ID NO: 20936 - DNA, 25 bp, Canis familiaris
atgcttagagtggagcctactgaaa

SEQ ID NO: 20937 - DNA, 25 bp, Canis familiaris
atgcttgagaagaaaccactggtta

SEQ ID NO: 20938 - DNA, 25 bp, Canis familiaris
atgctttgacaaaacctcagatgtg

SEQ ID NO: 20939 - DNA, 25 bp, Canis familiaris
atgcttggccaatatgcgtccatct

SEQ ID NO: 20940 - DNA, 25 bp, Canis familiaris
atgcttttcagtaatggtctctcga

SEQ ID NO: 20941 - DNA, 25 bp, Canis familiaris
atgcgttcatagcccatggattcat

SEQ ID NO: 20942 - DNA, 25 bp, Canis familiaris
atgccctcaagggctgagcatacag

SEQ ID NO: 20943 - DNA, 25 bp, Canis familiaris
atgctccaaagggtcctgacagcca

SEQ ID NO: 20944 - DNA, 25 bp, Canis familiaris
atgctccaaggaccacattgacacc

SEQ ID NO: 20945 - DNA, 25 bp, Canis familiaris
atgactgcacatgggaccatgacac

SEQ ID NO: 20946 - DNA, 25 bp, Canis familiaris
atgcacaacatggctatccttccaa

SEQ ID NO: 20947 - DNA, 25 bp, Canis familiaris
atgaaacatgtgctcccttaactga

SEQ ID NO: 20948 - DNA, 25 bp, Canis familiaris
atgataacatttcccttcaacctga

SEQ ID NO: 20949 - DNA, 25 bp, Canis familiaris
atgcatacactgaggccctgcaagc

SEQ ID NO: 20950 - DNA, 25 bp, Canis familiaris
atgcgtcatcacatacgtgctgaac

SEQ ID NO: 20951 - DNA, 25 bp, Canis familiaris
atgcgtccaacttgtcgtcatacaa

SEQ ID NO: 20952 - DNA, 25 bp, Canis familiaris
atgcgttccactcgggatttcaaac

SEQ ID NO: 20953 - DNA, 25 bp, Canis familiaris
atggttcctccacaggcttagaggt

SEQ ID NO: 20954 - DNA, 25 bp, Canis familiaris
atgaattagttagatgtttgtgggt

SEQ ID NO: 20955 - DNA, 25 bp, Canis familiaris
atgcttgggatttaatgctctatgg

SEQ ID NO: 20956 - DNA, 25 bp, Canis familiaris
atgcccgagccttaatgcttcaagg

SEQ ID NO: 20957 - DNA, 25 bp, Canis familiaris
atgccctgcctccagaatggtaaga

SEQ ID NO: 20958 - DNA, 25 bp, Canis familiaris
atgcacttccatcccaaggctttga

SEQ ID NO: 20959 - DNA, 25 bp, Canis familiaris
atgatcactctccctgcagggattt

SEQ ID NO: 20960 - DNA, 25 bp, Canis familiaris
aggacttaccgatggttattgcctt

SEQ ID NO: 20961 - DNA, 25 bp, Canis familiaris
atgcgatttgacagaagcggaactc

SEQ ID NO: 20962 - DNA, 25 bp, Canis familiaris
atgcaggtctggatggattggaact

SEQ ID NO: 20963 - DNA, 25 bp, Canis familiaris
atgcagtgactcagggtgggaacga

SEQ ID NO: 20964 - DNA, 25 bp, Canis familiaris
atgcagagacctgggtgtcgctgcc

SEQ ID NO: 20965 - DNA, 25 bp, Canis familiaris
atgccagagcctgaggctgctgctg

SEQ ID NO: 20966 - DNA, 25 bp, Canis familiaris
atgccagggctcccagtgatgtgga

SEQ ID NO: 20967 - DNA, 25 bp, Canis familiaris
atgacgggctaccagaattgtctaa

SEQ ID NO: 20968 - DNA, 25 bp, Canis familiaris
atgatcggctgctctgaaaggatgc

SEQ ID NO: 20969 - DNA, 25 bp, Canis familiaris
atgctgggctgccactgaggagttc

SEQ ID NO: 20970 - DNA, 25 bp, Canis familiaris
atgcggagatcaacagaggttctgc

SEQ ID NO: 20971 - DNA, 25 bp, Canis familiaris
atgccgtgatcggcggtgtcgtggc

SEQ ID NO: 20972 - DNA, 25 bp, Canis familiaris
atgcctgtaatgtggtgactttgta

SEQ ID NO: 20973 - DNA, 25 bp, Canis familiaris
atgccttgttgtgtatatgtgttgt

SEQ ID NO: 20974 - DNA, 25 bp, Canis familiaris
atgcctttttgttttctattgagtg

SEQ ID NO: 20975 - DNA, 25 bp, Canis familiaris
atgctctttatttactttcttggaa

SEQ ID NO: 20976 - DNA, 25 bp, Canis familiaris
atgcctgttgtttcctgtgattttg

SEQ ID NO: 20977 - DNA, 25 bp, Canis familiaris
atgcctttccatatctgttttgctt

SEQ ID NO: 20978 - DNA, 25 bp, Canis familiaris
atgcgtagctttatcatgattaact

SEQ ID NO: 20979 - DNA, 25 bp, Canis familiaris
atgcctggtttcttagatatgacac

SEQ ID NO: 20980 - DNA, 25 bp, Canis familiaris
atgctcccaaacttgatttgacact

SEQ ID NO: 20981 - DNA, 25 bp, Canis familiaris
atgccccaataatttttgagcttaa

SEQ ID NO: 20982 - DNA, 25 bp, Canis familiaris
atgcccatcagctaataattctact

SEQ ID NO: 20983 - DNA, 25 bp, Canis familiaris
atgctccagatgtacagaaattacc

SEQ ID NO: 20984 - DNA, 25 bp, Canis familiaris
atgcacctatgtaaggaagtcctgc

SEQ ID NO: 20985 - DNA, 25 bp, Canis familiaris
atgcagtatcaaatggacaagtccg

SEQ ID NO: 20986 - DNA, 25 bp, Canis familiaris
atgcagatctacagcgccagagtgc

SEQ ID NO: 20987 - DNA, 25 bp, Canis familiaris
atgcagatctacagcgccagagtgc

SEQ ID NO: 20988 - DNA, 25 bp, Canis familiaris
atgagctctgacagtgcccagctca

SEQ ID NO: 20989 - DNA, 25 bp, Canis familiaris
atgagctgcgtgtggcccctgagga

SEQ ID NO: 20990 - DNA, 25 bp, Canis familiaris
atgcactgcagagaggtccgggaga

SEQ ID NO: 20991 - DNA, 25 bp, Canis familiaris
atgcaaggacgaccccagtgtggga

SEQ ID NO: 20992 - DNA, 25 bp, Canis familiaris
atgcaacgcacaaacagtaggcttg

SEQ ID NO: 20993 - DNA, 25 bp, Canis familiaris
atgccgacaataacatgaaggctag

SEQ ID NO: 20994 - DNA, 25 bp, Canis familiaris
atgcactgagcatcaaacaatgact

SEQ ID NO: 20995 - DNA, 25 bp, Canis familiaris
atgcacatacatacaacaaagacaa

SEQ ID NO: 20996 - DNA, 25 bp, Canis familiaris
atgcctattctctaaagaatcagat

SEQ ID NO: 20997 - DNA, 25 bp, Canis familiaris
atgcctatttgctcacagagccctt

SEQ ID NO: 20998 - DNA, 25 bp, Canis familiaris
atgctcttaatctcttagaccttgc

SEQ ID NO: 20999 - DNA, 25 bp, Canis familiaris
atgctgtaaatcattctaactcatt

SEQ ID NO: 21000 - DNA, 25 bp, Canis familiaris
atgctgaacaacttcctgtagctca

SEQ ID NO: 21001 - DNA, 25 bp, Canis familiaris
atgctttcatttacacagatatcca

SEQ ID NO: 21002 - DNA, 25 bp, Canis familiaris
atgctctctgatatactctgttcgt

SEQ ID NO: 21003 - DNA, 25 bp, Canis familiaris
atgctggcatgtacagactctttgt

SEQ ID NO: 21004 - DNA, 25 bp, Canis familiaris
atgcatggatggagacagaagctgt

SEQ ID NO: 21005 - DNA, 25 bp, Canis familiaris
atgctgcgatgaacgacggcacttc

SEQ ID NO: 21006 - DNA, 25 bp, Canis familiaris
atgctcagcttcagaagagccttgc

SEQ ID NO: 21007 - DNA, 25 bp, Canis familiaris
atgctgacattgacgtagtcgttgt

SEQ ID NO: 21008 - DNA, 25 bp, Canis familiaris
atgcatgagcatatcctggccagtg

SEQ ID NO: 21009 - DNA, 25 bp, Canis familiaris
atgcagacattatcttggcagcgaa

SEQ ID NO: 21010 - DNA, 25 bp, Canis familiaris
atgcagggttacatgcagcacgcca

SEQ ID NO: 21011 - DNA, 25 bp, Canis familiaris
atgcaagaggtgtgtgcgtgtgtgc

SEQ ID NO: 21012 - DNA, 25 bp, Canis familiaris
atgcaacaggtgtcggtcttgctgt

SEQ ID NO: 21013 - DNA, 25 bp, Canis familiaris
atgagaagggcagactctattaaaa

SEQ ID NO: 21014 - DNA, 25 bp, Canis familiaris
atgaaaccaactctcgattatccga

SEQ ID NO: 21015 - DNA, 25 bp, Canis familiaris
atgaaatcgaacagtcgctgaacgg

SEQ ID NO: 21016 - DNA, 25 bp, Canis familiaris
atgaaagaaactatcatgaaccagg

SEQ ID NO: 21017 - DNA, 25 bp, Canis familiaris
atgaaggccagttagtccaagtcag

SEQ ID NO: 21018 - DNA, 25 bp, Canis familiaris
atgagatggcccagggtcaggctct

SEQ ID NO: 21019 - DNA, 25 bp, Canis familiaris
atgaatgggaaggacttatggcagt

SEQ ID NO: 21020 - DNA, 25 bp, Canis familiaris
atgaatgcatggaaggcgtttgtaa

SEQ ID NO: 21021 - DNA, 25 bp, Canis familiaris
atgctctatggttgctgtttttaag

SEQ ID NO: 21022 - DNA, 25 bp, Canis familiaris
atgctgcttggatttttgtcttgtt

SEQ ID NO: 21023 - DNA, 25 bp, Canis familiaris
atgctctaaggtttcttctctggct

SEQ ID NO: 21024 - DNA, 25 bp, Canis familiaris
atgttaccgatgatttcctgtgttg

SEQ ID NO: 21025 - DNA, 25 bp, Canis familiaris
atgttcctggaattattggctttat

SEQ ID NO: 21026 - DNA, 25 bp, Canis familiaris
atgaccaatgaatttttggctttaa

SEQ ID NO: 21027 - DNA, 25 bp, Canis familiaris
atgaaactggaataagcgctttgaa

SEQ ID NO: 21028 - DNA, 25 bp, Canis familiaris
atgagccaatggccgtagaggtttg

SEQ ID NO: 21029 - DNA, 25 bp, Canis familiaris
atgagcacagtgcagaggcaaagta

SEQ ID NO: 21030 - DNA, 25 bp, Canis familiaris
atgaacgtgggaagatggcagtggg

SEQ ID NO: 21031 - DNA, 25 bp, Canis familiaris
atgccctgcgggtgggcatggcagt

SEQ ID NO: 21032 - DNA, 25 bp, Canis familiaris
atgctccatggtgttttatggcagt

SEQ ID NO: 21033 - DNA, 25 bp, Canis familiaris
atgcccatacatgttatatctccgc

SEQ ID NO: 21034 - DNA, 25 bp, Canis familiaris
atgcccatacatttatatctccgca

SEQ ID NO: 21035 - DNA, 25 bp, Canis familiaris
atgcttcatcaaattaatctcactt

SEQ ID NO: 21036 - DNA, 25 bp, Canis familiaris
atgcttgatgcaggatctgaacttt

SEQ ID NO: 21037 - DNA, 25 bp, Canis familiaris
atgctctgtgcacttcagaccattt

SEQ ID NO: 21038 - DNA, 25 bp, Canis familiaris
atgactgcatgcatggaaccaatcc

SEQ ID NO: 21039 - DNA, 25 bp, Canis familiaris
atgctgcatctggctgagaaccacc

SEQ ID NO: 21040 - DNA, 25 bp, Canis familiaris
atgctggcatgcttcaatacccatg

SEQ ID NO: 21041 - DNA, 25 bp, Canis familiaris
atgcatatgctcccatagaccgcat

SEQ ID NO: 21042 - DNA, 25 bp, Canis familiaris
atgctgcatgctgtcgagagttcta

SEQ ID NO: 21043 - DNA, 25 bp, Canis familiaris
atgctgctgctcttcgcaagctgac

SEQ ID NO: 21044 - DNA, 25 bp, Canis familiaris
atgctgctccacaacatttggccaa

SEQ ID NO: 21045 - DNA, 25 bp, Canis familiaris
atgctgcccttgtttggtgatcaga

SEQ ID NO: 21046 - DNA, 25 bp, Canis familiaris
atgctgtccatgacattgtgtgtgt

SEQ ID NO: 21047 - DNA, 25 bp, Canis familiaris
atgctgcaactgtctgtgtggtgtg

SEQ ID NO: 21048 - DNA, 25 bp, Canis familiaris
atgctaaccggtgcttgtgacggcc

SEQ ID NO: 21049 - DNA, 25 bp, Canis familiaris
atgaacaccaggctctgtggactgc

SEQ ID NO: 21050 - DNA, 25 bp, Canis familiaris
atgaggcccaggcagtggacattcc

SEQ ID NO: 21051 - DNA, 25 bp, Canis familiaris
atgaccccagtgtcagattgatctt

SEQ ID NO: 21052 - DNA, 25 bp, Canis familiaris
atgaccaacgtatactgcactggaa

SEQ ID NO: 21053 - DNA, 25 bp, Canis familiaris
atgaccgacggattccagttcgagt

SEQ ID NO: 21054 - DNA, 25 bp, Canis familiaris
atgccctgaagtacattcagtttga

SEQ ID NO: 21055 - DNA, 25 bp, Canis familiaris
atgcccacacaggtctaagttatgt

SEQ ID NO: 21056 - DNA, 25 bp, Canis familiaris
atgaccccatgccttaatttcagtt

SEQ ID NO: 21057 - DNA, 25 bp, Canis familiaris
atgaaccctgtaaaaggatcaactc

SEQ ID NO: 21058 - DNA, 25 bp, Canis familiaris
agtacctcttaaaatgcctcagtct

SEQ ID NO: 21059 - DNA, 25 bp, Canis familiaris
atgaaaatttaaaacctcctctctg

SEQ ID NO: 21060 - DNA, 25 bp, Canis familiaris
atgactccattttagatagcccctt

SEQ ID NO: 21061 - DNA, 25 bp, Canis familiaris
atgaaactcgattagtcctccactt

SEQ ID NO: 21062 - DNA, 25 bp, Canis familiaris
atgaagtcaccactaaaccactgct

SEQ ID NO: 21063 - DNA, 25 bp, Canis familiaris
atgaagaccttctaaaacatctgca

SEQ ID NO: 21064 - DNA, 25 bp, Canis familiaris
aggaacactttttgaacttattctg

SEQ ID NO: 21065 - DNA, 25 bp, Canis familiaris
aggaaccatgttatccctgttactt

SEQ ID NO: 21066 - DNA, 25 bp, Canis familiaris
atgtcaaccagttaaccctgttcat

SEQ ID NO: 21067 - DNA, 25 bp, Canis familiaris
atgtacctgacatgaactacttttc

SEQ ID NO: 21068 - DNA, 25 bp, Canis familiaris
atgtaccagaccaaactgcattttg

SEQ ID NO: 21069 - DNA, 25 bp, Canis familiaris
aggagcctggccatattcaagtctc

SEQ ID NO: 21070 - DNA, 25 bp, Canis familiaris
atggttctgacgaagttaagttccg

SEQ ID NO: 21071 - DNA, 25 bp, Canis familiaris
atgctgttccaccaactgtaagcct

SEQ ID NO: 21072 - DNA, 25 bp, Canis familiaris
atgcaggtttcctcattacgcatct

SEQ ID NO: 21073 - DNA, 25 bp, Canis familiaris
atgcagtgtttcatacgatcccatc

SEQ ID NO: 21074 - DNA, 25 bp, Canis familiaris
atgaggcttcttgacggaccagcat

SEQ ID NO: 21075 - DNA, 25 bp, Canis familiaris
atgaactttctgatggatgctccca

SEQ ID NO: 21076 - DNA, 25 bp, Canis familiaris
atgaactttccttggattcacaccc

SEQ ID NO: 21077 - DNA, 25 bp, Canis familiaris
atgaatcccatctgggttccagcgt

SEQ ID NO: 21078 - DNA, 25 bp, Canis familiaris
atgaataagctctgagttgtccagc

SEQ ID NO: 21079 - DNA, 25 bp, Canis familiaris
atgcagtgaactgggtttactacct

SEQ ID NO: 21080 - DNA, 25 bp, Canis familiaris
atgagggtcggtgttatgctcactt

SEQ ID NO: 21081 - DNA, 25 bp, Canis familiaris
atgagaaccctgagctgttccagct

SEQ ID NO: 21082 - DNA, 25 bp, Canis familiaris
atgtgaacccaaactcttcgaacga

SEQ ID NO: 21083 - DNA, 25 bp, Canis familiaris
atgctatgacccaaactctatgctg

SEQ ID NO: 21084 - DNA, 25 bp, Canis familiaris
atgctatggttgaaatcattttgta

SEQ ID NO: 21085 - DNA, 25 bp, Canis familiaris
atgctctggttgaatcccttgagac

SEQ ID NO: 21086 - DNA, 25 bp, Canis familiaris
atgctctggtacatgcatccagtga

SEQ ID NO: 21087 - DNA, 25 bp, Canis familiaris
atgctgctgagatctgtatcgctct

SEQ ID NO: 21088 - DNA, 25 bp, Canis familiaris
atgctgtgaacccaacagtcttcct

SEQ ID NO: 21089 - DNA, 25 bp, Canis familiaris
atgcgtgtacacgtaacacttccac

SEQ ID NO: 21090 - DNA, 25 bp, Canis familiaris
atgagttacaagcaaactgctacga

SEQ ID NO: 21091 - DNA, 25 bp, Canis familiaris
atgactttccggaaactctaaatca

SEQ ID NO: 21092 - DNA, 25 bp, Canis familiaris
atgtctattctcaagatccacgcca

SEQ ID NO: 21093 - DNA, 25 bp, Canis familiaris
atgtctattttcatatccaccaagg

SEQ ID NO: 21094 - DNA, 25 bp, Canis familiaris
atgcattataatctttccccaaaca

SEQ ID NO: 21095 - DNA, 25 bp, Canis familiaris
atgggctacattttctacccaagaa

SEQ ID NO: 21096 - DNA, 25 bp, Canis familiaris
atgaaggactattctttagctaagt

SEQ ID NO: 21097 - DNA, 25 bp, Canis familiaris
atgctcggaatattttgttcaacgt

SEQ ID NO: 21098 - DNA, 25 bp, Canis familiaris
atgcacgctggtttttgataaggag

SEQ ID NO: 21099 - DNA, 25 bp, Canis familiaris
atgccctttttacaataatgacgtc

SEQ ID NO: 21100 - DNA, 25 bp, Canis familiaris
atgccctttttacacacatttatgt

SEQ ID NO: 21101 - DNA, 25 bp, Canis familiaris
atgagccaacttcttaacatctttg

SEQ ID NO: 21102 - DNA, 25 bp, Canis familiaris
atgcaaaagcatggtcttaagttgt

SEQ ID NO: 21103 - DNA, 25 bp, Canis familiaris
atgaatgcggattgttgtcaactat

SEQ ID NO: 21104 - DNA, 25 bp, Canis familiaris
atgactctggatggctatggaacgt

SEQ ID NO: 21105 - DNA, 25 bp, Canis familiaris
atgcagccatggtgactggaactga

SEQ ID NO: 21106 - DNA, 25 bp, Canis familiaris
atgcagcacatgttaacttatttga

SEQ ID NO: 21107 - DNA, 25 bp, Canis familiaris
atgcatctctttaattatttctaac

SEQ ID NO: 21108 - DNA, 25 bp, Canis familiaris
atgcatactgttatatatatcgcaa

SEQ ID NO: 21109 - DNA, 25 bp, Canis familiaris
atgctgggcttcatcattggccaag

SEQ ID NO: 21110 - DNA, 25 bp, Canis familiaris
atgctgttgcttttctgaagcctac

SEQ ID NO: 21111 - DNA, 25 bp, Canis familiaris
atgcgcttttcttctgaactgtaag

SEQ ID NO: 21112 - DNA, 25 bp, Canis familiaris
atgcgattttaattgtccatggaat

SEQ ID NO: 21113 - DNA, 25 bp, Canis familiaris
atgagcttactaggttccaggaaca

SEQ ID NO: 21114 - DNA, 25 bp, Canis familiaris
atgcagttgtcacggtacctggata

SEQ ID NO: 21115 - DNA, 25 bp, Canis familiaris
atgctttcatgctgtataactgtaa

SEQ ID NO: 21116 - DNA, 25 bp, Canis familiaris
atgctcttcatgtattttcggccaa

SEQ ID NO: 21117 - DNA, 25 bp, Canis familiaris
atgctctctctgacatcattatagg

SEQ ID NO: 21118 - DNA, 25 bp, Canis familiaris
atgcttcttggatcaatggggcagt

SEQ ID NO: 21119 - DNA, 25 bp, Canis familiaris
atgcgtatttggccgatgcgggcac

SEQ ID NO: 21120 - DNA, 25 bp, Canis familiaris
atgcatgttcctggtcattcgggat

SEQ ID NO: 21121 - DNA, 25 bp, Canis familiaris
atgagagccctggtaacgggaccct

SEQ ID NO: 21122 - DNA, 25 bp, Canis familiaris
atgaaagctatgatactcgggaact

SEQ ID NO: 21123 - DNA, 25 bp, Canis familiaris
atgacaagtctgagatgtgctgggg

SEQ ID NO: 21124 - DNA, 25 bp, Canis familiaris
atgacacaccaaacatgggcctgca

SEQ ID NO: 21125 - DNA, 25 bp, Canis familiaris
atgacatcaacaaccctggcttgtc

SEQ ID NO: 21126 - DNA, 25 bp, Canis familiaris
atgtatcacattaaccggttgtgcc

SEQ ID NO: 21127 - DNA, 25 bp, Canis familiaris
atgtagccattatctctggtaacca

SEQ ID NO: 21128 - DNA, 25 bp, Canis familiaris
atgaaccatttagtttggagagcaa

SEQ ID NO: 21129 - DNA, 25 bp, Canis familiaris
atgaagccgccttgttggagcaaaa

SEQ ID NO: 21130 - DNA, 25 bp, Canis familiaris
atgacctcccagttggtagatcagt

SEQ ID NO: 21131 - DNA, 25 bp, Canis familiaris
atgaccttcacaccagcgggaagct

SEQ ID NO: 21132 - DNA, 25 bp, Canis familiaris
atgacccatacaacaatcaggaagt

SEQ ID NO: 21133 - DNA, 25 bp, Canis familiaris
atgcgcaccatgggacataaggagg

SEQ ID NO: 21134 - DNA, 25 bp, Canis familiaris
atgagcaacatgcagatctacagcg

SEQ ID NO: 21135 - DNA, 25 bp, Canis familiaris
atgaactctgtgcccatcaaggaaa

SEQ ID NO: 21136 - DNA, 25 bp, Canis familiaris
atgaaccgcttcatgccactgaata

SEQ ID NO: 21137 - DNA, 25 bp, Canis familiaris
atgagacggtctcttcgtaataaat

SEQ ID NO: 21138 - DNA, 25 bp, Canis familiaris
atgagacaggtcttttcaattctaa

SEQ ID NO: 21139 - DNA, 25 bp, Canis familiaris
atgacacgtgatgtctcggtctctg

SEQ ID NO: 21140 - DNA, 25 bp, Canis familiaris
atgaaggaacgaccaggccttgacg

SEQ ID NO: 21141 - DNA, 25 bp, Canis familiaris
atgtagcgttaataggcctgtcctg

SEQ ID NO: 21142 - DNA, 25 bp, Canis familiaris
atgctgggtttatactgcgtctctt

SEQ ID NO: 21143 - DNA, 25 bp, Canis familiaris
atgagggtcttatgcatttttgcta

SEQ ID NO: 21144 - DNA, 25 bp, Canis familiaris
atgcacggtttcagattttcctcca

SEQ ID NO: 21145 - DNA, 25 bp, Canis familiaris
atgatggcgtttcagttgggcccca

SEQ ID NO: 21146 - DNA, 25 bp, Canis familiaris
atgaggaaggcagccttgggcctcc

SEQ ID NO: 21147 - DNA, 25 bp, Canis familiaris
atgcgtgcataccacttttgttctt

SEQ ID NO: 21148 - DNA, 25 bp, Canis familiaris
atgcgtgcagtggcgctgtttgtgt

SEQ ID NO: 21149 - DNA, 25 bp, Canis familiaris
atgcgctcagtgccatgcgttcgct

SEQ ID NO: 21150 - DNA, 25 bp, Canis familiaris
atgcatccagagctcctttgctgga

SEQ ID NO: 21151 - DNA, 25 bp, Canis familiaris
atgctagcatcatgtccttaggtaa

SEQ ID NO: 21152 - DNA, 25 bp, Canis familiaris
atgacaaaatgttttctggctgaca

SEQ ID NO: 21153 - DNA, 25 bp, Canis familiaris
atgaagaacttcgggctatgataga

SEQ ID NO: 21154 - DNA, 25 bp, Canis familiaris
atgaggacactaattgcactggtaa

SEQ ID NO: 21155 - DNA, 25 bp, Canis familiaris
atgcaaaaccatatgccattgttga

SEQ ID NO: 21156 - DNA, 25 bp, Canis familiaris
atgcacagtactttcccttttatat

SEQ ID NO: 21157 - DNA, 25 bp, Canis familiaris
atgctggaactattgccggtcttaa

SEQ ID NO: 21158 - DNA, 25 bp, Canis familiaris
atgcttgtattatccaatggtatta

SEQ ID NO: 21159 - DNA, 25 bp, Canis familiaris
atgcattgctcattattcccaaggt

SEQ ID NO: 21160 - DNA, 25 bp, Canis familiaris
atgcatccatattttctccagaact

SEQ ID NO: 21161 - DNA, 25 bp, Canis familiaris
atgcttctaaaccccagatagcgta

SEQ ID NO: 21162 - DNA, 25 bp, Canis familiaris
atgcttgttcaggcacgccagaagg

SEQ ID NO: 21163 - DNA, 25 bp, Canis familiaris
atgctgtgctctggctggagccaga

SEQ ID NO: 21164 - DNA, 25 bp, Canis familiaris
atgctgtgtctggtggccatggaga

SEQ ID NO: 21165 - DNA, 25 bp, Canis familiaris
atgctggcactgatggccgagccat

SEQ ID NO: 21166 - DNA, 25 bp, Canis familiaris
atgagctgcctgacggccaagtcat

SEQ ID NO: 21167 - DNA, 25 bp, Canis familiaris
atgcagagggtccccagagacatcc

SEQ ID NO: 21168 - DNA, 25 bp, Canis familiaris
atgcagacggagcccgaaggcagct

SEQ ID NO: 21169 - DNA, 25 bp, Canis familiaris
atgagacaggacaggtaggcctggg

SEQ ID NO: 21170 - DNA, 25 bp, Canis familiaris
atgaaactgccgggctacctgatgg

SEQ ID NO: 21171 - DNA, 25 bp, Canis familiaris
atgactatctggcgttatcctttgg

SEQ ID NO: 21172 - DNA, 25 bp, Canis familiaris
atgactacaggctggttctcaaccg

SEQ ID NO: 21173 - DNA, 25 bp, Canis familiaris
atgacatacggttgagtttactcca

SEQ ID NO: 21174 - DNA, 25 bp, Canis familiaris
atgaaagggtcatattgctccttga

SEQ ID NO: 21175 - DNA, 25 bp, Canis familiaris
atgttcagggtttatggcccatcta

SEQ ID NO: 21176 - DNA, 25 bp, Canis familiaris
atgttaggcctatttaaagctctga

SEQ ID NO: 21177 - DNA, 25 bp, Canis familiaris
atgttagcctatttaaaggtctgaa

SEQ ID NO: 21178 - DNA, 25 bp, Canis familiaris
atgcttatacttttcactaggttga

SEQ ID NO: 21179 - DNA, 25 bp, Canis familiaris
atgttacacttattaggacagtcat

SEQ ID NO: 21180 - DNA, 25 bp, Canis familiaris
atgctaactcttctagtgacacaga

SEQ ID NO: 21181 - DNA, 25 bp, Canis familiaris
atgcattacctgtatgaagctgaaa

SEQ ID NO: 21182 - DNA, 25 bp, Canis familiaris
atgcttaaagcatgatcactatgaa

SEQ ID NO: 21183 - DNA, 25 bp, Canis familiaris
atgctttcaacatttcatcattaag

SEQ ID NO: 21184 - DNA, 25 bp, Canis familiaris
atgcatgtctaagtacgcacggccg

SEQ ID NO: 21185 - DNA, 25 bp, Canis familiaris
atgcatgtctaagtacgcacggccg

SEQ ID NO: 21186 - DNA, 25 bp, Canis familiaris
atgcatatctatctatccatccacc

SEQ ID NO: 21187 - DNA, 25 bp, Canis familiaris
atgacacatagatatggtccaccat

SEQ ID NO: 21188 - DNA, 25 bp, Canis familiaris
atgaagaaataatctctgcctcatt

SEQ ID NO: 21189 - DNA, 25 bp, Canis familiaris
atgcaagatcaaacatctatcccaa

SEQ ID NO: 21190 - DNA, 25 bp, Canis familiaris
atgagagatcacacgtatgccaagt

SEQ ID NO: 21191 - DNA, 25 bp, Canis familiaris
atgagttcaggatctatggcaatgt

SEQ ID NO: 21192 - DNA, 25 bp, Canis familiaris
atgcatcttctgtaacctggcaggc

SEQ ID NO: 21193 - DNA, 25 bp, Canis familiaris
atgcatctttgttgtgtctctgact

SEQ ID NO: 21194 - DNA, 25 bp, Canis familiaris
atgcttttgttgatcctaaccaaag

SEQ ID NO: 21195 - DNA, 25 bp, Canis familiaris
atgaatttgtttgcctgggcccagg

SEQ ID NO: 21196 - DNA, 25 bp, Canis familiaris
atgaatttttttatttccgcatgga

SEQ ID NO: 21197 - DNA, 25 bp, Canis familiaris
atgaatgggtccataagccccggga

SEQ ID NO: 21198 - DNA, 25 bp, Canis familiaris
atgaagaggtcgactttgctccggg

SEQ ID NO: 21199 - DNA, 25 bp, Canis familiaris
atgcaggttgtagctttttgagggg

SEQ ID NO: 21200 - DNA, 25 bp, Canis familiaris
atgcaggatttctctttctctgact

SEQ ID NO: 21201 - DNA, 25 bp, Canis familiaris
atgcagcgatcaatcggttgactgc

SEQ ID NO: 21202 - DNA, 25 bp, Canis familiaris
atgcagccatgcaatcggtggactg

SEQ ID NO: 21203 - DNA, 25 bp, Canis familiaris
atgcggctgcactggtggaagaagc

SEQ ID NO: 21204 - DNA, 25 bp, Canis familiaris
atgcttgtgcctgagctgtcaaaag

SEQ ID NO: 21205 - DNA, 25 bp, Canis familiaris
atgcatcattccttggctgaaataa

SEQ ID NO: 21206 - DNA, 25 bp, Canis familiaris
atgctattctcccattaaatgagtt

SEQ ID NO: 21207 - DNA, 25 bp, Canis familiaris
atgaattatgcggcttaaagctgtc

SEQ ID NO: 21208 - DNA, 25 bp, Canis familiaris
atgaatggcatctctctaacgtgta

SEQ ID NO: 21209 - DNA, 25 bp, Canis familiaris
atgaatgcgcgatcccaaaatgttg

SEQ ID NO: 21210 - DNA, 25 bp, Canis familiaris
atgaaccagaacctcacatcttgtt

SEQ ID NO: 21211 - DNA, 25 bp, Canis familiaris
atgacaccaagggtcgctttgctgt

SEQ ID NO: 21212 - DNA, 25 bp, Canis familiaris
atgacaccagctgggctggcctttt

SEQ ID NO: 21213 - DNA, 25 bp, Canis familiaris
atgtcccacgcggatgggttgttgt

SEQ ID NO: 21214 - DNA, 25 bp, Canis familiaris
atgaaggaccgcctggagttctggt

SEQ ID NO: 21215 - DNA, 25 bp, Canis familiaris
atgaagtacccactgatgatatata

SEQ ID NO: 21216 - DNA, 25 bp, Canis familiaris
atgacaatgacttactttcaaatgg

SEQ ID NO: 21217 - DNA, 25 bp, Canis familiaris
atgtaataccattgctattcagaat

SEQ ID NO: 21218 - DNA, 25 bp, Canis familiaris
atgctaaagctttctcctcaataaa

SEQ ID NO: 21219 - DNA, 25 bp, Canis familiaris
atgctgaaagatattcccttatcat

SEQ ID NO: 21220 - DNA, 25 bp, Canis familiaris
atgctgaaattcattatctgttcct

SEQ ID NO: 21221 - DNA, 25 bp, Canis familiaris
atgctggagttagttgtatcttcaa

SEQ ID NO: 21222 - DNA, 25 bp, Canis familiaris
atgcttgagattttggctggtacta

SEQ ID NO: 21223 - DNA, 25 bp, Canis familiaris
atgctgttgcatttttgtttactaa

SEQ ID NO: 21224 - DNA, 25 bp, Canis familiaris
atgttggtagccgtttgtattaaag

SEQ ID NO: 21225 - DNA, 25 bp, Canis familiaris
atgattttactctgctggaatataa

SEQ ID NO: 21226 - DNA, 25 bp, Canis familiaris
atgcattgttcactcttggtattgt

SEQ ID NO: 21227 - DNA, 25 bp, Canis familiaris
atgctctgtccatcttggtgttgaa

SEQ ID NO: 21228 - DNA, 25 bp, Canis familiaris
atgcttgatgaagcttgtgagcttg

SEQ ID NO: 21229 - DNA, 25 bp, Canis familiaris
atgaagatgcactgctgcgtggctg

SEQ ID NO: 21230 - DNA, 25 bp, Canis familiaris
atgacagtgccatgtgcctttcata

SEQ ID NO: 21231 - DNA, 25 bp, Canis familiaris
atgaaggccatgcagtctctcaaat

SEQ ID NO: 21232 - DNA, 25 bp, Canis familiaris
atgtagcccagaacccagcaaatat

SEQ ID NO: 21233 - DNA, 25 bp, Canis familiaris
atgaagttgcattaccaacaaataa

SEQ ID NO: 21234 - DNA, 25 bp, Canis familiaris
atgaacttcaggttgcaaattatga

SEQ ID NO: 21235 - DNA, 25 bp, Canis familiaris
atgcactttgggggctacatccaga

SEQ ID NO: 21236 - DNA, 25 bp, Canis familiaris
atgaacttgtggggtaccggcttgt

SEQ ID NO: 21237 - DNA, 25 bp, Canis familiaris
atgaggacttggggatccctgggtg

SEQ ID NO: 21238 - DNA, 25 bp, Canis familiaris
atgaagattttggttttgtgtgtgt

SEQ ID NO: 21239 - DNA, 25 bp, Canis familiaris
atgaaagttaagagtgtgtgtgtgt

SEQ ID NO: 21240 - DNA, 25 bp, Canis familiaris
atgcaaagtaagcagcggtatgtgt

SEQ ID NO: 21241 - DNA, 25 bp, Canis familiaris
atgaaggtagtctctggtctggggg

SEQ ID NO: 21242 - DNA, 25 bp, Canis familiaris
atgaagtatcccacttgctctgggc

SEQ ID NO: 21243 - DNA, 25 bp, Canis familiaris
atgactgttaccccttggaatggct

SEQ ID NO: 21244 - DNA, 25 bp, Canis familiaris
atgaattttcactgttggcacattt

SEQ ID NO: 21245 - DNA, 25 bp, Canis familiaris
atgaatttacagcacttggcacaat

SEQ ID NO: 21246 - DNA, 25 bp, Canis familiaris
atgacattgttcttacacggcacaa

SEQ ID NO: 21247 - DNA, 25 bp, Canis familiaris
atgcacattgatatttactccagga

SEQ ID NO: 21248 - DNA, 25 bp, Canis familiaris
atgcagttgataagaggaatttggt

SEQ ID NO: 21249 - DNA, 25 bp, Canis familiaris
atgcttttccagttgaatttgactt

SEQ ID NO: 21250 - DNA, 25 bp, Canis familiaris
atgttcattccaaataaacgacttg

SEQ ID NO: 21251 - DNA, 25 bp, Canis familiaris
atgacgcatcctctaagaacgactt

SEQ ID NO: 21252 - DNA, 25 bp, Canis familiaris
atgaagaggctgagaaaacggtgat

SEQ ID NO: 21253 - DNA, 25 bp, Canis familiaris
atgaaggagtcaacacaagcaaggt

SEQ ID NO: 21254 - DNA, 25 bp, Canis familiaris
atgaaggagggcccacacgagagac

SEQ ID NO: 21255 - DNA, 25 bp, Canis familiaris
atgaaggtgacctcaagcctgcact

SEQ ID NO: 21256 - DNA, 25 bp, Canis familiaris
atgaagccttcctgaagcacatcct

SEQ ID NO: 21257 - DNA, 25 bp, Canis familiaris
atgaatctcctgtccagaacactgc

SEQ ID NO: 21258 - DNA, 25 bp, Canis familiaris
atgacatctgtcgtagaaacctcga

SEQ ID NO: 21259 - DNA, 25 bp, Canis familiaris
atgactcagcatgtaataacttttc

SEQ ID NO: 21260 - DNA, 25 bp, Canis familiaris
atgacctgaactgaagacctatgct

SEQ ID NO: 21261 - DNA, 25 bp, Canis familiaris
atgcacttagaaagctaaccttctt

SEQ ID NO: 21262 - DNA, 25 bp, Canis familiaris
atgatccgaataactacctgttttg

SEQ ID NO: 21263 - DNA, 25 bp, Canis familiaris
atgctatcctgcaagtctacctttt

SEQ ID NO: 21264 - DNA, 25 bp, Canis familiaris
atgctcaccatgagcaccaggcgct

SEQ ID NO: 21265 - DNA, 25 bp, Canis familiaris
atgctcatcctgctgccggatgaca

SEQ ID NO: 21266 - DNA, 25 bp, Canis familiaris
atgctcccgcaaccagagatggaag

SEQ ID NO: 21267 - DNA, 25 bp, Canis familiaris
atgcacctagcataagagcactgaa

SEQ ID NO: 21268 - DNA, 25 bp, Canis familiaris
atgacctctggaaatagcatctaac

SEQ ID NO: 21269 - DNA, 25 bp, Canis familiaris
atgacctgctgatggtgacctacct

SEQ ID NO: 21270 - DNA, 25 bp, Canis familiaris
atgacaccataccagaggactacga

SEQ ID NO: 21271 - DNA, 25 bp, Canis familiaris
atgacaccataccagaggactacga

SEQ ID NO: 21272 - DNA, 25 bp, Canis familiaris
atgacaccataccagaggactacga

SEQ ID NO: 21273 - DNA, 25 bp, Canis familiaris
atgcattcgtaaaacctctcacgaa

SEQ ID NO: 21274 - DNA, 25 bp, Canis familiaris
atgcatatgcatcaacggccttcac

SEQ ID NO: 21275 - DNA, 25 bp, Canis familiaris
atgaatgacatcaacgcgccttatc

SEQ ID NO: 21276 - DNA, 25 bp, Canis familiaris
atgcatatgacatgttcgccttacc

SEQ ID NO: 21277 - DNA, 25 bp, Canis familiaris
atgaatctgcaaattcgcacctttc

SEQ ID NO: 21278 - DNA, 25 bp, Canis familiaris
atgaatatcaagatcaccgcaccgc

SEQ ID NO: 21279 - DNA, 25 bp, Canis familiaris
atgactaagatttcatctgtgccca

SEQ ID NO: 21280 - DNA, 25 bp, Canis familiaris
atgaccagcaattaccttgccgact

SEQ ID NO: 21281 - DNA, 25 bp, Canis familiaris
atgatgccctattagccttggctcc

SEQ ID NO: 21282 - DNA, 25 bp, Canis familiaris
atgataccgattggcacgtagcccc

SEQ ID NO: 21283 - DNA, 25 bp, Canis familiaris
atgatgatgggcttgctatttcccc

SEQ ID NO: 21284 - DNA, 25 bp, Canis familiaris
atgaatgcagactgtgttcccacgg

SEQ ID NO: 21285 - DNA, 25 bp, Canis familiaris
atgcaatgcagtttgttgtctcata

SEQ ID NO: 21286 - DNA, 25 bp, Canis familiaris
atgaatacttgcacatgtagcatga

SEQ ID NO: 21287 - DNA, 25 bp, Canis familiaris
atgcaattcttgacattctgtatga

SEQ ID NO: 21288 - DNA, 25 bp, Canis familiaris
atgcacatcacatcctgtctggaat

SEQ ID NO: 21289 - DNA, 25 bp, Canis familiaris
atgcacggatgctgttgctggcaga

SEQ ID NO: 21290 - DNA, 25 bp, Canis familiaris
atgcacctgtgctggattgtcacac

SEQ ID NO: 21291 - DNA, 25 bp, Canis familiaris
atgagcacaggctctatattgctac

SEQ ID NO: 21292 - DNA, 25 bp, Canis familiaris
atgaacattgagatcatttgcaaca

SEQ ID NO: 21293 - DNA, 25 bp, Canis familiaris
atgaaatctttccatttgcaacaac

SEQ ID NO: 21294 - DNA, 25 bp, Canis familiaris
atgaaactctccgattatacccaat

SEQ ID NO: 21295 - DNA, 25 bp, Canis familiaris
atgaagcagcctacctttatgccac

SEQ ID NO: 21296 - DNA, 25 bp, Canis familiaris
atgaaagtgcctctatctcgcacac

SEQ ID NO: 21297 - DNA, 25 bp, Canis familiaris
atgataaatcctactggctctccac

SEQ ID NO: 21298 - DNA, 25 bp, Canis familiaris
atgagaacaccaagggtcaccccat

SEQ ID NO: 21299 - DNA, 25 bp, Canis familiaris
atgcaacaccaaatggcttcttccc

SEQ ID NO: 21300 - DNA, 25 bp, Canis familiaris
atgagaaaccgtcgtcgtatccagc

SEQ ID NO: 21301 - DNA, 25 bp, Canis familiaris
ctggaaaatcttgacgtaagagagg

SEQ ID NO: 21302 - DNA, 25 bp, Canis familiaris
atgagacaaacttctcagcgtaaag

SEQ ID NO: 21303 - DNA, 25 bp, Canis familiaris
atgcatggaaccaatccaggacaca

SEQ ID NO: 21304 - DNA, 25 bp, Canis familiaris
atgcttagaccattccaggaggaaa

SEQ ID NO: 21305 - DNA, 25 bp, Canis familiaris
atgcaaagaccatgcgccggaacac

SEQ ID NO: 21306 - DNA, 25 bp, Canis familiaris
atgaacaagctcaaggccaggaaaa

SEQ ID NO: 21307 - DNA, 25 bp, Canis familiaris
atgcaaacagccaagactcagcctc

SEQ ID NO: 21308 - DNA, 25 bp, Canis familiaris
atgcacagaaccaagcagtcacctt

SEQ ID NO: 21309 - DNA, 25 bp, Canis familiaris
atgcatgcagaaatatcccgacctc

SEQ ID NO: 21310 - DNA, 25 bp, Canis familiaris
atgaataaaatgctcgcacctcctc

SEQ ID NO: 21311 - DNA, 25 bp, Canis familiaris
atgaaaccaattcccagtgtcacct

SEQ ID NO: 21312 - DNA, 25 bp, Canis familiaris
atgaaactagattccctgtgtgccc

SEQ ID NO: 21313 - DNA, 25 bp, Canis familiaris
atgaatatttatgctccaatgtggg

SEQ ID NO: 21314 - DNA, 25 bp, Canis familiaris
atgcaaatattttctgcctcttctt

SEQ ID NO: 21315 - DNA, 25 bp, Canis familiaris
atgcacactttggattcttttctag

SEQ ID NO: 21316 - DNA, 25 bp, Canis familiaris
atgcaacagtctcattttcccatga

SEQ ID NO: 21317 - DNA, 25 bp, Canis familiaris
atgcaaatgcctatagatctcccta

SEQ ID NO: 21318 - DNA, 25 bp, Canis familiaris
atgacagtattcataattagcctga

SEQ ID NO: 21319 - DNA, 25 bp, Canis familiaris
atgaagctgcttgtgacattgcccg

SEQ ID NO: 21320 - DNA, 25 bp, Canis familiaris
atgaagcctttgtacagcagatcca

SEQ ID NO: 21321 - DNA, 25 bp, Canis familiaris
atgagaccagcagtaacgacacaga

SEQ ID NO: 21322 - DNA, 25 bp, Canis familiaris
atgcacccagcagtacaataaaagc

SEQ ID NO: 21323 - DNA, 25 bp, Canis familiaris
atgacaccacagtagcaataagcac

SEQ ID NO: 21324 - DNA, 25 bp, Canis familiaris
atgaagccatagtagctgttcaggc

SEQ ID NO: 21325 - DNA, 25 bp, Canis familiaris
atgatgcgctcagtgccatgcgttc

SEQ ID NO: 21326 - DNA, 25 bp, Canis familiaris
atggtgctatgggatggctataacg

SEQ ID NO: 21327 - DNA, 25 bp, Canis familiaris
atgagatgcttggagagggtctagg

SEQ ID NO: 21328 - DNA, 25 bp, Canis familiaris
atgaatgcttgagagggtcctgtcc

SEQ ID NO: 21329 - DNA, 25 bp, Canis familiaris
atgagagcaaagctgcgagtccgct

SEQ ID NO: 21330 - DNA, 25 bp, Canis familiaris
atgcaaggagaggagccagcccact

SEQ ID NO: 21331 - DNA, 25 bp, Canis familiaris
atgaagaagcagggcctctacctac

SEQ ID NO: 21332 - DNA, 25 bp, Canis familiaris
atgctagaggtctccacatacctcc

SEQ ID NO: 21333 - DNA, 25 bp, Canis familiaris
atgcaagaccatgttccagaagccc

SEQ ID NO: 21334 - DNA, 25 bp, Canis familiaris
atgacaggcactgctgtccacagtc

SEQ ID NO: 21335 - DNA, 25 bp, Canis familiaris
atgaattctttcagctctcatgtcc

SEQ ID NO: 21336 - DNA, 25 bp, Canis familiaris
atgcataccattaagagttcattat

SEQ ID NO: 21337 - DNA, 25 bp, Canis familiaris
atgctatgagctttagggtttattt

SEQ ID NO: 21338 - DNA, 25 bp, Canis familiaris
atgctatgaccttaggtatattctc

SEQ ID NO: 21339 - DNA, 25 bp, Canis familiaris
atgtagagccattgcaatgcatcaa

SEQ ID NO: 21340 - DNA, 25 bp, Canis familiaris
atgtaaccataaagaccaaccttag

SEQ ID NO: 21341 - DNA, 25 bp, Canis familiaris
atgtaactgcattgagaactgcata

SEQ ID NO: 21342 - DNA, 25 bp, Canis familiaris
atgacaactttgtcaagctcatttc

SEQ ID NO: 21343 - DNA, 25 bp, Canis familiaris
atgacaagctgtatcactgcctttg

SEQ ID NO: 21344 - DNA, 25 bp, Canis familiaris
atgaaactctgcaccgttatcatga

SEQ ID NO: 21345 - DNA, 25 bp, Canis familiaris
atgcttactctgtcttggttaatgg

SEQ ID NO: 21346 - DNA, 25 bp, Canis familiaris
atgcttacctatttgtctacactgt

SEQ ID NO: 21347 - DNA, 25 bp, Canis familiaris
atgcttgaaatttgtgtatgtccac

SEQ ID NO: 21348 - DNA, 25 bp, Canis familiaris
atgcttgactccagttcagcatcca

SEQ ID NO: 21349 - DNA, 25 bp, Canis familiaris
atgcttgtctcaaagattaagccat

SEQ ID NO: 21350 - DNA, 25 bp, Canis familiaris
atgcttgtctctatggacttgccta

SEQ ID NO: 21351 - DNA, 25 bp, Canis familiaris
atgcttgctttattttcttgggatc

SEQ ID NO: 21352 - DNA, 25 bp, Canis familiaris
atgcttctgtcttatgattttttca

SEQ ID NO: 21353 - DNA, 25 bp, Canis familiaris
atgcatgtactttatattttctata

SEQ ID NO: 21354 - DNA, 25 bp, Canis familiaris
atggtacttgcctcttttaaatctt

SEQ ID NO: 21355 - DNA, 25 bp, Canis familiaris
atgacttttggttcttcgtaattct

SEQ ID NO: 21356 - DNA, 25 bp, Canis familiaris
atgacttttgtgtgtttccagatat

SEQ ID NO: 21357 - DNA, 25 bp, Canis familiaris
atgaccttaggtatattctcttatt

SEQ ID NO: 21358 - DNA, 25 bp, Canis familiaris
aggagttggttaaacatctgccttt

SEQ ID NO: 21359 - DNA, 25 bp, Canis familiaris
atgagactacgtttggacttccttt

SEQ ID NO: 21360 - DNA, 25 bp, Canis familiaris
atgagttcaaggtggacattcgctt

SEQ ID NO: 21361 - DNA, 25 bp, Canis familiaris
atgcagtatctatgttaggcccagc

SEQ ID NO: 21362 - DNA, 25 bp, Canis familiaris
atgagtcctccggatagtatcaatg

SEQ ID NO: 21363 - DNA, 25 bp, Canis familiaris
atgagccagcatccggaaatcaagg

SEQ ID NO: 21364 - DNA, 25 bp, Canis familiaris
atgagccatcattggtgcatcatta

SEQ ID NO: 21365 - DNA, 25 bp, Canis familiaris
atgcaactgcattcctctgcattgt

SEQ ID NO: 21366 - DNA, 25 bp, Canis familiaris
atgcatagccatacttgttttgatg

SEQ ID NO: 21367 - DNA, 25 bp, Canis familiaris
atgcatcaccatccgatttattgct

SEQ ID NO: 21368 - DNA, 25 bp, Canis familiaris
atgcatcaccaatcatttattgcta

SEQ ID NO: 21369 - DNA, 25 bp, Canis familiaris
atgaattctatacttctcctctagg

SEQ ID NO: 21370 - DNA, 25 bp, Canis familiaris
atgagccctagactgactccagtag

SEQ ID NO: 21371 - DNA, 25 bp, Canis familiaris
atgagccctgaagaacgagccagat

SEQ ID NO: 21372 - DNA, 25 bp, Canis familiaris
atgacccaggactgccaggagcagt

SEQ ID NO: 21373 - DNA, 25 bp, Canis familiaris
atgaacgagaacactggtatgcaga

SEQ ID NO: 21374 - DNA, 25 bp, Canis familiaris
atgaacgaacagactcaggcgatgt

SEQ ID NO: 21375 - DNA, 25 bp, Canis familiaris
atgacctgaaccaaagggagacgct

SEQ ID NO: 21376 - DNA, 25 bp, Canis familiaris
atgtttgtgtccactggaaggcctt

SEQ ID NO: 21377 - DNA, 25 bp, Canis familiaris
atgttactggacacgaaaactcttg

SEQ ID NO: 21378 - DNA, 25 bp, Canis familiaris
atgagtatgctttacctaaaacttt

SEQ ID NO: 21379 - DNA, 25 bp, Canis familiaris
atgagctttctttgcacttaaaaat

SEQ ID NO: 21380 - DNA, 25 bp, Canis familiaris
atgatctctttgtgatttaagcagt

SEQ ID NO: 21381 - DNA, 25 bp, Canis familiaris
atgatccagctttgggctataggct

SEQ ID NO: 21382 - DNA, 25 bp, Canis familiaris
atgaccagtatccagagctagcagg

SEQ ID NO: 21383 - DNA, 25 bp, Canis familiaris
atgaggatgagctggagctacagga

SEQ ID NO: 21384 - DNA, 25 bp, Canis familiaris
atgcagggagtcggactaggagtcc

SEQ ID NO: 21385 - DNA, 25 bp, Canis familiaris
atgcatgggtttagtcctggaatcc

SEQ ID NO: 21386 - DNA, 25 bp, Canis familiaris
atgtaggtcttgactccaaaccctg

SEQ ID NO: 21387 - DNA, 25 bp, Canis familiaris
atgaagatcttggtcccataacccc

SEQ ID NO: 21388 - DNA, 25 bp, Canis familiaris
atgcaagatttgttcacactcccac

SEQ ID NO: 21389 - DNA, 25 bp, Canis familiaris
atgcaggatttgttcactttcccac

SEQ ID NO: 21390 - DNA, 25 bp, Canis familiaris
atgcactattattctcacttgtttt

SEQ ID NO: 21391 - DNA, 25 bp, Canis familiaris
atgcatcttgttttgaatttgtgtc

SEQ ID NO: 21392 - DNA, 25 bp, Canis familiaris
atgcattttgtttggtattgtattt

SEQ ID NO: 21393 - DNA, 25 bp, Canis familiaris
atgttgccgtttcgtaggacttgtc

SEQ ID NO: 21394 - DNA, 25 bp, Canis familiaris
agtggaccacttctggggtcttgac

SEQ ID NO: 21395 - DNA, 25 bp, Canis familiaris
atgtttccacctgtttggtcttgaa

SEQ ID NO: 21396 - DNA, 25 bp, Canis familiaris
agttaccccttcattcatttggaat

SEQ ID NO: 21397 - DNA, 25 bp, Canis familiaris
agtattacccttatcactttgaaat

SEQ ID NO: 21398 - DNA, 25 bp, Canis familiaris
atgaattaactttattgtctttgta

SEQ ID NO: 21399 - DNA, 25 bp, Canis familiaris
atgacataaatttgatctttttttt

SEQ ID NO: 21400 - DNA, 25 bp, Canis familiaris
atgagaatatttgacctacttttaa

SEQ ID NO: 21401 - DNA, 25 bp, Canis familiaris
atgaaattctgtgacatcatgtctt

SEQ ID NO: 21402 - DNA, 25 bp, Canis familiaris
atgcacttaggttcaatcagtcagc

SEQ ID NO: 21403 - DNA, 25 bp, Canis familiaris
atgcacaataagctcattagattct

SEQ ID NO: 21404 - DNA, 25 bp, Canis familiaris
atgtcagacaagttcagtaaagctt

SEQ ID NO: 21405 - DNA, 25 bp, Canis familiaris
atgtcaaccattcagtaaagctttt

SEQ ID NO: 21406 - DNA, 25 bp, Canis familiaris
ttgtcaaccccgatttagtcgtatc

SEQ ID NO: 21407 - DNA, 25 bp, Canis familiaris
atgaaaccccagatttgtgtttgat

SEQ ID NO: 21408 - DNA, 25 bp, Canis familiaris
atgagaagcaacgagagcttatgtg

SEQ ID NO: 21409 - DNA, 25 bp, Canis familiaris
atgaggaggactgagcttatagaca

SEQ ID NO: 21410 - DNA, 25 bp, Canis familiaris
atgaggagagttgtgtttggatatc

SEQ ID NO: 21411 - DNA, 25 bp, Canis familiaris
atgaggaggcttctcctcagccatt

SEQ ID NO: 21412 - DNA, 25 bp, Canis familiaris
atgcaggacagcttcaaccgggcat

SEQ ID NO: 21413 - DNA, 25 bp, Canis familiaris
atgcagagactcttcaaactgttca

SEQ ID NO: 21414 - DNA, 25 bp, Canis familiaris
atgcagctgcatcaacagaactttg

SEQ ID NO: 21415 - DNA, 25 bp, Canis familiaris
atgcagctgattggaagactttgtc

SEQ ID NO: 21416 - DNA, 25 bp, Canis familiaris
atgcaggttgcctgacgtgagaccc

SEQ ID NO: 21417 - DNA, 25 bp, Canis familiaris
atgaggggcctggattgggacttct

SEQ ID NO: 21418 - DNA, 25 bp, Canis familiaris
agaatgggccctgtggaacttccca

SEQ ID NO: 21419 - DNA, 25 bp, Canis familiaris
atgagagggcccggctggagactat

SEQ ID NO: 21420 - DNA, 25 bp, Canis familiaris
atgacatgggccactctggatacct

SEQ ID NO: 21421 - DNA, 25 bp, Canis familiaris
atgaatgggactgctcctatgccct

SEQ ID NO: 21422 - DNA, 25 bp, Canis familiaris
atgaagggcacagcttctggcagct

SEQ ID NO: 21423 - DNA, 25 bp, Canis familiaris
atgaagggcacagcttctggcagct

SEQ ID NO: 21424 - DNA, 25 bp, Canis familiaris
atgaaggagccagggacagatgatc

SEQ ID NO: 21425 - DNA, 25 bp, Canis familiaris
atgcagggagcccgaagcaggactc

SEQ ID NO: 21426 - DNA, 25 bp, Canis familiaris
atgacctgagccaaaggcagacact

SEQ ID NO: 21427 - DNA, 25 bp, Canis familiaris
atgacttgagcagtatagcccgcaa

SEQ ID NO: 21428 - DNA, 25 bp, Canis familiaris
atgactggagcagccatggccatgc

SEQ ID NO: 21429 - DNA, 25 bp, Canis familiaris
atgacgctggcagcgcgagccatga

SEQ ID NO: 21430 - DNA, 25 bp, Canis familiaris
atgacactggccccagcagaatgag

SEQ ID NO: 21431 - DNA, 25 bp, Canis familiaris
atgacatctccctgctgaagtgagg

SEQ ID NO: 21432 - DNA, 25 bp, Canis familiaris
atgagaccacaggggaagggggagt

SEQ ID NO: 21433 - DNA, 25 bp, Canis familiaris
atgggtttcggcgagaggcgggagt

SEQ ID NO: 21434 - DNA, 25 bp, Canis familiaris
atgggtcccaggtggcaggggaatc

SEQ ID NO: 21435 - DNA, 25 bp, Canis familiaris
atggagcctccgcggggagggacaa

SEQ ID NO: 21436 - DNA, 25 bp, Canis familiaris
atgagtccgcggcagagaggagggg

SEQ ID NO: 21437 - DNA, 25 bp, Canis familiaris
atgaccagcgccctggggatgagga

SEQ ID NO: 21438 - DNA, 25 bp, Canis familiaris
atgagctggtcgatctgggagagga

SEQ ID NO: 21439 - DNA, 25 bp, Canis familiaris
atgagtatgctcagcttcagaagag

SEQ ID NO: 21440 - DNA, 25 bp, Canis familiaris
atgagaattgccctaaactgaactg

SEQ ID NO: 21441 - DNA, 25 bp, Canis familiaris
atgagtcatttcctaagagctaaca

SEQ ID NO: 21442 - DNA, 25 bp, Canis familiaris
atgagcttttgcctgttagcatatc

SEQ ID NO: 21443 - DNA, 25 bp, Canis familiaris
atgagcgctttgatgccgactatgc

SEQ ID NO: 21444 - DNA, 25 bp, Canis familiaris
atgagcgtgcttaatccaaacaaac

SEQ ID NO: 21445 - DNA, 25 bp, Canis familiaris
atgatcgtgtggacatgccggaacc

SEQ ID NO: 21446 - DNA, 25 bp, Canis familiaris
atgaccggagtggcctgagaagccg

SEQ ID NO: 21447 - DNA, 25 bp, Canis familiaris
atgacacggaggtgccaacagcgag

SEQ ID NO: 21448 - DNA, 25 bp, Canis familiaris
atgacacggggctgcaggaacacaa

SEQ ID NO: 21449 - DNA, 25 bp, Canis familiaris
atgaccccgagagggtgcacacaca

SEQ ID NO: 21450 - DNA, 25 bp, Canis familiaris
atgacacctcgagactgtccagtga

SEQ ID NO: 21451 - DNA, 25 bp, Canis familiaris
atgacacagcatgaccacttacttg

SEQ ID NO: 21452 - DNA, 25 bp, Canis familiaris
atgacctgagtagactaccattgta

SEQ ID NO: 21453 - DNA, 25 bp, Canis familiaris
atgatagctggggctttaccagtct

SEQ ID NO: 21454 - DNA, 25 bp, Canis familiaris
atgacgttgccgattcaccagcact

SEQ ID NO: 21455 - DNA, 25 bp, Canis familiaris
atgactgttgcgcattgtccaagca

SEQ ID NO: 21456 - DNA, 25 bp, Canis familiaris
atgagtgatcttgtttctaaaccat

SEQ ID NO: 21457 - DNA, 25 bp, Canis familiaris
atgaaatcttgccacttgcaacaac

SEQ ID NO: 21458 - DNA, 25 bp, Canis familiaris
atgaatatttggcctatattcacac

SEQ ID NO: 21459 - DNA, 25 bp, Canis familiaris
atgaagattgatcagcttgtgtatg

SEQ ID NO: 21460 - DNA, 25 bp, Canis familiaris
atgaaatcttaactctgctgtgtgt

SEQ ID NO: 21461 - DNA, 25 bp, Canis familiaris
atgaattgctccagttctttgctaa

SEQ ID NO: 21462 - DNA, 25 bp, Canis familiaris
atgaattgcttctcatcttgttctc

SEQ ID NO: 21463 - DNA, 25 bp, Canis familiaris
atgatcataccctcatcagagtcgt

SEQ ID NO: 21464 - DNA, 25 bp, Canis familiaris
atgtaaccctcctagagatacccac

SEQ ID NO: 21465 - DNA, 25 bp, Canis familiaris
agtaacatgcctctgagtaacctcc

SEQ ID NO: 21466 - DNA, 25 bp, Canis familiaris
agtccaagagtcaggtaacctcctt

SEQ ID NO: 21467 - DNA, 25 bp, Canis familiaris
atgttagaggtgtgggaatccccgg

SEQ ID NO: 21468 - DNA, 25 bp, Canis familiaris
atgtagggagcctggagaaaccggg

SEQ ID NO: 21469 - DNA, 25 bp, Canis familiaris
atgttgtggacgtggcagtagactc

SEQ ID NO: 21470 - DNA, 25 bp, Canis familiaris
atgatttacaggctggtgccagaca

SEQ ID NO: 21471 - DNA, 25 bp, Canis familiaris
atgagggacgtgctgtgatgggcca

SEQ ID NO: 21472 - DNA, 25 bp, Canis familiaris
atgaggagccctgtgggtgagccga

SEQ ID NO: 21473 - DNA, 25 bp, Canis familiaris
aggttgtcctcgtggaggcatcggt

SEQ ID NO: 21474 - DNA, 25 bp, Canis familiaris
atgactcgttctgtaggagagattg

SEQ ID NO: 21475 - DNA, 25 bp, Canis familiaris
atgacagtgtttgccgggagtgtgc

SEQ ID NO: 21476 - DNA, 25 bp, Canis familiaris
atgacaggatgtttctcgggatgag

SEQ ID NO: 21477 - DNA, 25 bp, Canis familiaris
atgacaagtgcacttctcagtcgtc

SEQ ID NO: 21478 - DNA, 25 bp, Canis familiaris
atgacagagatacagccagcttccc

SEQ ID NO: 21479 - DNA, 25 bp, Canis familiaris
atgacatgcagagctgaccctgtgc

SEQ ID NO: 21480 - DNA, 25 bp, Canis familiaris
atgacatcatagatgacatccatag

SEQ ID NO: 21481 - DNA, 25 bp, Canis familiaris
atgacatacagacacatgcacacac

SEQ ID NO: 21482 - DNA, 25 bp, Canis familiaris
atgacacagactcacagcaactact

SEQ ID NO: 21483 - DNA, 25 bp, Canis familiaris
atgaccggctccgagtttgactttg

SEQ ID NO: 21484 - DNA, 25 bp, Canis familiaris
atgaccctcccaagtgagggctctg

SEQ ID NO: 21485 - DNA, 25 bp, Canis familiaris
atgacccaaactctatgctggtggt

SEQ ID NO: 21486 - DNA, 25 bp, Canis familiaris
atgaccaccaccttaggcaggaggt

SEQ ID NO: 21487 - DNA, 25 bp, Canis familiaris
atgaccacttcggcatcgtggaggg

SEQ ID NO: 21488 - DNA, 25 bp, Canis familiaris
atgaccacatttgatccgaaggacc

SEQ ID NO: 21489 - DNA, 25 bp, Canis familiaris
atgacccaattgtacccaagaactt

SEQ ID NO: 21490 - DNA, 25 bp, Canis familiaris
atgagcctaaaatccagcaaacagc

SEQ ID NO: 21491 - DNA, 25 bp, Canis familiaris
atgatgggaaaaagccacacacaca

SEQ ID NO: 21492 - DNA, 25 bp, Canis familiaris
atgattcgagtactcggtcaacaga

SEQ ID NO: 21493 - DNA, 25 bp, Canis familiaris
atgaaagggatgaggacaacaacct

SEQ ID NO: 21494 - DNA, 25 bp, Canis familiaris
atgaagaattatccgtgttacaacc

SEQ ID NO: 21495 - DNA, 25 bp, Canis familiaris
atgaatgagagttgcctggcttcca

SEQ ID NO: 21496 - DNA, 25 bp, Canis familiaris
atgaatgggtagtcatgcacctccc

SEQ ID NO: 21497 - DNA, 25 bp, Canis familiaris
atgaagaagtagacacctctgcccc

SEQ ID NO: 21498 - DNA, 25 bp, Canis familiaris
atgaagagttagaccccatggaccc

SEQ ID NO: 21499 - DNA, 25 bp, Canis familiaris
atgaaggaccattcaatcactggat

SEQ ID NO: 21500 - DNA, 25 bp, Canis familiaris
atgaatggattctcactttgtgatt

SEQ ID NO: 21501 - DNA, 25 bp, Canis familiaris
atgtaccatgtctcacttgggtctt

SEQ ID NO: 21502 - DNA, 25 bp, Canis familiaris
atgaactctgtcttttttggtcctt

SEQ ID NO: 21503 - DNA, 25 bp, Canis familiaris
atgatacttttttaggggcaccttg

SEQ ID NO: 21504 - DNA, 25 bp, Canis familiaris
atgtcactctttatatgggggcctc

SEQ ID NO: 21505 - DNA, 25 bp, Canis familiaris
atgtcacttgcaaaaaatgggggaa

SEQ ID NO: 21506 - DNA, 25 bp, Canis familiaris
atgacagcttcagactttggttgtt

SEQ ID NO: 21507 - DNA, 25 bp, Canis familiaris
atgagccattcagcgtggtcgtttt

SEQ ID NO: 21508 - DNA, 25 bp, Canis familiaris
atgaacattaccctggattggcaat

SEQ ID NO: 21509 - DNA, 25 bp, Canis familiaris
atgaaaagcccctgtggcagcagct

SEQ ID NO: 21510 - DNA, 25 bp, Canis familiaris
atgaagaactgggtagcatggaggt

SEQ ID NO: 21511 - DNA, 25 bp, Canis familiaris
atgaagatcctgaccgagcgtggct

SEQ ID NO: 21512 - DNA, 25 bp, Canis familiaris
atgaagtctgagaccttcctgtgct

SEQ ID NO: 21513 - DNA, 25 bp, Canis familiaris
atgaagtccgatttatctctctctc

SEQ ID NO: 21514 - DNA, 25 bp, Canis familiaris
atgaaccctgttaatctaatcataa

SEQ ID NO: 21515 - DNA, 25 bp, Canis familiaris
atgacaccacagactgttcttcatc

SEQ ID NO: 21516 - DNA, 25 bp, Canis familiaris
atgaatacacagtttttgctccctc

SEQ ID NO: 21517 - DNA, 25 bp, Canis familiaris
atgaccacagctttgtagtacaacc

SEQ ID NO: 21518 - DNA, 25 bp, Canis familiaris
atgaccggctctttaaacaaactat

SEQ ID NO: 21519 - DNA, 25 bp, Canis familiaris
atgacctgtgctgttccgaggaact

SEQ ID NO: 21520 - DNA, 25 bp, Canis familiaris
atgacctgggtttgcaaattgtact

SEQ ID NO: 21521 - DNA, 25 bp, Canis familiaris
atgacctaggttcaagatggcatct

SEQ ID NO: 21522 - DNA, 25 bp, Canis familiaris
atgacgcttgcacacgaaaagtctc

SEQ ID NO: 21523 - DNA, 25 bp, Canis familiaris
atgacagtcccatccaaacagattg

SEQ ID NO: 21524 - DNA, 25 bp, Canis familiaris
atgaagtgccactgcctagaaatgt

SEQ ID NO: 21525 - DNA, 25 bp, Canis familiaris
atgaagtaaccgcctagcaaattat

SEQ ID NO: 21526 - DNA, 25 bp, Canis familiaris
atgacaaaatcctccacaagttatg

SEQ ID NO: 21527 - DNA, 25 bp, Canis familiaris
atgacagaaatatccactcagagtg

SEQ ID NO: 21528 - DNA, 25 bp, Canis familiaris
atgactgaataatatccactgtgtg

SEQ ID NO: 21529 - DNA, 25 bp, Canis familiaris
atgactcacatattttaccgtagga

SEQ ID NO: 21530 - DNA, 25 bp, Canis familiaris
atgacttcatagttgtgatctcaaa

SEQ ID NO: 21531 - DNA, 25 bp, Canis familiaris
atgaaatcatcaactggctcgataa

SEQ ID NO: 21532 - DNA, 25 bp, Canis familiaris
atgaacctgatggatggctgagaaa

SEQ ID NO: 21533 - DNA, 25 bp, Canis familiaris
atgaaactggctgcagatgaagaag

SEQ ID NO: 21534 - DNA, 25 bp, Canis familiaris
atgagacactttaccagaaggacga

SEQ ID NO: 21535 - DNA, 25 bp, Canis familiaris
atgagacctggtacccaagcttttc

SEQ ID NO: 21536 - DNA, 25 bp, Canis familiaris
atgagaagatttacccacgatttta

SEQ ID NO: 21537 - DNA, 25 bp, Canis familiaris
atgagccaatttacagacaagactt

SEQ ID NO: 21538 - DNA, 25 bp, Canis familiaris
atgagcgactatttcagcacaagaa

SEQ ID NO: 21539 - DNA, 25 bp, Canis familiaris
atgacaccgattaatgcacccaagt

SEQ ID NO: 21540 - DNA, 25 bp, Canis familiaris
atgacgccgtacaacactcaaattc

SEQ ID NO: 21541 - DNA, 25 bp, Canis familiaris
atgacctcatgttaaccttagttat

SEQ ID NO: 21542 - DNA, 25 bp, Canis familiaris
atgaaccatgtattcccttgtcttt

SEQ ID NO: 21543 - DNA, 25 bp, Canis familiaris
atgaagcctttatatcttgtttctt

SEQ ID NO: 21544 - DNA, 25 bp, Canis familiaris
atgaatctgttttcttctctttttt

SEQ ID NO: 21545 - DNA, 25 bp, Canis familiaris
atgaatctttgttgtcttgttcttt

SEQ ID NO: 21546 - DNA, 25 bp, Canis familiaris
atgaatgtcaatcttttatctcttc

SEQ ID NO: 21547 - DNA, 25 bp, Canis familiaris
atgaagcctgctcattgtcttctgg

SEQ ID NO: 21548 - DNA, 25 bp, Canis familiaris
atgaacacatggcttgtttgttgga

SEQ ID NO: 21549 - DNA, 25 bp, Canis familiaris
atgaaaatatgtacttctttatgga

SEQ ID NO: 21550 - DNA, 25 bp, Canis familiaris
atgaagaattggattccctcatcaa

SEQ ID NO: 21551 - DNA, 25 bp, Canis familiaris
atgacagcattgaaggctttcccct

SEQ ID NO: 21552 - DNA, 25 bp, Canis familiaris
atgacctggacaacatttccttccc

SEQ ID NO: 21553 - DNA, 25 bp, Canis familiaris
atgaactgtacagtatttctctttc

SEQ ID NO: 21554 - DNA, 25 bp, Canis familiaris
atgacactgtggttattccatttat

SEQ ID NO: 21555 - DNA, 25 bp, Canis familiaris
atgacctaaatgtattccttctgat

SEQ ID NO: 21556 - DNA, 25 bp, Canis familiaris
atgacacatcaatttaaggcaactg

SEQ ID NO: 21557 - DNA, 25 bp, Canis familiaris
atgaccatcgtctacaagagcagca

SEQ ID NO: 21558 - DNA, 25 bp, Canis familiaris
atgagccctgagccacaaggcagac

SEQ ID NO: 21559 - DNA, 25 bp, Canis familiaris
atgactccagagcaaatggctacaa

SEQ ID NO: 21560 - DNA, 25 bp, Canis familiaris
atgacccagtaaaatattacaacca

SEQ ID NO: 21561 - DNA, 25 bp, Canis familiaris
atgacccattagagatttcactccc

SEQ ID NO: 21562 - DNA, 25 bp, Canis familiaris
atgaccccatagaaacttgtcctga

SEQ ID NO: 21563 - DNA, 25 bp, Canis familiaris
atgacttttaaaatcttgtgcctaa

SEQ ID NO: 21564 - DNA, 25 bp, Canis familiaris
atgtttttacgtactagtgcccaat

SEQ ID NO: 21565 - DNA, 25 bp, Canis familiaris
atgtttttccatccaaatttgccaa

SEQ ID NO: 21566 - DNA, 25 bp, Canis familiaris
atgagcttttctgccaactgtatta

SEQ ID NO: 21567 - DNA, 25 bp, Canis familiaris
atgacttatccaaacaggctgttgc

SEQ ID NO: 21568 - DNA, 25 bp, Canis familiaris
atgagttgtctaaatgggcatatta

SEQ ID NO: 21569 - DNA, 25 bp, Canis familiaris
atgagtattccacatgtcctttata

SEQ ID NO: 21570 - DNA, 25 bp, Canis familiaris
atgattcgatcctcttcagttcatt

SEQ ID NO: 21571 - DNA, 25 bp, Canis familiaris
atgagggtctaacttcacatccatt

SEQ ID NO: 21572 - DNA, 25 bp, Canis familiaris
atgagaagctatcaccacctcgatt

SEQ ID NO: 21573 - DNA, 25 bp, Canis familiaris
atgagacagacacaacctgcacagt

SEQ ID NO: 21574 - DNA, 25 bp, Canis familiaris
atgacccgtgctggccacgggagca

SEQ ID NO: 21575 - DNA, 25 bp, Canis familiaris
atgatcaggggggcatcgggtattg

SEQ ID NO: 21576 - DNA, 25 bp, Canis familiaris
atgtccaggtgaggcccaggtatat

SEQ ID NO: 21577 - DNA, 25 bp, Canis familiaris
atgttacgttgaccagcaggctgat

SEQ ID NO: 21578 - DNA, 25 bp, Canis familiaris
atgttaccttacatctggtcagaat

SEQ ID NO: 21579 - DNA, 25 bp, Canis familiaris
atgagcttccataaccactttaatt

SEQ ID NO: 21580 - DNA, 25 bp, Canis familiaris
atgacacttaatgccagcttataat

SEQ ID NO: 21581 - DNA, 25 bp, Canis familiaris
atgacacttgacgcacatcttgact

SEQ ID NO: 21582 - DNA, 25 bp, Canis familiaris
atgaccaagaaggccactggacttt

SEQ ID NO: 21583 - DNA, 25 bp, Canis familiaris
atgaccaccaataccagaggactac

SEQ ID NO: 21584 - DNA, 25 bp, Canis familiaris
atgacgaccaaccaaatgcacacaa

SEQ ID NO: 21585 - DNA, 25 bp, Canis familiaris
atgactacacaagacacttcacaat

SEQ ID NO: 21586 - DNA, 25 bp, Canis familiaris
atgacaacaccaaacctgatacctc

SEQ ID NO: 21587 - DNA, 25 bp, Canis familiaris
atgataagcagagcagccctgaaca

SEQ ID NO: 21588 - DNA, 25 bp, Canis familiaris
atgagctcatgatgccaggtctaat

SEQ ID NO: 21589 - DNA, 25 bp, Canis familiaris
atgactctgaaccgggtggcaccgg

SEQ ID NO: 21590 - DNA, 25 bp, Canis familiaris
atgatttcaccagtgggagaccctg

SEQ ID NO: 21591 - DNA, 25 bp, Canis familiaris
atgtgtatctcacctggggaacctg

SEQ ID NO: 21592 - DNA, 25 bp, Canis familiaris
atgagtaaaattcgaggctcggtgg

SEQ ID NO: 21593 - DNA, 25 bp, Canis familiaris
atgaaggtgaattcaaggctgaagg

SEQ ID NO: 21594 - DNA, 25 bp, Canis familiaris
atgaagcggcagtgacgtctacagg

SEQ ID NO: 21595 - DNA, 25 bp, Canis familiaris
atgacaatggatatgaagtctaatg

SEQ ID NO: 21596 - DNA, 25 bp, Canis familiaris
atgaaatttttggatggcttgatga

SEQ ID NO: 21597 - DNA, 25 bp, Canis familiaris
atgacttcttcttggtggcttgtct

SEQ ID NO: 21598 - DNA, 25 bp, Canis familiaris
atgactttttggtttgttttgcact

SEQ ID NO: 21599 - DNA, 25 bp, Canis familiaris
atgacttgtaaagcttgtgtttctt

SEQ ID NO: 21600 - DNA, 25 bp, Canis familiaris
atgacttttaattgcattgctgatt

SEQ ID NO: 21601 - DNA, 25 bp, Canis familiaris
atgaggaatctggcttgctgtgtag

SEQ ID NO: 21602 - DNA, 25 bp, Canis familiaris
atgaggaaccagaccgttatgttgt

SEQ ID NO: 21603 - DNA, 25 bp, Canis familiaris
atgaaacccagatgtgtgtgatatt

SEQ ID NO: 21604 - DNA, 25 bp, Canis familiaris
atgaagccctcgttgtttataacct

SEQ ID NO: 21605 - DNA, 25 bp, Canis familiaris
atgatctgctcctggttttaaactt

SEQ ID NO: 21606 - DNA, 25 bp, Canis familiaris
atgttgactgcacaggtaatacaac

SEQ ID NO: 21607 - DNA, 25 bp, Canis familiaris
atgtagttcaaccgtggaaagatgc

SEQ ID NO: 21608 - DNA, 25 bp, Canis familiaris
atgtagaactcccaattactggact

SEQ ID NO: 21609 - DNA, 25 bp, Canis familiaris
atgacgagacccaaatgatccgcgt

SEQ ID NO: 21610 - DNA, 25 bp, Canis familiaris
atgaggaacccaggtaccatttcta

SEQ ID NO: 21611 - DNA, 25 bp, Canis familiaris
atgattaacaacgcaacctttcctt

SEQ ID NO: 21612 - DNA, 25 bp, Canis familiaris
atgattagaacctagcctctttcct

SEQ ID NO: 21613 - DNA, 25 bp, Canis familiaris
atgactttattctactctaattcct

SEQ ID NO: 21614 - DNA, 25 bp, Canis familiaris
atgacatgtgttcctatgctctatt

SEQ ID NO: 21615 - DNA, 25 bp, Canis familiaris
atgactgatgtgctttcttttattt

SEQ ID NO: 21616 - DNA, 25 bp, Canis familiaris
atgacctgcctttttatttgatagt

SEQ ID NO: 21617 - DNA, 25 bp, Canis familiaris
atgataggtttctttattttcacta

SEQ ID NO: 21618 - DNA, 25 bp, Canis familiaris
atggggcttgttcatttgtacctca

SEQ ID NO: 21619 - DNA, 25 bp, Canis familiaris
atgacgtgcttggtgctgatttgtg

SEQ ID NO: 21620 - DNA, 25 bp, Canis familiaris
atgacaatctctctgcagtatctgc

SEQ ID NO: 21621 - DNA, 25 bp, Canis familiaris
atgaccactgctactcagaagccaa

SEQ ID NO: 21622 - DNA, 25 bp, Canis familiaris
atgactgctcactaacaacgcacct

SEQ ID NO: 21623 - DNA, 25 bp, Canis familiaris
atgagctgccctgagaacctcagtc

SEQ ID NO: 21624 - DNA, 25 bp, Canis familiaris
atgatgtgacccttgaggacctgtc

SEQ ID NO: 21625 - DNA, 25 bp, Canis familiaris
atgaggaactctaggtcccttcaac

SEQ ID NO: 21626 - DNA, 25 bp, Canis familiaris
atgagaaaactgccttctctcttca

SEQ ID NO: 21627 - DNA, 25 bp, Canis familiaris
atgtagaaaagggtcctctagagtc

SEQ ID NO: 21628 - DNA, 25 bp, Canis familiaris
atgttcaaaggagccctgcagagag

SEQ ID NO: 21629 - DNA, 25 bp, Canis familiaris
atgaaaagaggctccctgcgagtgg

SEQ ID NO: 21630 - DNA, 25 bp, Canis familiaris
atggaaaggggatacgtggtgcgaa

SEQ ID NO: 21631 - DNA, 25 bp, Canis familiaris
atggggggaccatatggtggaggaa

SEQ ID NO: 21632 - DNA, 25 bp, Canis familiaris
atgatggggaacctaagtcgcctgt

SEQ ID NO: 21633 - DNA, 25 bp, Canis familiaris
atgagaggtgttaccaaagcccttt

SEQ ID NO: 21634 - DNA, 25 bp, Canis familiaris
atgagaggtgtacaaaagccttttg

SEQ ID NO: 21635 - DNA, 25 bp, Canis familiaris
atgagaagttcacaaacccatagga

SEQ ID NO: 21636 - DNA, 25 bp, Canis familiaris
ttatgaaattcctagggccctttag

SEQ ID NO: 21637 - DNA, 25 bp, Canis familiaris
atgtgaaaatccaatgggcacggtg

SEQ ID NO: 21638 - DNA, 25 bp, Canis familiaris
atgtgaaaccgtactggcactggga

SEQ ID NO: 21639 - DNA, 25 bp, Canis familiaris
atgtagtacggatctggcaccaggt

SEQ ID NO: 21640 - DNA, 25 bp, Canis familiaris
atgttctttggatcggcacctagtc

SEQ ID NO: 21641 - DNA, 25 bp, Canis familiaris
atgttttaatcagctggacctacct

SEQ ID NO: 21642 - DNA, 25 bp, Canis familiaris
atgttttgtacacatttgactactt

SEQ ID NO: 21643 - DNA, 25 bp, Canis familiaris
atgatatgattttccaatctctacc

SEQ ID NO: 21644 - DNA, 25 bp, Canis familiaris
atgacttgtatcccgatgcttaaag

SEQ ID NO: 21645 - DNA, 25 bp, Canis familiaris
atgagtggctacctgggctattgta

SEQ ID NO: 21646 - DNA, 25 bp, Canis familiaris
atgagcttgtacttgggacttgcca

SEQ ID NO: 21647 - DNA, 25 bp, Canis familiaris
atgatggtgtacgtctggaccctga

SEQ ID NO: 21648 - DNA, 25 bp, Canis familiaris
atgactggtatacctgcaacacctg

SEQ ID NO: 21649 - DNA, 25 bp, Canis familiaris
atgagcttgtaacctgcatgcaact

SEQ ID NO: 21650 - DNA, 25 bp, Canis familiaris
atgactaggtgacctgctgcacttc

SEQ ID NO: 21651 - DNA, 25 bp, Canis familiaris
atgagaagggcagcgtgcctgtcct

SEQ ID NO: 21652 - DNA, 25 bp, Canis familiaris
atgaaagcttcatgggctcgtctct

SEQ ID NO: 21653 - DNA, 25 bp, Canis familiaris
atgaaactacgtacgtctgactctc

SEQ ID NO: 21654 - DNA, 25 bp, Canis familiaris
atgaaatcaacagttcctccacctg

SEQ ID NO: 21655 - DNA, 25 bp, Canis familiaris
atgataggccactttgcctcactta

SEQ ID NO: 21656 - DNA, 25 bp, Canis familiaris
atgacttcaagctttcgtacgctac

SEQ ID NO: 21657 - DNA, 25 bp, Canis familiaris
atgacgaaagccctgcgtcatcctc

SEQ ID NO: 21658 - DNA, 25 bp, Canis familiaris
atgagctggaaggacatgtttgcct

SEQ ID NO: 21659 - DNA, 25 bp, Canis familiaris
atgactgagttgagcattctgtctc

SEQ ID NO: 21660 - DNA, 25 bp, Canis familiaris
atgacatgtgggacactcttggctc

SEQ ID NO: 21661 - DNA, 25 bp, Canis familiaris
atgaaaggtgctgccttggctgggt

SEQ ID NO: 21662 - DNA, 25 bp, Canis familiaris
atgaaaggctgtggctgttcctcat

SEQ ID NO: 21663 - DNA, 25 bp, Canis familiaris
atgagaagcttgtccgcttcttctt

SEQ ID NO: 21664 - DNA, 25 bp, Canis familiaris
atgaaaattatccccatgcactctt

SEQ ID NO: 21665 - DNA, 25 bp, Canis familiaris
atgaaatattgctttccagcccttc

SEQ ID NO: 21666 - DNA, 25 bp, Canis familiaris
atgagtaatgtcgttcacccacgtc

SEQ ID NO: 21667 - DNA, 25 bp, Canis familiaris
atgacacagtgcggtacaccaacct

SEQ ID NO: 21668 - DNA, 25 bp, Canis familiaris
atgtctagagggtatcgccgtggca

SEQ ID NO: 21669 - DNA, 25 bp, Canis familiaris
atgactatggggaaagggctgaggg

SEQ ID NO: 21670 - DNA, 25 bp, Canis familiaris
atgaggtggggaagcgtcggcagga

SEQ ID NO: 21671 - DNA, 25 bp, Canis familiaris
atgaccacggagatgtctaggggca

SEQ ID NO: 21672 - DNA, 25 bp, Canis familiaris
atgtcccctagaattcaagctgtgc

SEQ ID NO: 21673 - DNA, 25 bp, Canis familiaris
atgtacgttgctatccaggctgtgc

SEQ ID NO: 21674 - DNA, 25 bp, Canis familiaris
atgtatttggctacagccaccgggt

SEQ ID NO: 21675 - DNA, 25 bp, Canis familiaris
atgtctttttatggcccgatggctt

SEQ ID NO: 21676 - DNA, 25 bp, Canis familiaris
atggtttagtgaggccctcggatcg

SEQ ID NO: 21677 - DNA, 25 bp, Canis familiaris
atgtgatttgggtgccatccgtcat

SEQ ID NO: 21678 - DNA, 25 bp, Canis familiaris
atgtattggtggtgatttggaaaaa

SEQ ID NO: 21679 - DNA, 25 bp, Canis familiaris
atgtcattcgtccaacttgaaaaca

SEQ ID NO: 21680 - DNA, 25 bp, Canis familiaris
atgaaatcgtcgcttcttgaagacc

SEQ ID NO: 21681 - DNA, 25 bp, Canis familiaris
atgggatcgtggagatgcctgccga

SEQ ID NO: 21682 - DNA, 25 bp, Canis familiaris
atgagggcctagagtgcgtgcccac

SEQ ID NO: 21683 - DNA, 25 bp, Canis familiaris
atgagccctagatggcggtgagccc

SEQ ID NO: 21684 - DNA, 25 bp, Canis familiaris
atgagcacctggtggacgtcttcac

SEQ ID NO: 21685 - DNA, 25 bp, Canis familiaris
atgacctctggcttgtggtcacttc

SEQ ID NO: 21686 - DNA, 25 bp, Canis familiaris
atgtcctcaggcttgtgatttgctc

SEQ ID NO: 21687 - DNA, 25 bp, Canis familiaris
atgtcaacatggagtagcttgctac

SEQ ID NO: 21688 - DNA, 25 bp, Canis familiaris
atgttggctgacagtgactctccac

SEQ ID NO: 21689 - DNA, 25 bp, Canis familiaris
atgttgcctacaggagatgaccccc

SEQ ID NO: 21690 - DNA, 25 bp, Canis familiaris
atgttaccaaggacatgactctgga

SEQ ID NO: 21691 - DNA, 25 bp, Canis familiaris
atgattcagccgtgtcacctatgca

SEQ ID NO: 21692 - DNA, 25 bp, Canis familiaris
atgattggccagtgttttctcaaaa

SEQ ID NO: 21693 - DNA, 25 bp, Canis familiaris
atgttgtgcccacctttggcaagaa

SEQ ID NO: 21694 - DNA, 25 bp, Canis familiaris
atgattacccacttagaagatcaaa

SEQ ID NO: 21695 - DNA, 25 bp, Canis familiaris
atgactttccatttagcacgatgag

SEQ ID NO: 21696 - DNA, 25 bp, Canis familiaris
atgtttgcccatttccaaagcagtc

SEQ ID NO: 21697 - DNA, 25 bp, Canis familiaris
atgtttgccttatttcacaaccact

SEQ ID NO: 21698 - DNA, 25 bp, Canis familiaris
atgttaggctgtttgtacacaactt

SEQ ID NO: 21699 - DNA, 25 bp, Canis familiaris
atgttagccgtgtggtctcaagtgt

SEQ ID NO: 21700 - DNA, 25 bp, Canis familiaris
atgtttccatctgtggtctccaaat

SEQ ID NO: 21701 - DNA, 25 bp, Canis familiaris
atgttggccttatgtgtcatccaca

SEQ ID NO: 21702 - DNA, 25 bp, Canis familiaris
atgaggtcacattaagtgcatttca

SEQ ID NO: 21703 - DNA, 25 bp, Canis familiaris
atgagggcacagtacaattcctgtt

SEQ ID NO: 21704 - DNA, 25 bp, Canis familiaris
atgagggacaaccaacccttctgac

SEQ ID NO: 21705 - DNA, 25 bp, Canis familiaris
atgttgggcatagagattactttaa

SEQ ID NO: 21706 - DNA, 25 bp, Canis familiaris
atgtaccattggcagcattacctta

SEQ ID NO: 21707 - DNA, 25 bp, Canis familiaris
atgacttctgtctgaattccactta

SEQ ID NO: 21708 - DNA, 25 bp, Canis familiaris
atgattttctaggtcttccacttct

SEQ ID NO: 21709 - DNA, 25 bp, Canis familiaris
atgattttcagggtcttcacgcctg

SEQ ID NO: 21710 - DNA, 25 bp, Canis familiaris
atgatatgattcatcgtcgtacgcc

SEQ ID NO: 21711 - DNA, 25 bp, Canis familiaris
atgatgtcaactgctgtgcgttctc

SEQ ID NO: 21712 - DNA, 25 bp, Canis familiaris
atgacaatatctgttctgtacccaa

SEQ ID NO: 21713 - DNA, 25 bp, Canis familiaris
atgacaatgactagtctcttaaccc

SEQ ID NO: 21714 - DNA, 25 bp, Canis familiaris
atgactatcattactctgttatcag

SEQ ID NO: 21715 - DNA, 25 bp, Canis familiaris
atgagcagtcttacttttgtagttt

SEQ ID NO: 21716 - DNA, 25 bp, Canis familiaris
atgagcattttcagcttttgcaaat

SEQ ID NO: 21717 - DNA, 25 bp, Canis familiaris
atgactttttaggtcttcattatta

SEQ ID NO: 21718 - DNA, 25 bp, Canis familiaris
atgttgtgctatgacttttctcctt

SEQ ID NO: 21719 - DNA, 25 bp, Canis familiaris
atgaggtttgaagtgcttggccacc

SEQ ID NO: 21720 - DNA, 25 bp, Canis familiaris
atgggctaacaaggtttcccgcagg

SEQ ID NO: 21721 - DNA, 25 bp, Canis familiaris
atggtcttgccatgacttgtatccc

SEQ ID NO: 21722 - DNA, 25 bp, Canis familiaris
atgtttgtcagttacgtttccacga

SEQ ID NO: 21723 - DNA, 25 bp, Canis familiaris
atgtcttgcacgattaggttaaccc

SEQ ID NO: 21724 - DNA, 25 bp, Canis familiaris
atgtctcggtcgattgcggtcaaca

SEQ ID NO: 21725 - DNA, 25 bp, Canis familiaris
atgttgggaattgtgggtcaacaag

SEQ ID NO: 21726 - DNA, 25 bp, Canis familiaris
atgttaatttttagggtctgataga

SEQ ID NO: 21727 - DNA, 25 bp, Canis familiaris
atgtttacctatttgccagtcgtgg

SEQ ID NO: 21728 - DNA, 25 bp, Canis familiaris
atgacttaccttttcaactcttgat

SEQ ID NO: 21729 - DNA, 25 bp, Canis familiaris
atgacttcacctgttatatctataa

SEQ ID NO: 21730 - DNA, 25 bp, Canis familiaris
atgagctgtcatctgtttataggta

SEQ ID NO: 21731 - DNA, 25 bp, Canis familiaris
atgatatgcttgcttctctagggaa

SEQ ID NO: 21732 - DNA, 25 bp, Canis familiaris
atgttgctacatctcctaaggaaac

SEQ ID NO: 21733 - DNA, 25 bp, Canis familiaris
atgtgccaacattttttaggaagat

SEQ ID NO: 21734 - DNA, 25 bp, Canis familiaris
atgatccaacattactattatccta

SEQ ID NO: 21735 - DNA, 25 bp, Canis familiaris
atgatcgaagcatcagtttactgtc

SEQ ID NO: 21736 - DNA, 25 bp, Canis familiaris
atgtcagatgactgcttatgtacag

SEQ ID NO: 21737 - DNA, 25 bp, Canis familiaris
atgactgctatctacctgatgtcca

SEQ ID NO: 21738 - DNA, 25 bp, Canis familiaris
atgagcagcttctcagagctcccat

SEQ ID NO: 21739 - DNA, 25 bp, Canis familiaris
atgagcacacccttgtgctccacat

SEQ ID NO: 21740 - DNA, 25 bp, Canis familiaris
atgagacctatctatctctaccaag

SEQ ID NO: 21741 - DNA, 25 bp, Canis familiaris
atgagatttatctttccccagaaac

SEQ ID NO: 21742 - DNA, 25 bp, Canis familiaris
atgagtttaattatcccatgttatc

SEQ ID NO: 21743 - DNA, 25 bp, Canis familiaris
atgagtgtgcatgcttttccactgt

SEQ ID NO: 21744 - DNA, 25 bp, Canis familiaris
atgacgcatatacatttctctctgt

SEQ ID NO: 21745 - DNA, 25 bp, Canis familiaris
atgagtatggatcagcttctcctct

SEQ ID NO: 21746 - DNA, 25 bp, Canis familiaris
agacgtggtcgacaatcctcaattt

SEQ ID NO: 21747 - DNA, 25 bp, Canis familiaris
atgaggggtgcgccaaatctcacac

SEQ ID NO: 21748 - DNA, 25 bp, Canis familiaris
atgttgggctcaggcaacctcatac

SEQ ID NO: 21749 - DNA, 25 bp, Canis familiaris
ctttaagccccaagcctgctagtaa

SEQ ID NO: 21750 - DNA, 25 bp, Canis familiaris
atgtttaccaacagccatgtatttc

SEQ ID NO: 21751 - DNA, 25 bp, Canis familiaris
atgacattacaaagcagaccatgaa

SEQ ID NO: 21752 - DNA, 25 bp, Canis familiaris
atgagattccagggggccagtacac

SEQ ID NO: 21753 - DNA, 25 bp, Canis familiaris
atgagcttcctggtgggaggtgata

SEQ ID NO: 21754 - DNA, 25 bp, Canis familiaris
atgagctgtcttgggggcagactat

SEQ ID NO: 21755 - DNA, 25 bp, Canis familiaris
atgactccttccgagtagactcagc

SEQ ID NO: 21756 - DNA, 25 bp, Canis familiaris
atgagctctgttgacctaacttgca

SEQ ID NO: 21757 - DNA, 25 bp, Canis familiaris
atgatgctagttgagcctctcgtgg

SEQ ID NO: 21758 - DNA, 25 bp, Canis familiaris
atgagttgcaatttccctcgggatg

SEQ ID NO: 21759 - DNA, 25 bp, Canis familiaris
atgtatgtgcgtgtccacggaggtg

SEQ ID NO: 21760 - DNA, 25 bp, Canis familiaris
atgtatagattgcatttcttaggtg

SEQ ID NO: 21761 - DNA, 25 bp, Canis familiaris
atgtcaactttgggtgtctgtggtg

SEQ ID NO: 21762 - DNA, 25 bp, Canis familiaris
atgtaaatattcggccactgtcagg

SEQ ID NO: 21763 - DNA, 25 bp, Canis familiaris
atgtaatgctgtactcttggcgacg

SEQ ID NO: 21764 - DNA, 25 bp, Canis familiaris
atgtagactgtgacctgtcagcctc

SEQ ID NO: 21765 - DNA, 25 bp, Canis familiaris
atgtatgtgtgtcctctgtagtcta

SEQ ID NO: 21766 - DNA, 25 bp, Canis familiaris
atgacattgctgttcaataagccaa

SEQ ID NO: 21767 - DNA, 25 bp, Canis familiaris
atgatcctgctgttactctggtgaa

SEQ ID NO: 21768 - DNA, 25 bp, Canis familiaris
atgaccagccacacctgatgaggaa

SEQ ID NO: 21769 - DNA, 25 bp, Canis familiaris
atgtccagtcaccgtctgtggagat

SEQ ID NO: 21770 - DNA, 25 bp, Canis familiaris
atgtccatgatactgtctctgaggg

SEQ ID NO: 21771 - DNA, 25 bp, Canis familiaris
atgtcacaattgcctcaaacaggca

SEQ ID NO: 21772 - DNA, 25 bp, Canis familiaris
atgtcagcaaggcctctatcacagt

SEQ ID NO: 21773 - DNA, 25 bp, Canis familiaris
atgtcagcaaggcctctatcacagt

SEQ ID NO: 21774 - DNA, 25 bp, Canis familiaris
atgaccacagtccatgccatcactg

SEQ ID NO: 21775 - DNA, 25 bp, Canis familiaris
atgaccacagtccatgccatcactg

SEQ ID NO: 21776 - DNA, 25 bp, Canis familiaris
atgagctcaattctggagcacatgt

SEQ ID NO: 21777 - DNA, 25 bp, Canis familiaris
atgacgataatgcctctagcactcc

SEQ ID NO: 21778 - DNA, 25 bp, Canis familiaris
atgagagctaaccttagctgcttcc

SEQ ID NO: 21779 - DNA, 25 bp, Canis familiaris
atgaggctttcctgaggctttgcca

SEQ ID NO: 21780 - DNA, 25 bp, Canis familiaris
atgaggtattctttattggtttgag

SEQ ID NO: 21781 - DNA, 25 bp, Canis familiaris
atgagtttttgtagattttcctgaa

SEQ ID NO: 21782 - DNA, 25 bp, Canis familiaris
atgagctttattttgtatttgtgta

SEQ ID NO: 21783 - DNA, 25 bp, Canis familiaris
atgatgttgttttatgtgtggggta

SEQ ID NO: 21784 - DNA, 25 bp, Canis familiaris
atgaggcaggtgtcctcgtgagggc

SEQ ID NO: 21785 - DNA, 25 bp, Canis familiaris
atgagggaatgacgtgcggcctggt

SEQ ID NO: 21786 - DNA, 25 bp, Canis familiaris
atgatgtaggggcagctggctcagt

SEQ ID NO: 21787 - DNA, 25 bp, Canis familiaris
atgatctcagggtccgtggcatgag

SEQ ID NO: 21788 - DNA, 25 bp, Canis familiaris
atgatcttggagtcctgggatcgag

SEQ ID NO: 21789 - DNA, 25 bp, Canis familiaris
atgtctgtacagtgcattagttgag

SEQ ID NO: 21790 - DNA, 25 bp, Canis familiaris
atgtctaaaatcggtatgcactgag

SEQ ID NO: 21791 - DNA, 25 bp, Canis familiaris
atgactgaagcctgagactcattag

SEQ ID NO: 21792 - DNA, 25 bp, Canis familiaris
atgttgataggctgcacatcctgga

SEQ ID NO: 21793 - DNA, 25 bp, Canis familiaris
atgtctgaagcctgcctacatagga

SEQ ID NO: 21794 - DNA, 25 bp, Canis familiaris
atgttatgcctcacctatctataaa

SEQ ID NO: 21795 - DNA, 25 bp, Canis familiaris
atgatgtaactctatcctatcctta

SEQ ID NO: 21796 - DNA, 25 bp, Canis familiaris
atgattaacttaaccttctttcagt

SEQ ID NO: 21797 - DNA, 25 bp, Canis familiaris
atgattctactaatacatcttttga

SEQ ID NO: 21798 - DNA, 25 bp, Canis familiaris
atgactattctgtcttcatcttttg

SEQ ID NO: 21799 - DNA, 25 bp, Canis familiaris
atgttacttgaccagcagcttttgt

SEQ ID NO: 21800 - DNA, 25 bp, Canis familiaris
atgtcatactcaaccaggcgaccat

SEQ ID NO: 21801 - DNA, 25 bp, Canis familiaris
atgtcacctcagaaagactgacctg

SEQ ID NO: 21802 - DNA, 25 bp, Canis familiaris
atgtcacctctggaaaggagtttta

SEQ ID NO: 21803 - DNA, 25 bp, Canis familiaris
atgatctccgcaatcagagatggag

SEQ ID NO: 21804 - DNA, 25 bp, Canis familiaris
atgatctgcgcatcctggagcagga

SEQ ID NO: 21805 - DNA, 25 bp, Canis familiaris
atgagagcgaacgtgggcaagttgc

SEQ ID NO: 21806 - DNA, 25 bp, Canis familiaris
atgagcgcagacttgtggaaagtgt

SEQ ID NO: 21807 - DNA, 25 bp, Canis familiaris
atgagctgcagttttacaaggcttg

SEQ ID NO: 21808 - DNA, 25 bp, Canis familiaris
atgaggagcttcttccaactgtgga

SEQ ID NO: 21809 - DNA, 25 bp, Canis familiaris
atgactgcagtaatttctagttgta

SEQ ID NO: 21810 - DNA, 25 bp, Canis familiaris
atgagccagctctatgtatctagtt

SEQ ID NO: 21811 - DNA, 25 bp, Canis familiaris
atgagccatgacgaggtttcttccg

SEQ ID NO: 21812 - DNA, 25 bp, Canis familiaris
atgactcagggtagtttctccctgt

SEQ ID NO: 21813 - DNA, 25 bp, Canis familiaris
atgtcttcagttattttccttggtt

SEQ ID NO: 21814 - DNA, 25 bp, Canis familiaris
atgtctttttgttttcctactgagt

SEQ ID NO: 21815 - DNA, 25 bp, Canis familiaris
atgatttttgtgacttctccatctc

SEQ ID NO: 21816 - DNA, 25 bp, Canis familiaris
atgaccatttggatgctgctgacat

SEQ ID NO: 21817 - DNA, 25 bp, Canis familiaris
atgatctcacttttatgtggaatat

SEQ ID NO: 21818 - DNA, 25 bp, Canis familiaris
atgtgcaacttctgactgtaaaatt

SEQ ID NO: 21819 - DNA, 25 bp, Canis familiaris
atgtctactctctcctgtaagaaca

SEQ ID NO: 21820 - DNA, 25 bp, Canis familiaris
atgtctacattctttctaataaact

SEQ ID NO: 21821 - DNA, 25 bp, Canis familiaris
atgtttgattcagttctcctaaaaa

SEQ ID NO: 21822 - DNA, 25 bp, Canis familiaris
atgagctgcttaagttccctgaaac

SEQ ID NO: 21823 - DNA, 25 bp, Canis familiaris
atgagtgaacatagagtccctgata

SEQ ID NO: 21824 - DNA, 25 bp, Canis familiaris
atgagagtatgctagatgccccctg

SEQ ID NO: 21825 - DNA, 25 bp, Canis familiaris
atgagagtagatgatgtgccccctc

SEQ ID NO: 21826 - DNA, 25 bp, Canis familiaris
atgagagtcagttctggctctgcct

SEQ ID NO: 21827 - DNA, 25 bp, Canis familiaris
atgagatgatgagtcatcgggtcac

SEQ ID NO: 21828 - DNA, 25 bp, Canis familiaris
atgagatgtgcagctcagggctcct

SEQ ID NO: 21829 - DNA, 25 bp, Canis familiaris
atgagcagctgcccatactgggcca

SEQ ID NO: 21830 - DNA, 25 bp, Canis familiaris
atgagactgcccacacagtgtgagg

SEQ ID NO: 21831 - DNA, 25 bp, Canis familiaris
atgatattctcaactgccaggtgca

SEQ ID NO: 21832 - DNA, 25 bp, Canis familiaris
atgtattaaatccccgtcgaaaatg

SEQ ID NO: 21833 - DNA, 25 bp, Canis familiaris
atgttctaattcgccttcagcaagg

SEQ ID NO: 21834 - DNA, 25 bp, Canis familiaris
atgtttgactttgctttcgccagaa

SEQ ID NO: 21835 - DNA, 25 bp, Canis familiaris
atgtattacttcatcggttgcctgg

SEQ ID NO: 21836 - DNA, 25 bp, Canis familiaris
atgattggacctgcggtattcctgg

SEQ ID NO: 21837 - DNA, 25 bp, Canis familiaris
atgagggaggcccttttttctctgc

SEQ ID NO: 21838 - DNA, 25 bp, Canis familiaris
atggtggtgtgctcttttatggctc

SEQ ID NO: 21839 - DNA, 25 bp, Canis familiaris
atgacgtgtgtctctttgatggggt

SEQ ID NO: 21840 - DNA, 25 bp, Canis familiaris
aggcgggtcttgtttatgccgttga

SEQ ID NO: 21841 - DNA, 25 bp, Canis familiaris
atgggggtgcagcttataccagggt

SEQ ID NO: 21842 - DNA, 25 bp, Canis familiaris
atgaggggtgaccgaggacgagggc

SEQ ID NO: 21843 - DNA, 25 bp, Canis familiaris
atgattatggtccggaggaccagag

SEQ ID NO: 21844 - DNA, 25 bp, Canis familiaris
atgatcttcccgttgaacactgagg

SEQ ID NO: 21845 - DNA, 25 bp, Canis familiaris
atgattctcaccttgtgaatttggt

SEQ ID NO: 21846 - DNA, 25 bp, Canis familiaris
atgatatcttgccatttacaatgat

SEQ ID NO: 21847 - DNA, 25 bp, Canis familiaris
atgatgcatgctacaaattaaactt

SEQ ID NO: 21848 - DNA, 25 bp, Canis familiaris
atgaccttcatatttatatatttct

SEQ ID NO: 21849 - DNA, 25 bp, Canis familiaris
atgagcctcctgttattttattcta

SEQ ID NO: 21850 - DNA, 25 bp, Canis familiaris
atgagcccctgggcgttgttctata

SEQ ID NO: 21851 - DNA, 25 bp, Canis familiaris
atgtagccctggtgctgtgttagat

SEQ ID NO: 21852 - DNA, 25 bp, Canis familiaris
atgatgaccgcctgggcatgttcga

SEQ ID NO: 21853 - DNA, 25 bp, Canis familiaris
atgagtccccgaggtatctacgaga

SEQ ID NO: 21854 - DNA, 25 bp, Canis familiaris
atgagaccctaatgtatgtaagaat

SEQ ID NO: 21855 - DNA, 25 bp, Canis familiaris
catgtacccaactgatttaaaataa

SEQ ID NO: 21856 - DNA, 25 bp, Canis familiaris
atgtaccccatccagttgtgaaata

SEQ ID NO: 21857 - DNA, 25 bp, Canis familiaris
atgaggccaaccaagccttatagta

SEQ ID NO: 21858 - DNA, 25 bp, Canis familiaris
atgaggccaactttatttatttatt

SEQ ID NO: 21859 - DNA, 25 bp, Canis familiaris
atgaggacccagttacaatttctac

SEQ ID NO: 21860 - DNA, 25 bp, Canis familiaris
atgaggaccaagtggcttttataca

SEQ ID NO: 21861 - DNA, 25 bp, Canis familiaris
atgttagcacaatctgccttttacc

SEQ ID NO: 21862 - DNA, 25 bp, Canis familiaris
atgtctgaccaatctctagtttaac

SEQ ID NO: 21863 - DNA, 25 bp, Canis familiaris
atgtatattctatctatggatttta

SEQ ID NO: 21864 - DNA, 25 bp, Canis familiaris
atgtttaatttggaggcagctttca

SEQ ID NO: 21865 - DNA, 25 bp, Canis familiaris
atgttgaataaatgggcatgcccaa

SEQ ID NO: 21866 - DNA, 25 bp, Canis familiaris
atgttggagacatgatggtgcagac

SEQ ID NO: 21867 - DNA, 25 bp, Canis familiaris
atgtgcaggagaaggatgatgatgg

SEQ ID NO: 21868 - DNA, 25 bp, Canis familiaris
atgtcatggagctgtgtatcattga

SEQ ID NO: 21869 - DNA, 25 bp, Canis familiaris
atgtatgtcaattgtatctcagtaa

SEQ ID NO: 21870 - DNA, 25 bp, Canis familiaris
atgatgagccacaagttcataagaa

SEQ ID NO: 21871 - DNA, 25 bp, Canis familiaris
atgatattccatgtctagaaaaatg

SEQ ID NO: 21872 - DNA, 25 bp, Canis familiaris
atgttattcagccattagaaagaat

SEQ ID NO: 21873 - DNA, 25 bp, Canis familiaris
atgttttgcaagactgaccataaat

SEQ ID NO: 21874 - DNA, 25 bp, Canis familiaris
atgtcctctgaggtcttcacaagga

SEQ ID NO: 21875 - DNA, 25 bp, Canis familiaris
atgatggcatggggttgtcacaaaa

SEQ ID NO: 21876 - DNA, 25 bp, Canis familiaris
atgaggatggggacaagctgcgagt

SEQ ID NO: 21877 - DNA, 25 bp, Canis familiaris
atgaggatggaggacaaggagcggc

SEQ ID NO: 21878 - DNA, 25 bp, Canis familiaris
atgagagagtacaagcagggggagg

SEQ ID NO: 21879 - DNA, 25 bp, Canis familiaris
atgatggaatataacggattggtga

SEQ ID NO: 21880 - DNA, 25 bp, Canis familiaris
atgaggttccatcaggttgggagca

SEQ ID NO: 21881 - DNA, 25 bp, Canis familiaris
atgtatttacaattagtctagggat

SEQ ID NO: 21882 - DNA, 25 bp, Canis familiaris
atgtttctctgctttgaggtcagga

SEQ ID NO: 21883 - DNA, 25 bp, Canis familiaris
atgttttctgattgtgcacgatgcg

SEQ ID NO: 21884 - DNA, 25 bp, Canis familiaris
atgtttgcaatttagcacctgctgg

SEQ ID NO: 21885 - DNA, 25 bp, Canis familiaris
atgtgcactgattttagaccggaga

SEQ ID NO: 21886 - DNA, 25 bp, Canis familiaris
atgaggctggatctcatgaccctga

SEQ ID NO: 21887 - DNA, 25 bp, Canis familiaris
atgaccatgacacctatgaatcctc

SEQ ID NO: 21888 - DNA, 25 bp, Canis familiaris
atgatactgaagctatgaatatact

SEQ ID NO: 21889 - DNA, 25 bp, Canis familiaris
atgttgctgacgctatgaattccta

SEQ ID NO: 21890 - DNA, 25 bp, Canis familiaris
atgttgatgatcctcgaaatactga

SEQ ID NO: 21891 - DNA, 25 bp, Canis familiaris
atgttggacatgtcgaacacgtggt

SEQ ID NO: 21892 - DNA, 25 bp, Canis familiaris
atgaggagacgggaacactgctgag

SEQ ID NO: 21893 - DNA, 25 bp, Canis familiaris
atgagccttagagactgactgccag

SEQ ID NO: 21894 - DNA, 25 bp, Canis familiaris
atgagtctatcatccctgacaaagc

SEQ ID NO: 21895 - DNA, 25 bp, Canis familiaris
atgagctcaactaacaatgcacaaa

SEQ ID NO: 21896 - DNA, 25 bp, Canis familiaris
atgagcagcacttgctacaaccctt

SEQ ID NO: 21897 - DNA, 25 bp, Canis familiaris
atgagctcatcttcaaaacttttgc

SEQ ID NO: 21898 - DNA, 25 bp, Canis familiaris
atgaccatggaatagatgtcttatc

SEQ ID NO: 21899 - DNA, 25 bp, Canis familiaris
atgaccaggtaatcattcctcctat

SEQ ID NO: 21900 - DNA, 25 bp, Canis familiaris
atgtcctgcagtataatttatcctt

SEQ ID NO: 21901 - DNA, 25 bp, Canis familiaris
atgtactctgtcttaaggctgtcct

SEQ ID NO: 21902 - DNA, 25 bp, Canis familiaris
atgtacctgcatttcagcaaggcat

SEQ ID NO: 21903 - DNA, 25 bp, Canis familiaris
atgtaagtcattccctacacacaca

SEQ ID NO: 21904 - DNA, 25 bp, Canis familiaris
atgtctcctgatatcctacacaaca

SEQ ID NO: 21905 - DNA, 25 bp, Canis familiaris
atgttgcggttaccacatccaaggt

SEQ ID NO: 21906 - DNA, 25 bp, Canis familiaris
atggtggtcttagcactccacctgt

SEQ ID NO: 21907 - DNA, 25 bp, Canis familiaris
atgatgggctttggtcccacatctt

SEQ ID NO: 21908 - DNA, 25 bp, Canis familiaris
atgggattattccacccacactagc

SEQ ID NO: 21909 - DNA, 25 bp, Canis familiaris
atgagacatctgactgctgaaaaca

SEQ ID NO: 21910 - DNA, 25 bp, Canis familiaris
atgagcatccatacgtagcgaccaa

SEQ ID NO: 21911 - DNA, 25 bp, Canis familiaris
atgatctcacgaggatcagccccaa

SEQ ID NO: 21912 - DNA, 25 bp, Canis familiaris
atgatctccaggaagcacgtctcca

SEQ ID NO: 21913 - DNA, 25 bp, Canis familiaris
atgagtgtgcggtaccattctccat

SEQ ID NO: 21914 - DNA, 25 bp, Canis familiaris
atgatgggcatgggactcttcccca

SEQ ID NO: 21915 - DNA, 25 bp, Canis familiaris
atgaggctgcagggtcagttcacct

SEQ ID NO: 21916 - DNA, 25 bp, Canis familiaris
atgagtcatcagggttcactcaacg

SEQ ID NO: 21917 - DNA, 25 bp, Canis familiaris
atgatgtcaatgagttcacctgccc

SEQ ID NO: 21918 - DNA, 25 bp, Canis familiaris
atgatgtcaacattgcttagccccc

SEQ ID NO: 21919 - DNA, 25 bp, Canis familiaris
atgatatccacttgtgtcaacccca

SEQ ID NO: 21920 - DNA, 25 bp, Canis familiaris
atgattccaatataaagatgccaca

SEQ ID NO: 21921 - DNA, 25 bp, Canis familiaris
atgaggctcagattaataacatgga

SEQ ID NO: 21922 - DNA, 25 bp, Canis familiaris
atgaggcctattctacacagccagc

SEQ ID NO: 21923 - DNA, 25 bp, Canis familiaris
atgaggagtaatggtgacaattaga

SEQ ID NO: 21924 - DNA, 25 bp, Canis familiaris
atgagagagctcttcaggttcttaa

SEQ ID NO: 21925 - DNA, 25 bp, Canis familiaris
atgagaggctctgatcttgatcttt

SEQ ID NO: 21926 - DNA, 25 bp, Canis familiaris
atgagaccattcctttgagtttaga

SEQ ID NO: 21927 - DNA, 25 bp, Canis familiaris
atgaggcacttttcttagtcctagt

SEQ ID NO: 21928 - DNA, 25 bp, Canis familiaris
aggccattttaatattacgacttga

SEQ ID NO: 21929 - DNA, 25 bp, Canis familiaris
atggccaatttctcatttaagtttg

SEQ ID NO: 21930 - DNA, 25 bp, Canis familiaris
atgagcttctttctatttgtatttt

SEQ ID NO: 21931 - DNA, 25 bp, Canis familiaris
atgagctttagggtttattttgctt

SEQ ID NO: 21932 - DNA, 25 bp, Canis familiaris
atgagttaaggcctttacccatctg

SEQ ID NO: 21933 - DNA, 25 bp, Canis familiaris
atgagtatgacctctttagcctgct

SEQ ID NO: 21934 - DNA, 25 bp, Canis familiaris
atgttgtagcctcattttcacctat

SEQ ID NO: 21935 - DNA, 25 bp, Canis familiaris
atgattttccaggttgttgcatcca

SEQ ID NO: 21936 - DNA, 25 bp, Canis familiaris
atgagttcatccagttattctccag

SEQ ID NO: 21937 - DNA, 25 bp, Canis familiaris
atgattaccctagtgttttctcaga

SEQ ID NO: 21938 - DNA, 25 bp, Canis familiaris
atgagtgaacacttctcttttccag

SEQ ID NO: 21939 - DNA, 25 bp, Canis familiaris
atgagtggaactcccttttctttca

SEQ ID NO: 21940 - DNA, 25 bp, Canis familiaris
atgttcaaactgtcgctttttttct

SEQ ID NO: 21941 - DNA, 25 bp, Canis familiaris
atgtatacatacgattgggtttttt

SEQ ID NO: 21942 - DNA, 25 bp, Canis familiaris
atgtccacatgagattcggggtctg

SEQ ID NO: 21943 - DNA, 25 bp, Canis familiaris
atgtccaaggattggccgcttgtcg

SEQ ID NO: 21944 - DNA, 25 bp, Canis familiaris
atgtaaagtgcttggcacgtcccgg

SEQ ID NO: 21945 - DNA, 25 bp, Canis familiaris
atggaaagcctgtgtgggcccaggg

SEQ ID NO: 21946 - DNA, 25 bp, Canis familiaris
atgatgaagagcatggggcccctct

SEQ ID NO: 21947 - DNA, 25 bp, Canis familiaris
atgatgaagagctcagccttccctg

SEQ ID NO: 21948 - DNA, 25 bp, Canis familiaris
atgatgaagagttgacacgtccctg

SEQ ID NO: 21949 - DNA, 25 bp, Canis familiaris
atgaggaagtggtcactctgctcct

SEQ ID NO: 21950 - DNA, 25 bp, Canis familiaris
atgagataaatttccacgctgctct

SEQ ID NO: 21951 - DNA, 25 bp, Canis familiaris
atgagaatttatgctgcctgcgctg

SEQ ID NO: 21952 - DNA, 25 bp, Canis familiaris
atgagagcgttagctgccatcatct

SEQ ID NO: 21953 - DNA, 25 bp, Canis familiaris
atgagagtgtatgcctcctatcttt

SEQ ID NO: 21954 - DNA, 25 bp, Canis familiaris
atgagattggcatggctttatttgt

SEQ ID NO: 21955 - DNA, 25 bp, Canis familiaris
atgatgactatctggcgttatcctt

SEQ ID NO: 21956 - DNA, 25 bp, Canis familiaris
atgatgactattctgtcttcatctt

SEQ ID NO: 21957 - DNA, 25 bp, Canis familiaris
atgatgagtcttctgcattgtcacc

SEQ ID NO: 21958 - DNA, 25 bp, Canis familiaris
atgagagatcttcccatctgatgtt

SEQ ID NO: 21959 - DNA, 25 bp, Canis familiaris
atgagagccaggacactctgtctct

SEQ ID NO: 21960 - DNA, 25 bp, Canis familiaris
atgatactcaggtacactgctggta

SEQ ID NO: 21961 - DNA, 25 bp, Canis familiaris
atgttctaggccaactgcgaggcat

SEQ ID NO: 21962 - DNA, 25 bp, Canis familiaris
atgttccagagcctgagccttggca

SEQ ID NO: 21963 - DNA, 25 bp, Canis familiaris
atgatggctcagccgagagccctta

SEQ ID NO: 21964 - DNA, 25 bp, Canis familiaris
atgagtgaagccaaagcaccaatct

SEQ ID NO: 21965 - DNA, 25 bp, Canis familiaris
atgagagaagcccatagtctacttt

SEQ ID NO: 21966 - DNA, 25 bp, Canis familiaris
atgaggaagccctggctgtgcttgc

SEQ ID NO: 21967 - DNA, 25 bp, Canis familiaris
atgaggacgagctggtgtgtctccc

SEQ ID NO: 21968 - DNA, 25 bp, Canis familiaris
atgaggtgacacaggctgttgcccc

SEQ ID NO: 21969 - DNA, 25 bp, Canis familiaris
atgtcagtgacggggttctcttcac

SEQ ID NO: 21970 - DNA, 25 bp, Canis familiaris
atgtatgggctggggcaatccttgc

SEQ ID NO: 21971 - DNA, 25 bp, Canis familiaris
atgtagggcagcagaccaacatctc

SEQ ID NO: 21972 - DNA, 25 bp, Canis familiaris
atgtcagggcagatgttacagttga

SEQ ID NO: 21973 - DNA, 25 bp, Canis familiaris
atgtcttggcaactctttcagtcaa

SEQ ID NO: 21974 - DNA, 25 bp, Canis familiaris
atgttcactgaactatattatcaaa

SEQ ID NO: 21975 - DNA, 25 bp, Canis familiaris
atgtctactaagttgcagttcaatc

SEQ ID NO: 21976 - DNA, 25 bp, Canis familiaris
atgtcacctctatcatgtttctagt

SEQ ID NO: 21977 - DNA, 25 bp, Canis familiaris
atgtagacactctttgttacaaatt

SEQ ID NO: 21978 - DNA, 25 bp, Canis familiaris
atgtaatcacactttgtcttggaat

SEQ ID NO: 21979 - DNA, 25 bp, Canis familiaris
atgatagatccaacatggtcttcaa

SEQ ID NO: 21980 - DNA, 25 bp, Canis familiaris
atgataaccacaatgcattcgtaaa

SEQ ID NO: 21981 - DNA, 25 bp, Canis familiaris
atgatgaaccgcttcatgccactga

SEQ ID NO: 21982 - DNA, 25 bp, Canis familiaris
atgaggaagagcgcatccctggcgt

SEQ ID NO: 21983 - DNA, 25 bp, Canis familiaris
aggggagaacctgagtgggctttct

SEQ ID NO: 21984 - DNA, 25 bp, Canis familiaris
ttgggttaaactgtacaggtttctg

SEQ ID NO: 21985 - DNA, 25 bp, Canis familiaris
tttcgcgtaatactgtaacggttgt

SEQ ID NO: 21986 - DNA, 25 bp, Canis familiaris
atgtcgcgtaattctgcaagacggc

SEQ ID NO: 21987 - DNA, 25 bp, Canis familiaris
atgtcagccttctgcgaaacgcagg

SEQ ID NO: 21988 - DNA, 25 bp, Canis familiaris
atgtgaggcatctgtggatagacac

SEQ ID NO: 21989 - DNA, 25 bp, Canis familiaris
atgttggctcaagtgctgcattaga

SEQ ID NO: 21990 - DNA, 25 bp, Canis familiaris
atgttgagccaaatcactctccact

SEQ ID NO: 21991 - DNA, 25 bp, Canis familiaris
atgttgctgcctagcatcttttctt

SEQ ID NO: 21992 - DNA, 25 bp, Canis familiaris
atgtggttccactgttttgttttgt

SEQ ID NO: 21993 - DNA, 25 bp, Canis familiaris
atgttactccttgatctttgtcttt

SEQ ID NO: 21994 - DNA, 25 bp, Canis familiaris
gacaaccttactaaagtctagaata

SEQ ID NO: 21995 - DNA, 25 bp, Canis familiaris
atgtttgtctttttaatgctttatt

SEQ ID NO: 21996 - DNA, 25 bp, Canis familiaris
atgttggtccaaattcaggctttat

SEQ ID NO: 21997 - DNA, 25 bp, Canis familiaris
atgtttgcccaaatataccatcttt

SEQ ID NO: 21998 - DNA, 25 bp, Canis familiaris
atgtttccacagattaccacgctgc

SEQ ID NO: 21999 - DNA, 25 bp, Canis familiaris
atgttatcgggtcaagccacgtgtc

SEQ ID NO: 22000 - DNA, 25 bp, Canis familiaris
atgtttggggtgacaggccctggtc

SEQ ID NO: 22001 - DNA, 25 bp, Canis familiaris
atgtttagaagagagtacgcttgtc

SEQ ID NO: 22002 - DNA, 25 bp, Canis familiaris
atgttttgaagagaaatgcctccat

SEQ ID NO: 22003 - DNA, 25 bp, Canis familiaris
atgttctcaacagcacacattctct

SEQ ID NO: 22004 - DNA, 25 bp, Canis familiaris
atgattctagaaatatcttttctct

SEQ ID NO: 22005 - DNA, 25 bp, Canis familiaris
atgtcctattctaatctttttaatc

SEQ ID NO: 22006 - DNA, 25 bp, Canis familiaris
atgtcccaacctatactctatatat

SEQ ID NO: 22007 - DNA, 25 bp, Canis familiaris
atgttctcatagtatttgacgtaat

SEQ ID NO: 22008 - DNA, 25 bp, Canis familiaris
atgttcctaggttgtatctggaata

SEQ ID NO: 22009 - DNA, 25 bp, Canis familiaris
atgtgtgccgcaagcctaagggaaa

SEQ ID NO: 22010 - DNA, 25 bp, Canis familiaris
atgtgtgccggaatatcagcaggcg

SEQ ID NO: 22011 - DNA, 25 bp, Canis familiaris
atgttgctctagacttcgagcagga

SEQ ID NO: 22012 - DNA, 25 bp, Canis familiaris
atgttgctgaagattgatgagtaga

SEQ ID NO: 22013 - DNA, 25 bp, Canis familiaris
atgtctctggagcgcgatgggaaac

SEQ ID NO: 22014 - DNA, 25 bp, Canis familiaris
atgtctccgtcaaggatgggagcat

SEQ ID NO: 22015 - DNA, 25 bp, Canis familiaris
atgtctccctgcagaggtaggaatt

SEQ ID NO: 22016 - DNA, 25 bp, Canis familiaris
ggtcttttaaagctcaggattattc

SEQ ID NO: 22017 - DNA, 25 bp, Canis familiaris
atgtctttctaaaaacaggactact

SEQ ID NO: 22018 - DNA, 25 bp, Canis familiaris
atgtcgcttctggattaaaaatttt

SEQ ID NO: 22019 - DNA, 25 bp, Canis familiaris
atgtctgctcttcatctaaaattct

SEQ ID NO: 22020 - DNA, 25 bp, Canis familiaris
atgtctatcttccacttaaatacgt

SEQ ID NO: 22021 - DNA, 25 bp, Canis familiaris
atgtttcctctgtttaatctaagtc

SEQ ID NO: 22022 - DNA, 25 bp, Canis familiaris
atgttttgtctgcttaccatgttcc

SEQ ID NO: 22023 - DNA, 25 bp, Canis familiaris
atgtttgttttgcttaatgttctcc

SEQ ID NO: 22024 - DNA, 25 bp, Canis familiaris
gttgtttcctggctaagattaggac

SEQ ID NO: 22025 - DNA, 25 bp, Canis familiaris
atgtaaatccttcgccaaattatgg

SEQ ID NO: 22026 - DNA, 25 bp, Canis familiaris
atgaggaaccttaccaagcagctaa

SEQ ID NO: 22027 - DNA, 25 bp, Canis familiaris
atgaggacctcatccgaaagctggc

SEQ ID NO: 22028 - DNA, 25 bp, Canis familiaris
atgaggactacgtccgaagccttcg

SEQ ID NO: 22029 - DNA, 25 bp, Canis familiaris
atgagggatacttccgggagctgct

SEQ ID NO: 22030 - DNA, 25 bp, Canis familiaris
atgagtttgacttcactgcggactt

SEQ ID NO: 22031 - DNA, 25 bp, Canis familiaris
atgttgtagatattccgtggactat

SEQ ID NO: 22032 - DNA, 25 bp, Canis familiaris
atgtatgtatcatatcccgaccttg

SEQ ID NO: 22033 - DNA, 25 bp, Canis familiaris
atgtcactgatatacttaagccttg

SEQ ID NO: 22034 - DNA, 25 bp, Canis familiaris
atgttcagaaaaatttatccttgta

SEQ ID NO: 22035 - DNA, 25 bp, Canis familiaris
atgttggaactttctttcgtatttg

SEQ ID NO: 22036 - DNA, 25 bp, Canis familiaris
atgggggtatgtgtttccttcattg

SEQ ID NO: 22037 - DNA, 25 bp, Canis familiaris
atgttgagggttttcttccctctgt

SEQ ID NO: 22038 - DNA, 25 bp, Canis familiaris
aggaatgtggttgtcttccctaact

SEQ ID NO: 22039 - DNA, 25 bp, Canis familiaris
aggacatttttagcttctgttctcc

SEQ ID NO: 22040 - DNA, 25 bp, Canis familiaris
aggttagtgtaagcttcgctcctgc

SEQ ID NO: 22041 - DNA, 25 bp, Canis familiaris
atgagtatcgtagagacggtctcct

SEQ ID NO: 22042 - DNA, 25 bp, Canis familiaris
atgagtcactggaaagcaccgtcgt

SEQ ID NO: 22043 - DNA, 25 bp, Canis familiaris
agcagtcaaggaaagcgtaacgttt

SEQ ID NO: 22044 - DNA, 25 bp, Canis familiaris
agcttcaaccaaggcttccaagttg

SEQ ID NO: 22045 - DNA, 25 bp, Canis familiaris
atgtctaaccagtgcttagcgttta

SEQ ID NO: 22046 - DNA, 25 bp, Canis familiaris
atgatctaaaactgtttgcacttac

SEQ ID NO: 22047 - DNA, 25 bp, Canis familiaris
atgatggaaaacagtgtcattctgt

SEQ ID NO: 22048 - DNA, 25 bp, Canis familiaris
atgaggaagcccaagttctccaact

SEQ ID NO: 22049 - DNA, 25 bp, Canis familiaris
atgaggaggatcgcgtgctcatcca

SEQ ID NO: 22050 - DNA, 25 bp, Canis familiaris
atgaggaggcaggccgcctgctctt

SEQ ID NO: 22051 - DNA, 25 bp, Canis familiaris
atgagtgtggtggcgactctgttcc

SEQ ID NO: 22052 - DNA, 25 bp, Canis familiaris
atgttgtggagatgacccttccttg

SEQ ID NO: 22053 - DNA, 25 bp, Canis familiaris
atgatttgggaagcctcttgcatcc

SEQ ID NO: 22054 - DNA, 25 bp, Canis familiaris
agttttcgaactgtctagatgcccc

SEQ ID NO: 22055 - DNA, 25 bp, Canis familiaris
atgtttttaactgcttaggtctatc

SEQ ID NO: 22056 - DNA, 25 bp, Canis familiaris
atgttttgtacatagatttgttaag

SEQ ID NO: 22057 - DNA, 25 bp, Canis familiaris
atgttactggacatcaccttttaca

SEQ ID NO: 22058 - DNA, 25 bp, Canis familiaris
atgttcctgcccaataaagtttcac

SEQ ID NO: 22059 - DNA, 25 bp, Canis familiaris
atgtttctgcctcaaaactcttgcc

SEQ ID NO: 22060 - DNA, 25 bp, Canis familiaris
atgttctggccctaagagacacttt

SEQ ID NO: 22061 - DNA, 25 bp, Canis familiaris
atgtactgccacaggacagacagca

SEQ ID NO: 22062 - DNA, 25 bp, Canis familiaris
atgtgactcagccattagaaacgac

SEQ ID NO: 22063 - DNA, 25 bp, Canis familiaris
atggagtacgtgggcaacgccaccc

SEQ ID NO: 22064 - DNA, 25 bp, Canis familiaris
atgagtctacggaagcaaaccccca

SEQ ID NO: 22065 - DNA, 25 bp, Canis familiaris
atgagtctgcggagaaaccagcccc

SEQ ID NO: 22066 - DNA, 25 bp, Canis familiaris
atggccgtgggcctcaacaagggcc

SEQ ID NO: 22067 - DNA, 25 bp, Canis familiaris
atgtccggggctgcacgcgcgctac

SEQ ID NO: 22068 - DNA, 25 bp, Canis familiaris
atgtccgtgttcgtgaggagctgct

SEQ ID NO: 22069 - DNA, 25 bp, Canis familiaris
atgtggctgcgtagcggaagcgctg

SEQ ID NO: 22070 - DNA, 25 bp, Canis familiaris
atgatatgcgatttgacagaagcgg

SEQ ID NO: 22071 - DNA, 25 bp, Canis familiaris
atgtgcagccatttgccagggcagc

SEQ ID NO: 22072 - DNA, 25 bp, Canis familiaris
atgtcgtatccggaggagagctata

SEQ ID NO: 22073 - DNA, 25 bp, Canis familiaris
atgtttgtccgcaggggcatgaaga

SEQ ID NO: 22074 - DNA, 25 bp, Canis familiaris
atgtgttcggtgagtgggaaaggct

SEQ ID NO: 22075 - DNA, 25 bp, Canis familiaris
atgtcttcgtccaggggcaaagttt

SEQ ID NO: 22076 - DNA, 25 bp, Canis familiaris
atggcttggatcgctggggaggaaa

SEQ ID NO: 22077 - DNA, 25 bp, Canis familiaris
atggctagacatgctgggggcagga

SEQ ID NO: 22078 - DNA, 25 bp, Canis familiaris
aggcggatcaacaagcgaggagcga

SEQ ID NO: 22079 - DNA, 25 bp, Canis familiaris
atggggacaagctgcgagtactgcc

SEQ ID NO: 22080 - DNA, 25 bp, Canis familiaris
atgaggggctggtggagcccgtcac

SEQ ID NO: 22081 - DNA, 25 bp, Canis familiaris
agggtttgttggcaagcctgtccac

SEQ ID NO: 22082 - DNA, 25 bp, Canis familiaris
atgggatttcttcacaagccagccc

SEQ ID NO: 22083 - DNA, 25 bp, Canis familiaris
agtctgagttaacacaaccccatgc

SEQ ID NO: 22084 - DNA, 25 bp, Canis familiaris
atgtctcttccatggcaaaacctca

SEQ ID NO: 22085 - DNA, 25 bp, Canis familiaris
atgttccataaactctaacaccaca

SEQ ID NO: 22086 - DNA, 25 bp, Canis familiaris
atgtcccaagacacttactaccaac

SEQ ID NO: 22087 - DNA, 25 bp, Canis familiaris
atgttctggaaccctgtgactacca

SEQ ID NO: 22088 - DNA, 25 bp, Canis familiaris
atgttcgagaacggctgctacttgc

SEQ ID NO: 22089 - DNA, 25 bp, Canis familiaris
atgttcttgccagcctgctgaattg

SEQ ID NO: 22090 - DNA, 25 bp, Canis familiaris
atgattctgctgtacttctttattg

SEQ ID NO: 22091 - DNA, 25 bp, Canis familiaris
atgattcgtcaacttgtgactttgg

SEQ ID NO: 22092 - DNA, 25 bp, Canis familiaris
atgttgtgttattcttgcagccttg

SEQ ID NO: 22093 - DNA, 25 bp, Canis familiaris
atgttgtggtatttatgcgctctca

SEQ ID NO: 22094 - DNA, 25 bp, Canis familiaris
atgttgttgtattttgaatgcccca

SEQ ID NO: 22095 - DNA, 25 bp, Canis familiaris
atgattattccttttgtattcccac

SEQ ID NO: 22096 - DNA, 25 bp, Canis familiaris
atgtttctcctggtttaccacgact

SEQ ID NO: 22097 - DNA, 25 bp, Canis familiaris
atgtttgtccctattatctgaccct

SEQ ID NO: 22098 - DNA, 25 bp, Canis familiaris
atgttttctacgaatttttcaccat

SEQ ID NO: 22099 - DNA, 25 bp, Canis familiaris
atgttgtgtctgtcaaactttagca

SEQ ID NO: 22100 - DNA, 25 bp, Canis familiaris
atgttgtcttgtgtcgttcatcagc

SEQ ID NO: 22101 - DNA, 25 bp, Canis familiaris
atgtattttgtttcaggatgcctgg

SEQ ID NO: 22102 - DNA, 25 bp, Canis familiaris
atgttcttggttccagttcttgtcg

SEQ ID NO: 22103 - DNA, 25 bp, Canis familiaris
atgttcttgaacaatcaggtttctc

SEQ ID NO: 22104 - DNA, 25 bp, Canis familiaris
atgtctttaatttccgtatgctgcc

SEQ ID NO: 22105 - DNA, 25 bp, Canis familiaris
atgattttctacacgcaggatctgc

SEQ ID NO: 22106 - DNA, 25 bp, Canis familiaris
aggcattacctcacagcaggactgc

SEQ ID NO: 22107 - DNA, 25 bp, Canis familiaris
atgtcttggcctgcacacaggaggc

SEQ ID NO: 22108 - DNA, 25 bp, Canis familiaris
atgatcatatggatacccactggac

SEQ ID NO: 22109 - DNA, 25 bp, Canis familiaris
atgatattggtttctgcttctgtgt

SEQ ID NO: 22110 - DNA, 25 bp, Canis familiaris
atgttgagctgttttcctgctgagc

SEQ ID NO: 22111 - DNA, 25 bp, Canis familiaris
atgtgtatgtgtttttgggggggtg

SEQ ID NO: 22112 - DNA, 25 bp, Canis familiaris
atgtcactggttattcgttagcggt

SEQ ID NO: 22113 - DNA, 25 bp, Canis familiaris
atgtctggcttaagttctttggggt

SEQ ID NO: 22114 - DNA, 25 bp, Canis familiaris
atgttgtgttaagttaattagagta

SEQ ID NO: 22115 - DNA, 25 bp, Canis familiaris
atgtctttaggctataatattagag

SEQ ID NO: 22116 - DNA, 25 bp, Canis familiaris
atgtcattacaggcacaggtatttg

SEQ ID NO: 22117 - DNA, 25 bp, Canis familiaris
atgtttccagaattcgttgttgttg

SEQ ID NO: 22118 - DNA, 25 bp, Canis familiaris
agttgatagtggttggtggttgttg

SEQ ID NO: 22119 - DNA, 25 bp, Canis familiaris
atgttgataatgctcggaatttttt

SEQ ID NO: 22120 - DNA, 25 bp, Canis familiaris
atgttcagcagtgacggtttttttt

SEQ ID NO: 22121 - DNA, 25 bp, Canis familiaris
aggctacgctagtgtttgatttttt

SEQ ID NO: 22122 - DNA, 25 bp, Canis familiaris
aggccctcttgatctaggagttttg

SEQ ID NO: 22123 - DNA, 25 bp, Canis familiaris
atgtattcttaatctagttgtttat

SEQ ID NO: 22124 - DNA, 25 bp, Canis familiaris
atgtctttaaatttagcatttcgta

SEQ ID NO: 22125 - DNA, 25 bp, Canis familiaris
atgtttataccattttgttcactgt

SEQ ID NO: 22126 - DNA, 25 bp, Canis familiaris
atgttatgttcctaatatttcacga

SEQ ID NO: 22127 - DNA, 25 bp, Canis familiaris
atgattccatttaaaatcttcacgt

SEQ ID NO: 22128 - DNA, 25 bp, Canis familiaris
atgatctccaatttcaaatgttcag

SEQ ID NO: 22129 - DNA, 25 bp, Canis familiaris
atgtctggtcatttggaattctgca

SEQ ID NO: 22130 - DNA, 25 bp, Canis familiaris
atgtcatagccatgtggttcattag

SEQ ID NO: 22131 - DNA, 25 bp, Canis familiaris
atgtcctgccagggggacactaggc

SEQ ID NO: 22132 - DNA, 25 bp, Canis familiaris
atgtcttttgcattgggaaatgggc

SEQ ID NO: 22133 - DNA, 25 bp, Canis familiaris
atgatgctttatctgggtctggggg

SEQ ID NO: 22134 - DNA, 25 bp, Canis familiaris
aggctgtacacaggggcctgggagc

SEQ ID NO: 22135 - DNA, 25 bp, Canis familiaris
atgtctcttcaaggaccgcatggta

SEQ ID NO: 22136 - DNA, 25 bp, Canis familiaris
atgttcttttgccaccgatggagca

SEQ ID NO: 22137 - DNA, 25 bp, Canis familiaris
atgttttctctggttcatcatggag

SEQ ID NO: 22138 - DNA, 25 bp, Canis familiaris
atgttcctagctcatcctatgtaac

SEQ ID NO: 22139 - DNA, 25 bp, Canis familiaris
atgttcctacatcatctcgcttata

SEQ ID NO: 22140 - DNA, 25 bp, Canis familiaris
atgttcaaaagttctctgctctctg

SEQ ID NO: 22141 - DNA, 25 bp, Canis familiaris
atgttttaaatatttgtctgctgta

SEQ ID NO: 22142 - DNA, 25 bp, Canis familiaris
atgattttttatcttggatgctcta

SEQ ID NO: 22143 - DNA, 25 bp, Canis familiaris
atgtccttcttacgttacatggaaa

SEQ ID NO: 22144 - DNA, 25 bp, Canis familiaris
atgtttgtttaccttcttgaatatg

SEQ ID NO: 22145 - DNA, 25 bp, Canis familiaris
atggtttcttccctccagaaatgat

SEQ ID NO: 22146 - DNA, 25 bp, Canis familiaris
atggtcttttactgacaggctagca

SEQ ID NO: 22147 - DNA, 25 bp, Canis familiaris
atgtttccttccagagaggcatggc

SEQ ID NO: 22148 - DNA, 25 bp, Canis familiaris
atgttggcacttgtagttggcaggc

SEQ ID NO: 22149 - DNA, 25 bp, Canis familiaris
atgtaggactgtttgtgtctggccc

SEQ ID NO: 22150 - DNA, 25 bp, Canis familiaris
atgttgacggctttgtgattgattc

SEQ ID NO: 22151 - DNA, 25 bp, Canis familiaris
atgttgacggctttgtgattgattc

SEQ ID NO: 22152 - DNA, 25 bp, Canis familiaris
atgttgccttgttttatgtgttcta

SEQ ID NO: 22153 - DNA, 25 bp, Canis familiaris
atgtaccacagttttttatccattc

SEQ ID NO: 22154 - DNA, 25 bp, Canis familiaris
atgtaaacagattttttttcagcat

SEQ ID NO: 22155 - DNA, 25 bp, Canis familiaris
atgttactgattactttttattgct

SEQ ID NO: 22156 - DNA, 25 bp, Canis familiaris
atgttcgcgattatcttctatatct

SEQ ID NO: 22157 - DNA, 25 bp, Canis familiaris
atgttgggatctttctatcgtctca

SEQ ID NO: 22158 - DNA, 25 bp, Canis familiaris
atgttggtgttaatgatgggttttt

SEQ ID NO: 22159 - DNA, 25 bp, Canis familiaris
atgttctgtatttgtatctgttttt

SEQ ID NO: 22160 - DNA, 25 bp, Canis familiaris
atgtcgtggagtctactggtgtctt

SEQ ID NO: 22161 - DNA, 25 bp, Canis familiaris
atgtttcgaccgaacagagcgtcca

SEQ ID NO: 22162 - DNA, 25 bp, Canis familiaris
atgtatttgaccggaatggttgaca

SEQ ID NO: 22163 - DNA, 25 bp, Canis familiaris
atgtcgttacccgttgagtgtggat

SEQ ID NO: 22164 - DNA, 25 bp, Canis familiaris
atgtctgttcatgtgttaagtgtta

SEQ ID NO: 22165 - DNA, 25 bp, Canis familiaris
atgtctatacatgtttcaactgttt

SEQ ID NO: 22166 - DNA, 25 bp, Canis familiaris
atgtcttaacaatttgccctgtgtc

SEQ ID NO: 22167 - DNA, 25 bp, Canis familiaris
atgttcctaatatttcacgatggcc

SEQ ID NO: 22168 - DNA, 25 bp, Canis familiaris
atgttctcatgaatgttgcacacga

SEQ ID NO: 22169 - DNA, 25 bp, Canis familiaris
atgttctgctattgcttgctagatg

SEQ ID NO: 22170 - DNA, 25 bp, Canis familiaris
atgatactgcaaattggctagttta

SEQ ID NO: 22171 - DNA, 25 bp, Canis familiaris
atgatcctgcaggcatctgagtatg

SEQ ID NO: 22172 - DNA, 25 bp, Canis familiaris
atgatgcctctgtattacatgatct

SEQ ID NO: 22173 - DNA, 25 bp, Canis familiaris
atgtccacagtgtcaccagatcaga

SEQ ID NO: 22174 - DNA, 25 bp, Canis familiaris
atgtcacaagtgttccaccaatgta

SEQ ID NO: 22175 - DNA, 25 bp, Canis familiaris
atgatatcttggtgcgctccagact

SEQ ID NO: 22176 - DNA, 25 bp, Canis familiaris
atgttgcatttattgcagccaaagt

SEQ ID NO: 22177 - DNA, 25 bp, Canis familiaris
atgtctgctgctttagacttacagt

SEQ ID NO: 22178 - DNA, 25 bp, Canis familiaris
atgtagctgttttcaatgtcaatta

SEQ ID NO: 22179 - DNA, 25 bp, Canis familiaris
atgattgcgttttaagtgattcttt

SEQ ID NO: 22180 - DNA, 25 bp, Canis familiaris
atgttccttataatagtgttctgat

SEQ ID NO: 22181 - DNA, 25 bp, Canis familiaris
atgtcctttgaagagctgttggaat

SEQ ID NO: 22182 - DNA, 25 bp, Canis familiaris
atgtgcctttgatttaatttgggac

SEQ ID NO: 22183 - DNA, 25 bp, Canis familiaris
atgggctctttttgaaattggtgac

SEQ ID NO: 22184 - DNA, 25 bp, Canis familiaris
atgtttcctctttgaatattcttga

SEQ ID NO: 22185 - DNA, 25 bp, Canis familiaris
atgtctcccttatgtttttaattgg

SEQ ID NO: 22186 - DNA, 25 bp, Canis familiaris
atgttttctttccttctttgagtat

SEQ ID NO: 22187 - DNA, 25 bp, Canis familiaris
atgttgttttctgctttctcatgaa

SEQ ID NO: 22188 - DNA, 25 bp, Canis familiaris
atgttagattctgtcctttatgcaa

SEQ ID NO: 22189 - DNA, 25 bp, Canis familiaris
atgttatattattctcctcttctca

SEQ ID NO: 22190 - DNA, 25 bp, Canis familiaris
atgtatagtttcctcattgtcccaa

SEQ ID NO: 22191 - DNA, 25 bp, Canis familiaris
atgtcacagttaacactgttcattc

SEQ ID NO: 22192 - DNA, 25 bp, Canis familiaris
atgtcatagttattattcagtatta

SEQ ID NO: 22193 - DNA, 25 bp, Canis familiaris
atgtctatgcattagatttcacttc

SEQ ID NO: 22194 - DNA, 25 bp, Canis familiaris
atgtagatctaagttctcaccccac

SEQ ID NO: 22195 - DNA, 25 bp, Canis familiaris
atgtatattaaacccgcactgccat

SEQ ID NO: 22196 - DNA, 25 bp, Canis familiaris
atgtaattaccatacgcttgctatt

SEQ ID NO: 22197 - DNA, 25 bp, Canis familiaris
atgttttggcaatgaccttaaatat

SEQ ID NO: 22198 - DNA, 25 bp, Canis familiaris
atgtttttgcaagactgacataaat

SEQ ID NO: 22199 - DNA, 25 bp, Canis familiaris
atgtttttagcagcattatcaataa

SEQ ID NO: 22200 - DNA, 25 bp, Canis familiaris
atgttccttgaagcattattcacaa

SEQ ID NO: 22201 - DNA, 25 bp, Canis familiaris
atgtatctattgagaatattctaaa

SEQ ID NO: 22202 - DNA, 25 bp, Canis familiaris
atgtttttcatttatcattgtaaaa

SEQ ID NO: 22203 - DNA, 25 bp, Canis familiaris
atgtttttattgtctcattttctaa

SEQ ID NO: 22204 - DNA, 25 bp, Canis familiaris
atgtgtttatttgccttttctttgt

SEQ ID NO: 22205 - DNA, 25 bp, Canis familiaris
atgttaacttgttctttgttttatg

SEQ ID NO: 22206 - DNA, 25 bp, Canis familiaris
atgtctcatgactttttttttatgt

SEQ ID NO: 22207 - DNA, 25 bp, Canis familiaris
atgttcattcattttgtttcttaaa

SEQ ID NO: 22208 - DNA, 25 bp, Canis familiaris
atgtatcattatttgcagtttgctt

SEQ ID NO: 22209 - DNA, 25 bp, Canis familiaris
atgttgactatctggcttcatcttt

SEQ ID NO: 22210 - DNA, 25 bp, Canis familiaris
atgtacactaacccagtgctcattt

SEQ ID NO: 22211 - DNA, 25 bp, Canis familiaris
atgtaaccatggcacttgatctgat

SEQ ID NO: 22212 - DNA, 25 bp, Canis familiaris
atgttcatcgtcaacccaggagaaa

SEQ ID NO: 22213 - DNA, 25 bp, Canis familiaris
atgttccccacctgaggacaagact

SEQ ID NO: 22214 - DNA, 25 bp, Canis familiaris
atgtccggcgcctggagtataagcc

SEQ ID NO: 22215 - DNA, 25 bp, Canis familiaris
atgtccacgggtgtgagtgtgagca

SEQ ID NO: 22216 - DNA, 25 bp, Canis familiaris
atgtctgcacagggagttaggttat

SEQ ID NO: 22217 - DNA, 25 bp, Canis familiaris
atgtctcaattgggttcggttgtct

SEQ ID NO: 22218 - DNA, 25 bp, Canis familiaris
atgtctcacttgggtcttattttta

SEQ ID NO: 22219 - DNA, 25 bp, Canis familiaris
atgttccttccactcctgagagtga

SEQ ID NO: 22220 - DNA, 25 bp, Canis familiaris
atgttatccaactccatgaagtttt

SEQ ID NO: 22221 - DNA, 25 bp, Canis familiaris
atgtcttccaacttcctggagtcaa

SEQ ID NO: 22222 - DNA, 25 bp, Canis familiaris
atgtttggcaagtatctcgagagaa

SEQ ID NO: 22223 - DNA, 25 bp, Canis familiaris
atgtacatggcccttccgtgtacat

SEQ ID NO: 22224 - DNA, 25 bp, Canis familiaris
atgtatacgatcactccggtactca

SEQ ID NO: 22225 - DNA, 25 bp, Canis familiaris
atgtattcaatctgctcctagacct

SEQ ID NO: 22226 - DNA, 25 bp, Canis familiaris
atggattaatccggccatgagccct

SEQ ID NO: 22227 - DNA, 25 bp, Canis familiaris
atgttatcaacatttggctgagcat

SEQ ID NO: 22228 - DNA, 25 bp, Canis familiaris
atgtcttcaagccagtgcgcaagca

SEQ ID NO: 22229 - DNA, 25 bp, Canis familiaris
atgtgctttatggcaggcgcaaact

SEQ ID NO: 22230 - DNA, 25 bp, Canis familiaris
aggctttatgactgtacttcgtgga

SEQ ID NO: 22231 - DNA, 25 bp, Canis familiaris
atgttattagaaagcttcttcggta

SEQ ID NO: 22232 - DNA, 25 bp, Canis familiaris
atgtttctagataggcttcccaggc

SEQ ID NO: 22233 - DNA, 25 bp, Canis familiaris
atgttgtctataatggcatcccacg

SEQ ID NO: 22234 - DNA, 25 bp, Canis familiaris
atgttcttgtattgactgcccattg

SEQ ID NO: 22235 - DNA, 25 bp, Canis familiaris
atgtttcttacattgtcccattctt

SEQ ID NO: 22236 - DNA, 25 bp, Canis familiaris
atgtttggctactgtctctatgttt

SEQ ID NO: 22237 - DNA, 25 bp, Canis familiaris
atgtattggtaatgatctcctttga

SEQ ID NO: 22238 - DNA, 25 bp, Canis familiaris
atggcttagtaatattcctttctgt

SEQ ID NO: 22239 - DNA, 25 bp, Canis familiaris
atggttacgattttgtttgtatcat

SEQ ID NO: 22240 - DNA, 25 bp, Canis familiaris
atggtaatgcctgctggtttttcct

SEQ ID NO: 22241 - DNA, 25 bp, Canis familiaris
atgtttcattaagtggtttttctct

SEQ ID NO: 22242 - DNA, 25 bp, Canis familiaris
atgtttatatatatgcttttatttt

SEQ ID NO: 22243 - DNA, 25 bp, Canis familiaris
atggttaaatgtctatttagccttt

SEQ ID NO: 22244 - DNA, 25 bp, Canis familiaris
atggctgaaattaagttctaactct

SEQ ID NO: 22245 - DNA, 25 bp, Canis familiaris
atgtgagattcataggtccaggacc

SEQ ID NO: 22246 - DNA, 25 bp, Canis familiaris
atgtcagaactaaggcctagccacg

SEQ ID NO: 22247 - DNA, 25 bp, Canis familiaris
atgtcatgtactacgaacattccac

SEQ ID NO: 22248 - DNA, 25 bp, Canis familiaris
atgattgctacacccaatagcttct

SEQ ID NO: 22249 - DNA, 25 bp, Canis familiaris
atgttgatggcacccaagacctgta

SEQ ID NO: 22250 - DNA, 25 bp, Canis familiaris
atgtattgcatcaccattgccactg

SEQ ID NO: 22251 - DNA, 25 bp, Canis familiaris
atgtattcatattttactactgtta

SEQ ID NO: 22252 - DNA, 25 bp, Canis familiaris
atgttgttgacatttcctcactgtt

SEQ ID NO: 22253 - DNA, 25 bp, Canis familiaris
atgttgatcatgtacttttcagtgt

SEQ ID NO: 22254 - DNA, 25 bp, Canis familiaris
atgtctcatgtgtgtttatctcgtg

SEQ ID NO: 22255 - DNA, 25 bp, Canis familiaris
atgtctattactttggatctcgatg

SEQ ID NO: 22256 - DNA, 25 bp, Canis familiaris
atggaatcttcttgggtcgcaatac

SEQ ID NO: 22257 - DNA, 25 bp, Canis familiaris
atgtaacttctttgtgttcatgaac

SEQ ID NO: 22258 - DNA, 25 bp, Canis familiaris
atgtaaatctgcatagtaccaaggc

SEQ ID NO: 22259 - DNA, 25 bp, Canis familiaris
atgttactcttttaagccaagtgca

SEQ ID NO: 22260 - DNA, 25 bp, Canis familiaris
atgtttgtctatgacggccacagcc

SEQ ID NO: 22261 - DNA, 25 bp, Canis familiaris
atgtgttcttcaagacccgaggcac

SEQ ID NO: 22262 - DNA, 25 bp, Canis familiaris
atgttccatgtcttgatggcccagg

SEQ ID NO: 22263 - DNA, 25 bp, Canis familiaris
atgttgcagattctggtgctcctgg

SEQ ID NO: 22264 - DNA, 25 bp, Canis familiaris
atgttgaggatgttggcttcgctga

SEQ ID NO: 22265 - DNA, 25 bp, Canis familiaris
atgttcaactgaatcctatagatga

SEQ ID NO: 22266 - DNA, 25 bp, Canis familiaris
atgttccgagattcctgtggcagac

SEQ ID NO: 22267 - DNA, 25 bp, Canis familiaris
atgttgcctgaggacctggggaaga

SEQ ID NO: 22268 - DNA, 25 bp, Canis familiaris
atgttggcgaggatctggtggaggg

SEQ ID NO: 22269 - DNA, 25 bp, Canis familiaris
atgttgggctagatcttgggggaga

SEQ ID NO: 22270 - DNA, 25 bp, Canis familiaris
atgtcagggaaggctttctggagga

SEQ ID NO: 22271 - DNA, 25 bp, Canis familiaris
atggtcgtaggcgtgtacgtgggag

SEQ ID NO: 22272 - DNA, 25 bp, Canis familiaris
atgggcggtagcgtgtacggtggga

SEQ ID NO: 22273 - DNA, 25 bp, Canis familiaris
aggacggatccgtaactcagtgggc

SEQ ID NO: 22274 - DNA, 25 bp, Canis familiaris
aggaaggtcccagaccacattctac

SEQ ID NO: 22275 - DNA, 25 bp, Canis familiaris
agagacaggtcttccaaccttttca

SEQ ID NO: 22276 - DNA, 25 bp, Canis familiaris
atgtgacacgttaaaacacatcttt

SEQ ID NO: 22277 - DNA, 25 bp, Canis familiaris
atgttcaacctacacaaccatgttc

SEQ ID NO: 22278 - DNA, 25 bp, Canis familiaris
atgtacaactttcccaactgtgtct

SEQ ID NO: 22279 - DNA, 25 bp, Canis familiaris
atgtactgaatgaagcccccagctt

SEQ ID NO: 22280 - DNA, 25 bp, Canis familiaris
atgttctgacagacagcctgactcc

SEQ ID NO: 22281 - DNA, 25 bp, Canis familiaris
atgtctgcatgatgagccactgctc

SEQ ID NO: 22282 - DNA, 25 bp, Canis familiaris
atgtctaattagccacagctcttca

SEQ ID NO: 22283 - DNA, 25 bp, Canis familiaris
atgttcagagtatcaagttctctag

SEQ ID NO: 22284 - DNA, 25 bp, Canis familiaris
atgttcatgtggttgtagttctatc

SEQ ID NO: 22285 - DNA, 25 bp, Canis familiaris
atgttctctggttttgtttatgctg

SEQ ID NO: 22286 - DNA, 25 bp, Canis familiaris
atgtctgttgggcttattatacttt

SEQ ID NO: 22287 - DNA, 25 bp, Canis familiaris
atggagttgggggtgatgattagct

SEQ ID NO: 22288 - DNA, 25 bp, Canis familiaris
atgtgaggtgatggatgtattattt

SEQ ID NO: 22289 - DNA, 25 bp, Canis familiaris
atgtgggtgtgacaatcgacgattg

SEQ ID NO: 22290 - DNA, 25 bp, Canis familiaris
gtgggaggtccgaggaagtttcctg

SEQ ID NO: 22291 - DNA, 25 bp, Canis familiaris
aggggtttctgttggatagttagca

SEQ ID NO: 22292 - DNA, 25 bp, Canis familiaris
aggacaattacttacccagttagag

SEQ ID NO: 22293 - DNA, 25 bp, Canis familiaris
atgtcaacttttttcacacgttaag

SEQ ID NO: 22294 - DNA, 25 bp, Canis familiaris
atgtcaatctttctccatacttaag

SEQ ID NO: 22295 - DNA, 25 bp, Canis familiaris
atgtcaactggtttgtattgcctat

SEQ ID NO: 22296 - DNA, 25 bp, Canis familiaris
atgtgcaagaggttcgttgtcctgt

SEQ ID NO: 22297 - DNA, 25 bp, Canis familiaris
atggaactggtgacctgtggccttt

SEQ ID NO: 22298 - DNA, 25 bp, Canis familiaris
atggagattgggcccattgcccttg

SEQ ID NO: 22299 - DNA, 25 bp, Canis familiaris
atggagtgtggggcaggggccaggg

SEQ ID NO: 22300 - DNA, 25 bp, Canis familiaris
atgtactgtgtgggtggtgggtgag

SEQ ID NO: 22301 - DNA, 25 bp, Canis familiaris
atgtttgtgctggcttgtactggga

SEQ ID NO: 22302 - DNA, 25 bp, Canis familiaris
atgttcgtgctgacttctatttgat

SEQ ID NO: 22303 - DNA, 25 bp, Canis familiaris
atgttcaatcatctctcatatctca

SEQ ID NO: 22304 - DNA, 25 bp, Canis familiaris
atgttcaatcatcttcattctaagt

SEQ ID NO: 22305 - DNA, 25 bp, Canis familiaris
atgtgccaatgcctgtacattaaca

SEQ ID NO: 22306 - DNA, 25 bp, Canis familiaris
atgtcgaggcggaacagtcactcct

SEQ ID NO: 22307 - DNA, 25 bp, Canis familiaris
atgtctggggtcgacagacctcacc

SEQ ID NO: 22308 - DNA, 25 bp, Canis familiaris
atggtgggcgtctacaacggcaaga

SEQ ID NO: 22309 - DNA, 25 bp, Canis familiaris
atgtggagggcttaatccgggcgag

SEQ ID NO: 22310 - DNA, 25 bp, Canis familiaris
atgtcccgtgtagacctggtgtagg

SEQ ID NO: 22311 - DNA, 25 bp, Canis familiaris
atgtccctctgttggcaggggtggg

SEQ ID NO: 22312 - DNA, 25 bp, Canis familiaris
atgtcaacttgcccagaggcggtgg

SEQ ID NO: 22313 - DNA, 25 bp, Canis familiaris
atgtacaatgtctacagagcggatg

SEQ ID NO: 22314 - DNA, 25 bp, Canis familiaris
atgtgcacgtgagtgacccgtgtgc

SEQ ID NO: 22315 - DNA, 25 bp, Canis familiaris
atgtaatgctggcagccctgtgctt

SEQ ID NO: 22316 - DNA, 25 bp, Canis familiaris
atgtttggggagctattgcatttgc

SEQ ID NO: 22317 - DNA, 25 bp, Canis familiaris
atgtttgtgtgctaggtttgatgaa

SEQ ID NO: 22318 - DNA, 25 bp, Canis familiaris
atgttctggctgcgtttctaggcaa

SEQ ID NO: 22319 - DNA, 25 bp, Canis familiaris
aggttggctactcttcctgagaaac

SEQ ID NO: 22320 - DNA, 25 bp, Canis familiaris
aggagggtatgtatggcttaaagtc

SEQ ID NO: 22321 - DNA, 25 bp, Canis familiaris
atgggggcaactggatggttcacta

SEQ ID NO: 22322 - DNA, 25 bp, Canis familiaris
atggatgggcaggggaggttactaa

SEQ ID NO: 22323 - DNA, 25 bp, Canis familiaris
atgtgcggtagcgaggggagctcac

SEQ ID NO: 22324 - DNA, 25 bp, Canis familiaris
atgtgggtgtcacgggaatcctcct

SEQ ID NO: 22325 - DNA, 25 bp, Canis familiaris
atgtcatgagtgctcggtggtcagc

SEQ ID NO: 22326 - DNA, 25 bp, Canis familiaris
atgtcaggcagcctaggctctggca

SEQ ID NO: 22327 - DNA, 25 bp, Canis familiaris
atgtttgctgccaaggctggagccc

SEQ ID NO: 22328 - DNA, 25 bp, Canis familiaris
atgtatgtggccatccaggctgtgc

SEQ ID NO: 22329 - DNA, 25 bp, Canis familiaris
atgtatgtgtccattggccttgggc

SEQ ID NO: 22330 - DNA, 25 bp, Canis familiaris
atgtctggctagatttgcccagagg

SEQ ID NO: 22331 - DNA, 25 bp, Canis familiaris
atgtctgcgatgaaacttgcctcaa

SEQ ID NO: 22332 - DNA, 25 bp, Canis familiaris
atgttacattaacttgcacagcaga

SEQ ID NO: 22333 - DNA, 25 bp, Canis familiaris
atgttcgtagaattctgcacaggca

SEQ ID NO: 22334 - DNA, 25 bp, Canis familiaris
atgtcatcagtattcaatcgccaaa

SEQ ID NO: 22335 - DNA, 25 bp, Canis familiaris
atgtctgcagttacaatggtagcat

SEQ ID NO: 22336 - DNA, 25 bp, Canis familiaris
atgtggcagtttgtgtgcacacaca

SEQ ID NO: 22337 - DNA, 25 bp, Canis familiaris
atgtgcacagggagaggagaccaag

SEQ ID NO: 22338 - DNA, 25 bp, Canis familiaris
atgtgcaatggccagaaggtcccaa

SEQ ID NO: 22339 - DNA, 25 bp, Canis familiaris
atgttagtcacaagaggtcctctag

SEQ ID NO: 22340 - DNA, 25 bp, Canis familiaris
atggttgacaaaaggacactcgaga

SEQ ID NO: 22341 - DNA, 25 bp, Canis familiaris
atgggggagacatggccagcttagc

SEQ ID NO: 22342 - DNA, 25 bp, Canis familiaris
atgggtggaatggggcctacttgcc

SEQ ID NO: 22343 - DNA, 25 bp, Canis familiaris
atggtgcggcttcgagagcctgact

SEQ ID NO: 22344 - DNA, 25 bp, Canis familiaris
atgtggcaggcttgtgacagttcct

SEQ ID NO: 22345 - DNA, 25 bp, Canis familiaris
atgtgtcgcagttggcagagtacgg

SEQ ID NO: 22346 - DNA, 25 bp, Canis familiaris
atgtgctggagacggccgtcatgct

SEQ ID NO: 22347 - DNA, 25 bp, Canis familiaris
atgtggagatggtgggccagctcgt

SEQ ID NO: 22348 - DNA, 25 bp, Canis familiaris
atgtaatggtgtggggctcctagct

SEQ ID NO: 22349 - DNA, 25 bp, Canis familiaris
atgtacaggcgcggagctatgctct

SEQ ID NO: 22350 - DNA, 25 bp, Canis familiaris
atgtatagcgaggctcactcacagc

SEQ ID NO: 22351 - DNA, 25 bp, Canis familiaris
atgtgtatgcagtttcagctaaaat

SEQ ID NO: 22352 - DNA, 25 bp, Canis familiaris
atgtttgttgcttcactagaggtgg

SEQ ID NO: 22353 - DNA, 25 bp, Canis familiaris
atgtttcttgcttgttttggctgcg

SEQ ID NO: 22354 - DNA, 25 bp, Canis familiaris
atgtttttgctgtcgattgtgatct

SEQ ID NO: 22355 - DNA, 25 bp, Canis familiaris
atgtttatgttgtcgtttaccttga

SEQ ID NO: 22356 - DNA, 25 bp, Canis familiaris
atgtatgtattcccgtttcaactat

SEQ ID NO: 22357 - DNA, 25 bp, Canis familiaris
atgtggtgagcgaccgttgctaact

SEQ ID NO: 22358 - DNA, 25 bp, Canis familiaris
atgtgactgacctcagtttgtactt

SEQ ID NO: 22359 - DNA, 25 bp, Canis familiaris
atgtactgtaaggaatgtgtgtcac

SEQ ID NO: 22360 - DNA, 25 bp, Canis familiaris
atgtgatttaaagtagttgtccaga

SEQ ID NO: 22361 - DNA, 25 bp, Canis familiaris
atgtgttctacttggagtttaagac

SEQ ID NO: 22362 - DNA, 25 bp, Canis familiaris
atgttcatgtagctgggtttgtaat

SEQ ID NO: 22363 - DNA, 25 bp, Canis familiaris
atgtttgaaatgcggtctgttgaag

SEQ ID NO: 22364 - DNA, 25 bp, Canis familiaris
atgtttgtatatctggctgtgtgtg

SEQ ID NO: 22365 - DNA, 25 bp, Canis familiaris
atggtcttgattcccactttaggct

SEQ ID NO: 22366 - DNA, 25 bp, Canis familiaris
atggtctctgtcacaactactaaat

SEQ ID NO: 22367 - DNA, 25 bp, Canis familiaris
atggtggcgtatttacttgcttaat

SEQ ID NO: 22368 - DNA, 25 bp, Canis familiaris
atggtaatacatttctcgtttaata

SEQ ID NO: 22369 - DNA, 25 bp, Canis familiaris
atggctaaacatcatccggatttga

SEQ ID NO: 22370 - DNA, 25 bp, Canis familiaris
atgtgctcaaacttcacctgcagac

SEQ ID NO: 22371 - DNA, 25 bp, Canis familiaris
atgtgctgcaccactgagctgtgca

SEQ ID NO: 22372 - DNA, 25 bp, Canis familiaris
atgtgctgacacagacctacaacat

SEQ ID NO: 22373 - DNA, 25 bp, Canis familiaris
atgtctgacaaacccgatatggctg

SEQ ID NO: 22374 - DNA, 25 bp, Canis familiaris
atgtctataaacgcagatgttctgg

SEQ ID NO: 22375 - DNA, 25 bp, Canis familiaris
atgtgggcaacaatccagagtccgg

SEQ ID NO: 22376 - DNA, 25 bp, Canis familiaris
atgtgagccatcgaagccacactgc

SEQ ID NO: 22377 - DNA, 25 bp, Canis familiaris
atgtagacatacgtgcatccacctt

SEQ ID NO: 22378 - DNA, 25 bp, Canis familiaris
atgtatcacccagtgctcatcatga

SEQ ID NO: 22379 - DNA, 25 bp, Canis familiaris
atgtagacctcattgtgctcatctt

SEQ ID NO: 22380 - DNA, 25 bp, Canis familiaris
atgtgaactgcctatttcctatgct

SEQ ID NO: 22381 - DNA, 25 bp, Canis familiaris
atgtgacttacattgcttcctgcac

SEQ ID NO: 22382 - DNA, 25 bp, Canis familiaris
atgtgtttaatatttcctacggtgt

SEQ ID NO: 22383 - DNA, 25 bp, Canis familiaris
atggtttgaaacttcctgacttgtt

SEQ ID NO: 22384 - DNA, 25 bp, Canis familiaris
atgggttgtaacattccacactatt

SEQ ID NO: 22385 - DNA, 25 bp, Canis familiaris
atgggtgggaccaggcaatcctttt

SEQ ID NO: 22386 - DNA, 25 bp, Canis familiaris
atggttgggaccaggccaatccctt

SEQ ID NO: 22387 - DNA, 25 bp, Canis familiaris
aagctagggaacacggtagatcctt

SEQ ID NO: 22388 - DNA, 25 bp, Canis familiaris
aggtaccagaacccggtagcttctg

SEQ ID NO: 22389 - DNA, 25 bp, Canis familiaris
aggcataccaatgccctagctagcc

SEQ ID NO: 22390 - DNA, 25 bp, Canis familiaris
atggacggatattcactgtagctag

SEQ ID NO: 22391 - DNA, 25 bp, Canis familiaris
atggagcttgtgcacctgaactccc

SEQ ID NO: 22392 - DNA, 25 bp, Canis familiaris
atggtggtgatgcacccaatgcctc

SEQ ID NO: 22393 - DNA, 25 bp, Canis familiaris
atggtgcgcctgctggaagatgccg

SEQ ID NO: 22394 - DNA, 25 bp, Canis familiaris
atgtgttgttgccatggtaatcctg

SEQ ID NO: 22395 - DNA, 25 bp, Canis familiaris
atgtgtggtatcagttcaacactgt

SEQ ID NO: 22396 - DNA, 25 bp, Canis familiaris
atgggcgtacatttcttatagcttg

SEQ ID NO: 22397 - DNA, 25 bp, Canis familiaris
atgtgctggggtttattctagtgtc

SEQ ID NO: 22398 - DNA, 25 bp, Canis familiaris
atgtcggaattgattttcagctgca

SEQ ID NO: 22399 - DNA, 25 bp, Canis familiaris
atgtcaggaatccttctttctcatg

SEQ ID NO: 22400 - DNA, 25 bp, Canis familiaris
atgtagaagatgttcctctcgccat

SEQ ID NO: 22401 - DNA, 25 bp, Canis familiaris
atgtatgatgagatcctcctcgctt

SEQ ID NO: 22402 - DNA, 25 bp, Canis familiaris
atgtgatgttgggcactcagctact

SEQ ID NO: 22403 - DNA, 25 bp, Canis familiaris
atgtttgtgatcgctattactattg

SEQ ID NO: 22404 - DNA, 25 bp, Canis familiaris
atgtctttacccattcatctatgga

SEQ ID NO: 22405 - DNA, 25 bp, Canis familiaris
atgtcatcttgagctctttattttg

SEQ ID NO: 22406 - DNA, 25 bp, Canis familiaris
atgtcatgttcctttttataatagc

SEQ ID NO: 22407 - DNA, 25 bp, Canis familiaris
atgtctgtgatcgtgttttcaagac

SEQ ID NO: 22408 - DNA, 25 bp, Canis familiaris
atgtctgagacactggttttgaagc

SEQ ID NO: 22409 - DNA, 25 bp, Canis familiaris
atgtctcagacagggttgtcagcac

SEQ ID NO: 22410 - DNA, 25 bp, Canis familiaris
atgtcacagcaggcagagtggtcag

SEQ ID NO: 22411 - DNA, 25 bp, Canis familiaris
atgtcacaagccaatgtgtcacaga

SEQ ID NO: 22412 - DNA, 25 bp, Canis familiaris
atgtgcacacatacactttcaatgc

SEQ ID NO: 22413 - DNA, 25 bp, Canis familiaris
atgtcacaccattcagtataagctt

SEQ ID NO: 22414 - DNA, 25 bp, Canis familiaris
atgtgctcagccttcagggctagtg

SEQ ID NO: 22415 - DNA, 25 bp, Canis familiaris
atgtcacaccatacctgagcaagga

SEQ ID NO: 22416 - DNA, 25 bp, Canis familiaris
atgtgaccaaggacatgacactgga

SEQ ID NO: 22417 - DNA, 25 bp, Canis familiaris
atgtggcactgaaacgaactgggca

SEQ ID NO: 22418 - DNA, 25 bp, Canis familiaris
atgggatccattactaagcatgtca

SEQ ID NO: 22419 - DNA, 25 bp, Canis familiaris
atgggtctctagatatagtctgcaa

SEQ ID NO: 22420 - DNA, 25 bp, Canis familiaris
aggatttgtagaatataaggatgac

SEQ ID NO: 22421 - DNA, 25 bp, Canis familiaris
atggattttaattctctatggtgga

SEQ ID NO: 22422 - DNA, 25 bp, Canis familiaris
atgggccttgaggtactaagtggaa

SEQ ID NO: 22423 - DNA, 25 bp, Canis familiaris
atggggttaggtggctcaggggagc

SEQ ID NO: 22424 - DNA, 25 bp, Canis familiaris
atggggttaggggcatggacctcct

SEQ ID NO: 22425 - DNA, 25 bp, Canis familiaris
atgtgggaacaaccggggactcatc

SEQ ID NO: 22426 - DNA, 25 bp, Canis familiaris
atgggagaaagttgcccaccacctc

SEQ ID NO: 22427 - DNA, 25 bp, Canis familiaris
atgggcgagaggtacatcacccacg

SEQ ID NO: 22428 - DNA, 25 bp, Canis familiaris
atgtgagccaaatactcagcctgcc

SEQ ID NO: 22429 - DNA, 25 bp, Canis familiaris
atggagtcaggcatcaggctcctgc

SEQ ID NO: 22430 - DNA, 25 bp, Canis familiaris
atgtggtggtggacatccatcggcg

SEQ ID NO: 22431 - DNA, 25 bp, Canis familiaris
atgtagttgtgcaacctcacggcgt

SEQ ID NO: 22432 - DNA, 25 bp, Canis familiaris
atgtatttgcttgcttcacttctgt

SEQ ID NO: 22433 - DNA, 25 bp, Canis familiaris
atgtatcctctaacttctattttct

SEQ ID NO: 22434 - DNA, 25 bp, Canis familiaris
atgtatcgtttcatttttctctctc

SEQ ID NO: 22435 - DNA, 25 bp, Canis familiaris
atgtactgttttatttgatctcgag

SEQ ID NO: 22436 - DNA, 25 bp, Canis familiaris
atgtaggttcttcatcttcatgctg

SEQ ID NO: 22437 - DNA, 25 bp, Canis familiaris
atgtcaatctttaaactcttgctgg

SEQ ID NO: 22438 - DNA, 25 bp, Canis familiaris
atgtaattcctaatgcttcttccac

SEQ ID NO: 22439 - DNA, 25 bp, Canis familiaris
atgtcgtccgtaatcatgtgctgtc

SEQ ID NO: 22440 - DNA, 25 bp, Canis familiaris
atgtcttcactctaacttggttatg

SEQ ID NO: 22441 - DNA, 25 bp, Canis familiaris
atgtctcggcattaatccgtttatg

SEQ ID NO: 22442 - DNA, 25 bp, Canis familiaris
atgtcagctacataaacagttttgt

SEQ ID NO: 22443 - DNA, 25 bp, Canis familiaris
atgtgaactaaaaacagtcttctgt

SEQ ID NO: 22444 - DNA, 25 bp, Canis familiaris
atggtaccagcagtgaaaccctctg

SEQ ID NO: 22445 - DNA, 25 bp, Canis familiaris
atggtggccgaaaaagccgggctca

SEQ ID NO: 22446 - DNA, 25 bp, Canis familiaris
atgggcccgcaatgaagcttggaga

SEQ ID NO: 22447 - DNA, 25 bp, Canis familiaris
aggagcctataatcaagtagggaat

SEQ ID NO: 22448 - DNA, 25 bp, Canis familiaris
atggggaatatataagtatgggaga

SEQ ID NO: 22449 - DNA, 25 bp, Canis familiaris
atggggacagttgaatttggggtat

SEQ ID NO: 22450 - DNA, 25 bp, Canis familiaris
agagtttggcttgtttgggggtctg

SEQ ID NO: 22451 - DNA, 25 bp, Canis familiaris
atgtgtttggttctttggttttctg

SEQ ID NO: 22452 - DNA, 25 bp, Canis familiaris
atggattttgttctgtagttttgtt

SEQ ID NO: 22453 - DNA, 25 bp, Canis familiaris
atggatggttggtggtctttcttgt

SEQ ID NO: 22454 - DNA, 25 bp, Canis familiaris
aggggttggattcctattgccaggt

SEQ ID NO: 22455 - DNA, 25 bp, Canis familiaris
atgggcactttttccaaatgctagg

SEQ ID NO: 22456 - DNA, 25 bp, Canis familiaris
atgtggtttctttccaaatttgcgt

SEQ ID NO: 22457 - DNA, 25 bp, Canis familiaris
atgtagtatgtttccctaacttcct

SEQ ID NO: 22458 - DNA, 25 bp, Canis familiaris
atgtcagtttgttgctctttactcc

SEQ ID NO: 22459 - DNA, 25 bp, Canis familiaris
atgtaatatgtccttctttacccta

SEQ ID NO: 22460 - DNA, 25 bp, Canis familiaris
atgtcactatgtatttattccctta

SEQ ID NO: 22461 - DNA, 25 bp, Canis familiaris
atgtaccactatatagtttccttca

SEQ ID NO: 22462 - DNA, 25 bp, Canis familiaris
atgtaccacaaaattgtatcacttt

SEQ ID NO: 22463 - DNA, 25 bp, Canis familiaris
atgtatctcaaatttcttaaactag

SEQ ID NO: 22464 - DNA, 25 bp, Canis familiaris
atgtgactgcaatatctcagttgaa

SEQ ID NO: 22465 - DNA, 25 bp, Canis familiaris
atgtcatctgcatcaaggcccaaaa

SEQ ID NO: 22466 - DNA, 25 bp, Canis familiaris
atgtgatctcgagaggcacatccaa

SEQ ID NO: 22467 - DNA, 25 bp, Canis familiaris
atgtgagtttgctagatactgccaa

SEQ ID NO: 22468 - DNA, 25 bp, Canis familiaris
atgtactcaatatgtcagtgccaga

SEQ ID NO: 22469 - DNA, 25 bp, Canis familiaris
atgtgatacaatttgatcagtatat

SEQ ID NO: 22470 - DNA, 25 bp, Canis familiaris
atgtcaacaatacttcaataaaaaa

SEQ ID NO: 22471 - DNA, 25 bp, Canis familiaris
atgtctataagaaccaaacctcaaa

SEQ ID NO: 22472 - DNA, 25 bp, Canis familiaris
atgtgaattatacccaacctgggaa

SEQ ID NO: 22473 - DNA, 25 bp, Canis familiaris
atgtgatagacattcctcaacttgt

SEQ ID NO: 22474 - DNA, 25 bp, Canis familiaris
atgtgtgtgacattcctcaggcact

SEQ ID NO: 22475 - DNA, 25 bp, Canis familiaris
atgtcttggagatgtgcgtaatatt

SEQ ID NO: 22476 - DNA, 25 bp, Canis familiaris
atgtctgtggagttattggaattca

SEQ ID NO: 22477 - DNA, 25 bp, Canis familiaris
atgtgtgtggctttactggagtatg

SEQ ID NO: 22478 - DNA, 25 bp, Canis familiaris
atgggatgacatactgacttaggca

SEQ ID NO: 22479 - DNA, 25 bp, Canis familiaris
atgggagcactgagactcttccaga

SEQ ID NO: 22480 - DNA, 25 bp, Canis familiaris
atggtggaatgaacacttggcttgg

SEQ ID NO: 22481 - DNA, 25 bp, Canis familiaris
atggtagttgccaagcactggccgg

SEQ ID NO: 22482 - DNA, 25 bp, Canis familiaris
atgtgtcattcccaacaaaccagag

SEQ ID NO: 22483 - DNA, 25 bp, Canis familiaris
atggttccactagaaatctccatga

SEQ ID NO: 22484 - DNA, 25 bp, Canis familiaris
atgtgtctccatgatgttacaccca

SEQ ID NO: 22485 - DNA, 25 bp, Canis familiaris
atgtgacttcaggtgtttgatctaa

SEQ ID NO: 22486 - DNA, 25 bp, Canis familiaris
atgtggtgtcatgcttgtctttgaa

SEQ ID NO: 22487 - DNA, 25 bp, Canis familiaris
atgggcttcatttttatttacattt

SEQ ID NO: 22488 - DNA, 25 bp, Canis familiaris
atgtggcttctttagtttttataat

SEQ ID NO: 22489 - DNA, 25 bp, Canis familiaris
atgtgagattctgtgagccttttga

SEQ ID NO: 22490 - DNA, 25 bp, Canis familiaris
atgtactcatccatagcctattgat

SEQ ID NO: 22491 - DNA, 25 bp, Canis familiaris
atgtaccccattggcctcaaataac

SEQ ID NO: 22492 - DNA, 25 bp, Canis familiaris
atgtaccccaatgtttttagcagca

SEQ ID NO: 22493 - DNA, 25 bp, Canis familiaris
atgtgcccccaagttttattcacct

SEQ ID NO: 22494 - DNA, 25 bp, Canis familiaris
atgtgatccccacggattctagtgc

SEQ ID NO: 22495 - DNA, 25 bp, Canis familiaris
aggaccccacgtctgctagagtggg

SEQ ID NO: 22496 - DNA, 25 bp, Canis familiaris
atggtcccaacgttctgtaatctgg

SEQ ID NO: 22497 - DNA, 25 bp, Canis familiaris
atggtggccaacctcttgtatgaga

SEQ ID NO: 22498 - DNA, 25 bp, Canis familiaris
atggtcccaaagtgtcttgaaatct

SEQ ID NO: 22499 - DNA, 25 bp, Canis familiaris
atggtcgagaaaaagccggcaaact

SEQ ID NO: 22500 - DNA, 25 bp, Canis familiaris
atgtccctgaacaacagctgctgga

SEQ ID NO: 22501 - DNA, 25 bp, Canis familiaris
atgtcctagaagcctctgtgtgtct

SEQ ID NO: 22502 - DNA, 25 bp, Canis familiaris
atgtctctacattctttgtgtgctt

SEQ ID NO: 22503 - DNA, 25 bp, Canis familiaris
atgtgcctacttaaactgtgctgac

SEQ ID NO: 22504 - DNA, 25 bp, Canis familiaris
atgtccatgactacaagaggcttgt

SEQ ID NO: 22505 - DNA, 25 bp, Canis familiaris
atgtcgcacaatactgcgaacattt

SEQ ID NO: 22506 - DNA, 25 bp, Canis familiaris
atgtctcatatactgtgtacaatat

SEQ ID NO: 22507 - DNA, 25 bp, Canis familiaris
atgtctgaatcatttgtcacaggag

SEQ ID NO: 22508 - DNA, 25 bp, Canis familiaris
atggatgcagacattatcttggcag

SEQ ID NO: 22509 - DNA, 25 bp, Canis familiaris
atgtgaccacccaatctgtgatggg

SEQ ID NO: 22510 - DNA, 25 bp, Canis familiaris
atgtaccccttatatgatgcaatga

SEQ ID NO: 22511 - DNA, 25 bp, Canis familiaris
atgtatcccctggtactgatatata

SEQ ID NO: 22512 - DNA, 25 bp, Canis familiaris
atgtctcacccgtaatctagaaaac

SEQ ID NO: 22513 - DNA, 25 bp, Canis familiaris
gttaaggccctatcataaaagacag

SEQ ID NO: 22514 - DNA, 25 bp, Canis familiaris
ctcggggcccacaaacacaaggaag

SEQ ID NO: 22515 - DNA, 25 bp, Canis familiaris
cttggtggccgacgaactcaacaag

SEQ ID NO: 22516 - DNA, 25 bp, Canis familiaris
atgtgggtgacgaggcccagagcaa

SEQ ID NO: 22517 - DNA, 25 bp, Canis familiaris
atgtgggagatcgggagtatgaaga

SEQ ID NO: 22518 - DNA, 25 bp, Canis familiaris
atgggtggactgcagagggcacgag

SEQ ID NO: 22519 - DNA, 25 bp, Canis familiaris
atggcgtgatacggttgactcacgg

SEQ ID NO: 22520 - DNA, 25 bp, Canis familiaris
atggaggaacgcctgatttccagga

SEQ ID NO: 22521 - DNA, 25 bp, Canis familiaris
atggtggaggcaaggtttctacaga

SEQ ID NO: 22522 - DNA, 25 bp, Canis familiaris
atggctggagaatttggtttcacaa

SEQ ID NO: 22523 - DNA, 25 bp, Canis familiaris
atggggtgcagttagagtttgaaca

SEQ ID NO: 22524 - DNA, 25 bp, Canis familiaris
atgggcctgagtttaaatgatgaag

SEQ ID NO: 22525 - DNA, 25 bp, Canis familiaris
atgtgtgacggcttgtaatgcttaa

SEQ ID NO: 22526 - DNA, 25 bp, Canis familiaris
atgggacccttgcaatgcggaatgg

SEQ ID NO: 22527 - DNA, 25 bp, Canis familiaris
atggggccgcgtcgcaatggaaaaa

SEQ ID NO: 22528 - DNA, 25 bp, Canis familiaris
atgtggcagctctctcgatagctaa

SEQ ID NO: 22529 - DNA, 25 bp, Canis familiaris
atgtggcagccatcttggagctgga

SEQ ID NO: 22530 - DNA, 25 bp, Canis familiaris
atgtggcagtcccaatatgcctgcg

SEQ ID NO: 22531 - DNA, 25 bp, Canis familiaris
atgtggtacacactatagcctcgca

SEQ ID NO: 22532 - DNA, 25 bp, Canis familiaris
atgtgttatcactcattgcacccaa

SEQ ID NO: 22533 - DNA, 25 bp, Canis familiaris
atgtgtcaacacaacattgcaaatc

SEQ ID NO: 22534 - DNA, 25 bp, Canis familiaris
atggtcctaccagtgctgacatttc

SEQ ID NO: 22535 - DNA, 25 bp, Canis familiaris
atgtcttcatgcaaaaggcactttc

SEQ ID NO: 22536 - DNA, 25 bp, Canis familiaris
accatttgtaaatgtcttacccttg

SEQ ID NO: 22537 - DNA, 25 bp, Canis familiaris
atgtcttggttaatagtctttctcc

SEQ ID NO: 22538 - DNA, 25 bp, Canis familiaris
atgtctttttttagcatctgtttct

SEQ ID NO: 22539 - DNA, 25 bp, Canis familiaris
atgtcctctctaaactgggatttct

SEQ ID NO: 22540 - DNA, 25 bp, Canis familiaris
atgtcacctgtaaaatgggcattat

SEQ ID NO: 22541 - DNA, 25 bp, Canis familiaris
atgtcaccttatcactgaatcacta

SEQ ID NO: 22542 - DNA, 25 bp, Canis familiaris
atgtcctattgtggattgtcatcct

SEQ ID NO: 22543 - DNA, 25 bp, Canis familiaris
atgggctattgtggatgatgatgct

SEQ ID NO: 22544 - DNA, 25 bp, Canis familiaris
atgggcttggtccagcagggaccct

SEQ ID NO: 22545 - DNA, 25 bp, Canis familiaris
atgtgggtgacttcaggccagacca

SEQ ID NO: 22546 - DNA, 25 bp, Canis familiaris
atggggtgaatggcacccagcccac

SEQ ID NO: 22547 - DNA, 25 bp, Canis familiaris
atgtgacagctgttgttccaaccca

SEQ ID NO: 22548 - DNA, 25 bp, Canis familiaris
atgtgcaagcttggatacccatccc

SEQ ID NO: 22549 - DNA, 25 bp, Canis familiaris
aggaacttgaaggccacatccctta

SEQ ID NO: 22550 - DNA, 25 bp, Canis familiaris
gcggtacagtgaggaccctacggta

SEQ ID NO: 22551 - DNA, 25 bp, Canis familiaris
atgggccagaaggactcctacgtgg

SEQ ID NO: 22552 - DNA, 25 bp, Canis familiaris
atggggcaaagaactccgtggaggg

SEQ ID NO: 22553 - DNA, 25 bp, Canis familiaris
atgggtccagaaagctccttgtgaa

SEQ ID NO: 22554 - DNA, 25 bp, Canis familiaris
atgggcccgcgaagtgcgcaataat

SEQ ID NO: 22555 - DNA, 25 bp, Canis familiaris
atgtcccctggaagcaggactgcat

SEQ ID NO: 22556 - DNA, 25 bp, Canis familiaris
atgtctcagcctgggatcagggctt

SEQ ID NO: 22557 - DNA, 25 bp, Canis familiaris
atgtcatcacacagtaaatggtcat

SEQ ID NO: 22558 - DNA, 25 bp, Canis familiaris
atgtcattattactcaaagcagctt

SEQ ID NO: 22559 - DNA, 25 bp, Canis familiaris
atgtcatgtctgtctctgaaagctc

SEQ ID NO: 22560 - DNA, 25 bp, Canis familiaris
atgtcagctctctcaggaagcacca

SEQ ID NO: 22561 - DNA, 25 bp, Canis familiaris
atgtacctaccaagagcaactatgt

SEQ ID NO: 22562 - DNA, 25 bp, Canis familiaris
atgtgacgtcaatgtgagttttgtt

SEQ ID NO: 22563 - DNA, 25 bp, Canis familiaris
atgtaccatctttgtcactttgtgc

SEQ ID NO: 22564 - DNA, 25 bp, Canis familiaris
atgtgacccttagacctagtgcagt

SEQ ID NO: 22565 - DNA, 25 bp, Canis familiaris
atggagacccctgaactcattgagt

SEQ ID NO: 22566 - DNA, 25 bp, Canis familiaris
atgggaccttgcagtaataatgatg

SEQ ID NO: 22567 - DNA, 25 bp, Canis familiaris
atgggccttataagttatcaaggtt

SEQ ID NO: 22568 - DNA, 25 bp, Canis familiaris
atggggattctaatgttctaagggt

SEQ ID NO: 22569 - DNA, 25 bp, Canis familiaris
atggctggaaacttgttcaaagggt

SEQ ID NO: 22570 - DNA, 25 bp, Canis familiaris
atggttgtagccttttacacagtag

SEQ ID NO: 22571 - DNA, 25 bp, Canis familiaris
atggtagtcgccgtgcctaccatgg

SEQ ID NO: 22572 - DNA, 25 bp, Canis familiaris
atggatagactcgcaggtatacgga

SEQ ID NO: 22573 - DNA, 25 bp, Canis familiaris
atggtatttcctatggatccgagat

SEQ ID NO: 22574 - DNA, 25 bp, Canis familiaris
atgtgatgagtctctctctgagtcc

SEQ ID NO: 22575 - DNA, 25 bp, Canis familiaris
atgtgggcccacttggagaccaaat

SEQ ID NO: 22576 - DNA, 25 bp, Canis familiaris
atggatacccactggactccaaaaa

SEQ ID NO: 22577 - DNA, 25 bp, Canis familiaris
atggtacgacttatccccaaattca

SEQ ID NO: 22578 - DNA, 25 bp, Canis familiaris
atgtgtaccattatttctaaaaatc

SEQ ID NO: 22579 - DNA, 25 bp, Canis familiaris
atggtgatcacctactttctaacta

SEQ ID NO: 22580 - DNA, 25 bp, Canis familiaris
atgtgtatcaactatgctctgtcca

SEQ ID NO: 22581 - DNA, 25 bp, Canis familiaris
atgtgtgaaacaatgttgtccaaca

SEQ ID NO: 22582 - DNA, 25 bp, Canis familiaris
atgtgataaagctgggtggcccctg

SEQ ID NO: 22583 - DNA, 25 bp, Canis familiaris
aggaattgatttctgggcagccctg

SEQ ID NO: 22584 - DNA, 25 bp, Canis familiaris
atggacatctttgtccggatcctgg

SEQ ID NO: 22585 - DNA, 25 bp, Canis familiaris
atgtgaacatttttgcctgttcatt

SEQ ID NO: 22586 - DNA, 25 bp, Canis familiaris
atgtgtacagggtccttttgcaata

SEQ ID NO: 22587 - DNA, 25 bp, Canis familiaris
atggtgacactggcgctttttaaga

SEQ ID NO: 22588 - DNA, 25 bp, Canis familiaris
atggaaacccagcggtgtcacagca

SEQ ID NO: 22589 - DNA, 25 bp, Canis familiaris
atggataagctccgtgtgcagtgcc

SEQ ID NO: 22590 - DNA, 25 bp, Canis familiaris
atgtctagcatgtccagtatgagtg

SEQ ID NO: 22591 - DNA, 25 bp, Canis familiaris
atggtggcatgagcatctgggatgt

SEQ ID NO: 22592 - DNA, 25 bp, Canis familiaris
atgtgcttctgagtatgtgtgtgta

SEQ ID NO: 22593 - DNA, 25 bp, Canis familiaris
atgtctcatctgtgtgcatgtgtgt

SEQ ID NO: 22594 - DNA, 25 bp, Canis familiaris
atgtgacatcgactgctggtggcat

SEQ ID NO: 22595 - DNA, 25 bp, Canis familiaris
atgtgatgccagcagcctgcatgga

SEQ ID NO: 22596 - DNA, 25 bp, Canis familiaris
atggagcaatctcgcagtgcagtgg

SEQ ID NO: 22597 - DNA, 25 bp, Canis familiaris
atggagcaatctcgcagtgcagtgg

SEQ ID NO: 22598 - DNA, 25 bp, Canis familiaris
atggactacttggcagccttggcca

SEQ ID NO: 22599 - DNA, 25 bp, Canis familiaris
atggactacttggcagccttggcca

SEQ ID NO: 22600 - DNA, 25 bp, Canis familiaris
atggatcaagcttggaccgggcagt

SEQ ID NO: 22601 - DNA, 25 bp, Canis familiaris
atggatgtggtgtgagcaccccgtg

SEQ ID NO: 22602 - DNA, 25 bp, Canis familiaris
atggggcatgtaggtcagccccggc

SEQ ID NO: 22603 - DNA, 25 bp, Canis familiaris
atgggactgtaccagatgatcgtcg

SEQ ID NO: 22604 - DNA, 25 bp, Canis familiaris
atgtggaggctaaccagatgctggg

SEQ ID NO: 22605 - DNA, 25 bp, Canis familiaris
atgtggaggccaaccagatgctggg

SEQ ID NO: 22606 - DNA, 25 bp, Canis familiaris
atgtgccaactcagccagtgtgaat

SEQ ID NO: 22607 - DNA, 25 bp, Canis familiaris
atgtctaactgtagcatttgatacc

SEQ ID NO: 22608 - DNA, 25 bp, Canis familiaris
atggtaacatgcttgctatagaaat

SEQ ID NO: 22609 - DNA, 25 bp, Canis familiaris
atggggactgtctatgtgataatat

SEQ ID NO: 22610 - DNA, 25 bp, Canis familiaris
atgtgcaggatcgctttgaagtcaa

SEQ ID NO: 22611 - DNA, 25 bp, Canis familiaris
atgtcagagcccggattccagacaa

SEQ ID NO: 22612 - DNA, 25 bp, Canis familiaris
atgtcaatgctcaggagccctgtaa

SEQ ID NO: 22613 - DNA, 25 bp, Canis familiaris
atgtcaatgctcaggtgagttcttc

SEQ ID NO: 22614 - DNA, 25 bp, Canis familiaris
atgtcactgctcttgaggtttctgc

SEQ ID NO: 22615 - DNA, 25 bp, Canis familiaris
atgtgagctcacttgaatcttcctt

SEQ ID NO: 22616 - DNA, 25 bp, Canis familiaris
atgtgaccacttttgttggcctggg

SEQ ID NO: 22617 - DNA, 25 bp, Canis familiaris
atggaccagcaggaggtcggccttt

SEQ ID NO: 22618 - DNA, 25 bp, Canis familiaris
atgtgaacacaggggcacggactca

SEQ ID NO: 22619 - DNA, 25 bp, Canis familiaris
atgtgaacattgcttgctccgaaat

SEQ ID NO: 22620 - DNA, 25 bp, Canis familiaris
atgggactaggtatgctcagaagct

SEQ ID NO: 22621 - DNA, 25 bp, Canis familiaris
atggaggctggagttgctgacaaga

SEQ ID NO: 22622 - DNA, 25 bp, Canis familiaris
atgtgtgtctggtatttacagcaaa

SEQ ID NO: 22623 - DNA, 25 bp, Canis familiaris
atgtgtgcattgactttgtaccaag

SEQ ID NO: 22624 - DNA, 25 bp, Canis familiaris
atggagcatttcaagttaacagtgg

SEQ ID NO: 22625 - DNA, 25 bp, Canis familiaris
aggcatgttgtgagaataaatgagg

SEQ ID NO: 22626 - DNA, 25 bp, Canis familiaris
atgtggtctgaaggagcatatggga

SEQ ID NO: 22627 - DNA, 25 bp, Canis familiaris
atgggcctgaattgccatgggagtg

SEQ ID NO: 22628 - DNA, 25 bp, Canis familiaris
atgtggcagctgattccatgtctgg

SEQ ID NO: 22629 - DNA, 25 bp, Canis familiaris
atgggcagcttcgatccattctggt

SEQ ID NO: 22630 - DNA, 25 bp, Canis familiaris
atgggctttgagtaattatgatgta

SEQ ID NO: 22631 - DNA, 25 bp, Canis familiaris
atgtgggttggattaattgttattg

SEQ ID NO: 22632 - DNA, 25 bp, Canis familiaris
atgtgatggttacgattttgtttgt

SEQ ID NO: 22633 - DNA, 25 bp, Canis familiaris
atgtgttcaccatgtgtttgtttgc

SEQ ID NO: 22634 - DNA, 25 bp, Canis familiaris
atgtgtctccctatgattcttattg

SEQ ID NO: 22635 - DNA, 25 bp, Canis familiaris
atgggctctcctaatgcaatgacat

SEQ ID NO: 22636 - DNA, 25 bp, Canis familiaris
atgtgttcccccaaagaataccagc

SEQ ID NO: 22637 - DNA, 25 bp, Canis familiaris
atgtgtgtgcgcgcaccatagtttc

SEQ ID NO: 22638 - DNA, 25 bp, Canis familiaris
atgtgagtgcatgtgagcctgagtg

SEQ ID NO: 22639 - DNA, 25 bp, Canis familiaris
atggtgctgctggagagcgagcagt

SEQ ID NO: 22640 - DNA, 25 bp, Canis familiaris
aggttcgaacagcacaatgtcacta

SEQ ID NO: 22641 - DNA, 25 bp, Canis familiaris
atggttctgaacactacactactag

SEQ ID NO: 22642 - DNA, 25 bp, Canis familiaris
atggatttaacatctttcttctatg

SEQ ID NO: 22643 - DNA, 25 bp, Canis familiaris
atgtgtctctaatattttcttctaa

SEQ ID NO: 22644 - DNA, 25 bp, Canis familiaris
atgtcttgcaaataatcttccttta

SEQ ID NO: 22645 - DNA, 25 bp, Canis familiaris
atgtcctgaatatgcacttcttatt

SEQ ID NO: 22646 - DNA, 25 bp, Canis familiaris
atgggctctcagtgagcttccaaat

SEQ ID NO: 22647 - DNA, 25 bp, Canis familiaris
atgggaccatgacacaccaaacatg

SEQ ID NO: 22648 - DNA, 25 bp, Canis familiaris
atgggacctatgaagcaactgaaga

SEQ ID NO: 22649 - DNA, 25 bp, Canis familiaris
atgggcatcagttatacaagggaca

SEQ ID NO: 22650 - DNA, 25 bp, Canis familiaris
atgggtgatgttgagaagggaaatt

SEQ ID NO: 22651 - DNA, 25 bp, Canis familiaris
atgtgtgtgtgtatggcaaaaaata

SEQ ID NO: 22652 - DNA, 25 bp, Canis familiaris
atgtgcttgttttgcgctatggaac

SEQ ID NO: 22653 - DNA, 25 bp, Canis familiaris
atgtccacgctgttggtggaaacac

SEQ ID NO: 22654 - DNA, 25 bp, Canis familiaris
atgtctaagtacttgggccacacac

SEQ ID NO: 22655 - DNA, 25 bp, Canis familiaris
atgggaagtatgtgggctcgcgccc

SEQ ID NO: 22656 - DNA, 25 bp, Canis familiaris
atggtgactttgtggacattccgca

SEQ ID NO: 22657 - DNA, 25 bp, Canis familiaris
atgtgtccgtcgtggatctgacgtg

SEQ ID NO: 22658 - DNA, 25 bp, Canis familiaris
atgtgttttcaagagcatctgaaat

SEQ ID NO: 22659 - DNA, 25 bp, Canis familiaris
atgtgatgtttccagtgaataataa

SEQ ID NO: 22660 - DNA, 25 bp, Canis familiaris
aggttttccaggctcaatcataggc

SEQ ID NO: 22661 - DNA, 25 bp, Canis familiaris
atggtttgttcttggtgtttgggca

SEQ ID NO: 22662 - DNA, 25 bp, Canis familiaris
atggtttgtaccttagcgttctggg

SEQ ID NO: 22663 - DNA, 25 bp, Canis familiaris
atggttttctccttcataatactgg

SEQ ID NO: 22664 - DNA, 25 bp, Canis familiaris
aggcttcttttaccatagtctcgga

SEQ ID NO: 22665 - DNA, 25 bp, Canis familiaris
aggtcccttcagcaaagttcgaact

SEQ ID NO: 22666 - DNA, 25 bp, Canis familiaris
atggtacaagtcccaaggttgccga

SEQ ID NO: 22667 - DNA, 25 bp, Canis familiaris
aggctccaaagtccagcaggtttag

SEQ ID NO: 22668 - DNA, 25 bp, Canis familiaris
accatggtagaatccggttttgcca

SEQ ID NO: 22669 - DNA, 25 bp, Canis familiaris
agcctaaaaacctgcacttgttgcc

SEQ ID NO: 22670 - DNA, 25 bp, Canis familiaris
aggaggaacccctcatcttgatgag

SEQ ID NO: 22671 - DNA, 25 bp, Canis familiaris
aggacaaaaccctgcctattgagct

SEQ ID NO: 22672 - DNA, 25 bp, Canis familiaris
aggacagaagaataccaccaagagt

SEQ ID NO: 22673 - DNA, 25 bp, Canis familiaris
agttcagaaaacaccaagcaaagta

SEQ ID NO: 22674 - DNA, 25 bp, Canis familiaris
ttcctcgttaacacgacaccacgga

SEQ ID NO: 22675 - DNA, 25 bp, Canis familiaris
atgggagtttacagggccccaggat

SEQ ID NO: 22676 - DNA, 25 bp, Canis familiaris
atgggagtttgttttggcaccacaa

SEQ ID NO: 22677 - DNA, 25 bp, Canis familiaris
atgggactttgaattgttccccagc

SEQ ID NO: 22678 - DNA, 25 bp, Canis familiaris
atggattatcgatattttccccact

SEQ ID NO: 22679 - DNA, 25 bp, Canis familiaris
aggttgctgctaaaatttgcctccg

SEQ ID NO: 22680 - DNA, 25 bp, Canis familiaris
atggtttccaaatatctgcacttag

SEQ ID NO: 22681 - DNA, 25 bp, Canis familiaris
atgtgctttccataggaccacgttt

SEQ ID NO: 22682 - DNA, 25 bp, Canis familiaris
atgtgcttctcaataaggacccagt

SEQ ID NO: 22683 - DNA, 25 bp, Canis familiaris
atgtgctgttcatttttggagcctt

SEQ ID NO: 22684 - DNA, 25 bp, Canis familiaris
atgtggaacgtctttgtcagcactg

SEQ ID NO: 22685 - DNA, 25 bp, Canis familiaris
atgtggaacgttttgtcagactgag

SEQ ID NO: 22686 - DNA, 25 bp, Canis familiaris
atgggaaggacttatggcagtaatc

SEQ ID NO: 22687 - DNA, 25 bp, Canis familiaris
atggaacggactccaggacaaccgg

SEQ ID NO: 22688 - DNA, 25 bp, Canis familiaris
atgggaggggctccgtatgcattcc

SEQ ID NO: 22689 - DNA, 25 bp, Canis familiaris
atgtggagttggcacgtggcactgc

SEQ ID NO: 22690 - DNA, 25 bp, Canis familiaris
atgtgtgatttcaccgaggaccaga

SEQ ID NO: 22691 - DNA, 25 bp, Canis familiaris
atgtgtatattctccgcaacagagg

SEQ ID NO: 22692 - DNA, 25 bp, Canis familiaris
atggaattatgaacccacccagtcc

SEQ ID NO: 22693 - DNA, 25 bp, Canis familiaris
atgggtaatgagatcctctagagtc

SEQ ID NO: 22694 - DNA, 25 bp, Canis familiaris
atgggtttaagtttcattgattcaa

SEQ ID NO: 22695 - DNA, 25 bp, Canis familiaris
atgtgttgttacttgtacagtttaa

SEQ ID NO: 22696 - DNA, 25 bp, Canis familiaris
atgtgtgcttttgtctaagtatgtg

SEQ ID NO: 22697 - DNA, 25 bp, Canis familiaris
atggatcttcttggtcgcaaataat

SEQ ID NO: 22698 - DNA, 25 bp, Canis familiaris
atggtttgctttagagccaattttg

SEQ ID NO: 22699 - DNA, 25 bp, Canis familiaris
atggcattagatttagaacaacttc

SEQ ID NO: 22700 - DNA, 25 bp, Canis familiaris
atggcactggtgttacccaactatc

SEQ ID NO: 22701 - DNA, 25 bp, Canis familiaris
atggacgggttgccgaagagctccc

SEQ ID NO: 22702 - DNA, 25 bp, Canis familiaris
aggaaagaagggcaagactcccttg

SEQ ID NO: 22703 - DNA, 25 bp, Canis familiaris
atggtaaagtggtctacacctccct

SEQ ID NO: 22704 - DNA, 25 bp, Canis familiaris
atggcctaagggttacatcagtttc

SEQ ID NO: 22705 - DNA, 25 bp, Canis familiaris
agagcccacaaggggccatcgttgc

SEQ ID NO: 22706 - DNA, 25 bp, Canis familiaris
aggcgtcctacatggaactgcctgc

SEQ ID NO: 22707 - DNA, 25 bp, Canis familiaris
atgtgcttcctcactggaggtggct

SEQ ID NO: 22708 - DNA, 25 bp, Canis familiaris
atggttctgccatttggatggtggc

SEQ ID NO: 22709 - DNA, 25 bp, Canis familiaris
atggtgcccacgttcacatggggct

SEQ ID NO: 22710 - DNA, 25 bp, Canis familiaris
atgtgtcgtcttttcaatggctgta

SEQ ID NO: 22711 - DNA, 25 bp, Canis familiaris
atgtgtcagtcattgcttggggcct

SEQ ID NO: 22712 - DNA, 25 bp, Canis familiaris
atgggcgcggagtatgggtgccttc

SEQ ID NO: 22713 - DNA, 25 bp, Canis familiaris
atggaacaggccttggggcgtacct

SEQ ID NO: 22714 - DNA, 25 bp, Canis familiaris
atggaagggagcaggctggggcccg

SEQ ID NO: 22715 - DNA, 25 bp, Canis familiaris
atggtgggcaacaaggggtggcctt

SEQ ID NO: 22716 - DNA, 25 bp, Canis familiaris
atggtggccaacagaggtgagattg

SEQ ID NO: 22717 - DNA, 25 bp, Canis familiaris
atggtggtcaacacggggcttcacc

SEQ ID NO: 22718 - DNA, 25 bp, Canis familiaris
atgggggcacaaggggaggttcgca

SEQ ID NO: 22719 - DNA, 25 bp, Canis familiaris
atgtggcaggaatgggggcgtccca

SEQ ID NO: 22720 - DNA, 25 bp, Canis familiaris
atggggaagacacacggcgacccca

SEQ ID NO: 22721 - DNA, 25 bp, Canis familiaris
aggggggaaggacagctgctcccct

SEQ ID NO: 22722 - DNA, 25 bp, Canis familiaris
aggcggggacgcaaaagtcactgcc

SEQ ID NO: 22723 - DNA, 25 bp, Canis familiaris
aggggggagggataatacacacata

SEQ ID NO: 22724 - DNA, 25 bp, Canis familiaris
aggaccaggtctggacaaaaaagca

SEQ ID NO: 22725 - DNA, 25 bp, Canis familiaris
atggcacaaggtagcaactcaaatc

SEQ ID NO: 22726 - DNA, 25 bp, Canis familiaris
atgtgacagtgaaacacctcaagtt

SEQ ID NO: 22727 - DNA, 25 bp, Canis familiaris
atggcagcatctacaaccctgaagt

SEQ ID NO: 22728 - DNA, 25 bp, Canis familiaris
atgtgccctaaagtcctatttacta

SEQ ID NO: 22729 - DNA, 25 bp, Canis familiaris
atgtcctgtaacgttctcatttgga

SEQ ID NO: 22730 - DNA, 25 bp, Canis familiaris
atgggatgtggacctactctactgt

SEQ ID NO: 22731 - DNA, 25 bp, Canis familiaris
atgtgcgaaggatccctcgacatat

SEQ ID NO: 22732 - DNA, 25 bp, Canis familiaris
atgggaagtgtacgcccaacacact

SEQ ID NO: 22733 - DNA, 25 bp, Canis familiaris
atggggatgcgtaggaccaaggccc

SEQ ID NO: 22734 - DNA, 25 bp, Canis familiaris
atgtggctgctgaatgggtccaagc

SEQ ID NO: 22735 - DNA, 25 bp, Canis familiaris
atgtggctgttttgcgtagcatcgt

SEQ ID NO: 22736 - DNA, 25 bp, Canis familiaris
atgtgtatgtttttttctcttaggt

SEQ ID NO: 22737 - DNA, 25 bp, Canis familiaris
atgtgtagctttttacctgtaacct

SEQ ID NO: 22738 - DNA, 25 bp, Canis familiaris
atgtctccatttgtacttaagcact

SEQ ID NO: 22739 - DNA, 25 bp, Canis familiaris
atgtctgcttttgctagtgtaatga

SEQ ID NO: 22740 - DNA, 25 bp, Canis familiaris
atgtggcttttgggcagttgattga

SEQ ID NO: 22741 - DNA, 25 bp, Canis familiaris
atgtgatttttgctatttgtatgaa

SEQ ID NO: 22742 - DNA, 25 bp, Canis familiaris
atggcaattcataggtttttagtca

SEQ ID NO: 22743 - DNA, 25 bp, Canis familiaris
atggatatctcattgctttcagata

SEQ ID NO: 22744 - DNA, 25 bp, Canis familiaris
atggtgtatgagacttctcagtgca

SEQ ID NO: 22745 - DNA, 25 bp, Canis familiaris
aggctgtagactcttcattcgttgt

SEQ ID NO: 22746 - DNA, 25 bp, Canis familiaris
atgtgttaactcattcttggtcccc

SEQ ID NO: 22747 - DNA, 25 bp, Canis familiaris
atgtgtataatcttattctctgtgt

SEQ ID NO: 22748 - DNA, 25 bp, Canis familiaris
atgtgtacactagtattcctgagca

SEQ ID NO: 22749 - DNA, 25 bp, Canis familiaris
atgtgtccatacatgttgcctgagg

SEQ ID NO: 22750 - DNA, 25 bp, Canis familiaris
atgtgtcttaattgtgcctgggagg

SEQ ID NO: 22751 - DNA, 25 bp, Canis familiaris
atgtgctttctatgtgcttgggggt

SEQ ID NO: 22752 - DNA, 25 bp, Canis familiaris
atgtgtgtgatattcctgctgtgag

SEQ ID NO: 22753 - DNA, 25 bp, Canis familiaris
atgtgctcagtggagccatctctgc

SEQ ID NO: 22754 - DNA, 25 bp, Canis familiaris
atgtgctatcagccagcaacacgtt

SEQ ID NO: 22755 - DNA, 25 bp, Canis familiaris
atgtgtgtcacacacgacgtcacgc

SEQ ID NO: 22756 - DNA, 25 bp, Canis familiaris
atgggcccagaacggggcatccaag

SEQ ID NO: 22757 - DNA, 25 bp, Canis familiaris
atggtctcgaggtggggagcacgtg

SEQ ID NO: 22758 - DNA, 25 bp, Canis familiaris
atggttcggcaaagcgcttgacgcc

SEQ ID NO: 22759 - DNA, 25 bp, Canis familiaris
atgtgtacttggagcagtgtcccct

SEQ ID NO: 22760 - DNA, 25 bp, Canis familiaris
atgtccacctggaacttgtgacctt

SEQ ID NO: 22761 - DNA, 25 bp, Canis familiaris
atgtcccttcgtaaagtgatactct

SEQ ID NO: 22762 - DNA, 25 bp, Canis familiaris
atgtgccatttcctacagagttgtc

SEQ ID NO: 22763 - DNA, 25 bp, Canis familiaris
atgtgttctttgcaagcgttcttct

SEQ ID NO: 22764 - DNA, 25 bp, Canis familiaris
atgtgtgtttgaagaagctttctct

SEQ ID NO: 22765 - DNA, 25 bp, Canis familiaris
atgggtgctttacactgttgctgct

SEQ ID NO: 22766 - DNA, 25 bp, Canis familiaris
atgtcctgctgttactactgtttgt

SEQ ID NO: 22767 - DNA, 25 bp, Canis familiaris
atgtccttcatatttgactggattt

SEQ ID NO: 22768 - DNA, 25 bp, Canis familiaris
atgtccaaaatgttgatctattata

SEQ ID NO: 22769 - DNA, 25 bp, Canis familiaris
atgtccataactcgtatctcattgg

SEQ ID NO: 22770 - DNA, 25 bp, Canis familiaris
atgtgcccaagctttactactgtgg

SEQ ID NO: 22771 - DNA, 25 bp, Canis familiaris
atgtgatcctactgacagccatcgt

SEQ ID NO: 22772 - DNA, 25 bp, Canis familiaris
atggattaacgccagcaactcggcc

SEQ ID NO: 22773 - DNA, 25 bp, Canis familiaris
atggtctccaagcagacctgggcaa

SEQ ID NO: 22774 - DNA, 25 bp, Canis familiaris
atggttccactgcatgacttgcagg

SEQ ID NO: 22775 - DNA, 25 bp, Canis familiaris
atgggcttcctgctgatgtatgatg

SEQ ID NO: 22776 - DNA, 25 bp, Canis familiaris
atgggcctccaaggagtaagagcct

SEQ ID NO: 22777 - DNA, 25 bp, Canis familiaris
atgggcctgctacatggggacagtt

SEQ ID NO: 22778 - DNA, 25 bp, Canis familiaris
atgggcacatgtagccagggtccac

SEQ ID NO: 22779 - DNA, 25 bp, Canis familiaris
atggtgtcattcacagagttccctg

SEQ ID NO: 22780 - DNA, 25 bp, Canis familiaris
atggtgttgcttacgatgatcgccc

SEQ ID NO: 22781 - DNA, 25 bp, Canis familiaris
atggccttccagagattagcccaac

SEQ ID NO: 22782 - DNA, 25 bp, Canis familiaris
aggtttgcctaggttggctacaact

SEQ ID NO: 22783 - DNA, 25 bp, Canis familiaris
aggtttactggcaattgactaaatg

SEQ ID NO: 22784 - DNA, 25 bp, Canis familiaris
agggttacacctaatggccaactgt

SEQ ID NO: 22785 - DNA, 25 bp, Canis familiaris
cgacggtccggagatggcacaagcg

SEQ ID NO: 22786 - DNA, 25 bp, Canis familiaris
agtcggtcaccgagtgtgtcaagca

SEQ ID NO: 22787 - DNA, 25 bp, Canis familiaris
aggggttagctgagttggcaaagtc

SEQ ID NO: 22788 - DNA, 25 bp, Canis familiaris
atggatggttggaggtgggtagggc

SEQ ID NO: 22789 - DNA, 25 bp, Canis familiaris
aggctggttgtggggaggctttgga

SEQ ID NO: 22790 - DNA, 25 bp, Canis familiaris
atggggttgagtgcttgcctttagc

SEQ ID NO: 22791 - DNA, 25 bp, Canis familiaris
atgggtcactgaggccttttttatt

SEQ ID NO: 22792 - DNA, 25 bp, Canis familiaris
atggtctacgacgcttttataacat

SEQ ID NO: 22793 - DNA, 25 bp, Canis familiaris
atggtacaaacccttttcagagcca

SEQ ID NO: 22794 - DNA, 25 bp, Canis familiaris
atggtagaatccggttttgccagta

SEQ ID NO: 22795 - DNA, 25 bp, Canis familiaris
atggtgggtccatcttttccacaat

SEQ ID NO: 22796 - DNA, 25 bp, Canis familiaris
atggaggggctattgtttgaccctt

SEQ ID NO: 22797 - DNA, 25 bp, Canis familiaris
atggtggaggctttctgtgctacct

SEQ ID NO: 22798 - DNA, 25 bp, Canis familiaris
atggctggggtggttggttccatgg

SEQ ID NO: 22799 - DNA, 25 bp, Canis familiaris
atggaggcaagtgttgccctgtcag

SEQ ID NO: 22800 - DNA, 25 bp, Canis familiaris
aggagttagtccttgaccactagtt

SEQ ID NO: 22801 - DNA, 25 bp, Canis familiaris
agtgcgggaaccttgtacaccgatc

SEQ ID NO: 22802 - DNA, 25 bp, Canis familiaris
atgggggagccacagtgaaccacac

SEQ ID NO: 22803 - DNA, 25 bp, Canis familiaris
atgggagaaccactgagcaaacttt

SEQ ID NO: 22804 - DNA, 25 bp, Canis familiaris
agggcaaggacaaatccaacttaat

SEQ ID NO: 22805 - DNA, 25 bp, Canis familiaris
aggccactagaaactcccagattaa

SEQ ID NO: 22806 - DNA, 25 bp, Canis familiaris
aggacaaatagggcccacaggagaa

SEQ ID NO: 22807 - DNA, 25 bp, Canis familiaris
atggtaaatacggcatttcagggaa

SEQ ID NO: 22808 - DNA, 25 bp, Canis familiaris
atgtccatcaataaggtattagtaa

SEQ ID NO: 22809 - DNA, 25 bp, Canis familiaris
atgtgcgtgcaagcgagttctcgta

SEQ ID NO: 22810 - DNA, 25 bp, Canis familiaris
atgtgccatcaatttagtattccta

SEQ ID NO: 22811 - DNA, 25 bp, Canis familiaris
atgtgctaaggaacttgatgtccaa

SEQ ID NO: 22812 - DNA, 25 bp, Canis familiaris
atgtgccaaggctctatgtcaagta

SEQ ID NO: 22813 - DNA, 25 bp, Canis familiaris
atgtgacatttctcttccatttaga

SEQ ID NO: 22814 - DNA, 25 bp, Canis familiaris
atgtgccatttgttgcttctattgt

SEQ ID NO: 22815 - DNA, 25 bp, Canis familiaris
atgtccaattataatgtcaaagtct

SEQ ID NO: 22816 - DNA, 25 bp, Canis familiaris
atgtccagtatcacactgcaagtgt

SEQ ID NO: 22817 - DNA, 25 bp, Canis familiaris
atgtgctccttaaagcagatcagtg

SEQ ID NO: 22818 - DNA, 25 bp, Canis familiaris
atgtgccctccaaagtaatgtgcct

SEQ ID NO: 22819 - DNA, 25 bp, Canis familiaris
atgtgccctataaaactgagtgtct

SEQ ID NO: 22820 - DNA, 25 bp, Canis familiaris
atggccgctatgtcagcaacgagtt

SEQ ID NO: 22821 - DNA, 25 bp, Canis familiaris
atgtgtggcatttcagaagagattt

SEQ ID NO: 22822 - DNA, 25 bp, Canis familiaris
atgtgtgtcataaaaagcactttta

SEQ ID NO: 22823 - DNA, 25 bp, Canis familiaris
atgtgcccatcccaaatcattattt

SEQ ID NO: 22824 - DNA, 25 bp, Canis familiaris
atggtgcctccggaaatctgttatt

SEQ ID NO: 22825 - DNA, 25 bp, Canis familiaris
atggtttgtctgtgaatttgcttat

SEQ ID NO: 22826 - DNA, 25 bp, Canis familiaris
atgtgttttcagttgctcttatttt

SEQ ID NO: 22827 - DNA, 25 bp, Canis familiaris
atgtgtattttgtccatgctctttc

SEQ ID NO: 22828 - DNA, 25 bp, Canis familiaris
atgtgtatatcttctggcactctca

SEQ ID NO: 22829 - DNA, 25 bp, Canis familiaris
atgtgctcaacaaccagcagttcct

SEQ ID NO: 22830 - DNA, 25 bp, Canis familiaris
atgtgctcaatgtcccagcaatgtc

SEQ ID NO: 22831 - DNA, 25 bp, Canis familiaris
atgtgtattaccgtccatgtctagt

SEQ ID NO: 22832 - DNA, 25 bp, Canis familiaris
atggtgattaccttcacttctcagc

SEQ ID NO: 22833 - DNA, 25 bp, Canis familiaris
atgggatgttcctcaaatctctaga

SEQ ID NO: 22834 - DNA, 25 bp, Canis familiaris
atgggattagcatgtaacctgtaat

SEQ ID NO: 22835 - DNA, 25 bp, Canis familiaris
atggtgtctaccataacccttcatg

SEQ ID NO: 22836 - DNA, 25 bp, Canis familiaris
atggtgactaccttacagacgcgtc

SEQ ID NO: 22837 - DNA, 25 bp, Canis familiaris
atggttcgagactttcaaccaacgc

SEQ ID NO: 22838 - DNA, 25 bp, Canis familiaris
atggttccaattctctgtacacaca

SEQ ID NO: 22839 - DNA, 25 bp, Canis familiaris
atgtgtgtcgcatttactttgacca

SEQ ID NO: 22840 - DNA, 25 bp, Canis familiaris
atgtggtagcctcactttaatgaac

SEQ ID NO: 22841 - DNA, 25 bp, Canis familiaris
atgtggtagacaaagcttccattgt

SEQ ID NO: 22842 - DNA, 25 bp, Canis familiaris
atggattagcatgtacctgtatatt

SEQ ID NO: 22843 - DNA, 25 bp, Canis familiaris
atgtgatcaagatgccccgtgaatt

SEQ ID NO: 22844 - DNA, 25 bp, Canis familiaris
atggtaagatgggctcctcgacatt

SEQ ID NO: 22845 - DNA, 25 bp, Canis familiaris
atgggaagacatagtccccactctc

SEQ ID NO: 22846 - DNA, 25 bp, Canis familiaris
atgggaaaaagaccacctcttccat

SEQ ID NO: 22847 - DNA, 25 bp, Canis familiaris
atgggaaacaagtgatgtgccttca

SEQ ID NO: 22848 - DNA, 25 bp, Canis familiaris
atgggaagaactcctgtgtgccact

SEQ ID NO: 22849 - DNA, 25 bp, Canis familiaris
atgtgtcacagtgtgccttgtgccc

SEQ ID NO: 22850 - DNA, 25 bp, Canis familiaris
atgtgtcagggttctctttagggtt

SEQ ID NO: 22851 - DNA, 25 bp, Canis familiaris
aggtacgtgcccacagtttgggcta

SEQ ID NO: 22852 - DNA, 25 bp, Canis familiaris
aggctccgccccagagttggggcag

SEQ ID NO: 22853 - DNA, 25 bp, Canis familiaris
aggccctggccgagacaggggagag

SEQ ID NO: 22854 - DNA, 25 bp, Canis familiaris
aggctcctgggggtcaaacaagaag

SEQ ID NO: 22855 - DNA, 25 bp, Canis familiaris
aggctgccatcgtggtctatgacat

SEQ ID NO: 22856 - DNA, 25 bp, Canis familiaris
atggctccttcaaggtcttacttgt

SEQ ID NO: 22857 - DNA, 25 bp, Canis familiaris
atgtgtcctatcaggtcgagatcca

SEQ ID NO: 22858 - DNA, 25 bp, Canis familiaris
atggggcaatgcatggcgcaggacc

SEQ ID NO: 22859 - DNA, 25 bp, Canis familiaris
atgggcagaagctgctccaggacct

SEQ ID NO: 22860 - DNA, 25 bp, Canis familiaris
atggtctgaagaccacccaacactt

SEQ ID NO: 22861 - DNA, 25 bp, Canis familiaris
atggcctgagacacaaagtccactt

SEQ ID NO: 22862 - DNA, 25 bp, Canis familiaris
atggaccaggtggccaagtccaccc

SEQ ID NO: 22863 - DNA, 25 bp, Canis familiaris
atggacacgtctgtgaatgacccct

SEQ ID NO: 22864 - DNA, 25 bp, Canis familiaris
atggtttgtttcgatctgacccagc

SEQ ID NO: 22865 - DNA, 25 bp, Canis familiaris
atggcacattatataatctaccaac

SEQ ID NO: 22866 - DNA, 25 bp, Canis familiaris
atggcaattagcagacagcttctca

SEQ ID NO: 22867 - DNA, 25 bp, Canis familiaris
atggactttgctaggcgcatcttct

SEQ ID NO: 22868 - DNA, 25 bp, Canis familiaris
aggactttcaagtagcatctttacc

SEQ ID NO: 22869 - DNA, 25 bp, Canis familiaris
atgggctataaacagatgatcttca

SEQ ID NO: 22870 - DNA, 25 bp, Canis familiaris
atgggccttgaactcaggatcctga

SEQ ID NO: 22871 - DNA, 25 bp, Canis familiaris
atgggctgctatggtgatcggaacg

SEQ ID NO: 22872 - DNA, 25 bp, Canis familiaris
atgtgtgatgtgtgttcgtccagga

SEQ ID NO: 22873 - DNA, 25 bp, Canis familiaris
atgtgtcatggatagtcccctgcat

SEQ ID NO: 22874 - DNA, 25 bp, Canis familiaris
atggttggagacatcatccaatgcc

SEQ ID NO: 22875 - DNA, 25 bp, Canis familiaris
atgggtgtgcgagagctctgcaccc

SEQ ID NO: 22876 - DNA, 25 bp, Canis familiaris
atggtgttgtactagttgctcctcc

SEQ ID NO: 22877 - DNA, 25 bp, Canis familiaris
atgggtcctgagcagtgtggcccaa

SEQ ID NO: 22878 - DNA, 25 bp, Canis familiaris
atgtgagaccagtccagtcttgcct

SEQ ID NO: 22879 - DNA, 25 bp, Canis familiaris
atgtggacaaagccgtcagcagcct

SEQ ID NO: 22880 - DNA, 25 bp, Canis familiaris
atgtggagaaagtcagctctggcta

SEQ ID NO: 22881 - DNA, 25 bp, Canis familiaris
atggagacaaagccacttcctacct

SEQ ID NO: 22882 - DNA, 25 bp, Canis familiaris
atgggcaaagtgcaggtttaccagg

SEQ ID NO: 22883 - DNA, 25 bp, Canis familiaris
atgggcaatcctgagcccttgactc

SEQ ID NO: 22884 - DNA, 25 bp, Canis familiaris
atggatagatgtatatgcccgtgcc

SEQ ID NO: 22885 - DNA, 25 bp, Canis familiaris
atgggagagcttaaagccccacgga

SEQ ID NO: 22886 - DNA, 25 bp, Canis familiaris
atgtggacacatttcatatccccct

SEQ ID NO: 22887 - DNA, 25 bp, Canis familiaris
atgtgtgtagattgtcaaccctaat

SEQ ID NO: 22888 - DNA, 25 bp, Canis familiaris
atgtgttctcgattcagacctctaa

SEQ ID NO: 22889 - DNA, 25 bp, Canis familiaris
atggcatttctattcgactacgttt

SEQ ID NO: 22890 - DNA, 25 bp, Canis familiaris
atggatctgtctgttcttgaccttg

SEQ ID NO: 22891 - DNA, 25 bp, Canis familiaris
atgtgtgtctgcgatttttaccttc

SEQ ID NO: 22892 - DNA, 25 bp, Canis familiaris
atgtggcagtggtgctatttccttc

SEQ ID NO: 22893 - DNA, 25 bp, Canis familiaris
atgtggacatgatggctgaatctcc

SEQ ID NO: 22894 - DNA, 25 bp, Canis familiaris
atggtgagcatctggacaatcgcgc

SEQ ID NO: 22895 - DNA, 25 bp, Canis familiaris
atggtaatgcatcgtaagatcttga

SEQ ID NO: 22896 - DNA, 25 bp, Canis familiaris
atggtatggctgccttggatctctg

SEQ ID NO: 22897 - DNA, 25 bp, Canis familiaris
atgtgtatcagctttgggaccagaa

SEQ ID NO: 22898 - DNA, 25 bp, Canis familiaris
atgtgttctgttcttgtgccgaaga

SEQ ID NO: 22899 - DNA, 25 bp, Canis familiaris
atgtgatccttttgacaggggacag

SEQ ID NO: 22900 - DNA, 25 bp, Canis familiaris
atggtgcgttgtgacacgtgtacac

SEQ ID NO: 22901 - DNA, 25 bp, Canis familiaris
atggtcctgtgtttatgctggttcc

SEQ ID NO: 22902 - DNA, 25 bp, Canis familiaris
atgtggcactggtgggctggtgatg

SEQ ID NO: 22903 - DNA, 25 bp, Canis familiaris
atgtggacactgtaggtgatacggt

SEQ ID NO: 22904 - DNA, 25 bp, Canis familiaris
atgtggccaccatggtggtcagatt

SEQ ID NO: 22905 - DNA, 25 bp, Canis familiaris
atggtcccctgggtgtacgtgatat

SEQ ID NO: 22906 - DNA, 25 bp, Canis familiaris
atggggacttggacgtcagggatat

SEQ ID NO: 22907 - DNA, 25 bp, Canis familiaris
atgggagagtatccagggcagggaa

SEQ ID NO: 22908 - DNA, 25 bp, Canis familiaris
atggggagcaaggtgggaggggagg

SEQ ID NO: 22909 - DNA, 25 bp, Canis familiaris
atggggaaagggctgagggcaaagg

SEQ ID NO: 22910 - DNA, 25 bp, Canis familiaris
atgggcggtaggcgttgtacgggtg

SEQ ID NO: 22911 - DNA, 25 bp, Canis familiaris
atggccggtaggcgtgtacggtggg

SEQ ID NO: 22912 - DNA, 25 bp, Canis familiaris
aggcccggaaggagtcacgtggcgc

SEQ ID NO: 22913 - DNA, 25 bp, Canis familiaris
aggctcagcgggattactttggggc

SEQ ID NO: 22914 - DNA, 25 bp, Canis familiaris
aggccagcggtgcaaatccatgtgg

SEQ ID NO: 22915 - DNA, 25 bp, Canis familiaris
agatccgctacttgaacttcgtgtg

SEQ ID NO: 22916 - DNA, 25 bp, Canis familiaris
agtccaaccttgcacttgggtgctt

SEQ ID NO: 22917 - DNA, 25 bp, Canis familiaris
atggataaccttaccctggaggctg

SEQ ID NO: 22918 - DNA, 25 bp, Canis familiaris
atgggcaactgtacctgactggagg

SEQ ID NO: 22919 - DNA, 25 bp, Canis familiaris
atggtgagacagttcctacagggcc

SEQ ID NO: 22920 - DNA, 25 bp, Canis familiaris
atggtgagaatggtaaacttggctt

SEQ ID NO: 22921 - DNA, 25 bp, Canis familiaris
atggtgagaccacagactttcctcc

SEQ ID NO: 22922 - DNA, 25 bp, Canis familiaris
atggatgcaacccaagaatccctcc

SEQ ID NO: 22923 - DNA, 25 bp, Canis familiaris
atgtgtcagaggtaatgtgtccgct

SEQ ID NO: 22924 - DNA, 25 bp, Canis familiaris
atgtgtcatcagctttgttattgcc

SEQ ID NO: 22925 - DNA, 25 bp, Canis familiaris
atgtggccgaggactttgattgcac

SEQ ID NO: 22926 - DNA, 25 bp, Canis familiaris
atgggccgaggctgatctattattc

SEQ ID NO: 22927 - DNA, 25 bp, Canis familiaris
atggagccaagcgtcaactatcgat

SEQ ID NO: 22928 - DNA, 25 bp, Canis familiaris
atgggcgctgtcacatacgatacat

SEQ ID NO: 22929 - DNA, 25 bp, Canis familiaris
atggggctgttctatactatgaacc

SEQ ID NO: 22930 - DNA, 25 bp, Canis familiaris
atggggttccaacccaacatctcaa

SEQ ID NO: 22931 - DNA, 25 bp, Canis familiaris
atggaagccttatcaataacataaa

SEQ ID NO: 22932 - DNA, 25 bp, Canis familiaris
atggagtgactcgctgacaaaaaaa

SEQ ID NO: 22933 - DNA, 25 bp, Canis familiaris
atggaggaggtggctatctacaaaa

SEQ ID NO: 22934 - DNA, 25 bp, Canis familiaris
atggggatggttccactagaaatct

SEQ ID NO: 22935 - DNA, 25 bp, Canis familiaris
atgggtaagctaccttaacagatgt

SEQ ID NO: 22936 - DNA, 25 bp, Canis familiaris
atgggtagaggaaattggttgtgta

SEQ ID NO: 22937 - DNA, 25 bp, Canis familiaris
atgggtaggggctagtgggtggctt

SEQ ID NO: 22938 - DNA, 25 bp, Canis familiaris
atgggaggctgccgaaggggtgctc

SEQ ID NO: 22939 - DNA, 25 bp, Canis familiaris
atgtgtttgtgttgtaggtggtgtt

SEQ ID NO: 22940 - DNA, 25 bp, Canis familiaris
aggccttgctgatgaaagctttttc

SEQ ID NO: 22941 - DNA, 25 bp, Canis familiaris
atggtcttctgatttagtcattctt

SEQ ID NO: 22942 - DNA, 25 bp, Canis familiaris
atggtgtacatgttccagtatgatt

SEQ ID NO: 22943 - DNA, 25 bp, Canis familiaris
atgggtagctgtgcagactgagtgt

SEQ ID NO: 22944 - DNA, 25 bp, Canis familiaris
atgtgggagctcgcagcatgtgtgt

SEQ ID NO: 22945 - DNA, 25 bp, Canis familiaris
atggagggctctccactcatgagaa

SEQ ID NO: 22946 - DNA, 25 bp, Canis familiaris
atggagtgtgcattacacttgggaa

SEQ ID NO: 22947 - DNA, 25 bp, Canis familiaris
atgggggcagttttcatggggcatt

SEQ ID NO: 22948 - DNA, 25 bp, Canis familiaris
atgggagcgtcttttcaggtggata

SEQ ID NO: 22949 - DNA, 25 bp, Canis familiaris
atgggagctctgttgtctaagtgtg

SEQ ID NO: 22950 - DNA, 25 bp, Canis familiaris
atggtgagcctgtcgatggggttgg

SEQ ID NO: 22951 - DNA, 25 bp, Canis familiaris
atgggatactgaagagagggagggt

SEQ ID NO: 22952 - DNA, 25 bp, Canis familiaris
atgggtcaccatgcagggagggggc

SEQ ID NO: 22953 - DNA, 25 bp, Canis familiaris
atggtgatccacggggtgacgggga

SEQ ID NO: 22954 - DNA, 25 bp, Canis familiaris
atgggaccacaggggtggctgctct

SEQ ID NO: 22955 - DNA, 25 bp, Canis familiaris
atgggcagtgccaggtggtgtgccg

SEQ ID NO: 22956 - DNA, 25 bp, Canis familiaris
atggtcaggctcggagttggcactc

SEQ ID NO: 22957 - DNA, 25 bp, Canis familiaris
atggacggctaccagattgtctata

SEQ ID NO: 22958 - DNA, 25 bp, Canis familiaris
atggaagtgttctagatggttaata

SEQ ID NO: 22959 - DNA, 25 bp, Canis familiaris
atgggggtgctatttggctttcatt

SEQ ID NO: 22960 - DNA, 25 bp, Canis familiaris
atggatatggtcgctgggctttctt

SEQ ID NO: 22961 - DNA, 25 bp, Canis familiaris
atggagaggatccggggcagctcct

SEQ ID NO: 22962 - DNA, 25 bp, Canis familiaris
atgggaggacgaaggagctgcccct

SEQ ID NO: 22963 - DNA, 25 bp, Canis familiaris
atggtgaagaggaagcgggcccgcc

SEQ ID NO: 22964 - DNA, 25 bp, Canis familiaris
atggtgaagctggatctgctgggcc

SEQ ID NO: 22965 - DNA, 25 bp, Canis familiaris
aggtagcatctgatgctcgggccca

SEQ ID NO: 22966 - DNA, 25 bp, Canis familiaris
atggtacatcatatcctgtgtcctc

SEQ ID NO: 22967 - DNA, 25 bp, Canis familiaris
atgggtccatttatgagcatcttgc

SEQ ID NO: 22968 - DNA, 25 bp, Canis familiaris
atgggaatttctttgcagctcctca

SEQ ID NO: 22969 - DNA, 25 bp, Canis familiaris
atgggctttttggcatcatgctcct

SEQ ID NO: 22970 - DNA, 25 bp, Canis familiaris
atgtggtattcattgggcatgtaga

SEQ ID NO: 22971 - DNA, 25 bp, Canis familiaris
atgggtgttcatgacagcattacaa

SEQ ID NO: 22972 - DNA, 25 bp, Canis familiaris
atgggatgtttggtactcgatcaca

SEQ ID NO: 22973 - DNA, 25 bp, Canis familiaris
atgtggcatgtttgtatatctggct

SEQ ID NO: 22974 - DNA, 25 bp, Canis familiaris
atgtggctgctactgtcatttccat

SEQ ID NO: 22975 - DNA, 25 bp, Canis familiaris
atgtgtgtgcatatgcgcattttcc

SEQ ID NO: 22976 - DNA, 25 bp, Canis familiaris
atgtgtgtgtctgggagttcctcag

SEQ ID NO: 22977 - DNA, 25 bp, Canis familiaris
atgggttctctggcacaacctatgt

SEQ ID NO: 22978 - DNA, 25 bp, Canis familiaris
atggatgatgatattacccctagat

SEQ ID NO: 22979 - DNA, 25 bp, Canis familiaris
atgtggatgcaactaacctcactcc

SEQ ID NO: 22980 - DNA, 25 bp, Canis familiaris
atgggcataagatggcctctgctcc

SEQ ID NO: 22981 - DNA, 25 bp, Canis familiaris
atgggcaaatattggccacagctgc

SEQ ID NO: 22982 - DNA, 25 bp, Canis familiaris
atgggaagcagcttggcttcacagc

SEQ ID NO: 22983 - DNA, 25 bp, Canis familiaris
atggggacatgaggcctgtcactgt

SEQ ID NO: 22984 - DNA, 25 bp, Canis familiaris
atgggctcacaagtgcttgctttct

SEQ ID NO: 22985 - DNA, 25 bp, Canis familiaris
atgggcatgtaactgtgtgctccct

SEQ ID NO: 22986 - DNA, 25 bp, Canis familiaris
atgggatgtgtgtcatgtgtgcatg

SEQ ID NO: 22987 - DNA, 25 bp, Canis familiaris
atggtcatgctgccgcaggatgatc

SEQ ID NO: 22988 - DNA, 25 bp, Canis familiaris
aggccatgctaggcacattgcacta

SEQ ID NO: 22989 - DNA, 25 bp, Canis familiaris
aggcatgcagccaaatcaatcctat

SEQ ID NO: 22990 - DNA, 25 bp, Canis familiaris
atggtagcctcattcaatacatcat

SEQ ID NO: 22991 - DNA, 25 bp, Canis familiaris
atggggccttcagatatcatcctat

SEQ ID NO: 22992 - DNA, 25 bp, Canis familiaris
atggcaggcattgcacaacttccta

SEQ ID NO: 22993 - DNA, 25 bp, Canis familiaris
atggcagctgtgagaacactcttct

SEQ ID NO: 22994 - DNA, 25 bp, Canis familiaris
atggcagttattagttctcccttag

SEQ ID NO: 22995 - DNA, 25 bp, Canis familiaris
atggactgaattatgtctcccccaa

SEQ ID NO: 22996 - DNA, 25 bp, Canis familiaris
atggactgaactgtgtcccaccaac

SEQ ID NO: 22997 - DNA, 25 bp, Canis familiaris
agtccgaaccggagcagacgacagc

SEQ ID NO: 22998 - DNA, 25 bp, Canis familiaris
atgtgggaacgctgcaggcgactac

SEQ ID NO: 22999 - DNA, 25 bp, Canis familiaris
atggggcaagcgtgggcaagtggca

SEQ ID NO: 23000 - DNA, 25 bp, Canis familiaris
aggctgtggtggtggagtagtcgct

SEQ ID NO: 23001 - DNA, 25 bp, Canis familiaris
aggctggcacgccacatgtggtagt

SEQ ID NO: 23002 - DNA, 25 bp, Canis familiaris
atggtggcagctggcagtgtggtgg

SEQ ID NO: 23003 - DNA, 25 bp, Canis familiaris
atgtggccagggcctgaggcttggg

SEQ ID NO: 23004 - DNA, 25 bp, Canis familiaris
atggcgctaggcgtgtacgttggga

SEQ ID NO: 23005 - DNA, 25 bp, Canis familiaris
atggggatggctatacaactctgaa

SEQ ID NO: 23006 - DNA, 25 bp, Canis familiaris
atggtgaatggccctaccactccaa

SEQ ID NO: 23007 - DNA, 25 bp, Canis familiaris
atggccacggctgcttccagctcct

SEQ ID NO: 23008 - DNA, 25 bp, Canis familiaris
atggcccaaatgttaatagtcccga

SEQ ID NO: 23009 - DNA, 25 bp, Canis familiaris
atggctccccggatgatggtccgga

SEQ ID NO: 23010 - DNA, 25 bp, Canis familiaris
atggtccccaggtcttggatctggg

SEQ ID NO: 23011 - DNA, 25 bp, Canis familiaris
atggttccacagttttgtctctagt

SEQ ID NO: 23012 - DNA, 25 bp, Canis familiaris
atggttaagcgagttctgcctctgg

SEQ ID NO: 23013 - DNA, 25 bp, Canis familiaris
atggtgtgaagcagatacctcttga

SEQ ID NO: 23014 - DNA, 25 bp, Canis familiaris
atggggcatgagagagatcctgatc

SEQ ID NO: 23015 - DNA, 25 bp, Canis familiaris
atgggagcaacttgtcatgcctgca

SEQ ID NO: 23016 - DNA, 25 bp, Canis familiaris
atggagcacaccatgtcactacagc

SEQ ID NO: 23017 - DNA, 25 bp, Canis familiaris
atggagagcaccaagtctggccaga

SEQ ID NO: 23018 - DNA, 25 bp, Canis familiaris
atggaagcagccaagtgcccatcaa

SEQ ID NO: 23019 - DNA, 25 bp, Canis familiaris
atggagcagcgtgagtgaccacctg

SEQ ID NO: 23020 - DNA, 25 bp, Canis familiaris
atgtggagctggaagtgcctcctct

SEQ ID NO: 23021 - DNA, 25 bp, Canis familiaris
atgtggtcgtgattatgtccgccta

SEQ ID NO: 23022 - DNA, 25 bp, Canis familiaris
atggcttagtgattgcttctctgga

SEQ ID NO: 23023 - DNA, 25 bp, Canis familiaris
atggcttgtgggtttcttcaaagga

SEQ ID NO: 23024 - DNA, 25 bp, Canis familiaris
atggctcgggaactctgtttaggga

SEQ ID NO: 23025 - DNA, 25 bp, Canis familiaris
atggccgggaaagggctgactgggg

SEQ ID NO: 23026 - DNA, 25 bp, Canis familiaris
aggcccgagaaagcgcagggacagc

SEQ ID NO: 23027 - DNA, 25 bp, Canis familiaris
aggacctaaaccagcaggcagcact

SEQ ID NO: 23028 - DNA, 25 bp, Canis familiaris
aggacgcctaagacggaagcagatc

SEQ ID NO: 23029 - DNA, 25 bp, Canis familiaris
atggcttcttgaaacgtgaaacact

SEQ ID NO: 23030 - DNA, 25 bp, Canis familiaris
atggtgccttgaaatctatgacctc

SEQ ID NO: 23031 - DNA, 25 bp, Canis familiaris
atggctgctagtttattagacttca

SEQ ID NO: 23032 - DNA, 25 bp, Canis familiaris
atggttaacatttctgaagccatat

SEQ ID NO: 23033 - DNA, 25 bp, Canis familiaris
atggtatcagaattcctcaaacagg

SEQ ID NO: 23034 - DNA, 25 bp, Canis familiaris
atggcctcagaatgactgcaagact

SEQ ID NO: 23035 - DNA, 25 bp, Canis familiaris
atggcggcgcaataatagaagtaca

SEQ ID NO: 23036 - DNA, 25 bp, Canis familiaris
atgggggcattaattacacacacac

SEQ ID NO: 23037 - DNA, 25 bp, Canis familiaris
atggtgggatctttaatccagtgat

SEQ ID NO: 23038 - DNA, 25 bp, Canis familiaris
atggtgagtttcttttctagcttcc

SEQ ID NO: 23039 - DNA, 25 bp, Canis familiaris
atgggattctctctggattggctat

SEQ ID NO: 23040 - DNA, 25 bp, Canis familiaris
atggagatttcgccatcgttggcct

SEQ ID NO: 23041 - DNA, 25 bp, Canis familiaris
atggaatcttgcttatatttagcgc

SEQ ID NO: 23042 - DNA, 25 bp, Canis familiaris
atggttttcttaatttcttgacttg

SEQ ID NO: 23043 - DNA, 25 bp, Canis familiaris
atggtcttgggttatattttggctt

SEQ ID NO: 23044 - DNA, 25 bp, Canis familiaris
atgtggctcattattattttgtggc

SEQ ID NO: 23045 - DNA, 25 bp, Canis familiaris
atggtgtgcatttttctttgagagg

SEQ ID NO: 23046 - DNA, 25 bp, Canis familiaris
atgggtcttcctggtattgatggca

SEQ ID NO: 23047 - DNA, 25 bp, Canis familiaris
atgggccaattaggcatttgagagc

SEQ ID NO: 23048 - DNA, 25 bp, Canis familiaris
atgggccaagacagagttgaagcca

SEQ ID NO: 23049 - DNA, 25 bp, Canis familiaris
atgggcacaaccgagattggaacca

SEQ ID NO: 23050 - DNA, 25 bp, Canis familiaris
atgggcaaaccatgcttgtggggat

SEQ ID NO: 23051 - DNA, 25 bp, Canis familiaris
atggaccaaccatttttgcctggtt

SEQ ID NO: 23052 - DNA, 25 bp, Canis familiaris
atggcacccacctcttagggtggtt

SEQ ID NO: 23053 - DNA, 25 bp, Canis familiaris
atggcctacatggcctccaaggagt

SEQ ID NO: 23054 - DNA, 25 bp, Canis familiaris
atggcactccgcatctgaagataga

SEQ ID NO: 23055 - DNA, 25 bp, Canis familiaris
atggcaccattcaacgcaagctaaa

SEQ ID NO: 23056 - DNA, 25 bp, Canis familiaris
atggcaactctcaaaacctacagga

SEQ ID NO: 23057 - DNA, 25 bp, Canis familiaris
atggagactgtggcaagaagaaagg

SEQ ID NO: 23058 - DNA, 25 bp, Canis familiaris
atggatgacttggaatttgaggggc

SEQ ID NO: 23059 - DNA, 25 bp, Canis familiaris
atggagtttgggttcttggggcaga

SEQ ID NO: 23060 - DNA, 25 bp, Canis familiaris
atgggttagggaatcaagaggtgca

SEQ ID NO: 23061 - DNA, 25 bp, Canis familiaris
atggggtggggtgcagtgaggctgg

SEQ ID NO: 23062 - DNA, 25 bp, Canis familiaris
atgggacttggggcacagggtcttg

SEQ ID NO: 23063 - DNA, 25 bp, Canis familiaris
atgggagaagggctggggccttggt

SEQ ID NO: 23064 - DNA, 25 bp, Canis familiaris
atggccatcataagggggggctttg

SEQ ID NO: 23065 - DNA, 25 bp, Canis familiaris
aggcctgcaacaggcaggtcccgtg

SEQ ID NO: 23066 - DNA, 25 bp, Canis familiaris
atggcaccgatcagggtgcctgggt

SEQ ID NO: 23067 - DNA, 25 bp, Canis familiaris
atgggccatgtatcgggcactgagg

SEQ ID NO: 23068 - DNA, 25 bp, Canis familiaris
atggggcgtatggcgtgtacgcgtg

SEQ ID NO: 23069 - DNA, 25 bp, Canis familiaris
atgggaggtctgagttccctgtgat

SEQ ID NO: 23070 - DNA, 25 bp, Canis familiaris
atggatgttgttgtgttctccttct

SEQ ID NO: 23071 - DNA, 25 bp, Canis familiaris
atggcagttttcagcttgttctatt

SEQ ID NO: 23072 - DNA, 25 bp, Canis familiaris
atggggtttcattgttttgcactta

SEQ ID NO: 23073 - DNA, 25 bp, Canis familiaris
atgggttgttaatttcagtcctgta

SEQ ID NO: 23074 - DNA, 25 bp, Canis familiaris
atggagtttttatctaacgctggga

SEQ ID NO: 23075 - DNA, 25 bp, Canis familiaris
atgggttttggaaatccctctggtg

SEQ ID NO: 23076 - DNA, 25 bp, Canis familiaris
atggggttcttaattttctctgtgt

SEQ ID NO: 23077 - DNA, 25 bp, Canis familiaris
atggggtcaataatcactcttctct

SEQ ID NO: 23078 - DNA, 25 bp, Canis familiaris
atggggatccaaaccatgcttgctt

SEQ ID NO: 23079 - DNA, 25 bp, Canis familiaris
atggagttccattaggcagtttttt

SEQ ID NO: 23080 - DNA, 25 bp, Canis familiaris
atgggagactactgaggctcttttc

SEQ ID NO: 23081 - DNA, 25 bp, Canis familiaris
atggaaaagttgaaggcttctctta

SEQ ID NO: 23082 - DNA, 25 bp, Canis familiaris
atggacccgaagccagacattcttt

SEQ ID NO: 23083 - DNA, 25 bp, Canis familiaris
atggaccaaaatcaccatgttttac

SEQ ID NO: 23084 - DNA, 25 bp, Canis familiaris
atggggagctggaccccatggttcc

SEQ ID NO: 23085 - DNA, 25 bp, Canis familiaris
atgggaggatgggcgtcctgagtca

SEQ ID NO: 23086 - DNA, 25 bp, Canis familiaris
atgggcaagatgctgcagttcgtgc

SEQ ID NO: 23087 - DNA, 25 bp, Canis familiaris
atggcagtgaagctgcagcttctga

SEQ ID NO: 23088 - DNA, 25 bp, Canis familiaris
atggcaatgaagtgtcctatgaaac

SEQ ID NO: 23089 - DNA, 25 bp, Canis familiaris
atggcacatgaattggtgttataac

SEQ ID NO: 23090 - DNA, 25 bp, Canis familiaris
atggaaaatatgcattttactttta

SEQ ID NO: 23091 - DNA, 25 bp, Canis familiaris
atggggagcgtgcattttactgtat

SEQ ID NO: 23092 - DNA, 25 bp, Canis familiaris
aggggaggctgacacttattcttta

SEQ ID NO: 23093 - DNA, 25 bp, Canis familiaris
atggctggagagtgtccttattctg

SEQ ID NO: 23094 - DNA, 25 bp, Canis familiaris
atggtggcaggttccccatattatt

SEQ ID NO: 23095 - DNA, 25 bp, Canis familiaris
atgggatgagtttcccactatgtgg

SEQ ID NO: 23096 - DNA, 25 bp, Canis familiaris
atgggaagttgtcctgtctttgtgc

SEQ ID NO: 23097 - DNA, 25 bp, Canis familiaris
atgggaagtcatgcctgatctctac

SEQ ID NO: 23098 - DNA, 25 bp, Canis familiaris
atgggaagtcatgcctgatctctac

SEQ ID NO: 23099 - DNA, 25 bp, Canis familiaris
atgggtactcatcatgctgttcttt

SEQ ID NO: 23100 - DNA, 25 bp, Canis familiaris
atgggtaccatattgctttcagctt

SEQ ID NO: 23101 - DNA, 25 bp, Canis familiaris
atggtgctggacattgcttgttgtt

SEQ ID NO: 23102 - DNA, 25 bp, Canis familiaris
atggtgctgaaaatctccttgcctg

SEQ ID NO: 23103 - DNA, 25 bp, Canis familiaris
atggacgatgaaattgcggcgctag

SEQ ID NO: 23104 - DNA, 25 bp, Canis familiaris
atggagctatgacctgggaccaatg

SEQ ID NO: 23105 - DNA, 25 bp, Canis familiaris
atgggcatatacagcaacacacaat

SEQ ID NO: 23106 - DNA, 25 bp, Canis familiaris
atggatgaataatacagagcacaga

SEQ ID NO: 23107 - DNA, 25 bp, Canis familiaris
atggtgacaaacctagtgctcaaca

SEQ ID NO: 23108 - DNA, 25 bp, Canis familiaris
atggatacagaagctacacacacac

SEQ ID NO: 23109 - DNA, 25 bp, Canis familiaris
atggtaagaaaggaacacacacaca

SEQ ID NO: 23110 - DNA, 25 bp, Canis familiaris
aggctccaacgagaaccaggccatc

SEQ ID NO: 23111 - DNA, 25 bp, Canis familiaris
aggtcaacttaccaaccgtgaagca

SEQ ID NO: 23112 - DNA, 25 bp, Canis familiaris
atgggaactcattccattgcctgga

SEQ ID NO: 23113 - DNA, 25 bp, Canis familiaris
atggtgggctcatgccatgatgggg

SEQ ID NO: 23114 - DNA, 25 bp, Canis familiaris
atgggggccaggccagaggttgcac

SEQ ID NO: 23115 - DNA, 25 bp, Canis familiaris
atgggagaccagagcggctgctatc

SEQ ID NO: 23116 - DNA, 25 bp, Canis familiaris
atgggaacaatgtggcctgcatcct

SEQ ID NO: 23117 - DNA, 25 bp, Canis familiaris
atgggagacaagtgccttctctgct

SEQ ID NO: 23118 - DNA, 25 bp, Canis familiaris
atgggggccacatgtgcttttgtgt

SEQ ID NO: 23119 - DNA, 25 bp, Canis familiaris
atggttttcacatccgagtgcggct

SEQ ID NO: 23120 - DNA, 25 bp, Canis familiaris
aggctcttgtcaagcccaaggaggt

SEQ ID NO: 23121 - DNA, 25 bp, Canis familiaris
atggtcttgccaaaatgaaagaaat

SEQ ID NO: 23122 - DNA, 25 bp, Canis familiaris
atggtcctgacgaagatgaaggaaa

SEQ ID NO: 23123 - DNA, 25 bp, Canis familiaris
atggccaaaccatagaaggaggcaa

SEQ ID NO: 23124 - DNA, 25 bp, Canis familiaris
atggcctaacactttgaagagagaa

SEQ ID NO: 23125 - DNA, 25 bp, Canis familiaris
aggtccagacctgctggaaagtctg

SEQ ID NO: 23126 - DNA, 25 bp, Canis familiaris
aggctttggctcagttggaattcag

SEQ ID NO: 23127 - DNA, 25 bp, Canis familiaris
aggctgtggttatgcccaagattca

SEQ ID NO: 23128 - DNA, 25 bp, Canis familiaris
atggttactttcatcctagttcaca

SEQ ID NO: 23129 - DNA, 25 bp, Canis familiaris
atggagtttttcttctcttatatac

SEQ ID NO: 23130 - DNA, 25 bp, Canis familiaris
atggagcttacattctttgctctaa

SEQ ID NO: 23131 - DNA, 25 bp, Canis familiaris
atgggtgtacattgctttatggata

SEQ ID NO: 23132 - DNA, 25 bp, Canis familiaris
atggtgtctagttctgtgtcaaaca

SEQ ID NO: 23133 - DNA, 25 bp, Canis familiaris
atggtgaaagcttttgccaaagatg

SEQ ID NO: 23134 - DNA, 25 bp, Canis familiaris
atgggacacactgcttctgcaaagt

SEQ ID NO: 23135 - DNA, 25 bp, Canis familiaris
atgggaccattgacttcccggagtt

SEQ ID NO: 23136 - DNA, 25 bp, Canis familiaris
aggccacgttgtatccggatagtct

SEQ ID NO: 23137 - DNA, 25 bp, Canis familiaris
agcccaaggcgtgatcctggaaacc

SEQ ID NO: 23138 - DNA, 25 bp, Canis familiaris
atggcccgggatacactcaggaata

SEQ ID NO: 23139 - DNA, 25 bp, Canis familiaris
atggctgctcagttgaagatctagg

SEQ ID NO: 23140 - DNA, 25 bp, Canis familiaris
atggcatttatggcaagcattttgt

SEQ ID NO: 23141 - DNA, 25 bp, Canis familiaris
aggcatcggtgccacgcatcttcat

SEQ ID NO: 23142 - DNA, 25 bp, Canis familiaris
atggcgcatggggaggagcgatcat

SEQ ID NO: 23143 - DNA, 25 bp, Canis familiaris
atggctcaagcctggaagatgatgt

SEQ ID NO: 23144 - DNA, 25 bp, Canis familiaris
atggtaatcactggccacatgtggc

SEQ ID NO: 23145 - DNA, 25 bp, Canis familiaris
aggctaatcagggatcactgggtgg

SEQ ID NO: 23146 - DNA, 25 bp, Canis familiaris
atggctgataacccatcctgggatg

SEQ ID NO: 23147 - DNA, 25 bp, Canis familiaris
atggctgccaactattttgaggatg

SEQ ID NO: 23148 - DNA, 25 bp, Canis familiaris
atgggtcccctttgatggtgatgac

SEQ ID NO: 23149 - DNA, 25 bp, Canis familiaris
atggtgtccccagggcatgaagaca

SEQ ID NO: 23150 - DNA, 25 bp, Canis familiaris
atggctaccccagagacaatatgct

SEQ ID NO: 23151 - DNA, 25 bp, Canis familiaris
aggccatcccctgagaaaacataat

SEQ ID NO: 23152 - DNA, 25 bp, Canis familiaris
aggcctcccacatcaaggccaaagc

SEQ ID NO: 23153 - DNA, 25 bp, Canis familiaris
aggcctccctaagctactacaaggc

SEQ ID NO: 23154 - DNA, 25 bp, Canis familiaris
aggccctcctggtactaatagcaat

SEQ ID NO: 23155 - DNA, 25 bp, Canis familiaris
atgggtcccttgtatgtacataatt

SEQ ID NO: 23156 - DNA, 25 bp, Canis familiaris
atggggccctggagctgcaaaatcc

SEQ ID NO: 23157 - DNA, 25 bp, Canis familiaris
atggggcccaggaagcaaactgctc

SEQ ID NO: 23158 - DNA, 25 bp, Canis familiaris
atggggacctggcagcagaagccgc

SEQ ID NO: 23159 - DNA, 25 bp, Canis familiaris
aggcgtcggctgcaaatgcagagcc

SEQ ID NO: 23160 - DNA, 25 bp, Canis familiaris
aggctgtaaatgccaagaaagatgc

SEQ ID NO: 23161 - DNA, 25 bp, Canis familiaris
aggcgccaaatcaatgagatccgtc

SEQ ID NO: 23162 - DNA, 25 bp, Canis familiaris
atggccctactgagattgtgcagac

SEQ ID NO: 23163 - DNA, 25 bp, Canis familiaris
atggcccgcgctggagtttcaatac

SEQ ID NO: 23164 - DNA, 25 bp, Canis familiaris
aggcccggctggacattttaaagat

SEQ ID NO: 23165 - DNA, 25 bp, Canis familiaris
aggccgcggctgtgatttttaaaca

SEQ ID NO: 23166 - DNA, 25 bp, Canis familiaris
aggtccgtctggcaacgtctaggac

SEQ ID NO: 23167 - DNA, 25 bp, Canis familiaris
atggtccctgggtgacgtgattgga

SEQ ID NO: 23168 - DNA, 25 bp, Canis familiaris
atggtccctgggtgacgtgattgga

SEQ ID NO: 23169 - DNA, 25 bp, Canis familiaris
atggtgccactctgcatagggatgc

SEQ ID NO: 23170 - DNA, 25 bp, Canis familiaris
atgggatatgtcagcatatgggatg

SEQ ID NO: 23171 - DNA, 25 bp, Canis familiaris
atgggatgctacacatgataaatct

SEQ ID NO: 23172 - DNA, 25 bp, Canis familiaris
atggttgtgcacacatgctaccttc

SEQ ID NO: 23173 - DNA, 25 bp, Canis familiaris
atggcttgtctaaatccacgttcct

SEQ ID NO: 23174 - DNA, 25 bp, Canis familiaris
atggcattgttaccaactgggacga

SEQ ID NO: 23175 - DNA, 25 bp, Canis familiaris
atggctcgtttagtaatgttggaga

SEQ ID NO: 23176 - DNA, 25 bp, Canis familiaris
atggctattttttaatgcctaggat

SEQ ID NO: 23177 - DNA, 25 bp, Canis familiaris
agggttttccgattgaccaggtcat

SEQ ID NO: 23178 - DNA, 25 bp, Canis familiaris
aggccttattcttgagttccaagtt

SEQ ID NO: 23179 - DNA, 25 bp, Canis familiaris
aggccttgttgatagtatgccaaaa

SEQ ID NO: 23180 - DNA, 25 bp, Canis familiaris
aggcctgacctgtcgagatgtcaca

SEQ ID NO: 23181 - DNA, 25 bp, Canis familiaris
atggcagctacttcggcgagatcag

SEQ ID NO: 23182 - DNA, 25 bp, Canis familiaris
atggagcttgctgcccaaggcatga

SEQ ID NO: 23183 - DNA, 25 bp, Canis familiaris
atggaggagcaggccgaccagatac

SEQ ID NO: 23184 - DNA, 25 bp, Canis familiaris
atggaggagcaggccgaccagatac

SEQ ID NO: 23185 - DNA, 25 bp, Canis familiaris
atggcggcaaggactgcaccgcaac

SEQ ID NO: 23186 - DNA, 25 bp, Canis familiaris
atgggtgccagatcacacacaacac

SEQ ID NO: 23187 - DNA, 25 bp, Canis familiaris
atggatggcaagagcccacatcacc

SEQ ID NO: 23188 - DNA, 25 bp, Canis familiaris
atggatacaatgctgcctaccatcg

SEQ ID NO: 23189 - DNA, 25 bp, Canis familiaris
atggatacaatgctgcctaccatcg

SEQ ID NO: 23190 - DNA, 25 bp, Canis familiaris
atggagacagagacttctgcccctg

SEQ ID NO: 23191 - DNA, 25 bp, Canis familiaris
atggtgagatagatgttcccccatc

SEQ ID NO: 23192 - DNA, 25 bp, Canis familiaris
atggtgactgggattccttccagcc

SEQ ID NO: 23193 - DNA, 25 bp, Canis familiaris
atggtatcgatggaaggcccaaacc

SEQ ID NO: 23194 - DNA, 25 bp, Canis familiaris
atggctgacgtttatgcgaccaacg

SEQ ID NO: 23195 - DNA, 25 bp, Canis familiaris
atggtagcagtttctgtatgcagta

SEQ ID NO: 23196 - DNA, 25 bp, Canis familiaris
atggattgcttttgcctgagcagct

SEQ ID NO: 23197 - DNA, 25 bp, Canis familiaris
atggttttttggcagctgcatcctt

SEQ ID NO: 23198 - DNA, 25 bp, Canis familiaris
atggagttcaccgaggactgctcct

SEQ ID NO: 23199 - DNA, 25 bp, Canis familiaris
atggaattacactggaagttgctaa

SEQ ID NO: 23200 - DNA, 25 bp, Canis familiaris
aggaagtaacatgtacagattttta

SEQ ID NO: 23201 - DNA, 25 bp, Canis familiaris
atggaaattatcactgagcagtttg

SEQ ID NO: 23202 - DNA, 25 bp, Canis familiaris
atggccaacttcacatgggtttctc

SEQ ID NO: 23203 - DNA, 25 bp, Canis familiaris
aggcgacgttcgtcatggcgatgtt

SEQ ID NO: 23204 - DNA, 25 bp, Canis familiaris
aggcgactttcggatggtgtttgga

SEQ ID NO: 23205 - DNA, 25 bp, Canis familiaris
aggcctctgtcctgaaggtattctg

SEQ ID NO: 23206 - DNA, 25 bp, Canis familiaris
atggctccgttcaaacacagtgttc

SEQ ID NO: 23207 - DNA, 25 bp, Canis familiaris
atggctccatttaaaacaaacaggc

SEQ ID NO: 23208 - DNA, 25 bp, Canis familiaris
aggcctcatttcacttaatcaccct

SEQ ID NO: 23209 - DNA, 25 bp, Canis familiaris
atggcgattttcacttacatccagc

SEQ ID NO: 23210 - DNA, 25 bp, Canis familiaris
atggatattatcccctataacctgc

SEQ ID NO: 23211 - DNA, 25 bp, Canis familiaris
atggatattatcccttatacctgcc

SEQ ID NO: 23212 - DNA, 25 bp, Canis familiaris
atggaatgtacccttgcaactttgt

SEQ ID NO: 23213 - DNA, 25 bp, Canis familiaris
atggaaatgagcagtcttacttttg

SEQ ID NO: 23214 - DNA, 25 bp, Canis familiaris
atggcaagtgccaggctgatggttt

SEQ ID NO: 23215 - DNA, 25 bp, Canis familiaris
atggaagctcttcgattgctctgtt

SEQ ID NO: 23216 - DNA, 25 bp, Canis familiaris
atggacagcatcttcgtatcaatcc

SEQ ID NO: 23217 - DNA, 25 bp, Canis familiaris
atggataggttgccttccatccatc

SEQ ID NO: 23218 - DNA, 25 bp, Canis familiaris
atggtagtgtggtctgctcaccagt

SEQ ID NO: 23219 - DNA, 25 bp, Canis familiaris
aggctaggtgaggtgcttccagatt

SEQ ID NO: 23220 - DNA, 25 bp, Canis familiaris
aggctggttcaggtgcttgggcacc

SEQ ID NO: 23221 - DNA, 25 bp, Canis familiaris
aggcgctttaggatggagcaccttt

SEQ ID NO: 23222 - DNA, 25 bp, Canis familiaris
aggcctttttggctgataccatctg

SEQ ID NO: 23223 - DNA, 25 bp, Canis familiaris
aggccattctgttggcggagtctgg

SEQ ID NO: 23224 - DNA, 25 bp, Canis familiaris
aggctatcacaggaggcagaggtct

SEQ ID NO: 23225 - DNA, 25 bp, Canis familiaris
agactcaccagcgagctgcgttact

SEQ ID NO: 23226 - DNA, 25 bp, Canis familiaris
aggcccgagccgcctggataccgca

SEQ ID NO: 23227 - DNA, 25 bp, Canis familiaris
atggtccagacacatctggtcccac

SEQ ID NO: 23228 - DNA, 25 bp, Canis familiaris
atggggatacgaatctgaggaccct

SEQ ID NO: 23229 - DNA, 25 bp, Canis familiaris
atggatggaactgagggggcaccta

SEQ ID NO: 23230 - DNA, 25 bp, Canis familiaris
aggctgagaaatgtggggccccact

SEQ ID NO: 23231 - DNA, 25 bp, Canis familiaris
aggctgaagacagagggctccgacc

SEQ ID NO: 23232 - DNA, 25 bp, Canis familiaris
aggccataagaatgtacccgacctt

SEQ ID NO: 23233 - DNA, 25 bp, Canis familiaris
aggcaccaaaaacacaccaggcact

SEQ ID NO: 23234 - DNA, 25 bp, Canis familiaris
aggtcctagggaagacccactgcct

SEQ ID NO: 23235 - DNA, 25 bp, Canis familiaris
aggccactgggccatgggaaaccct

SEQ ID NO: 23236 - DNA, 25 bp, Canis familiaris
aggcgactgagggcacgtgggtgcc

SEQ ID NO: 23237 - DNA, 25 bp, Canis familiaris
aggccactcgtggcatcagtactgc

SEQ ID NO: 23238 - DNA, 25 bp, Canis familiaris
atggtcaccggtactgtatctgagt

SEQ ID NO: 23239 - DNA, 25 bp, Canis familiaris
agcagtcccgggactgcttcgggtg

SEQ ID NO: 23240 - DNA, 25 bp, Canis familiaris
cgagtccctacgagtaccggagact

SEQ ID NO: 23241 - DNA, 25 bp, Canis familiaris
aggatgcccccgagtacagcggggc

SEQ ID NO: 23242 - DNA, 25 bp, Canis familiaris
aggagtccccagtgggagggtggca

SEQ ID NO: 23243 - DNA, 25 bp, Canis familiaris
agtgatttcctagaggcggggggtg

SEQ ID NO: 23244 - DNA, 25 bp, Canis familiaris
actaacccgaccatgggtgggcctg

SEQ ID NO: 23245 - DNA, 25 bp, Canis familiaris
agtaaagggccctgtaggcggcacg

SEQ ID NO: 23246 - DNA, 25 bp, Canis familiaris
agtgaaaggcccatggacttcggac

SEQ ID NO: 23247 - DNA, 25 bp, Canis familiaris
aggaaaacctcatgtacttagctag

SEQ ID NO: 23248 - DNA, 25 bp, Canis familiaris
aggcaaagaccaatcgtcctaacta

SEQ ID NO: 23249 - DNA, 25 bp, Canis familiaris
atggacaagaccaattacttagaaa

SEQ ID NO: 23250 - DNA, 25 bp, Canis familiaris
atggaatattcccctatctctagaa

SEQ ID NO: 23251 - DNA, 25 bp, Canis familiaris
atggacatgttcagggatcgccagg

SEQ ID NO: 23252 - DNA, 25 bp, Canis familiaris
aggaagtacttgcttcctgcaacca

SEQ ID NO: 23253 - DNA, 25 bp, Canis familiaris
atggacccactttgttccaagactc

SEQ ID NO: 23254 - DNA, 25 bp, Canis familiaris
atggactgccccagtcaacgagact

SEQ ID NO: 23255 - DNA, 25 bp, Canis familiaris
atggagtcgctcctgtaaagggcct

SEQ ID NO: 23256 - DNA, 25 bp, Canis familiaris
atggagttgctcctgaaagggcctt

SEQ ID NO: 23257 - DNA, 25 bp, Canis familiaris
atggagtagcaggtgtgccgggcac

SEQ ID NO: 23258 - DNA, 25 bp, Canis familiaris
atggagggagggttgctgcagggaa

SEQ ID NO: 23259 - DNA, 25 bp, Canis familiaris
aggctgggcgggtcgcaagaggaac

SEQ ID NO: 23260 - DNA, 25 bp, Canis familiaris
aggcagggggtccaacacagaaact

SEQ ID NO: 23261 - DNA, 25 bp, Canis familiaris
aggcctgggcctggagaacgaaatc

SEQ ID NO: 23262 - DNA, 25 bp, Canis familiaris
aggcctttgggtacatactgccaac

SEQ ID NO: 23263 - DNA, 25 bp, Canis familiaris
aggccttgctgttaataaagccaac

SEQ ID NO: 23264 - DNA, 25 bp, Canis familiaris
aggcctcatccttgaatacaacacg

SEQ ID NO: 23265 - DNA, 25 bp, Canis familiaris
aggctccccataacggcaaaggaca

SEQ ID NO: 23266 - DNA, 25 bp, Canis familiaris
atggccctcctaagggcacggacac

SEQ ID NO: 23267 - DNA, 25 bp, Canis familiaris
atggcgcaattcttgggggggacag

SEQ ID NO: 23268 - DNA, 25 bp, Canis familiaris
atggccgttcttagttggtggagcg

SEQ ID NO: 23269 - DNA, 25 bp, Canis familiaris
atggaggtgtttactttgtgctgac

SEQ ID NO: 23270 - DNA, 25 bp, Canis familiaris
atggaggtgctgctccatttttctc

SEQ ID NO: 23271 - DNA, 25 bp, Canis familiaris
atggctgtggtttcaatgtttactc

SEQ ID NO: 23272 - DNA, 25 bp, Canis familiaris
atggtgtctgttttcttttatccaa

SEQ ID NO: 23273 - DNA, 25 bp, Canis familiaris
atggcgctgtctgttctagtaacca

SEQ ID NO: 23274 - DNA, 25 bp, Canis familiaris
atggactgagtcctctcaaaaactc

SEQ ID NO: 23275 - DNA, 25 bp, Canis familiaris
atggatgggtcaactaagaaatcaa

SEQ ID NO: 23276 - DNA, 25 bp, Canis familiaris
aggcatggtggcaggaagcgaatac

SEQ ID NO: 23277 - DNA, 25 bp, Canis familiaris
atggtggcggcaagtgatcagtgaa

SEQ ID NO: 23278 - DNA, 25 bp, Canis familiaris
atggtactgagaggtatggatatac

SEQ ID NO: 23279 - DNA, 25 bp, Canis familiaris
atggtgacagtggggatggctataa

SEQ ID NO: 23280 - DNA, 25 bp, Canis familiaris
atggatcacgccaggcatggcttcc

SEQ ID NO: 23281 - DNA, 25 bp, Canis familiaris
atggatcacaccaggcatggttttc

SEQ ID NO: 23282 - DNA, 25 bp, Canis familiaris
atggtccacaaaacattctctttgc

SEQ ID NO: 23283 - DNA, 25 bp, Canis familiaris
atggcccacatcaagaagtctattt

SEQ ID NO: 23284 - DNA, 25 bp, Canis familiaris
atggacagcaccagaagctcttaat

SEQ ID NO: 23285 - DNA, 25 bp, Canis familiaris
atggcactctcgaaatacaattaca

SEQ ID NO: 23286 - DNA, 25 bp, Canis familiaris
atggcagcttctacatacgaattaa

SEQ ID NO: 23287 - DNA, 25 bp, Canis familiaris
atggcagcttctacatacgaattaa

SEQ ID NO: 23288 - DNA, 25 bp, Canis familiaris
atggcaagatctacaaggaagcgaa

SEQ ID NO: 23289 - DNA, 25 bp, Canis familiaris
atggcaggccgttggtagagtagca

SEQ ID NO: 23290 - DNA, 25 bp, Canis familiaris
atggcaggtctgcaggctaggagac

SEQ ID NO: 23291 - DNA, 25 bp, Canis familiaris
atggcaccctgacattcaggaggcg

SEQ ID NO: 23292 - DNA, 25 bp, Canis familiaris
atggatccgtgaaatctgagggcag

SEQ ID NO: 23293 - DNA, 25 bp, Canis familiaris
atggacccatgaaagggggcagttt

SEQ ID NO: 23294 - DNA, 25 bp, Canis familiaris
atggtgacctctaacgtgggcaaca

SEQ ID NO: 23295 - DNA, 25 bp, Canis familiaris
atggtcacccagaactgttgcacaa

SEQ ID NO: 23296 - DNA, 25 bp, Canis familiaris
aggctactccatgcaggttgcctga

SEQ ID NO: 23297 - DNA, 25 bp, Canis familiaris
atggcatcatctgcatggaggatct

SEQ ID NO: 23298 - DNA, 25 bp, Canis familiaris
atggcacttgcccagaagtcatcaa

SEQ ID NO: 23299 - DNA, 25 bp, Canis familiaris
atggacttcttgccaagtcctgtgt

SEQ ID NO: 23300 - DNA, 25 bp, Canis familiaris
aggagttttgcagaggccttgtagg

SEQ ID NO: 23301 - DNA, 25 bp, Canis familiaris
aggcgttttcagagcccaaggacgt

SEQ ID NO: 23302 - DNA, 25 bp, Canis familiaris
aggctgttttgaacccagaagaggc

SEQ ID NO: 23303 - DNA, 25 bp, Canis familiaris
aggctccttgtcaagcccacaagga

SEQ ID NO: 23304 - DNA, 25 bp, Canis familiaris
aggccttattcaacaaacaagccag

SEQ ID NO: 23305 - DNA, 25 bp, Canis familiaris
aggctctctttctcaaaaatgaatg

SEQ ID NO: 23306 - DNA, 25 bp, Canis familiaris
aggcctttggattcagcgtcatatt

SEQ ID NO: 23307 - DNA, 25 bp, Canis familiaris
aggcctacgatatcggaatattttc

SEQ ID NO: 23308 - DNA, 25 bp, Canis familiaris
aggtgattagacccggaatgtttat

SEQ ID NO: 23309 - DNA, 25 bp, Canis familiaris
atggattaaagccaccaacgttata

SEQ ID NO: 23310 - DNA, 25 bp, Canis familiaris
agtattacagagcacacaaaaaaag

SEQ ID NO: 23311 - DNA, 25 bp, Canis familiaris
gattaatacccctcgacgacaagga

SEQ ID NO: 23312 - DNA, 25 bp, Canis familiaris
accacaaacacctgggtaccaagat

SEQ ID NO: 23313 - DNA, 25 bp, Canis familiaris
accacaaactactttgttgccccag

SEQ ID NO: 23314 - DNA, 25 bp, Canis familiaris
acagaaaccctatttgctacccagg

SEQ ID NO: 23315 - DNA, 25 bp, Canis familiaris
tgtagaaaccggtggaccccaggag

SEQ ID NO: 23316 - DNA, 25 bp, Canis familiaris
aacaaatcttcgtgagacccgaccg

SEQ ID NO: 23317 - DNA, 25 bp, Canis familiaris
aggaggtttgctcagaaccggaccg

SEQ ID NO: 23318 - DNA, 25 bp, Canis familiaris
aggatagtatttcaagtcgagggct

SEQ ID NO: 23319 - DNA, 25 bp, Canis familiaris
aggaattatttcacacacggaccat

SEQ ID NO: 23320 - DNA, 25 bp, Canis familiaris
atggactttcttaggaccctgttca

SEQ ID NO: 23321 - DNA, 25 bp, Canis familiaris
atggtttcactaaaggacacagtta

SEQ ID NO: 23322 - DNA, 25 bp, Canis familiaris
cattccatcaataaattcatccctt

SEQ ID NO: 23323 - DNA, 25 bp, Canis familiaris
atggtaatcttctcaagacactcat

SEQ ID NO: 23324 - DNA, 25 bp, Canis familiaris
atggtattgtccaacacagattgtt

SEQ ID NO: 23325 - DNA, 25 bp, Canis familiaris
atggaaatatcactgagcacgttgt

SEQ ID NO: 23326 - DNA, 25 bp, Canis familiaris
atggaagtcatactgcccatgcttt

SEQ ID NO: 23327 - DNA, 25 bp, Canis familiaris
aggaagttgcagaaccggatgttga

SEQ ID NO: 23328 - DNA, 25 bp, Canis familiaris
aggaagtggcccaggaagctgctga

SEQ ID NO: 23329 - DNA, 25 bp, Canis familiaris
agtgtagttcacgctgaaagatgcc

SEQ ID NO: 23330 - DNA, 25 bp, Canis familiaris
aggctaattagccccaaacagctcc

SEQ ID NO: 23331 - DNA, 25 bp, Canis familiaris
aggtagtctatgcccttaacatgtc

SEQ ID NO: 23332 - DNA, 25 bp, Canis familiaris
aggccaggctcatctttaaattcac

SEQ ID NO: 23333 - DNA, 25 bp, Canis familiaris
aggcctggtctgactctgacaaatt

SEQ ID NO: 23334 - DNA, 25 bp, Canis familiaris
atggtctcactcatatgtgaaattt

SEQ ID NO: 23335 - DNA, 25 bp, Canis familiaris
atggttcctctgttcacaagtgtgt

SEQ ID NO: 23336 - DNA, 25 bp, Canis familiaris
atggtttacatgttccaatatgatt

SEQ ID NO: 23337 - DNA, 25 bp, Canis familiaris
atggttctactgccaaaattgatca

SEQ ID NO: 23338 - DNA, 25 bp, Canis familiaris
atggacttatcaaaaacttgctcaa

SEQ ID NO: 23339 - DNA, 25 bp, Canis familiaris
atggacatggacgcggactatccca

SEQ ID NO: 23340 - DNA, 25 bp, Canis familiaris
atggcactaaaatggttgtcctgca

SEQ ID NO: 23341 - DNA, 25 bp, Canis familiaris
atggaccttatgggactttcctact

SEQ ID NO: 23342 - DNA, 25 bp, Canis familiaris
atggactcatgttggacctactcct

SEQ ID NO: 23343 - DNA, 25 bp, Canis familiaris
atggcccacaagcagatctactact

SEQ ID NO: 23344 - DNA, 25 bp, Canis familiaris
aggcctgcccagcaaatactgagct

SEQ ID NO: 23345 - DNA, 25 bp, Canis familiaris
aggcctgacaacttcatctttggtc

SEQ ID NO: 23346 - DNA, 25 bp, Canis familiaris
aggcctcaaccaggtctggtgactc

SEQ ID NO: 23347 - DNA, 25 bp, Canis familiaris
aggctgctcaaggggcttgggacat

SEQ ID NO: 23348 - DNA, 25 bp, Canis familiaris
atggtctgaggtgtgctatggggca

SEQ ID NO: 23349 - DNA, 25 bp, Canis familiaris
atggtcgtggtgtttgggatatgat

SEQ ID NO: 23350 - DNA, 25 bp, Canis familiaris
atggttctgggtttgggcaggattt

SEQ ID NO: 23351 - DNA, 25 bp, Canis familiaris
atggttctggaaagggtgaatgttt

SEQ ID NO: 23352 - DNA, 25 bp, Canis familiaris
atggttgcgggaaggtgtcctgtgt

SEQ ID NO: 23353 - DNA, 25 bp, Canis familiaris
atggttctgcaggaggaggggggat

SEQ ID NO: 23354 - DNA, 25 bp, Canis familiaris
atggtacagcaggcctaggggaggg

SEQ ID NO: 23355 - DNA, 25 bp, Canis familiaris
aggctacagtggctgaggggggccc

SEQ ID NO: 23356 - DNA, 25 bp, Canis familiaris
aggcgcgcctgggcgaggaggaggt

SEQ ID NO: 23357 - DNA, 25 bp, Canis familiaris
aggccagccggggggagaggaggca

SEQ ID NO: 23358 - DNA, 25 bp, Canis familiaris
aggaaaaggcggcgcgggagcgcga

SEQ ID NO: 23359 - DNA, 25 bp, Canis familiaris
atggaagccagggcagggtggggcg

SEQ ID NO: 23360 - DNA, 25 bp, Canis familiaris
aggaaggggcctggcgttgaggctg

SEQ ID NO: 23361 - DNA, 25 bp, Canis familiaris
aggcagcggggtgacaggtaggcgg

SEQ ID NO: 23362 - DNA, 25 bp, Canis familiaris
aggccaagtttctacaggaagcgag

SEQ ID NO: 23363 - DNA, 25 bp, Canis familiaris
aggccaagttctgccggcagaaagc

SEQ ID NO: 23364 - DNA, 25 bp, Canis familiaris
agtcctacagcctcctgaggaaggc

SEQ ID NO: 23365 - DNA, 25 bp, Canis familiaris
agatcccacatctcccagaagtggg

SEQ ID NO: 23366 - DNA, 25 bp, Canis familiaris
agtccctcatgcgaatccaattgct

SEQ ID NO: 23367 - DNA, 25 bp, Canis familiaris
agtacgccaaactctattgctgtag

SEQ ID NO: 23368 - DNA, 25 bp, Canis familiaris
aggccggctaactcttgttggaggc

SEQ ID NO: 23369 - DNA, 25 bp, Canis familiaris
atggtagggaactcttgctgtggtg

SEQ ID NO: 23370 - DNA, 25 bp, Canis familiaris
atggaagtgaaacccgttgcttgct

SEQ ID NO: 23371 - DNA, 25 bp, Canis familiaris
aggaagtgcatcaggggttggcccc

SEQ ID NO: 23372 - DNA, 25 bp, Canis familiaris
aggcaggtgcactggtacttgcagc

SEQ ID NO: 23373 - DNA, 25 bp, Canis familiaris
aggacgacgcaggcatgtacatctg

SEQ ID NO: 23374 - DNA, 25 bp, Canis familiaris
atggcaccatccacatataccatgt

SEQ ID NO: 23375 - DNA, 25 bp, Canis familiaris
atggcaactccgtatcaactgatct

SEQ ID NO: 23376 - DNA, 25 bp, Canis familiaris
aggccagatttgtatttctgatgct

SEQ ID NO: 23377 - DNA, 25 bp, Canis familiaris
aggccagtagtgtttattgaatgaa

SEQ ID NO: 23378 - DNA, 25 bp, Canis familiaris
aggccatgctaggtactttgggcaa

SEQ ID NO: 23379 - DNA, 25 bp, Canis familiaris
aggccattttttttaggagcagcat

SEQ ID NO: 23380 - DNA, 25 bp, Canis familiaris
aggccttcctgtttacttatagcat

SEQ ID NO: 23381 - DNA, 25 bp, Canis familiaris
atggtattttttaagcagtatatct

SEQ ID NO: 23382 - DNA, 25 bp, Canis familiaris
atggttgctgtttttaagtgtgtgt

SEQ ID NO: 23383 - DNA, 25 bp, Canis familiaris
atggcttctcctttttgtggtatta

SEQ ID NO: 23384 - DNA, 25 bp, Canis familiaris
atggatttccgtctctggtgtagct

SEQ ID NO: 23385 - DNA, 25 bp, Canis familiaris
atggcgtaccagtcgttatggtggt

SEQ ID NO: 23386 - DNA, 25 bp, Canis familiaris
atggcgacacattaggtttgagggg

SEQ ID NO: 23387 - DNA, 25 bp, Canis familiaris
atggctcacacgtgcttttgttgtg

SEQ ID NO: 23388 - DNA, 25 bp, Canis familiaris
atggcttttgttgttctgattgcac

SEQ ID NO: 23389 - DNA, 25 bp, Canis familiaris
atggctgttctgagtttctgagggc

SEQ ID NO: 23390 - DNA, 25 bp, Canis familiaris
atggctttcttcctgatatcatgca

SEQ ID NO: 23391 - DNA, 25 bp, Canis familiaris
atggccatagcttgccatgactcct

SEQ ID NO: 23392 - DNA, 25 bp, Canis familiaris
atggccatagcttgccatgactcct

SEQ ID NO: 23393 - DNA, 25 bp, Canis familiaris
atggccatagcttgccatgactcct

SEQ ID NO: 23394 - DNA, 25 bp, Canis familiaris
aggcctactggtaggcctctccaac

SEQ ID NO: 23395 - DNA, 25 bp, Canis familiaris
aggcctatgtggaggccaaccagat

SEQ ID NO: 23396 - DNA, 25 bp, Canis familiaris
aggcctatgtggaggctaaccagat

SEQ ID NO: 23397 - DNA, 25 bp, Canis familiaris
atggcgtcacggagggacctctgaa

SEQ ID NO: 23398 - DNA, 25 bp, Canis familiaris
atggctccctggaggaggccatgct

SEQ ID NO: 23399 - DNA, 25 bp, Canis familiaris
atggctcccatcgtgggagcgaacg

SEQ ID NO: 23400 - DNA, 25 bp, Canis familiaris
atggcccctctggaaagctgtggcg

SEQ ID NO: 23401 - DNA, 25 bp, Canis familiaris
aggccacactgagttatggtgctgg

SEQ ID NO: 23402 - DNA, 25 bp, Canis familiaris
aggccaactacaaagggcatcctgg

SEQ ID NO: 23403 - DNA, 25 bp, Canis familiaris
aggccaagcatgtccgggagtgcct

SEQ ID NO: 23404 - DNA, 25 bp, Canis familiaris
aggctgacgaggcgggcagtgtgta

SEQ ID NO: 23405 - DNA, 25 bp, Canis familiaris
aggctgaggttgtgaggagactgtc

SEQ ID NO: 23406 - DNA, 25 bp, Canis familiaris
aggcgaagtctacagcgcaacagcc

SEQ ID NO: 23407 - DNA, 25 bp, Canis familiaris
atggcaagaatgtccaagccctagc

SEQ ID NO: 23408 - DNA, 25 bp, Canis familiaris
aggcggaagttcaaccactgagcca

SEQ ID NO: 23409 - DNA, 25 bp, Canis familiaris
atggaggtactctaagccactttca

SEQ ID NO: 23410 - DNA, 25 bp, Canis familiaris
atggagggactccagacattccttc

SEQ ID NO: 23411 - DNA, 25 bp, Canis familiaris
actgattgtaccgaacttacgatca

SEQ ID NO: 23412 - DNA, 25 bp, Canis familiaris
aggttgtcccagggctgtacaataa

SEQ ID NO: 23413 - DNA, 25 bp, Canis familiaris
atggttatcaccgatcgcattgaaa

SEQ ID NO: 23414 - DNA, 25 bp, Canis familiaris
atggctgttccttcatctgtaaaat

SEQ ID NO: 23415 - DNA, 25 bp, Canis familiaris
atggctgtatgcaattatcttaaaa

SEQ ID NO: 23416 - DNA, 25 bp, Canis familiaris
atggcagatatctcattgtaaaaga

SEQ ID NO: 23417 - DNA, 25 bp, Canis familiaris
atggctgccatctgcaagccagaaa

SEQ ID NO: 23418 - DNA, 25 bp, Canis familiaris
aggctgccgctcctaggagagaaca

SEQ ID NO: 23419 - DNA, 25 bp, Canis familiaris
aggcccccaataggcaagagccgga

SEQ ID NO: 23420 - DNA, 25 bp, Canis familiaris
aggttcccaattccggtctgggatg

SEQ ID NO: 23421 - DNA, 25 bp, Canis familiaris
atggaattcaaatacggcttggagt

SEQ ID NO: 23422 - DNA, 25 bp, Canis familiaris
atggaaacaatacacaggatacctt

SEQ ID NO: 23423 - DNA, 25 bp, Canis familiaris
agtcggactcggagcaggtgacgct

SEQ ID NO: 23424 - DNA, 25 bp, Canis familiaris
aggccaaccgcgagaagatgaccca

SEQ ID NO: 23425 - DNA, 25 bp, Canis familiaris
aggccaccttggtgattgtgccacc

SEQ ID NO: 23426 - DNA, 25 bp, Canis familiaris
aggcccctctgtggtgcaggggcac

SEQ ID NO: 23427 - DNA, 25 bp, Canis familiaris
aggccagccttcaggaggtgttggt

SEQ ID NO: 23428 - DNA, 25 bp, Canis familiaris
aggccggattctttaggcttgttgc

SEQ ID NO: 23429 - DNA, 25 bp, Canis familiaris
atggcgtgaatgactctccagcctt

SEQ ID NO: 23430 - DNA, 25 bp, Canis familiaris
atggcactgaattcttaacctatta

SEQ ID NO: 23431 - DNA, 25 bp, Canis familiaris
atggcctgttacaagtactcatctc

SEQ ID NO: 23432 - DNA, 25 bp, Canis familiaris
atggacattatgctaatcactttct

SEQ ID NO: 23433 - DNA, 25 bp, Canis familiaris
atggccaagtgcctaatctttctaa

SEQ ID NO: 23434 - DNA, 25 bp, Canis familiaris
atggccaattggcagtcatatttca

SEQ ID NO: 23435 - DNA, 25 bp, Canis familiaris
atggccgcaattcaatcacatcttc

SEQ ID NO: 23436 - DNA, 25 bp, Canis familiaris
atggcttactgtcaaagcttcattc

SEQ ID NO: 23437 - DNA, 25 bp, Canis familiaris
atggctacacaggcaaatactttga

SEQ ID NO: 23438 - DNA, 25 bp, Canis familiaris
aggccaccaggacgtgacaactaga

SEQ ID NO: 23439 - DNA, 25 bp, Canis familiaris
atggcctgaaggccctgaccagaaa

SEQ ID NO: 23440 - DNA, 25 bp, Canis familiaris
atggccgtggggctgcccagaacat

SEQ ID NO: 23441 - DNA, 25 bp, Canis familiaris
aggctggtaccggtgccgagaattc

SEQ ID NO: 23442 - DNA, 25 bp, Canis familiaris
aggcgacgacctcatcctagagatt

SEQ ID NO: 23443 - DNA, 25 bp, Canis familiaris
aggccacagaacactttagaaacta

SEQ ID NO: 23444 - DNA, 25 bp, Canis familiaris
aggcagaaaatctctttagaacgta

SEQ ID NO: 23445 - DNA, 25 bp, Canis familiaris
atggcaaaaaacctgttcagtcagc

SEQ ID NO: 23446 - DNA, 25 bp, Canis familiaris
atggctaggatttgcgtttctgtgg

SEQ ID NO: 23447 - DNA, 25 bp, Canis familiaris
atggttggacctgtaattctgctgc

SEQ ID NO: 23448 - DNA, 25 bp, Canis familiaris
aggccctacctggatatttcatatc

SEQ ID NO: 23449 - DNA, 25 bp, Canis familiaris
aggcctgtaactctgattctcaatg

SEQ ID NO: 23450 - DNA, 25 bp, Canis familiaris
aggccaaccactctgatgtaattag

SEQ ID NO: 23451 - DNA, 25 bp, Canis familiaris
aggcatcataccttcctaatagctc

SEQ ID NO: 23452 - DNA, 25 bp, Canis familiaris
aggctcaactggtaatgattagctc

SEQ ID NO: 23453 - DNA, 25 bp, Canis familiaris
aggccaaaatcttcacagtagccaa

SEQ ID NO: 23454 - DNA, 25 bp, Canis familiaris
aggccagatacataagcagggtcag

SEQ ID NO: 23455 - DNA, 25 bp, Canis familiaris
atggccgctcacacaacagtgaatc

SEQ ID NO: 23456 - DNA, 25 bp, Canis familiaris
atggcagcccaataacagttacatg

SEQ ID NO: 23457 - DNA, 25 bp, Canis familiaris
atggcacttcaatagaagatggaca

SEQ ID NO: 23458 - DNA, 25 bp, Canis familiaris
atggcttctggtggtagagaggaca

SEQ ID NO: 23459 - DNA, 25 bp, Canis familiaris
aggcattgctgacaggatgcagaag

SEQ ID NO: 23460 - DNA, 25 bp, Canis familiaris
aggcattgctgacaggatgcagaag

SEQ ID NO: 23461 - DNA, 25 bp, Canis familiaris
atggctgtgctactgcatggactgt

SEQ ID NO: 23462 - DNA, 25 bp, Canis familiaris
aggcatgctatccatgcatcaccct

SEQ ID NO: 23463 - DNA, 25 bp, Canis familiaris
atggatcaagctagatcagcattct

SEQ ID NO: 23464 - DNA, 25 bp, Canis familiaris
atggataatgctagaaacccaaatt

SEQ ID NO: 23465 - DNA, 25 bp, Canis familiaris
atggaaatgcttggcgatcccacta

SEQ ID NO: 23466 - DNA, 25 bp, Canis familiaris
atggcagaataacctgctcccatcc

SEQ ID NO: 23467 - DNA, 25 bp, Canis familiaris
atggctgcaaaacctatgctgccct

SEQ ID NO: 23468 - DNA, 25 bp, Canis familiaris
atggctgaaggacacatgtggtgcc

SEQ ID NO: 23469 - DNA, 25 bp, Canis familiaris
atggcttgatggacaaagggctccc

SEQ ID NO: 23470 - DNA, 25 bp, Canis familiaris
aggcttgtggccaagccagttcgcc

SEQ ID NO: 23471 - DNA, 25 bp, Canis familiaris
aggctgtgttggcaccaactcggtg

SEQ ID NO: 23472 - DNA, 25 bp, Canis familiaris
aggcgatgattctgaaacactccgt

SEQ ID NO: 23473 - DNA, 25 bp, Canis familiaris
agggaatcccaagaacccttgcttg

SEQ ID NO: 23474 - DNA, 25 bp, Canis familiaris
agggaaggccaagcaaggcggcgcc

SEQ ID NO: 23475 - DNA, 25 bp, Canis familiaris
atggaaggagccacacaagccgact

SEQ ID NO: 23476 - DNA, 25 bp, Canis familiaris
atggaattggaacactgagtctagt

SEQ ID NO: 23477 - DNA, 25 bp, Canis familiaris
atggcttggaaaggccaattctagg

SEQ ID NO: 23478 - DNA, 25 bp, Canis familiaris
aggctctgtgttgggcacttttata

SEQ ID NO: 23479 - DNA, 25 bp, Canis familiaris
atggctctgggtgagcatgtcctct

SEQ ID NO: 23480 - DNA, 25 bp, Canis familiaris
atggagggcagtgacattgcctgtt

SEQ ID NO: 23481 - DNA, 25 bp, Canis familiaris
atggaggaggtgcctcagggctgtc

SEQ ID NO: 23482 - DNA, 25 bp, Canis familiaris
atggagatgaaggccgtgtgcgtgt

SEQ ID NO: 23483 - DNA, 25 bp, Canis familiaris
atggaggaactctttgtttttctag

SEQ ID NO: 23484 - DNA, 25 bp, Canis familiaris
atggagggaccaactctgttttctc

SEQ ID NO: 23485 - DNA, 25 bp, Canis familiaris
atggcaggtcacaaacctgtcctcc

SEQ ID NO: 23486 - DNA, 25 bp, Canis familiaris
atggagcagtgcgtacaccttacac

SEQ ID NO: 23487 - DNA, 25 bp, Canis familiaris
atggaaatgagttcatctcgtaccc

SEQ ID NO: 23488 - DNA, 25 bp, Canis familiaris
aggcctcctatatgtgttcgtacct

SEQ ID NO: 23489 - DNA, 25 bp, Canis familiaris
aggccctgtaattggaatgagtcca

SEQ ID NO: 23490 - DNA, 25 bp, Canis familiaris
atggccctgctaatgtggaagacac

SEQ ID NO: 23491 - DNA, 25 bp, Canis familiaris
atggccctgctaatgtggaagacac

SEQ ID NO: 23492 - DNA, 25 bp, Canis familiaris
atggccctgctaatgtggaagacac

SEQ ID NO: 23493 - DNA, 25 bp, Canis familiaris
aggcctcgcccaggcagaagagcat

SEQ ID NO: 23494 - DNA, 25 bp, Canis familiaris
aggccatccaagggtagagcatatt

SEQ ID NO: 23495 - DNA, 25 bp, Canis familiaris
atggcatccaaggggtagaatttga

SEQ ID NO: 23496 - DNA, 25 bp, Canis familiaris
atggcatccatgacctggacaacat

SEQ ID NO: 23497 - DNA, 25 bp, Canis familiaris
atggcaagaggcgggctcagaataa

SEQ ID NO: 23498 - DNA, 25 bp, Canis familiaris
aggcacaagcacagagtcagaaagc

SEQ ID NO: 23499 - DNA, 25 bp, Canis familiaris
aggccctgcacatggaagaacaggt

SEQ ID NO: 23500 - DNA, 25 bp, Canis familiaris
aggcccgcagatctaagaccaagga

SEQ ID NO: 23501 - DNA, 25 bp, Canis familiaris
aggcccgcagatctaagaccaagga

SEQ ID NO: 23502 - DNA, 25 bp, Canis familiaris
aggccctgagtagaggaccaggtgt

SEQ ID NO: 23503 - DNA, 25 bp, Canis familiaris
atggacttggattccaggaccctgg

SEQ ID NO: 23504 - DNA, 25 bp, Canis familiaris
atggcacctggtacacaggagcccc

SEQ ID NO: 23505 - DNA, 25 bp, Canis familiaris
atggccctggacatcgagatcgcca

SEQ ID NO: 23506 - DNA, 25 bp, Canis familiaris
aggcctttgactactgagacctacc

SEQ ID NO: 23507 - DNA, 25 bp, Canis familiaris
aggcttgtattcttctaggctatca

SEQ ID NO: 23508 - DNA, 25 bp, Canis familiaris
aggctttggcgcttagagactatag

SEQ ID NO: 23509 - DNA, 25 bp, Canis familiaris
aggcgctgctgcggtgtagtgacat

SEQ ID NO: 23510 - DNA, 25 bp, Canis familiaris
aggctgtgagattgtgttggatgat

SEQ ID NO: 23511 - DNA, 25 bp, Canis familiaris
aggctgcatggcagtggctggtgct

SEQ ID NO: 23512 - DNA, 25 bp, Canis familiaris
atggctgctgtgaacattggggtgc

SEQ ID NO: 23513 - DNA, 25 bp, Canis familiaris
aggcgatgtgctttatggcaggcgc

SEQ ID NO: 23514 - DNA, 25 bp, Canis familiaris
aggcgtggtcacgatggagtcaccc

SEQ ID NO: 23515 - DNA, 25 bp, Canis familiaris
atggctgtctcaagccatgggccac

SEQ ID NO: 23516 - DNA, 25 bp, Canis familiaris
aggctgactgagacctttgacgcta

SEQ ID NO: 23517 - DNA, 25 bp, Canis familiaris
atggaagctggggcttctgccatct

SEQ ID NO: 23518 - DNA, 25 bp, Canis familiaris
atggaagccagggcactgtctgctg

SEQ ID NO: 23519 - DNA, 25 bp, Canis familiaris
atggagaccagggctgtctggctgg

SEQ ID NO: 23520 - DNA, 25 bp, Canis familiaris
atggcaaccagtgggtcaggtctcc

SEQ ID NO: 23521 - DNA, 25 bp, Canis familiaris
atggaaatccttgtactgtctctca

SEQ ID NO: 23522 - DNA, 25 bp, Canis familiaris
aggaaaggctttgacttgtccgcgt

SEQ ID NO: 23523 - DNA, 25 bp, Canis familiaris
aggcaacagtttgatccttgggcca

SEQ ID NO: 23524 - DNA, 25 bp, Canis familiaris
aggaagcctggtgagcttcggcagc

SEQ ID NO: 23525 - DNA, 25 bp, Canis familiaris
atggcaacttggtaagccggtagcg

SEQ ID NO: 23526 - DNA, 25 bp, Canis familiaris
atggaattccaggaacccgagaggg

SEQ ID NO: 23527 - DNA, 25 bp, Canis familiaris
aggctgttccagtatgatcctcaga

SEQ ID NO: 23528 - DNA, 25 bp, Canis familiaris
atggctgttttgttatgccaccctc

SEQ ID NO: 23529 - DNA, 25 bp, Canis familiaris
aggctttctcatttgaccaggccac

SEQ ID NO: 23530 - DNA, 25 bp, Canis familiaris
atggcactttcatctgattgcacca

SEQ ID NO: 23531 - DNA, 25 bp, Canis familiaris
atggaatgtgaatctgcatgtacag

SEQ ID NO: 23532 - DNA, 25 bp, Canis familiaris
atggacctattcgtcagatccgagt

SEQ ID NO: 23533 - DNA, 25 bp, Canis familiaris
atggacaccaggtgcagtgccgcat

SEQ ID NO: 23534 - DNA, 25 bp, Canis familiaris
aggtatccatggtgtgagcccaaag

SEQ ID NO: 23535 - DNA, 25 bp, Canis familiaris
aggttgggtgctgggacacccacgg

SEQ ID NO: 23536 - DNA, 25 bp, Canis familiaris
aggttgggttatggagcacaaagcc

SEQ ID NO: 23537 - DNA, 25 bp, Canis familiaris
aggaggtgttagtggtcagcaagac

SEQ ID NO: 23538 - DNA, 25 bp, Canis familiaris
aggctccttgaagttcgtggaagac

SEQ ID NO: 23539 - DNA, 25 bp, Canis familiaris
atggaccttgaatttggggacactc

SEQ ID NO: 23540 - DNA, 25 bp, Canis familiaris
aggcccttggcttatcggagagcct

SEQ ID NO: 23541 - DNA, 25 bp, Canis familiaris
atggccctctggctttggtggataa

SEQ ID NO: 23542 - DNA, 25 bp, Canis familiaris
aggcaccccaagtttgagtggttca

SEQ ID NO: 23543 - DNA, 25 bp, Canis familiaris
aggccccctaagagatcctgattga

SEQ ID NO: 23544 - DNA, 25 bp, Canis familiaris
aggcaccccttagtcagatattttt

SEQ ID NO: 23545 - DNA, 25 bp, Canis familiaris
aggcactcagtcacagaaggggttt

SEQ ID NO: 23546 - DNA, 25 bp, Canis familiaris
aggcaatcagtaccctggggcagtc

SEQ ID NO: 23547 - DNA, 25 bp, Canis familiaris
aggcatacaaagtcctatgggtgac

SEQ ID NO: 23548 - DNA, 25 bp, Canis familiaris
aggcatgaaccgtcgtttcaggaca

SEQ ID NO: 23549 - DNA, 25 bp, Canis familiaris
atggcatgctatttgtttttaggaa

SEQ ID NO: 23550 - DNA, 25 bp, Canis familiaris
aggctctaccttgttgatgatcgtt

SEQ ID NO: 23551 - DNA, 25 bp, Canis familiaris
aggctccgagttgaccaatggttgg

SEQ ID NO: 23552 - DNA, 25 bp, Canis familiaris
agtctagggtctgcacctttgtata

SEQ ID NO: 23553 - DNA, 25 bp, Canis familiaris
aggctagggtgtgagttacttggta

SEQ ID NO: 23554 - DNA, 25 bp, Canis familiaris
aggcaaccgggaggtctacgtgtgc

SEQ ID NO: 23555 - DNA, 25 bp, Canis familiaris
aggaaaacactgagcacggcaggtg

SEQ ID NO: 23556 - DNA, 25 bp, Canis familiaris
aggaaggaagcgcgcacggagttgc

SEQ ID NO: 23557 - DNA, 25 bp, Canis familiaris
aggtaaggctgcattccagggcttc

SEQ ID NO: 23558 - DNA, 25 bp, Canis familiaris
aggaaacggttcacagagcgctttt

SEQ ID NO: 23559 - DNA, 25 bp, Canis familiaris
aggaaacaggttatgaccactttag

SEQ ID NO: 23560 - DNA, 25 bp, Canis familiaris
aggcaaccacgaaatgtaccctctg

SEQ ID NO: 23561 - DNA, 25 bp, Canis familiaris
atggaacacggaatgtggccccttc

SEQ ID NO: 23562 - DNA, 25 bp, Canis familiaris
atggaaagcccttgtgtgttccttt

SEQ ID NO: 23563 - DNA, 25 bp, Canis familiaris
aggaacccagtgctgctgttcctga

SEQ ID NO: 23564 - DNA, 25 bp, Canis familiaris
atggaaaacagtgtcattctgttaa

SEQ ID NO: 23565 - DNA, 25 bp, Canis familiaris
atggacaccacgcgaagatcgtctg

SEQ ID NO: 23566 - DNA, 25 bp, Canis familiaris
atggcacccaacatgcaagatactc

SEQ ID NO: 23567 - DNA, 25 bp, Canis familiaris
atggccaccaacatgaaaagcccct

SEQ ID NO: 23568 - DNA, 25 bp, Canis familiaris
atggcaagctgatcaagaacaacgc

SEQ ID NO: 23569 - DNA, 25 bp, Canis familiaris
atggcaagctgatcacagaccacgc

SEQ ID NO: 23570 - DNA, 25 bp, Canis familiaris
atggcatcaacacagatccaccgaa

SEQ ID NO: 23571 - DNA, 25 bp, Canis familiaris
atggcagagcaactttctccgggaa

SEQ ID NO: 23572 - DNA, 25 bp, Canis familiaris
atggcaaggacttgctcccgagact

SEQ ID NO: 23573 - DNA, 25 bp, Canis familiaris
aggcgaaagctactccacagaagtt

SEQ ID NO: 23574 - DNA, 25 bp, Canis familiaris
aggcctaagccaccgaggtgttctc

SEQ ID NO: 23575 - DNA, 25 bp, Canis familiaris
atggccaagatgtgtcaagggtttc

SEQ ID NO: 23576 - DNA, 25 bp, Canis familiaris
atggcagggctgggaaagggtctga

SEQ ID NO: 23577 - DNA, 25 bp, Canis familiaris
atggcggcgctggagagggggcgct

SEQ ID NO: 23578 - DNA, 25 bp, Canis familiaris
aggctctctgctgagcagggaggcc

SEQ ID NO: 23579 - DNA, 25 bp, Canis familiaris
atggcttctcgcgggaggaagcgga

SEQ ID NO: 23580 - DNA, 25 bp, Canis familiaris
atggcctactgccggcaggaaggga

SEQ ID NO: 23581 - DNA, 25 bp, Canis familiaris
agtcgtaccccgtcgatgaggatga

SEQ ID NO: 23582 - DNA, 25 bp, Canis familiaris
agtctggtgccagcagccgcggtaa

SEQ ID NO: 23583 - DNA, 25 bp, Canis familiaris
aggctggtgccagacaaagcttgga

SEQ ID NO: 23584 - DNA, 25 bp, Canis familiaris
aggccgatgcttcactaagtcagta

SEQ ID NO: 23585 - DNA, 25 bp, Canis familiaris
aggctcgctttttctcagagacaga

SEQ ID NO: 23586 - DNA, 25 bp, Canis familiaris
aggcttctttattccaggtgtgacg

SEQ ID NO: 23587 - DNA, 25 bp, Canis familiaris
aggctgtcctttttggagatgtagc

SEQ ID NO: 23588 - DNA, 25 bp, Canis familiaris
aggctgacctttttgggatcactgt

SEQ ID NO: 23589 - DNA, 25 bp, Canis familiaris
atggcaacctttttgttaagcttca

SEQ ID NO: 23590 - DNA, 25 bp, Canis familiaris
atggcaaccctttggtaaagctcaa

SEQ ID NO: 23591 - DNA, 25 bp, Canis familiaris
atggaatcacatcttggtacaggac

SEQ ID NO: 23592 - DNA, 25 bp, Canis familiaris
atggaacccagcaggtgcagcaggt

SEQ ID NO: 23593 - DNA, 25 bp, Canis familiaris
aggaagcgcaatctgttcggggttg

SEQ ID NO: 23594 - DNA, 25 bp, Canis familiaris
atggaagccattcggttcctgtaga

SEQ ID NO: 23595 - DNA, 25 bp, Canis familiaris
atggaatgaattctcaacctgtgaa

SEQ ID NO: 23596 - DNA, 25 bp, Canis familiaris
atggaatcttgtctcacatttagat

SEQ ID NO: 23597 - DNA, 25 bp, Canis familiaris
atggcagtttgtcctaatttataaa

SEQ ID NO: 23598 - DNA, 25 bp, Canis familiaris
atggccattttcctaattttcctat

SEQ ID NO: 23599 - DNA, 25 bp, Canis familiaris
aggacttactctcaaacttccacat

SEQ ID NO: 23600 - DNA, 25 bp, Canis familiaris
agagacgatccgaggaacctcccat

SEQ ID NO: 23601 - DNA, 25 bp, Canis familiaris
aggcctgacgtgtggaaccttacaa

SEQ ID NO: 23602 - DNA, 25 bp, Canis familiaris
aggcttgaaggaaggcatccctgcc

SEQ ID NO: 23603 - DNA, 25 bp, Canis familiaris
aggttacggttatccacatcgcaag

SEQ ID NO: 23604 - DNA, 25 bp, Canis familiaris
atggcttaaattacttacccagaag

SEQ ID NO: 23605 - DNA, 25 bp, Canis familiaris
atggctctccaagaccaacggaatc

SEQ ID NO: 23606 - DNA, 25 bp, Canis familiaris
atggcttatcaagtactcgccgctg

SEQ ID NO: 23607 - DNA, 25 bp, Canis familiaris
atggcatgtatatttcctgttcact

SEQ ID NO: 23608 - DNA, 25 bp, Canis familiaris
aggcagtgctaatttgtgtcataca

SEQ ID NO: 23609 - DNA, 25 bp, Canis familiaris
aggagtgcagtattgctctgagcaa

SEQ ID NO: 23610 - DNA, 25 bp, Canis familiaris
aggacatgcgtggagctcagggaac

SEQ ID NO: 23611 - DNA, 25 bp, Canis familiaris
aggaatgagtctcgcctgggaagca

SEQ ID NO: 23612 - DNA, 25 bp, Canis familiaris
aggcaagtgttgccctgtcagaaag

SEQ ID NO: 23613 - DNA, 25 bp, Canis familiaris
atggcaaatgtatctattgagaata

SEQ ID NO: 23614 - DNA, 25 bp, Canis familiaris
atggaagactctgctttgcagctat

SEQ ID NO: 23615 - DNA, 25 bp, Canis familiaris
atggaatgtcttctgttgcctatgt

SEQ ID NO: 23616 - DNA, 25 bp, Canis familiaris
aggccagtctttctatgtctatgac

SEQ ID NO: 23617 - DNA, 25 bp, Canis familiaris
aggccagcggtaactgagactcacc

SEQ ID NO: 23618 - DNA, 25 bp, Canis familiaris
aggccactggtcaatgcagaggcat

SEQ ID NO: 23619 - DNA, 25 bp, Canis familiaris
atggcaaagtgtgtgagctggatga

SEQ ID NO: 23620 - DNA, 25 bp, Canis familiaris
atggaagggctggtggctcagtgct

SEQ ID NO: 23621 - DNA, 25 bp, Canis familiaris
aggcgacggattgagctgagctgct

SEQ ID NO: 23622 - DNA, 25 bp, Canis familiaris
atggcaacgtgctactggtatctat

SEQ ID NO: 23623 - DNA, 25 bp, Canis familiaris
atggcagcatttgtctcgatattct

SEQ ID NO: 23624 - DNA, 25 bp, Canis familiaris
atggccattgggcctggtgagcctg

SEQ ID NO: 23625 - DNA, 25 bp, Canis familiaris
atggccatgtggccacaggggctgt

SEQ ID NO: 23626 - DNA, 25 bp, Canis familiaris
atggccatcatgaacaccaggctct

SEQ ID NO: 23627 - DNA, 25 bp, Canis familiaris
atggcacacatcaacagctgctggc

SEQ ID NO: 23628 - DNA, 25 bp, Canis familiaris
atggcaatgagctcactctggctga

SEQ ID NO: 23629 - DNA, 25 bp, Canis familiaris
atggcagtgtgttacctggtgctca

SEQ ID NO: 23630 - DNA, 25 bp, Canis familiaris
atggctggagtaagcctgcctgcac

SEQ ID NO: 23631 - DNA, 25 bp, Canis familiaris
atggcatgggtgggcagccctgacc

SEQ ID NO: 23632 - DNA, 25 bp, Canis familiaris
atggcagggtgtacacagccgaccc

SEQ ID NO: 23633 - DNA, 25 bp, Canis familiaris
atggctaagtatctgacctgaccct

SEQ ID NO: 23634 - DNA, 25 bp, Canis familiaris
atggcaacagttttgccacccgact

SEQ ID NO: 23635 - DNA, 25 bp, Canis familiaris
cttcaacggccaggaacccgaatct

SEQ ID NO: 23636 - DNA, 25 bp, Canis familiaris
agtcaagtgtgcgaggaacgcggaa

SEQ ID NO: 23637 - DNA, 25 bp, Canis familiaris
atggcggatggcgaggagccggaga

SEQ ID NO: 23638 - DNA, 25 bp, Canis familiaris
aggcagttgcgcgaggtgatcggcg

SEQ ID NO: 23639 - DNA, 25 bp, Canis familiaris
aggcaggtcaaagtgccagcgggtg

SEQ ID NO: 23640 - DNA, 25 bp, Canis familiaris
aggcagagatcatgttccggccggt

SEQ ID NO: 23641 - DNA, 25 bp, Canis familiaris
aggcagagtaccatcaccttaggct

SEQ ID NO: 23642 - DNA, 25 bp, Canis familiaris
aggcaaaggcaccaaacttaggcag

SEQ ID NO: 23643 - DNA, 25 bp, Canis familiaris
aggccgaggccacataggctggtga

SEQ ID NO: 23644 - DNA, 25 bp, Canis familiaris
aggccgaggctgcaaagagcatcgt

SEQ ID NO: 23645 - DNA, 25 bp, Canis familiaris
aggccgaggctgcaaagagcatcgt

SEQ ID NO: 23646 - DNA, 25 bp, Canis familiaris
atggccagaaagcaagaagatgtat

SEQ ID NO: 23647 - DNA, 25 bp, Canis familiaris
atggccagtcaaacacatagcagtg

SEQ ID NO: 23648 - DNA, 25 bp, Canis familiaris
atggcatcattataagctatgagtg

SEQ ID NO: 23649 - DNA, 25 bp, Canis familiaris
atggctcattaaatcagttatggtt

SEQ ID NO: 23650 - DNA, 25 bp, Canis familiaris
atggctcattaaatcagttatggtt

SEQ ID NO: 23651 - DNA, 25 bp, Canis familiaris
atggctcttagatcagcatcctctt

SEQ ID NO: 23652 - DNA, 25 bp, Canis familiaris
atggcctgtgagtcaaatccagccc

SEQ ID NO: 23653 - DNA, 25 bp, Canis familiaris
atggccgctgactactagggcctgc

SEQ ID NO: 23654 - DNA, 25 bp, Canis familiaris
aggcagccagcctagtagtagcctc

SEQ ID NO: 23655 - DNA, 25 bp, Canis familiaris
atggcagaccactgattgaagcctc

SEQ ID NO: 23656 - DNA, 25 bp, Canis familiaris
atggcacactctgagctgtacacct

SEQ ID NO: 23657 - DNA, 25 bp, Canis familiaris
aggccatggtgaagctctactgccc

SEQ ID NO: 23658 - DNA, 25 bp, Canis familiaris
aggccagctggaagattacacatgc

SEQ ID NO: 23659 - DNA, 25 bp, Canis familiaris
aggctactgtgaacattcctctacc

SEQ ID NO: 23660 - DNA, 25 bp, Canis familiaris
aggctgcagctggttgttctggctg

SEQ ID NO: 23661 - DNA, 25 bp, Canis familiaris
atggcacagatgaattttctcgtat

SEQ ID NO: 23662 - DNA, 25 bp, Canis familiaris
atggcatcaaggatcttgcttatca

SEQ ID NO: 23663 - DNA, 25 bp, Canis familiaris
atggcacaggcctcattgctggcca

SEQ ID NO: 23664 - DNA, 25 bp, Canis familiaris
atggcacatggcgtaaggctgccct

SEQ ID NO: 23665 - DNA, 25 bp, Canis familiaris
aggactgccagtaaactcaccaaat

SEQ ID NO: 23666 - DNA, 25 bp, Canis familiaris
aggacatgtctaacacgtgcctcaa

SEQ ID NO: 23667 - DNA, 25 bp, Canis familiaris
aggccttgctgatgacttgcacaat

SEQ ID NO: 23668 - DNA, 25 bp, Canis familiaris
aggcctccgaatactatgagacatc

SEQ ID NO: 23669 - DNA, 25 bp, Canis familiaris
aggcctccgaatactatgagacatc

SEQ ID NO: 23670 - DNA, 25 bp, Canis familiaris
aggcctccgaatactatgagacatc

SEQ ID NO: 23671 - DNA, 25 bp, Canis familiaris
aggcctccgaatactatgagacatc

SEQ ID NO: 23672 - DNA, 25 bp, Canis familiaris
aggcctccgaatactatgagacatc

SEQ ID NO: 23673 - DNA, 25 bp, Canis familiaris
atggcccccaaaattctatcagcaa

SEQ ID NO: 23674 - DNA, 25 bp, Canis familiaris
atggcagggcaccaaattccacaga

SEQ ID NO: 23675 - DNA, 25 bp, Canis familiaris
aggctgaggcagccatgtttcaccg

SEQ ID NO: 23676 - DNA, 25 bp, Canis familiaris
aggctgagatagtctgtttacccca

SEQ ID NO: 23677 - DNA, 25 bp, Canis familiaris
atggctgttcgagttattttcccag

SEQ ID NO: 23678 - DNA, 25 bp, Canis familiaris
atggcatttgctctttgttgaccaa

SEQ ID NO: 23679 - DNA, 25 bp, Canis familiaris
atggcttctcatgctatttctacct

SEQ ID NO: 23680 - DNA, 25 bp, Canis familiaris
atggcattgccagcattcttttctc

SEQ ID NO: 23681 - DNA, 25 bp, Canis familiaris
atggcatttgcagatttttatatta

SEQ ID NO: 23682 - DNA, 25 bp, Canis familiaris
aggcttctcctgttttatatattat

SEQ ID NO: 23683 - DNA, 25 bp, Canis familiaris
atggctgtcccatattttgtatatt

SEQ ID NO: 23684 - DNA, 25 bp, Canis familiaris
aggcgcccagcacaatgatctgtaa

SEQ ID NO: 23685 - DNA, 25 bp, Canis familiaris
aggcctccaacccatatgagtggag

SEQ ID NO: 23686 - DNA, 25 bp, Canis familiaris
aggcctacacctgctagcaggggct

SEQ ID NO: 23687 - DNA, 25 bp, Canis familiaris
atggccttaccatctgggaggagcg

SEQ ID NO: 23688 - DNA, 25 bp, Canis familiaris
aggccttcccaaagaggggacagct

SEQ ID NO: 23689 - DNA, 25 bp, Canis familiaris
atggccatccagcactggttgggga

SEQ ID NO: 23690 - DNA, 25 bp, Canis familiaris
atggccatcaacccagatggggtgg

SEQ ID NO: 23691 - DNA, 25 bp, Canis familiaris
aggccatgactccctcagagatggc

SEQ ID NO: 23692 - DNA, 25 bp, Canis familiaris
aggcacgatgtcccacaggaagttc

SEQ ID NO: 23693 - DNA, 25 bp, Canis familiaris
aggaaatctccagccgaagcttcct

SEQ ID NO: 23694 - DNA, 25 bp, Canis familiaris
aggcagacacttaaccgacctagcc

SEQ ID NO: 23695 - DNA, 25 bp, Canis familiaris
aggaaacttcatattggccaacacc

SEQ ID NO: 23696 - DNA, 25 bp, Canis familiaris
aggaagttacacagaggacaacgct

SEQ ID NO: 23697 - DNA, 25 bp, Canis familiaris
aggaatgttccataccgtatccgtg

SEQ ID NO: 23698 - DNA, 25 bp, Canis familiaris
aggaatttcccaagccagatttttg

SEQ ID NO: 23699 - DNA, 25 bp, Canis familiaris
aggaatgtcccttggcaactgactt

SEQ ID NO: 23700 - DNA, 25 bp, Canis familiaris
aggaattcccagtaagtgcggcttc

SEQ ID NO: 23701 - DNA, 25 bp, Canis familiaris
agtaatttacgtttgcatgtgcctt

SEQ ID NO: 23702 - DNA, 25 bp, Canis familiaris
aggacacctccgcattgaggcaatt

SEQ ID NO: 23703 - DNA, 25 bp, Canis familiaris
aggaccagatcacctgttacggttg

SEQ ID NO: 23704 - DNA, 25 bp, Canis familiaris
aggccaagatcaccatcgtggcggg

SEQ ID NO: 23705 - DNA, 25 bp, Canis familiaris
aggcacaagcaacctgggcttggag

SEQ ID NO: 23706 - DNA, 25 bp, Canis familiaris
aggcgcggaagctggacgaggtgaa

SEQ ID NO: 23707 - DNA, 25 bp, Canis familiaris
aggcgggcagtgtgtacgcaggtgt

SEQ ID NO: 23708 - DNA, 25 bp, Canis familiaris
aggcgcctgggtggcataatcggtt

SEQ ID NO: 23709 - DNA, 25 bp, Canis familiaris
aggacactggtggtgctaactgttt

SEQ ID NO: 23710 - DNA, 25 bp, Canis familiaris
acgagcgtccgcatgctaatcgctt

SEQ ID NO: 23711 - DNA, 25 bp, Canis familiaris
aggaggtgcccaagctgaaggtgtg

SEQ ID NO: 23712 - DNA, 25 bp, Canis familiaris
aggcgtggcttccagtcaaagctgg

SEQ ID NO: 23713 - DNA, 25 bp, Canis familiaris
aggcctgagcttggatttacactgt

SEQ ID NO: 23714 - DNA, 25 bp, Canis familiaris
aggcctttctggatattcctttgtc

SEQ ID NO: 23715 - DNA, 25 bp, Canis familiaris
aggccttttgtgtctagactctttt

SEQ ID NO: 23716 - DNA, 25 bp, Canis familiaris
aggcatttgacacatctgacctctt

SEQ ID NO: 23717 - DNA, 25 bp, Canis familiaris
aggaattacaaggatacacatttat

SEQ ID NO: 23718 - DNA, 25 bp, Canis familiaris
agggatccccagcagatccttttaa

SEQ ID NO: 23719 - DNA, 25 bp, Canis familiaris
aggctacaagcctgaatccttttag

SEQ ID NO: 23720 - DNA, 25 bp, Canis familiaris
aggtacaaccaggacgccttattag

SEQ ID NO: 23721 - DNA, 25 bp, Canis familiaris
aggcaacaaattgacctttgttaga

SEQ ID NO: 23722 - DNA, 25 bp, Canis familiaris
aggaagcctgactggccttgtttaa

SEQ ID NO: 23723 - DNA, 25 bp, Canis familiaris
aggagagttactcatttttcctgag

SEQ ID NO: 23724 - DNA, 25 bp, Canis familiaris
aggagagccttcagtttttagccga

SEQ ID NO: 23725 - DNA, 25 bp, Canis familiaris
agtggagcctgcggcttaatttgac

SEQ ID NO: 23726 - DNA, 25 bp, Canis familiaris
aggctgaagtcggtgctaaactgca

SEQ ID NO: 23727 - DNA, 25 bp, Canis familiaris
atggcccagtgctttggaaatctgc

SEQ ID NO: 23728 - DNA, 25 bp, Canis familiaris
atggcccaagcatttgggaggctct

SEQ ID NO: 23729 - DNA, 25 bp, Canis familiaris
aggccaccagatcatgagggacttc

SEQ ID NO: 23730 - DNA, 25 bp, Canis familiaris
aggctcaccgtcatgacttgattcc

SEQ ID NO: 23731 - DNA, 25 bp, Canis familiaris
aggccacaagtcatactggattagg

SEQ ID NO: 23732 - DNA, 25 bp, Canis familiaris
aggccaaggactcactgtctttggg

SEQ ID NO: 23733 - DNA, 25 bp, Canis familiaris
aggacaagtacttcactctttttca

SEQ ID NO: 23734 - DNA, 25 bp, Canis familiaris
aggacaagctacactacgttggcca

SEQ ID NO: 23735 - DNA, 25 bp, Canis familiaris
aggacaaggctcactaggtttctgg

SEQ ID NO: 23736 - DNA, 25 bp, Canis familiaris
aggataacctgcactggtctacctt

SEQ ID NO: 23737 - DNA, 25 bp, Canis familiaris
aggaaagcagccgctttcgtccata

SEQ ID NO: 23738 - DNA, 25 bp, Canis familiaris
aggatagatccaagtccttcccaat

SEQ ID NO: 23739 - DNA, 25 bp, Canis familiaris
aggaattgactactggttggcccat

SEQ ID NO: 23740 - DNA, 25 bp, Canis familiaris
atggccataactttagttcccagcc

SEQ ID NO: 23741 - DNA, 25 bp, Canis familiaris
atggccaaacttcagtcatgtacct

SEQ ID NO: 23742 - DNA, 25 bp, Canis familiaris
atggccataacactggagtcctcat

SEQ ID NO: 23743 - DNA, 25 bp, Canis familiaris
atggccatagacagtattctcagca

SEQ ID NO: 23744 - DNA, 25 bp, Canis familiaris
atggctgcatagacaggtgaaccaa

SEQ ID NO: 23745 - DNA, 25 bp, Canis familiaris
atggctaatcatagggacccagaag

SEQ ID NO: 23746 - DNA, 25 bp, Canis familiaris
aggccgatcaaggaggtccaaactc

SEQ ID NO: 23747 - DNA, 25 bp, Canis familiaris
aggccaagcaaggcggcgccaaatt

SEQ ID NO: 23748 - DNA, 25 bp, Canis familiaris
aggccaagcaacatgtcggacaact

SEQ ID NO: 23749 - DNA, 25 bp, Canis familiaris
aggccaccataacacaggagaacca

SEQ ID NO: 23750 - DNA, 25 bp, Canis familiaris
aggcccctaaaagaagaagctctgc

SEQ ID NO: 23751 - DNA, 25 bp, Canis familiaris
aggcaccagctatgaaccaggaaga

SEQ ID NO: 23752 - DNA, 25 bp, Canis familiaris
aggaagaggggaacatgctggagaa

SEQ ID NO: 23753 - DNA, 25 bp, Canis familiaris
aggaagagctggggcttgcgttgta

SEQ ID NO: 23754 - DNA, 25 bp, Canis familiaris
aggaaactttccgtgctgatcgatg

SEQ ID NO: 23755 - DNA, 25 bp, Canis familiaris
agggcaaccgaatcttgtagtggac

SEQ ID NO: 23756 - DNA, 25 bp, Canis familiaris
agggaagcccagggttttgctgcga

SEQ ID NO: 23757 - DNA, 25 bp, Canis familiaris
aggcttatgccatacctattttgta

SEQ ID NO: 23758 - DNA, 25 bp, Canis familiaris
aggcctggaaaacccacgtgtggca

SEQ ID NO: 23759 - DNA, 25 bp, Canis familiaris
aggcctggcaacaagtgacctgggt

SEQ ID NO: 23760 - DNA, 25 bp, Canis familiaris
aggcctaggcagaaggcagcctgaa

SEQ ID NO: 23761 - DNA, 25 bp, Canis familiaris
aggccaaccagatgctgggcgatct

SEQ ID NO: 23762 - DNA, 25 bp, Canis familiaris
aggcgcggaagaagctggcacagat

SEQ ID NO: 23763 - DNA, 25 bp, Canis familiaris
aggcccaatcagtgctggatatgca

SEQ ID NO: 23764 - DNA, 25 bp, Canis familiaris
aggcccgtcatctggtggatgaggc

SEQ ID NO: 23765 - DNA, 25 bp, Canis familiaris
aggtctggtacatgtcgaatggtca

SEQ ID NO: 23766 - DNA, 25 bp, Canis familiaris
aggcctcgtaatcgtcgctaagaaa

SEQ ID NO: 23767 - DNA, 25 bp, Canis familiaris
aggacacagtactctttatactata

SEQ ID NO: 23768 - DNA, 25 bp, Canis familiaris
aggacagtattaccggttcgctata

SEQ ID NO: 23769 - DNA, 25 bp, Canis familiaris
aggaagtcattcgcacgttgtctaa

SEQ ID NO: 23770 - DNA, 25 bp, Canis familiaris
aggaattcaccctacgtggtcaact

SEQ ID NO: 23771 - DNA, 25 bp, Canis familiaris
aggaaatgcccctcaatgttgctga

SEQ ID NO: 23772 - DNA, 25 bp, Canis familiaris
aggcaaagccattcttacgtatcct

SEQ ID NO: 23773 - DNA, 25 bp, Canis familiaris
aggccagtacattcctgttttgctc

SEQ ID NO: 23774 - DNA, 25 bp, Canis familiaris
aggccagcaatatgccttcactgtc

SEQ ID NO: 23775 - DNA, 25 bp, Canis familiaris
aggccacaggtacattttgcctcac

SEQ ID NO: 23776 - DNA, 25 bp, Canis familiaris
aggccagcagggacctctgaagcct

SEQ ID NO: 23777 - DNA, 25 bp, Canis familiaris
aggccaacagagacctcgagcagcc

SEQ ID NO: 23778 - DNA, 25 bp, Canis familiaris
aggccatgacagcagaccaggaggt

SEQ ID NO: 23779 - DNA, 25 bp, Canis familiaris
aggccatggatgtcaacctgcatag

SEQ ID NO: 23780 - DNA, 25 bp, Canis familiaris
aggccatggttctttccattatgcc

SEQ ID NO: 23781 - DNA, 25 bp, Canis familiaris
aggctcatgttcatttccaatcctc

SEQ ID NO: 23782 - DNA, 25 bp, Canis familiaris
aggcatcagaacctttcctgaggcc

SEQ ID NO: 23783 - DNA, 25 bp, Canis familiaris
aggctctgcaaacagtccgaagcgc

SEQ ID NO: 23784 - DNA, 25 bp, Canis familiaris
aggctctccaaaccttctgtagcct

SEQ ID NO: 23785 - DNA, 25 bp, Canis familiaris
aggctccactaaaatctctgttgtt

SEQ ID NO: 23786 - DNA, 25 bp, Canis familiaris
aggccacccacatatcttgtatgtg

SEQ ID NO: 23787 - DNA, 25 bp, Canis familiaris
aggtctgggcgatactgtgaagtga

SEQ ID NO: 23788 - DNA, 25 bp, Canis familiaris
aggccgctgggatcaatgtggagtg

SEQ ID NO: 23789 - DNA, 25 bp, Canis familiaris
aggctcagggccccaagtgaagctg

SEQ ID NO: 23790 - DNA, 25 bp, Canis familiaris
aggccagggtccaagagcagagcac

SEQ ID NO: 23791 - DNA, 25 bp, Canis familiaris
aggccaaaatcaaagctgcgcagca

SEQ ID NO: 23792 - DNA, 25 bp, Canis familiaris
aggccaaacataaacacgcatacac

SEQ ID NO: 23793 - DNA, 25 bp, Canis familiaris
aggctcaaacttcacaagctttctc

SEQ ID NO: 23794 - DNA, 25 bp, Canis familiaris
aggccaaacttcaactaagttccat

SEQ ID NO: 23795 - DNA, 25 bp, Canis familiaris
agagccgaacgtgacgacgcggcca

SEQ ID NO: 23796 - DNA, 25 bp, Canis familiaris
aggcggaacgatacggcagcgccgc

SEQ ID NO: 23797 - DNA, 25 bp, Canis familiaris
aggcgagaagctacagggcgcaccc

SEQ ID NO: 23798 - DNA, 25 bp, Canis familiaris
aggctgatgaacccatggagcatta

SEQ ID NO: 23799 - DNA, 25 bp, Canis familiaris
aggcgtgtatgacgctgggcacgtt

SEQ ID NO: 23800 - DNA, 25 bp, Canis familiaris
aggcttttgcagtcttgcaggcagt

SEQ ID NO: 23801 - DNA, 25 bp, Canis familiaris
aggctcattcactgattcggcagct

SEQ ID NO: 23802 - DNA, 25 bp, Canis familiaris
aggccattcagagatacgtgcagct

SEQ ID NO: 23803 - DNA, 25 bp, Canis familiaris
aggccatctcgtgtgttctgagtaa

SEQ ID NO: 23804 - DNA, 25 bp, Canis familiaris
aggcacatcgtttttatctggaaag

SEQ ID NO: 23805 - DNA, 25 bp, Canis familiaris
aggccatctatatattgactggatt

SEQ ID NO: 23806 - DNA, 25 bp, Canis familiaris
aggccactcggtatgactggtctgt

SEQ ID NO: 23807 - DNA, 25 bp, Canis familiaris
aggcggactgttactgagctgcgtt

SEQ ID NO: 23808 - DNA, 25 bp, Canis familiaris
aggcgagtctgcttcaaggttgtga

SEQ ID NO: 23809 - DNA, 25 bp, Canis familiaris
aggcgatgtctagcctggtttgacc

SEQ ID NO: 23810 - DNA, 25 bp, Canis familiaris
aggtagttcctcgtagtgtttcact

SEQ ID NO: 23811 - DNA, 25 bp, Canis familiaris
aggaagttctccaaactggtcctgc

SEQ ID NO: 23812 - DNA, 25 bp, Canis familiaris
aggcagttttccaagcttgtgaggc

SEQ ID NO: 23813 - DNA, 25 bp, Canis familiaris
aggcgttcttgatcttggtgagtgt

SEQ ID NO: 23814 - DNA, 25 bp, Canis familiaris
aggctgattccttactgtgggtgtg

SEQ ID NO: 23815 - DNA, 25 bp, Canis familiaris
aggcatgttctttaagtgaaggggt

SEQ ID NO: 23816 - DNA, 25 bp, Canis familiaris
aggctatttgccatgactgacagag

SEQ ID NO: 23817 - DNA, 25 bp, Canis familiaris
aggccatattgggtgcgtgtgcaca

SEQ ID NO: 23818 - DNA, 25 bp, Canis familiaris
aggccttccagcctctggtgaaggc

SEQ ID NO: 23819 - DNA, 25 bp, Canis familiaris
aggcctctcatcatccggatgaatt

SEQ ID NO: 23820 - DNA, 25 bp, Canis familiaris
atggcctctcacatgcaagagcaag

SEQ ID NO: 23821 - DNA, 25 bp, Canis familiaris
aggcctgctcctggaaggaagtgct

SEQ ID NO: 23822 - DNA, 25 bp, Canis familiaris
aggctccctgctgagcagaaagttg

SEQ ID NO: 23823 - DNA, 25 bp, Canis familiaris
aggccccagctatgagaccgtggcc

SEQ ID NO: 23824 - DNA, 25 bp, Canis familiaris
aggaaccaggaaccagggtggccat

SEQ ID NO: 23825 - DNA, 25 bp, Canis familiaris
aggaaactgaacatcaggcccgctt

SEQ ID NO: 23826 - DNA, 25 bp, Canis familiaris
aggacaacatacacaacctccaatt

SEQ ID NO: 23827 - DNA, 25 bp, Canis familiaris
aggcaaagttgctcaaagcccctta

SEQ ID NO: 23828 - DNA, 25 bp, Canis familiaris
aggcaaagttgttcaaagcctttat

SEQ ID NO: 23829 - DNA, 25 bp, Canis familiaris
aggaaaattgattcacctgtttttg

SEQ ID NO: 23830 - DNA, 25 bp, Canis familiaris
aggaaaggtgctttgccttgcttct

SEQ ID NO: 23831 - DNA, 25 bp, Canis familiaris
aggaagagggtcctcaccagaactc

SEQ ID NO: 23832 - DNA, 25 bp, Canis familiaris
aggaaggcaggaatgaactcacaca

SEQ ID NO: 23833 - DNA, 25 bp, Canis familiaris
agctgaggactgtacctaccaacat

SEQ ID NO: 23834 - DNA, 25 bp, Canis familiaris
aggctggatctgtattctactctcc

SEQ ID NO: 23835 - DNA, 25 bp, Canis familiaris
atggcctattacatcaaccatcctc

SEQ ID NO: 23836 - DNA, 25 bp, Canis familiaris
atggcctaaagcaaagagcgtcccc

SEQ ID NO: 23837 - DNA, 25 bp, Canis familiaris
aggctatatagacccatgccgttcc

SEQ ID NO: 23838 - DNA, 25 bp, Canis familiaris
aggctgatagagccaccacacagtc

SEQ ID NO: 23839 - DNA, 25 bp, Canis familiaris
aggctgccacagtgtcacagctgtg

SEQ ID NO: 23840 - DNA, 25 bp, Canis familiaris
aggccaaagctgttcacatctgtgc

SEQ ID NO: 23841 - DNA, 25 bp, Canis familiaris
aggccacgagtgatagcatctttta

SEQ ID NO: 23842 - DNA, 25 bp, Canis familiaris
aggccatcttgtctagtcatgttca

SEQ ID NO: 23843 - DNA, 25 bp, Canis familiaris
aggccatctgtccttaaatgtccat

SEQ ID NO: 23844 - DNA, 25 bp, Canis familiaris
atggccactgacctaaaatgctctc

SEQ ID NO: 23845 - DNA, 25 bp, Canis familiaris
aggcccagagttacagaatcccagt

SEQ ID NO: 23846 - DNA, 25 bp, Canis familiaris
aggcctgcttgtcacagaatccggc

SEQ ID NO: 23847 - DNA, 25 bp, Canis familiaris
aggcccttgaggtcctgtcccatgg

SEQ ID NO: 23848 - DNA, 25 bp, Canis familiaris
aggccctggaagtctctgatgccta

SEQ ID NO: 23849 - DNA, 25 bp, Canis familiaris
aggaatctggtgtatgtgtgcatgc

SEQ ID NO: 23850 - DNA, 25 bp, Canis familiaris
aggaagctggcacatttgcaccttg

SEQ ID NO: 23851 - DNA, 25 bp, Canis familiaris
aggccagctgattaacttgactttg

SEQ ID NO: 23852 - DNA, 25 bp, Canis familiaris
aggccagctgattagactgcgtgtt

SEQ ID NO: 23853 - DNA, 25 bp, Canis familiaris
atggccacacattcagatacttgtt

SEQ ID NO: 23854 - DNA, 25 bp, Canis familiaris
aggcaatgccattcagtaatttctg

SEQ ID NO: 23855 - DNA, 25 bp, Canis familiaris
aggcagcacctgggttttcttgcct

SEQ ID NO: 23856 - DNA, 25 bp, Canis familiaris
aggatgccctgggttcttggtattc

SEQ ID NO: 23857 - DNA, 25 bp, Canis familiaris
aggcagcttcggatgcttgtggtgt

SEQ ID NO: 23858 - DNA, 25 bp, Canis familiaris
aggccttcgcagattatgtcagcac

SEQ ID NO: 23859 - DNA, 25 bp, Canis familiaris
aggccttcaagacctcaggagacct

SEQ ID NO: 23860 - DNA, 25 bp, Canis familiaris
aggccttcgagggcaagcaagacct

SEQ ID NO: 23861 - DNA, 25 bp, Canis familiaris
aggccaatcaggcgggatagcacct

SEQ ID NO: 23862 - DNA, 25 bp, Canis familiaris
aggccacataggctggtgagcctcc

SEQ ID NO: 23863 - DNA, 25 bp, Canis familiaris
aggccaacagtgttgctgggtctcc

SEQ ID NO: 23864 - DNA, 25 bp, Canis familiaris
aggccgaggagttgcggttctgcac

SEQ ID NO: 23865 - DNA, 25 bp, Canis familiaris
aggcctcagaaattgctgttcctcc

SEQ ID NO: 23866 - DNA, 25 bp, Canis familiaris
aggccatgcaaaggatcttggtctt

SEQ ID NO: 23867 - DNA, 25 bp, Canis familiaris
aggccataacacatttggatcctta

SEQ ID NO: 23868 - DNA, 25 bp, Canis familiaris
aggaataaccatctcgaatacttat

SEQ ID NO: 23869 - DNA, 25 bp, Canis familiaris
aggaaagacaatctctggttttcca

SEQ ID NO: 23870 - DNA, 25 bp, Canis familiaris
aggccagaaagtcatctgttccctc

SEQ ID NO: 23871 - DNA, 25 bp, Canis familiaris
aggccaggaaaatcgtgtcctgccg

SEQ ID NO: 23872 - DNA, 25 bp, Canis familiaris
aggccagctgaagaggccttcctcc

SEQ ID NO: 23873 - DNA, 25 bp, Canis familiaris
aggccgtgaagaagggctcgaccgc

SEQ ID NO: 23874 - DNA, 25 bp, Canis familiaris
aggcctcgaagcagggaggcccgcc

SEQ ID NO: 23875 - DNA, 25 bp, Canis familiaris
aggcccaggagcagctgggcccctg

SEQ ID NO: 23876 - DNA, 25 bp, Canis familiaris
aggtcactaggcggtaggccgactg

SEQ ID NO: 23877 - DNA, 25 bp, Canis familiaris
aggtttagaaggtgcctgctactgc

SEQ ID NO: 23878 - DNA, 25 bp, Canis familiaris
aggtttttagtcagtctcttgccgt

SEQ ID NO: 23879 - DNA, 25 bp, Canis familiaris
agggttttagtgggacgcgatcctg

SEQ ID NO: 23880 - DNA, 25 bp, Canis familiaris
aggcgttttgagaccagacgggaag

SEQ ID NO: 23881 - DNA, 25 bp, Canis familiaris
aggagttcttggagcagaggcgggc

SEQ ID NO: 23882 - DNA, 25 bp, Canis familiaris
aggaattcctggtgtacctggtcct

SEQ ID NO: 23883 - DNA, 25 bp, Canis familiaris
aggaagacccggagatcaaggacct

SEQ ID NO: 23884 - DNA, 25 bp, Canis familiaris
aggaaggccgggagacgagcctgac

SEQ ID NO: 23885 - DNA, 25 bp, Canis familiaris
aggacggagcggccggaatggcctg

SEQ ID NO: 23886 - DNA, 25 bp, Canis familiaris
aggacggtccgggaagtgagctgct

SEQ ID NO: 23887 - DNA, 25 bp, Canis familiaris
aggacggcctccatgacagaaggtt

SEQ ID NO: 23888 - DNA, 25 bp, Canis familiaris
aggaaggctcccagccattgagtac

SEQ ID NO: 23889 - DNA, 25 bp, Canis familiaris
aggacaggcccgggagcctgagtgc

SEQ ID NO: 23890 - DNA, 25 bp, Canis familiaris
agagaacccggagtacctggggctg

SEQ ID NO: 23891 - DNA, 25 bp, Canis familiaris
aggaagatcctgggagacctggggc

SEQ ID NO: 23892 - DNA, 25 bp, Canis familiaris
aggaggaactccgaaccatggacca

SEQ ID NO: 23893 - DNA, 25 bp, Canis familiaris
aggagggagtccaaagccagggtca

SEQ ID NO: 23894 - DNA, 25 bp, Canis familiaris
aggagcgctgatattaaggggccca

SEQ ID NO: 23895 - DNA, 25 bp, Canis familiaris
aggcggcgatgcatgtgacgggact

SEQ ID NO: 23896 - DNA, 25 bp, Canis familiaris
aggctgtgcgagcttgcagccttgt

SEQ ID NO: 23897 - DNA, 25 bp, Canis familiaris
aggcttggagcctcagctccatgct

SEQ ID NO: 23898 - DNA, 25 bp, Canis familiaris
aggcttgggccttggctatgctaaa

SEQ ID NO: 23899 - DNA, 25 bp, Canis familiaris
aggctgggagtcctgaggctggaaa

SEQ ID NO: 23900 - DNA, 25 bp, Canis familiaris
aggctttatgctgctgagacaggca

SEQ ID NO: 23901 - DNA, 25 bp, Canis familiaris
aggctttctgtgctacctggaagct

SEQ ID NO: 23902 - DNA, 25 bp, Canis familiaris
aggcctccgtgtacatactggatcc

SEQ ID NO: 23903 - DNA, 25 bp, Canis familiaris
aggcctcactgtcatcgaagcagaa

SEQ ID NO: 23904 - DNA, 25 bp, Canis familiaris
aggcccctgttgtgagcagtgaaaa

SEQ ID NO: 23905 - DNA, 25 bp, Canis familiaris
aggccttctctttgagatcctggaa

SEQ ID NO: 23906 - DNA, 25 bp, Canis familiaris
aggccttccatattgaattttctaa

SEQ ID NO: 23907 - DNA, 25 bp, Canis familiaris
aggccattcttaagtttgctcctta

SEQ ID NO: 23908 - DNA, 25 bp, Canis familiaris
aggaagtttattctcagctcctttt

SEQ ID NO: 23909 - DNA, 25 bp, Canis familiaris
aggattttacacattctctactttt

SEQ ID NO: 23910 - DNA, 25 bp, Canis familiaris
aggctatgtgttactctttcggttt

SEQ ID NO: 23911 - DNA, 25 bp, Canis familiaris
aggccatttctcttcatgttaggct

SEQ ID NO: 23912 - DNA, 25 bp, Canis familiaris
aggcctgtcttcacaggtacatgct

SEQ ID NO: 23913 - DNA, 25 bp, Canis familiaris
aggcccttgtactagaaactgctct

SEQ ID NO: 23914 - DNA, 25 bp, Canis familiaris
aggccagcttccaaaaatatatgtt

SEQ ID NO: 23915 - DNA, 25 bp, Canis familiaris
aggccctgtcaaaaagtgcacgtct

SEQ ID NO: 23916 - DNA, 25 bp, Canis familiaris
aggccggtacaatatgctgcagcat

SEQ ID NO: 23917 - DNA, 25 bp, Canis familiaris
aggcctgagtactgagcactgtatc

SEQ ID NO: 23918 - DNA, 25 bp, Canis familiaris
aggctccctgcatggagcctgcttc

SEQ ID NO: 23919 - DNA, 25 bp, Canis familiaris
aggccctgcacatggggctgttttc

SEQ ID NO: 23920 - DNA, 25 bp, Canis familiaris
aggcggccaaggcattgctgttgtc

SEQ ID NO: 23921 - DNA, 25 bp, Canis familiaris
aggcgtcccaggaatcattgttctt

SEQ ID NO: 23922 - DNA, 25 bp, Canis familiaris
aggctgctcacctgaacatttctat

SEQ ID NO: 23923 - DNA, 25 bp, Canis familiaris
aggcctgcagacttgaaatatttac

SEQ ID NO: 23924 - DNA, 25 bp, Canis familiaris
aggcatctggagctgaaggaccaag

SEQ ID NO: 23925 - DNA, 25 bp, Canis familiaris
aggcatctggccagaaggcatataa

SEQ ID NO: 23926 - DNA, 25 bp, Canis familiaris
aggcacagcagctcgagtgggtgaa

SEQ ID NO: 23927 - DNA, 25 bp, Canis familiaris
aggccaggcgctgagatgggcctcc

SEQ ID NO: 23928 - DNA, 25 bp, Canis familiaris
aggcctgccagcaggaggaggcccc

SEQ ID NO: 23929 - DNA, 25 bp, Canis familiaris
aggccccacacttagcagggagtct

SEQ ID NO: 23930 - DNA, 25 bp, Canis familiaris
aggccccagctaaatcaagagactt

SEQ ID NO: 23931 - DNA, 25 bp, Canis familiaris
aggccccgattagaagatgagattg

SEQ ID NO: 23932 - DNA, 25 bp, Canis familiaris
aggccccgtgtagagaacacagccc

SEQ ID NO: 23933 - DNA, 25 bp, Canis familiaris
aggaacctggggcaagagcaccgcc

SEQ ID NO: 23934 - DNA, 25 bp, Canis familiaris
aggcaaccttggcttatacaacctc

SEQ ID NO: 23935 - DNA, 25 bp, Canis familiaris
aggatatcctgaacttcttacccct

SEQ ID NO: 23936 - DNA, 25 bp, Canis familiaris
aggacatcccagacttttaaacaca

SEQ ID NO: 23937 - DNA, 25 bp, Canis familiaris
aggaacttcaacttgtgtttgccaa

SEQ ID NO: 23938 - DNA, 25 bp, Canis familiaris
aggcaattaacctaggctcttccac

SEQ ID NO: 23939 - DNA, 25 bp, Canis familiaris
aggctgtttacatgaggatctccca

SEQ ID NO: 23940 - DNA, 25 bp, Canis familiaris
aggcagttggaatgacaatcttgtc

SEQ ID NO: 23941 - DNA, 25 bp, Canis familiaris
aggcgtgtggcagtggaatcacctc

SEQ ID NO: 23942 - DNA, 25 bp, Canis familiaris
aggtctgttgccggaaagctctcgg

SEQ ID NO: 23943 - DNA, 25 bp, Canis familiaris
aggcttcttccagaaagcatctgca

SEQ ID NO: 23944 - DNA, 25 bp, Canis familiaris
aggctccctcgtgaagaatctgaag

SEQ ID NO: 23945 - DNA, 25 bp, Canis familiaris
aggctcccaaatgctaactcagaaa

SEQ ID NO: 23946 - DNA, 25 bp, Canis familiaris
aggcagttaaatgtaaatgcgtaga

SEQ ID NO: 23947 - DNA, 25 bp, Canis familiaris
aggaaaacaatagtgaagtcgtcat

SEQ ID NO: 23948 - DNA, 25 bp, Canis familiaris
aggtaaagcaaacgcaaagaagcac

SEQ ID NO: 23949 - DNA, 25 bp, Canis familiaris
agatgaataacccccgaagaagacg

SEQ ID NO: 23950 - DNA, 25 bp, Canis familiaris
aggaatagtacccctgataacaact

SEQ ID NO: 23951 - DNA, 25 bp, Canis familiaris
aggacttgtttcctgtaaccacact

SEQ ID NO: 23952 - DNA, 25 bp, Canis familiaris
agcggggtttccagaaccacagtct

SEQ ID NO: 23953 - DNA, 25 bp, Canis familiaris
aggaaagtttccagaactgccagcg

SEQ ID NO: 23954 - DNA, 25 bp, Canis familiaris
aggaaaatattctcgacctccatcc

SEQ ID NO: 23955 - DNA, 25 bp, Canis familiaris
aggaggattttatcaacctgtcact

SEQ ID NO: 23956 - DNA, 25 bp, Canis familiaris
agaagcgtttgttaagaagccatac

SEQ ID NO: 23957 - DNA, 25 bp, Canis familiaris
aggaactctttttacaggccaactg

SEQ ID NO: 23958 - DNA, 25 bp, Canis familiaris
aggaaatttctgtgactggcccaca

SEQ ID NO: 23959 - DNA, 25 bp, Canis familiaris
aggaaacacttgaggctgaaagcaa

SEQ ID NO: 23960 - DNA, 25 bp, Canis familiaris
aggaaggcccagaggcagagtccca

SEQ ID NO: 23961 - DNA, 25 bp, Canis familiaris
aggaaggctccaacgagaaccaggc

SEQ ID NO: 23962 - DNA, 25 bp, Canis familiaris
aggaacctgtccaaggattccgcgt

SEQ ID NO: 23963 - DNA, 25 bp, Canis familiaris
aggcagcctctgcaagaagttccac

SEQ ID NO: 23964 - DNA, 25 bp, Canis familiaris
aggcagagtctagtctggcacttcc

SEQ ID NO: 23965 - DNA, 25 bp, Canis familiaris
aggagcagctcatgcatttgcacag

SEQ ID NO: 23966 - DNA, 25 bp, Canis familiaris
aggcacagctctcctattgaaactt

SEQ ID NO: 23967 - DNA, 25 bp, Canis familiaris
aggctcggcatgactttgacagact

SEQ ID NO: 23968 - DNA, 25 bp, Canis familiaris
aggcactgactgaattgctacagcc

SEQ ID NO: 23969 - DNA, 25 bp, Canis familiaris
aggcactgattgaagtcttaaccac

SEQ ID NO: 23970 - DNA, 25 bp, Canis familiaris
aggcctgtctagtgttaaatgcact

SEQ ID NO: 23971 - DNA, 25 bp, Canis familiaris
aggctctggctttggtaaagaccac

SEQ ID NO: 23972 - DNA, 25 bp, Canis familiaris
aggcatcttctttggtacatgagct

SEQ ID NO: 23973 - DNA, 25 bp, Canis familiaris
aggcctctttgaaatgctgctgagc

SEQ ID NO: 23974 - DNA, 25 bp, Canis familiaris
aggcttcatttatacattatgcaca

SEQ ID NO: 23975 - DNA, 25 bp, Canis familiaris
aggcccaaattgaaatctatgactt

SEQ ID NO: 23976 - DNA, 25 bp, Canis familiaris
aggaccaaatggatcactggccctg

SEQ ID NO: 23977 - DNA, 25 bp, Canis familiaris
aggagcctgatacagtactcatccc

SEQ ID NO: 23978 - DNA, 25 bp, Canis familiaris
aggacaagaagatggacgcccaccc

SEQ ID NO: 23979 - DNA, 25 bp, Canis familiaris
aggaacagtgaaagggctcctcgcc

SEQ ID NO: 23980 - DNA, 25 bp, Canis familiaris
aggacctggaagaggtaccagcctc

SEQ ID NO: 23981 - DNA, 25 bp, Canis familiaris
aggccgagaaggaggtgacccgcat

SEQ ID NO: 23982 - DNA, 25 bp, Canis familiaris
aggccgggtgagggtggaggctgcc

SEQ ID NO: 23983 - DNA, 25 bp, Canis familiaris
aggttggcgtaggtgttggcgtcgc

SEQ ID NO: 23984 - DNA, 25 bp, Canis familiaris
aggcttgcgctgaagctgtgttgta

SEQ ID NO: 23985 - DNA, 25 bp, Canis familiaris
aggcctgagtgatgctgctgtgttc

SEQ ID NO: 23986 - DNA, 25 bp, Canis familiaris
aggcctgcagtacctgtttattgaa

SEQ ID NO: 23987 - DNA, 25 bp, Canis familiaris
aggcctgtgatactcttttttaaat

SEQ ID NO: 23988 - DNA, 25 bp, Canis familiaris
aggctctggcatgttggttttttct

SEQ ID NO: 23989 - DNA, 25 bp, Canis familiaris
aggccgctgataccggtgttgtgtt

SEQ ID NO: 23990 - DNA, 25 bp, Canis familiaris
aggccgctgagagaggtgcctttct

SEQ ID NO: 23991 - DNA, 25 bp, Canis familiaris
aggcacggagaccagcggtctaaat

SEQ ID NO: 23992 - DNA, 25 bp, Canis familiaris
aggcccgagacgacggcgatgagga

SEQ ID NO: 23993 - DNA, 25 bp, Canis familiaris
aggcccgcagggaggtggaggacct

SEQ ID NO: 23994 - DNA, 25 bp, Canis familiaris
agtaccgcacggtggaggaggacgg

SEQ ID NO: 23995 - DNA, 25 bp, Canis familiaris
aggacccaaggcaggggcagaaagg

SEQ ID NO: 23996 - DNA, 25 bp, Canis familiaris
aggaccaaaggcaggggcaagaaag

SEQ ID NO: 23997 - DNA, 25 bp, Canis familiaris
aggatctaagggaggtcgcgagaca

SEQ ID NO: 23998 - DNA, 25 bp, Canis familiaris
aggtcagatgggcctcaggtgggaa

SEQ ID NO: 23999 - DNA, 25 bp, Canis familiaris
aggactattggggatattgggaatg

SEQ ID NO: 24000 - DNA, 25 bp, Canis familiaris
aggactcactgtctttgggggtgtg

SEQ ID NO: 24001 - DNA, 25 bp, Canis familiaris
aggacagagtctgctttgggggcag

SEQ ID NO: 24002 - DNA, 25 bp, Canis familiaris
aggtcatcgactttgaggggagggg

SEQ ID NO: 24003 - DNA, 25 bp, Canis familiaris
agggctcaagtgtggagcccggggg

SEQ ID NO: 24004 - DNA, 25 bp, Canis familiaris
aggcccagaggctgaacctcaggga

SEQ ID NO: 24005 - DNA, 25 bp, Canis familiaris
aggcagcacaagaccaaacctcagt

SEQ ID NO: 24006 - DNA, 25 bp, Canis familiaris
aggcaggctagaaaaacactcggtg

SEQ ID NO: 24007 - DNA, 25 bp, Canis familiaris
aggcaatgggagaacccctcgagtg

SEQ ID NO: 24008 - DNA, 25 bp, Canis familiaris
aggcacagacggaaccgtccttatc

SEQ ID NO: 24009 - DNA, 25 bp, Canis familiaris
aggcaagatcgcggaccgctttctg

SEQ ID NO: 24010 - DNA, 25 bp, Canis familiaris
aggcagaggcatctagcccagtgtc

SEQ ID NO: 24011 - DNA, 25 bp, Canis familiaris
aggcagaccttgccctaagtgtgct

SEQ ID NO: 24012 - DNA, 25 bp, Canis familiaris
aggacgcctcgtctaaggagtggaa

SEQ ID NO: 24013 - DNA, 25 bp, Canis familiaris
aggcccaccggtcaatgtgaattga

SEQ ID NO: 24014 - DNA, 25 bp, Canis familiaris
aggcaaccccttcactgtgaaaagc

SEQ ID NO: 24015 - DNA, 25 bp, Canis familiaris
aggaacccttgtacactgtgggaat

SEQ ID NO: 24016 - DNA, 25 bp, Canis familiaris
gagggcaaacttcttttggagaaag

SEQ ID NO: 24017 - DNA, 25 bp, Canis familiaris
aggcttaactttttatgctggggca

SEQ ID NO: 24018 - DNA, 25 bp, Canis familiaris
aggcctggccattaattattgtgag

SEQ ID NO: 24019 - DNA, 25 bp, Canis familiaris
aggctgttgctttgaatttttatgt

SEQ ID NO: 24020 - DNA, 25 bp, Canis familiaris
aggcagtggttctcaaagtttggtt

SEQ ID NO: 24021 - DNA, 25 bp, Canis familiaris
aggagggcccgagcaggaatttggt

SEQ ID NO: 24022 - DNA, 25 bp, Canis familiaris
aggatgggcccgatgcaggaatttg

SEQ ID NO: 24023 - DNA, 25 bp, Canis familiaris
aggatgggccccatgttgggctttg

SEQ ID NO: 24024 - DNA, 25 bp, Canis familiaris
aggctcagacccagctgttgaggtg

SEQ ID NO: 24025 - DNA, 25 bp, Canis familiaris
aggcccagccacacagtgatgaatg

SEQ ID NO: 24026 - DNA, 25 bp, Canis familiaris
aggctgcctccagcaagatggtgtc

SEQ ID NO: 24027 - DNA, 25 bp, Canis familiaris
aggctcttccctggtgatgggtatt

SEQ ID NO: 24028 - DNA, 25 bp, Canis familiaris
aggctgcctccttgtggtgtaggag

SEQ ID NO: 24029 - DNA, 25 bp, Canis familiaris
aggctggtgccgtgggaagaactgc

SEQ ID NO: 24030 - DNA, 25 bp, Canis familiaris
aggcagagcccgagggaggcattcc

SEQ ID NO: 24031 - DNA, 25 bp, Canis familiaris
aggcgagatccgccaggacagcact

SEQ ID NO: 24032 - DNA, 25 bp, Canis familiaris
aggcagactccttcaggaactctaa

SEQ ID NO: 24033 - DNA, 25 bp, Canis familiaris
aggagcaccctgtgctgctcaccga

SEQ ID NO: 24034 - DNA, 25 bp, Canis familiaris
aggactgacctatggcttaagcaca

SEQ ID NO: 24035 - DNA, 25 bp, Canis familiaris
aggacttggccatgggctcagacac

SEQ ID NO: 24036 - DNA, 25 bp, Canis familiaris
aggctgccatgtcagggagcctgac

SEQ ID NO: 24037 - DNA, 25 bp, Canis familiaris
aggctccgtgccaggagcctgacgc

SEQ ID NO: 24038 - DNA, 25 bp, Canis familiaris
aggcccacagcatggggcttggctc

SEQ ID NO: 24039 - DNA, 25 bp, Canis familiaris
aggcccatagcatggggcttggctc

SEQ ID NO: 24040 - DNA, 25 bp, Canis familiaris
aggcccagagcaagcggggcatcct

SEQ ID NO: 24041 - DNA, 25 bp, Canis familiaris
aggcccagagcaagagaggtatcct

SEQ ID NO: 24042 - DNA, 25 bp, Canis familiaris
aggcccagagcaagagaggcatcct

SEQ ID NO: 24043 - DNA, 25 bp, Canis familiaris
aggcagtccagcaggggacagctcc

SEQ ID NO: 24044 - DNA, 25 bp, Canis familiaris
aggaatcacttaccaggatcagccc

SEQ ID NO: 24045 - DNA, 25 bp, Canis familiaris
aggaagcacggcactgagacagccc

SEQ ID NO: 24046 - DNA, 25 bp, Canis familiaris
aggcagcggggcagaaagcgcccgt

SEQ ID NO: 24047 - DNA, 25 bp, Canis familiaris
aggactggtgctgtgcaaaccttgc

SEQ ID NO: 24048 - DNA, 25 bp, Canis familiaris
aggaagaatgcttgccaataactat

SEQ ID NO: 24049 - DNA, 25 bp, Canis familiaris
aggagagattcttacattcaatgtt

SEQ ID NO: 24050 - DNA, 25 bp, Canis familiaris
aggaaatacccttgtcaacttgaca

SEQ ID NO: 24051 - DNA, 25 bp, Canis familiaris
aggacacataccacattaactaact

SEQ ID NO: 24052 - DNA, 25 bp, Canis familiaris
aggagccatcaaggacttacctaat

SEQ ID NO: 24053 - DNA, 25 bp, Canis familiaris
aggcagcaacaaaacttaacaatta

SEQ ID NO: 24054 - DNA, 25 bp, Canis familiaris
aggagagatgaaaaccaagtagatg

SEQ ID NO: 24055 - DNA, 25 bp, Canis familiaris
aggagagcaacggacaaagaaacaa

SEQ ID NO: 24056 - DNA, 25 bp, Canis familiaris
agggcgcccgagcaaggagaaaaca

SEQ ID NO: 24057 - DNA, 25 bp, Canis familiaris
aggccctcctggccaaggaagagga

SEQ ID NO: 24058 - DNA, 25 bp, Canis familiaris
aggagccctctggtcgggaagaagt

SEQ ID NO: 24059 - DNA, 25 bp, Canis familiaris
aggactccccaagcggaatgaagcc

SEQ ID NO: 24060 - DNA, 25 bp, Canis familiaris
aggactccaataacacggaagtctg

SEQ ID NO: 24061 - DNA, 25 bp, Canis familiaris
aggtcccattctccgtgggacctca

SEQ ID NO: 24062 - DNA, 25 bp, Canis familiaris
aggtcaccacgggcagtgtggtcct

SEQ ID NO: 24063 - DNA, 25 bp, Canis familiaris
aggagcccagggaaggggcctctgg

SEQ ID NO: 24064 - DNA, 25 bp, Canis familiaris
aggacccaagtcttggggagctcag

SEQ ID NO: 24065 - DNA, 25 bp, Canis familiaris
aggacgcccaatttcaggatgctgt

SEQ ID NO: 24066 - DNA, 25 bp, Canis familiaris
aggaccaaaataatagtgctgtgtg

SEQ ID NO: 24067 - DNA, 25 bp, Canis familiaris
aggactcagaactctaacggggcca

SEQ ID NO: 24068 - DNA, 25 bp, Canis familiaris
aggaccaagagctttacacggaggc

SEQ ID NO: 24069 - DNA, 25 bp, Canis familiaris
agtgcccatggaccttacgccatgg

SEQ ID NO: 24070 - DNA, 25 bp, Canis familiaris
aggcccatggggatacgaatctgag

SEQ ID NO: 24071 - DNA, 25 bp, Canis familiaris
aggcccaggtccatacagagtgatg

SEQ ID NO: 24072 - DNA, 25 bp, Canis familiaris
aggcactctggtgcttccatattgc

SEQ ID NO: 24073 - DNA, 25 bp, Canis familiaris
aggcatccagatgtttcctgcattc

SEQ ID NO: 24074 - DNA, 25 bp, Canis familiaris
aggcttagagatcatccctcactct

SEQ ID NO: 24075 - DNA, 25 bp, Canis familiaris
aggcgtcagcgtaatatccttctta

SEQ ID NO: 24076 - DNA, 25 bp, Canis familiaris
aggctctcacgtgttcacagttaga

SEQ ID NO: 24077 - DNA, 25 bp, Canis familiaris
aggctttaggcagttccgtctaaga

SEQ ID NO: 24078 - DNA, 25 bp, Canis familiaris
aggctttcaggagttccaggaacag

SEQ ID NO: 24079 - DNA, 25 bp, Canis familiaris
aggttatcaaagatcctgggttggg

SEQ ID NO: 24080 - DNA, 25 bp, Canis familiaris
agtgtagaaccatgtcctggtttgt

SEQ ID NO: 24081 - DNA, 25 bp, Canis familiaris
aggactgaacacatccctggttgta

SEQ ID NO: 24082 - DNA, 25 bp, Canis familiaris
aggagaaaaccttcgtgatgttggg

SEQ ID NO: 24083 - DNA, 25 bp, Canis familiaris
aggatataaagaagggatccctggg

SEQ ID NO: 24084 - DNA, 25 bp, Canis familiaris
aggcataggtgtacaggtatccctg

SEQ ID NO: 24085 - DNA, 25 bp, Canis familiaris
aggaaggcaattcaggtcttctgat

SEQ ID NO: 24086 - DNA, 25 bp, Canis familiaris
aggcagggactaacagagtttctct

SEQ ID NO: 24087 - DNA, 25 bp, Canis familiaris
aggcgggatcttaggtattactgct

SEQ ID NO: 24088 - DNA, 25 bp, Canis familiaris
aggcgagcaggcagattgctttcct

SEQ ID NO: 24089 - DNA, 25 bp, Canis familiaris
aggcagcaggcgcgcaaattaccca

SEQ ID NO: 24090 - DNA, 25 bp, Canis familiaris
aggcatgcaggctgcgcaaattacc

SEQ ID NO: 24091 - DNA, 25 bp, Canis familiaris
aggcagcaggctgcgcataattacc

SEQ ID NO: 24092 - DNA, 25 bp, Canis familiaris
aggcacaggacaggcatatcacatg

SEQ ID NO: 24093 - DNA, 25 bp, Canis familiaris
aggcaagctggagcagtcctgagat

SEQ ID NO: 24094 - DNA, 25 bp, Canis familiaris
aggagactgccaccagaagatcgat

SEQ ID NO: 24095 - DNA, 25 bp, Canis familiaris
aggctttgctcaccacaagtggaat

SEQ ID NO: 24096 - DNA, 25 bp, Canis familiaris
aggctttgccatcgccaaagccacc

SEQ ID NO: 24097 - DNA, 25 bp, Canis familiaris
aggctcttgaagtccaaatccagga

SEQ ID NO: 24098 - DNA, 25 bp, Canis familiaris
aggctctggaattctcaaggctggg

SEQ ID NO: 24099 - DNA, 25 bp, Canis familiaris
aggcagtggacatggcagctgggga

SEQ ID NO: 24100 - DNA, 25 bp, Canis familiaris
aggctgtgaggcttgatccttagga

SEQ ID NO: 24101 - DNA, 25 bp, Canis familiaris
aggctgagacactgagcatctattg

SEQ ID NO: 24102 - DNA, 25 bp, Canis familiaris
aggctgaatcacttatacctgctcc

SEQ ID NO: 24103 - DNA, 25 bp, Canis familiaris
aggcatatgacatcgtgatcctctc

SEQ ID NO: 24104 - DNA, 25 bp, Canis familiaris
aggctcaggaagggacacgctctgc

SEQ ID NO: 24105 - DNA, 25 bp, Canis familiaris
aggcagcagtgatgtggaccaaccc

SEQ ID NO: 24106 - DNA, 25 bp, Canis familiaris
aggcagaagagttgggccttcccgt

SEQ ID NO: 24107 - DNA, 25 bp, Canis familiaris
aggcggagggtctgtttcagcctgt

SEQ ID NO: 24108 - DNA, 25 bp, Canis familiaris
aggcaggatgggcccgattctagct

SEQ ID NO: 24109 - DNA, 25 bp, Canis familiaris
aggcagctaaggcattactgctagc

SEQ ID NO: 24110 - DNA, 25 bp, Canis familiaris
aggcagtaatacccatatatgtgag

SEQ ID NO: 24111 - DNA, 25 bp, Canis familiaris
aggagaactgagctcaatacaaaag

SEQ ID NO: 24112 - DNA, 25 bp, Canis familiaris
aggagaactgagctcgataccaaag

SEQ ID NO: 24113 - DNA, 25 bp, Canis familiaris
aggagagagacccttgaaccacaag

SEQ ID NO: 24114 - DNA, 25 bp, Canis familiaris
aggaagggacatgttggcccagagg

SEQ ID NO: 24115 - DNA, 25 bp, Canis familiaris
aggaatggaaccctttcctcaagca

SEQ ID NO: 24116 - DNA, 25 bp, Canis familiaris
aggcaagtgagtccctttcaagaat

SEQ ID NO: 24117 - DNA, 25 bp, Canis familiaris
aggatgtgtggttgcgctttacaga

SEQ ID NO: 24118 - DNA, 25 bp, Canis familiaris
aggcaggtggtcctttgatgacgtc

SEQ ID NO: 24119 - DNA, 25 bp, Canis familiaris
aggcaggatcctggtggtgcagcat

SEQ ID NO: 24120 - DNA, 25 bp, Canis familiaris
aggctctggagctgtggatgcagtt

SEQ ID NO: 24121 - DNA, 25 bp, Canis familiaris
aggtcggagtagttagatctttagc

SEQ ID NO: 24122 - DNA, 25 bp, Canis familiaris
aggcttgtgagttcctggtttcttg

SEQ ID NO: 24123 - DNA, 25 bp, Canis familiaris
aggcattgtggttactgtttccagt

SEQ ID NO: 24124 - DNA, 25 bp, Canis familiaris
aggaatatggtcccttttctgcaat

SEQ ID NO: 24125 - DNA, 25 bp, Canis familiaris
aggaaaggctacgttcttcagaact

SEQ ID NO: 24126 - DNA, 25 bp, Canis familiaris
aggaacagctatgacccttaggcct

SEQ ID NO: 24127 - DNA, 25 bp, Canis familiaris
aggaacatcttgaaccctttgacgc

SEQ ID NO: 24128 - DNA, 25 bp, Canis familiaris
aggagaccagtttccagctggaccg

SEQ ID NO: 24129 - DNA, 25 bp, Canis familiaris
aggacacgaattacacgctcaacac

SEQ ID NO: 24130 - DNA, 25 bp, Canis familiaris
aggagacgttttgcaatcatgaacc

SEQ ID NO: 24131 - DNA, 25 bp, Canis familiaris
aggcaacattccacgaacatgcata

SEQ ID NO: 24132 - DNA, 25 bp, Canis familiaris
aggcacaattctcaaggacatcata

SEQ ID NO: 24133 - DNA, 25 bp, Canis familiaris
aggacaatcctctggtgaattatac

SEQ ID NO: 24134 - DNA, 25 bp, Canis familiaris
aggcacaatcccttggctaaatttc

SEQ ID NO: 24135 - DNA, 25 bp, Canis familiaris
aggcaacatcccctttagctttgcc

SEQ ID NO: 24136 - DNA, 25 bp, Canis familiaris
aggaagacccacatcaacattgtgg

SEQ ID NO: 24137 - DNA, 25 bp, Canis familiaris
aggaatattccacttacatgccatg

SEQ ID NO: 24138 - DNA, 25 bp, Canis familiaris
aggcatcttatggccattgtcagcc

SEQ ID NO: 24139 - DNA, 25 bp, Canis familiaris
aggctctatattgctacatcaccct

SEQ ID NO: 24140 - DNA, 25 bp, Canis familiaris
aggctgaatattccaattaccacaa

SEQ ID NO: 24141 - DNA, 25 bp, Canis familiaris
aggctgtgtatagtccatttcccag

SEQ ID NO: 24142 - DNA, 25 bp, Canis familiaris
aggatgctgtcaacatttttgcccc

SEQ ID NO: 24143 - DNA, 25 bp, Canis familiaris
aggacttagacacttttgccttctt

SEQ ID NO: 24144 - DNA, 25 bp, Canis familiaris
aggcacatcttgttattttccctgc

SEQ ID NO: 24145 - DNA, 25 bp, Canis familiaris
aggctctggttttattcctcatggc

SEQ ID NO: 24146 - DNA, 25 bp, Canis familiaris
aggtgaatgtcgttcttaccatggc

SEQ ID NO: 24147 - DNA, 25 bp, Canis familiaris
aggtcaccacggacatgtaccaggt

SEQ ID NO: 24148 - DNA, 25 bp, Canis familiaris
aggacacccaggccatgaaggagat

SEQ ID NO: 24149 - DNA, 25 bp, Canis familiaris
aggagccctggactcatcaataaac

SEQ ID NO: 24150 - DNA, 25 bp, Canis familiaris
aggactcttgaaccatctgataatt

SEQ ID NO: 24151 - DNA, 25 bp, Canis familiaris
aggcactctgtagctatctgatgtt

SEQ ID NO: 24152 - DNA, 25 bp, Canis familiaris
aggcatctgtgtagggtctgtcctc

SEQ ID NO: 24153 - DNA, 25 bp, Canis familiaris
aggcagctgctcttaagttgccacc

SEQ ID NO: 24154 - DNA, 25 bp, Canis familiaris
aggctgtgctgtccctgtatgcctc

SEQ ID NO: 24155 - DNA, 25 bp, Canis familiaris
aggcagggattgcttcatgcctcta

SEQ ID NO: 24156 - DNA, 25 bp, Canis familiaris
aggcagggagggcttctcttgagcc

SEQ ID NO: 24157 - DNA, 25 bp, Canis familiaris
aggacaggaggcctttctctaatct

SEQ ID NO: 24158 - DNA, 25 bp, Canis familiaris
aggaagcagactgtgcctatttctc

SEQ ID NO: 24159 - DNA, 25 bp, Canis familiaris
aggacagacttgtgcttttatcttg

SEQ ID NO: 24160 - DNA, 25 bp, Canis familiaris
aggaataacttgcctttctgtcttg

SEQ ID NO: 24161 - DNA, 25 bp, Canis familiaris
aggaatcaacttcttactcctctca

SEQ ID NO: 24162 - DNA, 25 bp, Canis familiaris
aggcaacagagagctctggcccctt

SEQ ID NO: 24163 - DNA, 25 bp, Canis familiaris
aggcaaagatagatcgtccttctgg

SEQ ID NO: 24164 - DNA, 25 bp, Canis familiaris
aggataagaaaagcatcccatctgg

SEQ ID NO: 24165 - DNA, 25 bp, Canis familiaris
aggctaagaagatgtcccagactgg

SEQ ID NO: 24166 - DNA, 25 bp, Canis familiaris
aggctgaaggaagtatcgccgcctc

SEQ ID NO: 24167 - DNA, 25 bp, Canis familiaris
aggcaaaccacagtggccaggctct

SEQ ID NO: 24168 - DNA, 25 bp, Canis familiaris
aggaagaccaaccatgagaggctct

SEQ ID NO: 24169 - DNA, 25 bp, Canis familiaris
aggaatggagattcgcatgcgagga

SEQ ID NO: 24170 - DNA, 25 bp, Canis familiaris
aggactcgtgtctacagtcaggagt

SEQ ID NO: 24171 - DNA, 25 bp, Canis familiaris
aggaattgctggcatcaggcagcca

SEQ ID NO: 24172 - DNA, 25 bp, Canis familiaris
aggctgatctggagacacagcgcca

SEQ ID NO: 24173 - DNA, 25 bp, Canis familiaris
aggctattgctgaggagctggcccc

SEQ ID NO: 24174 - DNA, 25 bp, Canis familiaris
aggcattgggttaggcggaggctcc

SEQ ID NO: 24175 - DNA, 25 bp, Canis familiaris
aggaagggttgggggatggcagcac

SEQ ID NO: 24176 - DNA, 25 bp, Canis familiaris
aggcaacgtgttgtggggacagcaa

SEQ ID NO: 24177 - DNA, 25 bp, Canis familiaris
aggcaagcttatactctgagggacc

SEQ ID NO: 24178 - DNA, 25 bp, Canis familiaris
aggaagcttgttacattgggcccag

SEQ ID NO: 24179 - DNA, 25 bp, Canis familiaris
aggaagtttggttgtggacactcgg

SEQ ID NO: 24180 - DNA, 25 bp, Canis familiaris
aggaccttaggtttgatgcagaatc

SEQ ID NO: 24181 - DNA, 25 bp, Canis familiaris
aggaccacgcgagcttgatgcggat

SEQ ID NO: 24182 - DNA, 25 bp, Canis familiaris
aggaccaccgaacttatgctttatt

SEQ ID NO: 24183 - DNA, 25 bp, Canis familiaris
aggaccctcatggaaaactttagtg

SEQ ID NO: 24184 - DNA, 25 bp, Canis familiaris
aggaccttctggacacaaggtgtca

SEQ ID NO: 24185 - DNA, 25 bp, Canis familiaris
aggacttgttgccacacgaggtctt

SEQ ID NO: 24186 - DNA, 25 bp, Canis familiaris
aggacattggctggaacgactggat

SEQ ID NO: 24187 - DNA, 25 bp, Canis familiaris
aggactatggcgtatatctggagga

SEQ ID NO: 24188 - DNA, 25 bp, Canis familiaris
aggactatcctgctattggggtcaa

SEQ ID NO: 24189 - DNA, 25 bp, Canis familiaris
aggacaccttgtattgagtagtcat

SEQ ID NO: 24190 - DNA, 25 bp, Canis familiaris
aggacacctcctaatccatttgatt

SEQ ID NO: 24191 - DNA, 25 bp, Canis familiaris
aggctacttttgaagcgattcttta

SEQ ID NO: 24192 - DNA, 25 bp, Canis familiaris
aggcttcctggaaatgagctccctt

SEQ ID NO: 24193 - DNA, 25 bp, Canis familiaris
aggaattcggcacgagatctcctct

SEQ ID NO: 24194 - DNA, 25 bp, Canis familiaris
aggaattcggcacgagcagcggttt

SEQ ID NO: 24195 - DNA, 25 bp, Canis familiaris
aggaactgcgggcacactgtgctat

SEQ ID NO: 24196 - DNA, 25 bp, Canis familiaris
aggaagccggtcggagctgttcatc

SEQ ID NO: 24197 - DNA, 25 bp, Canis familiaris
aggaagccaggggaggcgacacagc

SEQ ID NO: 24198 - DNA, 25 bp, Canis familiaris
aggaggctacgagatgtcaaccatg

SEQ ID NO: 24199 - DNA, 25 bp, Canis familiaris
aggacctgaggagattacactggga

SEQ ID NO: 24200 - DNA, 25 bp, Canis familiaris
aggacacggccgtatattactgtgc

SEQ ID NO: 24201 - DNA, 25 bp, Canis familiaris
aggaagcggcgagtgtataaggtgc

SEQ ID NO: 24202 - DNA, 25 bp, Canis familiaris
aggaaattgcagtgtattctgttgc

SEQ ID NO: 24203 - DNA, 25 bp, Canis familiaris
aggaacttcagcagccatttgactc

SEQ ID NO: 24204 - DNA, 25 bp, Canis familiaris
aggctaaatagctgcctctggaccc

SEQ ID NO: 24205 - DNA, 25 bp, Canis familiaris
aggctaaatgacttgcccactggcc

SEQ ID NO: 24206 - DNA, 25 bp, Canis familiaris
aggacactagcatgggccactgatc

SEQ ID NO: 24207 - DNA, 25 bp, Canis familiaris
aggcacctgaaaggactcacgctgc

SEQ ID NO: 24208 - DNA, 25 bp, Canis familiaris
aggacactgaggacagcaacacctg

SEQ ID NO: 24209 - DNA, 25 bp, Canis familiaris
aggacagctggagttcagagccctt

SEQ ID NO: 24210 - DNA, 25 bp, Canis familiaris
aggcaagagaatactcaaccatatt

SEQ ID NO: 24211 - DNA, 25 bp, Canis familiaris
aggaagaactcactctatccaatga

SEQ ID NO: 24212 - DNA, 25 bp, Canis familiaris
aggaaaaggcagtcaaccacatagg

SEQ ID NO: 24213 - DNA, 25 bp, Canis familiaris
aggaaagatggcccaacccatcctt

SEQ ID NO: 24214 - DNA, 25 bp, Canis familiaris
aggaccagagggtcccaagcatcct

SEQ ID NO: 24215 - DNA, 25 bp, Canis familiaris
aggaccaggttgtctcctgcgactt

SEQ ID NO: 24216 - DNA, 25 bp, Canis familiaris
aggacacacgattgagctcggcgac

SEQ ID NO: 24217 - DNA, 25 bp, Canis familiaris
aggacatatggaatccacaggaaaa

SEQ ID NO: 24218 - DNA, 25 bp, Canis familiaris
agggctacgccttcgaggaagtgaa

SEQ ID NO: 24219 - DNA, 25 bp, Canis familiaris
aggagtaccctgacgagatcgagta

SEQ ID NO: 24220 - DNA, 25 bp, Canis familiaris
aggattggccaaacgccatcgcatg

SEQ ID NO: 24221 - DNA, 25 bp, Canis familiaris
aggcaaggacacacagttccatgga

SEQ ID NO: 24222 - DNA, 25 bp, Canis familiaris
aggcactggaccagtacccaggacc

SEQ ID NO: 24223 - DNA, 25 bp, Canis familiaris
aggagctggagcagttcacccaggt

SEQ ID NO: 24224 - DNA, 25 bp, Canis familiaris
agggggttggattacccgcagtgct

SEQ ID NO: 24225 - DNA, 25 bp, Canis familiaris
aggagggtggtttacagggcatatg

SEQ ID NO: 24226 - DNA, 25 bp, Canis familiaris
aggtgcctgtggagtacggggagtt

SEQ ID NO: 24227 - DNA, 25 bp, Canis familiaris
aggcacctgtggtgacccgagagtg

SEQ ID NO: 24228 - DNA, 25 bp, Canis familiaris
aggacctgggggtgcaagaggccaa

SEQ ID NO: 24229 - DNA, 25 bp, Canis familiaris
aggcaccagcggtgggcagctgggc

SEQ ID NO: 24230 - DNA, 25 bp, Canis familiaris
aggacacacgattttgtgcctggat

SEQ ID NO: 24231 - DNA, 25 bp, Canis familiaris
aggaaccaagggagccatgtgattg

SEQ ID NO: 24232 - DNA, 25 bp, Canis familiaris
aggaagccgaggcgtcacaggtgat

SEQ ID NO: 24233 - DNA, 25 bp, Canis familiaris
aggcatagcttagggcagcccaggt

SEQ ID NO: 24234 - DNA, 25 bp, Canis familiaris
aggattcataaactgactccggatg

SEQ ID NO: 24235 - DNA, 25 bp, Canis familiaris
aggttcgacgatttgtctcggatcc

SEQ ID NO: 24236 - DNA, 25 bp, Canis familiaris
aggctcttaatcactgtctttgtcc

SEQ ID NO: 24237 - DNA, 25 bp, Canis familiaris
aggttgtaggctgtctaactgtccg

SEQ ID NO: 24238 - DNA, 25 bp, Canis familiaris
agagttggggtcctaactttcactg

SEQ ID NO: 24239 - DNA, 25 bp, Canis familiaris
aggctagacgtggggaacttctcct

SEQ ID NO: 24240 - DNA, 25 bp, Canis familiaris
aggctagacgtggggaacttctcct

SEQ ID NO: 24241 - DNA, 25 bp, Canis familiaris
aggattacttgggaagccttcctct

SEQ ID NO: 24242 - DNA, 25 bp, Canis familiaris
aggtctaagttggtatgccccagca

SEQ ID NO: 24243 - DNA, 25 bp, Canis familiaris
aggttgtacactaaatccccatgac

SEQ ID NO: 24244 - DNA, 25 bp, Canis familiaris
aggtccgaactgatatcacctaccc

SEQ ID NO: 24245 - DNA, 25 bp, Canis familiaris
aggaaaaactcttgaccactgacgc

SEQ ID NO: 24246 - DNA, 25 bp, Canis familiaris
aggaacaaacctatcacactgcaca

SEQ ID NO: 24247 - DNA, 25 bp, Canis familiaris
aggaaagtcaacagtgcaacatgca

SEQ ID NO: 24248 - DNA, 25 bp, Canis familiaris
agggaagtctacaggttacatacag

SEQ ID NO: 24249 - DNA, 25 bp, Canis familiaris
agaaggagtccgaggcttactacca

SEQ ID NO: 24250 - DNA, 25 bp, Canis familiaris
aggaggtgtccgattgtgtattaaa

SEQ ID NO: 24251 - DNA, 25 bp, Canis familiaris
aggatgggttcgacttggacttgac

SEQ ID NO: 24252 - DNA, 25 bp, Canis familiaris
aggtaggtctcttagggtctgtgcc

SEQ ID NO: 24253 - DNA, 25 bp, Canis familiaris
aggaaggcactttgagtggtctgtt

SEQ ID NO: 24254 - DNA, 25 bp, Canis familiaris
aggaagagattgctattgttgtact

SEQ ID NO: 24255 - DNA, 25 bp, Canis familiaris
aggaatgacctgttcttgttctaca

SEQ ID NO: 24256 - DNA, 25 bp, Canis familiaris
aggaaccctgatagactggcttaca

SEQ ID NO: 24257 - DNA, 25 bp, Canis familiaris
aggacccgatgatggtggcactaag

SEQ ID NO: 24258 - DNA, 25 bp, Canis familiaris
aggaagggcacatggggctgctgaa

SEQ ID NO: 24259 - DNA, 25 bp, Canis familiaris
aggcacgggagttggcagagctgtt

SEQ ID NO: 24260 - DNA, 25 bp, Canis familiaris
aggaaggtgttgcgcaacttcttcc

SEQ ID NO: 24261 - DNA, 25 bp, Canis familiaris
aggaatggtactcagctatcattga

SEQ ID NO: 24262 - DNA, 25 bp, Canis familiaris
aggaagcgtatcctgagcatcacct

SEQ ID NO: 24263 - DNA, 25 bp, Canis familiaris
aggaagtttgagcgctacactggcc

SEQ ID NO: 24264 - DNA, 25 bp, Canis familiaris
aggaaatacgagattaccgagcagc

SEQ ID NO: 24265 - DNA, 25 bp, Canis familiaris
aggaagtgaccacgttttcgagcac

SEQ ID NO: 24266 - DNA, 25 bp, Canis familiaris
aggaaggaccggcaggtctgcacac

SEQ ID NO: 24267 - DNA, 25 bp, Canis familiaris
aggaaggactctggccagagcctcc

SEQ ID NO: 24268 - DNA, 25 bp, Canis familiaris
aggcaagggctgggtagcaggcccc

SEQ ID NO: 24269 - DNA, 25 bp, Canis familiaris
aggaaggcgctggccaaaggcctca

SEQ ID NO: 24270 - DNA, 25 bp, Canis familiaris
aggaagggcgccaagcaaggttccg

SEQ ID NO: 24271 - DNA, 25 bp, Canis familiaris
aggactagtcgactaccaggtccct

SEQ ID NO: 24272 - DNA, 25 bp, Canis familiaris
aggacaagctcaagtcacagccgct

SEQ ID NO: 24273 - DNA, 25 bp, Canis familiaris
aggacacgctgaaggcagtgccgga

SEQ ID NO: 24274 - DNA, 25 bp, Canis familiaris
aggaagcagctgtgaaggccaagac

SEQ ID NO: 24275 - DNA, 25 bp, Canis familiaris
aggacagacagttgcagagcccagg

SEQ ID NO: 24276 - DNA, 25 bp, Canis familiaris
aggcagcatatcctggcagagtcct

SEQ ID NO: 24277 - DNA, 25 bp, Canis familiaris
aggcagatgctggcatccgattcct

SEQ ID NO: 24278 - DNA, 25 bp, Canis familiaris
aggcagagtccagagcagtctctcc

SEQ ID NO: 24279 - DNA, 25 bp, Canis familiaris
aggcagaggccggaaacttactggt

SEQ ID NO: 24280 - DNA, 25 bp, Canis familiaris
aggcagcgacagcgggacttagggt

SEQ ID NO: 24281 - DNA, 25 bp, Canis familiaris
aggtggaaggggccctaggtggctg

SEQ ID NO: 24282 - DNA, 25 bp, Canis familiaris
aggaaaaggggcccccttgatgctg

SEQ ID NO: 24283 - DNA, 25 bp, Canis familiaris
aggaaggggcctggggccattggct

SEQ ID NO: 24284 - DNA, 25 bp, Canis familiaris
aggcagagggaggtcaggggtgggc

SEQ ID NO: 24285 - DNA, 25 bp, Canis familiaris
aggaacgagaccgtcgggtggcagc

SEQ ID NO: 24286 - DNA, 25 bp, Canis familiaris
aggagaatgagacacaccggggcac

SEQ ID NO: 24287 - DNA, 25 bp, Canis familiaris
aggcagagcaggagttcctggccca

SEQ ID NO: 24288 - DNA, 25 bp, Canis familiaris
aggaagcaaggtcttctggctctca

SEQ ID NO: 24289 - DNA, 25 bp, Canis familiaris
aggaatgaaacaccttgctcgtcac

SEQ ID NO: 24290 - DNA, 25 bp, Canis familiaris
aggaataacacacataccctcatct

SEQ ID NO: 24291 - DNA, 25 bp, Canis familiaris
aggaaggagccatacccttgcatct

SEQ ID NO: 24292 - DNA, 25 bp, Canis familiaris
aggaatggggagtcccctgtgctct

SEQ ID NO: 24293 - DNA, 25 bp, Canis familiaris
aggcatgatgggcatgggccctcgc

SEQ ID NO: 24294 - DNA, 25 bp, Canis familiaris
aggcagagccagctgattgacaccc

SEQ ID NO: 24295 - DNA, 25 bp, Canis familiaris
aggcatgaggcaggcattgcttccc

SEQ ID NO: 24296 - DNA, 25 bp, Canis familiaris
aggcagagcgcagacttcatgccgc

SEQ ID NO: 24297 - DNA, 25 bp, Canis familiaris
aggatgactggaacttcctcgagtc

SEQ ID NO: 24298 - DNA, 25 bp, Canis familiaris
aggaactggactatctgtctcgcac

SEQ ID NO: 24299 - DNA, 25 bp, Canis familiaris
aggcaagtggtatttggtctgctgc

SEQ ID NO: 24300 - DNA, 25 bp, Canis familiaris
aggaagtggctgctcttgtcatgag

SEQ ID NO: 24301 - DNA, 25 bp, Canis familiaris
aggcagagtggcttccattgtcagc

SEQ ID NO: 24302 - DNA, 25 bp, Canis familiaris
aggcatgggcctgcactatgttgcc

SEQ ID NO: 24303 - DNA, 25 bp, Canis familiaris
aggagcgaagatgcaagctttgcca

SEQ ID NO: 24304 - DNA, 25 bp, Canis familiaris
aggagtgcaaatgcacctcctgcaa

SEQ ID NO: 24305 - DNA, 25 bp, Canis familiaris
aggaaagaagccatctctatgagat

SEQ ID NO: 24306 - DNA, 25 bp, Canis familiaris
aggacaagaaggagcctgtggctaa

SEQ ID NO: 24307 - DNA, 25 bp, Canis familiaris
aggacaacaagtgcagctggctggt

SEQ ID NO: 24308 - DNA, 25 bp, Canis familiaris
aggagccattcctatcagcaggctg

SEQ ID NO: 24309 - DNA, 25 bp, Canis familiaris
aggcagccaagttcacagagcaggt

SEQ ID NO: 24310 - DNA, 25 bp, Canis familiaris
aggcaccaaatctgctgagccactc

SEQ ID NO: 24311 - DNA, 25 bp, Canis familiaris
aggaccaattgcgtctgatgtctca

SEQ ID NO: 24312 - DNA, 25 bp, Canis familiaris
aggaaccaatgggctatgtctcggc

SEQ ID NO: 24313 - DNA, 25 bp, Canis familiaris
aggacccacagtacttgtccagtcc

SEQ ID NO: 24314 - DNA, 25 bp, Canis familiaris
aggacccaatggtttgcatcctgtc

SEQ ID NO: 24315 - DNA, 25 bp, Canis familiaris
aggagccacctttatttctcctaga

SEQ ID NO: 24316 - DNA, 25 bp, Canis familiaris
aggaccctttccattatgactatca

SEQ ID NO: 24317 - DNA, 25 bp, Canis familiaris
aggacccttcatatgtttacagatt

SEQ ID NO: 24318 - DNA, 25 bp, Canis familiaris
aggacctgtgttattgttctacctg

SEQ ID NO: 24319 - DNA, 25 bp, Canis familiaris
aggaacttgtagggctcattttggt

SEQ ID NO: 24320 - DNA, 25 bp, Canis familiaris
aggagtccttacgtgttatattcag

SEQ ID NO: 24321 - DNA, 25 bp, Canis familiaris
aggaatccgagaactagttttctgg

SEQ ID NO: 24322 - DNA, 25 bp, Canis familiaris
aggacacctcagaacatgagttgta

SEQ ID NO: 24323 - DNA, 25 bp, Canis familiaris
aggacaccgcagtaggattttcgct

SEQ ID NO: 24324 - DNA, 25 bp, Canis familiaris
aggagccagctcgcaagtttggcgc

SEQ ID NO: 24325 - DNA, 25 bp, Canis familiaris
aggactatctccaaagccagagggc

SEQ ID NO: 24326 - DNA, 25 bp, Canis familiaris
aggacttccacgtgggatggagcac

SEQ ID NO: 24327 - DNA, 25 bp, Canis familiaris
aggaccagcgccagtgggaggatac

SEQ ID NO: 24328 - DNA, 25 bp, Canis familiaris
aggaccaagcgccagtgggagagat

SEQ ID NO: 24329 - DNA, 25 bp, Canis familiaris
aggacagatcacatactgggcagaa

SEQ ID NO: 24330 - DNA, 25 bp, Canis familiaris
aggacttcaccaactgtgcagacat

SEQ ID NO: 24331 - DNA, 25 bp, Canis familiaris
aggacctttcagacgacgacatcaa

SEQ ID NO: 24332 - DNA, 25 bp, Canis familiaris
aggactcttctgaaacgtactcaag

SEQ ID NO: 24333 - DNA, 25 bp, Canis familiaris
aggaattttgcagttcagtacgaat

SEQ ID NO: 24334 - DNA, 25 bp, Canis familiaris
agtggtgttaactgaacatctatat

SEQ ID NO: 24335 - DNA, 25 bp, Canis familiaris
aggactgtttactgaatagctagct

SEQ ID NO: 24336 - DNA, 25 bp, Canis familiaris
aggactttctactgatccaggtcat

SEQ ID NO: 24337 - DNA, 25 bp, Canis familiaris
aggatttttatcattccagcccttc

SEQ ID NO: 24338 - DNA, 25 bp, Canis familiaris
aggaaacttatcattctgtcccttc

SEQ ID NO: 24339 - DNA, 25 bp, Canis familiaris
aggaatgttgtggtttctgtccctc

SEQ ID NO: 24340 - DNA, 25 bp, Canis familiaris
aggacctttgtgcatgctattctct

SEQ ID NO: 24341 - DNA, 25 bp, Canis familiaris
aggaactgcttcctgatgtatcgtt

SEQ ID NO: 24342 - DNA, 25 bp, Canis familiaris
aggaaacttgagctgtatctgtaac

SEQ ID NO: 24343 - DNA, 25 bp, Canis familiaris
aggcaatgtcttgtttatctgtaga

SEQ ID NO: 24344 - DNA, 25 bp, Canis familiaris
aggaaacttttcaaatgcccagaga

SEQ ID NO: 24345 - DNA, 25 bp, Canis familiaris
aggaaacttataaactgcaacgcag

SEQ ID NO: 24346 - DNA, 25 bp, Canis familiaris
agtaaagtttaatctgtagcatgca

SEQ ID NO: 24347 - DNA, 25 bp, Canis familiaris
aggaatctgcttataagttagcgca

SEQ ID NO: 24348 - DNA, 25 bp, Canis familiaris
aggaatgtctccataagatataaca

SEQ ID NO: 24349 - DNA, 25 bp, Canis familiaris
aggaagtccacaacaagcgaaccac

SEQ ID NO: 24350 - DNA, 25 bp, Canis familiaris
aggatggatccactcacacagtaag

SEQ ID NO: 24351 - DNA, 25 bp, Canis familiaris
aggactgcaccaccaatagaacatt

SEQ ID NO: 24352 - DNA, 25 bp, Canis familiaris
aggactgctcacgacatggaacaat

SEQ ID NO: 24353 - DNA, 25 bp, Canis familiaris
aggacttcactgtcacgaatgctct

SEQ ID NO: 24354 - DNA, 25 bp, Canis familiaris
aggatttgcaggtcacatggtctct

SEQ ID NO: 24355 - DNA, 25 bp, Canis familiaris
aggatttgctagtccacttactggg

SEQ ID NO: 24356 - DNA, 25 bp, Canis familiaris
aggaatgtgtcttgcttattactga

SEQ ID NO: 24357 - DNA, 25 bp, Canis familiaris
aggatactgcatctcttattattgt

SEQ ID NO: 24358 - DNA, 25 bp, Canis familiaris
aggatgtctgagcacttccattttt

SEQ ID NO: 24359 - DNA, 25 bp, Canis familiaris
aggaatctgagatctcgacttttct

SEQ ID NO: 24360 - DNA, 25 bp, Canis familiaris
aggaagtggagggggcattgctgtt

SEQ ID NO: 24361 - DNA, 25 bp, Canis familiaris
aggaaggtgaggctggtgggctctg

SEQ ID NO: 24362 - DNA, 25 bp, Canis familiaris
aggagaggtaggagttggtgcccca

SEQ ID NO: 24363 - DNA, 25 bp, Canis familiaris
aggaagccagaggctggttgggccc

SEQ ID NO: 24364 - DNA, 25 bp, Canis familiaris
aggtgtacggccggactgagggcct

SEQ ID NO: 24365 - DNA, 25 bp, Canis familiaris
agggtaatcatatggacttgctgga

SEQ ID NO: 24366 - DNA, 25 bp, Canis familiaris
aggagctaattatggacttgaggac

SEQ ID NO: 24367 - DNA, 25 bp, Canis familiaris
aggaccaaggaaccagctctgtgaa

SEQ ID NO: 24368 - DNA, 25 bp, Canis familiaris
aggagaatatggtgtcctctcggaa

SEQ ID NO: 24369 - DNA, 25 bp, Canis familiaris
aggaaagatagatctcgttctggga

SEQ ID NO: 24370 - DNA, 25 bp, Canis familiaris
aggagcagagggatccagtcctggg

SEQ ID NO: 24371 - DNA, 25 bp, Canis familiaris
aggcacagagaggctctcctctcct

SEQ ID NO: 24372 - DNA, 25 bp, Canis familiaris
aggagagcataactctctctcgcct

SEQ ID NO: 24373 - DNA, 25 bp, Canis familiaris
aggaaagaggctgcctgggcttcca

SEQ ID NO: 24374 - DNA, 25 bp, Canis familiaris
aggagaaaggctgccgactatcccc

SEQ ID NO: 24375 - DNA, 25 bp, Canis familiaris
agtaaaagcaacacctgtaccacct

SEQ ID NO: 24376 - DNA, 25 bp, Canis familiaris
aggaaacacagactccctgttcaca

SEQ ID NO: 24377 - DNA, 25 bp, Canis familiaris
aggagttcaagaccagcctggccaa

SEQ ID NO: 24378 - DNA, 25 bp, Canis familiaris
aggagattaagacatcttattcaat

SEQ ID NO: 24379 - DNA, 25 bp, Canis familiaris
aggcacttccaactttatatgacaa

SEQ ID NO: 24380 - DNA, 25 bp, Canis familiaris
aggagcttccagttgaattcaacag

SEQ ID NO: 24381 - DNA, 25 bp, Canis familiaris
aggcacttgcctccagaataaactg

SEQ ID NO: 24382 - DNA, 25 bp, Canis familiaris
aggcacaatgagacttgaaaaaagt

SEQ ID NO: 24383 - DNA, 25 bp, Canis familiaris
aggacaagacatatgaaatcaacag

SEQ ID NO: 24384 - DNA, 25 bp, Canis familiaris
aggaaaacacttttgcagcatagca

SEQ ID NO: 24385 - DNA, 25 bp, Canis familiaris
aggaaaccctcgtgcagctataaat

SEQ ID NO: 24386 - DNA, 25 bp, Canis familiaris
actggaagccttgtccaaattaatt

SEQ ID NO: 24387 - DNA, 25 bp, Canis familiaris
actggaacttcctcgagtcatttta

SEQ ID NO: 24388 - DNA, 25 bp, Canis familiaris
agtttcacttagtctcgaacatttt

SEQ ID NO: 24389 - DNA, 25 bp, Canis familiaris
aggactacgtagactcagaggcttt

SEQ ID NO: 24390 - DNA, 25 bp, Canis familiaris
aggacgaagttgactcacaggtgac

SEQ ID NO: 24391 - DNA, 25 bp, Canis familiaris
aggcaaagcttgaactccaggtgaa

SEQ ID NO: 24392 - DNA, 25 bp, Canis familiaris
aggaaagttgtgtccctgtcatgaa

SEQ ID NO: 24393 - DNA, 25 bp, Canis familiaris
aggaaagcctggagcctgacgaggc

SEQ ID NO: 24394 - DNA, 25 bp, Canis familiaris
aggaatagctctcgggttttgcggc

SEQ ID NO: 24395 - DNA, 25 bp, Canis familiaris
aggagttctgttttctttttgtgct

SEQ ID NO: 24396 - DNA, 25 bp, Canis familiaris
aggatggaaaaactgttttgttgct

SEQ ID NO: 24397 - DNA, 25 bp, Canis familiaris
aggattgaagaaagtcgtgcatgag

SEQ ID NO: 24398 - DNA, 25 bp, Canis familiaris
aggaagaggatgatgctgccgctgg

SEQ ID NO: 24399 - DNA, 25 bp, Canis familiaris
aggaagatggcggagcgccggagcg

SEQ ID NO: 24400 - DNA, 25 bp, Canis familiaris
aggaactacgagacctgcaggaggc

SEQ ID NO: 24401 - DNA, 25 bp, Canis familiaris
aggacctacgaggtggcttcaggct

SEQ ID NO: 24402 - DNA, 25 bp, Canis familiaris
aggaccttaagtgggcaatgggcga

SEQ ID NO: 24403 - DNA, 25 bp, Canis familiaris
aggacacttcagcaaggcagcattg

SEQ ID NO: 24404 - DNA, 25 bp, Canis familiaris
aggttcttcagtctggccaaggaac

SEQ ID NO: 24405 - DNA, 25 bp, Canis familiaris
aggaacaatgcgcttggccaaggaa

SEQ ID NO: 24406 - DNA, 25 bp, Canis familiaris
aggaaccatcagccttggaggtgga

SEQ ID NO: 24407 - DNA, 25 bp, Canis familiaris
aggatcccatgtccatatgaccgtg

SEQ ID NO: 24408 - DNA, 25 bp, Canis familiaris
aggataccatatcagactccgtcct

SEQ ID NO: 24409 - DNA, 25 bp, Canis familiaris
aggaaatgctgaaaaccactgtgtt

SEQ ID NO: 24410 - DNA, 25 bp, Canis familiaris
aggaaaggaaattcacactgtgcgt

SEQ ID NO: 24411 - DNA, 25 bp, Canis familiaris
aggaaggcgaacgccactgtcctgt

SEQ ID NO: 24412 - DNA, 25 bp, Canis familiaris
aggaagagcagatgccttccttccc

SEQ ID NO: 24413 - DNA, 25 bp, Canis familiaris
aggagaaagaagccgtcctcctctc

SEQ ID NO: 24414 - DNA, 25 bp, Canis familiaris
aggaaaaagagaccactctccctca

SEQ ID NO: 24415 - DNA, 25 bp, Canis familiaris
aggaaactgaggtccacatgtcccc

SEQ ID NO: 24416 - DNA, 25 bp, Canis familiaris
aggaaggggagaccatggtgccacc

SEQ ID NO: 24417 - DNA, 25 bp, Canis familiaris
aggaaggctggatcctggagcctcg

SEQ ID NO: 24418 - DNA, 25 bp, Canis familiaris
aggaatggaggtgcatctggcccat

SEQ ID NO: 24419 - DNA, 25 bp, Canis familiaris
aggaatgctgggaatacccccacac

SEQ ID NO: 24420 - DNA, 25 bp, Canis familiaris
aggagatgtgcctaaacccaaaccg

SEQ ID NO: 24421 - DNA, 25 bp, Canis familiaris
agcagacgcaactatgaacccaaga

SEQ ID NO: 24422 - DNA, 25 bp, Canis familiaris
agaggcgctaaatccatcgcaagtt

SEQ ID NO: 24423 - DNA, 25 bp, Canis familiaris
aggagctctcataagatccctgata

SEQ ID NO: 24424 - DNA, 25 bp, Canis familiaris
aggagcctatcttaatctcgtcagc

SEQ ID NO: 24425 - DNA, 25 bp, Canis familiaris
aggaaatcatccagactctgtccca

SEQ ID NO: 24426 - DNA, 25 bp, Canis familiaris
aggaatctagtgatgcctcttgcct

SEQ ID NO: 24427 - DNA, 25 bp, Canis familiaris
aggaagtagtgcagccttgggatgc

SEQ ID NO: 24428 - DNA, 25 bp, Canis familiaris
aggagagtattcctccttgtgcggc

SEQ ID NO: 24429 - DNA, 25 bp, Canis familiaris
aggagagtttttgctcagagctggg

SEQ ID NO: 24430 - DNA, 25 bp, Canis familiaris
aggacgctttattagatcaactgag

SEQ ID NO: 24431 - DNA, 25 bp, Canis familiaris
aggaccgcttattagatccactgag

SEQ ID NO: 24432 - DNA, 25 bp, Canis familiaris
aggaccacttaatctccagctgtcc

SEQ ID NO: 24433 - DNA, 25 bp, Canis familiaris
aggaacaccatatagctctcagggc

SEQ ID NO: 24434 - DNA, 25 bp, Canis familiaris
aggaaggtcattgatgcctcagccg

SEQ ID NO: 24435 - DNA, 25 bp, Canis familiaris
aggaagatgtattcttccccctggg

SEQ ID NO: 24436 - DNA, 25 bp, Canis familiaris
aggagatgatgttgactgtcaccca

SEQ ID NO: 24437 - DNA, 25 bp, Canis familiaris
aggagctgatgagtgtctgtggccc

SEQ ID NO: 24438 - DNA, 25 bp, Canis familiaris
aggactggctcaactgtgtgccacc

SEQ ID NO: 24439 - DNA, 25 bp, Canis familiaris
aggagtttgaccttgatgctccact

SEQ ID NO: 24440 - DNA, 25 bp, Canis familiaris
aggactcatagactctacagctccc

SEQ ID NO: 24441 - DNA, 25 bp, Canis familiaris
aggagccactgaccagaatggcccc

SEQ ID NO: 24442 - DNA, 25 bp, Canis familiaris
aggagcacacgtgcgttctacacac

SEQ ID NO: 24443 - DNA, 25 bp, Canis familiaris
aggacaatgttggagcttctgaacc

SEQ ID NO: 24444 - DNA, 25 bp, Canis familiaris
aggacaaacgcgtcgtctaggtctc

SEQ ID NO: 24445 - DNA, 25 bp, Canis familiaris
acgaagacaccgtgactggcttcct

SEQ ID NO: 24446 - DNA, 25 bp, Canis familiaris
acctggccaacgagaatccttcgtt

SEQ ID NO: 24447 - DNA, 25 bp, Canis familiaris
agcactggttaacggattccttcct

SEQ ID NO: 24448 - DNA, 25 bp, Canis familiaris
agcaatggtccctggaccggtcaat

SEQ ID NO: 24449 - DNA, 25 bp, Canis familiaris
aggagagctttcttgagaccgttca

SEQ ID NO: 24450 - DNA, 25 bp, Canis familiaris
aggagactatcctgagtcgcggaca

SEQ ID NO: 24451 - DNA, 25 bp, Canis familiaris
aggattcttcttgcagtgggggacc

SEQ ID NO: 24452 - DNA, 25 bp, Canis familiaris
aggattctactgggcgacgagggcc

SEQ ID NO: 24453 - DNA, 25 bp, Canis familiaris
aggattcagcttttggaaaggaggt

SEQ ID NO: 24454 - DNA, 25 bp, Canis familiaris
aggaatcagttctggccatgagagg

SEQ ID NO: 24455 - DNA, 25 bp, Canis familiaris
aggaatctgctggaaggcgatgtag

SEQ ID NO: 24456 - DNA, 25 bp, Canis familiaris
aggaacctgccatcggtgacaggcc

SEQ ID NO: 24457 - DNA, 25 bp, Canis familiaris
aggaactctccatatttgaaagtga

SEQ ID NO: 24458 - DNA, 25 bp, Canis familiaris
aggagaaccctcaagctatgaaatt

SEQ ID NO: 24459 - DNA, 25 bp, Canis familiaris
aggacaccacccagcaagattatgt

SEQ ID NO: 24460 - DNA, 25 bp, Canis familiaris
aggaaagcacccagacgctttgcgt

SEQ ID NO: 24461 - DNA, 25 bp, Canis familiaris
aggaaggccaacaagcatcgttccc

SEQ ID NO: 24462 - DNA, 25 bp, Canis familiaris
aggacctccaacacaggagtcctcc

SEQ ID NO: 24463 - DNA, 25 bp, Canis familiaris
aggaccccacagttcaagagtcgct

SEQ ID NO: 24464 - DNA, 25 bp, Canis familiaris
aggagccccacagaaacataccttt

SEQ ID NO: 24465 - DNA, 25 bp, Canis familiaris
agtaataccatagaaactgaccatt

SEQ ID NO: 24466 - DNA, 25 bp, Canis familiaris
aggaacatccgagaaactccacagc

SEQ ID NO: 24467 - DNA, 25 bp, Canis familiaris
aggaggactcgaactacgtcctgcg

SEQ ID NO: 24468 - DNA, 25 bp, Canis familiaris
aggaagatgttcaacgacgtcgctc

SEQ ID NO: 24469 - DNA, 25 bp, Canis familiaris
aggaaatgtttgcctacttcctgct

SEQ ID NO: 24470 - DNA, 25 bp, Canis familiaris
aggaagggggcacagcatgccactg

SEQ ID NO: 24471 - DNA, 25 bp, Canis familiaris
aggacaaggcggcgcagcagcaact

SEQ ID NO: 24472 - DNA, 25 bp, Canis familiaris
aggagaaggtacctcagcatgcctc

SEQ ID NO: 24473 - DNA, 25 bp, Canis familiaris
aggagtaatttcctgagagccccct

SEQ ID NO: 24474 - DNA, 25 bp, Canis familiaris
aggactgtattctggagagccaccc

SEQ ID NO: 24475 - DNA, 25 bp, Canis familiaris
aggacttaatgcggaagccacctcc

SEQ ID NO: 24476 - DNA, 25 bp, Canis familiaris
aggtatttaccatcacaatgcctcc

SEQ ID NO: 24477 - DNA, 25 bp, Canis familiaris
aggaacgcaacgttcgcacagccat

SEQ ID NO: 24478 - DNA, 25 bp, Canis familiaris
aggaatccaatggatcctcagccct

SEQ ID NO: 24479 - DNA, 25 bp, Canis familiaris
aggaagaacaggtcaatcagccctt

SEQ ID NO: 24480 - DNA, 25 bp, Canis familiaris
aggaaggcagggcatgctcagcccc

SEQ ID NO: 24481 - DNA, 25 bp, Canis familiaris
aggaaggaggcttcagctatgccgc

SEQ ID NO: 24482 - DNA, 25 bp, Canis familiaris
aggaatggcctggaagctctgcctg

SEQ ID NO: 24483 - DNA, 25 bp, Canis familiaris
aggaagcaggcttcaagctgccctg

SEQ ID NO: 24484 - DNA, 25 bp, Canis familiaris
aggactctgagctcaagttccatga

SEQ ID NO: 24485 - DNA, 25 bp, Canis familiaris
aggagctgctggtgacggctcctga

SEQ ID NO: 24486 - DNA, 25 bp, Canis familiaris
aggatctatcagggcacacccctga

SEQ ID NO: 24487 - DNA, 25 bp, Canis familiaris
aggagaacatcatgcacctctccag

SEQ ID NO: 24488 - DNA, 25 bp, Canis familiaris
aggacactgatgggtcctgctgctc

SEQ ID NO: 24489 - DNA, 25 bp, Canis familiaris
aggactatgacaggaccgtgctgcc

SEQ ID NO: 24490 - DNA, 25 bp, Canis familiaris
aggaaatacacacccgtgcacaact

SEQ ID NO: 24491 - DNA, 25 bp, Canis familiaris
agtgaaaaccaagcccagctaacct

SEQ ID NO: 24492 - DNA, 25 bp, Canis familiaris
agtgcaataaagatacccccaccct

SEQ ID NO: 24493 - DNA, 25 bp, Canis familiaris
aggaaaatgcagatagccttgcaca

SEQ ID NO: 24494 - DNA, 25 bp, Canis familiaris
aggagaaatagttttgcctgccatt

SEQ ID NO: 24495 - DNA, 25 bp, Canis familiaris
aggaacaattttgtgctctggcctt

SEQ ID NO: 24496 - DNA, 25 bp, Canis familiaris
aggaaacactgtagtatctcggccc

SEQ ID NO: 24497 - DNA, 25 bp, Canis familiaris
aggagacaccgttttctttcatcct

SEQ ID NO: 24498 - DNA, 25 bp, Canis familiaris
aggagtgaacgtgtgcctttcctcc

SEQ ID NO: 24499 - DNA, 25 bp, Canis familiaris
aggagttatcggggtgctccatcct

SEQ ID NO: 24500 - DNA, 25 bp, Canis familiaris
agggaattcgacattgtccaccggt

SEQ ID NO: 24501 - DNA, 25 bp, Canis familiaris
aggagaagttgcagtttgccctcgg

SEQ ID NO: 24502 - DNA, 25 bp, Canis familiaris
aggaaagggcatgtgcttctcctgc

SEQ ID NO: 24503 - DNA, 25 bp, Canis familiaris
aggaagagagagactacctcccctt

SEQ ID NO: 24504 - DNA, 25 bp, Canis familiaris
aggaagatcatagactcctcccgtt

SEQ ID NO: 24505 - DNA, 25 bp, Canis familiaris
aggagaaaacaactcacaccacgtt

SEQ ID NO: 24506 - DNA, 25 bp, Canis familiaris
aggaacaaaaacattccactgttat

SEQ ID NO: 24507 - DNA, 25 bp, Canis familiaris
aagtaataaaacaggcttcatttat

SEQ ID NO: 24508 - DNA, 25 bp, Canis familiaris
aggtaaaacaacagagctacatttc

SEQ ID NO: 24509 - DNA, 25 bp, Canis familiaris
aggttacgattacggaatagattct

SEQ ID NO: 24510 - DNA, 25 bp, Canis familiaris
aggttcaaatcttcgtgttcacttt

SEQ ID NO: 24511 - DNA, 25 bp, Canis familiaris
aggttcaaatcttcgtgttcacttt

SEQ ID NO: 24512 - DNA, 25 bp, Canis familiaris
aggttcaaatcttcgtgttcacttt

SEQ ID NO: 24513 - DNA, 25 bp, Canis familiaris
aggttcaaatcttcgtgttcacttt

SEQ ID NO: 24514 - DNA, 25 bp, Canis familiaris
aggattccaatccacggatgtccca

SEQ ID NO: 24515 - DNA, 25 bp, Canis familiaris
aggttacaatttggtgcagccccta

SEQ ID NO: 24516 - DNA, 25 bp, Canis familiaris
aggatttcaattgaggaaccacttg

SEQ ID NO: 24517 - DNA, 25 bp, Canis familiaris
aggtctggtttctggaagtcacttg

SEQ ID NO: 24518 - DNA, 25 bp, Canis familiaris
aggttgattttcccagaaggtgctg

SEQ ID NO: 24519 - DNA, 25 bp, Canis familiaris
aggtttggtactcagaagggcctct

SEQ ID NO: 24520 - DNA, 25 bp, Canis familiaris
aggtttggaagcaggagaccgccct

SEQ ID NO: 24521 - DNA, 25 bp, Canis familiaris
aggaggaggaaatgagacccgcccg

SEQ ID NO: 24522 - DNA, 25 bp, Canis familiaris
aggaccgggaagcaaccggcagcac

SEQ ID NO: 24523 - DNA, 25 bp, Canis familiaris
aggaccctgaaacatacctggctga

SEQ ID NO: 24524 - DNA, 25 bp, Canis familiaris
aggacccttaagatgaagctgagct

SEQ ID NO: 24525 - DNA, 25 bp, Canis familiaris
aggacaggcctgcagttgagacgac

SEQ ID NO: 24526 - DNA, 25 bp, Canis familiaris
aggacagcagctgccatatctgata

SEQ ID NO: 24527 - DNA, 25 bp, Canis familiaris
aggacacagattccttctggaaccc

SEQ ID NO: 24528 - DNA, 25 bp, Canis familiaris
aggacacagccttttacaagacccg

SEQ ID NO: 24529 - DNA, 25 bp, Canis familiaris
aggacacacccattacacaagagcc

SEQ ID NO: 24530 - DNA, 25 bp, Canis familiaris
aggatcacaacctgagccaaaagca

SEQ ID NO: 24531 - DNA, 25 bp, Canis familiaris
aggaagagaccccaggacagaggcc

SEQ ID NO: 24532 - DNA, 25 bp, Canis familiaris
aggagaacaccctggagatgcacca

SEQ ID NO: 24533 - DNA, 25 bp, Canis familiaris
aggaagagacctgtccagtgcactc

SEQ ID NO: 24534 - DNA, 25 bp, Canis familiaris
aggaagatacttcctgtcattcacc

SEQ ID NO: 24535 - DNA, 25 bp, Canis familiaris
aggaaacagtcaccgatcttgcagc

SEQ ID NO: 24536 - DNA, 25 bp, Canis familiaris
aggaacaaccacatttgctgcaggg

SEQ ID NO: 24537 - DNA, 25 bp, Canis familiaris
aggactgaaccgaattgctgccaag

SEQ ID NO: 24538 - DNA, 25 bp, Canis familiaris
aggttgaagccaccgtctgaaccat

SEQ ID NO: 24539 - DNA, 25 bp, Canis familiaris
aggatctaaggaaggtcgcgaacat

SEQ ID NO: 24540 - DNA, 25 bp, Canis familiaris
aggatcttagaactctgggcgacct

SEQ ID NO: 24541 - DNA, 25 bp, Canis familiaris
aggagctgtggctactctaactgac

SEQ ID NO: 24542 - DNA, 25 bp, Canis familiaris
aggagcggatgattcccaaggcagc

SEQ ID NO: 24543 - DNA, 25 bp, Canis familiaris
aggacaggctgtgccaatcaggagc

SEQ ID NO: 24544 - DNA, 25 bp, Canis familiaris
aggatcgttttctaatctgtatgct

SEQ ID NO: 24545 - DNA, 25 bp, Canis familiaris
aggactttgattgcacattgttgtt

SEQ ID NO: 24546 - DNA, 25 bp, Canis familiaris
aggagctttgtaaccaggcatctta

SEQ ID NO: 24547 - DNA, 25 bp, Canis familiaris
agggcttttatctcaaatttttctg

SEQ ID NO: 24548 - DNA, 25 bp, Canis familiaris
aggactgttttctcaaatgtttgta

SEQ ID NO: 24549 - DNA, 25 bp, Canis familiaris
aggacttttcttcatataggatatt

SEQ ID NO: 24550 - DNA, 25 bp, Canis familiaris
aggacattttcttgaagtactggtg

SEQ ID NO: 24551 - DNA, 25 bp, Canis familiaris
aggacagttgtccagaagcaggctg

SEQ ID NO: 24552 - DNA, 25 bp, Canis familiaris
aggacagtctaccgatgatgattct

SEQ ID NO: 24553 - DNA, 25 bp, Canis familiaris
aggacactatcaccgatgttcatcg

SEQ ID NO: 24554 - DNA, 25 bp, Canis familiaris
aggacacatagacaagttgacaaaa

SEQ ID NO: 24555 - DNA, 25 bp, Canis familiaris
aggacaggagacacgttgacacaca

SEQ ID NO: 24556 - DNA, 25 bp, Canis familiaris
aggacatggacgacggttggcacac

SEQ ID NO: 24557 - DNA, 25 bp, Canis familiaris
aggacactgaggagggggcattgcc

SEQ ID NO: 24558 - DNA, 25 bp, Canis familiaris
aggagctgggggaggggcatctcct

SEQ ID NO: 24559 - DNA, 25 bp, Canis familiaris
agtctgaggggtgtggggccatggt

SEQ ID NO: 24560 - DNA, 25 bp, Canis familiaris
agtcggggagtgctgtcttgaagag

SEQ ID NO: 24561 - DNA, 25 bp, Canis familiaris
aggagggaattgaaattgtgaacac

SEQ ID NO: 24562 - DNA, 25 bp, Canis familiaris
aggatggacaagcttcatttatacc

SEQ ID NO: 24563 - DNA, 25 bp, Canis familiaris
aggagctgccagtagacatcatctt

SEQ ID NO: 24564 - DNA, 25 bp, Canis familiaris
aggacatcagcaagcaggatcagtt

SEQ ID NO: 24565 - DNA, 25 bp, Canis familiaris
aggactgatcccagatcagcctcgc

SEQ ID NO: 24566 - DNA, 25 bp, Canis familiaris
aggacatgacactggaaggtgacga

SEQ ID NO: 24567 - DNA, 25 bp, Canis familiaris
aggtcaactcctcagcagggaagac

SEQ ID NO: 24568 - DNA, 25 bp, Canis familiaris
aggtctacaccatccaggggaactc

SEQ ID NO: 24569 - DNA, 25 bp, Canis familiaris
aggtcccatgcctccacatgggatg

SEQ ID NO: 24570 - DNA, 25 bp, Canis familiaris
agggcccgaactgacgacgatgggg

SEQ ID NO: 24571 - DNA, 25 bp, Canis familiaris
aggagcagcccatggagacgacggg

SEQ ID NO: 24572 - DNA, 25 bp, Canis familiaris
aggacagcaacgggctaataggggt

SEQ ID NO: 24573 - DNA, 25 bp, Canis familiaris
aggtcacgaaggccgtaaggtggat

SEQ ID NO: 24574 - DNA, 25 bp, Canis familiaris
aggtcaagaaggctgtaaatgccaa

SEQ ID NO: 24575 - DNA, 25 bp, Canis familiaris
aggacatcaaagtttctttatggca

SEQ ID NO: 24576 - DNA, 25 bp, Canis familiaris
aggaccgagaggcacttgtagaatt

SEQ ID NO: 24577 - DNA, 25 bp, Canis familiaris
aggactcgtgaccagacgtctggag

SEQ ID NO: 24578 - DNA, 25 bp, Canis familiaris
aggacttgagcagcggcgtctgcaa

SEQ ID NO: 24579 - DNA, 25 bp, Canis familiaris
aggacttgtgcacatgtgcccatgc

SEQ ID NO: 24580 - DNA, 25 bp, Canis familiaris
aggacttctagcaatgtgaccggag

SEQ ID NO: 24581 - DNA, 25 bp, Canis familiaris
aggacttctttgtcatagcctgggc

SEQ ID NO: 24582 - DNA, 25 bp, Canis familiaris
aggatcttttgtctagtctctgttc

SEQ ID NO: 24583 - DNA, 25 bp, Canis familiaris
aggttgctttgtctaactcgatgcc

SEQ ID NO: 24584 - DNA, 25 bp, Canis familiaris
aggtgtgcaacttcgtagactggat

SEQ ID NO: 24585 - DNA, 25 bp, Canis familiaris
aggagtgacacttcttaggttctgg

SEQ ID NO: 24586 - DNA, 25 bp, Canis familiaris
aggattacacatgctgtcaggggcc

SEQ ID NO: 24587 - DNA, 25 bp, Canis familiaris
aggacagaactcttgcctggtgacc

SEQ ID NO: 24588 - DNA, 25 bp, Canis familiaris
aggatagagcctgggccttgtaccc

SEQ ID NO: 24589 - DNA, 25 bp, Canis familiaris
aggagaatgcctgtggtcttactgc

SEQ ID NO: 24590 - DNA, 25 bp, Canis familiaris
aggagacgtgctgtgacttcttcac

SEQ ID NO: 24591 - DNA, 25 bp, Canis familiaris
aggagaaagctctgggcatcctgac

SEQ ID NO: 24592 - DNA, 25 bp, Canis familiaris
aggaaacagtctggacagctcctcc

SEQ ID NO: 24593 - DNA, 25 bp, Canis familiaris
aggagaagctgtgctacgtcgccct

SEQ ID NO: 24594 - DNA, 25 bp, Canis familiaris
agtaggtctggatacgtacgcctcc

SEQ ID NO: 24595 - DNA, 25 bp, Canis familiaris
aggaggatgctgctacaactacgcc

SEQ ID NO: 24596 - DNA, 25 bp, Canis familiaris
aggagagattgtctggtctgagccc

SEQ ID NO: 24597 - DNA, 25 bp, Canis familiaris
aggagaagcggcgaggcctggacaa

SEQ ID NO: 24598 - DNA, 25 bp, Canis familiaris
aggagagagggggacagctggccac

SEQ ID NO: 24599 - DNA, 25 bp, Canis familiaris
aggagaagcccacagagtgaccacg

SEQ ID NO: 24600 - DNA, 25 bp, Canis familiaris
aggagacctctccaatggatacaca

SEQ ID NO: 24601 - DNA, 25 bp, Canis familiaris
aggagctccttaagtggttgcacac

SEQ ID NO: 24602 - DNA, 25 bp, Canis familiaris
aggagcaggccttgagggattccct

SEQ ID NO: 24603 - DNA, 25 bp, Canis familiaris
aggagcaggccatcaagcgtggctc

SEQ ID NO: 24604 - DNA, 25 bp, Canis familiaris
aggacagctggctaaacagatgatt

SEQ ID NO: 24605 - DNA, 25 bp, Canis familiaris
aggactgctgggagacagagctgct

SEQ ID NO: 24606 - DNA, 25 bp, Canis familiaris
aggtctgcattggaaacacgtttta

SEQ ID NO: 24607 - DNA, 25 bp, Canis familiaris
aggttcttggagttgatcagtctga

SEQ ID NO: 24608 - DNA, 25 bp, Canis familiaris
aggttgctctagtttcatattcaaa

SEQ ID NO: 24609 - DNA, 25 bp, Canis familiaris
aggtagctttatttgacttcacaga

SEQ ID NO: 24610 - DNA, 25 bp, Canis familiaris
aggagcagtttatcaacttcaagtt

SEQ ID NO: 24611 - DNA, 25 bp, Canis familiaris
aggagttgttcattttgctgaaatt

SEQ ID NO: 24612 - DNA, 25 bp, Canis familiaris
aggagatatattgtgactcataaga

SEQ ID NO: 24613 - DNA, 25 bp, Canis familiaris
aggatctcatccagtagctcatata

SEQ ID NO: 24614 - DNA, 25 bp, Canis familiaris
aggtctcagagatgtggcatatcag

SEQ ID NO: 24615 - DNA, 25 bp, Canis familiaris
aggagccacaaaggtgatgtcacca

SEQ ID NO: 24616 - DNA, 25 bp, Canis familiaris
aggagcagaaacggtgtccaggccc

SEQ ID NO: 24617 - DNA, 25 bp, Canis familiaris
aggaccggagcagggtccatgcgcc

SEQ ID NO: 24618 - DNA, 25 bp, Canis familiaris
aggacgggaagaacctcatcgccgc

SEQ ID NO: 24619 - DNA, 25 bp, Canis familiaris
aggacaggcagatagtggtccccct

SEQ ID NO: 24620 - DNA, 25 bp, Canis familiaris
aggacaggcagatctggttcctctc

SEQ ID NO: 24621 - DNA, 25 bp, Canis familiaris
aggtctgacgagacggttcacctgc

SEQ ID NO: 24622 - DNA, 25 bp, Canis familiaris
aggtctcaggatgcctttggttgct

SEQ ID NO: 24623 - DNA, 25 bp, Canis familiaris
aggatccaggggctcattggttctc

SEQ ID NO: 24624 - DNA, 25 bp, Canis familiaris
aggatccagtgtctgttttattcag

SEQ ID NO: 24625 - DNA, 25 bp, Canis familiaris
aggactgagcgtttctttattgtaa

SEQ ID NO: 24626 - DNA, 25 bp, Canis familiaris
aggactggcagactagcttttttcc

SEQ ID NO: 24627 - DNA, 25 bp, Canis familiaris
aggacattctgagacttccttcctt

SEQ ID NO: 24628 - DNA, 25 bp, Canis familiaris
aggagatttgggaggtgttatttgg

SEQ ID NO: 24629 - DNA, 25 bp, Canis familiaris
aggactttggagccggtgttgtttg

SEQ ID NO: 24630 - DNA, 25 bp, Canis familiaris
aggatcgtggggaggttagtcttat

SEQ ID NO: 24631 - DNA, 25 bp, Canis familiaris
aggattcgcgggaggtgtagcccta

SEQ ID NO: 24632 - DNA, 25 bp, Canis familiaris
aggacggctgggagttgctcaggcc

SEQ ID NO: 24633 - DNA, 25 bp, Canis familiaris
aggactggctgcagggggaagcgcc

SEQ ID NO: 24634 - DNA, 25 bp, Canis familiaris
aggactcctatgtgggtgacgaggc

SEQ ID NO: 24635 - DNA, 25 bp, Canis familiaris
aggactacgtgtgaggggcagcggc

SEQ ID NO: 24636 - DNA, 25 bp, Canis familiaris
aggacttcgtggtgtggatgcgcac

SEQ ID NO: 24637 - DNA, 25 bp, Canis familiaris
agcgacttaggtgtgaggattgcag

SEQ ID NO: 24638 - DNA, 25 bp, Canis familiaris
aggacttggggagtgcaggctctgg

SEQ ID NO: 24639 - DNA, 25 bp, Canis familiaris
aggacattgttgttctgggcgtgga

SEQ ID NO: 24640 - DNA, 25 bp, Canis familiaris
aggagctcatgatggttggagggga

SEQ ID NO: 24641 - DNA, 25 bp, Canis familiaris
aggagtcatgagacccatgaaaggc

SEQ ID NO: 24642 - DNA, 25 bp, Canis familiaris
aggagacgcagagacagacaagatg

SEQ ID NO: 24643 - DNA, 25 bp, Canis familiaris
aggagacaagaccagagctagcctg

SEQ ID NO: 24644 - DNA, 25 bp, Canis familiaris
aggagaagtatgcccagtacctgcc

SEQ ID NO: 24645 - DNA, 25 bp, Canis familiaris
aggaaaggcagaccacctgcctgct

SEQ ID NO: 24646 - DNA, 25 bp, Canis familiaris
aggacagaggatcgacacctgctcc

SEQ ID NO: 24647 - DNA, 25 bp, Canis familiaris
aggaaaggagcaaccttgctgcccc

SEQ ID NO: 24648 - DNA, 25 bp, Canis familiaris
aggtgtttggcaacctcaatgcccc

SEQ ID NO: 24649 - DNA, 25 bp, Canis familiaris
aggtttatgtgaccctgcagagcat

SEQ ID NO: 24650 - DNA, 25 bp, Canis familiaris
aggactcttggggtcgtgagatcga

SEQ ID NO: 24651 - DNA, 25 bp, Canis familiaris
aggtctcctggggtaggaccaagtg

SEQ ID NO: 24652 - DNA, 25 bp, Canis familiaris
aggaccctgggatcaggacctaagc

SEQ ID NO: 24653 - DNA, 25 bp, Canis familiaris
aggaccttgtctttagaacctgaag

SEQ ID NO: 24654 - DNA, 25 bp, Canis familiaris
cgggactggtctttggagtagaaat

SEQ ID NO: 24655 - DNA, 25 bp, Canis familiaris
aggtggggttatggtatgtgggaat

SEQ ID NO: 24656 - DNA, 25 bp, Canis familiaris
agggggagtaatcaggtgtaggatg

SEQ ID NO: 24657 - DNA, 25 bp, Canis familiaris
aggagtgggagagattgtttagaga

SEQ ID NO: 24658 - DNA, 25 bp, Canis familiaris
agggtggtatgagcttttcttggaa

SEQ ID NO: 24659 - DNA, 25 bp, Canis familiaris
aggggacttcagctggattctgttg

SEQ ID NO: 24660 - DNA, 25 bp, Canis familiaris
aggaggatcacgccgtggtacgttc

SEQ ID NO: 24661 - DNA, 25 bp, Canis familiaris
aggagccgcaagcggtgctgggttc

SEQ ID NO: 24662 - DNA, 25 bp, Canis familiaris
aggacactgaactatcgttgatgtt

SEQ ID NO: 24663 - DNA, 25 bp, Canis familiaris
aggaccagacactacggtattgcaa

SEQ ID NO: 24664 - DNA, 25 bp, Canis familiaris
aggacgacaccgtgatgtttcgacc

SEQ ID NO: 24665 - DNA, 25 bp, Canis familiaris
aggatggtacctcagtgtgttcaac

SEQ ID NO: 24666 - DNA, 25 bp, Canis familiaris
aggtcttcctgccgaggtttaagct

SEQ ID NO: 24667 - DNA, 25 bp, Canis familiaris
aggacctcactgggcaagtctaaca

SEQ ID NO: 24668 - DNA, 25 bp, Canis familiaris
aggacctcactgagatcagggacat

SEQ ID NO: 24669 - DNA, 25 bp, Canis familiaris
aggagaacactgaggcagcctgcaa

SEQ ID NO: 24670 - DNA, 25 bp, Canis familiaris
aggagaacctgaactgcaaccaagc

SEQ ID NO: 24671 - DNA, 25 bp, Canis familiaris
aggacaagcctcactgagcaaccaa

SEQ ID NO: 24672 - DNA, 25 bp, Canis familiaris
aggacattgacctgctgaaatccag

SEQ ID NO: 24673 - DNA, 25 bp, Canis familiaris
aggacttagagctgtagaaatgcac

SEQ ID NO: 24674 - DNA, 25 bp, Canis familiaris
aggacttatggcagtaatcatggct

SEQ ID NO: 24675 - DNA, 25 bp, Canis familiaris
aggacctgtctctgtaactggggac

SEQ ID NO: 24676 - DNA, 25 bp, Canis familiaris
aggactcttatcagcatatacgtgc

SEQ ID NO: 24677 - DNA, 25 bp, Canis familiaris
aggactgctaatctcagttcgctct

SEQ ID NO: 24678 - DNA, 25 bp, Canis familiaris
aggaggcagactttcaggctccagc

SEQ ID NO: 24679 - DNA, 25 bp, Canis familiaris
aggagctgctacaggcagagcccag

SEQ ID NO: 24680 - DNA, 25 bp, Canis familiaris
aggacactgagcaagagaggcccta

SEQ ID NO: 24681 - DNA, 25 bp, Canis familiaris
aggactctgcagcgaggatgaagct

SEQ ID NO: 24682 - DNA, 25 bp, Canis familiaris
aggacatggccgggctgctgaagcc

SEQ ID NO: 24683 - DNA, 25 bp, Canis familiaris
aggacatggcgggcctgctgaagcc

SEQ ID NO: 24684 - DNA, 25 bp, Canis familiaris
aggagaggggactgcgagaccaccc

SEQ ID NO: 24685 - DNA, 25 bp, Canis familiaris
aggaggggctacactgagcccagca

SEQ ID NO: 24686 - DNA, 25 bp, Canis familiaris
aggagaggacttccctgcagcacgt

SEQ ID NO: 24687 - DNA, 25 bp, Canis familiaris
aggataatttgtgcctgccattgtt

SEQ ID NO: 24688 - DNA, 25 bp, Canis familiaris
aggactctaagagcttgcccatgtt

SEQ ID NO: 24689 - DNA, 25 bp, Canis familiaris
aggacttccagcgagttctcaatgt

SEQ ID NO: 24690 - DNA, 25 bp, Canis familiaris
aggacttccagcttctttagatgaa

SEQ ID NO: 24691 - DNA, 25 bp, Canis familiaris
aggaccattatgcatcttctgtata

SEQ ID NO: 24692 - DNA, 25 bp, Canis familiaris
aggaccattatgcatcttctgtata

SEQ ID NO: 24693 - DNA, 25 bp, Canis familiaris
aggagctgtttaatcttgtggtaga

SEQ ID NO: 24694 - DNA, 25 bp, Canis familiaris
aggacctggagaagtggctggctaa

SEQ ID NO: 24695 - DNA, 25 bp, Canis familiaris
aggacctggtgcaggcactgggact

SEQ ID NO: 24696 - DNA, 25 bp, Canis familiaris
aggacctgttcctgcattgaggaaa

SEQ ID NO: 24697 - DNA, 25 bp, Canis familiaris
aggaccctaccagattgaggagatt

SEQ ID NO: 24698 - DNA, 25 bp, Canis familiaris
aggacgccaagcagacgtagaggat

SEQ ID NO: 24699 - DNA, 25 bp, Canis familiaris
aggacgccgagaaggcggtggagct

SEQ ID NO: 24700 - DNA, 25 bp, Canis familiaris
aggacagtctggtaggctggcgaac

SEQ ID NO: 24701 - DNA, 25 bp, Canis familiaris
aggagtccggaacggagctgcagcc

SEQ ID NO: 24702 - DNA, 25 bp, Canis familiaris
aggagcccaggatggagacagaccc

SEQ ID NO: 24703 - DNA, 25 bp, Canis familiaris
aggatgcccaggttggatacctatt

SEQ ID NO: 24704 - DNA, 25 bp, Canis familiaris
aggagacgacgacacagatgactat

SEQ ID NO: 24705 - DNA, 25 bp, Canis familiaris
aggagccagacgaaagcacagacta

SEQ ID NO: 24706 - DNA, 25 bp, Canis familiaris
aggactccaagctaggacatgacta

SEQ ID NO: 24707 - DNA, 25 bp, Canis familiaris
aggacccaaaagtgctatataagga

SEQ ID NO: 24708 - DNA, 25 bp, Canis familiaris
aggagcccaaaatctgtatattatc

SEQ ID NO: 24709 - DNA, 25 bp, Canis familiaris
agtggctaaaacacttagaatacaa

SEQ ID NO: 24710 - DNA, 25 bp, Canis familiaris
agggtataaccttcttcaacaatct

SEQ ID NO: 24711 - DNA, 25 bp, Canis familiaris
aggtagaaaatctcccaacacttgg

SEQ ID NO: 24712 - DNA, 25 bp, Canis familiaris
aggtaactaactccttcatcttctt

SEQ ID NO: 24713 - DNA, 25 bp, Canis familiaris
aggttcaatcttcgtgttcacttta

SEQ ID NO: 24714 - DNA, 25 bp, Canis familiaris
aggtgtccctatctacagactttaa

SEQ ID NO: 24715 - DNA, 25 bp, Canis familiaris
aggatttccagataacatggctctt

SEQ ID NO: 24716 - DNA, 25 bp, Canis familiaris
aggatttccaacttactgtgtaact

SEQ ID NO: 24717 - DNA, 25 bp, Canis familiaris
aggtttcaaacctcttttcacatga

SEQ ID NO: 24718 - DNA, 25 bp, Canis familiaris
aggttgaaccaccttcattttactg

SEQ ID NO: 24719 - DNA, 25 bp, Canis familiaris
aggtctgaaatttttcttcttgagg

SEQ ID NO: 24720 - DNA, 25 bp, Canis familiaris
aggattaaatcctccatttcttagg

SEQ ID NO: 24721 - DNA, 25 bp, Canis familiaris
aggatataatattcttctcaaactt

SEQ ID NO: 24722 - DNA, 25 bp, Canis familiaris
aggatatggttcaatttacgactgc

SEQ ID NO: 24723 - DNA, 25 bp, Canis familiaris
aggtagtgactgtatattacaatac

SEQ ID NO: 24724 - DNA, 25 bp, Canis familiaris
aggatggcttgttctctttaatacc

SEQ ID NO: 24725 - DNA, 25 bp, Canis familiaris
aggaggatgtcttgcttctttaact

SEQ ID NO: 24726 - DNA, 25 bp, Canis familiaris
aggaggatgtcttgtttttaattag

SEQ ID NO: 24727 - DNA, 25 bp, Canis familiaris
aggaggacttcattgctgttctaat

SEQ ID NO: 24728 - DNA, 25 bp, Canis familiaris
aggagttgtctcttgtgtataatat

SEQ ID NO: 24729 - DNA, 25 bp, Canis familiaris
aggagattgtcctacttctataata

SEQ ID NO: 24730 - DNA, 25 bp, Canis familiaris
aggagactgtccctctgactggaaa

SEQ ID NO: 24731 - DNA, 25 bp, Canis familiaris
aggagactgttaatctatgctagat

SEQ ID NO: 24732 - DNA, 25 bp, Canis familiaris
aggagacatctccatttactatgat

SEQ ID NO: 24733 - DNA, 25 bp, Canis familiaris
aggagacacccaggaattatgagct

SEQ ID NO: 24734 - DNA, 25 bp, Canis familiaris
aggagcatagcccatgaaatccatg

SEQ ID NO: 24735 - DNA, 25 bp, Canis familiaris
aggactggcccaatcaactatgaac

SEQ ID NO: 24736 - DNA, 25 bp, Canis familiaris
aggactggccatgtaattatgattg

SEQ ID NO: 24737 - DNA, 25 bp, Canis familiaris
aggacatggccattgttttcagtat

SEQ ID NO: 24738 - DNA, 25 bp, Canis familiaris
aggttggacaagatctgacagtgag

SEQ ID NO: 24739 - DNA, 25 bp, Canis familiaris
aggggagaataacttgactgatgga

SEQ ID NO: 24740 - DNA, 25 bp, Canis familiaris
aggtaaacattttctctgctcagga

SEQ ID NO: 24741 - DNA, 25 bp, Canis familiaris
aggtcgaacaaggtcctgatgcgga

SEQ ID NO: 24742 - DNA, 25 bp, Canis familiaris
aggataacaagggatgccctgggtg

SEQ ID NO: 24743 - DNA, 25 bp, Canis familiaris
aggataaagagggcatcccgcctga

SEQ ID NO: 24744 - DNA, 25 bp, Canis familiaris
aggataaagagggcatcccgcctga

SEQ ID NO: 24745 - DNA, 25 bp, Canis familiaris
aggaggaagggagcggcagcagtga

SEQ ID NO: 24746 - DNA, 25 bp, Canis familiaris
aggagaaggggtggcttgcaccgtc

SEQ ID NO: 24747 - DNA, 25 bp, Canis familiaris
aggagaaggtggacctgctgctgct

SEQ ID NO: 24748 - DNA, 25 bp, Canis familiaris
aggagtcgaatgtgctctgcttgtc

SEQ ID NO: 24749 - DNA, 25 bp, Canis familiaris
aggagctcgagtagatgtccgtccc

SEQ ID NO: 24750 - DNA, 25 bp, Canis familiaris
aggagctacagaggcaggccagccc

SEQ ID NO: 24751 - DNA, 25 bp, Canis familiaris
aggagccagagtggtggccagcggc

SEQ ID NO: 24752 - DNA, 25 bp, Canis familiaris
agaagctgaagaaggaccggcccga

SEQ ID NO: 24753 - DNA, 25 bp, Canis familiaris
aggagataacacgagaccggcgcac

SEQ ID NO: 24754 - DNA, 25 bp, Canis familiaris
aggagtaagacccctggaccaccag

SEQ ID NO: 24755 - DNA, 25 bp, Canis familiaris
aggagtaagagcctcctggaccacc

SEQ ID NO: 24756 - DNA, 25 bp, Canis familiaris
aggagtaagagcctcctggaccacc

SEQ ID NO: 24757 - DNA, 25 bp, Canis familiaris
aggaggaagcagctcccaatccact

SEQ ID NO: 24758 - DNA, 25 bp, Canis familiaris
aggagcgtagattgtccctactcct

SEQ ID NO: 24759 - DNA, 25 bp, Canis familiaris
aggtcagtggattgtatcaaagtca

SEQ ID NO: 24760 - DNA, 25 bp, Canis familiaris
aggatagatcgctttatgccagacc

SEQ ID NO: 24761 - DNA, 25 bp, Canis familiaris
aggagatgaggccttctcacagtcc

SEQ ID NO: 24762 - DNA, 25 bp, Canis familiaris
aggagatggccactgccgcatcctc

SEQ ID NO: 24763 - DNA, 25 bp, Canis familiaris
aggagcaggtgcagcacttcctgga

SEQ ID NO: 24764 - DNA, 25 bp, Canis familiaris
aggttcaggtactcctctgagacct

SEQ ID NO: 24765 - DNA, 25 bp, Canis familiaris
aggttgtagttaactcatttgaggc

SEQ ID NO: 24766 - DNA, 25 bp, Canis familiaris
aggatttcgtggagatttagctgtc

SEQ ID NO: 24767 - DNA, 25 bp, Canis familiaris
aggatattagtttctgtttagctga

SEQ ID NO: 24768 - DNA, 25 bp, Canis familiaris
aggattcggtttttgtctatatata

SEQ ID NO: 24769 - DNA, 25 bp, Canis familiaris
aggattgttttttagctcattcagc

SEQ ID NO: 24770 - DNA, 25 bp, Canis familiaris
aggactttctcttacacatagccat

SEQ ID NO: 24771 - DNA, 25 bp, Canis familiaris
aggagtgtttgcttcaaacctcata

SEQ ID NO: 24772 - DNA, 25 bp, Canis familiaris
aggagttctccaggcagaagccaac

SEQ ID NO: 24773 - DNA, 25 bp, Canis familiaris
aggagtccccaggttatgctaatct

SEQ ID NO: 24774 - DNA, 25 bp, Canis familiaris
aggaggccatcctgtatagacgtct

SEQ ID NO: 24775 - DNA, 25 bp, Canis familiaris
aggaggcactaagtttggatcataa

SEQ ID NO: 24776 - DNA, 25 bp, Canis familiaris
aggacgccatggctactgcgatatc

SEQ ID NO: 24777 - DNA, 25 bp, Canis familiaris
aggactctcatccttcacttgagtc

SEQ ID NO: 24778 - DNA, 25 bp, Canis familiaris
aggagattatcctcagctatctatc

SEQ ID NO: 24779 - DNA, 25 bp, Canis familiaris
aggagatttctcactctatcaagga

SEQ ID NO: 24780 - DNA, 25 bp, Canis familiaris
aggactatagataactttcactggt

SEQ ID NO: 24781 - DNA, 25 bp, Canis familiaris
agtgcaatatagccttttacctggt

SEQ ID NO: 24782 - DNA, 25 bp, Canis familiaris
aggagataataaaattacctgtgca

SEQ ID NO: 24783 - DNA, 25 bp, Canis familiaris
aggtcttgaaataatggcccgtgca

SEQ ID NO: 24784 - DNA, 25 bp, Canis familiaris
aggttgtgactattcattggccgtg

SEQ ID NO: 24785 - DNA, 25 bp, Canis familiaris
aggtttcagctattaagaactggtg

SEQ ID NO: 24786 - DNA, 25 bp, Canis familiaris
aggtcacccctgccaaagagtggtg

SEQ ID NO: 24787 - DNA, 25 bp, Canis familiaris
aggtcctccaggacaaggaattggg

SEQ ID NO: 24788 - DNA, 25 bp, Canis familiaris
aggacctgtcaggctacatggaata

SEQ ID NO: 24789 - DNA, 25 bp, Canis familiaris
aggacctgaacgaactgcagacgct

SEQ ID NO: 24790 - DNA, 25 bp, Canis familiaris
aggactctgacttggacatggccct

SEQ ID NO: 24791 - DNA, 25 bp, Canis familiaris
aggaccgcagcaaggtcatggccac

SEQ ID NO: 24792 - DNA, 25 bp, Canis familiaris
aggaccactgcatatgtctgcatgt

SEQ ID NO: 24793 - DNA, 25 bp, Canis familiaris
aggagatactgatggcactgatggc

SEQ ID NO: 24794 - DNA, 25 bp, Canis familiaris
aggagaatagaggagctgctggctg

SEQ ID NO: 24795 - DNA, 25 bp, Canis familiaris
aggacgataatggtgttcctttcgt

SEQ ID NO: 24796 - DNA, 25 bp, Canis familiaris
aggatcctactggctgtgtggtttc

SEQ ID NO: 24797 - DNA, 25 bp, Canis familiaris
aggacctacgcactttatttctgcc

SEQ ID NO: 24798 - DNA, 25 bp, Canis familiaris
aggagccagacatccattttcttcc

SEQ ID NO: 24799 - DNA, 25 bp, Canis familiaris
aggaggaacattggctttcatcctc

SEQ ID NO: 24800 - DNA, 25 bp, Canis familiaris
aggagataagcaagtctttcagacc

SEQ ID NO: 24801 - DNA, 25 bp, Canis familiaris
aggatgcatgagtcccttttcaacc

SEQ ID NO: 24802 - DNA, 25 bp, Canis familiaris
aggagctgcagtgttgtcatgtccc

SEQ ID NO: 24803 - DNA, 25 bp, Canis familiaris
aggacgagctggaagtcatcgccac

SEQ ID NO: 24804 - DNA, 25 bp, Canis familiaris
aggatggactggacataccctcact

SEQ ID NO: 24805 - DNA, 25 bp, Canis familiaris
aggattgactatccatacccacatc

SEQ ID NO: 24806 - DNA, 25 bp, Canis familiaris
agtgaatgacttccacagccatggc

SEQ ID NO: 24807 - DNA, 25 bp, Canis familiaris
aggaggtctttggcagcctggacta

SEQ ID NO: 24808 - DNA, 25 bp, Canis familiaris
aggagtgctttcgtaccatggagct

SEQ ID NO: 24809 - DNA, 25 bp, Canis familiaris
aggagtgcttgaaatcccttggctt

SEQ ID NO: 24810 - DNA, 25 bp, Canis familiaris
aggagatctccatatcacgtttctt

SEQ ID NO: 24811 - DNA, 25 bp, Canis familiaris
agggatcctaggaactgtcaatcta

SEQ ID NO: 24812 - DNA, 25 bp, Canis familiaris
agggtgcgtacggtctggatgcact

SEQ ID NO: 24813 - DNA, 25 bp, Canis familiaris
agagtgtggtttctcacgtactcgc

SEQ ID NO: 24814 - DNA, 25 bp, Canis familiaris
aggttgtggagtatacgtacaggcc

SEQ ID NO: 24815 - DNA, 25 bp, Canis familiaris
agtccattggttactaggtccaggt

SEQ ID NO: 24816 - DNA, 25 bp, Canis familiaris
agtcctctggtcccatgatgtgacc

SEQ ID NO: 24817 - DNA, 25 bp, Canis familiaris
aggtctctgggcctagttgaccatc

SEQ ID NO: 24818 - DNA, 25 bp, Canis familiaris
aggtgtccttcgtgattcacaacct

SEQ ID NO: 24819 - DNA, 25 bp, Canis familiaris
agagtcttcctataaatcaacaccg

SEQ ID NO: 24820 - DNA, 25 bp, Canis familiaris
agtgttagccagattaagaccccca

SEQ ID NO: 24821 - DNA, 25 bp, Canis familiaris
aggttacctgcaacgaaatgcccac

SEQ ID NO: 24822 - DNA, 25 bp, Canis familiaris
aggtatctttcacaattcagccaca

SEQ ID NO: 24823 - DNA, 25 bp, Canis familiaris
aggtttgttcatgaagtcgcaccaa

SEQ ID NO: 24824 - DNA, 25 bp, Canis familiaris
aggtcttttctgaattgtcacagtc

SEQ ID NO: 24825 - DNA, 25 bp, Canis familiaris
aggagtttcttatttgaaggctctt

SEQ ID NO: 24826 - DNA, 25 bp, Canis familiaris
aggagtttcttatttgaaggctctt

SEQ ID NO: 24827 - DNA, 25 bp, Canis familiaris
agggttgatttttatgaagccatgg

SEQ ID NO: 24828 - DNA, 25 bp, Canis familiaris
aggtcacagttctcctgaagtatgt

SEQ ID NO: 24829 - DNA, 25 bp, Canis familiaris
aggtcctgattggtcctgatttgcc

SEQ ID NO: 24830 - DNA, 25 bp, Canis familiaris
aggtgctggtaggtgtagttcccgg

SEQ ID NO: 24831 - DNA, 25 bp, Canis familiaris
aggtcctgaaggtgagtgtccggag

SEQ ID NO: 24832 - DNA, 25 bp, Canis familiaris
aggtattgcgaggttgcctttggga

SEQ ID NO: 24833 - DNA, 25 bp, Canis familiaris
aggagtgggcaggtcatgcctcttt

SEQ ID NO: 24834 - DNA, 25 bp, Canis familiaris
aggaggtggactacagcgactcgct

SEQ ID NO: 24835 - DNA, 25 bp, Canis familiaris
aggaggtggaggagcggccagcacc

SEQ ID NO: 24836 - DNA, 25 bp, Canis familiaris
aggagggtgggttgtgaccgactca

SEQ ID NO: 24837 - DNA, 25 bp, Canis familiaris
aggaggtgtgaaggggaccggccag

SEQ ID NO: 24838 - DNA, 25 bp, Canis familiaris
aggaggtgtgaaggggaccggccag

SEQ ID NO: 24839 - DNA, 25 bp, Canis familiaris
aggatggtgtgaccgtggcaaagtc

SEQ ID NO: 24840 - DNA, 25 bp, Canis familiaris
aggtattggcggctgctgcaaatgt

SEQ ID NO: 24841 - DNA, 25 bp, Canis familiaris
aggagtctgatgcggtgctcaatcc

SEQ ID NO: 24842 - DNA, 25 bp, Canis familiaris
aggatgttcaggagcctgaccctgc

SEQ ID NO: 24843 - DNA, 25 bp, Canis familiaris
aggtagtgaggcaagcaccaccggt

SEQ ID NO: 24844 - DNA, 25 bp, Canis familiaris
aggagagaagccagcacttcgcttt

SEQ ID NO: 24845 - DNA, 25 bp, Canis familiaris
aggagcgagaccccactaacatcaa

SEQ ID NO: 24846 - DNA, 25 bp, Canis familiaris
aggagggcaagtacctcatcctcaa

SEQ ID NO: 24847 - DNA, 25 bp, Canis familiaris
aggatggggagctcactcccagaac

SEQ ID NO: 24848 - DNA, 25 bp, Canis familiaris
aggtcgggatgtgcaaccctggaca

SEQ ID NO: 24849 - DNA, 25 bp, Canis familiaris
aggtctggttggaccccaatgagac

SEQ ID NO: 24850 - DNA, 25 bp, Canis familiaris
aggttgttttgataatacatgaact

SEQ ID NO: 24851 - DNA, 25 bp, Canis familiaris
aggttgcaatgcctaaaaatcaata

SEQ ID NO: 24852 - DNA, 25 bp, Canis familiaris
aggtaacatgcactcaacaactctc

SEQ ID NO: 24853 - DNA, 25 bp, Canis familiaris
aggtcactgcgcacaatagacccgc

SEQ ID NO: 24854 - DNA, 25 bp, Canis familiaris
aggtcagccggtggtagacgatgcc

SEQ ID NO: 24855 - DNA, 25 bp, Canis familiaris
aggtcagcacgttgctgtcgattaa

SEQ ID NO: 24856 - DNA, 25 bp, Canis familiaris
aggatgcagacctagggctgtccaa

SEQ ID NO: 24857 - DNA, 25 bp, Canis familiaris
aggatgtgatcccagggttccagga

SEQ ID NO: 24858 - DNA, 25 bp, Canis familiaris
aggatctcccgtagtgtgtcaatgg

SEQ ID NO: 24859 - DNA, 25 bp, Canis familiaris
aggagtcagggattgagttcaagtg

SEQ ID NO: 24860 - DNA, 25 bp, Canis familiaris
aggagctattgccaagagcctcaag

SEQ ID NO: 24861 - DNA, 25 bp, Canis familiaris
aggagctcatcggcagcgagctcgc

SEQ ID NO: 24862 - DNA, 25 bp, Canis familiaris
aggagctcctggatggctccgtagg

SEQ ID NO: 24863 - DNA, 25 bp, Canis familiaris
aggatgccctggatgaacctaggat

SEQ ID NO: 24864 - DNA, 25 bp, Canis familiaris
aggaccacatggtgcaactttctgg

SEQ ID NO: 24865 - DNA, 25 bp, Canis familiaris
aggatccattggagggcaagtctgg

SEQ ID NO: 24866 - DNA, 25 bp, Canis familiaris
aggatccattggagggcaagtctgg

SEQ ID NO: 24867 - DNA, 25 bp, Canis familiaris
aggatccattggagggcaagtctgg

SEQ ID NO: 24868 - DNA, 25 bp, Canis familiaris
aggtcctcactgaggtgccaggtgt

SEQ ID NO: 24869 - DNA, 25 bp, Canis familiaris
aggtcatccctgagtctgacgggga

SEQ ID NO: 24870 - DNA, 25 bp, Canis familiaris
aggtcatcccagagctgaacgggaa

SEQ ID NO: 24871 - DNA, 25 bp, Canis familiaris
aggtatcactatgagctttcagagg

SEQ ID NO: 24872 - DNA, 25 bp, Canis familiaris
aggagtcagtagggggtctgaggca

SEQ ID NO: 24873 - DNA, 25 bp, Canis familiaris
agggtcagaatcaagggggagggca

SEQ ID NO: 24874 - DNA, 25 bp, Canis familiaris
aggtcttcaatttggagggtgggca

SEQ ID NO: 24875 - DNA, 25 bp, Canis familiaris
aggttttgattctgggaggactgtt

SEQ ID NO: 24876 - DNA, 25 bp, Canis familiaris
agggggtgaatcatggtaggacttc

SEQ ID NO: 24877 - DNA, 25 bp, Canis familiaris
aggtgggctttatggtaggccttca

SEQ ID NO: 24878 - DNA, 25 bp, Canis familiaris
aggtaggttgtatcttgggctcctg

SEQ ID NO: 24879 - DNA, 25 bp, Canis familiaris
aggtagattttgcattttgttccat

SEQ ID NO: 24880 - DNA, 25 bp, Canis familiaris
aggtagataattctaattctctcac

SEQ ID NO: 24881 - DNA, 25 bp, Canis familiaris
aggtattcaattcatcctttctaat

SEQ ID NO: 24882 - DNA, 25 bp, Canis familiaris
aggtcttaatgttatccaactccat

SEQ ID NO: 24883 - DNA, 25 bp, Canis familiaris
aggatccttatcaagtcctaccact

SEQ ID NO: 24884 - DNA, 25 bp, Canis familiaris
aggatgccttatgcgtcatctagcc

SEQ ID NO: 24885 - DNA, 25 bp, Canis familiaris
aggagacgtcaatgtcatccagccc

SEQ ID NO: 24886 - DNA, 25 bp, Canis familiaris
agtggacgaaatttatgaccccgcg

SEQ ID NO: 24887 - DNA, 25 bp, Canis familiaris
aggtgacgacacatgggaccctaga

SEQ ID NO: 24888 - DNA, 25 bp, Canis familiaris
aggtatcaaatggtgtggagcccaa

SEQ ID NO: 24889 - DNA, 25 bp, Canis familiaris
agttctctatatcaggggactaata

SEQ ID NO: 24890 - DNA, 25 bp, Canis familiaris
aggacctatctttggaggccattag

SEQ ID NO: 24891 - DNA, 25 bp, Canis familiaris
aggagcatttctgagcagggcctgt

SEQ ID NO: 24892 - DNA, 25 bp, Canis familiaris
aggatcaaggctgcaaatggctttg

SEQ ID NO: 24893 - DNA, 25 bp, Canis familiaris
aggatttggctcctatgcatggctt

SEQ ID NO: 24894 - DNA, 25 bp, Canis familiaris
aggatattggctgtgatgagactca

SEQ ID NO: 24895 - DNA, 25 bp, Canis familiaris
aggtttgctgctggagctggacttc

SEQ ID NO: 24896 - DNA, 25 bp, Canis familiaris
aggatgggtgcaggcagctgtgtgc

SEQ ID NO: 24897 - DNA, 25 bp, Canis familiaris
aggagctggctgagcagctgggcct

SEQ ID NO: 24898 - DNA, 25 bp, Canis familiaris
aggagcatgttgattggaggcccta

SEQ ID NO: 24899 - DNA, 25 bp, Canis familiaris
aggagcgtgtgcatgtgtgcgtgtg

SEQ ID NO: 24900 - DNA, 25 bp, Canis familiaris
aggagagggtgtggctgctgtggcc

SEQ ID NO: 24901 - DNA, 25 bp, Canis familiaris
aggagtgttgggtctgctgtagccc

SEQ ID NO: 24902 - DNA, 25 bp, Canis familiaris
aggaggaaggagtctggtccggcag

SEQ ID NO: 24903 - DNA, 25 bp, Canis familiaris
aggaggaagggctttgcactcttga

SEQ ID NO: 24904 - DNA, 25 bp, Canis familiaris
aggatggcaacggctacatcagcgc

SEQ ID NO: 24905 - DNA, 25 bp, Canis familiaris
aggaggagaccctgatcgacggggt

SEQ ID NO: 24906 - DNA, 25 bp, Canis familiaris
agggggagcaagcaataccgggcgc

SEQ ID NO: 24907 - DNA, 25 bp, Canis familiaris
aggggcttgcaacaaaggccctggc

SEQ ID NO: 24908 - DNA, 25 bp, Canis familiaris
aggggcaggaagcggtggttgcggc

SEQ ID NO: 24909 - DNA, 25 bp, Canis familiaris
aggaggagggagagcccgagtcgtc

SEQ ID NO: 24910 - DNA, 25 bp, Canis familiaris
aggaggaggtggagaccgtcctggc

SEQ ID NO: 24911 - DNA, 25 bp, Canis familiaris
aggaggaggtgtcggactgcgtggt

SEQ ID NO: 24912 - DNA, 25 bp, Canis familiaris
aggaggaggcggccagactgttcta

SEQ ID NO: 24913 - DNA, 25 bp, Canis familiaris
aggtctagagcgtgagctccttctc

SEQ ID NO: 24914 - DNA, 25 bp, Canis familiaris
aggagacagacgactgagccttccc

SEQ ID NO: 24915 - DNA, 25 bp, Canis familiaris
aggagattgaccagatgttcgccgc

SEQ ID NO: 24916 - DNA, 25 bp, Canis familiaris
aggattctgtacaggttccactgcc

SEQ ID NO: 24917 - DNA, 25 bp, Canis familiaris
aggttgcttcacaaggttccttggg

SEQ ID NO: 24918 - DNA, 25 bp, Canis familiaris
aggagattctaaaggcttccctggt

SEQ ID NO: 24919 - DNA, 25 bp, Canis familiaris
aggagcgggcagaggtggacacggt

SEQ ID NO: 24920 - DNA, 25 bp, Canis familiaris
aggagttaggtgggtgggcggatgg

SEQ ID NO: 24921 - DNA, 25 bp, Canis familiaris
aggatgtgcagggggaggggcgtgg

SEQ ID NO: 24922 - DNA, 25 bp, Canis familiaris
aggagctcttggagcggaggcgggc

SEQ ID NO: 24923 - DNA, 25 bp, Canis familiaris
aggagctcttggagcggaggcgggc

SEQ ID NO: 24924 - DNA, 25 bp, Canis familiaris
aggagatcttggagcaggagcgggc

SEQ ID NO: 24925 - DNA, 25 bp, Canis familiaris
aggagatgctgcggcagctgggccg

SEQ ID NO: 24926 - DNA, 25 bp, Canis familiaris
aggagacatggggctgggcgtgccc

SEQ ID NO: 24927 - DNA, 25 bp, Canis familiaris
aggagtatggactcctgcgtgtccc

SEQ ID NO: 24928 - DNA, 25 bp, Canis familiaris
aggggatagtatctctcaggtgcct

SEQ ID NO: 24929 - DNA, 25 bp, Canis familiaris
aggagtatagcattgccacccaggt

SEQ ID NO: 24930 - DNA, 25 bp, Canis familiaris
aggagatagtcatgagccccagggt

SEQ ID NO: 24931 - DNA, 25 bp, Canis familiaris
aggagagaacatgggcacccggctg

SEQ ID NO: 24932 - DNA, 25 bp, Canis familiaris
agggaaaagtgacagccggctgtgg

SEQ ID NO: 24933 - DNA, 25 bp, Canis familiaris
aggagaagcaagctggagccagggt

SEQ ID NO: 24934 - DNA, 25 bp, Canis familiaris
aggagcagagcaactgtcaaggctg

SEQ ID NO: 24935 - DNA, 25 bp, Canis familiaris
aggagagagcagacctcaccagtgt

SEQ ID NO: 24936 - DNA, 25 bp, Canis familiaris
aggagagaggacttacttgctgtac

SEQ ID NO: 24937 - DNA, 25 bp, Canis familiaris
aggaggtggacttgatctgcttgtt

SEQ ID NO: 24938 - DNA, 25 bp, Canis familiaris
aggatggggctcaagtttctgtatt

SEQ ID NO: 24939 - DNA, 25 bp, Canis familiaris
agggccaggccaagttgtgttaaga

SEQ ID NO: 24940 - DNA, 25 bp, Canis familiaris
agggtagcaccactgtttttgaaca

SEQ ID NO: 24941 - DNA, 25 bp, Canis familiaris
agggggatacctgatgacattaaca

SEQ ID NO: 24942 - DNA, 25 bp, Canis familiaris
aggggccaagccagaactagaactc

SEQ ID NO: 24943 - DNA, 25 bp, Canis familiaris
agtgggccaagccatcaaccaacta

SEQ ID NO: 24944 - DNA, 25 bp, Canis familiaris
aggaggtagcagtatagaccgacta

SEQ ID NO: 24945 - DNA, 25 bp, Canis familiaris
aggtctggaatgtacaggcactgaa

SEQ ID NO: 24946 - DNA, 25 bp, Canis familiaris
aggtgcccagcataagagactgcaa

SEQ ID NO: 24947 - DNA, 25 bp, Canis familiaris
aggaggcacagctgactgagggcca

SEQ ID NO: 24948 - DNA, 25 bp, Canis familiaris
aggaggcggctggcagctgaaggct

SEQ ID NO: 24949 - DNA, 25 bp, Canis familiaris
aggagggagctggctctgtgacgtc

SEQ ID NO: 24950 - DNA, 25 bp, Canis familiaris
aggagatggactgtctgcgtgctct

SEQ ID NO: 24951 - DNA, 25 bp, Canis familiaris
aggatctgtcacagttcagctcact

SEQ ID NO: 24952 - DNA, 25 bp, Canis familiaris
aggatcttcagatattcgtgcactg

SEQ ID NO: 24953 - DNA, 25 bp, Canis familiaris
aggatctctcaatattttcggtcgg

SEQ ID NO: 24954 - DNA, 25 bp, Canis familiaris
aggagctccagaaactttccattca

SEQ ID NO: 24955 - DNA, 25 bp, Canis familiaris
agtggcccatctatttacctggaga

SEQ ID NO: 24956 - DNA, 25 bp, Canis familiaris
agactccgtttattttcctgaagca

SEQ ID NO: 24957 - DNA, 25 bp, Canis familiaris
agactacttccgtgctacttctaga

SEQ ID NO: 24958 - DNA, 25 bp, Canis familiaris
aggtactcttggtgtatctgttagt

SEQ ID NO: 24959 - DNA, 25 bp, Canis familiaris
aggtatcctattttggccttacgat

SEQ ID NO: 24960 - DNA, 25 bp, Canis familiaris
aggagatcctagtaacacctctaaa

SEQ ID NO: 24961 - DNA, 25 bp, Canis familiaris
aggagatccttgggagacttctccc

SEQ ID NO: 24962 - DNA, 25 bp, Canis familiaris
aggtatcccattgggctttgcttcc

SEQ ID NO: 24963 - DNA, 25 bp, Canis familiaris
aggtcagcccttgagtatatttgca

SEQ ID NO: 24964 - DNA, 25 bp, Canis familiaris
aggtcatcccctgggaggatctgga

SEQ ID NO: 24965 - DNA, 25 bp, Canis familiaris
aggagtccacctgggaggaccgtat

SEQ ID NO: 24966 - DNA, 25 bp, Canis familiaris
aggaggtcagccggtggtagacgat

SEQ ID NO: 24967 - DNA, 25 bp, Canis familiaris
aggaggtcaacaggttggagacgat

SEQ ID NO: 24968 - DNA, 25 bp, Canis familiaris
aggagttcaccagggtggagacaag

SEQ ID NO: 24969 - DNA, 25 bp, Canis familiaris
aggttttccctgtggatatctaaag

SEQ ID NO: 24970 - DNA, 25 bp, Canis familiaris
gggatcctttactcgtattctaaga

SEQ ID NO: 24971 - DNA, 25 bp, Canis familiaris
aggtccatttactcgtatcatgctt

SEQ ID NO: 24972 - DNA, 25 bp, Canis familiaris
aggtgccaatataaccaatgtgcat

SEQ ID NO: 24973 - DNA, 25 bp, Canis familiaris
agagtctgattaacacgaaggtgag

SEQ ID NO: 24974 - DNA, 25 bp, Canis familiaris
aggtcgatttaagtagaagtgcgtt

SEQ ID NO: 24975 - DNA, 25 bp, Canis familiaris
aggtttttaacttgtggctgctcct

SEQ ID NO: 24976 - DNA, 25 bp, Canis familiaris
aggagtctttcatgttctgtctccc

SEQ ID NO: 24977 - DNA, 25 bp, Canis familiaris
aggagatgtttcttcttctgtcttt

SEQ ID NO: 24978 - DNA, 25 bp, Canis familiaris
aggtatttctgctttttattttctg

SEQ ID NO: 24979 - DNA, 25 bp, Canis familiaris
aggttattctcattttttggtgatg

SEQ ID NO: 24980 - DNA, 25 bp, Canis familiaris
aggtttcaccacagtttccagataa

SEQ ID NO: 24981 - DNA, 25 bp, Canis familiaris
aggtttcagccctggatcaggagat

SEQ ID NO: 24982 - DNA, 25 bp, Canis familiaris
aggtatccccactggaagcacattt

SEQ ID NO: 24983 - DNA, 25 bp, Canis familiaris
aggttccatccatctactaaaattt

SEQ ID NO: 24984 - DNA, 25 bp, Canis familiaris
agtttttgtaccatgagaaaatact

SEQ ID NO: 24985 - DNA, 25 bp, Canis familiaris
aggattttctactgtaacaaaagct

SEQ ID NO: 24986 - DNA, 25 bp, Canis familiaris
cagggttccccatgttgtaacaagt

SEQ ID NO: 24987 - DNA, 25 bp, Canis familiaris
cgggtttaacttctgctacacacct

SEQ ID NO: 24988 - DNA, 25 bp, Canis familiaris
aggtgtttacacccaagtagcccat

SEQ ID NO: 24989 - DNA, 25 bp, Canis familiaris
aggttttcaggcccacagttggaga

SEQ ID NO: 24990 - DNA, 25 bp, Canis familiaris
aggtggtccggatgccagtaggatg

SEQ ID NO: 24991 - DNA, 25 bp, Canis familiaris
aggggctctaaatggagtactggta

SEQ ID NO: 24992 - DNA, 25 bp, Canis familiaris
aggttccgagaatgggtcactggct

SEQ ID NO: 24993 - DNA, 25 bp, Canis familiaris
aggtgtccaagatcacgtcaccggt

SEQ ID NO: 24994 - DNA, 25 bp, Canis familiaris
aggttatccgcatcatctgtatcct

SEQ ID NO: 24995 - DNA, 25 bp, Canis familiaris
aggtcaatcaccatattttcctccg

SEQ ID NO: 24996 - DNA, 25 bp, Canis familiaris
aggatgctctaaactattttgcccc

SEQ ID NO: 24997 - DNA, 25 bp, Canis familiaris
aggatgctggaaactatgtctgtga

SEQ ID NO: 24998 - DNA, 25 bp, Canis familiaris
aggatgccgcagaccattatctggc

SEQ ID NO: 24999 - DNA, 25 bp, Canis familiaris
aggagggcaagtttgtgcggctgcg

SEQ ID NO: 25000 - DNA, 25 bp, Canis familiaris
aggagtgccaaggtggctggggcct

SEQ ID NO: 25001 - DNA, 25 bp, Canis familiaris
aggagatgcgcgctgtgagtgggat

SEQ ID NO: 25002 - DNA, 25 bp, Canis familiaris
aggagaggcgggccagggagtggcc

SEQ ID NO: 25003 - DNA, 25 bp, Canis familiaris
aggagggcgctgcaagttatgagag

SEQ ID NO: 25004 - DNA, 25 bp, Canis familiaris
aggatggagagctaaagtcccagga

SEQ ID NO: 25005 - DNA, 25 bp, Canis familiaris
aggatctgctggaaagggcctcgaa

SEQ ID NO: 25006 - DNA, 25 bp, Canis familiaris
aggatgcagtgaccagaggggctcc

SEQ ID NO: 25007 - DNA, 25 bp, Canis familiaris
aggaggagatgccagcaaggagctg

SEQ ID NO: 25008 - DNA, 25 bp, Canis familiaris
aggagtatgtgcaaatcgctatctt

SEQ ID NO: 25009 - DNA, 25 bp, Canis familiaris
aggagatattgttgtgcctgccatt

SEQ ID NO: 25010 - DNA, 25 bp, Canis familiaris
aggagagctctgaagagcccctctc

SEQ ID NO: 25011 - DNA, 25 bp, Canis familiaris
aggagactgagaggcacctcacgcc

SEQ ID NO: 25012 - DNA, 25 bp, Canis familiaris
aggagatccagaacactctgacctc

SEQ ID NO: 25013 - DNA, 25 bp, Canis familiaris
agggcaacagaatctcaactacact

SEQ ID NO: 25014 - DNA, 25 bp, Canis familiaris
aggaggaagccatctccatgctaac

SEQ ID NO: 25015 - DNA, 25 bp, Canis familiaris
aggagttagccttcattctccatcc

SEQ ID NO: 25016 - DNA, 25 bp, Canis familiaris
aggagttcaccgtcatctttgacac

SEQ ID NO: 25017 - DNA, 25 bp, Canis familiaris
aggtgtacagaatgatgctttgaat

SEQ ID NO: 25018 - DNA, 25 bp, Canis familiaris
aggttcagggcatgtgcttccagac

SEQ ID NO: 25019 - DNA, 25 bp, Canis familiaris
aggtttgcttgatggttacaatgca

SEQ ID NO: 25020 - DNA, 25 bp, Canis familiaris
aggtttgcttgatgttacatgcaag

SEQ ID NO: 25021 - DNA, 25 bp, Canis familiaris
aggatttgccagtgcttgacagaag

SEQ ID NO: 25022 - DNA, 25 bp, Canis familiaris
aggattctgccctccgagaaaatct

SEQ ID NO: 25023 - DNA, 25 bp, Canis familiaris
aggttcccctcctaggaagacatat

SEQ ID NO: 25024 - DNA, 25 bp, Canis familiaris
acggtccgccaattcgaaaaagatg

SEQ ID NO: 25025 - DNA, 25 bp, Canis familiaris
agtggaccccgaccggagagaagtg

SEQ ID NO: 25026 - DNA, 25 bp, Canis familiaris
agggatccatccaacacagaaggta

SEQ ID NO: 25027 - DNA, 25 bp, Canis familiaris
aggttctccgcatccagaatattct

SEQ ID NO: 25028 - DNA, 25 bp, Canis familiaris
aggagtctgcgtttccaagagatgt

SEQ ID NO: 25029 - DNA, 25 bp, Canis familiaris
agtgagccaggggaccaaggtgagc

SEQ ID NO: 25030 - DNA, 25 bp, Canis familiaris
aggaggcaggattgaccacgggcat

SEQ ID NO: 25031 - DNA, 25 bp, Canis familiaris
agtgcagaaggtggacggcgagccc

SEQ ID NO: 25032 - DNA, 25 bp, Canis familiaris
aggagtaggcggtgggatctcgctg

SEQ ID NO: 25033 - DNA, 25 bp, Canis familiaris
aggagtttgacgaggtgtctcggat

SEQ ID NO: 25034 - DNA, 25 bp, Canis familiaris
aggtgttagattaggttttgacgat

SEQ ID NO: 25035 - DNA, 25 bp, Canis familiaris
aggagtaagacaaggcctggtagga

SEQ ID NO: 25036 - DNA, 25 bp, Canis familiaris
aggggttacattgcaccctaggaag

SEQ ID NO: 25037 - DNA, 25 bp, Canis familiaris
aggagaggtcacactcaccttagga

SEQ ID NO: 25038 - DNA, 25 bp, Canis familiaris
agagaggtatcctgaccctgaagta

SEQ ID NO: 25039 - DNA, 25 bp, Canis familiaris
aggaggtccaagcagccttaagcac

SEQ ID NO: 25040 - DNA, 25 bp, Canis familiaris
agaaccccacagctggataaggccc

SEQ ID NO: 25041 - DNA, 25 bp, Canis familiaris
agggcactacaccattggcaaggag

SEQ ID NO: 25042 - DNA, 25 bp, Canis familiaris
agggcactacaccattggcaaggag

SEQ ID NO: 25043 - DNA, 25 bp, Canis familiaris
agggcactacaccattggcaaggag

SEQ ID NO: 25044 - DNA, 25 bp, Canis familiaris
agggcactacaccattggcaaggag

SEQ ID NO: 25045 - DNA, 25 bp, Canis familiaris
agggcagtaatggattggcttttgt

SEQ ID NO: 25046 - DNA, 25 bp, Canis familiaris
aggtgacgacagtattgagtcccgt

SEQ ID NO: 25047 - DNA, 25 bp, Canis familiaris
aggtacggaaacaccatccgctgac

SEQ ID NO: 25048 - DNA, 25 bp, Canis familiaris
aggtactgtgaaaatccttccctct

SEQ ID NO: 25049 - DNA, 25 bp, Canis familiaris
aggtagtgtgtgaacatccttcccc

SEQ ID NO: 25050 - DNA, 25 bp, Canis familiaris
aggatgaagtgaccactcctgaccc

SEQ ID NO: 25051 - DNA, 25 bp, Canis familiaris
aggagatgaaggcatgctcctcctc

SEQ ID NO: 25052 - DNA, 25 bp, Canis familiaris
aggatgtactgtagcatctcgtccc

SEQ ID NO: 25053 - DNA, 25 bp, Canis familiaris
aggagtcactggacactttcatcct

SEQ ID NO: 25054 - DNA, 25 bp, Canis familiaris
aggagtcatctgcaaggaccagcgc

SEQ ID NO: 25055 - DNA, 25 bp, Canis familiaris
aggagtatctagcagagcagcgaca

SEQ ID NO: 25056 - DNA, 25 bp, Canis familiaris
aggattctagagcagcagcggaccc

SEQ ID NO: 25057 - DNA, 25 bp, Canis familiaris
aggagtctcaagcagagctgggccc

SEQ ID NO: 25058 - DNA, 25 bp, Canis familiaris
aggagattgctctaacctggggcac

SEQ ID NO: 25059 - DNA, 25 bp, Canis familiaris
aggatctgtgctccaagttcgggat

SEQ ID NO: 25060 - DNA, 25 bp, Canis familiaris
aggtctgctcacaggtagcggcaga

SEQ ID NO: 25061 - DNA, 25 bp, Canis familiaris
aggatcgccatccggatcacggcaa

SEQ ID NO: 25062 - DNA, 25 bp, Canis familiaris
aggatcgccatccggatcacggcaa

SEQ ID NO: 25063 - DNA, 25 bp, Canis familiaris
aggattgacatcctggactcagcgc

SEQ ID NO: 25064 - DNA, 25 bp, Canis familiaris
aggaggagcagcagcggctgcacgc

SEQ ID NO: 25065 - DNA, 25 bp, Canis familiaris
aggaggctcgctggagagcgacggc

SEQ ID NO: 25066 - DNA, 25 bp, Canis familiaris
aggagtttgctgccaagtgccaggc

SEQ ID NO: 25067 - DNA, 25 bp, Canis familiaris
aggagtttgctgctgatgtgcggct

SEQ ID NO: 25068 - DNA, 25 bp, Canis familiaris
aggagtctgtctccttgatgggctc

SEQ ID NO: 25069 - DNA, 25 bp, Canis familiaris
aggagtctctctagttcatgtggtc

SEQ ID NO: 25070 - DNA, 25 bp, Canis familiaris
aggaggccctgaatgttctgtgtcc

SEQ ID NO: 25071 - DNA, 25 bp, Canis familiaris
aggagtccctgaatctctggtatga

SEQ ID NO: 25072 - DNA, 25 bp, Canis familiaris
aggaggtctcatatgctctcgaaag

SEQ ID NO: 25073 - DNA, 25 bp, Canis familiaris
aggaggtctgatctgtgcatggcag

SEQ ID NO: 25074 - DNA, 25 bp, Canis familiaris
aggatggtggagttgctgggcattt

SEQ ID NO: 25075 - DNA, 25 bp, Canis familiaris
aggagtgtggttggtgtcctttcac

SEQ ID NO: 25076 - DNA, 25 bp, Canis familiaris
aggagtggtgtttgatgtcacctct

SEQ ID NO: 25077 - DNA, 25 bp, Canis familiaris
aggagtctctgggaatgctctccat

SEQ ID NO: 25078 - DNA, 25 bp, Canis familiaris
aggagtctgggctcagatctctgct

SEQ ID NO: 25079 - DNA, 25 bp, Canis familiaris
aggagtctgggctgaacagctccct

SEQ ID NO: 25080 - DNA, 25 bp, Canis familiaris
aggaggcagggatgtcgacagccct

SEQ ID NO: 25081 - DNA, 25 bp, Canis familiaris
aggggagttcattttgctacccatt

SEQ ID NO: 25082 - DNA, 25 bp, Canis familiaris
aggggagcattgtttctcccgtctg

SEQ ID NO: 25083 - DNA, 25 bp, Canis familiaris
aggggacaaagctgtccctgcctgt

SEQ ID NO: 25084 - DNA, 25 bp, Canis familiaris
aggggaaaagctggtacgcctgcag

SEQ ID NO: 25085 - DNA, 25 bp, Canis familiaris
aggggaaagagagatgttgccagca

SEQ ID NO: 25086 - DNA, 25 bp, Canis familiaris
aggtggacaaaagcggctggaccgg

SEQ ID NO: 25087 - DNA, 25 bp, Canis familiaris
aggaggagcaataagccgcctcccc

SEQ ID NO: 25088 - DNA, 25 bp, Canis familiaris
aggtgaagaaatcgccactcgtcca

SEQ ID NO: 25089 - DNA, 25 bp, Canis familiaris
aggtactgaatctcgagctttgaaa

SEQ ID NO: 25090 - DNA, 25 bp, Canis familiaris
aggtacatacactctgacttaaatc

SEQ ID NO: 25091 - DNA, 25 bp, Canis familiaris
aggtccaaactcctatcttctgagt

SEQ ID NO: 25092 - DNA, 25 bp, Canis familiaris
aggttaccaccaaatctgtcaatgt

SEQ ID NO: 25093 - DNA, 25 bp, Canis familiaris
aggtttcccaaatgcttagagctac

SEQ ID NO: 25094 - DNA, 25 bp, Canis familiaris
aggtttcccagttggttcataccat

SEQ ID NO: 25095 - DNA, 25 bp, Canis familiaris
aggtatccccagttttaatgactag

SEQ ID NO: 25096 - DNA, 25 bp, Canis familiaris
aggttgcccaccagtagaatactac

SEQ ID NO: 25097 - DNA, 25 bp, Canis familiaris
aagttcaagcccagaagtttcttca

SEQ ID NO: 25098 - DNA, 25 bp, Canis familiaris
aggttcaacttcaagacgtccctgt

SEQ ID NO: 25099 - DNA, 25 bp, Canis familiaris
aggatatgttccatcagccgtaccg

SEQ ID NO: 25100 - DNA, 25 bp, Canis familiaris
aggattgattccattgctcttgcct

SEQ ID NO: 25101 - DNA, 25 bp, Canis familiaris
agtgattttgccattatcttgccca

SEQ ID NO: 25102 - DNA, 25 bp, Canis familiaris
aggttatcgctcacatatcttcgac

SEQ ID NO: 25103 - DNA, 25 bp, Canis familiaris
aggtttgccaataagactgtggact

SEQ ID NO: 25104 - DNA, 25 bp, Canis familiaris
aggttctgccccaagaagctcagaa

SEQ ID NO: 25105 - DNA, 25 bp, Canis familiaris
aggagtgcagcccaaaacaccatgt

SEQ ID NO: 25106 - DNA, 25 bp, Canis familiaris
agacggcgtctggaaacaaagttag

SEQ ID NO: 25107 - DNA, 25 bp, Canis familiaris
accaggcactttgtacaaactccga

SEQ ID NO: 25108 - DNA, 25 bp, Canis familiaris
aggatgacacctattgacaaagctc

SEQ ID NO: 25109 - DNA, 25 bp, Canis familiaris
aggatgagtacagtgggcccaagct

SEQ ID NO: 25110 - DNA, 25 bp, Canis familiaris
aggaggaagactagctgcaccaacc

SEQ ID NO: 25111 - DNA, 25 bp, Canis familiaris
aggaggatgaggagtagccagtgcc

SEQ ID NO: 25112 - DNA, 25 bp, Canis familiaris
aggaggtgcctgagaagcctgactc

SEQ ID NO: 25113 - DNA, 25 bp, Canis familiaris
aggtctagcctaagaagcctcagcc

SEQ ID NO: 25114 - DNA, 25 bp, Canis familiaris
aggttctgtgtccaaagccatcact

SEQ ID NO: 25115 - DNA, 25 bp, Canis familiaris
aggttctgtgtccaaagccatcact

SEQ ID NO: 25116 - DNA, 25 bp, Canis familiaris
aggaggtgtacacatatcccacatc

SEQ ID NO: 25117 - DNA, 25 bp, Canis familiaris
aggaggattaattagtcaccaccat

SEQ ID NO: 25118 - DNA, 25 bp, Canis familiaris
aggaggagtaatggaaggccccttg

SEQ ID NO: 25119 - DNA, 25 bp, Canis familiaris
aggagtgagtagtggaggcctccat

SEQ ID NO: 25120 - DNA, 25 bp, Canis familiaris
aggagggtatgatgcaggtgccaga

SEQ ID NO: 25121 - DNA, 25 bp, Canis familiaris
aggagtggctggtcaagtggccggg

SEQ ID NO: 25122 - DNA, 25 bp, Canis familiaris
aggatctctctgagcagcagttgcc

SEQ ID NO: 25123 - DNA, 25 bp, Canis familiaris
aggatctgcttgaggcaggcggcct

SEQ ID NO: 25124 - DNA, 25 bp, Canis familiaris
aggatgtcctgaaggagcccaccat

SEQ ID NO: 25125 - DNA, 25 bp, Canis familiaris
aggatgacactgccagcgtgtccac

SEQ ID NO: 25126 - DNA, 25 bp, Canis familiaris
aggatgagcagcacggttctggctt

SEQ ID NO: 25127 - DNA, 25 bp, Canis familiaris
aggagtggacacagtacatgatgct

SEQ ID NO: 25128 - DNA, 25 bp, Canis familiaris
aggaggtgacacattgcctgcagat

SEQ ID NO: 25129 - DNA, 25 bp, Canis familiaris
aggaggacactgaatcccacagagc

SEQ ID NO: 25130 - DNA, 25 bp, Canis familiaris
aggaggagttgttaccacagagccc

SEQ ID NO: 25131 - DNA, 25 bp, Canis familiaris
aggaggccttgatacacatgcgtac

SEQ ID NO: 25132 - DNA, 25 bp, Canis familiaris
aggatgccatcaagttaagcttgta

SEQ ID NO: 25133 - DNA, 25 bp, Canis familiaris
aggtcttatatcttatccttgtaac

SEQ ID NO: 25134 - DNA, 25 bp, Canis familiaris
aggtcaaatcctgactctctgtacc

SEQ ID NO: 25135 - DNA, 25 bp, Canis familiaris
aggtctacggtggacttcagctacc

SEQ ID NO: 25136 - DNA, 25 bp, Canis familiaris
aggtctgaaaggcacttctgtcacc

SEQ ID NO: 25137 - DNA, 25 bp, Canis familiaris
aggtctagaataggactccccactc

SEQ ID NO: 25138 - DNA, 25 bp, Canis familiaris
aggttctgaatagtgcctgagcccc

SEQ ID NO: 25139 - DNA, 25 bp, Canis familiaris
aggttacatacttgcctagctctct

SEQ ID NO: 25140 - DNA, 25 bp, Canis familiaris
aggtacagaaccggtagcttctgcg

SEQ ID NO: 25141 - DNA, 25 bp, Canis familiaris
aggtaagattcctgtatttcctgcc

SEQ ID NO: 25142 - DNA, 25 bp, Canis familiaris
agatgaaggttttctgttttcccag

SEQ ID NO: 25143 - DNA, 25 bp, Canis familiaris
agagagggtccatggatttccccag

SEQ ID NO: 25144 - DNA, 25 bp, Canis familiaris
aggagggtcatcagggaggcctcgc

SEQ ID NO: 25145 - DNA, 25 bp, Canis familiaris
aggagggccagggaggagcggccag

SEQ ID NO: 25146 - DNA, 25 bp, Canis familiaris
aggaggtgaaccaggagctggcgca

SEQ ID NO: 25147 - DNA, 25 bp, Canis familiaris
aggggctgagacctgggttgtgaca

SEQ ID NO: 25148 - DNA, 25 bp, Canis familiaris
aggaggatatgatcgaggcttatga

SEQ ID NO: 25149 - DNA, 25 bp, Canis familiaris
aggaggacagcaacgggctaatagg

SEQ ID NO: 25150 - DNA, 25 bp, Canis familiaris
agggggcaccacaggatcaaatgcg

SEQ ID NO: 25151 - DNA, 25 bp, Canis familiaris
aggtgcccccagagtataactcagt

SEQ ID NO: 25152 - DNA, 25 bp, Canis familiaris
aggtcccctgagaattatatcccaa

SEQ ID NO: 25153 - DNA, 25 bp, Canis familiaris
aggtcccaagattagtgtatgcccg

SEQ ID NO: 25154 - DNA, 25 bp, Canis familiaris
aggttccatttaactgttcatccag

SEQ ID NO: 25155 - DNA, 25 bp, Canis familiaris
agggtaattttacattgtctctgga

SEQ ID NO: 25156 - DNA, 25 bp, Canis familiaris
aggttatctttttacacttccatga

SEQ ID NO: 25157 - DNA, 25 bp, Canis familiaris
aggttatgctttttatatatttgct

SEQ ID NO: 25158 - DNA, 25 bp, Canis familiaris
agggtggtccttgtaaagctgtaca

SEQ ID NO: 25159 - DNA, 25 bp, Canis familiaris
agggggtcgagaaggaggagctgta

SEQ ID NO: 25160 - DNA, 25 bp, Canis familiaris
agggggtatgaagaactgggtagca

SEQ ID NO: 25161 - DNA, 25 bp, Canis familiaris
aggatgggcttgaggtacggggctg

SEQ ID NO: 25162 - DNA, 25 bp, Canis familiaris
aggaggtgctggtggtagaacgcgg

SEQ ID NO: 25163 - DNA, 25 bp, Canis familiaris
agtacgtgcgggtgtaccccgagag

SEQ ID NO: 25164 - DNA, 25 bp, Canis familiaris
agtacagggcgacgaggatccccga

SEQ ID NO: 25165 - DNA, 25 bp, Canis familiaris
aggtcatggggacaggcaccccagc

SEQ ID NO: 25166 - DNA, 25 bp, Canis familiaris
aggatcagagaaaccaccaagcccg

SEQ ID NO: 25167 - DNA, 25 bp, Canis familiaris
aggatcagagaaaccaccaagcccg

SEQ ID NO: 25168 - DNA, 25 bp, Canis familiaris
aggatcagagaaaccaccaagcccg

SEQ ID NO: 25169 - DNA, 25 bp, Canis familiaris
aggatcagagaaaccaccaagcccg

SEQ ID NO: 25170 - DNA, 25 bp, Canis familiaris
aggatcagagaaaccaccaagcccg

SEQ ID NO: 25171 - DNA, 25 bp, Canis familiaris
aggtatgcagcaacgacaacaagac

SEQ ID NO: 25172 - DNA, 25 bp, Canis familiaris
aggttcatcgaccttgacagtgcac

SEQ ID NO: 25173 - DNA, 25 bp, Canis familiaris
aggttaccatcactggatctgctgc

SEQ ID NO: 25174 - DNA, 25 bp, Canis familiaris
aggttaccatcactggatctgctgc

SEQ ID NO: 25175 - DNA, 25 bp, Canis familiaris
aggttgatcctggctgattctgcct

SEQ ID NO: 25176 - DNA, 25 bp, Canis familiaris
aggattacgtcagtgtggctgcctt

SEQ ID NO: 25177 - DNA, 25 bp, Canis familiaris
aggtctacggatacatggctcgttt

SEQ ID NO: 25178 - DNA, 25 bp, Canis familiaris
aggatcggcaggtactcgtggttta

SEQ ID NO: 25179 - DNA, 25 bp, Canis familiaris
aggtgcggtggctactaaagttcga

SEQ ID NO: 25180 - DNA, 25 bp, Canis familiaris
agggcggtgactcgaaaggttctgc

SEQ ID NO: 25181 - DNA, 25 bp, Canis familiaris
aggtcggagagctgaaaagcctgtc

SEQ ID NO: 25182 - DNA, 25 bp, Canis familiaris
aggttggaagacggcggagcgctac

SEQ ID NO: 25183 - DNA, 25 bp, Canis familiaris
aggttgagctgagccaggtgggtcc

SEQ ID NO: 25184 - DNA, 25 bp, Canis familiaris
aggtccagctgcgaccagggaccta

SEQ ID NO: 25185 - DNA, 25 bp, Canis familiaris
aggttgcctcctttgagtgacttag

SEQ ID NO: 25186 - DNA, 25 bp, Canis familiaris
aggtttgtccctaggtgtcttatgg

SEQ ID NO: 25187 - DNA, 25 bp, Canis familiaris
aggttggattcctaagttcttaatg

SEQ ID NO: 25188 - DNA, 25 bp, Canis familiaris
aggattaatttgtaacgtctgttat

SEQ ID NO: 25189 - DNA, 25 bp, Canis familiaris
aggtctatatactaaaatcctttat

SEQ ID NO: 25190 - DNA, 25 bp, Canis familiaris
aggtcagttacatatcttcacttag

SEQ ID NO: 25191 - DNA, 25 bp, Canis familiaris
aggtgagttgactctttatccaaga

SEQ ID NO: 25192 - DNA, 25 bp, Canis familiaris
aggggtggaccttgaaattcagcag

SEQ ID NO: 25193 - DNA, 25 bp, Canis familiaris
aggggtgggtctagggttagcagct

SEQ ID NO: 25194 - DNA, 25 bp, Canis familiaris
aggtcgtggtgtctgggaaactccg

SEQ ID NO: 25195 - DNA, 25 bp, Canis familiaris
aggtcgtggtgtctgggaaactccg

SEQ ID NO: 25196 - DNA, 25 bp, Canis familiaris
aggatggggtggtggagtgcaactc

SEQ ID NO: 25197 - DNA, 25 bp, Canis familiaris
aggaggaggggctgtgggtagcgcc

SEQ ID NO: 25198 - DNA, 25 bp, Canis familiaris
aggaggagggggctggctgaaggct

SEQ ID NO: 25199 - DNA, 25 bp, Canis familiaris
aggaggagagggcttctggacactt

SEQ ID NO: 25200 - DNA, 25 bp, Canis familiaris
aggatggaaccctttcgttcatctt

SEQ ID NO: 25201 - DNA, 25 bp, Canis familiaris
aggaggaccaccgaacttatgcttt

SEQ ID NO: 25202 - DNA, 25 bp, Canis familiaris
aggaggagccgcggaaggtgtgctt

SEQ ID NO: 25203 - DNA, 25 bp, Canis familiaris
aggaggacagtgtgcacatgtttgc

SEQ ID NO: 25204 - DNA, 25 bp, Canis familiaris
aggaggaactgcctcctgttggctg

SEQ ID NO: 25205 - DNA, 25 bp, Canis familiaris
aggatcgacgcgcttctgtatgggc

SEQ ID NO: 25206 - DNA, 25 bp, Canis familiaris
aggtggacactgattttgttggcgt

SEQ ID NO: 25207 - DNA, 25 bp, Canis familiaris
aggttgaattggtacttgagcttgc

SEQ ID NO: 25208 - DNA, 25 bp, Canis familiaris
aggtctacggagtagcagtccttgt

SEQ ID NO: 25209 - DNA, 25 bp, Canis familiaris
aggtgctcagcaaatgtcaggtact

SEQ ID NO: 25210 - DNA, 25 bp, Canis familiaris
aggatccagatccatgacactgctt

SEQ ID NO: 25211 - DNA, 25 bp, Canis familiaris
aggatacaaccatcaatgagatcga

SEQ ID NO: 25212 - DNA, 25 bp, Canis familiaris
aggtcagaacctagcctgagagtga

SEQ ID NO: 25213 - DNA, 25 bp, Canis familiaris
agggagaacccttcgaggtggacat

SEQ ID NO: 25214 - DNA, 25 bp, Canis familiaris
aggggaaggggcattgtgtggacat

SEQ ID NO: 25215 - DNA, 25 bp, Canis familiaris
aggggttgtgggaggtgcatggcat

SEQ ID NO: 25216 - DNA, 25 bp, Canis familiaris
aggatagtaagcagacggtaggacc

SEQ ID NO: 25217 - DNA, 25 bp, Canis familiaris
aggtcagttggctggggtgaggggt

SEQ ID NO: 25218 - DNA, 25 bp, Canis familiaris
aggtatgtgggtactgggacagggg

SEQ ID NO: 25219 - DNA, 25 bp, Canis familiaris
aggttggctgttcctggacatgagg

SEQ ID NO: 25220 - DNA, 25 bp, Canis familiaris
aggttggatgatctcttcctagagt

SEQ ID NO: 25221 - DNA, 25 bp, Canis familiaris
aggttagttttgttgatgtcagatg

SEQ ID NO: 25222 - DNA, 25 bp, Canis familiaris
aggatgtaggtcttggtcagttgaa

SEQ ID NO: 25223 - DNA, 25 bp, Canis familiaris
aggatcggagcttctggatggtctg

SEQ ID NO: 25224 - DNA, 25 bp, Canis familiaris
aggtaggcactggctggcaaggttt

SEQ ID NO: 25225 - DNA, 25 bp, Canis familiaris
aggtcaggctgtttcagtagctgtt

SEQ ID NO: 25226 - DNA, 25 bp, Canis familiaris
aggatatggtgttactgctttgtta

SEQ ID NO: 25227 - DNA, 25 bp, Canis familiaris
aggatgttggattattgatttttca

SEQ ID NO: 25228 - DNA, 25 bp, Canis familiaris
aggatggctggtttgattatttcta

SEQ ID NO: 25229 - DNA, 25 bp, Canis familiaris
aggatggcaagtttgtcttcttcaa

SEQ ID NO: 25230 - DNA, 25 bp, Canis familiaris
aggatggaggttcacctctccagta

SEQ ID NO: 25231 - DNA, 25 bp, Canis familiaris
aggatggagtgtcaagtctgctacc

SEQ ID NO: 25232 - DNA, 25 bp, Canis familiaris
aggaggcctggacagagctggacct

SEQ ID NO: 25233 - DNA, 25 bp, Canis familiaris
aggaggccagaggagagaccagacc

SEQ ID NO: 25234 - DNA, 25 bp, Canis familiaris
aggaggcgagcgcagtgatgggtcc

SEQ ID NO: 25235 - DNA, 25 bp, Canis familiaris
aggatgagcggctcagatgcggggc

SEQ ID NO: 25236 - DNA, 25 bp, Canis familiaris
aggatggaggacaaggagcggctgc

SEQ ID NO: 25237 - DNA, 25 bp, Canis familiaris
aggtgacagctatgaggagcaagtt

SEQ ID NO: 25238 - DNA, 25 bp, Canis familiaris
aggatgagctctttgggactgtgaa

SEQ ID NO: 25239 - DNA, 25 bp, Canis familiaris
aggttgctcttctggacattgatat

SEQ ID NO: 25240 - DNA, 25 bp, Canis familiaris
aggatggcctctgatgggcattaga

SEQ ID NO: 25241 - DNA, 25 bp, Canis familiaris
aggattggctctaagggctgggtcg

SEQ ID NO: 25242 - DNA, 25 bp, Canis familiaris
agggtgcgactgaacgtgttcgggg

SEQ ID NO: 25243 - DNA, 25 bp, Canis familiaris
aggggctggtgaagcccctgggagc

SEQ ID NO: 25244 - DNA, 25 bp, Canis familiaris
agtggtgcagtggaatgcccagcga

SEQ ID NO: 25245 - DNA, 25 bp, Canis familiaris
agtggtgcagtggaatgcccagcga

SEQ ID NO: 25246 - DNA, 25 bp, Canis familiaris
aggatgagcatggctacatctcccg

SEQ ID NO: 25247 - DNA, 25 bp, Canis familiaris
aggataggtatgtcatctcccgata

SEQ ID NO: 25248 - DNA, 25 bp, Canis familiaris
agacagagggtttcccccaatgtgt

SEQ ID NO: 25249 - DNA, 25 bp, Canis familiaris
aacgttggttacacagcccagttgc

SEQ ID NO: 25250 - DNA, 25 bp, Canis familiaris
aggggtggctttatgacctggttgc

SEQ ID NO: 25251 - DNA, 25 bp, Canis familiaris
aggttgctgctcattcagtactctt

SEQ ID NO: 25252 - DNA, 25 bp, Canis familiaris
aggttcacacaaaagctaacttgct

SEQ ID NO: 25253 - DNA, 25 bp, Canis familiaris
aggatctcaaacaaatctgcacccc

SEQ ID NO: 25254 - DNA, 25 bp, Canis familiaris
aggatgctaggaacacatcccaccc

SEQ ID NO: 25255 - DNA, 25 bp, Canis familiaris
aggatgctggagagagccccaggcc

SEQ ID NO: 25256 - DNA, 25 bp, Canis familiaris
aggatgggtgagcagacccacctcg

SEQ ID NO: 25257 - DNA, 25 bp, Canis familiaris
aggattggtgagcatggaactacat

SEQ ID NO: 25258 - DNA, 25 bp, Canis familiaris
aggttggctgagcaggtgtcctcat

SEQ ID NO: 25259 - DNA, 25 bp, Canis familiaris
aggtagaggcagaagcaggctccct

SEQ ID NO: 25260 - DNA, 25 bp, Canis familiaris
aggttgcagagtggtctgcttccct

SEQ ID NO: 25261 - DNA, 25 bp, Canis familiaris
aggtttgcagtggtctgcggtgcct

SEQ ID NO: 25262 - DNA, 25 bp, Canis familiaris
aggttggaggcagcctagtcttgcc

SEQ ID NO: 25263 - DNA, 25 bp, Canis familiaris
aggtgtagagcctccttatttgtac

SEQ ID NO: 25264 - DNA, 25 bp, Canis familiaris
aggggcaggcactgctcttaagccc

SEQ ID NO: 25265 - DNA, 25 bp, Canis familiaris
aggtcagggaaactttctcagcctt

SEQ ID NO: 25266 - DNA, 25 bp, Canis familiaris
aggttaggaggccatttgcctgcct

SEQ ID NO: 25267 - DNA, 25 bp, Canis familiaris
aggtcattagggcattttctcgtgt

SEQ ID NO: 25268 - DNA, 25 bp, Canis familiaris
aggatttgggcagaatcttccgctg

SEQ ID NO: 25269 - DNA, 25 bp, Canis familiaris
aggtttacgcaatagcgacgcgctg

SEQ ID NO: 25270 - DNA, 25 bp, Canis familiaris
acggtgtacgaataccacaggccag

SEQ ID NO: 25271 - DNA, 25 bp, Canis familiaris
agggtgtgaaagttgttaagtgcca

SEQ ID NO: 25272 - DNA, 25 bp, Canis familiaris
aggtgggaagaggaggtgaaagtgc

SEQ ID NO: 25273 - DNA, 25 bp, Canis familiaris
aggtcctgggtcaaggagaagagtg

SEQ ID NO: 25274 - DNA, 25 bp, Canis familiaris
aggtgccgggcgcaggaactgcgtg

SEQ ID NO: 25275 - DNA, 25 bp, Canis familiaris
aggtgccgggcgcaggaactgcgtg

SEQ ID NO: 25276 - DNA, 25 bp, Canis familiaris
aggtgccgggcgcaggaactgcgtg

SEQ ID NO: 25277 - DNA, 25 bp, Canis familiaris
aggtgccgggcgcaggaactgcgtg

SEQ ID NO: 25278 - DNA, 25 bp, Canis familiaris
aggtgccgggcgcaggaactgcgtg

SEQ ID NO: 25279 - DNA, 25 bp, Canis familiaris
aggtgccgggcgcaggaactgcgtg

SEQ ID NO: 25280 - DNA, 25 bp, Canis familiaris
aggtgccgggcgcaggaactgcgtg

SEQ ID NO: 25281 - DNA, 25 bp, Canis familiaris
aggtgccgggcgcaggaactgcgtg

SEQ ID NO: 25282 - DNA, 25 bp, Canis familiaris
aggtgccgggcgcaggaactgcgtg

SEQ ID NO: 25283 - DNA, 25 bp, Canis familiaris
aggtgctgcaggtgtccgagacctg

SEQ ID NO: 25284 - DNA, 25 bp, Canis familiaris
aggtgccgtgagggccaggcaccca

SEQ ID NO: 25285 - DNA, 25 bp, Canis familiaris
aggtgccgagcactgtgctaggcgc

SEQ ID NO: 25286 - DNA, 25 bp, Canis familiaris
aggtgtcgttgcagcatcaggcagt

SEQ ID NO: 25287 - DNA, 25 bp, Canis familiaris
aggttgtttgataaatggcagcatt

SEQ ID NO: 25288 - DNA, 25 bp, Canis familiaris
aggttctataataagcaggagctcg

SEQ ID NO: 25289 - DNA, 25 bp, Canis familiaris
aggtgtgcttaaaaggtgtgtagtg

SEQ ID NO: 25290 - DNA, 25 bp, Canis familiaris
agagggcttccacagggaaagtgtg

SEQ ID NO: 25291 - DNA, 25 bp, Canis familiaris
aggggcttcctctggaaccagaatg

SEQ ID NO: 25292 - DNA, 25 bp, Canis familiaris
aggggcttctctgggtaatggtagt

SEQ ID NO: 25293 - DNA, 25 bp, Canis familiaris
agtgggttttaatagtggtggatgc

SEQ ID NO: 25294 - DNA, 25 bp, Canis familiaris
agtggtgtttttgaacatggggtgc

SEQ ID NO: 25295 - DNA, 25 bp, Canis familiaris
agatcgtttaaatatttgctgaggg

SEQ ID NO: 25296 - DNA, 25 bp, Canis familiaris
agtggtttaaactttcgcccagatg

SEQ ID NO: 25297 - DNA, 25 bp, Canis familiaris
aggggttcagaagaggagcctcaat

SEQ ID NO: 25298 - DNA, 25 bp, Canis familiaris
aggggtgttggggagtggcagtcct

SEQ ID NO: 25299 - DNA, 25 bp, Canis familiaris
agggggtcaagggagcttgcctcct

SEQ ID NO: 25300 - DNA, 25 bp, Canis familiaris
aggggaggcagcagggatttccctg

SEQ ID NO: 25301 - DNA, 25 bp, Canis familiaris
agggcagaacacagaggtttcccca

SEQ ID NO: 25302 - DNA, 25 bp, Canis familiaris
agggcataaatccaagggttccaga

SEQ ID NO: 25303 - DNA, 25 bp, Canis familiaris
agggagaaatgccaagacagttaaa

SEQ ID NO: 25304 - DNA, 25 bp, Canis familiaris
acgggaacttgatgaaattaatctc

SEQ ID NO: 25305 - DNA, 25 bp, Canis familiaris
agggcggccctacaataaagatctc

SEQ ID NO: 25306 - DNA, 25 bp, Canis familiaris
agggcctgccctagtaaatatttct

SEQ ID NO: 25307 - DNA, 25 bp, Canis familiaris
agggcacagggctgtaactccttat

SEQ ID NO: 25308 - DNA, 25 bp, Canis familiaris
agggcccgagctgtagactcggtgc

SEQ ID NO: 25309 - DNA, 25 bp, Canis familiaris
agtggccggagatgtcaaactggac

SEQ ID NO: 25310 - DNA, 25 bp, Canis familiaris
agggccgaaaagcagaacgagtcta

SEQ ID NO: 25311 - DNA, 25 bp, Canis familiaris
agggctctagaatatgaataccagt

SEQ ID NO: 25312 - DNA, 25 bp, Canis familiaris
agggctttgccattttaactcattc

SEQ ID NO: 25313 - DNA, 25 bp, Canis familiaris
agggcttttcagcttaaatcaggat

SEQ ID NO: 25314 - DNA, 25 bp, Canis familiaris
aggtgcttaattgcagctaaatcat

SEQ ID NO: 25315 - DNA, 25 bp, Canis familiaris
aggtgcgttatctcagcttcttcag

SEQ ID NO: 25316 - DNA, 25 bp, Canis familiaris
aggggctcaacatcacttaatcatc

SEQ ID NO: 25317 - DNA, 25 bp, Canis familiaris
aggtgtccttcagcaccataactct

SEQ ID NO: 25318 - DNA, 25 bp, Canis familiaris
aggtatcagttctgcagccaaccat

SEQ ID NO: 25319 - DNA, 25 bp, Canis familiaris
aggatacttttgccacatgaactct

SEQ ID NO: 25320 - DNA, 25 bp, Canis familiaris
aggtatctcttcaacctgaactctt

SEQ ID NO: 25321 - DNA, 25 bp, Canis familiaris
aggtatcacaagacacctacaccct

SEQ ID NO: 25322 - DNA, 25 bp, Canis familiaris
aggtctacacagaagccaagcgtcc

SEQ ID NO: 25323 - DNA, 25 bp, Canis familiaris
aggtttgccaaagtcaggcctctca

SEQ ID NO: 25324 - DNA, 25 bp, Canis familiaris
aggtgagtgtcacagttgagcccca

SEQ ID NO: 25325 - DNA, 25 bp, Canis familiaris
aggtagtgtcattctttacatcctt

SEQ ID NO: 25326 - DNA, 25 bp, Canis familiaris
aggtaccacaattttcactctttat

SEQ ID NO: 25327 - DNA, 25 bp, Canis familiaris
aggttccaagagtcttcgtgcatta

SEQ ID NO: 25328 - DNA, 25 bp, Canis familiaris
aggttctcaaaccattggatgtgaa

SEQ ID NO: 25329 - DNA, 25 bp, Canis familiaris
aggtcctcaagttcattgctcggaa

SEQ ID NO: 25330 - DNA, 25 bp, Canis familiaris
aggtccttgagcctcatcagttgaa

SEQ ID NO: 25331 - DNA, 25 bp, Canis familiaris
aggtctcttatttctcagtacaatg

SEQ ID NO: 25332 - DNA, 25 bp, Canis familiaris
aggtctcatgcttctagtagctatc

SEQ ID NO: 25333 - DNA, 25 bp, Canis familiaris
aggttactgccaagttggtccactt

SEQ ID NO: 25334 - DNA, 25 bp, Canis familiaris
aggtagacgaccgtcgggtcacttg

SEQ ID NO: 25335 - DNA, 25 bp, Canis familiaris
aggtcagtcgacactatggagttgc

SEQ ID NO: 25336 - DNA, 25 bp, Canis familiaris
aggtcaagaaggcctatgtggaggc

SEQ ID NO: 25337 - DNA, 25 bp, Canis familiaris
aggtcaagaaggcctatgtggaggc

SEQ ID NO: 25338 - DNA, 25 bp, Canis familiaris
aggtcatgatgctagggctctggga

SEQ ID NO: 25339 - DNA, 25 bp, Canis familiaris
aggtctggacaggagctgctgagat

SEQ ID NO: 25340 - DNA, 25 bp, Canis familiaris
aggtctcgcaggcagctgcagagct

SEQ ID NO: 25341 - DNA, 25 bp, Canis familiaris
aggtgcccagggtagtgacttatat

SEQ ID NO: 25342 - DNA, 25 bp, Canis familiaris
aggttccggagctgtccagaatgct

SEQ ID NO: 25343 - DNA, 25 bp, Canis familiaris
aggtacgcaggtgtctctagaagct

SEQ ID NO: 25344 - DNA, 25 bp, Canis familiaris
aggtcccatgagctttctgaacagc

SEQ ID NO: 25345 - DNA, 25 bp, Canis familiaris
aggtgggggcatcttctgaacagcc

SEQ ID NO: 25346 - DNA, 25 bp, Canis familiaris
agggctggactgacgtactatactg

SEQ ID NO: 25347 - DNA, 25 bp, Canis familiaris
agggcgaagttcagacattttggtt

SEQ ID NO: 25348 - DNA, 25 bp, Canis familiaris
aggggaagcttcactttttgtctga

SEQ ID NO: 25349 - DNA, 25 bp, Canis familiaris
aggggacaagtcacctttcatttct

SEQ ID NO: 25350 - DNA, 25 bp, Canis familiaris
agggaacaaggcctgcctttcactt

SEQ ID NO: 25351 - DNA, 25 bp, Canis familiaris
agggtactggtgtctttagtgcctt

SEQ ID NO: 25352 - DNA, 25 bp, Canis familiaris
aggggatccctctaatcaagtactt

SEQ ID NO: 25353 - DNA, 25 bp, Canis familiaris
aggggagccctaattgacatgttta

SEQ ID NO: 25354 - DNA, 25 bp, Canis familiaris
agggtgattccacctcgatggttta

SEQ ID NO: 25355 - DNA, 25 bp, Canis familiaris
aggtcgtatccgctttggtgttaga

SEQ ID NO: 25356 - DNA, 25 bp, Canis familiaris
aggtcatgtgattccgttttgcttc

SEQ ID NO: 25357 - DNA, 25 bp, Canis familiaris
aggtcatgtgattccgttttgcttc

SEQ ID NO: 25358 - DNA, 25 bp, Canis familiaris
aggtgcttgatgtccagtgttgatt

SEQ ID NO: 25359 - DNA, 25 bp, Canis familiaris
aggtactatgctaagtgcctgacat

SEQ ID NO: 25360 - DNA, 25 bp, Canis familiaris
aggtatgcatgagtctaacctgaga

SEQ ID NO: 25361 - DNA, 25 bp, Canis familiaris
aggtcagcagaatatactccagtgc

SEQ ID NO: 25362 - DNA, 25 bp, Canis familiaris
aggttggcactgactatatctctgt

SEQ ID NO: 25363 - DNA, 25 bp, Canis familiaris
aggtctggtctacatatgcctgact

SEQ ID NO: 25364 - DNA, 25 bp, Canis familiaris
aggtctctgcttaaattcctggcat

SEQ ID NO: 25365 - DNA, 25 bp, Canis familiaris
aggtctagctctacatcatgcttct

SEQ ID NO: 25366 - DNA, 25 bp, Canis familiaris
aggtctagccaaccatgctagtcct

SEQ ID NO: 25367 - DNA, 25 bp, Canis familiaris
aggtcacagtcacccagattgtact

SEQ ID NO: 25368 - DNA, 25 bp, Canis familiaris
aggtgcaggtcagcacgttgctgtc

SEQ ID NO: 25369 - DNA, 25 bp, Canis familiaris
aggtgagcgcctgcaagcagtttcc

SEQ ID NO: 25370 - DNA, 25 bp, Canis familiaris
agggagcctgctgcagtactcaatc

SEQ ID NO: 25371 - DNA, 25 bp, Canis familiaris
agggacacagcccagatttctcttt

SEQ ID NO: 25372 - DNA, 25 bp, Canis familiaris
agtgagcgaccctggtttgctaatt

SEQ ID NO: 25373 - DNA, 25 bp, Canis familiaris
agtacgacctttgggcattgaacat

SEQ ID NO: 25374 - DNA, 25 bp, Canis familiaris
agtgggaccctggcaggatgggcca

SEQ ID NO: 25375 - DNA, 25 bp, Canis familiaris
aggtggcccctggtggagagataag

SEQ ID NO: 25376 - DNA, 25 bp, Canis familiaris
agggcgcctacattcttagagaaag

SEQ ID NO: 25377 - DNA, 25 bp, Canis familiaris
aggggcgattattgctggaggaaaa

SEQ ID NO: 25378 - DNA, 25 bp, Canis familiaris
aggtggctgatctcccagagtaaaa

SEQ ID NO: 25379 - DNA, 25 bp, Canis familiaris
aggtagagcggtcccagatgtacca

SEQ ID NO: 25380 - DNA, 25 bp, Canis familiaris
aggtagtcaggcccaatgatgcccc

SEQ ID NO: 25381 - DNA, 25 bp, Canis familiaris
aggtaacagagccctgggctcccac

SEQ ID NO: 25382 - DNA, 25 bp, Canis familiaris
aggtgaacaagcccttggaccactt

SEQ ID NO: 25383 - DNA, 25 bp, Canis familiaris
aggtgaaaggctattggcaggtttg

SEQ ID NO: 25384 - DNA, 25 bp, Canis familiaris
agggtggggtaagagcaggcctgcc

SEQ ID NO: 25385 - DNA, 25 bp, Canis familiaris
agggtggttgtgaggactgcccgac

SEQ ID NO: 25386 - DNA, 25 bp, Canis familiaris
agggtagtttcgctgaagtcctggc

SEQ ID NO: 25387 - DNA, 25 bp, Canis familiaris
agggattgttctggttcaaccctgg

SEQ ID NO: 25388 - DNA, 25 bp, Canis familiaris
agggcaagcttcgtctacaaagggg

SEQ ID NO: 25389 - DNA, 25 bp, Canis familiaris
agaggcacagttttaacacaggggc

SEQ ID NO: 25390 - DNA, 25 bp, Canis familiaris
agggccatccttgaacttggcctgc

SEQ ID NO: 25391 - DNA, 25 bp, Canis familiaris
agggcccggctggagactatggcct

SEQ ID NO: 25392 - DNA, 25 bp, Canis familiaris
agggcccagctttacagtacagcct

SEQ ID NO: 25393 - DNA, 25 bp, Canis familiaris
aggtaccagggatcgtaccagccac

SEQ ID NO: 25394 - DNA, 25 bp, Canis familiaris
aggtaaagcggatcactccgcgcca

SEQ ID NO: 25395 - DNA, 25 bp, Canis familiaris
aggtagaaggagaagcacgctcccc

SEQ ID NO: 25396 - DNA, 25 bp, Canis familiaris
aggtaggagaagtacactgccccaa

SEQ ID NO: 25397 - DNA, 25 bp, Canis familiaris
aggtagggattgtctgagccctcct

SEQ ID NO: 25398 - DNA, 25 bp, Canis familiaris
aggtcagagtgtcacacaagcccct

SEQ ID NO: 25399 - DNA, 25 bp, Canis familiaris
aggtcaagtgaggcagctccagcct

SEQ ID NO: 25400 - DNA, 25 bp, Canis familiaris
aggtcatagtcagcctgcagtgctc

SEQ ID NO: 25401 - DNA, 25 bp, Canis familiaris
aggtcagagctgtatgcgctgggca

SEQ ID NO: 25402 - DNA, 25 bp, Canis familiaris
agggcatgggcatccgcctggacaa

SEQ ID NO: 25403 - DNA, 25 bp, Canis familiaris
aggtatgtacactgatgcttttaga

SEQ ID NO: 25404 - DNA, 25 bp, Canis familiaris
aggtatgtagcttttgtttcattcg

SEQ ID NO: 25405 - DNA, 25 bp, Canis familiaris
aggtatgtatcctctttatatccca

SEQ ID NO: 25406 - DNA, 25 bp, Canis familiaris
aggttttccttaatgatttcacaca

SEQ ID NO: 25407 - DNA, 25 bp, Canis familiaris
aggtatgtgctttctgaatgtttca

SEQ ID NO: 25408 - DNA, 25 bp, Canis familiaris
aggtgcttctcacccaaatatctca

SEQ ID NO: 25409 - DNA, 25 bp, Canis familiaris
agggtttgctgctcagaatttacct

SEQ ID NO: 25410 - DNA, 25 bp, Canis familiaris
agggtggagctacagccacctttct

SEQ ID NO: 25411 - DNA, 25 bp, Canis familiaris
agggtggctctacgacaacatccct

SEQ ID NO: 25412 - DNA, 25 bp, Canis familiaris
aggggactcctctaagagacctcta

SEQ ID NO: 25413 - DNA, 25 bp, Canis familiaris
aggtcaacatctgctgtaagaaaca

SEQ ID NO: 25414 - DNA, 25 bp, Canis familiaris
aggtcgtctgctgtggaaggacccc

SEQ ID NO: 25415 - DNA, 25 bp, Canis familiaris
aggtctcatatgctctcgaaagatc

SEQ ID NO: 25416 - DNA, 25 bp, Canis familiaris
agggtctacttctgcaaagtcctga

SEQ ID NO: 25417 - DNA, 25 bp, Canis familiaris
agggatttgttcttcataaatcaaa

SEQ ID NO: 25418 - DNA, 25 bp, Canis familiaris
aggtatttgtgttctctgaagccaa

SEQ ID NO: 25419 - DNA, 25 bp, Canis familiaris
aggtttaggtccgtgacacagctct

SEQ ID NO: 25420 - DNA, 25 bp, Canis familiaris
agggttaggagcaattccacctctg

SEQ ID NO: 25421 - DNA, 25 bp, Canis familiaris
aggtgatttggagaccctactcttc

SEQ ID NO: 25422 - DNA, 25 bp, Canis familiaris
aggttatctgctaaacctgctcctc

SEQ ID NO: 25423 - DNA, 25 bp, Canis familiaris
aggtgtttgataatgccacgcatct

SEQ ID NO: 25424 - DNA, 25 bp, Canis familiaris
aggtgtcatttacccaggagctggg

SEQ ID NO: 25425 - DNA, 25 bp, Canis familiaris
agtttggttgactcactaaggtgtg

SEQ ID NO: 25426 - DNA, 25 bp, Canis familiaris
aggggagtagaatcatagacatggt

SEQ ID NO: 25427 - DNA, 25 bp, Canis familiaris
aggggaccaaatactcagacaaaca

SEQ ID NO: 25428 - DNA, 25 bp, Canis familiaris
agggtgcacacacatgacttgaaag

SEQ ID NO: 25429 - DNA, 25 bp, Canis familiaris
aggttgcccagggattggaccaggc

SEQ ID NO: 25430 - DNA, 25 bp, Canis familiaris
aggttaccattggttgcaagcccct

SEQ ID NO: 25431 - DNA, 25 bp, Canis familiaris
aggtttcgtcaggatctgcacagcc

SEQ ID NO: 25432 - DNA, 25 bp, Canis familiaris
aggtgatttgtaggtgctgccgggt

SEQ ID NO: 25433 - DNA, 25 bp, Canis familiaris
aggtgaatttctttggacgctggtt

SEQ ID NO: 25434 - DNA, 25 bp, Canis familiaris
aggtatgttttgttggcaggcagtt

SEQ ID NO: 25435 - DNA, 25 bp, Canis familiaris
aggttttcatagtagtgcagtttct

SEQ ID NO: 25436 - DNA, 25 bp, Canis familiaris
aggttttaagtatgatcatcatcct

SEQ ID NO: 25437 - DNA, 25 bp, Canis familiaris
aggttttctctttcagatcatctgc

SEQ ID NO: 25438 - DNA, 25 bp, Canis familiaris
aggtagttgctcacatattcatctc

SEQ ID NO: 25439 - DNA, 25 bp, Canis familiaris
aggtatattctcttatttacacgta

SEQ ID NO: 25440 - DNA, 25 bp, Canis familiaris
aggtataatctctttctaactctct

SEQ ID NO: 25441 - DNA, 25 bp, Canis familiaris
aggtctagcattgttccacacattt

SEQ ID NO: 25442 - DNA, 25 bp, Canis familiaris
aggtccagcagctacatttacacat

SEQ ID NO: 25443 - DNA, 25 bp, Canis familiaris
aggtctctgctcttagacaaccatg

SEQ ID NO: 25444 - DNA, 25 bp, Canis familiaris
agggatgtgctcttagtcaactgga

SEQ ID NO: 25445 - DNA, 25 bp, Canis familiaris
aggtcatgtgctttggacacagcta

SEQ ID NO: 25446 - DNA, 25 bp, Canis familiaris
aggtgctctgtgtggagaaggatcc

SEQ ID NO: 25447 - DNA, 25 bp, Canis familiaris
agtgcagtcgtgtataagagaagag

SEQ ID NO: 25448 - DNA, 25 bp, Canis familiaris
agggtcttggcatcagagcaccagt

SEQ ID NO: 25449 - DNA, 25 bp, Canis familiaris
agggatcggagccatcatcgcgcca

SEQ ID NO: 25450 - DNA, 25 bp, Canis familiaris
agggatcggagccatcatcgcgcca

SEQ ID NO: 25451 - DNA, 25 bp, Canis familiaris
agcgtgtgcctaccctacgccggca

SEQ ID NO: 25452 - DNA, 25 bp, Canis familiaris
agcgtgtgcctaccctacgccggca

SEQ ID NO: 25453 - DNA, 25 bp, Canis familiaris
agggtgcctatctgtatggggtgca

SEQ ID NO: 25454 - DNA, 25 bp, Canis familiaris
agtggaagtatctgctatgggacta

SEQ ID NO: 25455 - DNA, 25 bp, Canis familiaris
aggggctggggactgatgaggactc

SEQ ID NO: 25456 - DNA, 25 bp, Canis familiaris
agggaccaaggacatatggaatcca

SEQ ID NO: 25457 - DNA, 25 bp, Canis familiaris
agggccccaaacaaatgtataccag

SEQ ID NO: 25458 - DNA, 25 bp, Canis familiaris
agggccagccagccactaagaaaaa

SEQ ID NO: 25459 - DNA, 25 bp, Canis familiaris
aggtccacctgatgctaaagaaata

SEQ ID NO: 25460 - DNA, 25 bp, Canis familiaris
aggtcccttagagagcaacagagta

SEQ ID NO: 25461 - DNA, 25 bp, Canis familiaris
aggtctgtttcactggtccaagaat

SEQ ID NO: 25462 - DNA, 25 bp, Canis familiaris
aggtcatttgaagtgtatacatagt

SEQ ID NO: 25463 - DNA, 25 bp, Canis familiaris
aggtttttccattcatacatgagct

SEQ ID NO: 25464 - DNA, 25 bp, Canis familiaris
acggttaatatcttaatctagctgg

SEQ ID NO: 25465 - DNA, 25 bp, Canis familiaris
aggtgttaatactagtgacttctgg

SEQ ID NO: 25466 - DNA, 25 bp, Canis familiaris
aggtgaggtttccgtgaggtctgtt

SEQ ID NO: 25467 - DNA, 25 bp, Canis familiaris
aggtactggagtgcgtgagcctggt

SEQ ID NO: 25468 - DNA, 25 bp, Canis familiaris
aggtagtggatgtggcggctcctat

SEQ ID NO: 25469 - DNA, 25 bp, Canis familiaris
aggtcaccgaggagcttgatgcctg

SEQ ID NO: 25470 - DNA, 25 bp, Canis familiaris
aggtcacacaggctacttgtcctgc

SEQ ID NO: 25471 - DNA, 25 bp, Canis familiaris
aggtaagaggcggccttcttggctg

SEQ ID NO: 25472 - DNA, 25 bp, Canis familiaris
aggtgaagggctggacgtctcttct

SEQ ID NO: 25473 - DNA, 25 bp, Canis familiaris
aggtacagggttgcctgactggctc

SEQ ID NO: 25474 - DNA, 25 bp, Canis familiaris
aggtcagctgggaataccccgacac

SEQ ID NO: 25475 - DNA, 25 bp, Canis familiaris
aggtcgtgtaggaacaccaggccct

SEQ ID NO: 25476 - DNA, 25 bp, Canis familiaris
aggtggtaaagatcatccggcccag

SEQ ID NO: 25477 - DNA, 25 bp, Canis familiaris
agggagtacagacagccctgagcca

SEQ ID NO: 25478 - DNA, 25 bp, Canis familiaris
agggactggacggagccaagcagct

SEQ ID NO: 25479 - DNA, 25 bp, Canis familiaris
agggctcatggccggattaatccat

SEQ ID NO: 25480 - DNA, 25 bp, Canis familiaris
aggtgcctgtttggtaacatcacat

SEQ ID NO: 25481 - DNA, 25 bp, Canis familiaris
aggtactgtgtgtgctaacctcttc

SEQ ID NO: 25482 - DNA, 25 bp, Canis familiaris
aggtaccagctatgcttgctttttc

SEQ ID NO: 25483 - DNA, 25 bp, Canis familiaris
aggtgaggagctcagcctcttcatt

SEQ ID NO: 25484 - DNA, 25 bp, Canis familiaris
aggtgtggagcgacatcccgcttgc

SEQ ID NO: 25485 - DNA, 25 bp, Canis familiaris
agggtggggacaacatccctgcaat

SEQ ID NO: 25486 - DNA, 25 bp, Canis familiaris
agggtgagggtgtccatctttaagg

SEQ ID NO: 25487 - DNA, 25 bp, Canis familiaris
agggtggggggcacatttgcaagcg

SEQ ID NO: 25488 - DNA, 25 bp, Canis familiaris
aggggttggttcactgctcatgaac

SEQ ID NO: 25489 - DNA, 25 bp, Canis familiaris
aggtttatagtaactcctcatgata

SEQ ID NO: 25490 - DNA, 25 bp, Canis familiaris
aggtcacttggtaactggcttggaa

SEQ ID NO: 25491 - DNA, 25 bp, Canis familiaris
aggtcagttgtgttaaagcctggaa

SEQ ID NO: 25492 - DNA, 25 bp, Canis familiaris
aggtcgtgtgtgtttgtggcaagga

SEQ ID NO: 25493 - DNA, 25 bp, Canis familiaris
aggtccatgtgattgcctgggtagg

SEQ ID NO: 25494 - DNA, 25 bp, Canis familiaris
aggtaagtacaggctgctgctctaa

SEQ ID NO: 25495 - DNA, 25 bp, Canis familiaris
aggtgaagggcagcggtgctatata

SEQ ID NO: 25496 - DNA, 25 bp, Canis familiaris
aggtgcatatcccagcataggttat

SEQ ID NO: 25497 - DNA, 25 bp, Canis familiaris
aggtgctgaaatactgaggtgctag

SEQ ID NO: 25498 - DNA, 25 bp, Canis familiaris
aggtgttctgcatttgaggtgtagt

SEQ ID NO: 25499 - DNA, 25 bp, Canis familiaris
agtgattttgaatggctgcgaagtg

SEQ ID NO: 25500 - DNA, 25 bp, Canis familiaris
aggtctttgatattggtcttttggt

SEQ ID NO: 25501 - DNA, 25 bp, Canis familiaris
aggtttcatacttggatctcttctg

SEQ ID NO: 25502 - DNA, 25 bp, Canis familiaris
aggtgtctgtttgaactctgtctgt

SEQ ID NO: 25503 - DNA, 25 bp, Canis familiaris
agggactgtttcggactattgcgct

SEQ ID NO: 25504 - DNA, 25 bp, Canis familiaris
agggatcatccttccaaaatggcgt

SEQ ID NO: 25505 - DNA, 25 bp, Canis familiaris
aggggcattgcttatctgaaattgt

SEQ ID NO: 25506 - DNA, 25 bp, Canis familiaris
aggtggcatttccattcatctttgg

SEQ ID NO: 25507 - DNA, 25 bp, Canis familiaris
aggtacatgttggcaatcatcctcc

SEQ ID NO: 25508 - DNA, 25 bp, Canis familiaris
aggtacttgtgccactgatactcca

SEQ ID NO: 25509 - DNA, 25 bp, Canis familiaris
aggtcctctgtggagtgcatctcca

SEQ ID NO: 25510 - DNA, 25 bp, Canis familiaris
aggtttgtaggccgcctcacaaaca

SEQ ID NO: 25511 - DNA, 25 bp, Canis familiaris
aggtcgttagtgtggtcgcaaagca

SEQ ID NO: 25512 - DNA, 25 bp, Canis familiaris
aggtgctttaataggggccaatgga

SEQ ID NO: 25513 - DNA, 25 bp, Canis familiaris
aggtttgtaaactcagccatctgta

SEQ ID NO: 25514 - DNA, 25 bp, Canis familiaris
aggtgtgcttaaacttccaatccat

SEQ ID NO: 25515 - DNA, 25 bp, Canis familiaris
aggggctcagaaatggacacaaaat

SEQ ID NO: 25516 - DNA, 25 bp, Canis familiaris
aggggccagactagacacggcagac

SEQ ID NO: 25517 - DNA, 25 bp, Canis familiaris
aggtggccactcagaacgtgaaccc

SEQ ID NO: 25518 - DNA, 25 bp, Canis familiaris
agggagacttgcacggcgtgagccc

SEQ ID NO: 25519 - DNA, 25 bp, Canis familiaris
aggtgaacgtgcgcaggcacttcgc

SEQ ID NO: 25520 - DNA, 25 bp, Canis familiaris
aggtcaacaatcccagagcagcaat

SEQ ID NO: 25521 - DNA, 25 bp, Canis familiaris
aggtgataaatactgagctgccaaa

SEQ ID NO: 25522 - DNA, 25 bp, Canis familiaris
aggtaacacttccgctgctgcggca

SEQ ID NO: 25523 - DNA, 25 bp, Canis familiaris
aggtaaactttgtccatagtcaaca

SEQ ID NO: 25524 - DNA, 25 bp, Canis familiaris
aggtccaatttactttggtcaacat

SEQ ID NO: 25525 - DNA, 25 bp, Canis familiaris
aggtcctatgttttgtgtgagtcta

SEQ ID NO: 25526 - DNA, 25 bp, Canis familiaris
aggtgcctatgttctatgctggccc

SEQ ID NO: 25527 - DNA, 25 bp, Canis familiaris
agtgggcttttaagtgtgcctaaat

SEQ ID NO: 25528 - DNA, 25 bp, Canis familiaris
agggcgtgattctagggtcctggaa

SEQ ID NO: 25529 - DNA, 25 bp, Canis familiaris
agtgtgttgtaccagccgatactgc

SEQ ID NO: 25530 - DNA, 25 bp, Canis familiaris
aggtgctatgtctggcacgtggctg

SEQ ID NO: 25531 - DNA, 25 bp, Canis familiaris
agggctttgcccgagctgtgcggaa

SEQ ID NO: 25532 - DNA, 25 bp, Canis familiaris
aggtgttgtggctgcatgtggtgga

SEQ ID NO: 25533 - DNA, 25 bp, Canis familiaris
aggtgcgtcttctgtggaatggacc

SEQ ID NO: 25534 - DNA, 25 bp, Canis familiaris
aggtgcggctgtctgtggaaggacc

SEQ ID NO: 25535 - DNA, 25 bp, Canis familiaris
aggtgcggctgtctgtggaaggacc

SEQ ID NO: 25536 - DNA, 25 bp, Canis familiaris
aggtgcttggtgtttggtgaggccc

SEQ ID NO: 25537 - DNA, 25 bp, Canis familiaris
aggtgcgtggacattgtgctagggt

SEQ ID NO: 25538 - DNA, 25 bp, Canis familiaris
aggtgcagctgccaaaggtgtcgga

SEQ ID NO: 25539 - DNA, 25 bp, Canis familiaris
agggacatctgaccaggttggatca

SEQ ID NO: 25540 - DNA, 25 bp, Canis familiaris
agggactcggagtaattgcctgcat

SEQ ID NO: 25541 - DNA, 25 bp, Canis familiaris
agggttaggtataatgtcatttatt

SEQ ID NO: 25542 - DNA, 25 bp, Canis familiaris
aggtggaagtgtttagcacattgta

SEQ ID NO: 25543 - DNA, 25 bp, Canis familiaris
agtgtggcaaggctctgtcaactga

SEQ ID NO: 25544 - DNA, 25 bp, Canis familiaris
agtggtgctagggttatacatcgta

SEQ ID NO: 25545 - DNA, 25 bp, Canis familiaris
aggggccagggtaagaatcccagat

SEQ ID NO: 25546 - DNA, 25 bp, Canis familiaris
agggggcaggggagattttcagact

SEQ ID NO: 25547 - DNA, 25 bp, Canis familiaris
caggaggtggggtggtttgtaggat

SEQ ID NO: 25548 - DNA, 25 bp, Canis familiaris
aggggggggcatcagtatagtactc

SEQ ID NO: 25549 - DNA, 25 bp, Canis familiaris
aggtggggggagcacgtagctcttg

SEQ ID NO: 25550 - DNA, 25 bp, Canis familiaris
aggtggcagagccgagggcgtagct

SEQ ID NO: 25551 - DNA, 25 bp, Canis familiaris
agatttggagcgggggctactgctg

SEQ ID NO: 25552 - DNA, 25 bp, Canis familiaris
aggtggtacgctcggtgatatcgct

SEQ ID NO: 25553 - DNA, 25 bp, Canis familiaris
aggtgtgctaactggcatttactag

SEQ ID NO: 25554 - DNA, 25 bp, Canis familiaris
aggtgtaaacgatcattctcacttt

SEQ ID NO: 25555 - DNA, 25 bp, Canis familiaris
aggtgaggaacaaacttcttgcttg

SEQ ID NO: 25556 - DNA, 25 bp, Canis familiaris
agggggcaaattctacctctgtgtt

SEQ ID NO: 25557 - DNA, 25 bp, Canis familiaris
aggggagacagtggttggcccggct

SEQ ID NO: 25558 - DNA, 25 bp, Canis familiaris
agggccagagggctttgcccgagct

SEQ ID NO: 25559 - DNA, 25 bp, Canis familiaris
aggggcagtttggattttcacggca

SEQ ID NO: 25560 - DNA, 25 bp, Canis familiaris
aggggatgtttctaattctcttcgc

SEQ ID NO: 25561 - DNA, 25 bp, Canis familiaris
aggtagtatttctaagtgcgctccc

SEQ ID NO: 25562 - DNA, 25 bp, Canis familiaris
aggtagtgctgtgcacaggggtccc

SEQ ID NO: 25563 - DNA, 25 bp, Canis familiaris
aggtagctgccctagaggggctcca

SEQ ID NO: 25564 - DNA, 25 bp, Canis familiaris
aggggtgcaggcatggggatgctcc

SEQ ID NO: 25565 - DNA, 25 bp, Canis familiaris
agggtatgggctttgggcagtcatc

SEQ ID NO: 25566 - DNA, 25 bp, Canis familiaris
agggaagaggtctgtgggtcactgg

SEQ ID NO: 25567 - DNA, 25 bp, Canis familiaris
agggtaggcgtgcgtggaaactcgg

SEQ ID NO: 25568 - DNA, 25 bp, Canis familiaris
agggatccacttggagggcaaagtc

SEQ ID NO: 25569 - DNA, 25 bp, Canis familiaris
agggacgacttgtaggtgaccagct

SEQ ID NO: 25570 - DNA, 25 bp, Canis familiaris
agggaaatcactgtgggacgcctgg

SEQ ID NO: 25571 - DNA, 25 bp, Canis familiaris
agggacaacgtctggaatctgggga

SEQ ID NO: 25572 - DNA, 25 bp, Canis familiaris
agtgcggaagcctgaggaccgggtg

SEQ ID NO: 25573 - DNA, 25 bp, Canis familiaris
agtgccgaaggacaggcaccttgca

SEQ ID NO: 25574 - DNA, 25 bp, Canis familiaris
agtcccaaggatcaagtcccaaaat

SEQ ID NO: 25575 - DNA, 25 bp, Canis familiaris
agtgcccaagagacgggtgggctaa

SEQ ID NO: 25576 - DNA, 25 bp, Canis familiaris
aggtgccaacagcgagtgtggccat

SEQ ID NO: 25577 - DNA, 25 bp, Canis familiaris
agcgtccaactcttggtttctattc

SEQ ID NO: 25578 - DNA, 25 bp, Canis familiaris
aggtcacacatttttcttttgtatc

SEQ ID NO: 25579 - DNA, 25 bp, Canis familiaris
aggtactttgtattatatttgacta

SEQ ID NO: 25580 - DNA, 25 bp, Canis familiaris
aggggctgatattttaagttgacta

SEQ ID NO: 25581 - DNA, 25 bp, Canis familiaris
aggtggcaacatttaaaggctggat

SEQ ID NO: 25582 - DNA, 25 bp, Canis familiaris
aggtgtgtacaaaaaagcggctggt

SEQ ID NO: 25583 - DNA, 25 bp, Canis familiaris
agggtggaccagaaaagcaggcgtg

SEQ ID NO: 25584 - DNA, 25 bp, Canis familiaris
aggggaacacagcatcacaaggtgc

SEQ ID NO: 25585 - DNA, 25 bp, Canis familiaris
agggccacaaggtatccaaagtctt

SEQ ID NO: 25586 - DNA, 25 bp, Canis familiaris
aggggacagatgctgttcgaacatt

SEQ ID NO: 25587 - DNA, 25 bp, Canis familiaris
aggtgcagacgctgctggtcaggac

SEQ ID NO: 25588 - DNA, 25 bp, Canis familiaris
agggcgtgcagcagctctgctgagt

SEQ ID NO: 25589 - DNA, 25 bp, Canis familiaris
aggtgcatcgccagcatttcgatcc

SEQ ID NO: 25590 - DNA, 25 bp, Canis familiaris
aggtcatccatgacaccttcgacct

SEQ ID NO: 25591 - DNA, 25 bp, Canis familiaris
aggtcatccatgacaactttggcat

SEQ ID NO: 25592 - DNA, 25 bp, Canis familiaris
aggtcatccatgacaactttggtat

SEQ ID NO: 25593 - DNA, 25 bp, Canis familiaris
aggtgcccttatgttgtgctgtatc

SEQ ID NO: 25594 - DNA, 25 bp, Canis familiaris
aggtgagccttagcattgtcctgac

SEQ ID NO: 25595 - DNA, 25 bp, Canis familiaris
aggtgacacttagggttgtcctcac

SEQ ID NO: 25596 - DNA, 25 bp, Canis familiaris
agggaatattgagggtaggccacca

SEQ ID NO: 25597 - DNA, 25 bp, Canis familiaris
aggtgacagtatttgggggccagct

SEQ ID NO: 25598 - DNA, 25 bp, Canis familiaris
agggacctagtttgaaggccattag

SEQ ID NO: 25599 - DNA, 25 bp, Canis familiaris
aggtgccctacttggatagtgcctt

SEQ ID NO: 25600 - DNA, 25 bp, Canis familiaris
aggtgcccattttgcaatttcctaa

SEQ ID NO: 25601 - DNA, 25 bp, Canis familiaris
aggtgcccatggagcgcgtgtttga

SEQ ID NO: 25602 - DNA, 25 bp, Canis familiaris
agggcattatagactgcgtggttcg

SEQ ID NO: 25603 - DNA, 25 bp, Canis familiaris
agcggtctaaatacgatgaatactg

SEQ ID NO: 25604 - DNA, 25 bp, Canis familiaris
agggtcctactttggagcaactggc

SEQ ID NO: 25605 - DNA, 25 bp, Canis familiaris
agggctttcacaactaggccctggc

SEQ ID NO: 25606 - DNA, 25 bp, Canis familiaris
agggatctgaccaggagggacccgg

SEQ ID NO: 25607 - DNA, 25 bp, Canis familiaris
agggcctgcctcatgtgaaggagct

SEQ ID NO: 25608 - DNA, 25 bp, Canis familiaris
agggcctggagcatgtgaagacgct

SEQ ID NO: 25609 - DNA, 25 bp, Canis familiaris
agggccggataattttgacgcctat

SEQ ID NO: 25610 - DNA, 25 bp, Canis familiaris
aggtccgtactattttgattcgtcg

SEQ ID NO: 25611 - DNA, 25 bp, Canis familiaris
aggtcggtatctaacacatgcattc

SEQ ID NO: 25612 - DNA, 25 bp, Canis familiaris
aggtctgattataaaatacttccca

SEQ ID NO: 25613 - DNA, 25 bp, Canis familiaris
aggtgctatttacctacactgtccc

SEQ ID NO: 25614 - DNA, 25 bp, Canis familiaris
aggtctcatcaaattgtattctgtt

SEQ ID NO: 25615 - DNA, 25 bp, Canis familiaris
aggtcactctctatctatttgtaga

SEQ ID NO: 25616 - DNA, 25 bp, Canis familiaris
aggtgttcactaaatatttgctaag

SEQ ID NO: 25617 - DNA, 25 bp, Canis familiaris
aggtgtctcctaatattgttccctg

SEQ ID NO: 25618 - DNA, 25 bp, Canis familiaris
aggtgtctgatcgattatctctcca

SEQ ID NO: 25619 - DNA, 25 bp, Canis familiaris
aggtgtctacattgcattgttcaga

SEQ ID NO: 25620 - DNA, 25 bp, Canis familiaris
aggtgatctccatctacaacagcac

SEQ ID NO: 25621 - DNA, 25 bp, Canis familiaris
aggtgatcctcaccaatactagagg

SEQ ID NO: 25622 - DNA, 25 bp, Canis familiaris
agtgctatttcaccaacgggacgga

SEQ ID NO: 25623 - DNA, 25 bp, Canis familiaris
aggtctttgctataccggaagtgtt

SEQ ID NO: 25624 - DNA, 25 bp, Canis familiaris
agggttgtccatgtccggaaagcct

SEQ ID NO: 25625 - DNA, 25 bp, Canis familiaris
agggtgttccttatcttaaagatct

SEQ ID NO: 25626 - DNA, 25 bp, Canis familiaris
aggggtgtatttctttctgtatttg

SEQ ID NO: 25627 - DNA, 25 bp, Canis familiaris
agggttctatttctagttgcttact

SEQ ID NO: 25628 - DNA, 25 bp, Canis familiaris
agggcccactttcagcaatggttaa

SEQ ID NO: 25629 - DNA, 25 bp, Canis familiaris
aggggcctcttcataggataccata

SEQ ID NO: 25630 - DNA, 25 bp, Canis familiaris
aggggttgggattccgatgacctca

SEQ ID NO: 25631 - DNA, 25 bp, Canis familiaris
aggtgaccgggacccgagcatttca

SEQ ID NO: 25632 - DNA, 25 bp, Canis familiaris
aggtgaccagtgaacgggactgttc

SEQ ID NO: 25633 - DNA, 25 bp, Canis familiaris
aggtgaacaggattattgagggccc

SEQ ID NO: 25634 - DNA, 25 bp, Canis familiaris
aggtgctaagggttgtgggcgccca

SEQ ID NO: 25635 - DNA, 25 bp, Canis familiaris
aggtgtgaaagccactgctaggggc

SEQ ID NO: 25636 - DNA, 25 bp, Canis familiaris
aggtgccaaggccaagccggaggcc

SEQ ID NO: 25637 - DNA, 25 bp, Canis familiaris
agggcccaaagaggccggcacagtc

SEQ ID NO: 25638 - DNA, 25 bp, Canis familiaris
agggtccaggagaccctgggcgtct

SEQ ID NO: 25639 - DNA, 25 bp, Canis familiaris
agggaccacaggagccgaggtctgc

SEQ ID NO: 25640 - DNA, 25 bp, Canis familiaris
agggacccagattcggcgatggttt

SEQ ID NO: 25641 - DNA, 25 bp, Canis familiaris
aggggccgagccaagaggtgagggt

SEQ ID NO: 25642 - DNA, 25 bp, Canis familiaris
agggaagcgaggagaggccgcgacc

SEQ ID NO: 25643 - DNA, 25 bp, Canis familiaris
aggggcaggaagacctggccctatc

SEQ ID NO: 25644 - DNA, 25 bp, Canis familiaris
aggggagcaaagacagtggccacga

SEQ ID NO: 25645 - DNA, 25 bp, Canis familiaris
aggggagcagaactggcgaagccat

SEQ ID NO: 25646 - DNA, 25 bp, Canis familiaris
aggtgtatgagaagatgccccgcct

SEQ ID NO: 25647 - DNA, 25 bp, Canis familiaris
aggtgctgatgttggacgagcccac

SEQ ID NO: 25648 - DNA, 25 bp, Canis familiaris
aggtcatgctgttggagagtccgct

SEQ ID NO: 25649 - DNA, 25 bp, Canis familiaris
aggtgactgcttctggtcacactgt

SEQ ID NO: 25650 - DNA, 25 bp, Canis familiaris
aggtgatcctcatgcttgctaaagt

SEQ ID NO: 25651 - DNA, 25 bp, Canis familiaris
aggtgacctcaagtgtaacacacac

SEQ ID NO: 25652 - DNA, 25 bp, Canis familiaris
aggtgaaatcacttgtccatgccaa

SEQ ID NO: 25653 - DNA, 25 bp, Canis familiaris
agggagacagccttgttctgggagg

SEQ ID NO: 25654 - DNA, 25 bp, Canis familiaris
agggaacacagtggcttcctggagc

SEQ ID NO: 25655 - DNA, 25 bp, Canis familiaris
aggtgttcacagggcctttggagca

SEQ ID NO: 25656 - DNA, 25 bp, Canis familiaris
agggttggagggcttctcagacact

SEQ ID NO: 25657 - DNA, 25 bp, Canis familiaris
agggttggggagattctgggtgctg

SEQ ID NO: 25658 - DNA, 25 bp, Canis familiaris
aggggtgggtggacccacactgtct

SEQ ID NO: 25659 - DNA, 25 bp, Canis familiaris
agggaatgagcgcagagcgcccacg

SEQ ID NO: 25660 - DNA, 25 bp, Canis familiaris
agggcagtgggcagagtggccagcg

SEQ ID NO: 25661 - DNA, 25 bp, Canis familiaris
agtagggaatctcaggccaagcctg

SEQ ID NO: 25662 - DNA, 25 bp, Canis familiaris
aggtgggattctgtccaaagcctgt

SEQ ID NO: 25663 - DNA, 25 bp, Canis familiaris
aggtgaaatcctatctaaagaattg

SEQ ID NO: 25664 - DNA, 25 bp, Canis familiaris
agggaaatcctcgtcaaatagttga

SEQ ID NO: 25665 - DNA, 25 bp, Canis familiaris
aggtgacaccatcctccaagattgt

SEQ ID NO: 25666 - DNA, 25 bp, Canis familiaris
aggtgacaccatcctccaagattgt

SEQ ID NO: 25667 - DNA, 25 bp, Canis familiaris
aggtgaaggtgcttcccagattgct

SEQ ID NO: 25668 - DNA, 25 bp, Canis familiaris
aggtccagagtaggcacgagcttct

SEQ ID NO: 25669 - DNA, 25 bp, Canis familiaris
aggtgacaagaagcaggcgtaccgg

SEQ ID NO: 25670 - DNA, 25 bp, Canis familiaris
aggtgcaacaggaccagcaggaccc

SEQ ID NO: 25671 - DNA, 25 bp, Canis familiaris
aggtgagacagcagtagaggccccg

SEQ ID NO: 25672 - DNA, 25 bp, Canis familiaris
aggtgacggccttagatctctcgcc

SEQ ID NO: 25673 - DNA, 25 bp, Canis familiaris
aggtgcaaacacaatagagcttgaa

SEQ ID NO: 25674 - DNA, 25 bp, Canis familiaris
aggtctgaaacttgcagccgtgctg

SEQ ID NO: 25675 - DNA, 25 bp, Canis familiaris
aggtgaggaacttggccggacgtag

SEQ ID NO: 25676 - DNA, 25 bp, Canis familiaris
aggtccgattctaggcctgtgaagt

SEQ ID NO: 25677 - DNA, 25 bp, Canis familiaris
agtgaacttgtcagccaattaagtc

SEQ ID NO: 25678 - DNA, 25 bp, Canis familiaris
agtcataccccagccagtagaggcc

SEQ ID NO: 25679 - DNA, 25 bp, Canis familiaris
agtctcgcccaggtgggttggagcc

SEQ ID NO: 25680 - DNA, 25 bp, Canis familiaris
aggtcttccacgagatcctggagac

SEQ ID NO: 25681 - DNA, 25 bp, Canis familiaris
agggcatgatcccagggtcctggga

SEQ ID NO: 25682 - DNA, 25 bp, Canis familiaris
agggcatgatcccagggtcctggga

SEQ ID NO: 25683 - DNA, 25 bp, Canis familiaris
agggcagtttagaggctctatggcc

SEQ ID NO: 25684 - DNA, 25 bp, Canis familiaris
aggggtagtaattggcctgctcagc

SEQ ID NO: 25685 - DNA, 25 bp, Canis familiaris
aggtgttggtagaattcgctgctcc

SEQ ID NO: 25686 - DNA, 25 bp, Canis familiaris
aggtgtctgattcatttatctctcc

SEQ ID NO: 25687 - DNA, 25 bp, Canis familiaris
agtctttgttggttctgattcccgg

SEQ ID NO: 25688 - DNA, 25 bp, Canis familiaris
agtgccaaggaggacttttccctgg

SEQ ID NO: 25689 - DNA, 25 bp, Canis familiaris
agtggcaactgaggtgcctttccgc

SEQ ID NO: 25690 - DNA, 25 bp, Canis familiaris
agtgatggcactgtggcttttcctg

SEQ ID NO: 25691 - DNA, 25 bp, Canis familiaris
aggtgaagctctggccttgagatgc

SEQ ID NO: 25692 - DNA, 25 bp, Canis familiaris
aggggccatgcaggagcttgaagca

SEQ ID NO: 25693 - DNA, 25 bp, Canis familiaris
aggtgctgctcatcgagaatgtggc

SEQ ID NO: 25694 - DNA, 25 bp, Canis familiaris
aggtgcagtcaccgaaagagagcgc

SEQ ID NO: 25695 - DNA, 25 bp, Canis familiaris
aggtggtcactgtacagctgcagac

SEQ ID NO: 25696 - DNA, 25 bp, Canis familiaris
aggtgttcacggagctgcaggagaa

SEQ ID NO: 25697 - DNA, 25 bp, Canis familiaris
aggtgaggagcgaaggtcaggaggt

SEQ ID NO: 25698 - DNA, 25 bp, Canis familiaris
aggggtgacccagcacaggaagtgt

SEQ ID NO: 25699 - DNA, 25 bp, Canis familiaris
agggcgaagggagagcaggatttgc

SEQ ID NO: 25700 - DNA, 25 bp, Canis familiaris
aggtctaaggttgcgcagtatgttc

SEQ ID NO: 25701 - DNA, 25 bp, Canis familiaris
aggtgctaatggttgctccagttct

SEQ ID NO: 25702 - DNA, 25 bp, Canis familiaris
aggtgctaatgtttggccagtggct

SEQ ID NO: 25703 - DNA, 25 bp, Canis familiaris
agggcacgcagttatgcccgtgggc

SEQ ID NO: 25704 - DNA, 25 bp, Canis familiaris
agtggaacctaatctgggctggcca

SEQ ID NO: 25705 - DNA, 25 bp, Canis familiaris
agggtacacttagttggcgtgctcc

SEQ ID NO: 25706 - DNA, 25 bp, Canis familiaris
aggggagccttagatggagccttct

SEQ ID NO: 25707 - DNA, 25 bp, Canis familiaris
agggacacctttgtgaatgcctctc

SEQ ID NO: 25708 - DNA, 25 bp, Canis familiaris
agggaccaatttgatcctgcatcct

SEQ ID NO: 25709 - DNA, 25 bp, Canis familiaris
aggggccagtattaatcctgagcat

SEQ ID NO: 25710 - DNA, 25 bp, Canis familiaris
agggcacaataatttcacctgcagt

SEQ ID NO: 25711 - DNA, 25 bp, Canis familiaris
agtgtcagatattgctttactgctg

SEQ ID NO: 25712 - DNA, 25 bp, Canis familiaris
aggtgccattggctgtgagctgctc

SEQ ID NO: 25713 - DNA, 25 bp, Canis familiaris
agggatctcaggctggacatgctct

SEQ ID NO: 25714 - DNA, 25 bp, Canis familiaris
agcggaagtggctggtcagctcatt

SEQ ID NO: 25715 - DNA, 25 bp, Canis familiaris
agtctacgtggaaggtcctctcgat

SEQ ID NO: 25716 - DNA, 25 bp, Canis familiaris
agtgtagcgtggtaggacccatcct

SEQ ID NO: 25717 - DNA, 25 bp, Canis familiaris
aggtggggagattggcccaccctgc

SEQ ID NO: 25718 - DNA, 25 bp, Canis familiaris
aggtggggagattggcccaccctgc

SEQ ID NO: 25719 - DNA, 25 bp, Canis familiaris
aggtgtgggagatctgcaccagccc

SEQ ID NO: 25720 - DNA, 25 bp, Canis familiaris
aggtgaagggcaacagcaccatcct

SEQ ID NO: 25721 - DNA, 25 bp, Canis familiaris
agggggaggatcaagctcctccttc

SEQ ID NO: 25722 - DNA, 25 bp, Canis familiaris
aggtggagatggactacccaacaat

SEQ ID NO: 25723 - DNA, 25 bp, Canis familiaris
agttggaaggcagccactcgcaaca

SEQ ID NO: 25724 - DNA, 25 bp, Canis familiaris
aggtggaaccttcagccagagagct

SEQ ID NO: 25725 - DNA, 25 bp, Canis familiaris
aggggaagcgtaaatgctccacctc

SEQ ID NO: 25726 - DNA, 25 bp, Canis familiaris
aggtgatgggcagtgccaactccac

SEQ ID NO: 25727 - DNA, 25 bp, Canis familiaris
aggtgggtggctggatacatgacag

SEQ ID NO: 25728 - DNA, 25 bp, Canis familiaris
aggggagagagcagctcacgccagt

SEQ ID NO: 25729 - DNA, 25 bp, Canis familiaris
agcggaggaagcacgtcctcggttt

SEQ ID NO: 25730 - DNA, 25 bp, Canis familiaris
agggggctgaataccagcttcggtg

SEQ ID NO: 25731 - DNA, 25 bp, Canis familiaris
agggggcgcaagatgactgtcaacg

SEQ ID NO: 25732 - DNA, 25 bp, Canis familiaris
aggtggtctcctctgacttcaacag

SEQ ID NO: 25733 - DNA, 25 bp, Canis familiaris
aggtgagttcttcatgtctccagat

SEQ ID NO: 25734 - DNA, 25 bp, Canis familiaris
aggtgagtccttttgtatcaatttt

SEQ ID NO: 25735 - DNA, 25 bp, Canis familiaris
aggtgacacctatagaacaagtttg

SEQ ID NO: 25736 - DNA, 25 bp, Canis familiaris
agggacccttgataggctacgtgtc

SEQ ID NO: 25737 - DNA, 25 bp, Canis familiaris
agggagccatctggtcaacgttttt

SEQ ID NO: 25738 - DNA, 25 bp, Canis familiaris
aggggcgatatcctctgacgtatca

SEQ ID NO: 25739 - DNA, 25 bp, Canis familiaris
agggctacatacctgctgaggtacc

SEQ ID NO: 25740 - DNA, 25 bp, Canis familiaris
aggtgtacattgctcagtggttccc

SEQ ID NO: 25741 - DNA, 25 bp, Canis familiaris
agtgttactacaaaggggctctctc

SEQ ID NO: 25742 - DNA, 25 bp, Canis familiaris
agtgttcgctgacgttagggcacct

SEQ ID NO: 25743 - DNA, 25 bp, Canis familiaris
aggtgtccaaggacaagcgcgccct

SEQ ID NO: 25744 - DNA, 25 bp, Canis familiaris
aggggcgtcgcgacaacagagcccc

SEQ ID NO: 25745 - DNA, 25 bp, Canis familiaris
aggggcagcccgataaaggccctct

SEQ ID NO: 25746 - DNA, 25 bp, Canis familiaris
agggacaccacgatagaagacttct

SEQ ID NO: 25747 - DNA, 25 bp, Canis familiaris
agggtaccacgaggagagaactgag

SEQ ID NO: 25748 - DNA, 25 bp, Canis familiaris
aggtgtgacccatgagaagcaacga

SEQ ID NO: 25749 - DNA, 25 bp, Canis familiaris
aggtggcccagctcaaacagaaggt

SEQ ID NO: 25750 - DNA, 25 bp, Canis familiaris
agggcgacctgtacaactgggaggt

SEQ ID NO: 25751 - DNA, 25 bp, Canis familiaris
aggtgccacgtgactaacctggtgg

SEQ ID NO: 25752 - DNA, 25 bp, Canis familiaris
aggtgctcacggcatgaacgcatgg

SEQ ID NO: 25753 - DNA, 25 bp, Canis familiaris
aggtgcacatcgcgacaatcgacat

SEQ ID NO: 25754 - DNA, 25 bp, Canis familiaris
aggtgcaatctaacaaaccacattt

SEQ ID NO: 25755 - DNA, 25 bp, Canis familiaris
aggtgatattaacacactgcagata

SEQ ID NO: 25756 - DNA, 25 bp, Canis familiaris
agggatattaccaactgagattgat

SEQ ID NO: 25757 - DNA, 25 bp, Canis familiaris
aggtgctactaaatgaatgaactgt

SEQ ID NO: 25758 - DNA, 25 bp, Canis familiaris
agagcgtactaaatgggcaccggga

SEQ ID NO: 25759 - DNA, 25 bp, Canis familiaris
agggtgactggaaggtacccaagat

SEQ ID NO: 25760 - DNA, 25 bp, Canis familiaris
agtgttgtctggtggtaccaccatg

SEQ ID NO: 25761 - DNA, 25 bp, Canis familiaris
agagctggttaatgagtaacaaatg

SEQ ID NO: 25762 - DNA, 25 bp, Canis familiaris
agggaattgaaattgtgaacacttg

SEQ ID NO: 25763 - DNA, 25 bp, Canis familiaris
agggatttgttagttgccatagtcg

SEQ ID NO: 25764 - DNA, 25 bp, Canis familiaris
agggatgtgtggtgtatctgggtcg

SEQ ID NO: 25765 - DNA, 25 bp, Canis familiaris
agggatgtagctcagcttctgggct

SEQ ID NO: 25766 - DNA, 25 bp, Canis familiaris
aggtgcaggagcaccttcgcagctt

SEQ ID NO: 25767 - DNA, 25 bp, Canis familiaris
aggtgctggagcagcaggggcagca

SEQ ID NO: 25768 - DNA, 25 bp, Canis familiaris
agggcagtgccaggcaacgggcacc

SEQ ID NO: 25769 - DNA, 25 bp, Canis familiaris
agggcggctcatgaaagtgcagtat

SEQ ID NO: 25770 - DNA, 25 bp, Canis familiaris
aggggactcagcatcacaggtgctg

SEQ ID NO: 25771 - DNA, 25 bp, Canis familiaris
agggtcacgcagttcacgttggaaa

SEQ ID NO: 25772 - DNA, 25 bp, Canis familiaris
agggtcacaagatcaagtctggagg

SEQ ID NO: 25773 - DNA, 25 bp, Canis familiaris
aggtgctagaagtaagagttggtgt

SEQ ID NO: 25774 - DNA, 25 bp, Canis familiaris
agggctaaaaaaatgatcttttgat

SEQ ID NO: 25775 - DNA, 25 bp, Canis familiaris
aggtgctgaataaatatttgttgaa

SEQ ID NO: 25776 - DNA, 25 bp, Canis familiaris
aggtgtgtaagaatgttgtgttaag

SEQ ID NO: 25777 - DNA, 25 bp, Canis familiaris
aggtgtgcctagttttgtgttgtga

SEQ ID NO: 25778 - DNA, 25 bp, Canis familiaris
aggggccggcactttgtgattgccg

SEQ ID NO: 25779 - DNA, 25 bp, Canis familiaris
aggggaaccacagtagtcactggcc

SEQ ID NO: 25780 - DNA, 25 bp, Canis familiaris
aggggaaccacagtgtatgtcaact

SEQ ID NO: 25781 - DNA, 25 bp, Canis familiaris
agtgggggaccatgttgctgaacca

SEQ ID NO: 25782 - DNA, 25 bp, Canis familiaris
agtggggtgcccagaatgtggcccc

SEQ ID NO: 25783 - DNA, 25 bp, Canis familiaris
agtgccgggccctgaaagagcggcg

SEQ ID NO: 25784 - DNA, 25 bp, Canis familiaris
agtattgggaccggcagacgcggac

SEQ ID NO: 25785 - DNA, 25 bp, Canis familiaris
agggtgtggacgtcggagtcggaca

SEQ ID NO: 25786 - DNA, 25 bp, Canis familiaris
agtggttcgaaggggagctcttgga

SEQ ID NO: 25787 - DNA, 25 bp, Canis familiaris
agggtttgataggtcgtccctgcta

SEQ ID NO: 25788 - DNA, 25 bp, Canis familiaris
agggacttaatggccagtataacta

SEQ ID NO: 25789 - DNA, 25 bp, Canis familiaris
aggggcaaaacccagttcaccatag

SEQ ID NO: 25790 - DNA, 25 bp, Canis familiaris
aggggccagatgacgtgtttcccaa

SEQ ID NO: 25791 - DNA, 25 bp, Canis familiaris
agggctgaagagagaatttcactaa

SEQ ID NO: 25792 - DNA, 25 bp, Canis familiaris
agaggtgggaaagctgtacttcaga

SEQ ID NO: 25793 - DNA, 25 bp, Canis familiaris
agggcctggaagtcactttgttcag

SEQ ID NO: 25794 - DNA, 25 bp, Canis familiaris
aggtgcccttaggacagttgtccag

SEQ ID NO: 25795 - DNA, 25 bp, Canis familiaris
agttaactgtacagaacatttcagg

SEQ ID NO: 25796 - DNA, 25 bp, Canis familiaris
aggtgaagctgtctccaacacttca

SEQ ID NO: 25797 - DNA, 25 bp, Canis familiaris
agggggcatgggtcccaatgttcgt

SEQ ID NO: 25798 - DNA, 25 bp, Canis familiaris
agggtggcatgggcacccagtgttg

SEQ ID NO: 25799 - DNA, 25 bp, Canis familiaris
aggtgctggctagtgacagccgctt

SEQ ID NO: 25800 - DNA, 25 bp, Canis familiaris
aggtgggatctgggaggagctttca

SEQ ID NO: 25801 - DNA, 25 bp, Canis familiaris
aggtgtttctggtgagaggttaact

SEQ ID NO: 25802 - DNA, 25 bp, Canis familiaris
agtgttttctgtggtgaggccttca

SEQ ID NO: 25803 - DNA, 25 bp, Canis familiaris
agtgtggtggttgtagagcttctcg

SEQ ID NO: 25804 - DNA, 25 bp, Canis familiaris
agtggaggcgttcaaggcttgtcga

SEQ ID NO: 25805 - DNA, 25 bp, Canis familiaris
agggaggcttttgaagcttccagaa

SEQ ID NO: 25806 - DNA, 25 bp, Canis familiaris
aggggaggcgttgaagcttccagaa

SEQ ID NO: 25807 - DNA, 25 bp, Canis familiaris
aggggtggcggatacagttctggaa

SEQ ID NO: 25808 - DNA, 25 bp, Canis familiaris
aggtggtggtggcaacaactcggat

SEQ ID NO: 25809 - DNA, 25 bp, Canis familiaris
aggggtgagtggcccaatcagttgg

SEQ ID NO: 25810 - DNA, 25 bp, Canis familiaris
agggttaggctggagcccagttggc

SEQ ID NO: 25811 - DNA, 25 bp, Canis familiaris
agggattatgagcgccctctttgtg

SEQ ID NO: 25812 - DNA, 25 bp, Canis familiaris
agggactattcatgcccttgttcat

SEQ ID NO: 25813 - DNA, 25 bp, Canis familiaris
aggtgagtttattctcttctgtgtc

SEQ ID NO: 25814 - DNA, 25 bp, Canis familiaris
aggtgtttgatttattctctttgct

SEQ ID NO: 25815 - DNA, 25 bp, Canis familiaris
caggtgtaattaaagtccttagtca

SEQ ID NO: 25816 - DNA, 25 bp, Canis familiaris
aggtgtaattaaagtccttagtcag

SEQ ID NO: 25817 - DNA, 25 bp, Canis familiaris
agggcaagtaacattcctgttttgc

SEQ ID NO: 25818 - DNA, 25 bp, Canis familiaris
agggcaggtaactccagttcagttc

SEQ ID NO: 25819 - DNA, 25 bp, Canis familiaris
agggggaagcttcccaagtcagtct

SEQ ID NO: 25820 - DNA, 25 bp, Canis familiaris
aggggaaatgtctcccagatctctc

SEQ ID NO: 25821 - DNA, 25 bp, Canis familiaris
agtggtaattcccacactggactcc

SEQ ID NO: 25822 - DNA, 25 bp, Canis familiaris
aggggagtgtcccaaggatgccatc

SEQ ID NO: 25823 - DNA, 25 bp, Canis familiaris
aggtggactgcccgagagggatctc

SEQ ID NO: 25824 - DNA, 25 bp, Canis familiaris
aggggtctgactgaaggtatctatc

SEQ ID NO: 25825 - DNA, 25 bp, Canis familiaris
aggggcggagcccagggatatttct

SEQ ID NO: 25826 - DNA, 25 bp, Canis familiaris
agggcgatcaaccaagggtcgttct

SEQ ID NO: 25827 - DNA, 25 bp, Canis familiaris
aggggacatgataaagtggtcttta

SEQ ID NO: 25828 - DNA, 25 bp, Canis familiaris
agggacactaaaggacagtttgaca

SEQ ID NO: 25829 - DNA, 25 bp, Canis familiaris
agtggaattgaatcccgttcgagta

SEQ ID NO: 25830 - DNA, 25 bp, Canis familiaris
agtgggttgagttttcctgtccagt

SEQ ID NO: 25831 - DNA, 25 bp, Canis familiaris
aggggcttcagtctattgatttact

SEQ ID NO: 25832 - DNA, 25 bp, Canis familiaris
aggtgttcctgtgttgttcattact

SEQ ID NO: 25833 - DNA, 25 bp, Canis familiaris
agggtccctgtgtttgaacagtcaa

SEQ ID NO: 25834 - DNA, 25 bp, Canis familiaris
aggggccctgggagaggcactaatt

SEQ ID NO: 25835 - DNA, 25 bp, Canis familiaris
aggggcccgaggaggccacaagaag

SEQ ID NO: 25836 - DNA, 25 bp, Canis familiaris
agggcccctgggagagctgaagggg

SEQ ID NO: 25837 - DNA, 25 bp, Canis familiaris
agggcccctgtggtacagtgaaggc

SEQ ID NO: 25838 - DNA, 25 bp, Canis familiaris
agggcccaggtgatacgtgtcggct

SEQ ID NO: 25839 - DNA, 25 bp, Canis familiaris
agggcacacatgcatgaaccctgtc

SEQ ID NO: 25840 - DNA, 25 bp, Canis familiaris
agggacacaaaggaccaggtctgga

SEQ ID NO: 25841 - DNA, 25 bp, Canis familiaris
agggagcaagaagagcagcggcgtt

SEQ ID NO: 25842 - DNA, 25 bp, Canis familiaris
agggtgagggagtagcaggctcggc

SEQ ID NO: 25843 - DNA, 25 bp, Canis familiaris
agggtgaaggtgtgtgctctaggct

SEQ ID NO: 25844 - DNA, 25 bp, Canis familiaris
aggggaatcggctgagtgcttgtct

SEQ ID NO: 25845 - DNA, 25 bp, Canis familiaris
agggagaatcggggcatttgcagga

SEQ ID NO: 25846 - DNA, 25 bp, Canis familiaris
aggggaagcaggatgcgtggctgag

SEQ ID NO: 25847 - DNA, 25 bp, Canis familiaris
agggctgaaagcacaggtggcatat

SEQ ID NO: 25848 - DNA, 25 bp, Canis familiaris
agggccaagtcagcagtagtctgca

SEQ ID NO: 25849 - DNA, 25 bp, Canis familiaris
agtgagcagcaagagtagtagtaat

SEQ ID NO: 25850 - DNA, 25 bp, Canis familiaris
agcactgcagcaatataatatcggt

SEQ ID NO: 25851 - DNA, 25 bp, Canis familiaris
agggcagcacatatataaggtggct

SEQ ID NO: 25852 - DNA, 25 bp, Canis familiaris
agggcagcagatacccagggggagg

SEQ ID NO: 25853 - DNA, 25 bp, Canis familiaris
agggcagcatggagttgggggtgat

SEQ ID NO: 25854 - DNA, 25 bp, Canis familiaris
agggagctgaagctgtcgggaggcc

SEQ ID NO: 25855 - DNA, 25 bp, Canis familiaris
agggaccatagtgtctgtgtagacc

SEQ ID NO: 25856 - DNA, 25 bp, Canis familiaris
agggggctgcagttttgtggagctc

SEQ ID NO: 25857 - DNA, 25 bp, Canis familiaris
aggtgtggatgctctctatttagcg

SEQ ID NO: 25858 - DNA, 25 bp, Canis familiaris
aggtgtggatgctctctatttagcg

SEQ ID NO: 25859 - DNA, 25 bp, Canis familiaris
aggtgtggctctgcttctagaagca

SEQ ID NO: 25860 - DNA, 25 bp, Canis familiaris
aggtgggctcacagtctattgagca

SEQ ID NO: 25861 - DNA, 25 bp, Canis familiaris
aggtgggatatcatggcttccatct

SEQ ID NO: 25862 - DNA, 25 bp, Canis familiaris
aggtgaggcagtgtcctctgccttg

SEQ ID NO: 25863 - DNA, 25 bp, Canis familiaris
agggatggtgaaacctctgctcttt

SEQ ID NO: 25864 - DNA, 25 bp, Canis familiaris
agggagaggaatcctgctgccctga

SEQ ID NO: 25865 - DNA, 25 bp, Canis familiaris
agggcagtgacattgcctgttttgc

SEQ ID NO: 25866 - DNA, 25 bp, Canis familiaris
aggtgagattgccatccgtgtgttc

SEQ ID NO: 25867 - DNA, 25 bp, Canis familiaris
agggcacaatgcttcggtgtgtcgc

SEQ ID NO: 25868 - DNA, 25 bp, Canis familiaris
aggtggcaatgctggatggttccca

SEQ ID NO: 25869 - DNA, 25 bp, Canis familiaris
aggtgtaggctgggctgagttccct

SEQ ID NO: 25870 - DNA, 25 bp, Canis familiaris
aggtgtagatccggtgggtgacgtc

SEQ ID NO: 25871 - DNA, 25 bp, Canis familiaris
agtggaaatcctgacggcatacgcc

SEQ ID NO: 25872 - DNA, 25 bp, Canis familiaris
agtggtaacaccaaggctttcctct

SEQ ID NO: 25873 - DNA, 25 bp, Canis familiaris
aggggaacgccagtggcgtgtccct

SEQ ID NO: 25874 - DNA, 25 bp, Canis familiaris
aggggacctggcaggtgtggcacct

SEQ ID NO: 25875 - DNA, 25 bp, Canis familiaris
agggccagtctggcaggaggttccc

SEQ ID NO: 25876 - DNA, 25 bp, Canis familiaris
agggctgcagtcatctgaaggctta

SEQ ID NO: 25877 - DNA, 25 bp, Canis familiaris
aggtgtgcttcacctatgacctgtt

SEQ ID NO: 25878 - DNA, 25 bp, Canis familiaris
aggtggctcctttgatgaccatgta

SEQ ID NO: 25879 - DNA, 25 bp, Canis familiaris
aggtggccagcttctgaggctaggt

SEQ ID NO: 25880 - DNA, 25 bp, Canis familiaris
aggtggtccagatcaggtaggcgtg

SEQ ID NO: 25881 - DNA, 25 bp, Canis familiaris
agggaagctcgaaagcccagggaga

SEQ ID NO: 25882 - DNA, 25 bp, Canis familiaris
agtggggatcaaggagccggggcaa

SEQ ID NO: 25883 - DNA, 25 bp, Canis familiaris
agggtagtcctaagcctggatgggg

SEQ ID NO: 25884 - DNA, 25 bp, Canis familiaris
agggcaagatcagcattccttttcg

SEQ ID NO: 25885 - DNA, 25 bp, Canis familiaris
agggcacagtacaattcctgttttt

SEQ ID NO: 25886 - DNA, 25 bp, Canis familiaris
agggacaggtggactcccatttctt

SEQ ID NO: 25887 - DNA, 25 bp, Canis familiaris
agggtaggttcacaccagtacatgt

SEQ ID NO: 25888 - DNA, 25 bp, Canis familiaris
agggttggttcttatcccgaatctg

SEQ ID NO: 25889 - DNA, 25 bp, Canis familiaris
agggatatgctcattatacccaaat

SEQ ID NO: 25890 - DNA, 25 bp, Canis familiaris
agtgcttcacgcagaagtccacact

SEQ ID NO: 25891 - DNA, 25 bp, Canis familiaris
agtactcactcagtgacatgcccct

SEQ ID NO: 25892 - DNA, 25 bp, Canis familiaris
agtcctgcttagccagagccaaatg

SEQ ID NO: 25893 - DNA, 25 bp, Canis familiaris
agtcctgtgggatgagtctatgtga

SEQ ID NO: 25894 - DNA, 25 bp, Canis familiaris
agggccagctgggaagttttgtaca

SEQ ID NO: 25895 - DNA, 25 bp, Canis familiaris
aggggcctggaggagttgttcccag

SEQ ID NO: 25896 - DNA, 25 bp, Canis familiaris
agtgagagccatgagggcctttccc

SEQ ID NO: 25897 - DNA, 25 bp, Canis familiaris
agtggagcccatgggggctgctact

SEQ ID NO: 25898 - DNA, 25 bp, Canis familiaris
agtcatggacgtgtgggcgcgactg

SEQ ID NO: 25899 - DNA, 25 bp, Canis familiaris
agtctggactgtttgcaggggcctt

SEQ ID NO: 25900 - DNA, 25 bp, Canis familiaris
aggtggactgtgttcaagggcttgc

SEQ ID NO: 25901 - DNA, 25 bp, Canis familiaris
agtctgtgggccacacggagcttgc

SEQ ID NO: 25902 - DNA, 25 bp, Canis familiaris
agtggtagagccacctgaatcctgc

SEQ ID NO: 25903 - DNA, 25 bp, Canis familiaris
agtggggagccgtgtggctccctgg

SEQ ID NO: 25904 - DNA, 25 bp, Canis familiaris
agggtggacatcgcagatgaccccg

SEQ ID NO: 25905 - DNA, 25 bp, Canis familiaris
agggatggaccggttatccacgaga

SEQ ID NO: 25906 - DNA, 25 bp, Canis familiaris
agggagatacggtctgtctccccgt

SEQ ID NO: 25907 - DNA, 25 bp, Canis familiaris
agggagctaccacatggactccacg

SEQ ID NO: 25908 - DNA, 25 bp, Canis familiaris
agggtgtgcacgtgacgtgcccact

SEQ ID NO: 25909 - DNA, 25 bp, Canis familiaris
agtgggtgaagagccactaccctgg

SEQ ID NO: 25910 - DNA, 25 bp, Canis familiaris
agggaggaagacccacatcaacatt

SEQ ID NO: 25911 - DNA, 25 bp, Canis familiaris
aggggcagaaagccctcatcctttt

SEQ ID NO: 25912 - DNA, 25 bp, Canis familiaris
accggaagagggttgcaccattggt

SEQ ID NO: 25913 - DNA, 25 bp, Canis familiaris
aggggaatgggttgtgccctgtggt

SEQ ID NO: 25914 - DNA, 25 bp, Canis familiaris
aggggagttagttgtgagccgcggt

SEQ ID NO: 25915 - DNA, 25 bp, Canis familiaris
aggtgggcttgacaggagcctgctg

SEQ ID NO: 25916 - DNA, 25 bp, Canis familiaris
aggtgggcatttaagtggactctgt

SEQ ID NO: 25917 - DNA, 25 bp, Canis familiaris
aggtgtctcggatagtgggctctgt

SEQ ID NO: 25918 - DNA, 25 bp, Canis familiaris
aggtgtcctgacatctgtaggggtc

SEQ ID NO: 25919 - DNA, 25 bp, Canis familiaris
aggtgtccagtcctctgaggaggga

SEQ ID NO: 25920 - DNA, 25 bp, Canis familiaris
aggtgtggaggctggaggaggatga

SEQ ID NO: 25921 - DNA, 25 bp, Canis familiaris
agggtggagttttcagagggcagct

SEQ ID NO: 25922 - DNA, 25 bp, Canis familiaris
agggagggtgttttcagctccagac

SEQ ID NO: 25923 - DNA, 25 bp, Canis familiaris
agggagtgggtgtagtgcagctggc

SEQ ID NO: 25924 - DNA, 25 bp, Canis familiaris
agggcaggggtctgaggcttgccat

SEQ ID NO: 25925 - DNA, 25 bp, Canis familiaris
agggatggtttctgaggggttctga

SEQ ID NO: 25926 - DNA, 25 bp, Canis familiaris
agggattttggctgaggagtgactc

SEQ ID NO: 25927 - DNA, 25 bp, Canis familiaris
agggtctttcagcgagcaaggcatt

SEQ ID NO: 25928 - DNA, 25 bp, Canis familiaris
agtaaagttcagggcagctcgggtg

SEQ ID NO: 25929 - DNA, 25 bp, Canis familiaris
cagtaggtttccattcggggttgag

SEQ ID NO: 25930 - DNA, 25 bp, Canis familiaris
agtggacattctcttttagggtttg

SEQ ID NO: 25931 - DNA, 25 bp, Canis familiaris
aggggatctcgcaaatgtaagggtt

SEQ ID NO: 25932 - DNA, 25 bp, Canis familiaris
agggctttcttaattcaagggtgtg

SEQ ID NO: 25933 - DNA, 25 bp, Canis familiaris
agtggttttatatcatctcgagggt

SEQ ID NO: 25934 - DNA, 25 bp, Canis familiaris
aggtgtggtatcaaacttcaggttg

SEQ ID NO: 25935 - DNA, 25 bp, Canis familiaris
aggtggatgtcagcaacctgcagtc

SEQ ID NO: 25936 - DNA, 25 bp, Canis familiaris
agggagatgttgttcactgctggta

SEQ ID NO: 25937 - DNA, 25 bp, Canis familiaris
agggaaggcggtgagctgtgctgag

SEQ ID NO: 25938 - DNA, 25 bp, Canis familiaris
agggaagagcgggtctgctctgctg

SEQ ID NO: 25939 - DNA, 25 bp, Canis familiaris
agggagggagaggcttcctgtggcc

SEQ ID NO: 25940 - DNA, 25 bp, Canis familiaris
agggaggtgagggctacgtgcccac

SEQ ID NO: 25941 - DNA, 25 bp, Canis familiaris
agggatcctgggtcaaggtgcccaa

SEQ ID NO: 25942 - DNA, 25 bp, Canis familiaris
agggtcttgggatagagctctcctc

SEQ ID NO: 25943 - DNA, 25 bp, Canis familiaris
agggtccttgagaataagccccatc

SEQ ID NO: 25944 - DNA, 25 bp, Canis familiaris
agggctccttgatgactacctaatc

SEQ ID NO: 25945 - DNA, 25 bp, Canis familiaris
aggggcctgtgtaaatgcacccaat

SEQ ID NO: 25946 - DNA, 25 bp, Canis familiaris
aggtggtctttcaagcagagatcca

SEQ ID NO: 25947 - DNA, 25 bp, Canis familiaris
agggtcattttcagcagagtctaga

SEQ ID NO: 25948 - DNA, 25 bp, Canis familiaris
agggctcaaactcacaatcctgaga

SEQ ID NO: 25949 - DNA, 25 bp, Canis familiaris
agggcttacctgtacactgacttga

SEQ ID NO: 25950 - DNA, 25 bp, Canis familiaris
agggcaaacttggatattagctatg

SEQ ID NO: 25951 - DNA, 25 bp, Canis familiaris
agggcaaattgagagcttcagaagg

SEQ ID NO: 25952 - DNA, 25 bp, Canis familiaris
agggcaacaaggacagcttccaagt

SEQ ID NO: 25953 - DNA, 25 bp, Canis familiaris
agggcaatggaaatactctctataa

SEQ ID NO: 25954 - DNA, 25 bp, Canis familiaris
aggtggatgacgatgcaccctgcat

SEQ ID NO: 25955 - DNA, 25 bp, Canis familiaris
aggtggcagcaggctgctgcgccgt

SEQ ID NO: 25956 - DNA, 25 bp, Canis familiaris
aggtggcgcagaagccaccgcagcc

SEQ ID NO: 25957 - DNA, 25 bp, Canis familiaris
aggggcatgcataatgacttcaggc

SEQ ID NO: 25958 - DNA, 25 bp, Canis familiaris
aggggatcaattactagcatgtcat

SEQ ID NO: 25959 - DNA, 25 bp, Canis familiaris
agggtgtcaattcctggagtcccaa

SEQ ID NO: 25960 - DNA, 25 bp, Canis familiaris
agggttcgattccgagatggagcct

SEQ ID NO: 25961 - DNA, 25 bp, Canis familiaris
agggtctgcagagcctggtgaacct

SEQ ID NO: 25962 - DNA, 25 bp, Canis familiaris
aggtggctgagagccgagccaggca

SEQ ID NO: 25963 - DNA, 25 bp, Canis familiaris
agggtgtgtgagcacgacctgagct

SEQ ID NO: 25964 - DNA, 25 bp, Canis familiaris
agggtggccagaaggtcctgagcct

SEQ ID NO: 25965 - DNA, 25 bp, Canis familiaris
agggatctacagagattcctcccct

SEQ ID NO: 25966 - DNA, 25 bp, Canis familiaris
agtggactccagatgtcctcttttc

SEQ ID NO: 25967 - DNA, 25 bp, Canis familiaris
agtggcctccagtgatgacctggta

SEQ ID NO: 25968 - DNA, 25 bp, Canis familiaris
agggcactctggtgagacaggggat

SEQ ID NO: 25969 - DNA, 25 bp, Canis familiaris
agtggcgcttgataaacatggggac

SEQ ID NO: 25970 - DNA, 25 bp, Canis familiaris
agggcctctgagtcaataatgatga

SEQ ID NO: 25971 - DNA, 25 bp, Canis familiaris
agtggtccgcaagatgggagacaag

SEQ ID NO: 25972 - DNA, 25 bp, Canis familiaris
agtggcgtccaaaatggaggccatt

SEQ ID NO: 25973 - DNA, 25 bp, Canis familiaris
agagggtccagttcaggggttggtg

SEQ ID NO: 25974 - DNA, 25 bp, Canis familiaris
aggggctcgagatcgggactggaat

SEQ ID NO: 25975 - DNA, 25 bp, Canis familiaris
aggggagcagagacctggaggggac

SEQ ID NO: 25976 - DNA, 25 bp, Canis familiaris
aggtggagcatatcccggaggaggc

SEQ ID NO: 25977 - DNA, 25 bp, Canis familiaris
agggggcagactgccgagcagggtg

SEQ ID NO: 25978 - DNA, 25 bp, Canis familiaris
agggatgagcaggtgggggtgggga

SEQ ID NO: 25979 - DNA, 25 bp, Canis familiaris
agtggtgggtggagggatgtggtgg

SEQ ID NO: 25980 - DNA, 25 bp, Canis familiaris
agggctgggggtgtgggcaaggagc

SEQ ID NO: 25981 - DNA, 25 bp, Canis familiaris
aggggtgggtgtgacccaagcagcc

SEQ ID NO: 25982 - DNA, 25 bp, Canis familiaris
aggggaatggtcttagcccaagcac

SEQ ID NO: 25983 - DNA, 25 bp, Canis familiaris
aggggaagtttttgtctgagcagca

SEQ ID NO: 25984 - DNA, 25 bp, Canis familiaris
agggggcagggattatttgagcagc

SEQ ID NO: 25985 - DNA, 25 bp, Canis familiaris
agggtggcagtgtctttttcacagc

SEQ ID NO: 25986 - DNA, 25 bp, Canis familiaris
agggtaggtctcagttctatctgct

SEQ ID NO: 25987 - DNA, 25 bp, Canis familiaris
agggtcaggaggaagtgttgtagct

SEQ ID NO: 25988 - DNA, 25 bp, Canis familiaris
agggaagatgatgcctctgtattac

SEQ ID NO: 25989 - DNA, 25 bp, Canis familiaris
agggcaggcggtgctattgatctac

SEQ ID NO: 25990 - DNA, 25 bp, Canis familiaris
agggaggggtacatctcactgagct

SEQ ID NO: 25991 - DNA, 25 bp, Canis familiaris
agggagggagttaatgccactgcgg

SEQ ID NO: 25992 - DNA, 25 bp, Canis familiaris
agggagagaagtctagctgcacctg

SEQ ID NO: 25993 - DNA, 25 bp, Canis familiaris
agggcaacacagccagtttgacctt

SEQ ID NO: 25994 - DNA, 25 bp, Canis familiaris
aggggacataacatttcacactgta

SEQ ID NO: 25995 - DNA, 25 bp, Canis familiaris
agggtcagaattaagttacactgta

SEQ ID NO: 25996 - DNA, 25 bp, Canis familiaris
agggctctgtgatccagtctaaggt

SEQ ID NO: 25997 - DNA, 25 bp, Canis familiaris
agggattatccatagtctcattgtg

SEQ ID NO: 25998 - DNA, 25 bp, Canis familiaris
agggagtatctctaactcctgctct

SEQ ID NO: 25999 - DNA, 25 bp, Canis familiaris
agggaggcaataaactccagtgctg

SEQ ID NO: 26000 - DNA, 25 bp, Canis familiaris
agggggcatatcaatacctgcgtcg

SEQ ID NO: 26001 - DNA, 25 bp, Canis familiaris
agtgtgagcctgtcttcacaacgtc

SEQ ID NO: 26002 - DNA, 25 bp, Canis familiaris
aggggcagtacaagcttacgtctct

SEQ ID NO: 26003 - DNA, 25 bp, Canis familiaris
agggagagtccatgttacctacacc

SEQ ID NO: 26004 - DNA, 25 bp, Canis familiaris
agtgggagtccatgctcaggttccc

SEQ ID NO: 26005 - DNA, 25 bp, Canis familiaris
agggtgcactgttgagccaggttct

SEQ ID NO: 26006 - DNA, 25 bp, Canis familiaris
aggggcatctattgacctgtgcctc

SEQ ID NO: 26007 - DNA, 25 bp, Canis familiaris
agggaagcctataccattcccacat

SEQ ID NO: 26008 - DNA, 25 bp, Canis familiaris
agggaactcattaataccagccacc

SEQ ID NO: 26009 - DNA, 25 bp, Canis familiaris
agggcagaagtcgttgacgcccacc

SEQ ID NO: 26010 - DNA, 25 bp, Canis familiaris
agggtggagtccgtgactgccaccc

SEQ ID NO: 26011 - DNA, 25 bp, Canis familiaris
agtggcggagacccgacaatcaagc

SEQ ID NO: 26012 - DNA, 25 bp, Canis familiaris
agggcggaggcccagagaaggaggg

SEQ ID NO: 26013 - DNA, 25 bp, Canis familiaris
agggtgagggcctcaggaggggcgc

SEQ ID NO: 26014 - DNA, 25 bp, Canis familiaris
agggacaggggctcaggaggcaacc

SEQ ID NO: 26015 - DNA, 25 bp, Canis familiaris
agggccggtgaaaatggagaacagc

SEQ ID NO: 26016 - DNA, 25 bp, Canis familiaris
agggccatttttaagaagagacaag

SEQ ID NO: 26017 - DNA, 25 bp, Canis familiaris
agggcaagatccttcaagtagaaca

SEQ ID NO: 26018 - DNA, 25 bp, Canis familiaris
agggagaaggaaaatgtgagcaaga

SEQ ID NO: 26019 - DNA, 25 bp, Canis familiaris
aggggcatgagggagctttgaggaa

SEQ ID NO: 26020 - DNA, 25 bp, Canis familiaris
aggggaggaccagtctggagccata

SEQ ID NO: 26021 - DNA, 25 bp, Canis familiaris
agggaaagagcttgctctggcgcca

SEQ ID NO: 26022 - DNA, 25 bp, Canis familiaris
agggagaaggaggctctgtgcagga

SEQ ID NO: 26023 - DNA, 25 bp, Canis familiaris
agggatggaagaggcaggctgcagc

SEQ ID NO: 26024 - DNA, 25 bp, Canis familiaris
agggaaggacatggcagctgtgcag

SEQ ID NO: 26025 - DNA, 25 bp, Canis familiaris
agtgtgaaggcactggcactcagct

SEQ ID NO: 26026 - DNA, 25 bp, Canis familiaris
agggcataggccagatccttgaccc

SEQ ID NO: 26027 - DNA, 25 bp, Canis familiaris
agggaaggcacaaggcaccagaccc

SEQ ID NO: 26028 - DNA, 25 bp, Canis familiaris
agggagaggacactgtggctcgaca

SEQ ID NO: 26029 - DNA, 25 bp, Canis familiaris
aggggaggcacactgaagtattcag

SEQ ID NO: 26030 - DNA, 25 bp, Canis familiaris
aggggggcagcaaatcagaatgact

SEQ ID NO: 26031 - DNA, 25 bp, Canis familiaris
agggtgtggacatgatcagcaagat

SEQ ID NO: 26032 - DNA, 25 bp, Canis familiaris
agggatggcagcctgaaccagagct

SEQ ID NO: 26033 - DNA, 25 bp, Canis familiaris
agggaggagcattgcacactcaggc

SEQ ID NO: 26034 - DNA, 25 bp, Canis familiaris
agggagaggaggaactgcggcgcct

SEQ ID NO: 26035 - DNA, 25 bp, Canis familiaris
agggagaggatggaggaccgctgcc

SEQ ID NO: 26036 - DNA, 25 bp, Canis familiaris
agggagcaggatgctgatcctctcc

SEQ ID NO: 26037 - DNA, 25 bp, Canis familiaris
agggtagatgagacacatcctagca

SEQ ID NO: 26038 - DNA, 25 bp, Canis familiaris
agggcatcagtgatcactcgtcacc

SEQ ID NO: 26039 - DNA, 25 bp, Canis familiaris
agtgtcagactatccatgtgtacac

SEQ ID NO: 26040 - DNA, 25 bp, Canis familiaris
agggcatggggtgcagagctggtgc

SEQ ID NO: 26041 - DNA, 25 bp, Canis familiaris
agggtcgggcaggaggtgttggagc

SEQ ID NO: 26042 - DNA, 25 bp, Canis familiaris
agtggtcctgggtcaggtttctggc

SEQ ID NO: 26043 - DNA, 25 bp, Canis familiaris
agaggacctggttcaggttatctaa

SEQ ID NO: 26044 - DNA, 25 bp, Canis familiaris
agtgccccgttttggagataccaag

SEQ ID NO: 26045 - DNA, 25 bp, Canis familiaris
agtggtcgcttactttgagtgatcc

SEQ ID NO: 26046 - DNA, 25 bp, Canis familiaris
agggtatcttgaccctgtctgatcc

SEQ ID NO: 26047 - DNA, 25 bp, Canis familiaris
agtggtttacaacctgtcttcagcc

SEQ ID NO: 26048 - DNA, 25 bp, Canis familiaris
aggggtgttgagaccaacctcacca

SEQ ID NO: 26049 - DNA, 25 bp, Canis familiaris
agtggattgttcttccaacaaccct

SEQ ID NO: 26050 - DNA, 25 bp, Canis familiaris
agggatgtgccttaacagcgacccc

SEQ ID NO: 26051 - DNA, 25 bp, Canis familiaris
agggagactcgtaacagctgagccc

SEQ ID NO: 26052 - DNA, 25 bp, Canis familiaris
aggggactctgaatagaaagaccat

SEQ ID NO: 26053 - DNA, 25 bp, Canis familiaris
agggctgaacccatgagaagcacca

SEQ ID NO: 26054 - DNA, 25 bp, Canis familiaris
agtggatttctctactggaagccct

SEQ ID NO: 26055 - DNA, 25 bp, Canis familiaris
agtggcagtttgcatggcgaacccc

SEQ ID NO: 26056 - DNA, 25 bp, Canis familiaris
agtggatgcttctgggcgacaacaa

SEQ ID NO: 26057 - DNA, 25 bp, Canis familiaris
aggggatacgtggtgcgaaatcatt

SEQ ID NO: 26058 - DNA, 25 bp, Canis familiaris
agggactacgtcttcattgaatttt

SEQ ID NO: 26059 - DNA, 25 bp, Canis familiaris
agaggatcttcccttttctatttag

SEQ ID NO: 26060 - DNA, 25 bp, Canis familiaris
agggtcatctctttttatttttgca

SEQ ID NO: 26061 - DNA, 25 bp, Canis familiaris
agggtcatctgtaatgtcttgcctt

SEQ ID NO: 26062 - DNA, 25 bp, Canis familiaris
agggtcatattgctccttgaaggga

SEQ ID NO: 26063 - DNA, 25 bp, Canis familiaris
agttgtaattgaccccagtcagggg

SEQ ID NO: 26064 - DNA, 25 bp, Canis familiaris
agggaaactgaggcccatgtccctg

SEQ ID NO: 26065 - DNA, 25 bp, Canis familiaris
agggaacacatcagccacatggccc

SEQ ID NO: 26066 - DNA, 25 bp, Canis familiaris
agggagacacaaggcgtcagcgctt

SEQ ID NO: 26067 - DNA, 25 bp, Canis familiaris
agggaaccaagcctcatggatgagt

SEQ ID NO: 26068 - DNA, 25 bp, Canis familiaris
aggggagcgcaatagatgagatgtg

SEQ ID NO: 26069 - DNA, 25 bp, Canis familiaris
agtgggagctactgatgctggatgg

SEQ ID NO: 26070 - DNA, 25 bp, Canis familiaris
agggagagcttgtgactggggcagt

SEQ ID NO: 26071 - DNA, 25 bp, Canis familiaris
aggggatgttgcattctgggcaggt

SEQ ID NO: 26072 - DNA, 25 bp, Canis familiaris
aggggtcttgtctggaggatggtgt

SEQ ID NO: 26073 - DNA, 25 bp, Canis familiaris
agtctgggctctaccggagaaggtg

SEQ ID NO: 26074 - DNA, 25 bp, Canis familiaris
agtgtgcgaggaacgcggaagagcg

SEQ ID NO: 26075 - DNA, 25 bp, Canis familiaris
agtggcaaggctctagtatctgtgg

SEQ ID NO: 26076 - DNA, 25 bp, Canis familiaris
agggaatgtctgctgagtctcccag

SEQ ID NO: 26077 - DNA, 25 bp, Canis familiaris
agtgggatgtggctgggccagccag

SEQ ID NO: 26078 - DNA, 25 bp, Canis familiaris
agtggtagagcgcttgcctagcaag

SEQ ID NO: 26079 - DNA, 25 bp, Canis familiaris
aggggagatgagtttcctgcagcat

SEQ ID NO: 26080 - DNA, 25 bp, Canis familiaris
aggggatgcaagatcctgtcagcca

SEQ ID NO: 26081 - DNA, 25 bp, Canis familiaris
aggggatgctgaattctctgtagta

SEQ ID NO: 26082 - DNA, 25 bp, Canis familiaris
agggcagtcatagttgtcagtggta

SEQ ID NO: 26083 - DNA, 25 bp, Canis familiaris
agggcaggtactagcctgctggaga

SEQ ID NO: 26084 - DNA, 25 bp, Canis familiaris
agggcagcgtgatttggccgagagt

SEQ ID NO: 26085 - DNA, 25 bp, Canis familiaris
agtggctgcggaggtacctggagat

SEQ ID NO: 26086 - DNA, 25 bp, Canis familiaris
agggctggtggccaaactaaatcac

SEQ ID NO: 26087 - DNA, 25 bp, Canis familiaris
agtggttgggcccaagtagcagacc

SEQ ID NO: 26088 - DNA, 25 bp, Canis familiaris
agtgggtgggcaggcactgcgtaac

SEQ ID NO: 26089 - DNA, 25 bp, Canis familiaris
agtgatgatgcggacgtcctggtgt

SEQ ID NO: 26090 - DNA, 25 bp, Canis familiaris
agtgtatggtacccttcttgtatgc

SEQ ID NO: 26091 - DNA, 25 bp, Canis familiaris
agtggagagaacacttttggcttct

SEQ ID NO: 26092 - DNA, 25 bp, Canis familiaris
agggaagaatccttatctctggctt

SEQ ID NO: 26093 - DNA, 25 bp, Canis familiaris
agggaagcaatggctcgtcaccctt

SEQ ID NO: 26094 - DNA, 25 bp, Canis familiaris
agggaacactggtttcctcatgctt

SEQ ID NO: 26095 - DNA, 25 bp, Canis familiaris
agtggaaacacgtatgaaccattct

SEQ ID NO: 26096 - DNA, 25 bp, Canis familiaris
agtggagtccatcacaataccgtct

SEQ ID NO: 26097 - DNA, 25 bp, Canis familiaris
agtgaacccatctcagacacacaat

SEQ ID NO: 26098 - DNA, 25 bp, Canis familiaris
agggaccagtagacagacagacaga

SEQ ID NO: 26099 - DNA, 25 bp, Canis familiaris
agggccatgcgtagggccagacaga

SEQ ID NO: 26100 - DNA, 25 bp, Canis familiaris
agggcgcaggaaggacaagtcatgt

SEQ ID NO: 26101 - DNA, 25 bp, Canis familiaris
agggtcatgttgcctaagtgtctgt

SEQ ID NO: 26102 - DNA, 25 bp, Canis familiaris
agggtcattttctaagtgctgcttg

SEQ ID NO: 26103 - DNA, 25 bp, Canis familiaris
agggtgctattaaatggcagctttg

SEQ ID NO: 26104 - DNA, 25 bp, Canis familiaris
agggtgtgttagtgtgagattgtgt

SEQ ID NO: 26105 - DNA, 25 bp, Canis familiaris
aggggtgggtgtatgatgttgtgtc

SEQ ID NO: 26106 - DNA, 25 bp, Canis familiaris
agtgaggtggagaggcgttttgatg

SEQ ID NO: 26107 - DNA, 25 bp, Canis familiaris
agtacttagagggaaattttgcagc

SEQ ID NO: 26108 - DNA, 25 bp, Canis familiaris
agtgtctgaaaggtaattgtttgcc

SEQ ID NO: 26109 - DNA, 25 bp, Canis familiaris
agtgttaaattgtacagtcctgctc

SEQ ID NO: 26110 - DNA, 25 bp, Canis familiaris
agggtaacttgtacagctccttctg

SEQ ID NO: 26111 - DNA, 25 bp, Canis familiaris
agtggctcagtcatgtcacctgact

SEQ ID NO: 26112 - DNA, 25 bp, Canis familiaris
agtggtggacctgacctgccgtcta

SEQ ID NO: 26113 - DNA, 25 bp, Canis familiaris
agtgcagggcaccagtagacaacgt

SEQ ID NO: 26114 - DNA, 25 bp, Canis familiaris
agggaggacaagtagccacagcggt

SEQ ID NO: 26115 - DNA, 25 bp, Canis familiaris
agtaaggagtgagtacccagcggcg

SEQ ID NO: 26116 - DNA, 25 bp, Canis familiaris
agtggagcttgggctagcccactgg

SEQ ID NO: 26117 - DNA, 25 bp, Canis familiaris
agtggcgctgtgtgctgaaaattgg

SEQ ID NO: 26118 - DNA, 25 bp, Canis familiaris
agggcctttcccaaatgaatgtgag

SEQ ID NO: 26119 - DNA, 25 bp, Canis familiaris
agggcgttgtgtcctatcaagatgt

SEQ ID NO: 26120 - DNA, 25 bp, Canis familiaris
agggaggagttgtttgaatgagtta

SEQ ID NO: 26121 - DNA, 25 bp, Canis familiaris
agttagcggtagtttgtgtcaggat

SEQ ID NO: 26122 - DNA, 25 bp, Canis familiaris
agttagtgggggcatttctggtctt

SEQ ID NO: 26123 - DNA, 25 bp, Canis familiaris
agttgaccaggacactttttgactt

SEQ ID NO: 26124 - DNA, 25 bp, Canis familiaris
actgtccccgggattatcttactgt

SEQ ID NO: 26125 - DNA, 25 bp, Canis familiaris
acttgtggcacgtgtttctttacct

SEQ ID NO: 26126 - DNA, 25 bp, Canis familiaris
agtcttgttagctgtagtttgtacc

SEQ ID NO: 26127 - DNA, 25 bp, Canis familiaris
agtgttcttactttactctggtata

SEQ ID NO: 26128 - DNA, 25 bp, Canis familiaris
agggtattagactgcctcaggtgca

SEQ ID NO: 26129 - DNA, 25 bp, Canis familiaris
agggttgtgagattgagccccggca

SEQ ID NO: 26130 - DNA, 25 bp, Canis familiaris
agggccagtggagtacgtgccggac

SEQ ID NO: 26131 - DNA, 25 bp, Canis familiaris
agtgtgacgtggacatccggaagga

SEQ ID NO: 26132 - DNA, 25 bp, Canis familiaris
agtgcgacgtggacatccgtaagga

SEQ ID NO: 26133 - DNA, 25 bp, Canis familiaris
agtgtgacgttgacatccgtaaaga

SEQ ID NO: 26134 - DNA, 25 bp, Canis familiaris
agtgtggtgctgctcatgacgtaat

SEQ ID NO: 26135 - DNA, 25 bp, Canis familiaris
agtggctgaggtacagagctgccct

SEQ ID NO: 26136 - DNA, 25 bp, Canis familiaris
agtgcgtcactgaagctgagcatgc

SEQ ID NO: 26137 - DNA, 25 bp, Canis familiaris
agtgtgcacctaccatgagctgcac

SEQ ID NO: 26138 - DNA, 25 bp, Canis familiaris
agggcttctgaggctcagctgagca

SEQ ID NO: 26139 - DNA, 25 bp, Canis familiaris
agggtatctgtggcatggatatgca

SEQ ID NO: 26140 - DNA, 25 bp, Canis familiaris
agtggagacctgtctggtcacacgt

SEQ ID NO: 26141 - DNA, 25 bp, Canis familiaris
agtgatcaggcaattcggtcaattg

SEQ ID NO: 26142 - DNA, 25 bp, Canis familiaris
agtggatcagcactccggaagactg

SEQ ID NO: 26143 - DNA, 25 bp, Canis familiaris
agtggctccacaagacagaagttta

SEQ ID NO: 26144 - DNA, 25 bp, Canis familiaris
agggttccactgttgtcatatgtct

SEQ ID NO: 26145 - DNA, 25 bp, Canis familiaris
agggtttcacagggcatctctgccc

SEQ ID NO: 26146 - DNA, 25 bp, Canis familiaris
agtgtgtgttaggtcgattctctca

SEQ ID NO: 26147 - DNA, 25 bp, Canis familiaris
agtggctgtctacatgtgtgtccat

SEQ ID NO: 26148 - DNA, 25 bp, Canis familiaris
agtgtgctatttatgtggccacatg

SEQ ID NO: 26149 - DNA, 25 bp, Canis familiaris
agtgatcgtttttcttccaaactat

SEQ ID NO: 26150 - DNA, 25 bp, Canis familiaris
agggctttcaaacttgcctaaatat

SEQ ID NO: 26151 - DNA, 25 bp, Canis familiaris
agggctactcaatactgctctaagt

SEQ ID NO: 26152 - DNA, 25 bp, Canis familiaris
agggttctctgattctgtgttaaat

SEQ ID NO: 26153 - DNA, 25 bp, Canis familiaris
agggctacattgttgtggacataat

SEQ ID NO: 26154 - DNA, 25 bp, Canis familiaris
agggctcatcatttatgtgaatcta

SEQ ID NO: 26155 - DNA, 25 bp, Canis familiaris
agggctcacactaaggacctcagtt

SEQ ID NO: 26156 - DNA, 25 bp, Canis familiaris
agggccagatcggggcgcccatgcc

SEQ ID NO: 26157 - DNA, 25 bp, Canis familiaris
agggactatcagtggcgccactgcc

SEQ ID NO: 26158 - DNA, 25 bp, Canis familiaris
agggagcagacacggtgagcgcact

SEQ ID NO: 26159 - DNA, 25 bp, Canis familiaris
agggtgcagtatcagtgagccagct

SEQ ID NO: 26160 - DNA, 25 bp, Canis familiaris
agggatgacaatcagagcctcctct

SEQ ID NO: 26161 - DNA, 25 bp, Canis familiaris
agggcgacaacaaggcgaagctcat

SEQ ID NO: 26162 - DNA, 25 bp, Canis familiaris
agggcatgaacatcgtggaagccat

SEQ ID NO: 26163 - DNA, 25 bp, Canis familiaris
agggcatgaacatcgtggaagccat

SEQ ID NO: 26164 - DNA, 25 bp, Canis familiaris
agggcatgtgagaacctggcccctt

SEQ ID NO: 26165 - DNA, 25 bp, Canis familiaris
agggatgtgctggagtgtggccctt

SEQ ID NO: 26166 - DNA, 25 bp, Canis familiaris
agggttgtaagattgagctccatgt

SEQ ID NO: 26167 - DNA, 25 bp, Canis familiaris
agggttgtgacatggagccctgtgt

SEQ ID NO: 26168 - DNA, 25 bp, Canis familiaris
agtggtcagtggtgtgcaggcattg

SEQ ID NO: 26169 - DNA, 25 bp, Canis familiaris
agggttgtgaggggcgtgcatggcc

SEQ ID NO: 26170 - DNA, 25 bp, Canis familiaris
agtggatcgagagggtggtcggctg

SEQ ID NO: 26171 - DNA, 25 bp, Canis familiaris
agggcatcgtgaagggacatcatcc

SEQ ID NO: 26172 - DNA, 25 bp, Canis familiaris
agggcatgctggagcgagactgagc

SEQ ID NO: 26173 - DNA, 25 bp, Canis familiaris
agggtgcagccttgggactgtgcac

SEQ ID NO: 26174 - DNA, 25 bp, Canis familiaris
agtgtctgagcctcaggagcttccc

SEQ ID NO: 26175 - DNA, 25 bp, Canis familiaris
agtgacagtctagagggcttcgtgc

SEQ ID NO: 26176 - DNA, 25 bp, Canis familiaris
agtgacacttcttaggttctggtcc

SEQ ID NO: 26177 - DNA, 25 bp, Canis familiaris
agtagacatcgtgaggatttttcct

SEQ ID NO: 26178 - DNA, 25 bp, Canis familiaris
agtagactcgttccaattcgttcct

SEQ ID NO: 26179 - DNA, 25 bp, Canis familiaris
agggtcctggctaacattggttcct

SEQ ID NO: 26180 - DNA, 25 bp, Canis familiaris
agggtcctggtttcacaggattatc

SEQ ID NO: 26181 - DNA, 25 bp, Canis familiaris
agtggcccaggttccctgagaagat

SEQ ID NO: 26182 - DNA, 25 bp, Canis familiaris
agggctgtcggtttcctatggaaga

SEQ ID NO: 26183 - DNA, 25 bp, Canis familiaris
agggatgtccgttgtcattgattaa

SEQ ID NO: 26184 - DNA, 25 bp, Canis familiaris
agtgggtcggagcctatggattaac

SEQ ID NO: 26185 - DNA, 25 bp, Canis familiaris
agggttcggaacaggcaggtacgct

SEQ ID NO: 26186 - DNA, 25 bp, Canis familiaris
agggtctggccaagggtcaggtaca

SEQ ID NO: 26187 - DNA, 25 bp, Canis familiaris
agtgcgacttccaggagttcgtggc

SEQ ID NO: 26188 - DNA, 25 bp, Canis familiaris
agtggacagaccatggggccgaagc

SEQ ID NO: 26189 - DNA, 25 bp, Canis familiaris
agatagtggaggaggacccccagcc

SEQ ID NO: 26190 - DNA, 25 bp, Canis familiaris
agtgagggtggagggcttacgtagc

SEQ ID NO: 26191 - DNA, 25 bp, Canis familiaris
agtggaggagtcgggttacgctggc

SEQ ID NO: 26192 - DNA, 25 bp, Canis familiaris
agtggcaggcagaggagtgcttcct

SEQ ID NO: 26193 - DNA, 25 bp, Canis familiaris
agtggaggccgtggcacttgccact

SEQ ID NO: 26194 - DNA, 25 bp, Canis familiaris
agtggccccattcgaatcatcgaat

SEQ ID NO: 26195 - DNA, 25 bp, Canis familiaris
agggcccactgtaaatccaggatga

SEQ ID NO: 26196 - DNA, 25 bp, Canis familiaris
agggccagccgagagatgccaagtg

SEQ ID NO: 26197 - DNA, 25 bp, Canis familiaris
agtgagccaacgtcaagttccagtt

SEQ ID NO: 26198 - DNA, 25 bp, Canis familiaris
agtctccaaccatatatcccaggta

SEQ ID NO: 26199 - DNA, 25 bp, Canis familiaris
agtgctccaagataataaaaatgaa

SEQ ID NO: 26200 - DNA, 25 bp, Canis familiaris
agtgctaggcccctaaaagaagaag

SEQ ID NO: 26201 - DNA, 25 bp, Canis familiaris
agtctagccccggcaagcgggagaa

SEQ ID NO: 26202 - DNA, 25 bp, Canis familiaris
agtgctcagccaagaccaaggagtg

SEQ ID NO: 26203 - DNA, 25 bp, Canis familiaris
agtgatacaactacagaagggctga

SEQ ID NO: 26204 - DNA, 25 bp, Canis familiaris
agtgaagcaggcatcggagggaccc

SEQ ID NO: 26205 - DNA, 25 bp, Canis familiaris
agtgaagcaggcatcggagggaccc

SEQ ID NO: 26206 - DNA, 25 bp, Canis familiaris
agtgaacaagtctggaggcaaggcc

SEQ ID NO: 26207 - DNA, 25 bp, Canis familiaris
agtggaggagtctcgggtcatggcc

SEQ ID NO: 26208 - DNA, 25 bp, Canis familiaris
agtccaggtgtccgggtgaaggcac

SEQ ID NO: 26209 - DNA, 25 bp, Canis familiaris
agtccacttcggcggacagtggcgt

SEQ ID NO: 26210 - DNA, 25 bp, Canis familiaris
agtccacccacttgcaggacaaggt

SEQ ID NO: 26211 - DNA, 25 bp, Canis familiaris
agtcctccctgtgtggacacaagta

SEQ ID NO: 26212 - DNA, 25 bp, Canis familiaris
agtccttactgataggggcacctgg

SEQ ID NO: 26213 - DNA, 25 bp, Canis familiaris
agtagttatttctggggagcggatt

SEQ ID NO: 26214 - DNA, 25 bp, Canis familiaris
agcggtttcttcaggtaggtgggtg

SEQ ID NO: 26215 - DNA, 25 bp, Canis familiaris
agggcttactactggtatccttctt

SEQ ID NO: 26216 - DNA, 25 bp, Canis familiaris
agggcatctactattgttgctcctt

SEQ ID NO: 26217 - DNA, 25 bp, Canis familiaris
agtgtacaactcattttgcgccaat

SEQ ID NO: 26218 - DNA, 25 bp, Canis familiaris
agcgtaccatccagtttgtggactg

SEQ ID NO: 26219 - DNA, 25 bp, Canis familiaris
agggatccactttgtgttggggctc

SEQ ID NO: 26220 - DNA, 25 bp, Canis familiaris
agggacatccttctgcgagaagggc

SEQ ID NO: 26221 - DNA, 25 bp, Canis familiaris
agtgccctcctggggcaacaagggc

SEQ ID NO: 26222 - DNA, 25 bp, Canis familiaris
agtggccatttggttccactggggg

SEQ ID NO: 26223 - DNA, 25 bp, Canis familiaris
agtggctcaaagggacacctgggtg

SEQ ID NO: 26224 - DNA, 25 bp, Canis familiaris
agtggacacggttatctcctaagtg

SEQ ID NO: 26225 - DNA, 25 bp, Canis familiaris
agggcaacaggtttctcatgtacta

SEQ ID NO: 26226 - DNA, 25 bp, Canis familiaris
agggaatgagttttcttgctccgca

SEQ ID NO: 26227 - DNA, 25 bp, Canis familiaris
agtggaaagttgggtagctctcgcg

SEQ ID NO: 26228 - DNA, 25 bp, Canis familiaris
agtgtcgacgtagggttgctcatcc

SEQ ID NO: 26229 - DNA, 25 bp, Canis familiaris
agtggctgggtagggttgctggcac

SEQ ID NO: 26230 - DNA, 25 bp, Canis familiaris
agggcgaggtaggatttgacagcac

SEQ ID NO: 26231 - DNA, 25 bp, Canis familiaris
agggcgaattaggcagcttccctca

SEQ ID NO: 26232 - DNA, 25 bp, Canis familiaris
agggactcgtaggcacagatccctc

SEQ ID NO: 26233 - DNA, 25 bp, Canis familiaris
agggacgtgaaggccaatcctgcat

SEQ ID NO: 26234 - DNA, 25 bp, Canis familiaris
agggagcagtgaggcaggctaccca

SEQ ID NO: 26235 - DNA, 25 bp, Canis familiaris
agtggacgtgtggaagccaccacct

SEQ ID NO: 26236 - DNA, 25 bp, Canis familiaris
agtgtacatttgttatccacagatg

SEQ ID NO: 26237 - DNA, 25 bp, Canis familiaris
agtgtaattccaggcttcacgctgt

SEQ ID NO: 26238 - DNA, 25 bp, Canis familiaris
agtgaagttctctgtatagtcttac

SEQ ID NO: 26239 - DNA, 25 bp, Canis familiaris
agtagaattactgctaggccttagt

SEQ ID NO: 26240 - DNA, 25 bp, Canis familiaris
agtccaaaacctgagctgctttagc

SEQ ID NO: 26241 - DNA, 25 bp, Canis familiaris
agtgccaaacaggcctgattttatt

SEQ ID NO: 26242 - DNA, 25 bp, Canis familiaris
agggactccatggccaggatttgat

SEQ ID NO: 26243 - DNA, 25 bp, Canis familiaris
agggacttcagcactgaggcttatc

SEQ ID NO: 26244 - DNA, 25 bp, Canis familiaris
agaggacttccctgcagcacgtcgc

SEQ ID NO: 26245 - DNA, 25 bp, Canis familiaris
agggagttccacggcatgaagcccc

SEQ ID NO: 26246 - DNA, 25 bp, Canis familiaris
agtgaacggccgtgagaagccccta

SEQ ID NO: 26247 - DNA, 25 bp, Canis familiaris
agtgcccaggggaaaatggcctcct

SEQ ID NO: 26248 - DNA, 25 bp, Canis familiaris
agtggcctgctacaaaagtcctgct

SEQ ID NO: 26249 - DNA, 25 bp, Canis familiaris
agtggtcgccagctaagagcgctac

SEQ ID NO: 26250 - DNA, 25 bp, Canis familiaris
agggcacttgagctctaatcctact

SEQ ID NO: 26251 - DNA, 25 bp, Canis familiaris
agtgtgccattgggacattacctcc

SEQ ID NO: 26252 - DNA, 25 bp, Canis familiaris
agtgatcctctggggttaagcgtcc

SEQ ID NO: 26253 - DNA, 25 bp, Canis familiaris
agtgaccatcccgagctgaatatcg

SEQ ID NO: 26254 - DNA, 25 bp, Canis familiaris
agtgatgcacttcccgtgacataaa

SEQ ID NO: 26255 - DNA, 25 bp, Canis familiaris
agggcatctctctatagttataaat

SEQ ID NO: 26256 - DNA, 25 bp, Canis familiaris
agggaatcatgccatttattacaat

SEQ ID NO: 26257 - DNA, 25 bp, Canis familiaris
agtggaatcaactttgcatatgcaa

SEQ ID NO: 26258 - DNA, 25 bp, Canis familiaris
agtgtaatgacagttggctctagac

SEQ ID NO: 26259 - DNA, 25 bp, Canis familiaris
agtgaaaaacctccattagcattga

SEQ ID NO: 26260 - DNA, 25 bp, Canis familiaris
agtggatgaaatccagccccaaggg

SEQ ID NO: 26261 - DNA, 25 bp, Canis familiaris
agtgtaaagcattcccacaaagggt

SEQ ID NO: 26262 - DNA, 25 bp, Canis familiaris
agtgtttacattgctatcgatcagg

SEQ ID NO: 26263 - DNA, 25 bp, Canis familiaris
agtggtaatcccattctgtagagac

SEQ ID NO: 26264 - DNA, 25 bp, Canis familiaris
agggctaatttctttcattttgtca

SEQ ID NO: 26265 - DNA, 25 bp, Canis familiaris
agggctttttgtgtcttactgctat

SEQ ID NO: 26266 - DNA, 25 bp, Canis familiaris
agggctctttttgactatttctaag

SEQ ID NO: 26267 - DNA, 25 bp, Canis familiaris
agggctcctgatttccaggtttcta

SEQ ID NO: 26268 - DNA, 25 bp, Canis familiaris
agtgctcgggattgaccgggttctg

SEQ ID NO: 26269 - DNA, 25 bp, Canis familiaris
agtgccgcgctagtgaagggttttt

SEQ ID NO: 26270 - DNA, 25 bp, Canis familiaris
agtgtcccagagaactgcggttgtt

SEQ ID NO: 26271 - DNA, 25 bp, Canis familiaris
agtggggctgagatcggaggtgcat

SEQ ID NO: 26272 - DNA, 25 bp, Canis familiaris
agggcaggtaggtgtgaggctgtgg

SEQ ID NO: 26273 - DNA, 25 bp, Canis familiaris
agggcaggaaggccaggcaggtgtc

SEQ ID NO: 26274 - DNA, 25 bp, Canis familiaris
agggcgagaaggccccatgggacct

SEQ ID NO: 26275 - DNA, 25 bp, Canis familiaris
agggctaagggatccatgggcccgc

SEQ ID NO: 26276 - DNA, 25 bp, Canis familiaris
agggccggaagttcgagcgtgcccg

SEQ ID NO: 26277 - DNA, 25 bp, Canis familiaris
agggccctgcaagtggacagtgtgc

SEQ ID NO: 26278 - DNA, 25 bp, Canis familiaris
agggcagcccagtgggcagatgctg

SEQ ID NO: 26279 - DNA, 25 bp, Canis familiaris
agggaccgcagacagaggcgcgggg

SEQ ID NO: 26280 - DNA, 25 bp, Canis familiaris
agggaccagcagaacagaggcgcgg

SEQ ID NO: 26281 - DNA, 25 bp, Canis familiaris
agtgggctacaatcagagtgccggt

SEQ ID NO: 26282 - DNA, 25 bp, Canis familiaris
agtggtcagaagcacgggccggacc

SEQ ID NO: 26283 - DNA, 25 bp, Canis familiaris
agtggtgagaacaagagggaaggca

SEQ ID NO: 26284 - DNA, 25 bp, Canis familiaris
agtggtagacacaaggactgactat

SEQ ID NO: 26285 - DNA, 25 bp, Canis familiaris
agtcctggacaaacctctatcatat

SEQ ID NO: 26286 - DNA, 25 bp, Canis familiaris
agtgcctggaattacctaggtatat

SEQ ID NO: 26287 - DNA, 25 bp, Canis familiaris
agtggggatctgtccctacttgatt

SEQ ID NO: 26288 - DNA, 25 bp, Canis familiaris
agggcaggcttagctgccctctgtt

SEQ ID NO: 26289 - DNA, 25 bp, Canis familiaris
agggcagcctatgaatgaccctctt

SEQ ID NO: 26290 - DNA, 25 bp, Canis familiaris
agtggagccagaaagctacagcctc

SEQ ID NO: 26291 - DNA, 25 bp, Canis familiaris
agtgtgtgcacactaacttacctct

SEQ ID NO: 26292 - DNA, 25 bp, Canis familiaris
agtgttggcatctagagctcaaact

SEQ ID NO: 26293 - DNA, 25 bp, Canis familiaris
agtgtattattagtctcaagttaga

SEQ ID NO: 26294 - DNA, 25 bp, Canis familiaris
agtggattctgtattattttatgcc

SEQ ID NO: 26295 - DNA, 25 bp, Canis familiaris
agtggccatcttaagcttttttgct

SEQ ID NO: 26296 - DNA, 25 bp, Canis familiaris
agtggcgtgttttatattattgtta

SEQ ID NO: 26297 - DNA, 25 bp, Canis familiaris
agtgcactgtgtcctgaaattctta

SEQ ID NO: 26298 - DNA, 25 bp, Canis familiaris
agtgacggggcttgtcatgcccaag

SEQ ID NO: 26299 - DNA, 25 bp, Canis familiaris
agtgagggggccctcaccaagcagt

SEQ ID NO: 26300 - DNA, 25 bp, Canis familiaris
agtgatgggagtctctctcctactg

SEQ ID NO: 26301 - DNA, 25 bp, Canis familiaris
agtgatgaaactcctcccaatacta

SEQ ID NO: 26302 - DNA, 25 bp, Canis familiaris
agggaaattcctgctgtgtggttgc

SEQ ID NO: 26303 - DNA, 25 bp, Canis familiaris
agggaaattactgctgagtccacag

SEQ ID NO: 26304 - DNA, 25 bp, Canis familiaris
agtggtatgatctgctgcctagtgc

SEQ ID NO: 26305 - DNA, 25 bp, Canis familiaris
agtggatctgagtgtctccaggctg

SEQ ID NO: 26306 - DNA, 25 bp, Canis familiaris
agtgcaaggcagtgtctcgagaatt

SEQ ID NO: 26307 - DNA, 25 bp, Canis familiaris
agtgatcaggtgtgttgggtaacgg

SEQ ID NO: 26308 - DNA, 25 bp, Canis familiaris
agtgatagtggtcttggaacaattg

SEQ ID NO: 26309 - DNA, 25 bp, Canis familiaris
agtgaagtcgtcatatgaacccagg

SEQ ID NO: 26310 - DNA, 25 bp, Canis familiaris
agtagaattgttttgacctcccaga

SEQ ID NO: 26311 - DNA, 25 bp, Canis familiaris
agtagaacgttaaggcactgccagg

SEQ ID NO: 26312 - DNA, 25 bp, Canis familiaris
agtttacagcttactgcttgtccgg

SEQ ID NO: 26313 - DNA, 25 bp, Canis familiaris
agtgtgtaagttcgtgtcggtggcc

SEQ ID NO: 26314 - DNA, 25 bp, Canis familiaris
agatttctagcgtgtcctatggacc

SEQ ID NO: 26315 - DNA, 25 bp, Canis familiaris
agtgcttctaggcggactgttactg

SEQ ID NO: 26316 - DNA, 25 bp, Canis familiaris
agtgcttccgcccagaagtattgtc

SEQ ID NO: 26317 - DNA, 25 bp, Canis familiaris
agtgcccccagctatggaaattatt

SEQ ID NO: 26318 - DNA, 25 bp, Canis familiaris
agtgtcaccaatccagtaaagcttt

SEQ ID NO: 26319 - DNA, 25 bp, Canis familiaris
agtggcacccagcagtttagcttaa

SEQ ID NO: 26320 - DNA, 25 bp, Canis familiaris
agtggatgaccaagttttacaggaa

SEQ ID NO: 26321 - DNA, 25 bp, Canis familiaris
agtggtggccttgatattgaagagc

SEQ ID NO: 26322 - DNA, 25 bp, Canis familiaris
agtggggcttcgaaaccacgaccat

SEQ ID NO: 26323 - DNA, 25 bp, Canis familiaris
agtgggcgtctaattatccacccct

SEQ ID NO: 26324 - DNA, 25 bp, Canis familiaris
agtgagggtattttctgcccctctc

SEQ ID NO: 26325 - DNA, 25 bp, Canis familiaris
agtgttggtttattatggccctgtt

SEQ ID NO: 26326 - DNA, 25 bp, Canis familiaris
agtgttggggagactacaccctgat

SEQ ID NO: 26327 - DNA, 25 bp, Canis familiaris
agtgagctggcgcatgactacacgc

SEQ ID NO: 26328 - DNA, 25 bp, Canis familiaris
agtgaggcatctggatggctcagtc

SEQ ID NO: 26329 - DNA, 25 bp, Canis familiaris
agtgagagtgaccaggcttgtcctg

SEQ ID NO: 26330 - DNA, 25 bp, Canis familiaris
agtggagtatcacttcctgtcgccc

SEQ ID NO: 26331 - DNA, 25 bp, Canis familiaris
agtggagtatcacttcctgtcgccc

SEQ ID NO: 26332 - DNA, 25 bp, Canis familiaris
agtggatgtctcatcttttgcccac

SEQ ID NO: 26333 - DNA, 25 bp, Canis familiaris
agtgtgtgctatgtgccttgtacca

SEQ ID NO: 26334 - DNA, 25 bp, Canis familiaris
agtgcttctcaagtccttcagagac

SEQ ID NO: 26335 - DNA, 25 bp, Canis familiaris
agtcagagtagcttcccatcaggac

SEQ ID NO: 26336 - DNA, 25 bp, Canis familiaris
agtcacgtacgattccacgagacct

SEQ ID NO: 26337 - DNA, 25 bp, Canis familiaris
agtgactttccagtcccaagtcact

SEQ ID NO: 26338 - DNA, 25 bp, Canis familiaris
agtgtctttacatccaaaatgcaaa

SEQ ID NO: 26339 - DNA, 25 bp, Canis familiaris
agtgatccattttgaacaaccctaa

SEQ ID NO: 26340 - DNA, 25 bp, Canis familiaris
agtgactacttcaaggcattctccg

SEQ ID NO: 26341 - DNA, 25 bp, Canis familiaris
agggctcagcagaaatggcctctcc

SEQ ID NO: 26342 - DNA, 25 bp, Canis familiaris
agggcacaccaatggtgcctctctg

SEQ ID NO: 26343 - DNA, 25 bp, Canis familiaris
agtggaaccgacagtgaccatctcc

SEQ ID NO: 26344 - DNA, 25 bp, Canis familiaris
agtggaaccattactgtagctcccg

SEQ ID NO: 26345 - DNA, 25 bp, Canis familiaris
agtggtcctctatcatgtagtcaac

SEQ ID NO: 26346 - DNA, 25 bp, Canis familiaris
agtggtctcctgtgtttggaccaat

SEQ ID NO: 26347 - DNA, 25 bp, Canis familiaris
agtgggacctaaatttctgagctta

SEQ ID NO: 26348 - DNA, 25 bp, Canis familiaris
agtggtgacttactgatatccgagt

SEQ ID NO: 26349 - DNA, 25 bp, Canis familiaris
agggcatgtcttttgcatagcctaa

SEQ ID NO: 26350 - DNA, 25 bp, Canis familiaris
agtggctgtactttgatgccctgga

SEQ ID NO: 26351 - DNA, 25 bp, Canis familiaris
agtggctgtgacgattgtgatcctc

SEQ ID NO: 26352 - DNA, 25 bp, Canis familiaris
agtgccagtcactatgtggtatcta

SEQ ID NO: 26353 - DNA, 25 bp, Canis familiaris
agtggattcagcaatggagacaagt

SEQ ID NO: 26354 - DNA, 25 bp, Canis familiaris
agtggattcttcacacacacactca

SEQ ID NO: 26355 - DNA, 25 bp, Canis familiaris
agtgagatcctaaccatcaagccac

SEQ ID NO: 26356 - DNA, 25 bp, Canis familiaris
agtcagccaaaaccataacacccat

SEQ ID NO: 26357 - DNA, 25 bp, Canis familiaris
agtcctaaacacagaccactggatg

SEQ ID NO: 26358 - DNA, 25 bp, Canis familiaris
agtcccgagactgaaccagcgcggg

SEQ ID NO: 26359 - DNA, 25 bp, Canis familiaris
agtgggcgcagacttatcccacgtg

SEQ ID NO: 26360 - DNA, 25 bp, Canis familiaris
agtggggaggtaatccctgctgctt

SEQ ID NO: 26361 - DNA, 25 bp, Canis familiaris
agtgtgggaggacgatccccgactt

SEQ ID NO: 26362 - DNA, 25 bp, Canis familiaris
agtgctggaagccggaacccaggct

SEQ ID NO: 26363 - DNA, 25 bp, Canis familiaris
agtctggaagctgtgaaagtccgtc

SEQ ID NO: 26364 - DNA, 25 bp, Canis familiaris
agtcaggggcagtgagaattctcaa

SEQ ID NO: 26365 - DNA, 25 bp, Canis familiaris
agtctgggtcagtgtatatgtccat

SEQ ID NO: 26366 - DNA, 25 bp, Canis familiaris
agtgtgggacagggtctctgccctg

SEQ ID NO: 26367 - DNA, 25 bp, Canis familiaris
agtggagtgaagcgagctcaccctg

SEQ ID NO: 26368 - DNA, 25 bp, Canis familiaris
agtggagttggaagccgcatggggg

SEQ ID NO: 26369 - DNA, 25 bp, Canis familiaris
agggcttcgtgaactaggagtgggg

SEQ ID NO: 26370 - DNA, 25 bp, Canis familiaris
agggcttctgtatataaattctgag

SEQ ID NO: 26371 - DNA, 25 bp, Canis familiaris
agtggcttttatacaaagtatctat

SEQ ID NO: 26372 - DNA, 25 bp, Canis familiaris
agtggtaggctaaataacgatatta

SEQ ID NO: 26373 - DNA, 25 bp, Canis familiaris
agtgtggacctgacaacaaccatca

SEQ ID NO: 26374 - DNA, 25 bp, Canis familiaris
agtgtgtagacggaaaggctcaaac

SEQ ID NO: 26375 - DNA, 25 bp, Canis familiaris
agtgttggcctgctcagggtcaacc

SEQ ID NO: 26376 - DNA, 25 bp, Canis familiaris
agtttggggttagccgcatatccgt

SEQ ID NO: 26377 - DNA, 25 bp, Canis familiaris
agtggtggtctttgaccctcaagct

SEQ ID NO: 26378 - DNA, 25 bp, Canis familiaris
agtgatctagttttgccctttactc

SEQ ID NO: 26379 - DNA, 25 bp, Canis familiaris
agctcttcaaaatgccttagtactc

SEQ ID NO: 26380 - DNA, 25 bp, Canis familiaris
agtgttcaaaactttaagtgtccat

SEQ ID NO: 26381 - DNA, 25 bp, Canis familiaris
agtgttctcaagtctgggggttgtc

SEQ ID NO: 26382 - DNA, 25 bp, Canis familiaris
agtgattcctattggggacgactgc

SEQ ID NO: 26383 - DNA, 25 bp, Canis familiaris
agtgaccacctggggtcacagccac

SEQ ID NO: 26384 - DNA, 25 bp, Canis familiaris
agggcaagtctggtgtccagcagcc

SEQ ID NO: 26385 - DNA, 25 bp, Canis familiaris
agtggcagcactaggttcggattcc

SEQ ID NO: 26386 - DNA, 25 bp, Canis familiaris
agatgcctgaccagttcggaatcgc

SEQ ID NO: 26387 - DNA, 25 bp, Canis familiaris
agtgctgcttccggtgctaaaatga

SEQ ID NO: 26388 - DNA, 25 bp, Canis familiaris
agggctgagcagctgtgcaaataga

SEQ ID NO: 26389 - DNA, 25 bp, Canis familiaris
agggctgtgatgctctaaatagtag

SEQ ID NO: 26390 - DNA, 25 bp, Canis familiaris
agggcatcttgggctacactgagga

SEQ ID NO: 26391 - DNA, 25 bp, Canis familiaris
agtggcaatttcgtacatcttggcc

SEQ ID NO: 26392 - DNA, 25 bp, Canis familiaris
agtgagcacatggacggacacctgc

SEQ ID NO: 26393 - DNA, 25 bp, Canis familiaris
agtgccaagcacagaaagccgctaa

SEQ ID NO: 26394 - DNA, 25 bp, Canis familiaris
agtcgaccaacacacaggtgctgca

SEQ ID NO: 26395 - DNA, 25 bp, Canis familiaris
agtccatggccatctacaagtccat

SEQ ID NO: 26396 - DNA, 25 bp, Canis familiaris
agtcagcaggtgtcatcacacggcc

SEQ ID NO: 26397 - DNA, 25 bp, Canis familiaris
agtcgcaatgattcagctcgctgag

SEQ ID NO: 26398 - DNA, 25 bp, Canis familiaris
agtccaggattagcgctgtggccgc

SEQ ID NO: 26399 - DNA, 25 bp, Canis familiaris
agtgccagtctgtgtcagctgtgac

SEQ ID NO: 26400 - DNA, 25 bp, Canis familiaris
agggcagctgagggacatctggcaa

SEQ ID NO: 26401 - DNA, 25 bp, Canis familiaris
agggcctgtatccacatctggaaat

SEQ ID NO: 26402 - DNA, 25 bp, Canis familiaris
agggcacattatactcatctcagag

SEQ ID NO: 26403 - DNA, 25 bp, Canis familiaris
agggcacatggtacctgacaggtgt

SEQ ID NO: 26404 - DNA, 25 bp, Canis familiaris
agggctatagttgctgtgaggatta

SEQ ID NO: 26405 - DNA, 25 bp, Canis familiaris
agggctttgctcgagctgtgcggaa

SEQ ID NO: 26406 - DNA, 25 bp, Canis familiaris
agggcttcagcgccaggcgcgaatt

SEQ ID NO: 26407 - DNA, 25 bp, Canis familiaris
agtggcgttcagccacccgagattg

SEQ ID NO: 26408 - DNA, 25 bp, Canis familiaris
agtggctaccagcacaagcggatgc

SEQ ID NO: 26409 - DNA, 25 bp, Canis familiaris
agtggctaccaagcatcggagggca

SEQ ID NO: 26410 - DNA, 25 bp, Canis familiaris
agggctcagaaaggctcaggatggt

SEQ ID NO: 26411 - DNA, 25 bp, Canis familiaris
agggcacaagagggcttggggcgtg

SEQ ID NO: 26412 - DNA, 25 bp, Canis familiaris
agggcttatgaatcttgggtgtgtt

SEQ ID NO: 26413 - DNA, 25 bp, Canis familiaris
agggctgtaggattttgtggtgatt

SEQ ID NO: 26414 - DNA, 25 bp, Canis familiaris
agtggtctcggatcttggtgtgaat

SEQ ID NO: 26415 - DNA, 25 bp, Canis familiaris
agtgtgtgcctgggactgaggtggc

SEQ ID NO: 26416 - DNA, 25 bp, Canis familiaris
agtggctgccaggagattgttctag

SEQ ID NO: 26417 - DNA, 25 bp, Canis familiaris
agggcgcatatggaacggctctcag

SEQ ID NO: 26418 - DNA, 25 bp, Canis familiaris
agtgcacgatttacctggtctcagt

SEQ ID NO: 26419 - DNA, 25 bp, Canis familiaris
agtgaagtgttgacggggccagttt

SEQ ID NO: 26420 - DNA, 25 bp, Canis familiaris
agtgccaggtggacgggaggtgttt

SEQ ID NO: 26421 - DNA, 25 bp, Canis familiaris
agtccggggactcggagatcgagct

SEQ ID NO: 26422 - DNA, 25 bp, Canis familiaris
agtcctggaggaccagggtcagcgc

SEQ ID NO: 26423 - DNA, 25 bp, Canis familiaris
agcaccctgagggaagggcccaagg

SEQ ID NO: 26424 - DNA, 25 bp, Canis familiaris
agaccactcaaacaggaacccaagg

SEQ ID NO: 26425 - DNA, 25 bp, Canis familiaris
agactttaagacatggctgacctaa

SEQ ID NO: 26426 - DNA, 25 bp, Canis familiaris
agtttgttatactcgcagatcccaa

SEQ ID NO: 26427 - DNA, 25 bp, Canis familiaris
agttataacatcttcggagtccgaa

SEQ ID NO: 26428 - DNA, 25 bp, Canis familiaris
agtgctatatttctctggttaccaa

SEQ ID NO: 26429 - DNA, 25 bp, Canis familiaris
agcccgtaatttgggttcaccacat

SEQ ID NO: 26430 - DNA, 25 bp, Canis familiaris
agggcctaatatgttttcaggaatg

SEQ ID NO: 26431 - DNA, 25 bp, Canis familiaris
agggcctggatatacatttgcaatg

SEQ ID NO: 26432 - DNA, 25 bp, Canis familiaris
agggccttgttgtaagttgcctgtg

SEQ ID NO: 26433 - DNA, 25 bp, Canis familiaris
agtgccaagtttttcagttgccacg

SEQ ID NO: 26434 - DNA, 25 bp, Canis familiaris
agtgctaagtgtgaactggaccctg

SEQ ID NO: 26435 - DNA, 25 bp, Canis familiaris
agatcaggacggcaaagcgacgcct

SEQ ID NO: 26436 - DNA, 25 bp, Canis familiaris
agtgcaggaagacaaccagccagcc

SEQ ID NO: 26437 - DNA, 25 bp, Canis familiaris
agtgcatggctgtgctacagaccca

SEQ ID NO: 26438 - DNA, 25 bp, Canis familiaris
agtgctgagcatctcaagagccatt

SEQ ID NO: 26439 - DNA, 25 bp, Canis familiaris
agtgctactcgttatgtgatcattg

SEQ ID NO: 26440 - DNA, 25 bp, Canis familiaris
agtgaatctcaggcgcagcgcctcg

SEQ ID NO: 26441 - DNA, 25 bp, Canis familiaris
agtgcatttcagtacaagccctgta

SEQ ID NO: 26442 - DNA, 25 bp, Canis familiaris
agaccttctgaagagctccgataaa

SEQ ID NO: 26443 - DNA, 25 bp, Canis familiaris
agtcctctcccaggagtacctaaat

SEQ ID NO: 26444 - DNA, 25 bp, Canis familiaris
agtcctgctcaggatggcagttcct

SEQ ID NO: 26445 - DNA, 25 bp, Canis familiaris
agtcgtgtgcatcgggcagatcgtc

SEQ ID NO: 26446 - DNA, 25 bp, Canis familiaris
agtgctgcactgcggggatgagtcc

SEQ ID NO: 26447 - DNA, 25 bp, Canis familiaris
agtctgcgtgcccatgagaatgaga

SEQ ID NO: 26448 - DNA, 25 bp, Canis familiaris
agtgctggtgctgctgagcatggac

SEQ ID NO: 26449 - DNA, 25 bp, Canis familiaris
agggctgatctgtctggcatgtcag

SEQ ID NO: 26450 - DNA, 25 bp, Canis familiaris
agtggatgatcatcaggtccagttt

SEQ ID NO: 26451 - DNA, 25 bp, Canis familiaris
agggcatgatcttggagtcctggga

SEQ ID NO: 26452 - DNA, 25 bp, Canis familiaris
agggcatgatctgggagtcccgtga

SEQ ID NO: 26453 - DNA, 25 bp, Canis familiaris
agtggtgtttgatgtcacctctgga

SEQ ID NO: 26454 - DNA, 25 bp, Canis familiaris
agtggttttaggactcctctggtct

SEQ ID NO: 26455 - DNA, 25 bp, Canis familiaris
agtggatttgtataactcgctttca

SEQ ID NO: 26456 - DNA, 25 bp, Canis familiaris
agtgtgcagtggacacaaactcttt

SEQ ID NO: 26457 - DNA, 25 bp, Canis familiaris
agtggcagagagaagtcctcacctt

SEQ ID NO: 26458 - DNA, 25 bp, Canis familiaris
agtgggagagagacccagcacctct

SEQ ID NO: 26459 - DNA, 25 bp, Canis familiaris
agtgggagagagacgcctctctgcg

SEQ ID NO: 26460 - DNA, 25 bp, Canis familiaris
agtgggaatatactcaagctgtctg

SEQ ID NO: 26461 - DNA, 25 bp, Canis familiaris
agtggtgttcgactgcaagttcatc

SEQ ID NO: 26462 - DNA, 25 bp, Canis familiaris
agtgttttctgctgcaaagtctgcg

SEQ ID NO: 26463 - DNA, 25 bp, Canis familiaris
agtttatggtgcagaatggattgag

SEQ ID NO: 26464 - DNA, 25 bp, Canis familiaris
agatcatgtatgctcactttcgttg

SEQ ID NO: 26465 - DNA, 25 bp, Canis familiaris
agaaagacttccattggtttctggg

SEQ ID NO: 26466 - DNA, 25 bp, Canis familiaris
agtgaaatcttcacctggttctccg

SEQ ID NO: 26467 - DNA, 25 bp, Canis familiaris
agtaaataatttcccagttcatctg

SEQ ID NO: 26468 - DNA, 25 bp, Canis familiaris
agtcagatataatgtccaccttccc

SEQ ID NO: 26469 - DNA, 25 bp, Canis familiaris
agtaagacaatgccccatgtttccc

SEQ ID NO: 26470 - DNA, 25 bp, Canis familiaris
agtgtatccagatccacatcttcac

SEQ ID NO: 26471 - DNA, 25 bp, Canis familiaris
agtgatatcctttctgagctttcaa

SEQ ID NO: 26472 - DNA, 25 bp, Canis familiaris
agtgacactctgtgctggtaccaaa

SEQ ID NO: 26473 - DNA, 25 bp, Canis familiaris
agtgcacacatctgagttaaccaac

SEQ ID NO: 26474 - DNA, 25 bp, Canis familiaris
agtgacagttggtttaactacatgt

SEQ ID NO: 26475 - DNA, 25 bp, Canis familiaris
agtggcgttgtgtgctgaaaatcag

SEQ ID NO: 26476 - DNA, 25 bp, Canis familiaris
agtggcgtcgggctgcaagagaaaa

SEQ ID NO: 26477 - DNA, 25 bp, Canis familiaris
agtgcgcgatgccgggatcaaagtc

SEQ ID NO: 26478 - DNA, 25 bp, Canis familiaris
agtcacagactcaggaccaattgcg

SEQ ID NO: 26479 - DNA, 25 bp, Canis familiaris
agtcaaacatctagccgccaatatt

SEQ ID NO: 26480 - DNA, 25 bp, Canis familiaris
agtgaacctcaacagctactatgct

SEQ ID NO: 26481 - DNA, 25 bp, Canis familiaris
agtggtctccatttagatgacatcg

SEQ ID NO: 26482 - DNA, 25 bp, Canis familiaris
agtggatccactgctttgagaatgt

SEQ ID NO: 26483 - DNA, 25 bp, Canis familiaris
agtgcgatttctgcttttcgtgtac

SEQ ID NO: 26484 - DNA, 25 bp, Canis familiaris
agtggctttctgattttggtagtcc

SEQ ID NO: 26485 - DNA, 25 bp, Canis familiaris
agtcctgtatcaattcctgtggggt

SEQ ID NO: 26486 - DNA, 25 bp, Canis familiaris
agtcctatacaagaccatggattgt

SEQ ID NO: 26487 - DNA, 25 bp, Canis familiaris
agtcctatccaggtagaagtagtgt

SEQ ID NO: 26488 - DNA, 25 bp, Canis familiaris
agtccacatccatctcggagtattt

SEQ ID NO: 26489 - DNA, 25 bp, Canis familiaris
agtcccagcatctgttgagggtctc

SEQ ID NO: 26490 - DNA, 25 bp, Canis familiaris
agtggccaatgtggctggggcaggt

SEQ ID NO: 26491 - DNA, 25 bp, Canis familiaris
agtcatgcctacagcagtgggccgt

SEQ ID NO: 26492 - DNA, 25 bp, Canis familiaris
agtgtcgcatacaggtcaggctgcc

SEQ ID NO: 26493 - DNA, 25 bp, Canis familiaris
agtgtggcaaaggcctcgagtccac

SEQ ID NO: 26494 - DNA, 25 bp, Canis familiaris
agtgtggagaacgcctggggcatcc

SEQ ID NO: 26495 - DNA, 25 bp, Canis familiaris
agtagacgatgacccggtcggtctc

SEQ ID NO: 26496 - DNA, 25 bp, Canis familiaris
agtggatcgacacccaggtggtcct

SEQ ID NO: 26497 - DNA, 25 bp, Canis familiaris
agtgttggacaccggagtcagtccc

SEQ ID NO: 26498 - DNA, 25 bp, Canis familiaris
agtggtcgataccggtgcatcgtac

SEQ ID NO: 26499 - DNA, 25 bp, Canis familiaris
agtggtcagcagaccgagttcccac

SEQ ID NO: 26500 - DNA, 25 bp, Canis familiaris
agtgtgtagagtcccaggacacccc

SEQ ID NO: 26501 - DNA, 25 bp, Canis familiaris
agtggtggggcccaaagcatctggc

SEQ ID NO: 26502 - DNA, 25 bp, Canis familiaris
agtggagggagcagggagcatcgca

SEQ ID NO: 26503 - DNA, 25 bp, Canis familiaris
agtggagggcacagctatgcactcg

SEQ ID NO: 26504 - DNA, 25 bp, Canis familiaris
agtgcgggtcataagcttgcgttga

SEQ ID NO: 26505 - DNA, 25 bp, Canis familiaris
agctcgggtgccagtcagtgtagag

SEQ ID NO: 26506 - DNA, 25 bp, Canis familiaris
agtcggagactcatctcgacgggac

SEQ ID NO: 26507 - DNA, 25 bp, Canis familiaris
agtcggatagccacttgtagtccac

SEQ ID NO: 26508 - DNA, 25 bp, Canis familiaris
agtcttgaagccctcatttagacag

SEQ ID NO: 26509 - DNA, 25 bp, Canis familiaris
agtcgcaaatgccctctctggtgac

SEQ ID NO: 26510 - DNA, 25 bp, Canis familiaris
agtgcccgatatctgtgctgagtgt

SEQ ID NO: 26511 - DNA, 25 bp, Canis familiaris
agtcccaactaagtgccagtggcac

SEQ ID NO: 26512 - DNA, 25 bp, Canis familiaris
agtgcactaacatggagggctggac

SEQ ID NO: 26513 - DNA, 25 bp, Canis familiaris
agtcccaacattccagagtctcgac

SEQ ID NO: 26514 - DNA, 25 bp, Canis familiaris
agtccacacgtcccagggtgtgaat

SEQ ID NO: 26515 - DNA, 25 bp, Canis familiaris
agtacactactccctggggatgcct

SEQ ID NO: 26516 - DNA, 25 bp, Canis familiaris
agtgggctacatcagagtgcggttc

SEQ ID NO: 26517 - DNA, 25 bp, Canis familiaris
agtgtggctacatctagagtgcggt

SEQ ID NO: 26518 - DNA, 25 bp, Canis familiaris
agtgtgcctggcaccatggtaggtg

SEQ ID NO: 26519 - DNA, 25 bp, Canis familiaris
agtgtttgccgggagtgtgcgagtg

SEQ ID NO: 26520 - DNA, 25 bp, Canis familiaris
agtgctggtgtccaggactgtgggc

SEQ ID NO: 26521 - DNA, 25 bp, Canis familiaris
agtggttgcctcaggctggagggag

SEQ ID NO: 26522 - DNA, 25 bp, Canis familiaris
agtgtgttctgtaaagggtctggga

SEQ ID NO: 26523 - DNA, 25 bp, Canis familiaris
agtggacacgttaaccagtctggag

SEQ ID NO: 26524 - DNA, 25 bp, Canis familiaris
agtggacgctgttgaattttctgta

SEQ ID NO: 26525 - DNA, 25 bp, Canis familiaris
agtggttatgtctgcatttggttca

SEQ ID NO: 26526 - DNA, 25 bp, Canis familiaris
agtggtccagtttcattcttgtaca

SEQ ID NO: 26527 - DNA, 25 bp, Canis familiaris
agtggctacctttcatgtccaaaat

SEQ ID NO: 26528 - DNA, 25 bp, Canis familiaris
agtcctaccttgtgctcacattagt

SEQ ID NO: 26529 - DNA, 25 bp, Canis familiaris
agtcaagacctccagatttcattaa

SEQ ID NO: 26530 - DNA, 25 bp, Canis familiaris
agtgccagttctgagaaacagtcag

SEQ ID NO: 26531 - DNA, 25 bp, Canis familiaris
agtccagttgcgacaggcactagta

SEQ ID NO: 26532 - DNA, 25 bp, Canis familiaris
agtccatgattggcctggcctggct

SEQ ID NO: 26533 - DNA, 25 bp, Canis familiaris
agtcctcactggcctggacagtggg

SEQ ID NO: 26534 - DNA, 25 bp, Canis familiaris
agtacacctgggcgccagtgacatt

SEQ ID NO: 26535 - DNA, 25 bp, Canis familiaris
agtccagctctggggagccaggtga

SEQ ID NO: 26536 - DNA, 25 bp, Canis familiaris
agtgctcagcctgagacccaggatg

SEQ ID NO: 26537 - DNA, 25 bp, Canis familiaris
agtggagcctgtggaccagaggacc

SEQ ID NO: 26538 - DNA, 25 bp, Canis familiaris
agtggaactctggattgactggtca

SEQ ID NO: 26539 - DNA, 25 bp, Canis familiaris
agtggtgacgtggtccctggtcacc

SEQ ID NO: 26540 - DNA, 25 bp, Canis familiaris
agtggttcagggacaccattctctc

SEQ ID NO: 26541 - DNA, 25 bp, Canis familiaris
tttgaccttcaggacacactagtta

SEQ ID NO: 26542 - DNA, 25 bp, Canis familiaris
agtggtatagcacatacacatacac

SEQ ID NO: 26543 - DNA, 25 bp, Canis familiaris
agtggctgagacccgatattcacac

SEQ ID NO: 26544 - DNA, 25 bp, Canis familiaris
agtgactgatccgacttatctcacc

SEQ ID NO: 26545 - DNA, 25 bp, Canis familiaris
agtgatagctcacgacgtggatccc

SEQ ID NO: 26546 - DNA, 25 bp, Canis familiaris
agtgatagctcacgacgtggatccc

SEQ ID NO: 26547 - DNA, 25 bp, Canis familiaris
agtgatgagcgctgatctggtctcc

SEQ ID NO: 26548 - DNA, 25 bp, Canis familiaris
agtgatggccaattcatgtcctgca

SEQ ID NO: 26549 - DNA, 25 bp, Canis familiaris
agtgcttgccaatcataccatagtt

SEQ ID NO: 26550 - DNA, 25 bp, Canis familiaris
agtgttgccagacgcatgaccactg

SEQ ID NO: 26551 - DNA, 25 bp, Canis familiaris
agtgctctgcacagagctcctcact

SEQ ID NO: 26552 - DNA, 25 bp, Canis familiaris
agtcttcacttacttctacaagggg

SEQ ID NO: 26553 - DNA, 25 bp, Canis familiaris
agtgtctgcctttgtcttaggttgt

SEQ ID NO: 26554 - DNA, 25 bp, Canis familiaris
agtggctgccgttgttttaattctt

SEQ ID NO: 26555 - DNA, 25 bp, Canis familiaris
agtgtgacacgtttcagtttctcct

SEQ ID NO: 26556 - DNA, 25 bp, Canis familiaris
agtgtgttgggcatcagtgttttct

SEQ ID NO: 26557 - DNA, 25 bp, Canis familiaris
agtgttgggtctgagctgtgtagtt

SEQ ID NO: 26558 - DNA, 25 bp, Canis familiaris
agtgtttggatcacagcaggggcta

SEQ ID NO: 26559 - DNA, 25 bp, Canis familiaris
agtgtggtggctttgctgaggggcc

SEQ ID NO: 26560 - DNA, 25 bp, Canis familiaris
agtggagattgtctctacagtcccc

SEQ ID NO: 26561 - DNA, 25 bp, Canis familiaris
agtggagggggcattgctgttcccc

SEQ ID NO: 26562 - DNA, 25 bp, Canis familiaris
agtcaatgtgggcagttcggtcgtc

SEQ ID NO: 26563 - DNA, 25 bp, Canis familiaris
agtaggtggcggcctaaggctctgt

SEQ ID NO: 26564 - DNA, 25 bp, Canis familiaris
agtagttagctaggccggattcttt

SEQ ID NO: 26565 - DNA, 25 bp, Canis familiaris
agtggctctggatgagcccgtggct

SEQ ID NO: 26566 - DNA, 25 bp, Canis familiaris
agtagtaggaggcccacttggcggc

SEQ ID NO: 26567 - DNA, 25 bp, Canis familiaris
cagtaggggggctctttggacatga

SEQ ID NO: 26568 - DNA, 25 bp, Canis familiaris
agtgatggggtgccttttggtgttg

SEQ ID NO: 26569 - DNA, 25 bp, Canis familiaris
agtggcatgagcagccttttgggga

SEQ ID NO: 26570 - DNA, 25 bp, Canis familiaris
agtgttcaactgtcttttggtggaa

SEQ ID NO: 26571 - DNA, 25 bp, Canis familiaris
agtggtgctatttctcttttgtggc

SEQ ID NO: 26572 - DNA, 25 bp, Canis familiaris
agtgtttttggccatttctgtgtgt

SEQ ID NO: 26573 - DNA, 25 bp, Canis familiaris
agttctttcatagactcctttggag

SEQ ID NO: 26574 - DNA, 25 bp, Canis familiaris
agtccaggtataacattcctattgg

SEQ ID NO: 26575 - DNA, 25 bp, Canis familiaris
agtgcctggtgaaccaggtgtttgg

SEQ ID NO: 26576 - DNA, 25 bp, Canis familiaris
agtggggcatgaacgggtacttcct

SEQ ID NO: 26577 - DNA, 25 bp, Canis familiaris
agtgaggggcagtggtgcccttcct

SEQ ID NO: 26578 - DNA, 25 bp, Canis familiaris
agtgagggatgcctcagttccctcc

SEQ ID NO: 26579 - DNA, 25 bp, Canis familiaris
agtgcgtgaagagagctcgtcctcc

SEQ ID NO: 26580 - DNA, 25 bp, Canis familiaris
agtgatgctatctaggagtccttcc

SEQ ID NO: 26581 - DNA, 25 bp, Canis familiaris
agtgatgcttacatgggctgtgacc

SEQ ID NO: 26582 - DNA, 25 bp, Canis familiaris
agtgactctctttggtcttacacgt

SEQ ID NO: 26583 - DNA, 25 bp, Canis familiaris
agtgtgtctgcgtgtttacacccat

SEQ ID NO: 26584 - DNA, 25 bp, Canis familiaris
agtggtgtgtgatggtcaaccctct

SEQ ID NO: 26585 - DNA, 25 bp, Canis familiaris
agtgggtgctgcttatcaaactcct

SEQ ID NO: 26586 - DNA, 25 bp, Canis familiaris
agtgggctccaaataagacctctgc

SEQ ID NO: 26587 - DNA, 25 bp, Canis familiaris
agtgcagtttcaatcagaagccccg

SEQ ID NO: 26588 - DNA, 25 bp, Canis familiaris
agtgcatttcacctatgtagcctgc

SEQ ID NO: 26589 - DNA, 25 bp, Canis familiaris
agtgttgatacgatttcctgggaga

SEQ ID NO: 26590 - DNA, 25 bp, Canis familiaris
agtgttataaactgcttccaaggac

SEQ ID NO: 26591 - DNA, 25 bp, Canis familiaris
agttcttaaatgtggctaattctgt

SEQ ID NO: 26592 - DNA, 25 bp, Canis familiaris
agttctgtaaatcgcaactccttcc

SEQ ID NO: 26593 - DNA, 25 bp, Canis familiaris
agtgtcgcaaattccattcactccc

SEQ ID NO: 26594 - DNA, 25 bp, Canis familiaris
agtgtccagagatagcagtccttca

SEQ ID NO: 26595 - DNA, 25 bp, Canis familiaris
agtgcttcagaatacatatctccta

SEQ ID NO: 26596 - DNA, 25 bp, Canis familiaris
agtggtcaatacactgcttgctctt

SEQ ID NO: 26597 - DNA, 25 bp, Canis familiaris
agtggactataatgtcgactctggt

SEQ ID NO: 26598 - DNA, 25 bp, Canis familiaris
agtgtcctgaagaagctagagcctg

SEQ ID NO: 26599 - DNA, 25 bp, Canis familiaris
agtgcggtgaagagctgggccgtct

SEQ ID NO: 26600 - DNA, 25 bp, Canis familiaris
agtcagtgtggactggcggtaccct

SEQ ID NO: 26601 - DNA, 25 bp, Canis familiaris
agtgagtgtgggagcgactttgcct

SEQ ID NO: 26602 - DNA, 25 bp, Canis familiaris
agtggggacagtggcttcttagcct

SEQ ID NO: 26603 - DNA, 25 bp, Canis familiaris
agtggggcaagggcttcttggacct

SEQ ID NO: 26604 - DNA, 25 bp, Canis familiaris
agtggtccatagggctgtttgagtt

SEQ ID NO: 26605 - DNA, 25 bp, Canis familiaris
agtggttctagagtggcttgtgctg

SEQ ID NO: 26606 - DNA, 25 bp, Canis familiaris
agtggatatctcttggtgtgcttgt

SEQ ID NO: 26607 - DNA, 25 bp, Canis familiaris
agtgagtctgtgtgagtccttgtgt

SEQ ID NO: 26608 - DNA, 25 bp, Canis familiaris
agtgagcttatgtacagtttgtggt

SEQ ID NO: 26609 - DNA, 25 bp, Canis familiaris
agtgagttctgagcagcgtttgtgc

SEQ ID NO: 26610 - DNA, 25 bp, Canis familiaris
agtgagagtctaagccttatggctg

SEQ ID NO: 26611 - DNA, 25 bp, Canis familiaris
agtgatgatgtcgagatcggaatgg

SEQ ID NO: 26612 - DNA, 25 bp, Canis familiaris
agtgcagagctctagatgaggctgg

SEQ ID NO: 26613 - DNA, 25 bp, Canis familiaris
agtgcagagctgcactcagtgcaga

SEQ ID NO: 26614 - DNA, 25 bp, Canis familiaris
agtgatactgtacttctcagcagaa

SEQ ID NO: 26615 - DNA, 25 bp, Canis familiaris
agtgcacatggaacattctccagaa

SEQ ID NO: 26616 - DNA, 25 bp, Canis familiaris
agtgcagcccagaatgctttcaagg

SEQ ID NO: 26617 - DNA, 25 bp, Canis familiaris
agtgcaggccagagtcttcggtgcc

SEQ ID NO: 26618 - DNA, 25 bp, Canis familiaris
agtgcagtccttggtgctgtaggta

SEQ ID NO: 26619 - DNA, 25 bp, Canis familiaris
agtgaggcttctgggtgcataccag

SEQ ID NO: 26620 - DNA, 25 bp, Canis familiaris
agtcagagtcctgcgttacaactcc

SEQ ID NO: 26621 - DNA, 25 bp, Canis familiaris
agtgcggcttctgactaaatacatc

SEQ ID NO: 26622 - DNA, 25 bp, Canis familiaris
agtggttttcaaatcacaacaagca

SEQ ID NO: 26623 - DNA, 25 bp, Canis familiaris
agtggttcgcatcacttcaacaacg

SEQ ID NO: 26624 - DNA, 25 bp, Canis familiaris
agtggtatgagctgtattcgtaatc

SEQ ID NO: 26625 - DNA, 25 bp, Canis familiaris
agtggttggggtatggtgctagcta

SEQ ID NO: 26626 - DNA, 25 bp, Canis familiaris
agtggtggtgagctttgggttctat

SEQ ID NO: 26627 - DNA, 25 bp, Canis familiaris
agtgtgtgggggtaggaggctccct

SEQ ID NO: 26628 - DNA, 25 bp, Canis familiaris
agtctggggcttctgtaagcgccct

SEQ ID NO: 26629 - DNA, 25 bp, Canis familiaris
agttagtggctgattaacggctaca

SEQ ID NO: 26630 - DNA, 25 bp, Canis familiaris
agtctgagtggcttttacatcccca

SEQ ID NO: 26631 - DNA, 25 bp, Canis familiaris
agtccactggcgtcttcaccaccat

SEQ ID NO: 26632 - DNA, 25 bp, Canis familiaris
agtgtccttaattactctgtgcctc

SEQ ID NO: 26633 - DNA, 25 bp, Canis familiaris
agtgcccattagttatttgtccctg

SEQ ID NO: 26634 - DNA, 25 bp, Canis familiaris
agtgccacttaaactttgaagccat

SEQ ID NO: 26635 - DNA, 25 bp, Canis familiaris
agtcctttcaatctacaaactcatg

SEQ ID NO: 26636 - DNA, 25 bp, Canis familiaris
agtccatgttacctacaccaatttc

SEQ ID NO: 26637 - DNA, 25 bp, Canis familiaris
agtccatgtatatctacagcagtgt

SEQ ID NO: 26638 - DNA, 25 bp, Canis familiaris
agtcacgttttcacacagttgcagt

SEQ ID NO: 26639 - DNA, 25 bp, Canis familiaris
agtgccagtatgagtcacaacttga

SEQ ID NO: 26640 - DNA, 25 bp, Canis familiaris
agtgctggttgaatctgaccacttc

SEQ ID NO: 26641 - DNA, 25 bp, Canis familiaris
agtggtgtgtgaacggctcacccat

SEQ ID NO: 26642 - DNA, 25 bp, Canis familiaris
agtggatgggctactgccttttcta

SEQ ID NO: 26643 - DNA, 25 bp, Canis familiaris
agtggtgagtgaagatcctgtaatc

SEQ ID NO: 26644 - DNA, 25 bp, Canis familiaris
agtagtgtatgttagcctgtgcagt

SEQ ID NO: 26645 - DNA, 25 bp, Canis familiaris
agtggttgaatgtctgccttcagcc

SEQ ID NO: 26646 - DNA, 25 bp, Canis familiaris
agtggttcaatctggattcagcccg

SEQ ID NO: 26647 - DNA, 25 bp, Canis familiaris
agtcgcgtagactcgatcatcaggc

SEQ ID NO: 26648 - DNA, 25 bp, Canis familiaris
agtccaggaggctcagctatgccac

SEQ ID NO: 26649 - DNA, 25 bp, Canis familiaris
agtccagggaggtcacttcacagaa

SEQ ID NO: 26650 - DNA, 25 bp, Canis familiaris
agtgccaggtggagctcaacaggaa

SEQ ID NO: 26651 - DNA, 25 bp, Canis familiaris
agtccccaggggccaacaggacatg

SEQ ID NO: 26652 - DNA, 25 bp, Canis familiaris
agtttcgtgggggaccgcagaatgt

SEQ ID NO: 26653 - DNA, 25 bp, Canis familiaris
agtacacaggccagcttccaaaaat

SEQ ID NO: 26654 - DNA, 25 bp, Canis familiaris
agtgtccagcgctaggctggcaata

SEQ ID NO: 26655 - DNA, 25 bp, Canis familiaris
agtgtagagctctattgccgaataa

SEQ ID NO: 26656 - DNA, 25 bp, Canis familiaris
agtgaaactgcgaatggctcattaa

SEQ ID NO: 26657 - DNA, 25 bp, Canis familiaris
agtgagacctggaaactctgggaca

SEQ ID NO: 26658 - DNA, 25 bp, Canis familiaris
agtgagaagctctaactcgctggcg

SEQ ID NO: 26659 - DNA, 25 bp, Canis familiaris
agtgtagaccataagctgcttgcag

SEQ ID NO: 26660 - DNA, 25 bp, Canis familiaris
agtgcgacaatacatgctgcttcaa

SEQ ID NO: 26661 - DNA, 25 bp, Canis familiaris
agtgcagctcaatattagcttcagt

SEQ ID NO: 26662 - DNA, 25 bp, Canis familiaris
agtgcagcaacacatctgacttcaa

SEQ ID NO: 26663 - DNA, 25 bp, Canis familiaris
agtgctgagagccaactcacaccat

SEQ ID NO: 26664 - DNA, 25 bp, Canis familiaris
agtgtggacaagtctctcagccaac

SEQ ID NO: 26665 - DNA, 25 bp, Canis familiaris
agtgtagacaggttccacctgaccc

SEQ ID NO: 26666 - DNA, 25 bp, Canis familiaris
agtgcaagagcaagtgctgccaccg

SEQ ID NO: 26667 - DNA, 25 bp, Canis familiaris
agtgcaagacaggcactccacttgt

SEQ ID NO: 26668 - DNA, 25 bp, Canis familiaris
agtgcagatacaaccatcctgtttg

SEQ ID NO: 26669 - DNA, 25 bp, Canis familiaris
agtgcagtaaagcatacagaatatg

SEQ ID NO: 26670 - DNA, 25 bp, Canis familiaris
agtgaggaacaattgcagcaacaac

SEQ ID NO: 26671 - DNA, 25 bp, Canis familiaris
agtgaggacaattgcagcacaacct

SEQ ID NO: 26672 - DNA, 25 bp, Canis familiaris
agtgacgtcaacgagacacagccgc

SEQ ID NO: 26673 - DNA, 25 bp, Canis familiaris
agtgacagtgactgagtcccaggcc

SEQ ID NO: 26674 - DNA, 25 bp, Canis familiaris
agtgaagatgcctcagtcaccatcc

SEQ ID NO: 26675 - DNA, 25 bp, Canis familiaris
agtgtggaggctgcagctccatcac

SEQ ID NO: 26676 - DNA, 25 bp, Canis familiaris
agtgtcaggagctgcgctccatacc

SEQ ID NO: 26677 - DNA, 25 bp, Canis familiaris
agtgtcaggatgtgcctgtgtccct

SEQ ID NO: 26678 - DNA, 25 bp, Canis familiaris
agtgaagcctgaactctagcggcct

SEQ ID NO: 26679 - DNA, 25 bp, Canis familiaris
agtgaccggttccatagtgttctgt

SEQ ID NO: 26680 - DNA, 25 bp, Canis familiaris
cagttcctctatatgggtttcgacg

SEQ ID NO: 26681 - DNA, 25 bp, Canis familiaris
agttcctctatatgggtttcgacga

SEQ ID NO: 26682 - DNA, 25 bp, Canis familiaris
agttcctctatatgggtttcgacga

SEQ ID NO: 26683 - DNA, 25 bp, Canis familiaris
agttcctctatatgggtttcgacga

SEQ ID NO: 26684 - DNA, 25 bp, Canis familiaris
agttcctctatatgggtttcgacga

SEQ ID NO: 26685 - DNA, 25 bp, Canis familiaris
agttcctctatatgggtttcgacga

SEQ ID NO: 26686 - DNA, 25 bp, Canis familiaris
agttcccttaggcgtattgagaaag

SEQ ID NO: 26687 - DNA, 25 bp, Canis familiaris
agtgttcatttcacaagtaattaaa

SEQ ID NO: 26688 - DNA, 25 bp, Canis familiaris
agtgctttttatcttgaaattcaac

SEQ ID NO: 26689 - DNA, 25 bp, Canis familiaris
agtgtgattttatgatatgtagtaa

SEQ ID NO: 26690 - DNA, 25 bp, Canis familiaris
agtgctgctcatcgtatcagaagta

SEQ ID NO: 26691 - DNA, 25 bp, Canis familiaris
agtgctctgcatatctctgagatgt

SEQ ID NO: 26692 - DNA, 25 bp, Canis familiaris
agtgctgctgaaatcgctggtggtg

SEQ ID NO: 26693 - DNA, 25 bp, Canis familiaris
agtcgctgaacggcgtgcattatca

SEQ ID NO: 26694 - DNA, 25 bp, Canis familiaris
agtcctgaaagcggatgataaaaca

SEQ ID NO: 26695 - DNA, 25 bp, Canis familiaris
agtccaaatcctggatgagaccaca

SEQ ID NO: 26696 - DNA, 25 bp, Canis familiaris
agtcccttcgtgcattcatgcacac

SEQ ID NO: 26697 - DNA, 25 bp, Canis familiaris
agtgcgcctgtgctggatgtcagct

SEQ ID NO: 26698 - DNA, 25 bp, Canis familiaris
agtgatctgcttccattttcagctt

SEQ ID NO: 26699 - DNA, 25 bp, Canis familiaris
agtgttgcattgggcttctcagcct

SEQ ID NO: 26700 - DNA, 25 bp, Canis familiaris
agtgtagatcagggtgcaccagcct

SEQ ID NO: 26701 - DNA, 25 bp, Canis familiaris
agtgggacacagatgcagccagctc

SEQ ID NO: 26702 - DNA, 25 bp, Canis familiaris
agtgatctacaacttcgcagcactc

SEQ ID NO: 26703 - DNA, 25 bp, Canis familiaris
agtgatcagacctttgctcatgacc

SEQ ID NO: 26704 - DNA, 25 bp, Canis familiaris
agtgacaagagctctggatgcagac

SEQ ID NO: 26705 - DNA, 25 bp, Canis familiaris
agtgtgcaacatccacattgacagt

SEQ ID NO: 26706 - DNA, 25 bp, Canis familiaris
agtgtgcaacatccaaattgaacag

SEQ ID NO: 26707 - DNA, 25 bp, Canis familiaris
agtagctacatgccagtttggtcag

SEQ ID NO: 26708 - DNA, 25 bp, Canis familiaris
agtactaactaggtctggctcaggg

SEQ ID NO: 26709 - DNA, 25 bp, Canis familiaris
agtcctgaaacaggccagagccagg

SEQ ID NO: 26710 - DNA, 25 bp, Canis familiaris
agtcctttacccggacaagcactct

SEQ ID NO: 26711 - DNA, 25 bp, Canis familiaris
agtcctgcgtttcccaaagacagct

SEQ ID NO: 26712 - DNA, 25 bp, Canis familiaris
agtcctgcaggaatctccgacaagc

SEQ ID NO: 26713 - DNA, 25 bp, Canis familiaris
agttccgacatgactcaggatatga

SEQ ID NO: 26714 - DNA, 25 bp, Canis familiaris
agtgtggagtctgctcgtgattctc

SEQ ID NO: 26715 - DNA, 25 bp, Canis familiaris
agtgaggactctggtcactgtgtct

SEQ ID NO: 26716 - DNA, 25 bp, Canis familiaris
agtgaagaccatctagcttgatcta

SEQ ID NO: 26717 - DNA, 25 bp, Canis familiaris
agtgacgacaccatactcaacatca

SEQ ID NO: 26718 - DNA, 25 bp, Canis familiaris
agtgacctacctgcatctgagtcat

SEQ ID NO: 26719 - DNA, 25 bp, Canis familiaris
agtgtactgcagcatgctcatcggt

SEQ ID NO: 26720 - DNA, 25 bp, Canis familiaris
agtgctgaggagctctgagggtgcc

SEQ ID NO: 26721 - DNA, 25 bp, Canis familiaris
agtgctcggctggtcagcgaggtga

SEQ ID NO: 26722 - DNA, 25 bp, Canis familiaris
agtgtagctgtggtcactgtggctt

SEQ ID NO: 26723 - DNA, 25 bp, Canis familiaris
agtgcttgctggctcatttggtaga

SEQ ID NO: 26724 - DNA, 25 bp, Canis familiaris
agtgggtcgcatggattaggtatga

SEQ ID NO: 26725 - DNA, 25 bp, Canis familiaris
agtgggtcgcaggcattaggtatga

SEQ ID NO: 26726 - DNA, 25 bp, Canis familiaris
agtgcggtgtgagcggatgtgtata

SEQ ID NO: 26727 - DNA, 25 bp, Canis familiaris
agtgatggttgcacaacattgtgaa

SEQ ID NO: 26728 - DNA, 25 bp, Canis familiaris
agtgtgccttctcaaattatatata

SEQ ID NO: 26729 - DNA, 25 bp, Canis familiaris
agtgtctattctgacaattagggca

SEQ ID NO: 26730 - DNA, 25 bp, Canis familiaris
agtgtatcatatggcccagttacgc

SEQ ID NO: 26731 - DNA, 25 bp, Canis familiaris
agtgttcaatctgtcttatcacccc

SEQ ID NO: 26732 - DNA, 25 bp, Canis familiaris
agtgctgtaattgtcttttttttat

SEQ ID NO: 26733 - DNA, 25 bp, Canis familiaris
agtgtgataccttctgttttgtttt

SEQ ID NO: 26734 - DNA, 25 bp, Canis familiaris
agttgtaccgaaacatctacttctt

SEQ ID NO: 26735 - DNA, 25 bp, Canis familiaris
agacttactatggtgatcatcttca

SEQ ID NO: 26736 - DNA, 25 bp, Canis familiaris
agacttcatttgggttcaggaaaat

SEQ ID NO: 26737 - DNA, 25 bp, Canis familiaris
agtccttttatcgtatcaggaagta

SEQ ID NO: 26738 - DNA, 25 bp, Canis familiaris
agtcctcatggaacgtacaatttta

SEQ ID NO: 26739 - DNA, 25 bp, Canis familiaris
agtccacagtgtcttccaaattata

SEQ ID NO: 26740 - DNA, 25 bp, Canis familiaris
agtcccagtccaaaaatgagatttt

SEQ ID NO: 26741 - DNA, 25 bp, Canis familiaris
agtcccagattacactactatttct

SEQ ID NO: 26742 - DNA, 25 bp, Canis familiaris
agttgggattaatctgttatttagt

SEQ ID NO: 26743 - DNA, 25 bp, Canis familiaris
agtgtggaagatttttcttattccg

SEQ ID NO: 26744 - DNA, 25 bp, Canis familiaris
agtgaggactatcttcctccattcc

SEQ ID NO: 26745 - DNA, 25 bp, Canis familiaris
agtgggttgaacatcctgccatatt

SEQ ID NO: 26746 - DNA, 25 bp, Canis familiaris
agtgcggttgacttttcttcattag

SEQ ID NO: 26747 - DNA, 25 bp, Canis familiaris
agtgttttgagctttccttgtttgc

SEQ ID NO: 26748 - DNA, 25 bp, Canis familiaris
agtgtcttttatttgatttgttctg

SEQ ID NO: 26749 - DNA, 25 bp, Canis familiaris
agtgctctcgtcttaacatttgttt

SEQ ID NO: 26750 - DNA, 25 bp, Canis familiaris
agtgtgtgcagtgttacttctcttc

SEQ ID NO: 26751 - DNA, 25 bp, Canis familiaris
agtgcctgagttatacatctccagt

SEQ ID NO: 26752 - DNA, 25 bp, Canis familiaris
agtgccatgaaaattgaaccaagat

SEQ ID NO: 26753 - DNA, 25 bp, Canis familiaris
agtacagcagccactaaccagatgt

SEQ ID NO: 26754 - DNA, 25 bp, Canis familiaris
agtagcagatgccgttcaaaaggtc

SEQ ID NO: 26755 - DNA, 25 bp, Canis familiaris
agtgatgctgctgtgttcaacaact

SEQ ID NO: 26756 - DNA, 25 bp, Canis familiaris
agtgcatgtgatgtttccagtgaat

SEQ ID NO: 26757 - DNA, 25 bp, Canis familiaris
agtgtgtatctggttctgcatggaa

SEQ ID NO: 26758 - DNA, 25 bp, Canis familiaris
agtcatggtagagttgctaggaagt

SEQ ID NO: 26759 - DNA, 25 bp, Canis familiaris
agtgcagagtaggagaccagttgga

SEQ ID NO: 26760 - DNA, 25 bp, Canis familiaris
agtctggcgagatgaacactatgtg

SEQ ID NO: 26761 - DNA, 25 bp, Canis familiaris
agtctggcgtgatcaacattttgtt

SEQ ID NO: 26762 - DNA, 25 bp, Canis familiaris
agtctgttggtctagtttcctttgc

SEQ ID NO: 26763 - DNA, 25 bp, Canis familiaris
agttgtgtgggtctcattcctttat

SEQ ID NO: 26764 - DNA, 25 bp, Canis familiaris
agtctcgttgttctagttcgatgtt

SEQ ID NO: 26765 - DNA, 25 bp, Canis familiaris
agtgcttttttcttactgtaatctt

SEQ ID NO: 26766 - DNA, 25 bp, Canis familiaris
agtgttctttttgcaatgatctatt

SEQ ID NO: 26767 - DNA, 25 bp, Canis familiaris
agtgttctttaatgccttctgtgat

SEQ ID NO: 26768 - DNA, 25 bp, Canis familiaris
agtgtccttgtagtactatcatttt

SEQ ID NO: 26769 - DNA, 25 bp, Canis familiaris
agtcagcaaggtttactattatatg

SEQ ID NO: 26770 - DNA, 25 bp, Canis familiaris
agtgtccaggtgaaacgttgtaaga

SEQ ID NO: 26771 - DNA, 25 bp, Canis familiaris
agttgccagtggccgacgattcaac

SEQ ID NO: 26772 - DNA, 25 bp, Canis familiaris
agtgctaagatttcagaggattcat

SEQ ID NO: 26773 - DNA, 25 bp, Canis familiaris
agtgtatgatgagccacaagttcat

SEQ ID NO: 26774 - DNA, 25 bp, Canis familiaris
agtgctatgcattgaaacgtgtttt

SEQ ID NO: 26775 - DNA, 25 bp, Canis familiaris
agtgcttcattaaacgcttctcttc

SEQ ID NO: 26776 - DNA, 25 bp, Canis familiaris
agtgtggcattggcagacagcttct

SEQ ID NO: 26777 - DNA, 25 bp, Canis familiaris
agtgtgtcactggcagaaatgattg

SEQ ID NO: 26778 - DNA, 25 bp, Canis familiaris
agtgctgtgcctcattgaatttgga

SEQ ID NO: 26779 - DNA, 25 bp, Canis familiaris
agtcttcctcttgcgtttgtggagg

SEQ ID NO: 26780 - DNA, 25 bp, Canis familiaris
agtcttccactctggaggtctgaag

SEQ ID NO: 26781 - DNA, 25 bp, Canis familiaris
agtcgcatcctcaatgggcaggtct

SEQ ID NO: 26782 - DNA, 25 bp, Canis familiaris
agtgcgtgcccactgaggagttcaa

SEQ ID NO: 26783 - DNA, 25 bp, Canis familiaris
agtgtgtgcccactgggcagcacca

SEQ ID NO: 26784 - DNA, 25 bp, Canis familiaris
agtgtatgtcaactgcccagatgcc

SEQ ID NO: 26785 - DNA, 25 bp, Canis familiaris
agtgctctctgaaggatcacaggcc

SEQ ID NO: 26786 - DNA, 25 bp, Canis familiaris
agtgcctacattcatcattgtctcc

SEQ ID NO: 26787 - DNA, 25 bp, Canis familiaris
agtgcacttcatgtatttctaataa

SEQ ID NO: 26788 - DNA, 25 bp, Canis familiaris
agtgaaatcttgtcatttctaatga

SEQ ID NO: 26789 - DNA, 25 bp, Canis familiaris
agtgccaactccttctgttatgaga

SEQ ID NO: 26790 - DNA, 25 bp, Canis familiaris
agtgccatttccactgtaagccaga

SEQ ID NO: 26791 - DNA, 25 bp, Canis familiaris
agtgctttatcctttcaataccaga

SEQ ID NO: 26792 - DNA, 25 bp, Canis familiaris
agtgctttccactttaacacatccc

SEQ ID NO: 26793 - DNA, 25 bp, Canis familiaris
agtgttcatcctcagtaccaaatct

SEQ ID NO: 26794 - DNA, 25 bp, Canis familiaris
agctttaactaacactacaatggca

SEQ ID NO: 26795 - DNA, 25 bp, Canis familiaris
agttttgtagaaggccaaccaggca

SEQ ID NO: 26796 - DNA, 25 bp, Canis familiaris
agtaatttacacttggacagccggg

SEQ ID NO: 26797 - DNA, 25 bp, Canis familiaris
agtacatagtagacagtgggatcct

SEQ ID NO: 26798 - DNA, 25 bp, Canis familiaris
agtccagaatggagtccgactctgc

SEQ ID NO: 26799 - DNA, 25 bp, Canis familiaris
agtgctccaaggaggtagccctgcc

SEQ ID NO: 26800 - DNA, 25 bp, Canis familiaris
agtcccacaagatggcgaccagtcg

SEQ ID NO: 26801 - DNA, 25 bp, Canis familiaris
agtccacacacatcagaggggcggg

SEQ ID NO: 26802 - DNA, 25 bp, Canis familiaris
agtgcgcaataatcagacagggcct

SEQ ID NO: 26803 - DNA, 25 bp, Canis familiaris
agtgaactcacatagaaggcccttg

SEQ ID NO: 26804 - DNA, 25 bp, Canis familiaris
agtgcaacttacagaaaccatttca

SEQ ID NO: 26805 - DNA, 25 bp, Canis familiaris
agtgcagttctacaaaacctctata

SEQ ID NO: 26806 - DNA, 25 bp, Canis familiaris
agtctgttgctagaaaactctggga

SEQ ID NO: 26807 - DNA, 25 bp, Canis familiaris
agtcgtggtaccctggtgccaggga

SEQ ID NO: 26808 - DNA, 25 bp, Canis familiaris
agtgcacggtactgtggtctcagat

SEQ ID NO: 26809 - DNA, 25 bp, Canis familiaris
agtgcacgcgcgacaggagcgttga

SEQ ID NO: 26810 - DNA, 25 bp, Canis familiaris
agtccatgggaagtgagcgcgcaga

SEQ ID NO: 26811 - DNA, 25 bp, Canis familiaris
agtgccaaggaggtgaccgtggtca

SEQ ID NO: 26812 - DNA, 25 bp, Canis familiaris
agtgacaagggggagcagctgctgg

SEQ ID NO: 26813 - DNA, 25 bp, Canis familiaris
agtacatccggggacttgtgcgggc

SEQ ID NO: 26814 - DNA, 25 bp, Canis familiaris
agtcaactttgacaacgtgggcgcc

SEQ ID NO: 26815 - DNA, 25 bp, Canis familiaris
agtcgttttcagtacattgtagggc

SEQ ID NO: 26816 - DNA, 25 bp, Canis familiaris
agctcagtttcctactctttggaac

SEQ ID NO: 26817 - DNA, 25 bp, Canis familiaris
agtaattttctacttggaggtcaag

SEQ ID NO: 26818 - DNA, 25 bp, Canis familiaris
agtaattccctttcatgctgagtta

SEQ ID NO: 26819 - DNA, 25 bp, Canis familiaris
agtcaagtccctcttgtggcataac

SEQ ID NO: 26820 - DNA, 25 bp, Canis familiaris
agtaagtccctccagattcggagaa

SEQ ID NO: 26821 - DNA, 25 bp, Canis familiaris
agataaatgcccaaattattggaaa

SEQ ID NO: 26822 - DNA, 25 bp, Canis familiaris
agtcaaaccgtattccgttgaaatg

SEQ ID NO: 26823 - DNA, 25 bp, Canis familiaris
agtgcttcaccgaacttcagataaa

SEQ ID NO: 26824 - DNA, 25 bp, Canis familiaris
agtgttgcccactcattgtaagaac

SEQ ID NO: 26825 - DNA, 25 bp, Canis familiaris
agtgtatgcctcctatctttaaaaa

SEQ ID NO: 26826 - DNA, 25 bp, Canis familiaris
agtcgatgagacctatgttcccaaa

SEQ ID NO: 26827 - DNA, 25 bp, Canis familiaris
agatcgagggggagtcccacacgtc

SEQ ID NO: 26828 - DNA, 25 bp, Canis familiaris
agtccgtggaggagttcaccagggt

SEQ ID NO: 26829 - DNA, 25 bp, Canis familiaris
agtcaagggggcagatggcatccgc

SEQ ID NO: 26830 - DNA, 25 bp, Canis familiaris
agtcagcaggcgcgcaatattaccc

SEQ ID NO: 26831 - DNA, 25 bp, Canis familiaris
agtcgagaggtgcaatcttccctgc

SEQ ID NO: 26832 - DNA, 25 bp, Canis familiaris
agtccgggattcaatggatccgtga

SEQ ID NO: 26833 - DNA, 25 bp, Canis familiaris
agtccagtaatatattgtgcaagtg

SEQ ID NO: 26834 - DNA, 25 bp, Canis familiaris
agtccagcgaagtcactatacaagt

SEQ ID NO: 26835 - DNA, 25 bp, Canis familiaris
agtccctaggacattacagcagcgc

SEQ ID NO: 26836 - DNA, 25 bp, Canis familiaris
agtctctcgagtccttataatccta

SEQ ID NO: 26837 - DNA, 25 bp, Canis familiaris
agtgctccggatctatttttacaac

SEQ ID NO: 26838 - DNA, 25 bp, Canis familiaris
agtgctccgcctgtagtagttcagg

SEQ ID NO: 26839 - DNA, 25 bp, Canis familiaris
agtgtaaactgctcagtcagtgcta

SEQ ID NO: 26840 - DNA, 25 bp, Canis familiaris
agtgtacctctgttaggcagctcta

SEQ ID NO: 26841 - DNA, 25 bp, Canis familiaris
agtgttccttgtaagatatcttgca

SEQ ID NO: 26842 - DNA, 25 bp, Canis familiaris
agtgttccatatttaattctatcct

SEQ ID NO: 26843 - DNA, 25 bp, Canis familiaris
agtgttgtactctttttctaaagtg

SEQ ID NO: 26844 - DNA, 25 bp, Canis familiaris
agtgttttctatagtctctcacaaa

SEQ ID NO: 26845 - DNA, 25 bp, Canis familiaris
agtgtttgctgtttgtcactctcat

SEQ ID NO: 26846 - DNA, 25 bp, Canis familiaris
agtgcgagtgcgtgtgtgagtgcgt

SEQ ID NO: 26847 - DNA, 25 bp, Canis familiaris
agtcatgtgtactgtgaaatgctgt

SEQ ID NO: 26848 - DNA, 25 bp, Canis familiaris
agtcaggcgacgggagcgatgcgct

SEQ ID NO: 26849 - DNA, 25 bp, Canis familiaris
agtacctgacggctgagatcctgga

SEQ ID NO: 26850 - DNA, 25 bp, Canis familiaris
agtccctgcagggaggtgtacggcc

SEQ ID NO: 26851 - DNA, 25 bp, Canis familiaris
agtgttctcagatagtggtaagggt

SEQ ID NO: 26852 - DNA, 25 bp, Canis familiaris
agtgttctccactgggtaatgtgga

SEQ ID NO: 26853 - DNA, 25 bp, Canis familiaris
agtgttctcacaatttggttaattg

SEQ ID NO: 26854 - DNA, 25 bp, Canis familiaris
agtgatctcccatttttcttttatg

SEQ ID NO: 26855 - DNA, 25 bp, Canis familiaris
agtgtttccaatttcatgccattat

SEQ ID NO: 26856 - DNA, 25 bp, Canis familiaris
agtgtttcactctagataccttttg

SEQ ID NO: 26857 - DNA, 25 bp, Canis familiaris
agtgttgtagctcagactctttgcc

SEQ ID NO: 26858 - DNA, 25 bp, Canis familiaris
agtgttcaactatgacggtgtcgcg

SEQ ID NO: 26859 - DNA, 25 bp, Canis familiaris
agtgttcaaagcaggcccgagccgc

SEQ ID NO: 26860 - DNA, 25 bp, Canis familiaris
agtgttcaaagcaggcccgagccgc

SEQ ID NO: 26861 - DNA, 25 bp, Canis familiaris
agtgttcaaagcaggcccgagccgc

SEQ ID NO: 26862 - DNA, 25 bp, Canis familiaris
agtgttcaaagcaggcccgagccgc

SEQ ID NO: 26863 - DNA, 25 bp, Canis familiaris
agttaataaatccagccgcggtcct

SEQ ID NO: 26864 - DNA, 25 bp, Canis familiaris
agtgctaatagcaatcaacacgatg

SEQ ID NO: 26865 - DNA, 25 bp, Canis familiaris
agtgcaaggtgaagcaacaaatgct

SEQ ID NO: 26866 - DNA, 25 bp, Canis familiaris
agtgagaagtgaagcaccgactcat

SEQ ID NO: 26867 - DNA, 25 bp, Canis familiaris
agtgagatagtgccactcaccccat

SEQ ID NO: 26868 - DNA, 25 bp, Canis familiaris
agtgaatagagcagctcctccacgc

SEQ ID NO: 26869 - DNA, 25 bp, Canis familiaris
agtgcagaaagtggctcagctcctc

SEQ ID NO: 26870 - DNA, 25 bp, Canis familiaris
agtgaagtggcagcacagcccttgg

SEQ ID NO: 26871 - DNA, 25 bp, Canis familiaris
agtaagtgcgggtcataagcttgcg

SEQ ID NO: 26872 - DNA, 25 bp, Canis familiaris
agtaggaggggcaatcggctcgcat

SEQ ID NO: 26873 - DNA, 25 bp, Canis familiaris
agtaaagctgtgcaacggccacgtc

SEQ ID NO: 26874 - DNA, 25 bp, Canis familiaris
agtacaagctgtttcacacctcagg

SEQ ID NO: 26875 - DNA, 25 bp, Canis familiaris
agtgaaagtggcttccacaccgtgc

SEQ ID NO: 26876 - DNA, 25 bp, Canis familiaris
agtgaggaaccagcgcaagctcttg

SEQ ID NO: 26877 - DNA, 25 bp, Canis familiaris
agtatgacaacagcctcaagatcat

SEQ ID NO: 26878 - DNA, 25 bp, Canis familiaris
agtgagagcaacctcctacatgcat

SEQ ID NO: 26879 - DNA, 25 bp, Canis familiaris
agtacagaatcagtcaccctcatga

SEQ ID NO: 26880 - DNA, 25 bp, Canis familiaris
agtgaaaaatctactcgtatgtgtt

SEQ ID NO: 26881 - DNA, 25 bp, Canis familiaris
agtagaaagctgtgtcagtcgtatt

SEQ ID NO: 26882 - DNA, 25 bp, Canis familiaris
agtgagaggacgaggcaccttctgc

SEQ ID NO: 26883 - DNA, 25 bp, Canis familiaris
agtgcggtgaccaggaacatctcca

SEQ ID NO: 26884 - DNA, 25 bp, Canis familiaris
gattacctaccagaaaatcccaagg

SEQ ID NO: 26885 - DNA, 25 bp, Canis familiaris
gcgttccgaccgaacaaaccaagcg

SEQ ID NO: 26886 - DNA, 25 bp, Canis familiaris
agttgcctaggaaacaacccacctg

SEQ ID NO: 26887 - DNA, 25 bp, Canis familiaris
agtatcctctcgttacaaccagaac

SEQ ID NO: 26888 - DNA, 25 bp, Canis familiaris
agttacattcgttgaaggcacagaa

SEQ ID NO: 26889 - DNA, 25 bp, Canis familiaris
agtgatcctttttgacggaaccagt

SEQ ID NO: 26890 - DNA, 25 bp, Canis familiaris
agtgcatttctttcgaaggaccctt

SEQ ID NO: 26891 - DNA, 25 bp, Canis familiaris
agtgattccttcaggacagaccctc

SEQ ID NO: 26892 - DNA, 25 bp, Canis familiaris
agtacctgcttcagtacaacgaccc

SEQ ID NO: 26893 - DNA, 25 bp, Canis familiaris
agtcacactttgcgaaccattgcct

SEQ ID NO: 26894 - DNA, 25 bp, Canis familiaris
agtcagacttggcctactttaccat

SEQ ID NO: 26895 - DNA, 25 bp, Canis familiaris
agtcagagcagatgcctggtttccc

SEQ ID NO: 26896 - DNA, 25 bp, Canis familiaris
agtctaagcaacttgttttccctct

SEQ ID NO: 26897 - DNA, 25 bp, Canis familiaris
agttaataacttgatcttagctaat

SEQ ID NO: 26898 - DNA, 25 bp, Canis familiaris
agtgataaaacggcagatataactg

SEQ ID NO: 26899 - DNA, 25 bp, Canis familiaris
agtgttgaacacgcaaaaccaggga

SEQ ID NO: 26900 - DNA, 25 bp, Canis familiaris
agtgcttggagcaccaaatatcaag

SEQ ID NO: 26901 - DNA, 25 bp, Canis familiaris
agtgatatgtaacccttgaataggc

SEQ ID NO: 26902 - DNA, 25 bp, Canis familiaris
agtgatatggttccctttcattctc

SEQ ID NO: 26903 - DNA, 25 bp, Canis familiaris
agtactggtgtctcctataatgtcc

SEQ ID NO: 26904 - DNA, 25 bp, Canis familiaris
agctcctagtaatgcccagaattca

SEQ ID NO: 26905 - DNA, 25 bp, Canis familiaris
agtcctcactagaagcctgtggtct

SEQ ID NO: 26906 - DNA, 25 bp, Canis familiaris
agtcactttagtggccttgttttca

SEQ ID NO: 26907 - DNA, 25 bp, Canis familiaris
agtcattcttttgcctatatcttta

SEQ ID NO: 26908 - DNA, 25 bp, Canis familiaris
agtgctccctaagcttatatttcct

SEQ ID NO: 26909 - DNA, 25 bp, Canis familiaris
agtgctcccggaagtatgtatttga

SEQ ID NO: 26910 - DNA, 25 bp, Canis familiaris
agtgctatccgatgttgttatcctg

SEQ ID NO: 26911 - DNA, 25 bp, Canis familiaris
agtgctgtgggatgatgatgtgaat

SEQ ID NO: 26912 - DNA, 25 bp, Canis familiaris
agtgcctgtgattgtgtgttgccat

SEQ ID NO: 26913 - DNA, 25 bp, Canis familiaris
agagcttaagggtactgcatgcaga

SEQ ID NO: 26914 - DNA, 25 bp, Canis familiaris
agttgctcaagggtatcgacaggta

SEQ ID NO: 26915 - DNA, 25 bp, Canis familiaris
agtcgccaatgaagtcggacagctt

SEQ ID NO: 26916 - DNA, 25 bp, Canis familiaris
agtgcccacaatgggggtgcagctt

SEQ ID NO: 26917 - DNA, 25 bp, Canis familiaris
agtgcccctattgggtgtcatctgt

SEQ ID NO: 26918 - DNA, 25 bp, Canis familiaris
agtgcccctactatgagattatgtt

SEQ ID NO: 26919 - DNA, 25 bp, Canis familiaris
agtgccctaactacgattgacattt

SEQ ID NO: 26920 - DNA, 25 bp, Canis familiaris
agtgcctcataggtgacgatgtaca

SEQ ID NO: 26921 - DNA, 25 bp, Canis familiaris
agtgcttgctacagacaggatgaca

SEQ ID NO: 26922 - DNA, 25 bp, Canis familiaris
agtgccttatccccagagagaaaag

SEQ ID NO: 26923 - DNA, 25 bp, Canis familiaris
agtacatccccctggatcaaataga

SEQ ID NO: 26924 - DNA, 25 bp, Canis familiaris
agtctccctccctttagagaatgtc

SEQ ID NO: 26925 - DNA, 25 bp, Canis familiaris
agattgggttcctctcggaatgacg

SEQ ID NO: 26926 - DNA, 25 bp, Canis familiaris
agtactggtctcgccaagtcaagat

SEQ ID NO: 26927 - DNA, 25 bp, Canis familiaris
agtaggatgtttaccaaccctgata

SEQ ID NO: 26928 - DNA, 25 bp, Canis familiaris
agtagtggaattatcagacctctag

SEQ ID NO: 26929 - DNA, 25 bp, Canis familiaris
agtagtctagtaatctcagccctgg

SEQ ID NO: 26930 - DNA, 25 bp, Canis familiaris
agtgcagttataaattccttccatg

SEQ ID NO: 26931 - DNA, 25 bp, Canis familiaris
agctgggtaaactatctttgtaaca

SEQ ID NO: 26932 - DNA, 25 bp, Canis familiaris
agtgagtgtccaattatcttttaac

SEQ ID NO: 26933 - DNA, 25 bp, Canis familiaris
agtgcagcattccataattctttct

SEQ ID NO: 26934 - DNA, 25 bp, Canis familiaris
agtgcagtcctttgtatcttgatta

SEQ ID NO: 26935 - DNA, 25 bp, Canis familiaris
agtctgagtctttgtaattattgaa

SEQ ID NO: 26936 - DNA, 25 bp, Canis familiaris
agttcaatctgtgcaaatttcggta

SEQ ID NO: 26937 - DNA, 25 bp, Canis familiaris
agctccaattgcgcaacgtcggaaa

SEQ ID NO: 26938 - DNA, 25 bp, Canis familiaris
agtagaattggagaccctgaataat

SEQ ID NO: 26939 - DNA, 25 bp, Canis familiaris
agtagaattgctgtcccctacagat

SEQ ID NO: 26940 - DNA, 25 bp, Canis familiaris
agtaataatctcttcctaataaata

SEQ ID NO: 26941 - DNA, 25 bp, Canis familiaris
agtagatttgtcatccgtaggaata

SEQ ID NO: 26942 - DNA, 25 bp, Canis familiaris
agtcagattgtgtcctcctgtagct

SEQ ID NO: 26943 - DNA, 25 bp, Canis familiaris
agtgcagtcgtgatttcagtccatc

SEQ ID NO: 26944 - DNA, 25 bp, Canis familiaris
agtgctggctgtaaatgtcttctat

SEQ ID NO: 26945 - DNA, 25 bp, Canis familiaris
agtgcaattgtatcaatctgtgcta

SEQ ID NO: 26946 - DNA, 25 bp, Canis familiaris
agtccattgtgaggcttctgttagg

SEQ ID NO: 26947 - DNA, 25 bp, Canis familiaris
agtccaccgcgctttatttatgtgg

SEQ ID NO: 26948 - DNA, 25 bp, Canis familiaris
agaacaacttgtgcttttattagaa

SEQ ID NO: 26949 - DNA, 25 bp, Canis familiaris
agaaaacactttctctctggctgga

SEQ ID NO: 26950 - DNA, 25 bp, Canis familiaris
agttcagcaactttttctaggtgga

SEQ ID NO: 26951 - DNA, 25 bp, Canis familiaris
agattcacaaactgcccgagtgggc

SEQ ID NO: 26952 - DNA, 25 bp, Canis familiaris
agtacacattactagcccaatggtt

SEQ ID NO: 26953 - DNA, 25 bp, Canis familiaris
agtataatcaggaaacacaagtttg

SEQ ID NO: 26954 - DNA, 25 bp, Canis familiaris
agtaacctgtaagcctgagttctga

SEQ ID NO: 26955 - DNA, 25 bp, Canis familiaris
agtaccctagaaccactctttggat

SEQ ID NO: 26956 - DNA, 25 bp, Canis familiaris
agtaccccgaagtcagtaatatgta

SEQ ID NO: 26957 - DNA, 25 bp, Canis familiaris
agtcccacgaattacattacatttc

SEQ ID NO: 26958 - DNA, 25 bp, Canis familiaris
aaccaaccagtatataaccttgctt

SEQ ID NO: 26959 - DNA, 25 bp, Canis familiaris
agttttgccactcttaacactttct

SEQ ID NO: 26960 - DNA, 25 bp, Canis familiaris
agtcgttctcttgacaaacacgttg

SEQ ID NO: 26961 - DNA, 25 bp, Canis familiaris
agtgcaatattttaaccaacgcctt

SEQ ID NO: 26962 - DNA, 25 bp, Canis familiaris
agtctagatatcatcaacgcacccc

SEQ ID NO: 26963 - DNA, 25 bp, Canis familiaris
agatatcgtcatcagaaaccccggt

SEQ ID NO: 26964 - DNA, 25 bp, Canis familiaris
agtaggcgtgtagagtacccgtgtt

SEQ ID NO: 26965 - DNA, 25 bp, Canis familiaris
agtacggggagttcatgcacccctt

SEQ ID NO: 26966 - DNA, 25 bp, Canis familiaris
agtcagggggtgaccgatcaccggt

SEQ ID NO: 26967 - DNA, 25 bp, Canis familiaris
agtcgtgtacctgaggtgcaccggt

SEQ ID NO: 26968 - DNA, 25 bp, Canis familiaris
agtcgtgtacctgaggtgcaccggt

SEQ ID NO: 26969 - DNA, 25 bp, Canis familiaris
agtcgtgtacctgaggtgcaccggt

SEQ ID NO: 26970 - DNA, 25 bp, Canis familiaris
agtcgtgtacctgaggtgcaccggt

SEQ ID NO: 26971 - DNA, 25 bp, Canis familiaris
agtcgtgtacctgaggtgcaccggt

SEQ ID NO: 26972 - DNA, 25 bp, Canis familiaris
agtcttgttcctaatggtgctcacc

SEQ ID NO: 26973 - DNA, 25 bp, Canis familiaris
agtcttgtcatcctgaatttgcaca

SEQ ID NO: 26974 - DNA, 25 bp, Canis familiaris
agtcatatgattcctagttctgaga

SEQ ID NO: 26975 - DNA, 25 bp, Canis familiaris
agtcatagctgtcaacctcaagggc

SEQ ID NO: 26976 - DNA, 25 bp, Canis familiaris
agtcaatctgattaacccaccataa

SEQ ID NO: 26977 - DNA, 25 bp, Canis familiaris
agtgagcctattaaccgtgccatct

SEQ ID NO: 26978 - DNA, 25 bp, Canis familiaris
agtgagcttttctagtggctgcctc

SEQ ID NO: 26979 - DNA, 25 bp, Canis familiaris
agtgccttgcattaagtcgactctc

SEQ ID NO: 26980 - DNA, 25 bp, Canis familiaris
agtgctcattacaacacgtgtcctc

SEQ ID NO: 26981 - DNA, 25 bp, Canis familiaris
agtgcaactccaaactggacccaac

SEQ ID NO: 26982 - DNA, 25 bp, Canis familiaris
agtacaaccatggtctgaacccggc

SEQ ID NO: 26983 - DNA, 25 bp, Canis familiaris
agtaccaccattgcttatataagga

SEQ ID NO: 26984 - DNA, 25 bp, Canis familiaris
agtacctccagtgatttttaagcat

SEQ ID NO: 26985 - DNA, 25 bp, Canis familiaris
agtaggcattaaatattgtttacgt

SEQ ID NO: 26986 - DNA, 25 bp, Canis familiaris
agtctggattccattcttttcacca

SEQ ID NO: 26987 - DNA, 25 bp, Canis familiaris
agtgcatggtttatctctttccacc

SEQ ID NO: 26988 - DNA, 25 bp, Canis familiaris
agtgcaggggtgatctctgcttcct

SEQ ID NO: 26989 - DNA, 25 bp, Canis familiaris
agtgcatgaggcttcttgcttctta

SEQ ID NO: 26990 - DNA, 25 bp, Canis familiaris
agtgcaacgaacttctgtcctattt

SEQ ID NO: 26991 - DNA, 25 bp, Canis familiaris
agtaattagcagtgattcctcttaa

SEQ ID NO: 26992 - DNA, 25 bp, Canis familiaris
agtgacttgacctgtgacctcaaaa

SEQ ID NO: 26993 - DNA, 25 bp, Canis familiaris
agtagctatgaatatggcgcccaat

SEQ ID NO: 26994 - DNA, 25 bp, Canis familiaris
agtcaccgaaagagagcgcctatct

SEQ ID NO: 26995 - DNA, 25 bp, Canis familiaris
agtcctgcccaggtacagggctact

SEQ ID NO: 26996 - DNA, 25 bp, Canis familiaris
agtcctctggcacagaagggcaggc

SEQ ID NO: 26997 - DNA, 25 bp, Canis familiaris
agtcctgtggcacaacacatacagc

SEQ ID NO: 26998 - DNA, 25 bp, Canis familiaris
agtccatggggaaatccagacccaa

SEQ ID NO: 26999 - DNA, 25 bp, Canis familiaris
agtatataagttctccaaccccatg

SEQ ID NO: 27000 - DNA, 25 bp, Canis familiaris
agtagagaagaagccaaaccccagc

SEQ ID NO: 27001 - DNA, 25 bp, Canis familiaris
agtcaagtagcctcaaagaccctca

SEQ ID NO: 27002 - DNA, 25 bp, Canis familiaris
agtcaaatagtcacgactgccaccc

SEQ ID NO: 27003 - DNA, 25 bp, Canis familiaris
agtctaaactgagctagcagccccc

SEQ ID NO: 27004 - DNA, 25 bp, Canis familiaris
agtctagatcaccgtcgatcatccc

SEQ ID NO: 27005 - DNA, 25 bp, Canis familiaris
agtgaagtacagcctgactcaccgc

SEQ ID NO: 27006 - DNA, 25 bp, Canis familiaris
agcttattcggcgtgacgcatcgcg

SEQ ID NO: 27007 - DNA, 25 bp, Canis familiaris
agttatgatcggtctgacctggggg

SEQ ID NO: 27008 - DNA, 25 bp, Canis familiaris
agttattttgagacacctgggtggc

SEQ ID NO: 27009 - DNA, 25 bp, Canis familiaris
agttttttgaccacagcgggacact

SEQ ID NO: 27010 - DNA, 25 bp, Canis familiaris
agtttttttcaatcactgacttact

SEQ ID NO: 27011 - DNA, 25 bp, Canis familiaris
agtcttcctctcaaaaacggcaaca

SEQ ID NO: 27012 - DNA, 25 bp, Canis familiaris
agtctttcactgggaaggcgggcac

SEQ ID NO: 27013 - DNA, 25 bp, Canis familiaris
agttatataatgctgaaggggacca

SEQ ID NO: 27014 - DNA, 25 bp, Canis familiaris
agtattttagttgacggcaacactt

SEQ ID NO: 27015 - DNA, 25 bp, Canis familiaris
agtttctttgttgagtccgacttca

SEQ ID NO: 27016 - DNA, 25 bp, Canis familiaris
agtactttcgaagatgtcccttgta

SEQ ID NO: 27017 - DNA, 25 bp, Canis familiaris
agtacttgtgaatgacttcttcttg

SEQ ID NO: 27018 - DNA, 25 bp, Canis familiaris
agtaataaaacaggcttcatttatt

SEQ ID NO: 27019 - DNA, 25 bp, Canis familiaris
agtagataaaactgtgttgctcttt

SEQ ID NO: 27020 - DNA, 25 bp, Canis familiaris
agtattacttacaggcgtggctatt

SEQ ID NO: 27021 - DNA, 25 bp, Canis familiaris
agtattactaccagagcggctgcct

SEQ ID NO: 27022 - DNA, 25 bp, Canis familiaris
agtttagcatagcgtccaaggccct

SEQ ID NO: 27023 - DNA, 25 bp, Canis familiaris
agtctgtcaccactggtacagggcc

SEQ ID NO: 27024 - DNA, 25 bp, Canis familiaris
agtgcctgactcttggtttgggctc

SEQ ID NO: 27025 - DNA, 25 bp, Canis familiaris
agtgccttcctttgtattctggact

SEQ ID NO: 27026 - DNA, 25 bp, Canis familiaris
agtccattcccttttattgtcaagt

SEQ ID NO: 27027 - DNA, 25 bp, Canis familiaris
agtgcctttctgcagtttttcagga

SEQ ID NO: 27028 - DNA, 25 bp, Canis familiaris
agtgaatttagccggtgccttgagc

SEQ ID NO: 27029 - DNA, 25 bp, Canis familiaris
agtaaattcacacagcttctatgga

SEQ ID NO: 27030 - DNA, 25 bp, Canis familiaris
agtaaatttcccaatgctctagcgg

SEQ ID NO: 27031 - DNA, 25 bp, Canis familiaris
agtagcaatcctcacaatctgccat

SEQ ID NO: 27032 - DNA, 25 bp, Canis familiaris
agtctatcatccctgacaaagcctg

SEQ ID NO: 27033 - DNA, 25 bp, Canis familiaris
agtcaactcctaaagaagctctcag

SEQ ID NO: 27034 - DNA, 25 bp, Canis familiaris
agtaacttgccaaagtcccacagtc

SEQ ID NO: 27035 - DNA, 25 bp, Canis familiaris
agtagaggaccaggtgtccactggt

SEQ ID NO: 27036 - DNA, 25 bp, Canis familiaris
agtaagagactcgcgtctcatcggc

SEQ ID NO: 27037 - DNA, 25 bp, Canis familiaris
agtccagaaactttgttcatcaatc

SEQ ID NO: 27038 - DNA, 25 bp, Canis familiaris
agtccagaggagcaagtccctatcc

SEQ ID NO: 27039 - DNA, 25 bp, Canis familiaris
agtacaagtgacccaactccaattc

SEQ ID NO: 27040 - DNA, 25 bp, Canis familiaris
agttcaatggcagcccttctaaggt

SEQ ID NO: 27041 - DNA, 25 bp, Canis familiaris
agattgaggtgctccttttggggct

SEQ ID NO: 27042 - DNA, 25 bp, Canis familiaris
agtcgatggacttcctgatattgtt

SEQ ID NO: 27043 - DNA, 25 bp, Canis familiaris
agtccaggacctcagatctgtggca

SEQ ID NO: 27044 - DNA, 25 bp, Canis familiaris
agtccatggagcttgattctgggga

SEQ ID NO: 27045 - DNA, 25 bp, Canis familiaris
agtccagctcagagacctcggatga

SEQ ID NO: 27046 - DNA, 25 bp, Canis familiaris
agtcctgcatcgggacttgggagcc

SEQ ID NO: 27047 - DNA, 25 bp, Canis familiaris
agtcctcccaagttaggatggatcc

SEQ ID NO: 27048 - DNA, 25 bp, Canis familiaris
agtccccaaatgcccggcagagaga

SEQ ID NO: 27049 - DNA, 25 bp, Canis familiaris
agtgcccagaaaggaggaaggaatg

SEQ ID NO: 27050 - DNA, 25 bp, Canis familiaris
agtgcccggctagtggacgaggaat

SEQ ID NO: 27051 - DNA, 25 bp, Canis familiaris
agtcccagtgtactagtcagtgcgt

SEQ ID NO: 27052 - DNA, 25 bp, Canis familiaris
agttccgcgtacgagtcaggtaata

SEQ ID NO: 27053 - DNA, 25 bp, Canis familiaris
agtgctatcacgtcaaggaaggaga

SEQ ID NO: 27054 - DNA, 25 bp, Canis familiaris
agtgcatgtcctgccagggggacac

SEQ ID NO: 27055 - DNA, 25 bp, Canis familiaris
agtgcagctgttgaagggggccgtt

SEQ ID NO: 27056 - DNA, 25 bp, Canis familiaris
agctgacgtttgaactggaaccggt

SEQ ID NO: 27057 - DNA, 25 bp, Canis familiaris
agtacaggattggagcagggcccgg

SEQ ID NO: 27058 - DNA, 25 bp, Canis familiaris
agttcaggattgaaaggacttccag

SEQ ID NO: 27059 - DNA, 25 bp, Canis familiaris
agtttggggatgcctgggtagctca

SEQ ID NO: 27060 - DNA, 25 bp, Canis familiaris
agtcttgtagtgacgctcggtcgta

SEQ ID NO: 27061 - DNA, 25 bp, Canis familiaris
agtctttactgccacatcgggctaa

SEQ ID NO: 27062 - DNA, 25 bp, Canis familiaris
gatgtttcgaccgaacgacgtccaa

SEQ ID NO: 27063 - DNA, 25 bp, Canis familiaris
agttttgagccctggttgtacaaga

SEQ ID NO: 27064 - DNA, 25 bp, Canis familiaris
agtatttgaatacagtcttctaaaa

SEQ ID NO: 27065 - DNA, 25 bp, Canis familiaris
agtcaattactacccgtgttgtaca

SEQ ID NO: 27066 - DNA, 25 bp, Canis familiaris
agtaaatatgtatcacagttctcta

SEQ ID NO: 27067 - DNA, 25 bp, Canis familiaris
agtaacatgtgttccggttccaact

SEQ ID NO: 27068 - DNA, 25 bp, Canis familiaris
agtacagctttattaggcttaaaag

SEQ ID NO: 27069 - DNA, 25 bp, Canis familiaris
agtacctgctatttctggtccaaca

SEQ ID NO: 27070 - DNA, 25 bp, Canis familiaris
agtcgcctcatgtgaaggtccaata

SEQ ID NO: 27071 - DNA, 25 bp, Canis familiaris
agtgccccatttcatcaaccaatgg

SEQ ID NO: 27072 - DNA, 25 bp, Canis familiaris
agtgccaacctaaatctacctcagg

SEQ ID NO: 27073 - DNA, 25 bp, Canis familiaris
agtcacaacttcaaattccactcta

SEQ ID NO: 27074 - DNA, 25 bp, Canis familiaris
agtaagaatctgcaattcgcacgtt

SEQ ID NO: 27075 - DNA, 25 bp, Canis familiaris
agtcacgtatcgcgtgatctccgac

SEQ ID NO: 27076 - DNA, 25 bp, Canis familiaris
agtcattgaactctgtacccatagc

SEQ ID NO: 27077 - DNA, 25 bp, Canis familiaris
agtgcttttgtacctacactctagc

SEQ ID NO: 27078 - DNA, 25 bp, Canis familiaris
agtgctttcgtaccatggagcttgc

SEQ ID NO: 27079 - DNA, 25 bp, Canis familiaris
agtgcttttgtgttcagttatctgc

SEQ ID NO: 27080 - DNA, 25 bp, Canis familiaris
agtgctgcttgattttttcttctaa

SEQ ID NO: 27081 - DNA, 25 bp, Canis familiaris
agtgccttgcattctttgttacaaa

SEQ ID NO: 27082 - DNA, 25 bp, Canis familiaris
agtcctgctcttcttttatatgatc

SEQ ID NO: 27083 - DNA, 25 bp, Canis familiaris
agttctcctgtggttattccaagcc

SEQ ID NO: 27084 - DNA, 25 bp, Canis familiaris
agtcatccctgtagctatatcatcc

SEQ ID NO: 27085 - DNA, 25 bp, Canis familiaris
agtgcatttcatttgctttgctcac

SEQ ID NO: 27086 - DNA, 25 bp, Canis familiaris
agtgcatttctagaattgaccgttc

SEQ ID NO: 27087 - DNA, 25 bp, Canis familiaris
agtgcatgcatgttggggttacctt

SEQ ID NO: 27088 - DNA, 25 bp, Canis familiaris
agtgcatgcatgttggggttacctt

SEQ ID NO: 27089 - DNA, 25 bp, Canis familiaris
agtgcatgcatgttggggttacctt

SEQ ID NO: 27090 - DNA, 25 bp, Canis familiaris
agtgcatgcatgttggggttacctt

SEQ ID NO: 27091 - DNA, 25 bp, Canis familiaris
agtagtgatctgcggcgtacgcttc

SEQ ID NO: 27092 - DNA, 25 bp, Canis familiaris
agtatttgtccagcctgactgttgc

SEQ ID NO: 27093 - DNA, 25 bp, Canis familiaris
agtattttgtcaaccatcctttttg

SEQ ID NO: 27094 - DNA, 25 bp, Canis familiaris
agtacagggctcttcaaacttgttt

SEQ ID NO: 27095 - DNA, 25 bp, Canis familiaris
agtcaagggctcactttgttttgtt

SEQ ID NO: 27096 - DNA, 25 bp, Canis familiaris
agtaaagtgccattcctgtttcctt

SEQ ID NO: 27097 - DNA, 25 bp, Canis familiaris
agtacagaggcctgccttgctgatc

SEQ ID NO: 27098 - DNA, 25 bp, Canis familiaris
agtacgtggcaagtgcctgtgttcc

SEQ ID NO: 27099 - DNA, 25 bp, Canis familiaris
agtactgtgagccaggcggttcgct

SEQ ID NO: 27100 - DNA, 25 bp, Canis familiaris
agtacggctgccagcagtggtcatc

SEQ ID NO: 27101 - DNA, 25 bp, Canis familiaris
agtacttgctgcataggggccatgt

SEQ ID NO: 27102 - DNA, 25 bp, Canis familiaris
agtcatatctctgttgttgccaagt

SEQ ID NO: 27103 - DNA, 25 bp, Canis familiaris
cagaattcactctcgtgccgaattc

SEQ ID NO: 27104 - DNA, 25 bp, Canis familiaris
agataaggttaccgctcgtatctct

SEQ ID NO: 27105 - DNA, 25 bp, Canis familiaris
agtaagggtgatgcccgctatctca

SEQ ID NO: 27106 - DNA, 25 bp, Canis familiaris
agtagagtggcttctccacttttcc

SEQ ID NO: 27107 - DNA, 25 bp, Canis familiaris
agtagagatcccataccatctttcc

SEQ ID NO: 27108 - DNA, 25 bp, Canis familiaris
agatgactgaccgctacaactatcc

SEQ ID NO: 27109 - DNA, 25 bp, Canis familiaris
agtacatcctcggcaaaatctctgc

SEQ ID NO: 27110 - DNA, 25 bp, Canis familiaris
agtactcactgggccaagttaccta

SEQ ID NO: 27111 - DNA, 25 bp, Canis familiaris
agtaccttgtcagtcaatgttcact

SEQ ID NO: 27112 - DNA, 25 bp, Canis familiaris
agtacatttgataccaaaatgcact

SEQ ID NO: 27113 - DNA, 25 bp, Canis familiaris
agtaacattggaacaaactgcattg

SEQ ID NO: 27114 - DNA, 25 bp, Canis familiaris
agtaactctggacagtttgtttctg

SEQ ID NO: 27115 - DNA, 25 bp, Canis familiaris
agtcaatccggatatgaaggtttgg

SEQ ID NO: 27116 - DNA, 25 bp, Canis familiaris
agtcgcacccagagatgaagctttc

SEQ ID NO: 27117 - DNA, 25 bp, Canis familiaris
agtacccacgtccgatatgcatagt

SEQ ID NO: 27118 - DNA, 25 bp, Canis familiaris
agtaccccattgaacatggcattgt

SEQ ID NO: 27119 - DNA, 25 bp, Canis familiaris
agtaccccattgaacatggcattgt

SEQ ID NO: 27120 - DNA, 25 bp, Canis familiaris
agtacccctggagttgagagtgata

SEQ ID NO: 27121 - DNA, 25 bp, Canis familiaris
agtccccttggctctgggattgaac

SEQ ID NO: 27122 - DNA, 25 bp, Canis familiaris
agtccccctgtctgtgggtatgatc

SEQ ID NO: 27123 - DNA, 25 bp, Canis familiaris
agtcactacctgtcaaggtttgtgt

SEQ ID NO: 27124 - DNA, 25 bp, Canis familiaris
agtgcccaactgttataggttgttg

SEQ ID NO: 27125 - DNA, 25 bp, Canis familiaris
agtcccagagccgattcgatgtttt

SEQ ID NO: 27126 - DNA, 25 bp, Canis familiaris
agatcaccaagcacttcgtgttcta

SEQ ID NO: 27127 - DNA, 25 bp, Canis familiaris
agtcctgccaaagttcttgcattca

SEQ ID NO: 27128 - DNA, 25 bp, Canis familiaris
agtccgccagcaccatgaagtgcag

SEQ ID NO: 27129 - DNA, 25 bp, Canis familiaris
agtcctccagcaagaagagctcctc

SEQ ID NO: 27130 - DNA, 25 bp, Canis familiaris
agtcctgcagcagaggcaagtcttc

SEQ ID NO: 27131 - DNA, 25 bp, Canis familiaris
agtactgcacacacacaagttgccc

SEQ ID NO: 27132 - DNA, 25 bp, Canis familiaris
agtatcatgaaagccactggatgtg

SEQ ID NO: 27133 - DNA, 25 bp, Canis familiaris
agtcctcagacagcacattcttggt

SEQ ID NO: 27134 - DNA, 25 bp, Canis familiaris
agtctgtagaaggcttcctcgtctc

SEQ ID NO: 27135 - DNA, 25 bp, Canis familiaris
agtagggtgcacggtccctactgcc

SEQ ID NO: 27136 - DNA, 25 bp, Canis familiaris
agtagacagtcctgacccataagcc

SEQ ID NO: 27137 - DNA, 25 bp, Canis familiaris
agtacacagatcaggacggcaaagc

SEQ ID NO: 27138 - DNA, 25 bp, Canis familiaris
agtaccaagttccagggctgtcagc

SEQ ID NO: 27139 - DNA, 25 bp, Canis familiaris
agtaccggcatccggagtgcttcgt

SEQ ID NO: 27140 - DNA, 25 bp, Canis familiaris
agtagtcggatgcttggcacgtcgt

SEQ ID NO: 27141 - DNA, 25 bp, Canis familiaris
agtagtcaggtgcttaccctgctgt

SEQ ID NO: 27142 - DNA, 25 bp, Canis familiaris
agtagtcagcgatattgtaatagcg

SEQ ID NO: 27143 - DNA, 25 bp, Canis familiaris
agtcgatgacgataatgcctctagc

SEQ ID NO: 27144 - DNA, 25 bp, Canis familiaris
agtcctcgatactattcgcttagcc

SEQ ID NO: 27145 - DNA, 25 bp, Canis familiaris
agtgcccgagactatatatgttata

SEQ ID NO: 27146 - DNA, 25 bp, Canis familiaris
agtcctctagaggtatagtgcaaag

SEQ ID NO: 27147 - DNA, 25 bp, Canis familiaris
agtcctcaaggaatgccagtgcata

SEQ ID NO: 27148 - DNA, 25 bp, Canis familiaris
agtccatcaatgtcttgtagtgctc

SEQ ID NO: 27149 - DNA, 25 bp, Canis familiaris
agtcttccatattactagatgtgaa

SEQ ID NO: 27150 - DNA, 25 bp, Canis familiaris
agtctcttagtgtacatgtgctgtg

SEQ ID NO: 27151 - DNA, 25 bp, Canis familiaris
agtctccacagattgacggcggggc

SEQ ID NO: 27152 - DNA, 25 bp, Canis familiaris
agatctccaagcatccgacggagta

SEQ ID NO: 27153 - DNA, 25 bp, Canis familiaris
agtaccatagtattctgactggact

SEQ ID NO: 27154 - DNA, 25 bp, Canis familiaris
agtacccaaggtagtctagtctaag

SEQ ID NO: 27155 - DNA, 25 bp, Canis familiaris
agtaacaccggcggtctggttgcac

SEQ ID NO: 27156 - DNA, 25 bp, Canis familiaris
agtcaggccggtgctgactggggca

SEQ ID NO: 27157 - DNA, 25 bp, Canis familiaris
agtcattgcgggaccgcgtggaaga

SEQ ID NO: 27158 - DNA, 25 bp, Canis familiaris
agtacctggtgaaagctgtggccaa

SEQ ID NO: 27159 - DNA, 25 bp, Canis familiaris
agtccctgtctgtggctatgtgaca

SEQ ID NO: 27160 - DNA, 25 bp, Canis familiaris
agtctcctgtcctgaatagtgctaa

SEQ ID NO: 27161 - DNA, 25 bp, Canis familiaris
agtctaaactgtctatagtgctgag

SEQ ID NO: 27162 - DNA, 25 bp, Canis familiaris
agtcataacatctatgcaattattt

SEQ ID NO: 27163 - DNA, 25 bp, Canis familiaris
agtgcctaacatcgcatttcattta

SEQ ID NO: 27164 - DNA, 25 bp, Canis familiaris
agtgcctaacatcgcatttcattta

SEQ ID NO: 27165 - DNA, 25 bp, Canis familiaris
agtgcctaacatcgcatttcattta

SEQ ID NO: 27166 - DNA, 25 bp, Canis familiaris
agtgcctaacatcgcatttcattta

SEQ ID NO: 27167 - DNA, 25 bp, Canis familiaris
agtgcctaacatcgcatttcattta

SEQ ID NO: 27168 - DNA, 25 bp, Canis familiaris
agtgccacaaatcgaaagcttccat

SEQ ID NO: 27169 - DNA, 25 bp, Canis familiaris
agtcttcagactcgatggggtcctg

SEQ ID NO: 27170 - DNA, 25 bp, Canis familiaris
agtcctgagatgtgtggggctcgcg

SEQ ID NO: 27171 - DNA, 25 bp, Canis familiaris
agtcccgattgttagcatggctcac

SEQ ID NO: 27172 - DNA, 25 bp, Canis familiaris
agtgcccgagtggaggcacctgcag

SEQ ID NO: 27173 - DNA, 25 bp, Canis familiaris
agtgccagcgggtgaggcgtgcagt

SEQ ID NO: 27174 - DNA, 25 bp, Canis familiaris
agtgccagcgggtgataaggagatg

SEQ ID NO: 27175 - DNA, 25 bp, Canis familiaris
agtgccatgcgttcgctgaaaggca

SEQ ID NO: 27176 - DNA, 25 bp, Canis familiaris
agtcccgtctcagtgcagaaggcac

SEQ ID NO: 27177 - DNA, 25 bp, Canis familiaris
agtcctggactcctctaatgtgacc

SEQ ID NO: 27178 - DNA, 25 bp, Canis familiaris
agtgcctatgaccttcaatttaccc

SEQ ID NO: 27179 - DNA, 25 bp, Canis familiaris
agtccttgtggcataacttgtacac

SEQ ID NO: 27180 - DNA, 25 bp, Canis familiaris
agtgccattggttatagacttacaa

SEQ ID NO: 27181 - DNA, 25 bp, Canis familiaris
agtccttacgactaacttacagaag

SEQ ID NO: 27182 - DNA, 25 bp, Canis familiaris
agtcctattcaacttagctttcgaa

SEQ ID NO: 27183 - DNA, 25 bp, Canis familiaris
agtcttttaactaggcatgcttata

SEQ ID NO: 27184 - DNA, 25 bp, Canis familiaris
agtcttttgcattcttgtcaggcta

SEQ ID NO: 27185 - DNA, 25 bp, Canis familiaris
agtctcgaatgatctggtcagcact

SEQ ID NO: 27186 - DNA, 25 bp, Canis familiaris
agtccgaatctgtggatggcacccg

SEQ ID NO: 27187 - DNA, 25 bp, Canis familiaris
agtgcctagaaggggctacacccac

SEQ ID NO: 27188 - DNA, 25 bp, Canis familiaris
agatctcaaaagagttgaacctcat

SEQ ID NO: 27189 - DNA, 25 bp, Canis familiaris
agtctttgaagagcttacggacatc

SEQ ID NO: 27190 - DNA, 25 bp, Canis familiaris
agttttgcaaagttttccgagtgtg

SEQ ID NO: 27191 - DNA, 25 bp, Canis familiaris
agtccctgcaaaatgcttctacggt

SEQ ID NO: 27192 - DNA, 25 bp, Canis familiaris
agtacttcaccattctttactgtta

SEQ ID NO: 27193 - DNA, 25 bp, Canis familiaris
agtcactaactcactgaactctctt

SEQ ID NO: 27194 - DNA, 25 bp, Canis familiaris
agtacttaccaggagcaacttatgt

SEQ ID NO: 27195 - DNA, 25 bp, Canis familiaris
agtccttaccactgattttgtgtgt

SEQ ID NO: 27196 - DNA, 25 bp, Canis familiaris
agtctattcgacacgattcgttggt

SEQ ID NO: 27197 - DNA, 25 bp, Canis familiaris
agtatgttggagaatctttggtctg

SEQ ID NO: 27198 - DNA, 25 bp, Canis familiaris
agtctgagtctagctctcattggcc

SEQ ID NO: 27199 - DNA, 25 bp, Canis familiaris
agtccagctctaggttcttagtctt

SEQ ID NO: 27200 - DNA, 25 bp, Canis familiaris
agtactgtgctatgagcttatcgta

SEQ ID NO: 27201 - DNA, 25 bp, Canis familiaris
agtacgtgctaagctcgtgcagtcg

SEQ ID NO: 27202 - DNA, 25 bp, Canis familiaris
agtacgtgtctatctcaggaccact

SEQ ID NO: 27203 - DNA, 25 bp, Canis familiaris
agtaggattctaacccagcaggcct

SEQ ID NO: 27204 - DNA, 25 bp, Canis familiaris
agtcagaactctgacctagtgcgcc

SEQ ID NO: 27205 - DNA, 25 bp, Canis familiaris
agtcagagagtcagacctcctgcac

SEQ ID NO: 27206 - DNA, 25 bp, Canis familiaris
agtagaagtgggccgtgcctatttt

SEQ ID NO: 27207 - DNA, 25 bp, Canis familiaris
agtactacatgggcttggccgaaga

SEQ ID NO: 27208 - DNA, 25 bp, Canis familiaris
agtactacatgggcttagctgaaga

SEQ ID NO: 27209 - DNA, 25 bp, Canis familiaris
agtacttcatgtacatttgtgaatt

SEQ ID NO: 27210 - DNA, 25 bp, Canis familiaris
agtccttcatttatttacgtggtct

SEQ ID NO: 27211 - DNA, 25 bp, Canis familiaris
agtccttctttttgtgggcttgaga

SEQ ID NO: 27212 - DNA, 25 bp, Canis familiaris
agtccctgtgttttgtgttgtttga

SEQ ID NO: 27213 - DNA, 25 bp, Canis familiaris
agtccaaggttgtggctgtttggcc

SEQ ID NO: 27214 - DNA, 25 bp, Canis familiaris
agtcccaggatcaggtgccatattg

SEQ ID NO: 27215 - DNA, 25 bp, Canis familiaris
agtcctagatgtgggctgtgccctt

SEQ ID NO: 27216 - DNA, 25 bp, Canis familiaris
agtccaggtgtggcagcttctacat

SEQ ID NO: 27217 - DNA, 25 bp, Canis familiaris
agtcctgggatcgagttctgcatcg

SEQ ID NO: 27218 - DNA, 25 bp, Canis familiaris
agtcttaaatctgttctgctcctag

SEQ ID NO: 27219 - DNA, 25 bp, Canis familiaris
agttttattcgcatttgtccacttc

SEQ ID NO: 27220 - DNA, 25 bp, Canis familiaris
agtccttcatttattattgccagat

SEQ ID NO: 27221 - DNA, 25 bp, Canis familiaris
agtctctatctaatggtgaatcgcc

SEQ ID NO: 27222 - DNA, 25 bp, Canis familiaris
agtcgttttgtgctatagccactcc

SEQ ID NO: 27223 - DNA, 25 bp, Canis familiaris
agtcttgtttatttaagccatcttt

SEQ ID NO: 27224 - DNA, 25 bp, Canis familiaris
agtcctgttcagaaagaggcccttc

SEQ ID NO: 27225 - DNA, 25 bp, Canis familiaris
agtcctaataatgagagtcccttga

SEQ ID NO: 27226 - DNA, 25 bp, Canis familiaris
agtttgtacagtgaagtcccttggg

SEQ ID NO: 27227 - DNA, 25 bp, Canis familiaris
agtttgtacaatgatgaccgccaag

SEQ ID NO: 27228 - DNA, 25 bp, Canis familiaris
agttttaattcggccatcccaagat

SEQ ID NO: 27229 - DNA, 25 bp, Canis familiaris
agttctctaagtgcccctaggcagt

SEQ ID NO: 27230 - DNA, 25 bp, Canis familiaris
agttcttaaatagcagcaccagtaa

SEQ ID NO: 27231 - DNA, 25 bp, Canis familiaris
agttaaacctatgccaccagactac

SEQ ID NO: 27232 - DNA, 25 bp, Canis familiaris
agttaaacttatcttcatcgaatga

SEQ ID NO: 27233 - DNA, 25 bp, Canis familiaris
agttgaaaatgtatttcctgaaata

SEQ ID NO: 27234 - DNA, 25 bp, Canis familiaris
agttgtaaaattcttcctcatagtc

SEQ ID NO: 27235 - DNA, 25 bp, Canis familiaris
agttaaaaatataccaccttgagat

SEQ ID NO: 27236 - DNA, 25 bp, Canis familiaris
agattacataaaatttcctgggaat

SEQ ID NO: 27237 - DNA, 25 bp, Canis familiaris
agtagtctaaaattttctgagtatt

SEQ ID NO: 27238 - DNA, 25 bp, Canis familiaris
agtattctcagatatgatttcaaaa

SEQ ID NO: 27239 - DNA, 25 bp, Canis familiaris
agttctccagttgttctattagcat

SEQ ID NO: 27240 - DNA, 25 bp, Canis familiaris
agtccccatggagattatctttgat

SEQ ID NO: 27241 - DNA, 25 bp, Canis familiaris
agtccccatggagatatcttgataa

SEQ ID NO: 27242 - DNA, 25 bp, Canis familiaris
agtcctcctatatgttctttgcaag

SEQ ID NO: 27243 - DNA, 25 bp, Canis familiaris
agtcgccatctagcatttgtttcaa

SEQ ID NO: 27244 - DNA, 25 bp, Canis familiaris
agtaccctacttttgatttcagctc

SEQ ID NO: 27245 - DNA, 25 bp, Canis familiaris
agtagctccatcatttattttcctc

SEQ ID NO: 27246 - DNA, 25 bp, Canis familiaris
agtagcgcttctttttatgttccac

SEQ ID NO: 27247 - DNA, 25 bp, Canis familiaris
agtaccttgagctcttagtgattga

SEQ ID NO: 27248 - DNA, 25 bp, Canis familiaris
agtacctcatagtccttcgtgtacc

SEQ ID NO: 27249 - DNA, 25 bp, Canis familiaris
agtacatcattactcagttcaagta

SEQ ID NO: 27250 - DNA, 25 bp, Canis familiaris
agtaacatctactattccattctat

SEQ ID NO: 27251 - DNA, 25 bp, Canis familiaris
agtctacttcaccaatcgactcttt

SEQ ID NO: 27252 - DNA, 25 bp, Canis familiaris
agtctactgtgcaatgaatcactgt

SEQ ID NO: 27253 - DNA, 25 bp, Canis familiaris
agtcttggttatttcctgtggtcag

SEQ ID NO: 27254 - DNA, 25 bp, Canis familiaris
agtctggtgccatttcttttagtga

SEQ ID NO: 27255 - DNA, 25 bp, Canis familiaris
agtcatgatggcaatttctgtataa

SEQ ID NO: 27256 - DNA, 25 bp, Canis familiaris
agtcagctggcttcttagcctgagc

SEQ ID NO: 27257 - DNA, 25 bp, Canis familiaris
agtcatgggatccttggcatccact

SEQ ID NO: 27258 - DNA, 25 bp, Canis familiaris
agtcagcagtgaacttgtcagccaa

SEQ ID NO: 27259 - DNA, 25 bp, Canis familiaris
agtcagggtcacattgatctatgaa

SEQ ID NO: 27260 - DNA, 25 bp, Canis familiaris
agacgtgtaaatgttcctgcaaaaa

SEQ ID NO: 27261 - DNA, 25 bp, Canis familiaris
agttattttatgattcccacaaaca

SEQ ID NO: 27262 - DNA, 25 bp, Canis familiaris
agtattggtaggtttgcgtcaacaa

SEQ ID NO: 27263 - DNA, 25 bp, Canis familiaris
agttgggctgggacttggtacatct

SEQ ID NO: 27264 - DNA, 25 bp, Canis familiaris
agttgggctgggacttggtacatct

SEQ ID NO: 27265 - DNA, 25 bp, Canis familiaris
agttgggctgggacttggtacatct

SEQ ID NO: 27266 - DNA, 25 bp, Canis familiaris
agtagggagcttacttctccctctt

SEQ ID NO: 27267 - DNA, 25 bp, Canis familiaris
agtcaagtagtggatttctccctcc

SEQ ID NO: 27268 - DNA, 25 bp, Canis familiaris
agtcatttagtggctctgactccct

SEQ ID NO: 27269 - DNA, 25 bp, Canis familiaris
agtctactggtgtcttcaccaccat

SEQ ID NO: 27270 - DNA, 25 bp, Canis familiaris
agtctactggtgtcttcaccaccat

SEQ ID NO: 27271 - DNA, 25 bp, Canis familiaris
agtccctggtgctggcaacagcagc

SEQ ID NO: 27272 - DNA, 25 bp, Canis familiaris
agtcccgatgactctgaaagtgatt

SEQ ID NO: 27273 - DNA, 25 bp, Canis familiaris
agtccctcttctgctaacagttatc

SEQ ID NO: 27274 - DNA, 25 bp, Canis familiaris
agtccccttgtctgaggatttctgc

SEQ ID NO: 27275 - DNA, 25 bp, Canis familiaris
agacccgtattacaggtatttcatc

SEQ ID NO: 27276 - DNA, 25 bp, Canis familiaris
agacccgtgtttgatagttctttca

SEQ ID NO: 27277 - DNA, 25 bp, Canis familiaris
agaccacgttttgatcctgttggcc

SEQ ID NO: 27278 - DNA, 25 bp, Canis familiaris
agagctttggatttggtgccgagtc

SEQ ID NO: 27279 - DNA, 25 bp, Canis familiaris
agtctgtgttgctctggaccaactc

SEQ ID NO: 27280 - DNA, 25 bp, Canis familiaris
agtctgtgaattgctgaacctggct

SEQ ID NO: 27281 - DNA, 25 bp, Canis familiaris
agtctggaatctgatccctagctct

SEQ ID NO: 27282 - DNA, 25 bp, Canis familiaris
agtctggaagcccaccttgaatttt

SEQ ID NO: 27283 - DNA, 25 bp, Canis familiaris
agtctcaagactgcccagttttttt

SEQ ID NO: 27284 - DNA, 25 bp, Canis familiaris
agttaagactcacgaaactcttcta

SEQ ID NO: 27285 - DNA, 25 bp, Canis familiaris
agttactggtcacaaaagctcattt

SEQ ID NO: 27286 - DNA, 25 bp, Canis familiaris
agtacctggacgacagaaacacttt

SEQ ID NO: 27287 - DNA, 25 bp, Canis familiaris
agtccccaactgtaaaagcatcaat

SEQ ID NO: 27288 - DNA, 25 bp, Canis familiaris
agtccccagggattaacagatcaga

SEQ ID NO: 27289 - DNA, 25 bp, Canis familiaris
agtcttccaggggacacatcctaga

SEQ ID NO: 27290 - DNA, 25 bp, Canis familiaris
agtcttccagggaccatcctaaaat

SEQ ID NO: 27291 - DNA, 25 bp, Canis familiaris
agtcttccaggcttggccggaaaga

SEQ ID NO: 27292 - DNA, 25 bp, Canis familiaris
agatctacacggaggccaagaaggt

SEQ ID NO: 27293 - DNA, 25 bp, Canis familiaris
agattatcagggtctgttaaaattg

SEQ ID NO: 27294 - DNA, 25 bp, Canis familiaris
agatcttcagggtgagttggcaact

SEQ ID NO: 27295 - DNA, 25 bp, Canis familiaris
agtctcacctggttgaggggagaat

SEQ ID NO: 27296 - DNA, 25 bp, Canis familiaris
agtacacctagaattttcgtgcaat

SEQ ID NO: 27297 - DNA, 25 bp, Canis familiaris
agtagactccaaactgtctctggat

SEQ ID NO: 27298 - DNA, 25 bp, Canis familiaris
agtctgcaacttttctgttcggaac

SEQ ID NO: 27299 - DNA, 25 bp, Canis familiaris
agtctgtagctatgtgtttctgtat

SEQ ID NO: 27300 - DNA, 25 bp, Canis familiaris
agtcgacactatcatgctctttatt

SEQ ID NO: 27301 - DNA, 25 bp, Canis familiaris
agtctaaatcatccatctttctctt

SEQ ID NO: 27302 - DNA, 25 bp, Canis familiaris
agtcttacaagccaatctgctcctt

SEQ ID NO: 27303 - DNA, 25 bp, Canis familiaris
agtctttagagcagtctctgcccct

SEQ ID NO: 27304 - DNA, 25 bp, Canis familiaris
agtcatgaccagcctggatcctgca

SEQ ID NO: 27305 - DNA, 25 bp, Canis familiaris
agtcggcaagccggatccgtaactt

SEQ ID NO: 27306 - DNA, 25 bp, Canis familiaris
agtctggcaactccgacgtgtatga

SEQ ID NO: 27307 - DNA, 25 bp, Canis familiaris
agtctggcaactcggacgtgtatga

SEQ ID NO: 27308 - DNA, 25 bp, Canis familiaris
agtcttatcacatttgagccttaac

SEQ ID NO: 27309 - DNA, 25 bp, Canis familiaris
agtcattagctattaggacactata

SEQ ID NO: 27310 - DNA, 25 bp, Canis familiaris
agtattacccacagacatatatgag

SEQ ID NO: 27311 - DNA, 25 bp, Canis familiaris
agtaaactcatatggacaattggta

SEQ ID NO: 27312 - DNA, 25 bp, Canis familiaris
agtaactccatgaaccctagggtat

SEQ ID NO: 27313 - DNA, 25 bp, Canis familiaris
agttcctcagctcaaccaaatggtt

SEQ ID NO: 27314 - DNA, 25 bp, Canis familiaris
agttgactggcaaacaccaaacttc

SEQ ID NO: 27315 - DNA, 25 bp, Canis familiaris
agttgaagtcaaacgctggaagcaa

SEQ ID NO: 27316 - DNA, 25 bp, Canis familiaris
agtacagcgagttcttcacaggcag

SEQ ID NO: 27317 - DNA, 25 bp, Canis familiaris
agtaggctagtgtccataagttatt

SEQ ID NO: 27318 - DNA, 25 bp, Canis familiaris
agtaggtagttgaataggatattta

SEQ ID NO: 27319 - DNA, 25 bp, Canis familiaris
agtaggttatcgctcacatatcttc

SEQ ID NO: 27320 - DNA, 25 bp, Canis familiaris
agtaggtgttggtagcccacttgga

SEQ ID NO: 27321 - DNA, 25 bp, Canis familiaris
agtaagcatttgtaagccacctaaa

SEQ ID NO: 27322 - DNA, 25 bp, Canis familiaris
agtaagcctgtgtggcgacactctt

SEQ ID NO: 27323 - DNA, 25 bp, Canis familiaris
agtaagcgtgtgtagcgtgccactt

SEQ ID NO: 27324 - DNA, 25 bp, Canis familiaris
agtacatgccactattgggcttctt

SEQ ID NO: 27325 - DNA, 25 bp, Canis familiaris
agtagtgccttttgtgacttctcat

SEQ ID NO: 27326 - DNA, 25 bp, Canis familiaris
agtcttcctttgtatggtttatcat

SEQ ID NO: 27327 - DNA, 25 bp, Canis familiaris
agtcatattctttcttggtattaat

SEQ ID NO: 27328 - DNA, 25 bp, Canis familiaris
agttatctcactttggggaatacat

SEQ ID NO: 27329 - DNA, 25 bp, Canis familiaris
agatcttcttcggaggctaaaactg

SEQ ID NO: 27330 - DNA, 25 bp, Canis familiaris
agtctctggtctgggggaggaaccg

SEQ ID NO: 27331 - DNA, 25 bp, Canis familiaris
agttctgtgaacctggtgataaagc

SEQ ID NO: 27332 - DNA, 25 bp, Canis familiaris
agtactgtgggcctggggccaagcc

SEQ ID NO: 27333 - DNA, 25 bp, Canis familiaris
agtcggagagcgccgaggacggagc

SEQ ID NO: 27334 - DNA, 25 bp, Canis familiaris
agtcggaggttcgaagacgatcaga

SEQ ID NO: 27335 - DNA, 25 bp, Canis familiaris
agtagtagtggtggtcagacaaatg

SEQ ID NO: 27336 - DNA, 25 bp, Canis familiaris
agtagtagtggtggtcagacaaatg

SEQ ID NO: 27337 - DNA, 25 bp, Canis familiaris
agctgaatactggaggaagtaaact

SEQ ID NO: 27338 - DNA, 25 bp, Canis familiaris
taggaaagggggagtaatcaggtgt

SEQ ID NO: 27339 - DNA, 25 bp, Canis familiaris
aaaaagggggcagcggcacatggtt

SEQ ID NO: 27340 - DNA, 25 bp, Canis familiaris
agtacaaggggacccagtcacggag

SEQ ID NO: 27341 - DNA, 25 bp, Canis familiaris
agtaaaggggtgctagctccgagcc

SEQ ID NO: 27342 - DNA, 25 bp, Canis familiaris
agtagaagagaacgtgtcaccctga

SEQ ID NO: 27343 - DNA, 25 bp, Canis familiaris
agtagaatgtagcggtcagcacccc

SEQ ID NO: 27344 - DNA, 25 bp, Canis familiaris
agtagaagttagacgtataccacgc

SEQ ID NO: 27345 - DNA, 25 bp, Canis familiaris
agtcagaggttactcgtgatcccac

SEQ ID NO: 27346 - DNA, 25 bp, Canis familiaris
agtcgtggttcacgtgatgctccga

SEQ ID NO: 27347 - DNA, 25 bp, Canis familiaris
accgtgggtcacggtgcgtcacggt

SEQ ID NO: 27348 - DNA, 25 bp, Canis familiaris
actccgggacctggtgacccaggat

SEQ ID NO: 27349 - DNA, 25 bp, Canis familiaris
agtccctggaggcttacccagtgat

SEQ ID NO: 27350 - DNA, 25 bp, Canis familiaris
agtaccggcatgtcatgttacccag

SEQ ID NO: 27351 - DNA, 25 bp, Canis familiaris
agtcactctggcaactttgaaaatg

SEQ ID NO: 27352 - DNA, 25 bp, Canis familiaris
agtctgcctgtaaattatcttgaag

SEQ ID NO: 27353 - DNA, 25 bp, Canis familiaris
agtctgcttaatctcttcttaatcc

SEQ ID NO: 27354 - DNA, 25 bp, Canis familiaris
agtcccaaatgttagctcttcaatt

SEQ ID NO: 27355 - DNA, 25 bp, Canis familiaris
agtagccacctttttgttcaatttg

SEQ ID NO: 27356 - DNA, 25 bp, Canis familiaris
agtacacaacttcttttagttcgtg

SEQ ID NO: 27357 - DNA, 25 bp, Canis familiaris
agtttcaacgtctcggtgagttagt

SEQ ID NO: 27358 - DNA, 25 bp, Canis familiaris
agttttacgtctgggtgttttgcag

SEQ ID NO: 27359 - DNA, 25 bp, Canis familiaris
agttctgtacggtgtgttggtttgt

SEQ ID NO: 27360 - DNA, 25 bp, Canis familiaris
agttcttgaaatcttggggattctg

SEQ ID NO: 27361 - DNA, 25 bp, Canis familiaris
agttcttgacctctggggaagttct

SEQ ID NO: 27362 - DNA, 25 bp, Canis familiaris
agttttgccctttttgtaatatgag

SEQ ID NO: 27363 - DNA, 25 bp, Canis familiaris
agttaatcctgcttcttgggaaaag

SEQ ID NO: 27364 - DNA, 25 bp, Canis familiaris
agtctctttccatcgtcacagaaag

SEQ ID NO: 27365 - DNA, 25 bp, Canis familiaris
agttttctgccctaccaaggataga

SEQ ID NO: 27366 - DNA, 25 bp, Canis familiaris
agttttcctaccccataaagcatat

SEQ ID NO: 27367 - DNA, 25 bp, Canis familiaris
agttattcgctcttcaactaaccgc

SEQ ID NO: 27368 - DNA, 25 bp, Canis familiaris
agtctgtattctctaagtaagcacg

SEQ ID NO: 27369 - DNA, 25 bp, Canis familiaris
agtcttatcctgatagggatagtct

SEQ ID NO: 27370 - DNA, 25 bp, Canis familiaris
agtctttctctgaattccggattta

SEQ ID NO: 27371 - DNA, 25 bp, Canis familiaris
agttttctgtgaactccttcagtat

SEQ ID NO: 27372 - DNA, 25 bp, Canis familiaris
agtcattttctctgcttttcagata

SEQ ID NO: 27373 - DNA, 25 bp, Canis familiaris
agcttgcttacttcgtctttaaatt

SEQ ID NO: 27374 - DNA, 25 bp, Canis familiaris
agttgtcaactttgttctaaatatc

SEQ ID NO: 27375 - DNA, 25 bp, Canis familiaris
agttccagtctaagtcctaaaatct

SEQ ID NO: 27376 - DNA, 25 bp, Canis familiaris
agtttcaggccaagttatacaaata

SEQ ID NO: 27377 - DNA, 25 bp, Canis familiaris
agtcttcagagtgttctaaaactaa

SEQ ID NO: 27378 - DNA, 25 bp, Canis familiaris
aactgtatggggaacataaaagtag

SEQ ID NO: 27379 - DNA, 25 bp, Canis familiaris
aaagtacgaagtcaaaaggatcatg

SEQ ID NO: 27380 - DNA, 25 bp, Canis familiaris
aacggccgaagttgtagctcggtcg

SEQ ID NO: 27381 - DNA, 25 bp, Canis familiaris
aactggttaattctatgcccctagg

SEQ ID NO: 27382 - DNA, 25 bp, Canis familiaris
agatcttttgaaatttacaccccag

SEQ ID NO: 27383 - DNA, 25 bp, Canis familiaris
agtctttctgaactttcaatcccca

SEQ ID NO: 27384 - DNA, 25 bp, Canis familiaris
agtctttctggactttatcaccctt

SEQ ID NO: 27385 - DNA, 25 bp, Canis familiaris
agtctttcttcatttatatagcgtg

SEQ ID NO: 27386 - DNA, 25 bp, Canis familiaris
agtctttttacttcattgtgctttt

SEQ ID NO: 27387 - DNA, 25 bp, Canis familiaris
agtctttttcttatcttctatttct

SEQ ID NO: 27388 - DNA, 25 bp, Canis familiaris
agtcgttatcttatttctctatctt

SEQ ID NO: 27389 - DNA, 25 bp, Canis familiaris
agtacatcatatttttattccattg

SEQ ID NO: 27390 - DNA, 25 bp, Canis familiaris
agtagcactgtctagcttagttgat

SEQ ID NO: 27391 - DNA, 25 bp, Canis familiaris
agtatgccttctgtgacggctgata

SEQ ID NO: 27392 - DNA, 25 bp, Canis familiaris
agtctgtttgctgtaatatgcttga

SEQ ID NO: 27393 - DNA, 25 bp, Canis familiaris
agtctgtttgctgtatatgctgaaa

SEQ ID NO: 27394 - DNA, 25 bp, Canis familiaris
agtctgtgtggatctcatacgaagg

SEQ ID NO: 27395 - DNA, 25 bp, Canis familiaris
agtcatggtggccaacagaggtgag

SEQ ID NO: 27396 - DNA, 25 bp, Canis familiaris
agtctgcgtttccaagagatgtggc

SEQ ID NO: 27397 - DNA, 25 bp, Canis familiaris
agtctcgatgttaccagcactatgg

SEQ ID NO: 27398 - DNA, 25 bp, Canis familiaris
agtctgtaggtcctctgcagtatgc

SEQ ID NO: 27399 - DNA, 25 bp, Canis familiaris
agtctgtgaagtggttaaattaatt

SEQ ID NO: 27400 - DNA, 25 bp, Canis familiaris
agtctgccaggtgtttattttttag

SEQ ID NO: 27401 - DNA, 25 bp, Canis familiaris
agtcagttggttacttatgttttct

SEQ ID NO: 27402 - DNA, 25 bp, Canis familiaris
agtctttgcgttcctaatctatgtt

SEQ ID NO: 27403 - DNA, 25 bp, Canis familiaris
agttcttagtatctgccttagttca

SEQ ID NO: 27404 - DNA, 25 bp, Canis familiaris
agttcttagtctcacctcagatatt

SEQ ID NO: 27405 - DNA, 25 bp, Canis familiaris
agtacatacgtagtacctcgaacta

SEQ ID NO: 27406 - DNA, 25 bp, Canis familiaris
agtattacgattgcacagtggaaca

SEQ ID NO: 27407 - DNA, 25 bp, Canis familiaris
agtctctcacaaaggatcagtaaac

SEQ ID NO: 27408 - DNA, 25 bp, Canis familiaris
agtctcccactgagaagataaatac

SEQ ID NO: 27409 - DNA, 25 bp, Canis familiaris
agctgctaagcatcaagaagggaat

SEQ ID NO: 27410 - DNA, 25 bp, Canis familiaris
agtatacgatgacaaagtctgagat

SEQ ID NO: 27411 - DNA, 25 bp, Canis familiaris
agtttcaataccggagatcatgcaa

SEQ ID NO: 27412 - DNA, 25 bp, Canis familiaris
agtttactaccatgaatctgtccta

SEQ ID NO: 27413 - DNA, 25 bp, Canis familiaris
agttgcccaacctagattctgtggc

SEQ ID NO: 27414 - DNA, 25 bp, Canis familiaris
agtctgttctggcggcattgtgggc

SEQ ID NO: 27415 - DNA, 25 bp, Canis familiaris
agtctgctctttcggatttggggat

SEQ ID NO: 27416 - DNA, 25 bp, Canis familiaris
agtctctctctcaggctttggagaa

SEQ ID NO: 27417 - DNA, 25 bp, Canis familiaris
agtctagcttcagggtcctgcgagc

SEQ ID NO: 27418 - DNA, 25 bp, Canis familiaris
agtctggtgtcagtgttgctctggt

SEQ ID NO: 27419 - DNA, 25 bp, Canis familiaris
agttggttgcagctagctctgacgt

SEQ ID NO: 27420 - DNA, 25 bp, Canis familiaris
agtctttcatgacgatggcagctga

SEQ ID NO: 27421 - DNA, 25 bp, Canis familiaris
agtctgctttgggggcagctgtcta

SEQ ID NO: 27422 - DNA, 25 bp, Canis familiaris
agtcttattgtgttgcagcagtctc

SEQ ID NO: 27423 - DNA, 25 bp, Canis familiaris
agtcttattcttgggatatgcatgc

SEQ ID NO: 27424 - DNA, 25 bp, Canis familiaris
agtcagtctcttacacaaatgcatg

SEQ ID NO: 27425 - DNA, 25 bp, Canis familiaris
agtcagctgcttccattcaaatgct

SEQ ID NO: 27426 - DNA, 25 bp, Canis familiaris
agtcagatgctttcatttacacaga

SEQ ID NO: 27427 - DNA, 25 bp, Canis familiaris
agtcactatcattatttcacctgga

SEQ ID NO: 27428 - DNA, 25 bp, Canis familiaris
agtatttctaagttgcacacattga

SEQ ID NO: 27429 - DNA, 25 bp, Canis familiaris
agttgtcctaagttgccctaacatg

SEQ ID NO: 27430 - DNA, 25 bp, Canis familiaris
agtttcccaggagcacgacatattg

SEQ ID NO: 27431 - DNA, 25 bp, Canis familiaris
agtttatccaagacccaggcatact

SEQ ID NO: 27432 - DNA, 25 bp, Canis familiaris
agtttccagaacagccggacagctc

SEQ ID NO: 27433 - DNA, 25 bp, Canis familiaris
agtcttcccacaagggggacatgga

SEQ ID NO: 27434 - DNA, 25 bp, Canis familiaris
agtttcctagctttggggctcaggt

SEQ ID NO: 27435 - DNA, 25 bp, Canis familiaris
agtagacacgggtgggagccggctg

SEQ ID NO: 27436 - DNA, 25 bp, Canis familiaris
agtacatcacgtcaggcgtgacccc

SEQ ID NO: 27437 - DNA, 25 bp, Canis familiaris
agtacaagggacccgagactcccat

SEQ ID NO: 27438 - DNA, 25 bp, Canis familiaris
agtaccggagacaggtgcagtccct

SEQ ID NO: 27439 - DNA, 25 bp, Canis familiaris
agtaccggagacaggtgcagtccct

SEQ ID NO: 27440 - DNA, 25 bp, Canis familiaris
agtattctggggtgcaggttctgcc

SEQ ID NO: 27441 - DNA, 25 bp, Canis familiaris
agttacaggatgcttcagaggttct

SEQ ID NO: 27442 - DNA, 25 bp, Canis familiaris
agttgttggaccacagggtgctcgt

SEQ ID NO: 27443 - DNA, 25 bp, Canis familiaris
agtacagtggaccaccagggggtga

SEQ ID NO: 27444 - DNA, 25 bp, Canis familiaris
agtagagtccactctgggggtggat

SEQ ID NO: 27445 - DNA, 25 bp, Canis familiaris
agatcacgcccacaattggagggtt

SEQ ID NO: 27446 - DNA, 25 bp, Canis familiaris
agtcactaaatttcattgcaggggt

SEQ ID NO: 27447 - DNA, 25 bp, Canis familiaris
agtcttacgttagttgggatggata

SEQ ID NO: 27448 - DNA, 25 bp, Canis familiaris
agttaaatgtaaatgcgtagatgga

SEQ ID NO: 27449 - DNA, 25 bp, Canis familiaris
agtatatatatgatgcctgcgtaag

SEQ ID NO: 27450 - DNA, 25 bp, Canis familiaris
agtaattctttgactggcctgaagc

SEQ ID NO: 27451 - DNA, 25 bp, Canis familiaris
agtaatgttctacttggagtcaagg

SEQ ID NO: 27452 - DNA, 25 bp, Canis familiaris
agtattgtacaacttctttacacag

SEQ ID NO: 27453 - DNA, 25 bp, Canis familiaris
agtaatgtggtgtttgcttatttca

SEQ ID NO: 27454 - DNA, 25 bp, Canis familiaris
agtcacagctttctttgctaccata

SEQ ID NO: 27455 - DNA, 25 bp, Canis familiaris
agtcttgattttctgtgctacctga

SEQ ID NO: 27456 - DNA, 25 bp, Canis familiaris
agtatctgattcttggttttggctc

SEQ ID NO: 27457 - DNA, 25 bp, Canis familiaris
agtctcgagttttatttgtgtcatt

SEQ ID NO: 27458 - DNA, 25 bp, Canis familiaris
agtctaagccttatggctgtcttcc

SEQ ID NO: 27459 - DNA, 25 bp, Canis familiaris
agttccagtcttattttcagtcagt

SEQ ID NO: 27460 - DNA, 25 bp, Canis familiaris
agtttgcctgctgtatttgtagtaa

SEQ ID NO: 27461 - DNA, 25 bp, Canis familiaris
agtcttgctcctggctatttatatt

SEQ ID NO: 27462 - DNA, 25 bp, Canis familiaris
agtcttcagcctactgtcttactga

SEQ ID NO: 27463 - DNA, 25 bp, Canis familiaris
agtcttagatgcttgattttcctca

SEQ ID NO: 27464 - DNA, 25 bp, Canis familiaris
agtcattggcaattactattcatct

SEQ ID NO: 27465 - DNA, 25 bp, Canis familiaris
agtcattggctgtttctgtttgttg

SEQ ID NO: 27466 - DNA, 25 bp, Canis familiaris
agtcttggctgttgtgttttgctct

SEQ ID NO: 27467 - DNA, 25 bp, Canis familiaris
agtcttggtgtgttatttcccgctg

SEQ ID NO: 27468 - DNA, 25 bp, Canis familiaris
agtcttggttgtacattgtccgtgt

SEQ ID NO: 27469 - DNA, 25 bp, Canis familiaris
agtagacgtctgactgttgtcgcgg

SEQ ID NO: 27470 - DNA, 25 bp, Canis familiaris
agtcttcagattttccatcacttca

SEQ ID NO: 27471 - DNA, 25 bp, Canis familiaris
agttctcagcgtttaaatctttcag

SEQ ID NO: 27472 - DNA, 25 bp, Canis familiaris
agttccgcgctaataaagccttctg

SEQ ID NO: 27473 - DNA, 25 bp, Canis familiaris
agtttgtgcctactcaacagttttg

SEQ ID NO: 27474 - DNA, 25 bp, Canis familiaris
agtttggccacagaaggctttcttc

SEQ ID NO: 27475 - DNA, 25 bp, Canis familiaris
agtatgctcagcttcagaagagcct

SEQ ID NO: 27476 - DNA, 25 bp, Canis familiaris
agtagtcacagatttagaccccccg

SEQ ID NO: 27477 - DNA, 25 bp, Canis familiaris
agtttccaattttgcattccgttgc

SEQ ID NO: 27478 - DNA, 25 bp, Canis familiaris
agttagtctttttgaaccctcatgc

SEQ ID NO: 27479 - DNA, 25 bp, Canis familiaris
agttatatcttgcttagcccacatc

SEQ ID NO: 27480 - DNA, 25 bp, Canis familiaris
agtatttgctgcagatttcccatct

SEQ ID NO: 27481 - DNA, 25 bp, Canis familiaris
agtactgtgatgtgagatccccagc

SEQ ID NO: 27482 - DNA, 25 bp, Canis familiaris
agtactcagagtgacacatgcccgc

SEQ ID NO: 27483 - DNA, 25 bp, Canis familiaris
agtatctcgactggatccagctccg

SEQ ID NO: 27484 - DNA, 25 bp, Canis familiaris
agtagacgacatgtgccgtttgtca

SEQ ID NO: 27485 - DNA, 25 bp, Canis familiaris
agtagggcacaggggcttattgaag

SEQ ID NO: 27486 - DNA, 25 bp, Canis familiaris
agtagaggcctggggcttagcctgg

SEQ ID NO: 27487 - DNA, 25 bp, Canis familiaris
agcttgaaggatctggcttaaggga

SEQ ID NO: 27488 - DNA, 25 bp, Canis familiaris
agttgacacgtccctgttgttggga

SEQ ID NO: 27489 - DNA, 25 bp, Canis familiaris
agttaactacagaccattgtttcta

SEQ ID NO: 27490 - DNA, 25 bp, Canis familiaris
agttatgacatgtgtccacgctttt

SEQ ID NO: 27491 - DNA, 25 bp, Canis familiaris
agttgatccagtgtgtcctttctgt

SEQ ID NO: 27492 - DNA, 25 bp, Canis familiaris
agtttccagcacataccagattctc

SEQ ID NO: 27493 - DNA, 25 bp, Canis familiaris
agttgaccaaggccatccagaaagc

SEQ ID NO: 27494 - DNA, 25 bp, Canis familiaris
agttagtcaacttgcaccagagcgg

SEQ ID NO: 27495 - DNA, 25 bp, Canis familiaris
agtcagttaacttcacctgtgtgat

SEQ ID NO: 27496 - DNA, 25 bp, Canis familiaris
agtcatttgaacttgtgccttggtc

SEQ ID NO: 27497 - DNA, 25 bp, Canis familiaris
agtcttaatttttgctcttggattt

SEQ ID NO: 27498 - DNA, 25 bp, Canis familiaris
agtttgatatgttttcgctgggttt

SEQ ID NO: 27499 - DNA, 25 bp, Canis familiaris
agtcttgatttgtttctctagtatt

SEQ ID NO: 27500 - DNA, 25 bp, Canis familiaris
agtaatcattatgtcgcttctggat

SEQ ID NO: 27501 - DNA, 25 bp, Canis familiaris
agtactcatttgcaactatcatgaa

SEQ ID NO: 27502 - DNA, 25 bp, Canis familiaris
agtaatcatcctgcgactcatagtc

SEQ ID NO: 27503 - DNA, 25 bp, Canis familiaris
agtcagacatttccagagctcagct

SEQ ID NO: 27504 - DNA, 25 bp, Canis familiaris
agtaagattgctctgcagcgcgttc

SEQ ID NO: 27505 - DNA, 25 bp, Canis familiaris
agtaagctgcggatggccgtgtgca

SEQ ID NO: 27506 - DNA, 25 bp, Canis familiaris
agtcagacgaggatgtccgcagcgc

SEQ ID NO: 27507 - DNA, 25 bp, Canis familiaris
agtcagaaggtgagactgccccggt

SEQ ID NO: 27508 - DNA, 25 bp, Canis familiaris
agtcacaaggcagagatatccccgt

SEQ ID NO: 27509 - DNA, 25 bp, Canis familiaris
agtcaaaggccattgaagcccggca

SEQ ID NO: 27510 - DNA, 25 bp, Canis familiaris
agtaaagacaatgaagcccaggcct

SEQ ID NO: 27511 - DNA, 25 bp, Canis familiaris
agttaaaaatgtcacaaaggtgctg

SEQ ID NO: 27512 - DNA, 25 bp, Canis familiaris
agttgagctaactccacattaattg

SEQ ID NO: 27513 - DNA, 25 bp, Canis familiaris
agttcagtctaatccagcagtcaat

SEQ ID NO: 27514 - DNA, 25 bp, Canis familiaris
agttcattactgttccagctgctga

SEQ ID NO: 27515 - DNA, 25 bp, Canis familiaris
agttcaaagctaatgatcacggata

SEQ ID NO: 27516 - DNA, 25 bp, Canis familiaris
agttatcgcagccatttccaggtat

SEQ ID NO: 27517 - DNA, 25 bp, Canis familiaris
agtcttgctgacttattccaattaa

SEQ ID NO: 27518 - DNA, 25 bp, Canis familiaris
agttttacttacacagatcccagcc

SEQ ID NO: 27519 - DNA, 25 bp, Canis familiaris
agttttgaccagacctgagtccacc

SEQ ID NO: 27520 - DNA, 25 bp, Canis familiaris
agttctaggacagcactgacccagc

SEQ ID NO: 27521 - DNA, 25 bp, Canis familiaris
agttcaagaccagcctggccaacat

SEQ ID NO: 27522 - DNA, 25 bp, Canis familiaris
agtattacaacttcctggccaacag

SEQ ID NO: 27523 - DNA, 25 bp, Canis familiaris
agttctaaacattcccaacacaggg

SEQ ID NO: 27524 - DNA, 25 bp, Canis familiaris
agctggctaacctcacgtcaaaggt

SEQ ID NO: 27525 - DNA, 25 bp, Canis familiaris
agatggtgaccctcacagaaaacct

SEQ ID NO: 27526 - DNA, 25 bp, Canis familiaris
agatttggcctcaccaagactaccc

SEQ ID NO: 27527 - DNA, 25 bp, Canis familiaris
agtcattgcccacggcaaagaccac

SEQ ID NO: 27528 - DNA, 25 bp, Canis familiaris
agtcattcctcatgtacactaaccc

SEQ ID NO: 27529 - DNA, 25 bp, Canis familiaris
agtaatcttaaatcactcctctctc

SEQ ID NO: 27530 - DNA, 25 bp, Canis familiaris
agtcattcaaaattttgcccctcct

SEQ ID NO: 27531 - DNA, 25 bp, Canis familiaris
agttctcacaactcttgctttttat

SEQ ID NO: 27532 - DNA, 25 bp, Canis familiaris
agtttataaacactgtgctctttaa

SEQ ID NO: 27533 - DNA, 25 bp, Canis familiaris
agtttatcataatcatgtacttggc

SEQ ID NO: 27534 - DNA, 25 bp, Canis familiaris
agcatggtaactgcctgtactatgg

SEQ ID NO: 27535 - DNA, 25 bp, Canis familiaris
agtagtatcatcgcctgttgctaac

SEQ ID NO: 27536 - DNA, 25 bp, Canis familiaris
agtcagtaatagtccttgtaatcct

SEQ ID NO: 27537 - DNA, 25 bp, Canis familiaris
agtcagtattacccgtgtgaagccc

SEQ ID NO: 27538 - DNA, 25 bp, Canis familiaris
agtttactttcccagatgaatccca

SEQ ID NO: 27539 - DNA, 25 bp, Canis familiaris
agtttcacgttctacttagtaccat

SEQ ID NO: 27540 - DNA, 25 bp, Canis familiaris
agtttctggttctctagtttcacac

SEQ ID NO: 27541 - DNA, 25 bp, Canis familiaris
agattacccttacaagttctccaca

SEQ ID NO: 27542 - DNA, 25 bp, Canis familiaris
cagttccccaaacacgattgtacct

SEQ ID NO: 27543 - DNA, 25 bp, Canis familiaris
agttccccagaactagagctgagta

SEQ ID NO: 27544 - DNA, 25 bp, Canis familiaris
agtcattccaaatatgagatgcatt

SEQ ID NO: 27545 - DNA, 25 bp, Canis familiaris
agtcattccaaatatgagatgcatt

SEQ ID NO: 27546 - DNA, 25 bp, Canis familiaris
agtactgtacagtgatgatgatcat

SEQ ID NO: 27547 - DNA, 25 bp, Canis familiaris
agttgatgaacgagatgtgatctcg

SEQ ID NO: 27548 - DNA, 25 bp, Canis familiaris
agttctgcacagccagtatgctgct

SEQ ID NO: 27549 - DNA, 25 bp, Canis familiaris
agtttcacagctccatatgtgttcc

SEQ ID NO: 27550 - DNA, 25 bp, Canis familiaris
agtcattcatgcttttattgttcaa

SEQ ID NO: 27551 - DNA, 25 bp, Canis familiaris
agatttgaggttctggattccaggc

SEQ ID NO: 27552 - DNA, 25 bp, Canis familiaris
agttcgagtttgaggtggccgtgcc

SEQ ID NO: 27553 - DNA, 25 bp, Canis familiaris
agttagaacttttaggtgcctgtgg

SEQ ID NO: 27554 - DNA, 25 bp, Canis familiaris
agatacagaaccatggaggccctct

SEQ ID NO: 27555 - DNA, 25 bp, Canis familiaris
agttcgatgaccatgggtccccaat

SEQ ID NO: 27556 - DNA, 25 bp, Canis familiaris
agttcaatgacacctcgaaaccaaa

SEQ ID NO: 27557 - DNA, 25 bp, Canis familiaris
agttcaaatcccagcaaccacatgg

SEQ ID NO: 27558 - DNA, 25 bp, Canis familiaris
agttgtgttaccataagccaacgga

SEQ ID NO: 27559 - DNA, 25 bp, Canis familiaris
agttgggattccatatttcctagga

SEQ ID NO: 27560 - DNA, 25 bp, Canis familiaris
agtttggtttcgatcttcataacgg

SEQ ID NO: 27561 - DNA, 25 bp, Canis familiaris
agtttgagttttgtcaccatccact

SEQ ID NO: 27562 - DNA, 25 bp, Canis familiaris
agttaaatattgttgtaccattact

SEQ ID NO: 27563 - DNA, 25 bp, Canis familiaris
agtaaattatattctctcccttgtt

SEQ ID NO: 27564 - DNA, 25 bp, Canis familiaris
agtaattgttttgcatcttccatgt

SEQ ID NO: 27565 - DNA, 25 bp, Canis familiaris
agtactgcagttatcaatgtaaaat

SEQ ID NO: 27566 - DNA, 25 bp, Canis familiaris
agtaatcgctttttatacaataatt

SEQ ID NO: 27567 - DNA, 25 bp, Canis familiaris
agtacattgcctaattcttttggat

SEQ ID NO: 27568 - DNA, 25 bp, Canis familiaris
agtaatttctttttcatttgacatg

SEQ ID NO: 27569 - DNA, 25 bp, Canis familiaris
agttacctttcatgtctgttaagag

SEQ ID NO: 27570 - DNA, 25 bp, Canis familiaris
agttccctttcagtactttgcaaga

SEQ ID NO: 27571 - DNA, 25 bp, Canis familiaris
agttgccatgtagaccccttgaaga

SEQ ID NO: 27572 - DNA, 25 bp, Canis familiaris
agttgccatgtagaccccttgaaga

SEQ ID NO: 27573 - DNA, 25 bp, Canis familiaris
agttgaatgagttccccacttaatg

SEQ ID NO: 27574 - DNA, 25 bp, Canis familiaris
agtaaaagtcattcccacatctgca

SEQ ID NO: 27575 - DNA, 25 bp, Canis familiaris
agtaacataatatctggacagtgca

SEQ ID NO: 27576 - DNA, 25 bp, Canis familiaris
agtatcacgtcgatgctgtgtgcat

SEQ ID NO: 27577 - DNA, 25 bp, Canis familiaris
agtatctattagagcctggccattt

SEQ ID NO: 27578 - DNA, 25 bp, Canis familiaris
agtaacttgaagctctggccgtgct

SEQ ID NO: 27579 - DNA, 25 bp, Canis familiaris
agtaccttggatttttacagtgctt

SEQ ID NO: 27580 - DNA, 25 bp, Canis familiaris
agatacccgtaaattttatccatgt

SEQ ID NO: 27581 - DNA, 25 bp, Canis familiaris
agatacccgtgaatttaagaaagat

SEQ ID NO: 27582 - DNA, 25 bp, Canis familiaris
agtacctagtgagcttaagaagaga

SEQ ID NO: 27583 - DNA, 25 bp, Canis familiaris
agtatcctagtcctcctagaatgaa

SEQ ID NO: 27584 - DNA, 25 bp, Canis familiaris
agatcaccattcaagatcccagagg

SEQ ID NO: 27585 - DNA, 25 bp, Canis familiaris
agtacctgctggaccaccagacagt

SEQ ID NO: 27586 - DNA, 25 bp, Canis familiaris
agtagagcacgtcgccgagatgaag

SEQ ID NO: 27587 - DNA, 25 bp, Canis familiaris
agtagagcagctcggggagtgcctg

SEQ ID NO: 27588 - DNA, 25 bp, Canis familiaris
agtcagcacgctggggacagacggt

SEQ ID NO: 27589 - DNA, 25 bp, Canis familiaris
agtagcaagcgaaaacagtaggctt

SEQ ID NO: 27590 - DNA, 25 bp, Canis familiaris
agtacaaccctgaaatatagccatt

SEQ ID NO: 27591 - DNA, 25 bp, Canis familiaris
agtaacccactgtatgaaagccatt

SEQ ID NO: 27592 - DNA, 25 bp, Canis familiaris
agtagatgtccaagtacacacacac

SEQ ID NO: 27593 - DNA, 25 bp, Canis familiaris
agtaatgtgcttgctaatccaccct

SEQ ID NO: 27594 - DNA, 25 bp, Canis familiaris
agttatgttcttcaactccacactt

SEQ ID NO: 27595 - DNA, 25 bp, Canis familiaris
agttctgattttcagactccctttc

SEQ ID NO: 27596 - DNA, 25 bp, Canis familiaris
agttctgcagtaactacacctactt

SEQ ID NO: 27597 - DNA, 25 bp, Canis familiaris
agttgcatttagatacacgtaccgt

SEQ ID NO: 27598 - DNA, 25 bp, Canis familiaris
agttccttgattgaccgtccagagt

SEQ ID NO: 27599 - DNA, 25 bp, Canis familiaris
agtattctctttgagccctactatt

SEQ ID NO: 27600 - DNA, 25 bp, Canis familiaris
agtaattctttccagttctcagttg

SEQ ID NO: 27601 - DNA, 25 bp, Canis familiaris
agtagatgtctgggcgagttggagt

SEQ ID NO: 27602 - DNA, 25 bp, Canis familiaris
agtaatgcttgatgcaggatctgaa

SEQ ID NO: 27603 - DNA, 25 bp, Canis familiaris
agtacatgattattccagatctgga

SEQ ID NO: 27604 - DNA, 25 bp, Canis familiaris
agatactatttctcgtcatggtcct

SEQ ID NO: 27605 - DNA, 25 bp, Canis familiaris
agtagctttccaccgttggaggctt

SEQ ID NO: 27606 - DNA, 25 bp, Canis familiaris
agtaggagtcctgcatgtatggggc

SEQ ID NO: 27607 - DNA, 25 bp, Canis familiaris
agtacaggatcggcgtgggggcgcc

SEQ ID NO: 27608 - DNA, 25 bp, Canis familiaris
agtcacaggaaattgggaggccaca

SEQ ID NO: 27609 - DNA, 25 bp, Canis familiaris
agtacctgagagtaggaaggccagg

SEQ ID NO: 27610 - DNA, 25 bp, Canis familiaris
agtactccaatcgaggacactctgc

SEQ ID NO: 27611 - DNA, 25 bp, Canis familiaris
agtacctcaatgaagtggccatcac

SEQ ID NO: 27612 - DNA, 25 bp, Canis familiaris
agtcacactagatgtggagtccatc

SEQ ID NO: 27613 - DNA, 25 bp, Canis familiaris
agtcaacggcaactgtgtctgtcac

SEQ ID NO: 27614 - DNA, 25 bp, Canis familiaris
agtaggcggcagatgttagtcccct

SEQ ID NO: 27615 - DNA, 25 bp, Canis familiaris
agtaccagacgtggttggacctccg

SEQ ID NO: 27616 - DNA, 25 bp, Canis familiaris
agttccagggttctaatcacatacg

SEQ ID NO: 27617 - DNA, 25 bp, Canis familiaris
agttcactcggttagattataaagc

SEQ ID NO: 27618 - DNA, 25 bp, Canis familiaris
agttattggaactatgactaagaca

SEQ ID NO: 27619 - DNA, 25 bp, Canis familiaris
agttttgtgagaatatgttgtagat

SEQ ID NO: 27620 - DNA, 25 bp, Canis familiaris
agtatgtggagaattttggtctgat

SEQ ID NO: 27621 - DNA, 25 bp, Canis familiaris
agttgagagatgcctggttggttca

SEQ ID NO: 27622 - DNA, 25 bp, Canis familiaris
agttatggatatctcattgctttca

SEQ ID NO: 27623 - DNA, 25 bp, Canis familiaris
agtttgcaagtttcagcctgattaa

SEQ ID NO: 27624 - DNA, 25 bp, Canis familiaris
agtaccaaggcatgagctcgacata

SEQ ID NO: 27625 - DNA, 25 bp, Canis familiaris
agtacgaggagatggccaaccgcag

SEQ ID NO: 27626 - DNA, 25 bp, Canis familiaris
agtaccaggcagtaacagccaccct

SEQ ID NO: 27627 - DNA, 25 bp, Canis familiaris
agtaccaggcagtaacagccaccct

SEQ ID NO: 27628 - DNA, 25 bp, Canis familiaris
agtaccaggcagtaacagccaccct

SEQ ID NO: 27629 - DNA, 25 bp, Canis familiaris
agtaccaggcagtaacagccaccct

SEQ ID NO: 27630 - DNA, 25 bp, Canis familiaris
agtactgggagatccagccatccac

SEQ ID NO: 27631 - DNA, 25 bp, Canis familiaris
agtactgggagatccagccatccac

SEQ ID NO: 27632 - DNA, 25 bp, Canis familiaris
agtactgtgtacacacgtcacctct

SEQ ID NO: 27633 - DNA, 25 bp, Canis familiaris
agtacttgtccatgaaattcctctg

SEQ ID NO: 27634 - DNA, 25 bp, Canis familiaris
agtatttgtaatgagaatgatttct

SEQ ID NO: 27635 - DNA, 25 bp, Canis familiaris
agttccatctaacaaatgactttct

SEQ ID NO: 27636 - DNA, 25 bp, Canis familiaris
agttcacataaagtatttcctagtt

SEQ ID NO: 27637 - DNA, 25 bp, Canis familiaris
agttaatacatcgttttctctgaat

SEQ ID NO: 27638 - DNA, 25 bp, Canis familiaris
agattagattcggtcgttctggaaa

SEQ ID NO: 27639 - DNA, 25 bp, Canis familiaris
agtttgatatggtaagtctctgcta

SEQ ID NO: 27640 - DNA, 25 bp, Canis familiaris
agtttatggggttgtctcctagctt

SEQ ID NO: 27641 - DNA, 25 bp, Canis familiaris
agtttggctttgtgatccctaactc

SEQ ID NO: 27642 - DNA, 25 bp, Canis familiaris
agtttttttcattgatccctttcat

SEQ ID NO: 27643 - DNA, 25 bp, Canis familiaris
agttttacacaaagatacactttca

SEQ ID NO: 27644 - DNA, 25 bp, Canis familiaris
agtacattccaggcatgagtgaact

SEQ ID NO: 27645 - DNA, 25 bp, Canis familiaris
agatcaatcatgccacctggggtga

SEQ ID NO: 27646 - DNA, 25 bp, Canis familiaris
agtacatgagtgtctcctgagggac

SEQ ID NO: 27647 - DNA, 25 bp, Canis familiaris
agtagccagtgtgctctggaggccc

SEQ ID NO: 27648 - DNA, 25 bp, Canis familiaris
agtaggagtgtggttggtgtccttt

SEQ ID NO: 27649 - DNA, 25 bp, Canis familiaris
agtagcgaggggaggccagtgcttc

SEQ ID NO: 27650 - DNA, 25 bp, Canis familiaris
agtagtggggcgaggctcctgatat

SEQ ID NO: 27651 - DNA, 25 bp, Canis familiaris
agtaggcgcaagcgagatccctgtc

SEQ ID NO: 27652 - DNA, 25 bp, Canis familiaris
agttgggatggcggatgaccttggc

SEQ ID NO: 27653 - DNA, 25 bp, Canis familiaris
agtagtgagggcctggaccctgagc

SEQ ID NO: 27654 - DNA, 25 bp, Canis familiaris
agctcagtatggtggcaggccatta

SEQ ID NO: 27655 - DNA, 25 bp, Canis familiaris
agcttgtctggaagtcgaggaggac

SEQ ID NO: 27656 - DNA, 25 bp, Canis familiaris
agttacctgttccgtgtgaggcact

SEQ ID NO: 27657 - DNA, 25 bp, Canis familiaris
agatttcggttcaggtcatgacctc

SEQ ID NO: 27658 - DNA, 25 bp, Canis familiaris
agtttccttttgtgtcattcagtgt

SEQ ID NO: 27659 - DNA, 25 bp, Canis familiaris
agatttcctcgagtgtggttttaga

SEQ ID NO: 27660 - DNA, 25 bp, Canis familiaris
agatatggcccgcgctggagtttca

SEQ ID NO: 27661 - DNA, 25 bp, Canis familiaris
agtatgtcacccaactgctggtata

SEQ ID NO: 27662 - DNA, 25 bp, Canis familiaris
agtatatgcattgctacttgtatat

SEQ ID NO: 27663 - DNA, 25 bp, Canis familiaris
agtattctttctacgtgatcttttt

SEQ ID NO: 27664 - DNA, 25 bp, Canis familiaris
agtattctttctacgggatctgttt

SEQ ID NO: 27665 - DNA, 25 bp, Canis familiaris
agtaactaactgcttggatcttcct

SEQ ID NO: 27666 - DNA, 25 bp, Canis familiaris
agtaagttacttatgcttctctccc

SEQ ID NO: 27667 - DNA, 25 bp, Canis familiaris
agtattgaaactattccatcctccc

SEQ ID NO: 27668 - DNA, 25 bp, Canis familiaris
agtataatacccaatatccagcctc

SEQ ID NO: 27669 - DNA, 25 bp, Canis familiaris
agataaaacctcaataccactaata

SEQ ID NO: 27670 - DNA, 25 bp, Canis familiaris
agtttaccagtctataccatgctac

SEQ ID NO: 27671 - DNA, 25 bp, Canis familiaris
agttttggatcttcaacctgcttcc

SEQ ID NO: 27672 - DNA, 25 bp, Canis familiaris
agtaaaggccttagccctgcttagc

SEQ ID NO: 27673 - DNA, 25 bp, Canis familiaris
agttgaggcccttaagttgcttgag

SEQ ID NO: 27674 - DNA, 25 bp, Canis familiaris
agtagaagacctcagcagattgcct

SEQ ID NO: 27675 - DNA, 25 bp, Canis familiaris
agtacaggacctggacacttggcca

SEQ ID NO: 27676 - DNA, 25 bp, Canis familiaris
agtagctggaactgtcacgtggacc

SEQ ID NO: 27677 - DNA, 25 bp, Canis familiaris
agtactgtgtgaagaccaaggcccc

SEQ ID NO: 27678 - DNA, 25 bp, Canis familiaris
agtattttataacctggagccccat

SEQ ID NO: 27679 - DNA, 25 bp, Canis familiaris
agcttcccttaaccaggggtgccat

SEQ ID NO: 27680 - DNA, 25 bp, Canis familiaris
agtaagccattaaccagtgagcaag

SEQ ID NO: 27681 - DNA, 25 bp, Canis familiaris
agtaacgcattacttctgtcagaag

SEQ ID NO: 27682 - DNA, 25 bp, Canis familiaris
agtattcaagtaccgctcaggtatt

SEQ ID NO: 27683 - DNA, 25 bp, Canis familiaris
agtttgagtgtgcaagccgggttcc

SEQ ID NO: 27684 - DNA, 25 bp, Canis familiaris
agtttggtgcatcaatctagtggat

SEQ ID NO: 27685 - DNA, 25 bp, Canis familiaris
agattgttgattcagtgctgagtgc

SEQ ID NO: 27686 - DNA, 25 bp, Canis familiaris
agttgcgtattctagctgtcagttc

SEQ ID NO: 27687 - DNA, 25 bp, Canis familiaris
agttagttttcggagcagcttactt

SEQ ID NO: 27688 - DNA, 25 bp, Canis familiaris
agttcagttttatatcacttatcat

SEQ ID NO: 27689 - DNA, 25 bp, Canis familiaris
agtactgtacatcaataccttcata

SEQ ID NO: 27690 - DNA, 25 bp, Canis familiaris
agtactcagacttgaattctttcta

SEQ ID NO: 27691 - DNA, 25 bp, Canis familiaris
agttcattactcaattctgtttcta

SEQ ID NO: 27692 - DNA, 25 bp, Canis familiaris
agttggtgacttttctgcatttaaa

SEQ ID NO: 27693 - DNA, 25 bp, Canis familiaris
agttggctagtaccttgatcttcag

SEQ ID NO: 27694 - DNA, 25 bp, Canis familiaris
agtagtgtgttagctgtctttcagg

SEQ ID NO: 27695 - DNA, 25 bp, Canis familiaris
agtacttgcatttatctgttgtcta

SEQ ID NO: 27696 - DNA, 25 bp, Canis familiaris
agtactctgtaaatctggatgtcat

SEQ ID NO: 27697 - DNA, 25 bp, Canis familiaris
agtactctgtgtggatcggtggctc

SEQ ID NO: 27698 - DNA, 25 bp, Canis familiaris
agtactctttcacttgggagcatat

SEQ ID NO: 27699 - DNA, 25 bp, Canis familiaris
agtttccttcagcatggggcagcta

SEQ ID NO: 27700 - DNA, 25 bp, Canis familiaris
agtttccatatgccgatgccgtaaa

SEQ ID NO: 27701 - DNA, 25 bp, Canis familiaris
agtttcatgattccgattcctgagg

SEQ ID NO: 27702 - DNA, 25 bp, Canis familiaris
agttgccatctttccattttgggga

SEQ ID NO: 27703 - DNA, 25 bp, Canis familiaris
agtagctcatctcacctttaaaaag

SEQ ID NO: 27704 - DNA, 25 bp, Canis familiaris
agtagctcactctgactttgaatga

SEQ ID NO: 27705 - DNA, 25 bp, Canis familiaris
agttcccaactgttgttgaagccca

SEQ ID NO: 27706 - DNA, 25 bp, Canis familiaris
agttctgcaacaagttttagacact

SEQ ID NO: 27707 - DNA, 25 bp, Canis familiaris
agtttgaggaggccgtcatagcccg

SEQ ID NO: 27708 - DNA, 25 bp, Canis familiaris
agtttctgggtgccatgtacactct

SEQ ID NO: 27709 - DNA, 25 bp, Canis familiaris
agtttattgtgtccttgctactctg

SEQ ID NO: 27710 - DNA, 25 bp, Canis familiaris
agatcttcgtttcgtttattctcca

SEQ ID NO: 27711 - DNA, 25 bp, Canis familiaris
agttctctagtttgatttgtaatcc

SEQ ID NO: 27712 - DNA, 25 bp, Canis familiaris
agttctgctcgggatgattatttct

SEQ ID NO: 27713 - DNA, 25 bp, Canis familiaris
agttctcctgaagtatgtatattga

SEQ ID NO: 27714 - DNA, 25 bp, Canis familiaris
agttccgtgcacctatttatatttt

SEQ ID NO: 27715 - DNA, 25 bp, Canis familiaris
agtaccgctcagtatatttataatg

SEQ ID NO: 27716 - DNA, 25 bp, Canis familiaris
agttcccaaaattatgctatagctt

SEQ ID NO: 27717 - DNA, 25 bp, Canis familiaris
agtaccgaaaacccatctgatgtct

SEQ ID NO: 27718 - DNA, 25 bp, Canis familiaris
agtttctgaaagtggctcgctgtcc

SEQ ID NO: 27719 - DNA, 25 bp, Canis familiaris
agtttctgcagaagtccctggctgc

SEQ ID NO: 27720 - DNA, 25 bp, Canis familiaris
agtattcagatgtttcctatcagct

SEQ ID NO: 27721 - DNA, 25 bp, Canis familiaris
agtatgtagggattcagcattcctg

SEQ ID NO: 27722 - DNA, 25 bp, Canis familiaris
agtagttgttgcttcaggctcctac

SEQ ID NO: 27723 - DNA, 25 bp, Canis familiaris
agtagtttccattctgatccttaca

SEQ ID NO: 27724 - DNA, 25 bp, Canis familiaris
agattttaccatttgacgttgtgag

SEQ ID NO: 27725 - DNA, 25 bp, Canis familiaris
agttttgccctttgtctgtgtgggt

SEQ ID NO: 27726 - DNA, 25 bp, Canis familiaris
agttttgcctttgtcttgtgggtgt

SEQ ID NO: 27727 - DNA, 25 bp, Canis familiaris
agttcgggtattgctttgtgggatt

SEQ ID NO: 27728 - DNA, 25 bp, Canis familiaris
agttcagggtcttggatttggccga

SEQ ID NO: 27729 - DNA, 25 bp, Canis familiaris
agttgtggttcagggatgcttggcc

SEQ ID NO: 27730 - DNA, 25 bp, Canis familiaris
agtagtgagtgttggtgtgtgtgtg

SEQ ID NO: 27731 - DNA, 25 bp, Canis familiaris
agtacgcggtacaatggccatgatg

SEQ ID NO: 27732 - DNA, 25 bp, Canis familiaris
agtacatcagttactcattccaagt

SEQ ID NO: 27733 - DNA, 25 bp, Canis familiaris
agtatgtcagtgcgttctccaaact

SEQ ID NO: 27734 - DNA, 25 bp, Canis familiaris
agtagtggtagacttgcccgaatct

SEQ ID NO: 27735 - DNA, 25 bp, Canis familiaris
agtactggttacatgcacacacaca

SEQ ID NO: 27736 - DNA, 25 bp, Canis familiaris
agtactgagagtcctcatctaccct

SEQ ID NO: 27737 - DNA, 25 bp, Canis familiaris
agtagacaattcttctctcactggt

SEQ ID NO: 27738 - DNA, 25 bp, Canis familiaris
agtagccattactttaactcctatg

SEQ ID NO: 27739 - DNA, 25 bp, Canis familiaris
agtactctaactaaagtctccaagt

SEQ ID NO: 27740 - DNA, 25 bp, Canis familiaris
agtacttagactggcaaaccacggt

SEQ ID NO: 27741 - DNA, 25 bp, Canis familiaris
agttcttagcctcagaatgccactg

SEQ ID NO: 27742 - DNA, 25 bp, Canis familiaris
agtatttagagccaggccgccagtc

SEQ ID NO: 27743 - DNA, 25 bp, Canis familiaris
agtataagggattggctcacacagt

SEQ ID NO: 27744 - DNA, 25 bp, Canis familiaris
agataccgggattcgtccagagtcc

SEQ ID NO: 27745 - DNA, 25 bp, Canis familiaris
agtaccgggaggtcacggagctcgg

SEQ ID NO: 27746 - DNA, 25 bp, Canis familiaris
agttcccggatgatacggtgctcca

SEQ ID NO: 27747 - DNA, 25 bp, Canis familiaris
agttccccttttaagagtctgccat

SEQ ID NO: 27748 - DNA, 25 bp, Canis familiaris
agttctcccttagtgcaagacatag

SEQ ID NO: 27749 - DNA, 25 bp, Canis familiaris
agtactcccattgctgcagaatatc

SEQ ID NO: 27750 - DNA, 25 bp, Canis familiaris
agtatgactccactcacggcaaatt

SEQ ID NO: 27751 - DNA, 25 bp, Canis familiaris
agtagacatcaaagaaggaggttca

SEQ ID NO: 27752 - DNA, 25 bp, Canis familiaris
agtagacagcttcatgaggaggttc

SEQ ID NO: 27753 - DNA, 25 bp, Canis familiaris
agtagcacaagtcagaggttttcct

SEQ ID NO: 27754 - DNA, 25 bp, Canis familiaris
agttcctaggtgcaagctttttctt

SEQ ID NO: 27755 - DNA, 25 bp, Canis familiaris
agttcccacaggcaagctttcttgc

SEQ ID NO: 27756 - DNA, 25 bp, Canis familiaris
agttcccagtgacttcagtattttc

SEQ ID NO: 27757 - DNA, 25 bp, Canis familiaris
agttcccagagtttcaatgcttgag

SEQ ID NO: 27758 - DNA, 25 bp, Canis familiaris
agttctccacacaaacatgatggga

SEQ ID NO: 27759 - DNA, 25 bp, Canis familiaris
agttggctcagcagatacagaaggt

SEQ ID NO: 27760 - DNA, 25 bp, Canis familiaris
agctatgtgtcacagacaacagggt

SEQ ID NO: 27761 - DNA, 25 bp, Canis familiaris
agtagtgctacttctcattggtggc

SEQ ID NO: 27762 - DNA, 25 bp, Canis familiaris
agtagatgatactctgcttgagcat

SEQ ID NO: 27763 - DNA, 25 bp, Canis familiaris
agtttgctgacaccatcaagcagct

SEQ ID NO: 27764 - DNA, 25 bp, Canis familiaris
agttgttgcacaccatataccgcta

SEQ ID NO: 27765 - DNA, 25 bp, Canis familiaris
agtttctgccatggatgtcacacgt

SEQ ID NO: 27766 - DNA, 25 bp, Canis familiaris
agttctcaactgcatgtaccaggcc

SEQ ID NO: 27767 - DNA, 25 bp, Canis familiaris
agttcatcgacgagaacccagagct

SEQ ID NO: 27768 - DNA, 25 bp, Canis familiaris
agataccgacagagaaggccacctt

SEQ ID NO: 27769 - DNA, 25 bp, Canis familiaris
agtagccaacgaaagggacagcatt

SEQ ID NO: 27770 - DNA, 25 bp, Canis familiaris
agtagacatagccattagtgacact

SEQ ID NO: 27771 - DNA, 25 bp, Canis familiaris
agtatacacagctttttccatcttg

SEQ ID NO: 27772 - DNA, 25 bp, Canis familiaris
agtatgaatctgcaaattcgcacct

SEQ ID NO: 27773 - DNA, 25 bp, Canis familiaris
agttaggctgcaacagattcccctc

SEQ ID NO: 27774 - DNA, 25 bp, Canis familiaris
agttcatcgctcacagacttggact

SEQ ID NO: 27775 - DNA, 25 bp, Canis familiaris
agtatgcacgtcattatcttctcct

SEQ ID NO: 27776 - DNA, 25 bp, Canis familiaris
agtatgtcgtggagtctactggtgt

SEQ ID NO: 27777 - DNA, 25 bp, Canis familiaris
agtagccgtggaggtgctgggcact

SEQ ID NO: 27778 - DNA, 25 bp, Canis familiaris
agtagagcgagacctggtggagccc

SEQ ID NO: 27779 - DNA, 25 bp, Canis familiaris
agatatgagcctcctctgcaatagg

SEQ ID NO: 27780 - DNA, 25 bp, Canis familiaris
agtatgagtgtgctccatctgcagg

SEQ ID NO: 27781 - DNA, 25 bp, Canis familiaris
agtttgagagcaatgccatcacctg

SEQ ID NO: 27782 - DNA, 25 bp, Canis familiaris
agatgttcggttctacgatgggtcc

SEQ ID NO: 27783 - DNA, 25 bp, Canis familiaris
agttatctggttttcctggagctga

SEQ ID NO: 27784 - DNA, 25 bp, Canis familiaris
agtatacaccgattctcctatgact

SEQ ID NO: 27785 - DNA, 25 bp, Canis familiaris
agatcaagatcattgctcctcctga

SEQ ID NO: 27786 - DNA, 25 bp, Canis familiaris
agtagagataggccctgccttgctt

SEQ ID NO: 27787 - DNA, 25 bp, Canis familiaris
agtagtgcagcaggtcctgttcgcc

SEQ ID NO: 27788 - DNA, 25 bp, Canis familiaris
tccgtagttctacaatttgctaatt

SEQ ID NO: 27789 - DNA, 25 bp, Canis familiaris
agttagttaacgtatagtgtagtat

SEQ ID NO: 27790 - DNA, 25 bp, Canis familiaris
agttagtagagagtatagagttcac

SEQ ID NO: 27791 - DNA, 25 bp, Canis familiaris
agttaaaagacctgatgctcccact

SEQ ID NO: 27792 - DNA, 25 bp, Canis familiaris
agttccgagagatcatcgttctccc

SEQ ID NO: 27793 - DNA, 25 bp, Canis familiaris
agtttgaatagtttcttccatccct

SEQ ID NO: 27794 - DNA, 25 bp, Canis familiaris
agtttgaagatttctctacccctgt

SEQ ID NO: 27795 - DNA, 25 bp, Canis familiaris
agttatcaaataattccattccctg

SEQ ID NO: 27796 - DNA, 25 bp, Canis familiaris
agttcagcaagtgaagtctactcct

SEQ ID NO: 27797 - DNA, 25 bp, Canis familiaris
agttcaacctggtgatcgactccaa

SEQ ID NO: 27798 - DNA, 25 bp, Canis familiaris
agttctaccaagtgtgccacaccaa

SEQ ID NO: 27799 - DNA, 25 bp, Canis familiaris
agttcgtcttagaagttcgaggcaa

SEQ ID NO: 27800 - DNA, 25 bp, Canis familiaris
agttccctactgaagactggagcgc

SEQ ID NO: 27801 - DNA, 25 bp, Canis familiaris
agttcatcctggagcgactgggcat

SEQ ID NO: 27802 - DNA, 25 bp, Canis familiaris
cagtgctcccgtctgtactggagca

SEQ ID NO: 27803 - DNA, 25 bp, Canis familiaris
agatccctcgctctgctgaaggatc

SEQ ID NO: 27804 - DNA, 25 bp, Canis familiaris
agatcccctggcttgcagaaaatcc

SEQ ID NO: 27805 - DNA, 25 bp, Canis familiaris
agtacctatgcgtgctgaagcaacc

SEQ ID NO: 27806 - DNA, 25 bp, Canis familiaris
agttcctgcggttcaacagcgacgc

SEQ ID NO: 27807 - DNA, 25 bp, Canis familiaris
agttattgctggtaacacctggcca

SEQ ID NO: 27808 - DNA, 25 bp, Canis familiaris
agtatagctttgttacacctgccac

SEQ ID NO: 27809 - DNA, 25 bp, Canis familiaris
agtttgctttggtacacagttcatg

SEQ ID NO: 27810 - DNA, 25 bp, Canis familiaris
agtttgcttctgttctatttgctag

SEQ ID NO: 27811 - DNA, 25 bp, Canis familiaris
agtttggtgctgtattggccgagag

SEQ ID NO: 27812 - DNA, 25 bp, Canis familiaris
agttttggtaattgtgagagagaga

SEQ ID NO: 27813 - DNA, 25 bp, Canis familiaris
agtttgtgctgtttggccgagaggt

SEQ ID NO: 27814 - DNA, 25 bp, Canis familiaris
agtattggcatttggggcagcccgg

SEQ ID NO: 27815 - DNA, 25 bp, Canis familiaris
agttctggaacatgggaccctatgc

SEQ ID NO: 27816 - DNA, 25 bp, Canis familiaris
agatataacattgaggtacccttgc

SEQ ID NO: 27817 - DNA, 25 bp, Canis familiaris
agttcatacactacaggtgccccat

SEQ ID NO: 27818 - DNA, 25 bp, Canis familiaris
agatcctacagaaacttccctgctg

SEQ ID NO: 27819 - DNA, 25 bp, Canis familiaris
agttccctatatagttacctgtgta

SEQ ID NO: 27820 - DNA, 25 bp, Canis familiaris
agtatctttctattgtaacctgtta

SEQ ID NO: 27821 - DNA, 25 bp, Canis familiaris
agtttctttttgtaatcgtattcag

SEQ ID NO: 27822 - DNA, 25 bp, Canis familiaris
agtttcctgtacaaaactgtatgta

SEQ ID NO: 27823 - DNA, 25 bp, Canis familiaris
agtttacttggcagtctcttgtgta

SEQ ID NO: 27824 - DNA, 25 bp, Canis familiaris
agttattctttcagttctcagtgga

SEQ ID NO: 27825 - DNA, 25 bp, Canis familiaris
agttgtactttcatttccatctgtg

SEQ ID NO: 27826 - DNA, 25 bp, Canis familiaris
agttgctgttttgggtttcacttgc

SEQ ID NO: 27827 - DNA, 25 bp, Canis familiaris
agatctagtgtcacggttagacttt

SEQ ID NO: 27828 - DNA, 25 bp, Canis familiaris
agatttgttaaggggtcagccattt

SEQ ID NO: 27829 - DNA, 25 bp, Canis familiaris
agtatatttaggctgggcaccacat

SEQ ID NO: 27830 - DNA, 25 bp, Canis familiaris
agtagaggctaggagtcccagccca

SEQ ID NO: 27831 - DNA, 25 bp, Canis familiaris
agtaggatcagagtgaacccccaca

SEQ ID NO: 27832 - DNA, 25 bp, Canis familiaris
agatcgagaatctgaacccaccaac

SEQ ID NO: 27833 - DNA, 25 bp, Canis familiaris
agattgaactctggaccccagaccc

SEQ ID NO: 27834 - DNA, 25 bp, Canis familiaris
agattgaagtgggaccttcttgcct

SEQ ID NO: 27835 - DNA, 25 bp, Canis familiaris
agattaaactggtgcctctttctgt

SEQ ID NO: 27836 - DNA, 25 bp, Canis familiaris
agatttaattttcacctgtctcctc

SEQ ID NO: 27837 - DNA, 25 bp, Canis familiaris
agttgtttaaatgtgccttctcctc

SEQ ID NO: 27838 - DNA, 25 bp, Canis familiaris
agttttatagtaggttatcgctcac

SEQ ID NO: 27839 - DNA, 25 bp, Canis familiaris
agttgttataaagttgaattgtgaa

SEQ ID NO: 27840 - DNA, 25 bp, Canis familiaris
agtatttatattcttggtattggga

SEQ ID NO: 27841 - DNA, 25 bp, Canis familiaris
aactctatggttctgggtttgggca

SEQ ID NO: 27842 - DNA, 25 bp, Canis familiaris
agactcttggggttggttattggca

SEQ ID NO: 27843 - DNA, 25 bp, Canis familiaris
agattataaagcattggtttttcaa

SEQ ID NO: 27844 - DNA, 25 bp, Canis familiaris
agttttatactgatggctcttacca

SEQ ID NO: 27845 - DNA, 25 bp, Canis familiaris
agtttgtaattcatcctcttggatc

SEQ ID NO: 27846 - DNA, 25 bp, Canis familiaris
agttttaattcttcattctgtcaat

SEQ ID NO: 27847 - DNA, 25 bp, Canis familiaris
agtatttatattccatctctttcct

SEQ ID NO: 27848 - DNA, 25 bp, Canis familiaris
agtatttgagctttgtctccttcct

SEQ ID NO: 27849 - DNA, 25 bp, Canis familiaris
agtatctgagagactgttgcccttc

SEQ ID NO: 27850 - DNA, 25 bp, Canis familiaris
agttctgagaacgttcacacctgac

SEQ ID NO: 27851 - DNA, 25 bp, Canis familiaris
agttcgaggtgaacatccacgtgcc

SEQ ID NO: 27852 - DNA, 25 bp, Canis familiaris
agtttgtcagtgaccatcccgagct

SEQ ID NO: 27853 - DNA, 25 bp, Canis familiaris
agatcttgtaagacccaacggggag

SEQ ID NO: 27854 - DNA, 25 bp, Canis familiaris
agtttgtttgcacccaatcaacgga

SEQ ID NO: 27855 - DNA, 25 bp, Canis familiaris
agttcgtattgctccacatcaacaa

SEQ ID NO: 27856 - DNA, 25 bp, Canis familiaris
agttctgtactcttctaaataaaag

SEQ ID NO: 27857 - DNA, 25 bp, Canis familiaris
agttgcttactgttttaatcaggaa

SEQ ID NO: 27858 - DNA, 25 bp, Canis familiaris
agttcttcctgacgtgtgacaagac

SEQ ID NO: 27859 - DNA, 25 bp, Canis familiaris
agtttatcggacatagaccagccta

SEQ ID NO: 27860 - DNA, 25 bp, Canis familiaris
agattgtatcggggaacctccgtat

SEQ ID NO: 27861 - DNA, 25 bp, Canis familiaris
agattgatatttgctaaccctcgat

SEQ ID NO: 27862 - DNA, 25 bp, Canis familiaris
agttgtagtttaaccctgcctattg

SEQ ID NO: 27863 - DNA, 25 bp, Canis familiaris
agtttagatgtactacctccactat

SEQ ID NO: 27864 - DNA, 25 bp, Canis familiaris
agtttagagacatttctcccatctc

SEQ ID NO: 27865 - DNA, 25 bp, Canis familiaris
agttatataactttctgtccctcga

SEQ ID NO: 27866 - DNA, 25 bp, Canis familiaris
agttgacacaactgacttgaaccaa

SEQ ID NO: 27867 - DNA, 25 bp, Canis familiaris
agatattccccttacttagaaacag

SEQ ID NO: 27868 - DNA, 25 bp, Canis familiaris
agattttcctcttacttacatcaaa

SEQ ID NO: 27869 - DNA, 25 bp, Canis familiaris
agttgaacttaaatctttgacaaat

SEQ ID NO: 27870 - DNA, 25 bp, Canis familiaris
agtttgctttaagctgctatgagca

SEQ ID NO: 27871 - DNA, 25 bp, Canis familiaris
agttttgtgatacttcattatgaag

SEQ ID NO: 27872 - DNA, 25 bp, Canis familiaris
agttcttggatattgcttcaacgtg

SEQ ID NO: 27873 - DNA, 25 bp, Canis familiaris
agagatttggcagccttaaggcaag

SEQ ID NO: 27874 - DNA, 25 bp, Canis familiaris
agagactctggctgttttggtgaag

SEQ ID NO: 27875 - DNA, 25 bp, Canis familiaris
agatgacttctgtgcctttgtaaca

SEQ ID NO: 27876 - DNA, 25 bp, Canis familiaris
agatgcacttaatacatgtagttat

SEQ ID NO: 27877 - DNA, 25 bp, Canis familiaris
agctacatttctgaagtacttaatt

SEQ ID NO: 27878 - DNA, 25 bp, Canis familiaris
agataattttgatactgcattttta

SEQ ID NO: 27879 - DNA, 25 bp, Canis familiaris
agttatttcttatctcttattctga

SEQ ID NO: 27880 - DNA, 25 bp, Canis familiaris
agttcaattcattaagctctacatt

SEQ ID NO: 27881 - DNA, 25 bp, Canis familiaris
agatatttctcttaagccgaagtga

SEQ ID NO: 27882 - DNA, 25 bp, Canis familiaris
agatatgtttgcaataaactgaaga

SEQ ID NO: 27883 - DNA, 25 bp, Canis familiaris
agatcagtgctccaagataataaaa

SEQ ID NO: 27884 - DNA, 25 bp, Canis familiaris
agatcctctccacatatgtcattat

SEQ ID NO: 27885 - DNA, 25 bp, Canis familiaris
agtaggctacagtctgtgccatgtt

SEQ ID NO: 27886 - DNA, 25 bp, Canis familiaris
agtaggctgagattttcacatgtat

SEQ ID NO: 27887 - DNA, 25 bp, Canis familiaris
agtagactgtcattttatctgcaaa

SEQ ID NO: 27888 - DNA, 25 bp, Canis familiaris
agataacatgattacctaccagaaa

SEQ ID NO: 27889 - DNA, 25 bp, Canis familiaris
agttatagtatatctggaccaaacc

SEQ ID NO: 27890 - DNA, 25 bp, Canis familiaris
agtttctgtatttttgccacaaagc

SEQ ID NO: 27891 - DNA, 25 bp, Canis familiaris
agattcgtcctttcttggaagaagc

SEQ ID NO: 27892 - DNA, 25 bp, Canis familiaris
agatacctctcttcgttgggaaatt

SEQ ID NO: 27893 - DNA, 25 bp, Canis familiaris
agttcacactgatgccttgggaatt

SEQ ID NO: 27894 - DNA, 25 bp, Canis familiaris
acgagctttgatgccgtcacaggct

SEQ ID NO: 27895 - DNA, 25 bp, Canis familiaris
agtatctctttgacaagcacaccct

SEQ ID NO: 27896 - DNA, 25 bp, Canis familiaris
agtatctctttgacaagcacaccct

SEQ ID NO: 27897 - DNA, 25 bp, Canis familiaris
agtatctgtgggcagcagcgaccct

SEQ ID NO: 27898 - DNA, 25 bp, Canis familiaris
agtatctggggcaaccagccgatcg

SEQ ID NO: 27899 - DNA, 25 bp, Canis familiaris
agactgggcggctctaacatgattg

SEQ ID NO: 27900 - DNA, 25 bp, Canis familiaris
agatcagcgacggctattaaagctt

SEQ ID NO: 27901 - DNA, 25 bp, Canis familiaris
agatcagcaattcttgtaacagtat

SEQ ID NO: 27902 - DNA, 25 bp, Canis familiaris
agatcccacttatgtcaatggttag

SEQ ID NO: 27903 - DNA, 25 bp, Canis familiaris
agacccagttactcattgggtggac

SEQ ID NO: 27904 - DNA, 25 bp, Canis familiaris
agacgtaggtactcattatttattt

SEQ ID NO: 27905 - DNA, 25 bp, Canis familiaris
agatgcctgagacacccaaaactat

SEQ ID NO: 27906 - DNA, 25 bp, Canis familiaris
agatcctgaagttggccgccaacat

SEQ ID NO: 27907 - DNA, 25 bp, Canis familiaris
agatcgagtgatcttgccccagacc

SEQ ID NO: 27908 - DNA, 25 bp, Canis familiaris
agatcggataccaatcctgccaaaa

SEQ ID NO: 27909 - DNA, 25 bp, Canis familiaris
agatctgcaggagccaccgtaatat

SEQ ID NO: 27910 - DNA, 25 bp, Canis familiaris
agctggattacgcaacagtaaatcc

SEQ ID NO: 27911 - DNA, 25 bp, Canis familiaris
agttgcattaccaacaaataaataa

SEQ ID NO: 27912 - DNA, 25 bp, Canis familiaris
agttgctttactgcagaaaccaaac

SEQ ID NO: 27913 - DNA, 25 bp, Canis familiaris
agttcccaactgtaaaagcctcaat

SEQ ID NO: 27914 - DNA, 25 bp, Canis familiaris
agttcaaccgtggaaagatgccaat

SEQ ID NO: 27915 - DNA, 25 bp, Canis familiaris
agttcttcatcgctggaaagctgaa

SEQ ID NO: 27916 - DNA, 25 bp, Canis familiaris
agtttaatgcggacgaatttgaaga

SEQ ID NO: 27917 - DNA, 25 bp, Canis familiaris
agtttacaggggtagcagcctaaga

SEQ ID NO: 27918 - DNA, 25 bp, Canis familiaris
agatttacaggtgcagtcaccgaaa

SEQ ID NO: 27919 - DNA, 25 bp, Canis familiaris
agattaacagcgtttgctacccaaa

SEQ ID NO: 27920 - DNA, 25 bp, Canis familiaris
agattcaagagatgtgttcccgcac

SEQ ID NO: 27921 - DNA, 25 bp, Canis familiaris
agttgcacgagacgtggcgcacgga

SEQ ID NO: 27922 - DNA, 25 bp, Canis familiaris
agttgccgtaattggagcctggcat

SEQ ID NO: 27923 - DNA, 25 bp, Canis familiaris
agttcacagtacagcagtcctggag

SEQ ID NO: 27924 - DNA, 25 bp, Canis familiaris
agttctatttattgcgtcgctgggg

SEQ ID NO: 27925 - DNA, 25 bp, Canis familiaris
agttgatcaattttccttctgtggg

SEQ ID NO: 27926 - DNA, 25 bp, Canis familiaris
agttgcaatattttcctgtagatag

SEQ ID NO: 27927 - DNA, 25 bp, Canis familiaris
agatcatcaaactggccttggagtg

SEQ ID NO: 27928 - DNA, 25 bp, Canis familiaris
gcagttaaaaagctcgtagttggat

SEQ ID NO: 27929 - DNA, 25 bp, Canis familiaris
agttggaaagatctcgtccctggtc

SEQ ID NO: 27930 - DNA, 25 bp, Canis familiaris
agttgcgcgaggtgatcggcgccgt

SEQ ID NO: 27931 - DNA, 25 bp, Canis familiaris
agttgggaggaggactcgaggccct

SEQ ID NO: 27932 - DNA, 25 bp, Canis familiaris
agttggtaggtgtgctcaggtccaa

SEQ ID NO: 27933 - DNA, 25 bp, Canis familiaris
agttggaacctggagctgcgagtcc

SEQ ID NO: 27934 - DNA, 25 bp, Canis familiaris
agttgataaacttagctggagagat

SEQ ID NO: 27935 - DNA, 25 bp, Canis familiaris
agttgatggaagtcgtatagaagat

SEQ ID NO: 27936 - DNA, 25 bp, Canis familiaris
agttgtgtccctgtcatgaaagagt

SEQ ID NO: 27937 - DNA, 25 bp, Canis familiaris
agttgatggcccaatgttaaatgtt

SEQ ID NO: 27938 - DNA, 25 bp, Canis familiaris
agttgatgccacccaggttaacctt

SEQ ID NO: 27939 - DNA, 25 bp, Canis familiaris
agatatgcaccctcatgtttatagc

SEQ ID NO: 27940 - DNA, 25 bp, Canis familiaris
agtatgaccctgctattcgaagcct

SEQ ID NO: 27941 - DNA, 25 bp, Canis familiaris
agttaagcactgaccatctggcaag

SEQ ID NO: 27942 - DNA, 25 bp, Canis familiaris
agataacggctccggtatgtgcaag

SEQ ID NO: 27943 - DNA, 25 bp, Canis familiaris
agatatccttcttcgagcatttgag

SEQ ID NO: 27944 - DNA, 25 bp, Canis familiaris
agttgcccagcttggagttgtctgt

SEQ ID NO: 27945 - DNA, 25 bp, Canis familiaris
agttgcagtccaaggttgtggctgt

SEQ ID NO: 27946 - DNA, 25 bp, Canis familiaris
agatatggttaaaaatgtgcgctgt

SEQ ID NO: 27947 - DNA, 25 bp, Canis familiaris
agattgacttggaaacggcctttgc

SEQ ID NO: 27948 - DNA, 25 bp, Canis familiaris
agtattcctgtgacttggacctttc

SEQ ID NO: 27949 - DNA, 25 bp, Canis familiaris
agttggcacattggctgtgtccact

SEQ ID NO: 27950 - DNA, 25 bp, Canis familiaris
agttaccatctcatgagttgcctcc

SEQ ID NO: 27951 - DNA, 25 bp, Canis familiaris
agataacctttcaagtctgctctgc

SEQ ID NO: 27952 - DNA, 25 bp, Canis familiaris
agatcctgctgtggtcaggtcgctt

SEQ ID NO: 27953 - DNA, 25 bp, Canis familiaris
agtatgtgctgcgctatgaggcctt

SEQ ID NO: 27954 - DNA, 25 bp, Canis familiaris
agtatgactcgcccataggtctaac

SEQ ID NO: 27955 - DNA, 25 bp, Canis familiaris
agttgtgtggccaaagtaatatact

SEQ ID NO: 27956 - DNA, 25 bp, Canis familiaris
agtttggcccgttgtagtaatcttg

SEQ ID NO: 27957 - DNA, 25 bp, Canis familiaris
agtttggctccggtgtagtaatgca

SEQ ID NO: 27958 - DNA, 25 bp, Canis familiaris
agttctggccgcgtggatttaaagc

SEQ ID NO: 27959 - DNA, 25 bp, Canis familiaris
agcgttggaccccagagttatggag

SEQ ID NO: 27960 - DNA, 25 bp, Canis familiaris
agattagggaccaaggacatatgga

SEQ ID NO: 27961 - DNA, 25 bp, Canis familiaris
agcttaagcccaccggagtaggatc

SEQ ID NO: 27962 - DNA, 25 bp, Canis familiaris
agcttaagttctctccaaaagagct

SEQ ID NO: 27963 - DNA, 25 bp, Canis familiaris
agctggaactttcacagaatcaaaa

SEQ ID NO: 27964 - DNA, 25 bp, Canis familiaris
agcggcccacttgacgtgtataaat

SEQ ID NO: 27965 - DNA, 25 bp, Canis familiaris
agaggaaactttacacgtacagaat

SEQ ID NO: 27966 - DNA, 25 bp, Canis familiaris
agaggaaacgtagccaccagcttct

SEQ ID NO: 27967 - DNA, 25 bp, Canis familiaris
agagtaagggttccagcccaggact

SEQ ID NO: 27968 - DNA, 25 bp, Canis familiaris
agttcagaggcgttgtggcccggaa

SEQ ID NO: 27969 - DNA, 25 bp, Canis familiaris
agttcaggcgagcaggccgttgaga

SEQ ID NO: 27970 - DNA, 25 bp, Canis familiaris
agttcatggtgcagaatgggttgag

SEQ ID NO: 27971 - DNA, 25 bp, Canis familiaris
agttgctggtgatgaaggcgctctc

SEQ ID NO: 27972 - DNA, 25 bp, Canis familiaris
agttgctgcagttaaagctcgtagt

SEQ ID NO: 27973 - DNA, 25 bp, Canis familiaris
agttgggtctaaacggtctgctcca

SEQ ID NO: 27974 - DNA, 25 bp, Canis familiaris
agttggtgactaacctggactctgc

SEQ ID NO: 27975 - DNA, 25 bp, Canis familiaris
agttcgtggcacacttggacatggg

SEQ ID NO: 27976 - DNA, 25 bp, Canis familiaris
agttcctggcaggcactgtggacac

SEQ ID NO: 27977 - DNA, 25 bp, Canis familiaris
agttcactgagaacctgggcaccat

SEQ ID NO: 27978 - DNA, 25 bp, Canis familiaris
agtatcctgatttttggctcaccat

SEQ ID NO: 27979 - DNA, 25 bp, Canis familiaris
agttctgtattgctgtggcttccat

SEQ ID NO: 27980 - DNA, 25 bp, Canis familiaris
agtttgatgttgcaatccattcccg

SEQ ID NO: 27981 - DNA, 25 bp, Canis familiaris
agtttgatgatttttctctctctct

SEQ ID NO: 27982 - DNA, 25 bp, Canis familiaris
agttctcatgtatttctttgccatt

SEQ ID NO: 27983 - DNA, 25 bp, Canis familiaris
agttctgataccttgtttacatgtt

SEQ ID NO: 27984 - DNA, 25 bp, Canis familiaris
agttctgattcttgctggtatggtt

SEQ ID NO: 27985 - DNA, 25 bp, Canis familiaris
agttctcattcttgctgttttattg

SEQ ID NO: 27986 - DNA, 25 bp, Canis familiaris
agttctcctctcaggatcttgatta

SEQ ID NO: 27987 - DNA, 25 bp, Canis familiaris
agttcttgctccaggagggatgagc

SEQ ID NO: 27988 - DNA, 25 bp, Canis familiaris
agttcttgccccgaaggcatataat

SEQ ID NO: 27989 - DNA, 25 bp, Canis familiaris
agttttcctccctgagtgaacatgg

SEQ ID NO: 27990 - DNA, 25 bp, Canis familiaris
agttcttcttccctcaaggggagtg

SEQ ID NO: 27991 - DNA, 25 bp, Canis familiaris
agcttctttcttcctcaaggggagt

SEQ ID NO: 27992 - DNA, 25 bp, Canis familiaris
agttctctctcgtgtgacaggggag

SEQ ID NO: 27993 - DNA, 25 bp, Canis familiaris
agatttctgatcctcaaaatgggga

SEQ ID NO: 27994 - DNA, 25 bp, Canis familiaris
agtttattcttcccaattggcaata

SEQ ID NO: 27995 - DNA, 25 bp, Canis familiaris
agttgtacagttcccaatctggcct

SEQ ID NO: 27996 - DNA, 25 bp, Canis familiaris
agtttacacttctaagtctgagtcc

SEQ ID NO: 27997 - DNA, 25 bp, Canis familiaris
agtttcacatctattaggtgaggct

SEQ ID NO: 27998 - DNA, 25 bp, Canis familiaris
agatttgacttcacttggcgactct

SEQ ID NO: 27999 - DNA, 25 bp, Canis familiaris
agtttgagttgaagctcgtgccctt

SEQ ID NO: 28000 - DNA, 25 bp, Canis familiaris
agtttcagtcaaagacgcctgcctt

SEQ ID NO: 28001 - DNA, 25 bp, Canis familiaris
agatttcttcaatgtagcctactcg

SEQ ID NO: 28002 - DNA, 25 bp, Canis familiaris
agatatatccagttttccctagcta

SEQ ID NO: 28003 - DNA, 25 bp, Canis familiaris
agtttccgccatctcagtcatcagg

SEQ ID NO: 28004 - DNA, 25 bp, Canis familiaris
agttcctgcccatttcattcaggga

SEQ ID NO: 28005 - DNA, 25 bp, Canis familiaris
agttctcagcacaatcttcgttggg

SEQ ID NO: 28006 - DNA, 25 bp, Canis familiaris
agatatccagtccgtgacgattggg

SEQ ID NO: 28007 - DNA, 25 bp, Canis familiaris
agataatcacagcttgaagttagga

SEQ ID NO: 28008 - DNA, 25 bp, Canis familiaris
agataaagccctgacctgttgcgat

SEQ ID NO: 28009 - DNA, 25 bp, Canis familiaris
agctggaaccgtgaggcgtcaggct

SEQ ID NO: 28010 - DNA, 25 bp, Canis familiaris
agctggaaccgtgaggcgtcaggct

SEQ ID NO: 28011 - DNA, 25 bp, Canis familiaris
agttaactagctcagtcgtcggtgc

SEQ ID NO: 28012 - DNA, 25 bp, Canis familiaris
agtattcttggtcttctgaaggctg

SEQ ID NO: 28013 - DNA, 25 bp, Canis familiaris
agtttattgcctattctgaagtgtc

SEQ ID NO: 28014 - DNA, 25 bp, Canis familiaris
agttcttttctattactgtattgtc

SEQ ID NO: 28015 - DNA, 25 bp, Canis familiaris
agtttttctttctattctattgtat

SEQ ID NO: 28016 - DNA, 25 bp, Canis familiaris
agtttttctcttaatcatctctcgt

SEQ ID NO: 28017 - DNA, 25 bp, Canis familiaris
agtttttactttactggctgctgct

SEQ ID NO: 28018 - DNA, 25 bp, Canis familiaris
agatcgacttacatcttgggtcctg

SEQ ID NO: 28019 - DNA, 25 bp, Canis familiaris
agaggacttaccagtgggtgccctt

SEQ ID NO: 28020 - DNA, 25 bp, Canis familiaris
agaggacttaccagtgggtgccctt

SEQ ID NO: 28021 - DNA, 25 bp, Canis familiaris
agaggactttgacacgggagcacgt

SEQ ID NO: 28022 - DNA, 25 bp, Canis familiaris
aaatgtctataacacgcgtaggggt

SEQ ID NO: 28023 - DNA, 25 bp, Canis familiaris
agtattcttataacacagtgctcag

SEQ ID NO: 28024 - DNA, 25 bp, Canis familiaris
agttcttattatccaaagcatagta

SEQ ID NO: 28025 - DNA, 25 bp, Canis familiaris
agttctttgtatcgtatctgaagta

SEQ ID NO: 28026 - DNA, 25 bp, Canis familiaris
agttcttttctgcctgagcgaggac

SEQ ID NO: 28027 - DNA, 25 bp, Canis familiaris
agttctttgcttttgacacggagac

SEQ ID NO: 28028 - DNA, 25 bp, Canis familiaris
agttccttctcgttgacatcggagt

SEQ ID NO: 28029 - DNA, 25 bp, Canis familiaris
agtttacctctgtgacatgtgtgtt

SEQ ID NO: 28030 - DNA, 25 bp, Canis familiaris
agttttcgctctggtgaatgcatgt

SEQ ID NO: 28031 - DNA, 25 bp, Canis familiaris
agttttcgctcggtgaatacatgtt

SEQ ID NO: 28032 - DNA, 25 bp, Canis familiaris
agtttctccctgataaagtgctctc

SEQ ID NO: 28033 - DNA, 25 bp, Canis familiaris
agttcgtcgtcgttacatgaggtcg

SEQ ID NO: 28034 - DNA, 25 bp, Canis familiaris
agttagtccttgaccactagtttgg

SEQ ID NO: 28035 - DNA, 25 bp, Canis familiaris
agtttgccactgttaaccagtattg

SEQ ID NO: 28036 - DNA, 25 bp, Canis familiaris
agctcgacgccgtgaaccaataggc

SEQ ID NO: 28037 - DNA, 25 bp, Canis familiaris
agatcataccccgaaaccagaaggc

SEQ ID NO: 28038 - DNA, 25 bp, Canis familiaris
agagctcaccaagaacccaaatagt

SEQ ID NO: 28039 - DNA, 25 bp, Canis familiaris
agttcctcatcagctactgtcaaag

SEQ ID NO: 28040 - DNA, 25 bp, Canis familiaris
agttccttatctgacttaattaaat

SEQ ID NO: 28041 - DNA, 25 bp, Canis familiaris
agtttcctatctgagcttatttgca

SEQ ID NO: 28042 - DNA, 25 bp, Canis familiaris
agatttcctactttttaatggctga

SEQ ID NO: 28043 - DNA, 25 bp, Canis familiaris
agcactccctatattttaagcgttc

SEQ ID NO: 28044 - DNA, 25 bp, Canis familiaris
agttcccttagtcattagcccagac

SEQ ID NO: 28045 - DNA, 25 bp, Canis familiaris
agttctgccttaagtttgagcacca

SEQ ID NO: 28046 - DNA, 25 bp, Canis familiaris
agttacttaaattctctgagcctca

SEQ ID NO: 28047 - DNA, 25 bp, Canis familiaris
agttagcttggagctctccatctct

SEQ ID NO: 28048 - DNA, 25 bp, Canis familiaris
agtttcttgagaagctgctgcctcc

SEQ ID NO: 28049 - DNA, 25 bp, Canis familiaris
agatattcaatggaagcgcgggtat

SEQ ID NO: 28050 - DNA, 25 bp, Canis familiaris
agatcattattccaacggcttctgt

SEQ ID NO: 28051 - DNA, 25 bp, Canis familiaris
agtttctgctctcaaggatctgctt

SEQ ID NO: 28052 - DNA, 25 bp, Canis familiaris
agaatttgcctaccaggaagcccag

SEQ ID NO: 28053 - DNA, 25 bp, Canis familiaris
agactctttgtctcagtaaacctgt

SEQ ID NO: 28054 - DNA, 25 bp, Canis familiaris
agagctcgattcactaaaaacctta

SEQ ID NO: 28055 - DNA, 25 bp, Canis familiaris
agagcccacaaggctttacaacctt

SEQ ID NO: 28056 - DNA, 25 bp, Canis familiaris
acagactattaatgttagccaacta

SEQ ID NO: 28057 - DNA, 25 bp, Canis familiaris
agcagaaattaatcattcccaaata

SEQ ID NO: 28058 - DNA, 25 bp, Canis familiaris
agataacactaaattctcccaagta

SEQ ID NO: 28059 - DNA, 25 bp, Canis familiaris
agataatacttcttttaccacccat

SEQ ID NO: 28060 - DNA, 25 bp, Canis familiaris
agttatgccgaatgttacccagcca

SEQ ID NO: 28061 - DNA, 25 bp, Canis familiaris
agtttccagatatggtgacctcgct

SEQ ID NO: 28062 - DNA, 25 bp, Canis familiaris
agctttcccaggtgtggatccagct

SEQ ID NO: 28063 - DNA, 25 bp, Canis familiaris
agttcaccagggtggagacaagtgc

SEQ ID NO: 28064 - DNA, 25 bp, Canis familiaris
agttactcattgggtggacactccg

SEQ ID NO: 28065 - DNA, 25 bp, Canis familiaris
agttagtcattctggcaaatagcct

SEQ ID NO: 28066 - DNA, 25 bp, Canis familiaris
agttccacttctttcataattgcct

SEQ ID NO: 28067 - DNA, 25 bp, Canis familiaris
agttccagtttctgaaagtgcctta

SEQ ID NO: 28068 - DNA, 25 bp, Canis familiaris
agatcccttttcagaagtgtcggta

SEQ ID NO: 28069 - DNA, 25 bp, Canis familiaris
agaccacgttcgtgaagcgtcacct

SEQ ID NO: 28070 - DNA, 25 bp, Canis familiaris
agacccggacactgagttgtacact

SEQ ID NO: 28071 - DNA, 25 bp, Canis familiaris
agacccagtgaacaagtctggaggc

SEQ ID NO: 28072 - DNA, 25 bp, Canis familiaris
agataccatttacagggcaggggat

SEQ ID NO: 28073 - DNA, 25 bp, Canis familiaris
agatactaacccttggtggacggat

SEQ ID NO: 28074 - DNA, 25 bp, Canis familiaris
agaactacatacttggggaatttgt

SEQ ID NO: 28075 - DNA, 25 bp, Canis familiaris
agatcctgagatgttggtagaaggt

SEQ ID NO: 28076 - DNA, 25 bp, Canis familiaris
agattcatgagatagcatttcagaa

SEQ ID NO: 28077 - DNA, 25 bp, Canis familiaris
agttgccagagatgcttcgaaaggc

SEQ ID NO: 28078 - DNA, 25 bp, Canis familiaris
agattccatgtgtgctttggggagc

SEQ ID NO: 28079 - DNA, 25 bp, Canis familiaris
agttccttgcatttttgagagccag

SEQ ID NO: 28080 - DNA, 25 bp, Canis familiaris
agttctggacagttttgcagcacca

SEQ ID NO: 28081 - DNA, 25 bp, Canis familiaris
agttctgtgggttatctcatgatct

SEQ ID NO: 28082 - DNA, 25 bp, Canis familiaris
agaccgaggagtgtctcgtcctgtc

SEQ ID NO: 28083 - DNA, 25 bp, Canis familiaris
agacaaggtttgctcggatcctggc

SEQ ID NO: 28084 - DNA, 25 bp, Canis familiaris
agataggcattttggtcggcgtctg

SEQ ID NO: 28085 - DNA, 25 bp, Canis familiaris
agttcagcagtttcctggggttggc

SEQ ID NO: 28086 - DNA, 25 bp, Canis familiaris
agttgaagtctgtcctggttgtctg

SEQ ID NO: 28087 - DNA, 25 bp, Canis familiaris
agttacatgttgtctgtggctgctt

SEQ ID NO: 28088 - DNA, 25 bp, Canis familiaris
agttacactgtgtctctatgtgaat

SEQ ID NO: 28089 - DNA, 25 bp, Canis familiaris
agttgaacgggctattggatctaga

SEQ ID NO: 28090 - DNA, 25 bp, Canis familiaris
agctgtgctacgtcgccctggactt

SEQ ID NO: 28091 - DNA, 25 bp, Canis familiaris
agttgtagtcaccagccaggactct

SEQ ID NO: 28092 - DNA, 25 bp, Canis familiaris
agttctgcagtgacgacacctactt

SEQ ID NO: 28093 - DNA, 25 bp, Canis familiaris
agttctgcagtttatcccaacatgt

SEQ ID NO: 28094 - DNA, 25 bp, Canis familiaris
agttgtgctttctatttccagctgt

SEQ ID NO: 28095 - DNA, 25 bp, Canis familiaris
agttgtgtttggatatctcgttgta

SEQ ID NO: 28096 - DNA, 25 bp, Canis familiaris
agttgatgtttgttttctgtttgat

SEQ ID NO: 28097 - DNA, 25 bp, Canis familiaris
agttgatctattttttgctcttgtt

SEQ ID NO: 28098 - DNA, 25 bp, Canis familiaris
agttcaaatgctttttgttctattt

SEQ ID NO: 28099 - DNA, 25 bp, Canis familiaris
agttcacagaattttagcttccatt

SEQ ID NO: 28100 - DNA, 25 bp, Canis familiaris
agttatcaaattttatctcaccatt

SEQ ID NO: 28101 - DNA, 25 bp, Canis familiaris
agttttgacaagtattctatccatg

SEQ ID NO: 28102 - DNA, 25 bp, Canis familiaris
agttcttcacttgattatatccttc

SEQ ID NO: 28103 - DNA, 25 bp, Canis familiaris
agttcttccagggaccaatccctag

SEQ ID NO: 28104 - DNA, 25 bp, Canis familiaris
agattgttgccatcaacgacccctt

SEQ ID NO: 28105 - DNA, 25 bp, Canis familiaris
agattccagcaataaaccaagcctt

SEQ ID NO: 28106 - DNA, 25 bp, Canis familiaris
agatttaccaaaacccatacagctc

SEQ ID NO: 28107 - DNA, 25 bp, Canis familiaris
agattgtacttagaccctactctca

SEQ ID NO: 28108 - DNA, 25 bp, Canis familiaris
agttctgattttgacagcactcccc

SEQ ID NO: 28109 - DNA, 25 bp, Canis familiaris
agttctgggtggacaacaccacctc

SEQ ID NO: 28110 - DNA, 25 bp, Canis familiaris
agttctggtgtgtacgacaagccct

SEQ ID NO: 28111 - DNA, 25 bp, Canis familiaris
agttcaggttggctggagtgcaggc

SEQ ID NO: 28112 - DNA, 25 bp, Canis familiaris
agattcaggtcgggtccgtggtgtg

SEQ ID NO: 28113 - DNA, 25 bp, Canis familiaris
agatcatcaagctggacaccgtgcg

SEQ ID NO: 28114 - DNA, 25 bp, Canis familiaris
agatcatgaccttgaacggcagttg

SEQ ID NO: 28115 - DNA, 25 bp, Canis familiaris
agatcatggccttccatgggctcat

SEQ ID NO: 28116 - DNA, 25 bp, Canis familiaris
agatcattgctcctcctgagcgcaa

SEQ ID NO: 28117 - DNA, 25 bp, Canis familiaris
agatcatgcaagctggtggctggac

SEQ ID NO: 28118 - DNA, 25 bp, Canis familiaris
agatctgcagacggctgttgtctcc

SEQ ID NO: 28119 - DNA, 25 bp, Canis familiaris
agttcaagctgcgagtcaggctctc

SEQ ID NO: 28120 - DNA, 25 bp, Canis familiaris
agttacctggcattagaccatcttt

SEQ ID NO: 28121 - DNA, 25 bp, Canis familiaris
agataatcgggcgtcaggcctcttt

SEQ ID NO: 28122 - DNA, 25 bp, Canis familiaris
agttatctacagttattcgctcttc

SEQ ID NO: 28123 - DNA, 25 bp, Canis familiaris
agttactatagtattctgctacaat

SEQ ID NO: 28124 - DNA, 25 bp, Canis familiaris
agttattaagtagtcagctctgctg

SEQ ID NO: 28125 - DNA, 25 bp, Canis familiaris
agttatggaagtagcccaagtgtcc

SEQ ID NO: 28126 - DNA, 25 bp, Canis familiaris
agattgtggaactcagccaaggcac

SEQ ID NO: 28127 - DNA, 25 bp, Canis familiaris
agatttggaggcttcactggggccc

SEQ ID NO: 28128 - DNA, 25 bp, Canis familiaris
agttagtgtctggtcagctgggctc

SEQ ID NO: 28129 - DNA, 25 bp, Canis familiaris
agatctatgattcgagtactcggtc

SEQ ID NO: 28130 - DNA, 25 bp, Canis familiaris
agatcaaagttactaccgtgatgca

SEQ ID NO: 28131 - DNA, 25 bp, Canis familiaris
agatgcaatgaactaattccttgaa

SEQ ID NO: 28132 - DNA, 25 bp, Canis familiaris
agataacacagcccagatctcagct

SEQ ID NO: 28133 - DNA, 25 bp, Canis familiaris
agatatccacatggctcagtctctc

SEQ ID NO: 28134 - DNA, 25 bp, Canis familiaris
agaagtaacgtactcttcgtaggag

SEQ ID NO: 28135 - DNA, 25 bp, Canis familiaris
agaacgtcaccttgttctagtaggc

SEQ ID NO: 28136 - DNA, 25 bp, Canis familiaris
agatccggtccttgaactggtatcg

SEQ ID NO: 28137 - DNA, 25 bp, Canis familiaris
agatcccgactataacggcaccagt

SEQ ID NO: 28138 - DNA, 25 bp, Canis familiaris
agacaccgaatttaaagcccacagc

SEQ ID NO: 28139 - DNA, 25 bp, Canis familiaris
agatatccgacctgagtaccgagag

SEQ ID NO: 28140 - DNA, 25 bp, Canis familiaris
agatccaagtcgtggtacctgaggt

SEQ ID NO: 28141 - DNA, 25 bp, Canis familiaris
agttgcagagtttgggacacctggg

SEQ ID NO: 28142 - DNA, 25 bp, Canis familiaris
agattgagatgttaggtagccccct

SEQ ID NO: 28143 - DNA, 25 bp, Canis familiaris
agttaggatggcactagcggcactg

SEQ ID NO: 28144 - DNA, 25 bp, Canis familiaris
agattaggactgttctactgtgaat

SEQ ID NO: 28145 - DNA, 25 bp, Canis familiaris
agttgtaacctcatcactggaatgt

SEQ ID NO: 28146 - DNA, 25 bp, Canis familiaris
agttaagcagcctttctgtggagag

SEQ ID NO: 28147 - DNA, 25 bp, Canis familiaris
agttgggcagcattcatgttcctag

SEQ ID NO: 28148 - DNA, 25 bp, Canis familiaris
agttgtctgcagttattaagctcgt

SEQ ID NO: 28149 - DNA, 25 bp, Canis familiaris
agttgtcgagacgacgggtcgctcc

SEQ ID NO: 28150 - DNA, 25 bp, Canis familiaris
agttgcaccgactacaaggtcagtt

SEQ ID NO: 28151 - DNA, 25 bp, Canis familiaris
agattgccaccctacagggaactgc

SEQ ID NO: 28152 - DNA, 25 bp, Canis familiaris
agttcgcataactacattggcaaca

SEQ ID NO: 28153 - DNA, 25 bp, Canis familiaris
agttgcgctctgactacaggtgcac

SEQ ID NO: 28154 - DNA, 25 bp, Canis familiaris
agttgtgcttatcactcagggcaga

SEQ ID NO: 28155 - DNA, 25 bp, Canis familiaris
agttctgctgtccgtcacaggagaa

SEQ ID NO: 28156 - DNA, 25 bp, Canis familiaris
agttctctgttcccaatgataacca

SEQ ID NO: 28157 - DNA, 25 bp, Canis familiaris
agacactgctgtaaggaagaaacca

SEQ ID NO: 28158 - DNA, 25 bp, Canis familiaris
agagccatccctggggaaacactac

SEQ ID NO: 28159 - DNA, 25 bp, Canis familiaris
agaaatcctaggaccacatcaaccc

SEQ ID NO: 28160 - DNA, 25 bp, Canis familiaris
agagtccctagaaacatgctcaccc

SEQ ID NO: 28161 - DNA, 25 bp, Canis familiaris
agttctctccaaaagagctcatctc

SEQ ID NO: 28162 - DNA, 25 bp, Canis familiaris
agatttccactcaaagtgccaacga

SEQ ID NO: 28163 - DNA, 25 bp, Canis familiaris
agataactcaccactgtccaaagac

SEQ ID NO: 28164 - DNA, 25 bp, Canis familiaris
agagactaaacaccttccaaaggct

SEQ ID NO: 28165 - DNA, 25 bp, Canis familiaris
agaggtgaagtacctggcccaaggc

SEQ ID NO: 28166 - DNA, 25 bp, Canis familiaris
agaggtaattacatagtgtaaagtc

SEQ ID NO: 28167 - DNA, 25 bp, Canis familiaris
agattgtattccgtttgttaaagct

SEQ ID NO: 28168 - DNA, 25 bp, Canis familiaris
agatcctatcttctctcgaaacaac

SEQ ID NO: 28169 - DNA, 25 bp, Canis familiaris
agatcttatattgtggcgaagacac

SEQ ID NO: 28170 - DNA, 25 bp, Canis familiaris
agatcccgagatgacgccaatgacc

SEQ ID NO: 28171 - DNA, 25 bp, Canis familiaris
agatcacccagatcaaccatggcct

SEQ ID NO: 28172 - DNA, 25 bp, Canis familiaris
agattgccgctgaaattgcacaggc

SEQ ID NO: 28173 - DNA, 25 bp, Canis familiaris
agttcgctctgtgatgtcaagtgca

SEQ ID NO: 28174 - DNA, 25 bp, Canis familiaris
agttgctgtccagcttctagtgcat

SEQ ID NO: 28175 - DNA, 25 bp, Canis familiaris
agttcctggcacttctgctagtgcc

SEQ ID NO: 28176 - DNA, 25 bp, Canis familiaris
agttcagtggcctcagtgatgtaca

SEQ ID NO: 28177 - DNA, 25 bp, Canis familiaris
agttggtggctcagggatgctcatg

SEQ ID NO: 28178 - DNA, 25 bp, Canis familiaris
agttgggttcatagatgccatctgc

SEQ ID NO: 28179 - DNA, 25 bp, Canis familiaris
agatgctggcgtaaatgattttgct

SEQ ID NO: 28180 - DNA, 25 bp, Canis familiaris
agttcagctgaataaatactgcatt

SEQ ID NO: 28181 - DNA, 25 bp, Canis familiaris
agttcagtgttaccatatgcctctt

SEQ ID NO: 28182 - DNA, 25 bp, Canis familiaris
agattagtgatttgccagggtttag

SEQ ID NO: 28183 - DNA, 25 bp, Canis familiaris
agttagctaggccggattctttagg

SEQ ID NO: 28184 - DNA, 25 bp, Canis familiaris
agttggctacgtcggattcatctgg

SEQ ID NO: 28185 - DNA, 25 bp, Canis familiaris
agatcaggtaggcgtgcttcatcct

SEQ ID NO: 28186 - DNA, 25 bp, Canis familiaris
agattactatagagtgctgattcct

SEQ ID NO: 28187 - DNA, 25 bp, Canis familiaris
agattcacataactcggtatcccta

SEQ ID NO: 28188 - DNA, 25 bp, Canis familiaris
agttcagctgaaattcgtatccaca

SEQ ID NO: 28189 - DNA, 25 bp, Canis familiaris
agttcagagaggactccttccagct

SEQ ID NO: 28190 - DNA, 25 bp, Canis familiaris
agttagcatgatggcattcccttca

SEQ ID NO: 28191 - DNA, 25 bp, Canis familiaris
agttgactgtgccttatacatctcc

SEQ ID NO: 28192 - DNA, 25 bp, Canis familiaris
agatggaccgtggttatcacttccc

SEQ ID NO: 28193 - DNA, 25 bp, Canis familiaris
agataactgtattttgtccggcgcc

SEQ ID NO: 28194 - DNA, 25 bp, Canis familiaris
agattcatgtgtatttcccttcgtc

SEQ ID NO: 28195 - DNA, 25 bp, Canis familiaris
agttctgcttttacagtccatttgt

SEQ ID NO: 28196 - DNA, 25 bp, Canis familiaris
agttctcagtttatctcaattttat

SEQ ID NO: 28197 - DNA, 25 bp, Canis familiaris
agttcggcacttgtctcattttatt

SEQ ID NO: 28198 - DNA, 25 bp, Canis familiaris
agttctctatctctaaatatttatt

SEQ ID NO: 28199 - DNA, 25 bp, Canis familiaris
agttctttcactatcaattggcttt

SEQ ID NO: 28200 - DNA, 25 bp, Canis familiaris
agttcataatcagttgccacttgtc

SEQ ID NO: 28201 - DNA, 25 bp, Canis familiaris
agttcaagccagagtcagcacgtcc

SEQ ID NO: 28202 - DNA, 25 bp, Canis familiaris
agttgcagaataagagtcccatgtc

SEQ ID NO: 28203 - DNA, 25 bp, Canis familiaris
agttcactcagtagagtccactctg

SEQ ID NO: 28204 - DNA, 25 bp, Canis familiaris
agttcattcagtcgtgtaacactca

SEQ ID NO: 28205 - DNA, 25 bp, Canis familiaris
agttcttcattttgcgtacagctct

SEQ ID NO: 28206 - DNA, 25 bp, Canis familiaris
agattcggttattgagctacgctcg

SEQ ID NO: 28207 - DNA, 25 bp, Canis familiaris
agatttgtgattttggtctagccag

SEQ ID NO: 28208 - DNA, 25 bp, Canis familiaris
agttctgtgatttcttgataagcct

SEQ ID NO: 28209 - DNA, 25 bp, Canis familiaris
agttcttaggactgtggcagccttt

SEQ ID NO: 28210 - DNA, 25 bp, Canis familiaris
agctcctgtcggaggtggggctttc

SEQ ID NO: 28211 - DNA, 25 bp, Canis familiaris
agccctctggggagtggagcttttc

SEQ ID NO: 28212 - DNA, 25 bp, Canis familiaris
agctggacgcagagtagggattttt

SEQ ID NO: 28213 - DNA, 25 bp, Canis familiaris
agcactccggaagactggatttatg

SEQ ID NO: 28214 - DNA, 25 bp, Canis familiaris
agttcctggtactctgcagctaata

SEQ ID NO: 28215 - DNA, 25 bp, Canis familiaris
agttccggttggtcatagccagtac

SEQ ID NO: 28216 - DNA, 25 bp, Canis familiaris
agatgtccgacttatccgagagcag

SEQ ID NO: 28217 - DNA, 25 bp, Canis familiaris
agattccgtttgtcaccagggatcc

SEQ ID NO: 28218 - DNA, 25 bp, Canis familiaris
agatacgcgttttctggtgtcgcct

SEQ ID NO: 28219 - DNA, 25 bp, Canis familiaris
agatgaaggttctgtgggctgcgct

SEQ ID NO: 28220 - DNA, 25 bp, Canis familiaris
agatctgggacctgtgggcaatgct

SEQ ID NO: 28221 - DNA, 25 bp, Canis familiaris
agagttgcccaaagggggatgcttt

SEQ ID NO: 28222 - DNA, 25 bp, Canis familiaris
agagattcccttagaggtgccctgt

SEQ ID NO: 28223 - DNA, 25 bp, Canis familiaris
agatgaactcccgagatggaccgtg

SEQ ID NO: 28224 - DNA, 25 bp, Canis familiaris
agatgcacctcgctgcaagaaagag

SEQ ID NO: 28225 - DNA, 25 bp, Canis familiaris
agatctcgtggtcctggaaaatgat

SEQ ID NO: 28226 - DNA, 25 bp, Canis familiaris
agattcctgtctctggatccaagtc

SEQ ID NO: 28227 - DNA, 25 bp, Canis familiaris
agttgcctgattatacatctccagt

SEQ ID NO: 28228 - DNA, 25 bp, Canis familiaris
agttgttttttaatctgcaactttg

SEQ ID NO: 28229 - DNA, 25 bp, Canis familiaris
agattgtttctctcttggaactttt

SEQ ID NO: 28230 - DNA, 25 bp, Canis familiaris
agatgtggtttcacagcgtaacgaa

SEQ ID NO: 28231 - DNA, 25 bp, Canis familiaris
agttgctgtttttggcagtcaaggt

SEQ ID NO: 28232 - DNA, 25 bp, Canis familiaris
agttgattctgatttgaaacacggt

SEQ ID NO: 28233 - DNA, 25 bp, Canis familiaris
agttgtctctgatgcagcttctacg

SEQ ID NO: 28234 - DNA, 25 bp, Canis familiaris
agatgctcttcaacccatatctaac

SEQ ID NO: 28235 - DNA, 25 bp, Canis familiaris
agatctgtaatccctcaatgtgcaa

SEQ ID NO: 28236 - DNA, 25 bp, Canis familiaris
agatctgtgattcttaggagaggtc

SEQ ID NO: 28237 - DNA, 25 bp, Canis familiaris
agatctgtgttcatggtgttggggt

SEQ ID NO: 28238 - DNA, 25 bp, Canis familiaris
agatcttggtcttggacatcggggc

SEQ ID NO: 28239 - DNA, 25 bp, Canis familiaris
agattctgcgagatttccggggcac

SEQ ID NO: 28240 - DNA, 25 bp, Canis familiaris
agatccagggaatccgggaatgcct

SEQ ID NO: 28241 - DNA, 25 bp, Canis familiaris
agatccgggagatcgcggacgggct

SEQ ID NO: 28242 - DNA, 25 bp, Canis familiaris
agatccccgagatgcagcggatgct

SEQ ID NO: 28243 - DNA, 25 bp, Canis familiaris
agatccccgagtacgatgatgctgc

SEQ ID NO: 28244 - DNA, 25 bp, Canis familiaris
agatcgcgccggattattgctgcaa

SEQ ID NO: 28245 - DNA, 25 bp, Canis familiaris
agatcgcgccggattattgctgcaa

SEQ ID NO: 28246 - DNA, 25 bp, Canis familiaris
agatggcccggtgtaggtgaactcc

SEQ ID NO: 28247 - DNA, 25 bp, Canis familiaris
agatcacggggtctcagagtacacc

SEQ ID NO: 28248 - DNA, 25 bp, Canis familiaris
agatccaggggaaccaggtccatca

SEQ ID NO: 28249 - DNA, 25 bp, Canis familiaris
agatctcctgggaaaagagtctcta

SEQ ID NO: 28250 - DNA, 25 bp, Canis familiaris
agattacggtactaactgatgtcat

SEQ ID NO: 28251 - DNA, 25 bp, Canis familiaris
agttctctgtggacacaacttgtga

SEQ ID NO: 28252 - DNA, 25 bp, Canis familiaris
agttgcctatgatgcagaactggct

SEQ ID NO: 28253 - DNA, 25 bp, Canis familiaris
agattccaatactaagagctgcgtt

SEQ ID NO: 28254 - DNA, 25 bp, Canis familiaris
agttgcagcgattgcaactggcctg

SEQ ID NO: 28255 - DNA, 25 bp, Canis familiaris
agttgctgatagtaagtgcctcata

SEQ ID NO: 28256 - DNA, 25 bp, Canis familiaris
agttgctggcagttcgtgcttgaaa

SEQ ID NO: 28257 - DNA, 25 bp, Canis familiaris
agcttcgatccattctggttaaaga

SEQ ID NO: 28258 - DNA, 25 bp, Canis familiaris
agatccagaccttagagctttcaat

SEQ ID NO: 28259 - DNA, 25 bp, Canis familiaris
agatccaaggctcagacggtgacga

SEQ ID NO: 28260 - DNA, 25 bp, Canis familiaris
agatctcaaagtccaaagggaagca

SEQ ID NO: 28261 - DNA, 25 bp, Canis familiaris
agaccataggctattagggacacta

SEQ ID NO: 28262 - DNA, 25 bp, Canis familiaris
agatgccacgagttcctgggacaac

SEQ ID NO: 28263 - DNA, 25 bp, Canis familiaris
agatgccggtgggctaaaccaacgg

SEQ ID NO: 28264 - DNA, 25 bp, Canis familiaris
agatcactgagaagttaaatgccaa

SEQ ID NO: 28265 - DNA, 25 bp, Canis familiaris
agatcaaggtcgagaaagcaaaaac

SEQ ID NO: 28266 - DNA, 25 bp, Canis familiaris
agataacagtcatgtggagatgaaa

SEQ ID NO: 28267 - DNA, 25 bp, Canis familiaris
agatgctacactgagcttaagacag

SEQ ID NO: 28268 - DNA, 25 bp, Canis familiaris
agatgtaccctatttatagccaggt

SEQ ID NO: 28269 - DNA, 25 bp, Canis familiaris
agagctgagtttatttactgatagt

SEQ ID NO: 28270 - DNA, 25 bp, Canis familiaris
agatccagtttccttgtctgtaaaa

SEQ ID NO: 28271 - DNA, 25 bp, Canis familiaris
agatcgctggaggacttgtcttcaa

SEQ ID NO: 28272 - DNA, 25 bp, Canis familiaris
agattcttgggagtatgttgtcata

SEQ ID NO: 28273 - DNA, 25 bp, Canis familiaris
agattctccgcgattggctgtatga

SEQ ID NO: 28274 - DNA, 25 bp, Canis familiaris
agttctgctctgttttggtttttga

SEQ ID NO: 28275 - DNA, 25 bp, Canis familiaris
agttctttgactttgtgacgcatta

SEQ ID NO: 28276 - DNA, 25 bp, Canis familiaris
agatcctggcagattatgtgacctt

SEQ ID NO: 28277 - DNA, 25 bp, Canis familiaris
agatttctgcactttgggacattaa

SEQ ID NO: 28278 - DNA, 25 bp, Canis familiaris
agttgccatgacattgggacagatc

SEQ ID NO: 28279 - DNA, 25 bp, Canis familiaris
agttgcaagaggaggagagagaaag

SEQ ID NO: 28280 - DNA, 25 bp, Canis familiaris
agttggtagagctggaggtggtact

SEQ ID NO: 28281 - DNA, 25 bp, Canis familiaris
agttgctgtaactctggtcttgttc

SEQ ID NO: 28282 - DNA, 25 bp, Canis familiaris
agttgtggaatcatctggtctttct

SEQ ID NO: 28283 - DNA, 25 bp, Canis familiaris
agttgtgtgacagggcatcttcttt

SEQ ID NO: 28284 - DNA, 25 bp, Canis familiaris
agttggtgatgacggctccacttat

SEQ ID NO: 28285 - DNA, 25 bp, Canis familiaris
agcgggggagattgtctacttgact

SEQ ID NO: 28286 - DNA, 25 bp, Canis familiaris
cggggggaattgcgtgcattaatca

SEQ ID NO: 28287 - DNA, 25 bp, Canis familiaris
agttggggaagacagtggtgcctct

SEQ ID NO: 28288 - DNA, 25 bp, Canis familiaris
agttgcggcgtgctgaagtggacct

SEQ ID NO: 28289 - DNA, 25 bp, Canis familiaris
agattcttgcttcaggaggcaacct

SEQ ID NO: 28290 - DNA, 25 bp, Canis familiaris
agttctgcctttggacaggccatct

SEQ ID NO: 28291 - DNA, 25 bp, Canis familiaris
agatcttcgttcagggtgtcatctg

SEQ ID NO: 28292 - DNA, 25 bp, Canis familiaris
agttgtcagcctgtggtgcagtcat

SEQ ID NO: 28293 - DNA, 25 bp, Canis familiaris
agttgtgagctacctagatgcccat

SEQ ID NO: 28294 - DNA, 25 bp, Canis familiaris
agttgtatgtatctatgtgtgtatg

SEQ ID NO: 28295 - DNA, 25 bp, Canis familiaris
agttgtatccttttgtgtgtttaga

SEQ ID NO: 28296 - DNA, 25 bp, Canis familiaris
agattgaccctttgctgttgtatgt

SEQ ID NO: 28297 - DNA, 25 bp, Canis familiaris
agatttctacttgtgatgtgttgtc

SEQ ID NO: 28298 - DNA, 25 bp, Canis familiaris
agatttctttcttgatgtactatgt

SEQ ID NO: 28299 - DNA, 25 bp, Canis familiaris
agttgtctgttccttaactctgatc

SEQ ID NO: 28300 - DNA, 25 bp, Canis familiaris
agattacagtcccagtacatcctta

SEQ ID NO: 28301 - DNA, 25 bp, Canis familiaris
agatataactgctacattttcctta

SEQ ID NO: 28302 - DNA, 25 bp, Canis familiaris
agattcatatcttacacttcctgct

SEQ ID NO: 28303 - DNA, 25 bp, Canis familiaris
agatcttggctatcacttcagtgct

SEQ ID NO: 28304 - DNA, 25 bp, Canis familiaris
agatattgtgcgcatccccatatgc

SEQ ID NO: 28305 - DNA, 25 bp, Canis familiaris
agattttgccaactgccaatcatgt

SEQ ID NO: 28306 - DNA, 25 bp, Canis familiaris
agatttcatggccctgtcaagagca

SEQ ID NO: 28307 - DNA, 25 bp, Canis familiaris
agattctgctgagcctgcgagggaa

SEQ ID NO: 28308 - DNA, 25 bp, Canis familiaris
agcacctcgaagcgtagcgtggaaa

SEQ ID NO: 28309 - DNA, 25 bp, Canis familiaris
agagccggatggcgtagggcggtga

SEQ ID NO: 28310 - DNA, 25 bp, Canis familiaris
agaggcggatttggtcgtggacgtg

SEQ ID NO: 28311 - DNA, 25 bp, Canis familiaris
agaggcccatttgtagtggctggtt

SEQ ID NO: 28312 - DNA, 25 bp, Canis familiaris
agctacctcttagttcaggaccgct

SEQ ID NO: 28313 - DNA, 25 bp, Canis familiaris
agataccctgtagcatgaggccacc

SEQ ID NO: 28314 - DNA, 25 bp, Canis familiaris
agatcacctgagaagtataagccca

SEQ ID NO: 28315 - DNA, 25 bp, Canis familiaris
agatcaccgagcggctatgtctggc

SEQ ID NO: 28316 - DNA, 25 bp, Canis familiaris
agatcgcagcgagggagctgctctg

SEQ ID NO: 28317 - DNA, 25 bp, Canis familiaris
agatcatcgctgtctggaccatatc

SEQ ID NO: 28318 - DNA, 25 bp, Canis familiaris
agttgcgtgtgggcacttatctgca

SEQ ID NO: 28319 - DNA, 25 bp, Canis familiaris
agttgcggtgtggacgttgagcgac

SEQ ID NO: 28320 - DNA, 25 bp, Canis familiaris
agttcggttctgaccttgatgctgc

SEQ ID NO: 28321 - DNA, 25 bp, Canis familiaris
agttcctctgtgttcatttgcaatg

SEQ ID NO: 28322 - DNA, 25 bp, Canis familiaris
agttccactgctttctttcgaaata

SEQ ID NO: 28323 - DNA, 25 bp, Canis familiaris
agttccacatcagcctatttataaa

SEQ ID NO: 28324 - DNA, 25 bp, Canis familiaris
agatccccaggaacatacttatttt

SEQ ID NO: 28325 - DNA, 25 bp, Canis familiaris
agatatccacgagaattctgttttc

SEQ ID NO: 28326 - DNA, 25 bp, Canis familiaris
agttccattctaatatcctttttct

SEQ ID NO: 28327 - DNA, 25 bp, Canis familiaris
agatcaccttgtattttctttgcct

SEQ ID NO: 28328 - DNA, 25 bp, Canis familiaris
agatcctttcatattttcttcctgg

SEQ ID NO: 28329 - DNA, 25 bp, Canis familiaris
agatatttagcttcttttctacaaa

SEQ ID NO: 28330 - DNA, 25 bp, Canis familiaris
agactttgcctctgtaatttaaata

SEQ ID NO: 28331 - DNA, 25 bp, Canis familiaris
agcgatttgtctggttaattccgat

SEQ ID NO: 28332 - DNA, 25 bp, Canis familiaris
agagtgcttgactgtaactcccttc

SEQ ID NO: 28333 - DNA, 25 bp, Canis familiaris
agagttggaatctgagcccacgttc

SEQ ID NO: 28334 - DNA, 25 bp, Canis familiaris
agagtttaagttagcaatatcaatt

SEQ ID NO: 28335 - DNA, 25 bp, Canis familiaris
agatttgctaagtggatattcagaa

SEQ ID NO: 28336 - DNA, 25 bp, Canis familiaris
agattccggaaactgatgactctgg

SEQ ID NO: 28337 - DNA, 25 bp, Canis familiaris
agattcatctctaaagtgtattcga

SEQ ID NO: 28338 - DNA, 25 bp, Canis familiaris
agattcaatctacattttagcagaa

SEQ ID NO: 28339 - DNA, 25 bp, Canis familiaris
agatacacacaaggacatttgcaca

SEQ ID NO: 28340 - DNA, 25 bp, Canis familiaris
agatattcacattcttcatttcaat

SEQ ID NO: 28341 - DNA, 25 bp, Canis familiaris
agttgatacaatgccatttactgga

SEQ ID NO: 28342 - DNA, 25 bp, Canis familiaris
agatctctattagccacttactgga

SEQ ID NO: 28343 - DNA, 25 bp, Canis familiaris
agatttattattgctcagtttgagt

SEQ ID NO: 28344 - DNA, 25 bp, Canis familiaris
agattattttctgctctatcttcag

SEQ ID NO: 28345 - DNA, 25 bp, Canis familiaris
agattcaatttcagccttctgttcc

SEQ ID NO: 28346 - DNA, 25 bp, Canis familiaris
agaggcactttcaagactattttct

SEQ ID NO: 28347 - DNA, 25 bp, Canis familiaris
agaggtcttggaaattaataatatg

SEQ ID NO: 28348 - DNA, 25 bp, Canis familiaris
agaggatcgggcttaagtagaattt

SEQ ID NO: 28349 - DNA, 25 bp, Canis familiaris
agatgaaccctgttaatctaatcat

SEQ ID NO: 28350 - DNA, 25 bp, Canis familiaris
agagagccccaactaacacaatgat

SEQ ID NO: 28351 - DNA, 25 bp, Canis familiaris
agatagccggaccgatgagccttgt

SEQ ID NO: 28352 - DNA, 25 bp, Canis familiaris
agatatcttaactgaacccgactga

SEQ ID NO: 28353 - DNA, 25 bp, Canis familiaris
agattttgagaaagaccctcagaaa

SEQ ID NO: 28354 - DNA, 25 bp, Canis familiaris
agattacgagcactggagcccaaaa

SEQ ID NO: 28355 - DNA, 25 bp, Canis familiaris
agatcttcggagagacctcagctca

SEQ ID NO: 28356 - DNA, 25 bp, Canis familiaris
agatcagttccgagagatcatcgtt

SEQ ID NO: 28357 - DNA, 25 bp, Canis familiaris
agatgaggtcccatgtacacatatt

SEQ ID NO: 28358 - DNA, 25 bp, Canis familiaris
agatatttcttgggtactcatcata

SEQ ID NO: 28359 - DNA, 25 bp, Canis familiaris
agattttcttcaagacactgctccg

SEQ ID NO: 28360 - DNA, 25 bp, Canis familiaris
agttgcgagcttaaagcatcactcc

SEQ ID NO: 28361 - DNA, 25 bp, Canis familiaris
agttgtgcacttttacaagccgcaa

SEQ ID NO: 28362 - DNA, 25 bp, Canis familiaris
agatctcgacttcttgagtgcctgc

SEQ ID NO: 28363 - DNA, 25 bp, Canis familiaris
agatctctgaaccgtgtgcagctgc

SEQ ID NO: 28364 - DNA, 25 bp, Canis familiaris
agatgcctgatagtcggcgtgtccg

SEQ ID NO: 28365 - DNA, 25 bp, Canis familiaris
agatcatctgtaagcacctgggcct

SEQ ID NO: 28366 - DNA, 25 bp, Canis familiaris
agatatcagttagctcagaggacag

SEQ ID NO: 28367 - DNA, 25 bp, Canis familiaris
agatgattgccctttcagtggacag

SEQ ID NO: 28368 - DNA, 25 bp, Canis familiaris
agatgaaggccagttagtccaagtc

SEQ ID NO: 28369 - DNA, 25 bp, Canis familiaris
agataaggcctgattggccagcccc

SEQ ID NO: 28370 - DNA, 25 bp, Canis familiaris
agatacggactggctgttgggacac

SEQ ID NO: 28371 - DNA, 25 bp, Canis familiaris
agattaagccatgcatgtctaagta

SEQ ID NO: 28372 - DNA, 25 bp, Canis familiaris
agatatatatgcttccatctatcaa

SEQ ID NO: 28373 - DNA, 25 bp, Canis familiaris
agatcatatatctgtagcattgact

SEQ ID NO: 28374 - DNA, 25 bp, Canis familiaris
agatgatgcatttgagtgacgtaat

SEQ ID NO: 28375 - DNA, 25 bp, Canis familiaris
agattatcttgcatgccagaaccct

SEQ ID NO: 28376 - DNA, 25 bp, Canis familiaris
agattactctgaatgacctcccagt

SEQ ID NO: 28377 - DNA, 25 bp, Canis familiaris
agatattcttacccctgacggattt

SEQ ID NO: 28378 - DNA, 25 bp, Canis familiaris
agttcctagactacctgcaagtatt

SEQ ID NO: 28379 - DNA, 25 bp, Canis familiaris
agttcctaagtttctgcaggaggtg

SEQ ID NO: 28380 - DNA, 25 bp, Canis familiaris
agttccatggcgctccatggtaggt

SEQ ID NO: 28381 - DNA, 25 bp, Canis familiaris
agttccatgaggcttgtcctgactg

SEQ ID NO: 28382 - DNA, 25 bp, Canis familiaris
agttgccactccattgtcagtgacc

SEQ ID NO: 28383 - DNA, 25 bp, Canis familiaris
agttccaccaccttgatcaagtttg

SEQ ID NO: 28384 - DNA, 25 bp, Canis familiaris
agttccctgcaccatgagatcaaaa

SEQ ID NO: 28385 - DNA, 25 bp, Canis familiaris
agttgccctggccatgggaggatag

SEQ ID NO: 28386 - DNA, 25 bp, Canis familiaris
agatcatgacctgagtgaggggaag

SEQ ID NO: 28387 - DNA, 25 bp, Canis familiaris
agatcatgacttttctggggcgtcc

SEQ ID NO: 28388 - DNA, 25 bp, Canis familiaris
agattgcctctcttcaagatgctgc

SEQ ID NO: 28389 - DNA, 25 bp, Canis familiaris
agattgcttcaaggcaaaggcacca

SEQ ID NO: 28390 - DNA, 25 bp, Canis familiaris
agatgtgcttagagttcgagtcccc

SEQ ID NO: 28391 - DNA, 25 bp, Canis familiaris
agatcatcaccaaaggccaagtccc

SEQ ID NO: 28392 - DNA, 25 bp, Canis familiaris
agatttccaaattccaaggtccaga

SEQ ID NO: 28393 - DNA, 25 bp, Canis familiaris
agatctcgtcaatgtcaaaggtaaa

SEQ ID NO: 28394 - DNA, 25 bp, Canis familiaris
agatctaccacaatgatcaagaggg

SEQ ID NO: 28395 - DNA, 25 bp, Canis familiaris
agatgcttcccaattgctggagtgg

SEQ ID NO: 28396 - DNA, 25 bp, Canis familiaris
agatgctgatgctcaagctgttgac

SEQ ID NO: 28397 - DNA, 25 bp, Canis familiaris
agattgtcattatcatgctctgtgc

SEQ ID NO: 28398 - DNA, 25 bp, Canis familiaris
agatctctccatagacagccagatg

SEQ ID NO: 28399 - DNA, 25 bp, Canis familiaris
agatctcaccagtgcttcatatgct

SEQ ID NO: 28400 - DNA, 25 bp, Canis familiaris
agatctctcaagttcgtcttgttcc

SEQ ID NO: 28401 - DNA, 25 bp, Canis familiaris
agatctcataagctcgatttctacg

SEQ ID NO: 28402 - DNA, 25 bp, Canis familiaris
agatcctgaccgagcgtggctacag

SEQ ID NO: 28403 - DNA, 25 bp, Canis familiaris
agatccgaacacagcggtcgacatt

SEQ ID NO: 28404 - DNA, 25 bp, Canis familiaris
agatcgccaaagtgggccagatatt

SEQ ID NO: 28405 - DNA, 25 bp, Canis familiaris
agctagaaaggtgcggccatactgt

SEQ ID NO: 28406 - DNA, 25 bp, Canis familiaris
agattgagaaggaactggaaacagt

SEQ ID NO: 28407 - DNA, 25 bp, Canis familiaris
agatatgaggaacccaggtaccatt

SEQ ID NO: 28408 - DNA, 25 bp, Canis familiaris
agattggatggtcccacgtgacctc

SEQ ID NO: 28409 - DNA, 25 bp, Canis familiaris
agttgagagtctctctgttgacctc

SEQ ID NO: 28410 - DNA, 25 bp, Canis familiaris
agttgtcagtgcgaactcttgggct

SEQ ID NO: 28411 - DNA, 25 bp, Canis familiaris
agttgctatggggacagtgggagca

SEQ ID NO: 28412 - DNA, 25 bp, Canis familiaris
agttgctggtgagctcggaggacta

SEQ ID NO: 28413 - DNA, 25 bp, Canis familiaris
agttgtgggagcatcacgggagctg

SEQ ID NO: 28414 - DNA, 25 bp, Canis familiaris
agattgtggtggtgactgcaggagt

SEQ ID NO: 28415 - DNA, 25 bp, Canis familiaris
agattggtggcattggcaccgtgcc

SEQ ID NO: 28416 - DNA, 25 bp, Canis familiaris
agattgagcgtcttgaccacgatgc

SEQ ID NO: 28417 - DNA, 25 bp, Canis familiaris
agattactgctctggctcctagcac

SEQ ID NO: 28418 - DNA, 25 bp, Canis familiaris
agattgagcctcagactcctatacg

SEQ ID NO: 28419 - DNA, 25 bp, Canis familiaris
agattactctgtgactgccaattct

SEQ ID NO: 28420 - DNA, 25 bp, Canis familiaris
agatattgttgtgcctgccattttc

SEQ ID NO: 28421 - DNA, 25 bp, Canis familiaris
agattgtgtgccacctgttggctct

SEQ ID NO: 28422 - DNA, 25 bp, Canis familiaris
agattttgtctgtactgttagttaa

SEQ ID NO: 28423 - DNA, 25 bp, Canis familiaris
agatgtttgtcgggctggtactttt

SEQ ID NO: 28424 - DNA, 25 bp, Canis familiaris
agttgtttcggtgggttggctattg

SEQ ID NO: 28425 - DNA, 25 bp, Canis familiaris
agattggttaggggtgtgtgtgtat

SEQ ID NO: 28426 - DNA, 25 bp, Canis familiaris
agttggctctagctacttggactat

SEQ ID NO: 28427 - DNA, 25 bp, Canis familiaris
agcttctgtaagatccttggaccat

SEQ ID NO: 28428 - DNA, 25 bp, Canis familiaris
agattcggaagacctcttacgctca

SEQ ID NO: 28429 - DNA, 25 bp, Canis familiaris
agattcgggaagacctcttagcgct

SEQ ID NO: 28430 - DNA, 25 bp, Canis familiaris
agttggaaaagcacctgctctgcct

SEQ ID NO: 28431 - DNA, 25 bp, Canis familiaris
agttgcaaactagagctcatcccct

SEQ ID NO: 28432 - DNA, 25 bp, Canis familiaris
agttgaaactggagtcccatcctgc

SEQ ID NO: 28433 - DNA, 25 bp, Canis familiaris
agttgaatacacattatccctctct

SEQ ID NO: 28434 - DNA, 25 bp, Canis familiaris
agttgcttacagactgttcctcacc

SEQ ID NO: 28435 - DNA, 25 bp, Canis familiaris
agttgagctactactatgctccccc

SEQ ID NO: 28436 - DNA, 25 bp, Canis familiaris
agttgctcacatattcatctcttgc

SEQ ID NO: 28437 - DNA, 25 bp, Canis familiaris
agattcatccataatccctttctgc

SEQ ID NO: 28438 - DNA, 25 bp, Canis familiaris
agattcatccataatccctttctgc

SEQ ID NO: 28439 - DNA, 25 bp, Canis familiaris
agttgctgccatgcagccctagatc

SEQ ID NO: 28440 - DNA, 25 bp, Canis familiaris
agattgtgccaaaggccatcagccc

SEQ ID NO: 28441 - DNA, 25 bp, Canis familiaris
agatattccatttggtgccacacca

SEQ ID NO: 28442 - DNA, 25 bp, Canis familiaris
agatgtcattatgcaaaccacccta

SEQ ID NO: 28443 - DNA, 25 bp, Canis familiaris
agattatttccacagcaacttccac

SEQ ID NO: 28444 - DNA, 25 bp, Canis familiaris
agataaaatctacatcgactcgccc

SEQ ID NO: 28445 - DNA, 25 bp, Canis familiaris
agatgatccaatttgcaaagacctg

SEQ ID NO: 28446 - DNA, 25 bp, Canis familiaris
agatgtcgccatttgcttaattttt

SEQ ID NO: 28447 - DNA, 25 bp, Canis familiaris
agatgtggcccatatgtgaatatat

SEQ ID NO: 28448 - DNA, 25 bp, Canis familiaris
agatgggctcctcgacattgagatt

SEQ ID NO: 28449 - DNA, 25 bp, Canis familiaris
agatcttgctctgcgtcttagatat

SEQ ID NO: 28450 - DNA, 25 bp, Canis familiaris
agatttcctgctggtctgtggagct

SEQ ID NO: 28451 - DNA, 25 bp, Canis familiaris
agattcttcatgtaagctggaactt

SEQ ID NO: 28452 - DNA, 25 bp, Canis familiaris
agatctcttcagaaaggaacctttg

SEQ ID NO: 28453 - DNA, 25 bp, Canis familiaris
agattcttcgatgaggagtcctaca

SEQ ID NO: 28454 - DNA, 25 bp, Canis familiaris
agatttgtctgtgagcgactcctcc

SEQ ID NO: 28455 - DNA, 25 bp, Canis familiaris
agattggtcttgtcagggcaccttc

SEQ ID NO: 28456 - DNA, 25 bp, Canis familiaris
agattatgtcgatctgccgaccttc

SEQ ID NO: 28457 - DNA, 25 bp, Canis familiaris
agatttgatctgttcatacgtctgt

SEQ ID NO: 28458 - DNA, 25 bp, Canis familiaris
agattatacgtctatatcgactttt

SEQ ID NO: 28459 - DNA, 25 bp, Canis familiaris
agattggccgtcttgactattttcc

SEQ ID NO: 28460 - DNA, 25 bp, Canis familiaris
agttgtgccatttgtacttctttcc

SEQ ID NO: 28461 - DNA, 25 bp, Canis familiaris
agttggctcatttgtcgttttcata

SEQ ID NO: 28462 - DNA, 25 bp, Canis familiaris
agattgcagccttttcgtgaattct

SEQ ID NO: 28463 - DNA, 25 bp, Canis familiaris
agattgcatttcttaggtgttttaa

SEQ ID NO: 28464 - DNA, 25 bp, Canis familiaris
agatctgatttgctagttcttcctt

SEQ ID NO: 28465 - DNA, 25 bp, Canis familiaris
agatctattccgacctaatgacaga

SEQ ID NO: 28466 - DNA, 25 bp, Canis familiaris
agatctatgtcttgtttgttgaaaa

SEQ ID NO: 28467 - DNA, 25 bp, Canis familiaris
agatctctgtccattttctgaacga

SEQ ID NO: 28468 - DNA, 25 bp, Canis familiaris
agatgctcgtgctttaatttataaa

SEQ ID NO: 28469 - DNA, 25 bp, Canis familiaris
agatgagcactgactaacttgtata

SEQ ID NO: 28470 - DNA, 25 bp, Canis familiaris
agattgaggaccagctctgttaccc

SEQ ID NO: 28471 - DNA, 25 bp, Canis familiaris
agatatagaccgcaggttcttccct

SEQ ID NO: 28472 - DNA, 25 bp, Canis familiaris
agataaactcagcttctttttcctt

SEQ ID NO: 28473 - DNA, 25 bp, Canis familiaris
agttgacagtggctccttttatcct

SEQ ID NO: 28474 - DNA, 25 bp, Canis familiaris
agttgatatctggctgtccttttta

SEQ ID NO: 28475 - DNA, 25 bp, Canis familiaris
agatatgatatatagtctctagtat

SEQ ID NO: 28476 - DNA, 25 bp, Canis familiaris
agattgatgctctaagctgcttctt

SEQ ID NO: 28477 - DNA, 25 bp, Canis familiaris
agatagcacatggaagcgtctttat

SEQ ID NO: 28478 - DNA, 25 bp, Canis familiaris
agatgcaggatgtggacttgttcat

SEQ ID NO: 28479 - DNA, 25 bp, Canis familiaris
agatctggcagctgtcttggataag

SEQ ID NO: 28480 - DNA, 25 bp, Canis familiaris
agattgatcagcttgtgtatggttt

SEQ ID NO: 28481 - DNA, 25 bp, Canis familiaris
agattatgatcgcttgaggcctctc

SEQ ID NO: 28482 - DNA, 25 bp, Canis familiaris
agatcacgcaggatgggctccctgc

SEQ ID NO: 28483 - DNA, 25 bp, Canis familiaris
agatgccaatgacatggccccttgc

SEQ ID NO: 28484 - DNA, 25 bp, Canis familiaris
agatgctacgggaatctccattctg

SEQ ID NO: 28485 - DNA, 25 bp, Canis familiaris
agatcctggggactgcccagtctgt

SEQ ID NO: 28486 - DNA, 25 bp, Canis familiaris
agatcctggggactgcccagtctgt

SEQ ID NO: 28487 - DNA, 25 bp, Canis familiaris
agatcctggggactgcccagtctgt

SEQ ID NO: 28488 - DNA, 25 bp, Canis familiaris
agatcctggggactgcccagtctgt

SEQ ID NO: 28489 - DNA, 25 bp, Canis familiaris
agattctggagagtggctctgccct

SEQ ID NO: 28490 - DNA, 25 bp, Canis familiaris
agattctgagtgtctactgctggca

SEQ ID NO: 28491 - DNA, 25 bp, Canis familiaris
agattgagcaatttagctggggagc

SEQ ID NO: 28492 - DNA, 25 bp, Canis familiaris
agattgcaaatactgcccgcaaagc

SEQ ID NO: 28493 - DNA, 25 bp, Canis familiaris
agatgtgaacattgcttctccaaat

SEQ ID NO: 28494 - DNA, 25 bp, Canis familiaris
agagtgctacaccgtttcaatgaaa

SEQ ID NO: 28495 - DNA, 25 bp, Canis familiaris
agatgtgtcaccagtttcaggcact

SEQ ID NO: 28496 - DNA, 25 bp, Canis familiaris
agatggtcaccatgaattccctcat

SEQ ID NO: 28497 - DNA, 25 bp, Canis familiaris
agatgttatttccagagtagcccag

SEQ ID NO: 28498 - DNA, 25 bp, Canis familiaris
agatcttatttattgggcagccccg

SEQ ID NO: 28499 - DNA, 25 bp, Canis familiaris
agatttatttcagtccgtgcactct

SEQ ID NO: 28500 - DNA, 25 bp, Canis familiaris
agttgtatgttgctctaatcctcca

SEQ ID NO: 28501 - DNA, 25 bp, Canis familiaris
agatcttaggtggttcagtcctcca

SEQ ID NO: 28502 - DNA, 25 bp, Canis familiaris
agatcaaaagtcatacgctccacca

SEQ ID NO: 28503 - DNA, 25 bp, Canis familiaris
agatttaagtacaactgctcccctt

SEQ ID NO: 28504 - DNA, 25 bp, Canis familiaris
agatctatacacacaactgctccaa

SEQ ID NO: 28505 - DNA, 25 bp, Canis familiaris
agatctggcaccacaccttctacaa

SEQ ID NO: 28506 - DNA, 25 bp, Canis familiaris
agatcatgtttgagaccttcaacac

SEQ ID NO: 28507 - DNA, 25 bp, Canis familiaris
agatcatgtttgagaccttcaacac

SEQ ID NO: 28508 - DNA, 25 bp, Canis familiaris
agatctgcttggtagacctgctgca

SEQ ID NO: 28509 - DNA, 25 bp, Canis familiaris
agattgctgtgcagaaccctctggt

SEQ ID NO: 28510 - DNA, 25 bp, Canis familiaris
agatggcggccaagaccaacaagaa

SEQ ID NO: 28511 - DNA, 25 bp, Canis familiaris
agatgtctcgaaaggtaaaagatga

SEQ ID NO: 28512 - DNA, 25 bp, Canis familiaris
agatgcttcgaaaggcaaggaggaa

SEQ ID NO: 28513 - DNA, 25 bp, Canis familiaris
agatccctacgaggaggcctggaac

SEQ ID NO: 28514 - DNA, 25 bp, Canis familiaris
agattccttcgaggggtcctgagac

SEQ ID NO: 28515 - DNA, 25 bp, Canis familiaris
agattgtcttcaagaaccccttgcc

SEQ ID NO: 28516 - DNA, 25 bp, Canis familiaris
agatctaggtctaaagccccttcat

SEQ ID NO: 28517 - DNA, 25 bp, Canis familiaris
agatttttctatatagccctatcaa

SEQ ID NO: 28518 - DNA, 25 bp, Canis familiaris
agatgatttttaatacccagcagat

SEQ ID NO: 28519 - DNA, 25 bp, Canis familiaris
agatgctgacttttaacccacacaa

SEQ ID NO: 28520 - DNA, 25 bp, Canis familiaris
agatcagatcttcctataattccaa

SEQ ID NO: 28521 - DNA, 25 bp, Canis familiaris
agatatcacttgctcataattattt

SEQ ID NO: 28522 - DNA, 25 bp, Canis familiaris
agatcaaattgatgtcatagtaatt

SEQ ID NO: 28523 - DNA, 25 bp, Canis familiaris
agatccaatatatgactagtagacc

SEQ ID NO: 28524 - DNA, 25 bp, Canis familiaris
agatcagcctgaaagactaggaccc

SEQ ID NO: 28525 - DNA, 25 bp, Canis familiaris
agatcgttgtaacctgggacagaca

SEQ ID NO: 28526 - DNA, 25 bp, Canis familiaris
agatcttggctatcctgttatcaga

SEQ ID NO: 28527 - DNA, 25 bp, Canis familiaris
agattcttcttaatcggtatcagaa

SEQ ID NO: 28528 - DNA, 25 bp, Canis familiaris
agatttttatcaactgtgggaaact

SEQ ID NO: 28529 - DNA, 25 bp, Canis familiaris
agattgtttgaaatcatgtcggaat

SEQ ID NO: 28530 - DNA, 25 bp, Canis familiaris
agatttttatgaagctttggacatg

SEQ ID NO: 28531 - DNA, 25 bp, Canis familiaris
agatctttatcttcagctttaggtt

SEQ ID NO: 28532 - DNA, 25 bp, Canis familiaris
agatcttcttttcttatacggtcgc

SEQ ID NO: 28533 - DNA, 25 bp, Canis familiaris
agattttgatttcttaaactggcca

SEQ ID NO: 28534 - DNA, 25 bp, Canis familiaris
agattattatttttagtcacactag

SEQ ID NO: 28535 - DNA, 25 bp, Canis familiaris
agatgaattttaactggcccacttg

SEQ ID NO: 28536 - DNA, 25 bp, Canis familiaris
agatgcctttggtcatctgaccgca

SEQ ID NO: 28537 - DNA, 25 bp, Canis familiaris
agatctggaatgaccacttccgctg

SEQ ID NO: 28538 - DNA, 25 bp, Canis familiaris
agatgggaattcttcttcctgggcc

SEQ ID NO: 28539 - DNA, 25 bp, Canis familiaris
agatgggaagtctttatgctgaata

SEQ ID NO: 28540 - DNA, 25 bp, Canis familiaris
agatcgcggaatggttatggctgtg

SEQ ID NO: 28541 - DNA, 25 bp, Canis familiaris
agagcccagacaggtaatgccggtg

SEQ ID NO: 28542 - DNA, 25 bp, Canis familiaris
agagcccaagaattactgttttgca

SEQ ID NO: 28543 - DNA, 25 bp, Canis familiaris
agagcctccaaataacttttcaaag

SEQ ID NO: 28544 - DNA, 25 bp, Canis familiaris
agagcgtgccagtcatcaacagcat

SEQ ID NO: 28545 - DNA, 25 bp, Canis familiaris
agatgcagtacagcctgacagcctg

SEQ ID NO: 28546 - DNA, 25 bp, Canis familiaris
agatgcagctgaagcgcatgcctcg

SEQ ID NO: 28547 - DNA, 25 bp, Canis familiaris
agagcatggaaactcagctgcagtt

SEQ ID NO: 28548 - DNA, 25 bp, Canis familiaris
agatgtgtgccgatgagcgcagctt

SEQ ID NO: 28549 - DNA, 25 bp, Canis familiaris
agatggcatcaaattcacaacttaa

SEQ ID NO: 28550 - DNA, 25 bp, Canis familiaris
agatggctccatttaaaacaaacag

SEQ ID NO: 28551 - DNA, 25 bp, Canis familiaris
agatggctccactttaaaaccaaca

SEQ ID NO: 28552 - DNA, 25 bp, Canis familiaris
agaggccccagtgaaagtccagaac

SEQ ID NO: 28553 - DNA, 25 bp, Canis familiaris
agagagccccagggggaccacagtt

SEQ ID NO: 28554 - DNA, 25 bp, Canis familiaris
agaggaacctgcgaaggacttcaat

SEQ ID NO: 28555 - DNA, 25 bp, Canis familiaris
agaggacagcctcggggtgctgact

SEQ ID NO: 28556 - DNA, 25 bp, Canis familiaris
agatgccacgccgagggtggatcca

SEQ ID NO: 28557 - DNA, 25 bp, Canis familiaris
agatgaacacgcgaagggcgacccg

SEQ ID NO: 28558 - DNA, 25 bp, Canis familiaris
agatgcctaacagactgagccaccc

SEQ ID NO: 28559 - DNA, 25 bp, Canis familiaris
agatccagacaaggaggcatccccc

SEQ ID NO: 28560 - DNA, 25 bp, Canis familiaris
agatatgcaacagcctggatgcccc

SEQ ID NO: 28561 - DNA, 25 bp, Canis familiaris
agatacaagttcgtggcacacttgg

SEQ ID NO: 28562 - DNA, 25 bp, Canis familiaris
agatagatacttgtgtgcccgtgtg

SEQ ID NO: 28563 - DNA, 25 bp, Canis familiaris
agatcaatgacttgggtcgcctggg

SEQ ID NO: 28564 - DNA, 25 bp, Canis familiaris
agataaagcttcactcgtcgcagag

SEQ ID NO: 28565 - DNA, 25 bp, Canis familiaris
agataaagccttggcctggtcgggg

SEQ ID NO: 28566 - DNA, 25 bp, Canis familiaris
agatgtaagactaccttggggggag

SEQ ID NO: 28567 - DNA, 25 bp, Canis familiaris
agatgaatgtaaaccctggcgtcgg

SEQ ID NO: 28568 - DNA, 25 bp, Canis familiaris
agaccatggacggctgacgggtcgg

SEQ ID NO: 28569 - DNA, 25 bp, Canis familiaris
agactaaggggccctaggtgcgcgg

SEQ ID NO: 28570 - DNA, 25 bp, Canis familiaris
agattagctggggagccgagggcca

SEQ ID NO: 28571 - DNA, 25 bp, Canis familiaris
agattggatagggggtgcggggcac

SEQ ID NO: 28572 - DNA, 25 bp, Canis familiaris
agatgtgagtaagagatatgggggc

SEQ ID NO: 28573 - DNA, 25 bp, Canis familiaris
agactgtgtagaccaattccgggcc

SEQ ID NO: 28574 - DNA, 25 bp, Canis familiaris
agatctggtcaccaggttccggttc

SEQ ID NO: 28575 - DNA, 25 bp, Canis familiaris
agattggacgtgctttatcggctcc

SEQ ID NO: 28576 - DNA, 25 bp, Canis familiaris
agattgagaatttcttcctccacct

SEQ ID NO: 28577 - DNA, 25 bp, Canis familiaris
agataagtttctttgcttcactcct

SEQ ID NO: 28578 - DNA, 25 bp, Canis familiaris
agataagcaagtctttcagaccttg

SEQ ID NO: 28579 - DNA, 25 bp, Canis familiaris
agatgaaaggctctcttccaaggtg

SEQ ID NO: 28580 - DNA, 25 bp, Canis familiaris
agagtccaggtgcttgtgggacccg

SEQ ID NO: 28581 - DNA, 25 bp, Canis familiaris
agagcacccttcggatgcagttaaa

SEQ ID NO: 28582 - DNA, 25 bp, Canis familiaris
agatgcagccatatcacgagcgtgt

SEQ ID NO: 28583 - DNA, 25 bp, Canis familiaris
agatcgcatccactatcaggcggac

SEQ ID NO: 28584 - DNA, 25 bp, Canis familiaris
agatcagagcgtcacacgcgactgc

SEQ ID NO: 28585 - DNA, 25 bp, Canis familiaris
agatgagaccgaaaccgtccggacg

SEQ ID NO: 28586 - DNA, 25 bp, Canis familiaris
agatgaagcctatctcatcggccgc

SEQ ID NO: 28587 - DNA, 25 bp, Canis familiaris
agatggagcctgtgtgaggacctgc

SEQ ID NO: 28588 - DNA, 25 bp, Canis familiaris
agatggagcctgtgtgaggacctgc

SEQ ID NO: 28589 - DNA, 25 bp, Canis familiaris
agatggagcctgtgtgaggacctgc

SEQ ID NO: 28590 - DNA, 25 bp, Canis familiaris
agatcggcaatgcctgctgggagct

SEQ ID NO: 28591 - DNA, 25 bp, Canis familiaris
agatcggcaatgcctgctgggagct

SEQ ID NO: 28592 - DNA, 25 bp, Canis familiaris
agatgaggcaggggctcgtgtgcta

SEQ ID NO: 28593 - DNA, 25 bp, Canis familiaris
agataggagctgcatgccctacaca

SEQ ID NO: 28594 - DNA, 25 bp, Canis familiaris
agattgagtgtgcagcttctggcct

SEQ ID NO: 28595 - DNA, 25 bp, Canis familiaris
agaaagtgtccgattccctatcgag

SEQ ID NO: 28596 - DNA, 25 bp, Canis familiaris
agaaagtggcccctattcagagaag

SEQ ID NO: 28597 - DNA, 25 bp, Canis familiaris
aagacgaatgtccgccagtaagtag

SEQ ID NO: 28598 - DNA, 25 bp, Canis familiaris
agcaggggtgtggcctagaaagtga

SEQ ID NO: 28599 - DNA, 25 bp, Canis familiaris
agcacgtcgttcgactgggtaggag

SEQ ID NO: 28600 - DNA, 25 bp, Canis familiaris
agaggtggtgtgggggagtaagaga

SEQ ID NO: 28601 - DNA, 25 bp, Canis familiaris
agaggtcaggatgtttagccataac

SEQ ID NO: 28602 - DNA, 25 bp, Canis familiaris
agaggtcggaggtattctccagcaa

SEQ ID NO: 28603 - DNA, 25 bp, Canis familiaris
agaggcctatgttgttacctccaaa

SEQ ID NO: 28604 - DNA, 25 bp, Canis familiaris
agagatggtcaatgttccccaaacc

SEQ ID NO: 28605 - DNA, 25 bp, Canis familiaris
agaggacatcaatttgggcccaaat

SEQ ID NO: 28606 - DNA, 25 bp, Canis familiaris
agatggaacgcatcagggctccagg

SEQ ID NO: 28607 - DNA, 25 bp, Canis familiaris
agatgtaacctatcaacttcagctg

SEQ ID NO: 28608 - DNA, 25 bp, Canis familiaris
agagtcttccaaaatcacgtcagct

SEQ ID NO: 28609 - DNA, 25 bp, Canis familiaris
agagggtccaaaactcgttgctgct

SEQ ID NO: 28610 - DNA, 25 bp, Canis familiaris
agagggtctagccacttctgtaggc

SEQ ID NO: 28611 - DNA, 25 bp, Canis familiaris
agatgttgtcacggacccgatcatg

SEQ ID NO: 28612 - DNA, 25 bp, Canis familiaris
agatgcgttcatctgaggccgcact

SEQ ID NO: 28613 - DNA, 25 bp, Canis familiaris
agatcttctcaactactcaacagct

SEQ ID NO: 28614 - DNA, 25 bp, Canis familiaris
agatatctcatccttactcagtact

SEQ ID NO: 28615 - DNA, 25 bp, Canis familiaris
agatagccatcttctttacttctta

SEQ ID NO: 28616 - DNA, 25 bp, Canis familiaris
agatgatgcctctgtattacatgat

SEQ ID NO: 28617 - DNA, 25 bp, Canis familiaris
agatgatgctcctggcaggcacttc

SEQ ID NO: 28618 - DNA, 25 bp, Canis familiaris
agatgaatcatctgtcaccactgct

SEQ ID NO: 28619 - DNA, 25 bp, Canis familiaris
agattatatgcaagttgccctccct

SEQ ID NO: 28620 - DNA, 25 bp, Canis familiaris
agatcttcagcaacttctgagcccc

SEQ ID NO: 28621 - DNA, 25 bp, Canis familiaris
agattatgtgacctttgacaacccc

SEQ ID NO: 28622 - DNA, 25 bp, Canis familiaris
agattctgtttccatttcaataccc

SEQ ID NO: 28623 - DNA, 25 bp, Canis familiaris
agattctcattttttatcttcaccc

SEQ ID NO: 28624 - DNA, 25 bp, Canis familiaris
agatcttcctctaaatatttcccgt

SEQ ID NO: 28625 - DNA, 25 bp, Canis familiaris
agattttgatctcccattttcatcc

SEQ ID NO: 28626 - DNA, 25 bp, Canis familiaris
agagttcatgaccactaaaccagcc

SEQ ID NO: 28627 - DNA, 25 bp, Canis familiaris
agcagttaggctcccaaatctaagc

SEQ ID NO: 28628 - DNA, 25 bp, Canis familiaris
agatcttcgtgctaccaaacttaca

SEQ ID NO: 28629 - DNA, 25 bp, Canis familiaris
agatattcccgatacagagcttagg

SEQ ID NO: 28630 - DNA, 25 bp, Canis familiaris
agatcttccaggggaaggctggggc

SEQ ID NO: 28631 - DNA, 25 bp, Canis familiaris
agatccctgggagaagggcgctgcc

SEQ ID NO: 28632 - DNA, 25 bp, Canis familiaris
agatctccggttgaatgttgcctca

SEQ ID NO: 28633 - DNA, 25 bp, Canis familiaris
agatttgtgtttgatagttcctgct

SEQ ID NO: 28634 - DNA, 25 bp, Canis familiaris
agattttttatttatgttccttcat

SEQ ID NO: 28635 - DNA, 25 bp, Canis familiaris
agaatgcttaaatacaggaccctca

SEQ ID NO: 28636 - DNA, 25 bp, Canis familiaris
agatatcttcaagtacatcccaccc

SEQ ID NO: 28637 - DNA, 25 bp, Canis familiaris
agatctattaatgggtctcacctcc

SEQ ID NO: 28638 - DNA, 25 bp, Canis familiaris
agatttgaatagtgtgctcctccgc

SEQ ID NO: 28639 - DNA, 25 bp, Canis familiaris
agattaggtcgtggtagcctctcac

SEQ ID NO: 28640 - DNA, 25 bp, Canis familiaris
agatgaaggccgtgtacctggctct

SEQ ID NO: 28641 - DNA, 25 bp, Canis familiaris
agaggactgggaggtacctggagcc

SEQ ID NO: 28642 - DNA, 25 bp, Canis familiaris
agagtagtggtatttcaccggcggc

SEQ ID NO: 28643 - DNA, 25 bp, Canis familiaris
agatttggcgttaccgcctgagggg

SEQ ID NO: 28644 - DNA, 25 bp, Canis familiaris
agatctggggtgtaggggtgggtgg

SEQ ID NO: 28645 - DNA, 25 bp, Canis familiaris
agaggagagggctgggctagggggg

SEQ ID NO: 28646 - DNA, 25 bp, Canis familiaris
agagggaggccttgggctgaggtct

SEQ ID NO: 28647 - DNA, 25 bp, Canis familiaris
agatcgaagacactttccggcagtt

SEQ ID NO: 28648 - DNA, 25 bp, Canis familiaris
agatcgagaactttgtgcctgtgct

SEQ ID NO: 28649 - DNA, 25 bp, Canis familiaris
agatcaagagccatcattgccgtcg

SEQ ID NO: 28650 - DNA, 25 bp, Canis familiaris
agatgcaggcccacaatgccaaggc

SEQ ID NO: 28651 - DNA, 25 bp, Canis familiaris
agataggccctgctcatgccagggc

SEQ ID NO: 28652 - DNA, 25 bp, Canis familiaris
agacatggtacgcattccagggcta

SEQ ID NO: 28653 - DNA, 25 bp, Canis familiaris
agatatggtatctgttcatacttta

SEQ ID NO: 28654 - DNA, 25 bp, Canis familiaris
agatgtggcttgcctgtctcatatc

SEQ ID NO: 28655 - DNA, 25 bp, Canis familiaris
agatgcttttcaggtatcaaaggtt

SEQ ID NO: 28656 - DNA, 25 bp, Canis familiaris
agatcttctctcgggaggatttgat

SEQ ID NO: 28657 - DNA, 25 bp, Canis familiaris
agatctgtcctcagggcagtagtta

SEQ ID NO: 28658 - DNA, 25 bp, Canis familiaris
agatgatactccaggtctgccagtt

SEQ ID NO: 28659 - DNA, 25 bp, Canis familiaris
agatgaagcttatgcagttgccaaa

SEQ ID NO: 28660 - DNA, 25 bp, Canis familiaris
agaaggcttaaggcggcctacagag

SEQ ID NO: 28661 - DNA, 25 bp, Canis familiaris
agaggtgcttgaatgccaactaaag

SEQ ID NO: 28662 - DNA, 25 bp, Canis familiaris
agatagcctgctaatgccacagctg

SEQ ID NO: 28663 - DNA, 25 bp, Canis familiaris
agagcacctgctacatgccatgctc

SEQ ID NO: 28664 - DNA, 25 bp, Canis familiaris
agagacctttctgtgtcaagttccc

SEQ ID NO: 28665 - DNA, 25 bp, Canis familiaris
agatgacctttttgtgccagtgttt

SEQ ID NO: 28666 - DNA, 25 bp, Canis familiaris
agatacttttggggaaggctggtca

SEQ ID NO: 28667 - DNA, 25 bp, Canis familiaris
agaatggttggtggtgaaacggtat

SEQ ID NO: 28668 - DNA, 25 bp, Canis familiaris
agagggctcaggccttaagacgcgt

SEQ ID NO: 28669 - DNA, 25 bp, Canis familiaris
agatgggaccctgtaaaagctgtaa

SEQ ID NO: 28670 - DNA, 25 bp, Canis familiaris
agagggccatcctgtataaacgtct

SEQ ID NO: 28671 - DNA, 25 bp, Canis familiaris
agatcaggtctcctcagtattcaga

SEQ ID NO: 28672 - DNA, 25 bp, Canis familiaris
agatcagattatcatcctcatatat

SEQ ID NO: 28673 - DNA, 25 bp, Canis familiaris
agatatatatctcacaccaaatttg

SEQ ID NO: 28674 - DNA, 25 bp, Canis familiaris
agatgagactctcacatcacaatat

SEQ ID NO: 28675 - DNA, 25 bp, Canis familiaris
agatcacctcttgatgacatacatc

SEQ ID NO: 28676 - DNA, 25 bp, Canis familiaris
agatcaatcttgacagaacaccaaa

SEQ ID NO: 28677 - DNA, 25 bp, Canis familiaris
agataaccaatccaacagccatagg

SEQ ID NO: 28678 - DNA, 25 bp, Canis familiaris
agatccctctattaaagcatctgag

SEQ ID NO: 28679 - DNA, 25 bp, Canis familiaris
agatccccttcaccaatgacaaaat

SEQ ID NO: 28680 - DNA, 25 bp, Canis familiaris
agatcaaccgtctgttccaggacat

SEQ ID NO: 28681 - DNA, 25 bp, Canis familiaris
agatccatcctttttttacagatat

SEQ ID NO: 28682 - DNA, 25 bp, Canis familiaris
agatccatccatattgtcataaatg

SEQ ID NO: 28683 - DNA, 25 bp, Canis familiaris
agatgacactcttgttgcctaacat

SEQ ID NO: 28684 - DNA, 25 bp, Canis familiaris
agatctcctcttttcctataaaaat

SEQ ID NO: 28685 - DNA, 25 bp, Canis familiaris
agatggcctttttccttctaaatat

SEQ ID NO: 28686 - DNA, 25 bp, Canis familiaris
agatcattcttcattcctgtctaaa

SEQ ID NO: 28687 - DNA, 25 bp, Canis familiaris
agatattctgacaccactgactctg

SEQ ID NO: 28688 - DNA, 25 bp, Canis familiaris
agatctttatggacacactgccctt

SEQ ID NO: 28689 - DNA, 25 bp, Canis familiaris
agatgtcattttaagcattgctcct

SEQ ID NO: 28690 - DNA, 25 bp, Canis familiaris
agatgtcgatggctgccattgccac

SEQ ID NO: 28691 - DNA, 25 bp, Canis familiaris
agatgctgcagatgtgcccattagc

SEQ ID NO: 28692 - DNA, 25 bp, Canis familiaris
agatctgcagaaacgccacacaagg

SEQ ID NO: 28693 - DNA, 25 bp, Canis familiaris
agagtcagaaggtcctccaaggcct

SEQ ID NO: 28694 - DNA, 25 bp, Canis familiaris
agaggagcaagtttcgccagggaca

SEQ ID NO: 28695 - DNA, 25 bp, Canis familiaris
agaggacgcaggcatccagaggaca

SEQ ID NO: 28696 - DNA, 25 bp, Canis familiaris
agagtatccaaagttcagaaaaatt

SEQ ID NO: 28697 - DNA, 25 bp, Canis familiaris
agaggacccatcatccagaatacta

SEQ ID NO: 28698 - DNA, 25 bp, Canis familiaris
agaggaagattgaccctgaaattca

SEQ ID NO: 28699 - DNA, 25 bp, Canis familiaris
agcgctacgaggacgggaagttcca

SEQ ID NO: 28700 - DNA, 25 bp, Canis familiaris
agagtagccgtgagggagaccagcc

SEQ ID NO: 28701 - DNA, 25 bp, Canis familiaris
agagtccaccgaacgagcgacaagc

SEQ ID NO: 28702 - DNA, 25 bp, Canis familiaris
agatctgggcacgaaaggacactac

SEQ ID NO: 28703 - DNA, 25 bp, Canis familiaris
agatctggagcctcagaggatttag

SEQ ID NO: 28704 - DNA, 25 bp, Canis familiaris
agatgtagagacttaaggctttatt

SEQ ID NO: 28705 - DNA, 25 bp, Canis familiaris
agatgctagagttcaaagcgatttg

SEQ ID NO: 28706 - DNA, 25 bp, Canis familiaris
agatcaaagtattatatgctgtgtg

SEQ ID NO: 28707 - DNA, 25 bp, Canis familiaris
agatgacatcaatagtggtgcagtg

SEQ ID NO: 28708 - DNA, 25 bp, Canis familiaris
agatctataagaatggggactgcct

SEQ ID NO: 28709 - DNA, 25 bp, Canis familiaris
agatcatccaagtggaggttcctac

SEQ ID NO: 28710 - DNA, 25 bp, Canis familiaris
agatcaccatcgtggcgggagtgct

SEQ ID NO: 28711 - DNA, 25 bp, Canis familiaris
agatgactccgtacttgttgggctt

SEQ ID NO: 28712 - DNA, 25 bp, Canis familiaris
agatgacccagatcatgtttgagac

SEQ ID NO: 28713 - DNA, 25 bp, Canis familiaris
agatcaccctgaatgctggcttagc

SEQ ID NO: 28714 - DNA, 25 bp, Canis familiaris
agatcacaggatacactccactagc

SEQ ID NO: 28715 - DNA, 25 bp, Canis familiaris
agatcagagtgttcctgccttagca

SEQ ID NO: 28716 - DNA, 25 bp, Canis familiaris
agatgcagaacttctcttagttgga

SEQ ID NO: 28717 - DNA, 25 bp, Canis familiaris
agatgcatgctattcctttgaggtc

SEQ ID NO: 28718 - DNA, 25 bp, Canis familiaris
agatatgcgtgatcctctgtgagct

SEQ ID NO: 28719 - DNA, 25 bp, Canis familiaris
agatattgtgtgtcgtgtgtatgtg

SEQ ID NO: 28720 - DNA, 25 bp, Canis familiaris
agatcctggtaggtgatgtgggcca

SEQ ID NO: 28721 - DNA, 25 bp, Canis familiaris
agatcactatgttgtagttggggcc

SEQ ID NO: 28722 - DNA, 25 bp, Canis familiaris
agatcttatgtgtctgagtcccggt

SEQ ID NO: 28723 - DNA, 25 bp, Canis familiaris
agatgtcttgttaagtcccttgcac

SEQ ID NO: 28724 - DNA, 25 bp, Canis familiaris
agatggtccttaagccactttctgg

SEQ ID NO: 28725 - DNA, 25 bp, Canis familiaris
agctttcacttgcagcctttttagc

SEQ ID NO: 28726 - DNA, 25 bp, Canis familiaris
agacccacagtgccacgtgttaata

SEQ ID NO: 28727 - DNA, 25 bp, Canis familiaris
agagccccagggagatgattagata

SEQ ID NO: 28728 - DNA, 25 bp, Canis familiaris
agagcctcgagctgcgacaatattt

SEQ ID NO: 28729 - DNA, 25 bp, Canis familiaris
agaggctcagtgtggtcaactctga

SEQ ID NO: 28730 - DNA, 25 bp, Canis familiaris
caggctaagttccgcgctaataaag

SEQ ID NO: 28731 - DNA, 25 bp, Canis familiaris
agaggacagtccagctcctaaacag

SEQ ID NO: 28732 - DNA, 25 bp, Canis familiaris
gaggggcattccagtccaaagggaa

SEQ ID NO: 28733 - DNA, 25 bp, Canis familiaris
agagggcttgcctgttgcattagat

SEQ ID NO: 28734 - DNA, 25 bp, Canis familiaris
agagtagttcctggaggcagtcgct

SEQ ID NO: 28735 - DNA, 25 bp, Canis familiaris
agagtggttactgtggcgatggctt

SEQ ID NO: 28736 - DNA, 25 bp, Canis familiaris
agagatggtacttttcggacgcttt

SEQ ID NO: 28737 - DNA, 25 bp, Canis familiaris
agatgatgatgtgttttcgtccctt

SEQ ID NO: 28738 - DNA, 25 bp, Canis familiaris
agatcatatgataattgtctttctc

SEQ ID NO: 28739 - DNA, 25 bp, Canis familiaris
agatcatttcaaaactcatttccta

SEQ ID NO: 28740 - DNA, 25 bp, Canis familiaris
agatctttaatttacatttgctttt

SEQ ID NO: 28741 - DNA, 25 bp, Canis familiaris
agatgcacttccatcccaaggcttt

SEQ ID NO: 28742 - DNA, 25 bp, Canis familiaris
agatgctgggcgatctcatcaaggt

SEQ ID NO: 28743 - DNA, 25 bp, Canis familiaris
agatcggatgagacagacacaacct

SEQ ID NO: 28744 - DNA, 25 bp, Canis familiaris
agataggagacacacacagccttgc

SEQ ID NO: 28745 - DNA, 25 bp, Canis familiaris
agatgaggagataacaacctctacc

SEQ ID NO: 28746 - DNA, 25 bp, Canis familiaris
tagtaagattaagccctaacccgct

SEQ ID NO: 28747 - DNA, 25 bp, Canis familiaris
agagagagtaaagcccaacacccgt

SEQ ID NO: 28748 - DNA, 25 bp, Canis familiaris
agcagggggacatgccaaaaccatc

SEQ ID NO: 28749 - DNA, 25 bp, Canis familiaris
agaggggaaccatgctgagaaactg

SEQ ID NO: 28750 - DNA, 25 bp, Canis familiaris
agagaaggaccctactgcggaactg

SEQ ID NO: 28751 - DNA, 25 bp, Canis familiaris
agatgaacgaacagactcaggcgat

SEQ ID NO: 28752 - DNA, 25 bp, Canis familiaris
agatgcacagaaccaagcagtcacc

SEQ ID NO: 28753 - DNA, 25 bp, Canis familiaris
agatcaagatggccaagatgtgtca

SEQ ID NO: 28754 - DNA, 25 bp, Canis familiaris
agatcatcgttgtacagtgtgtgca

SEQ ID NO: 28755 - DNA, 25 bp, Canis familiaris
agatgatcgtcgtagagctgggcac

SEQ ID NO: 28756 - DNA, 25 bp, Canis familiaris
agatagcagtggcgagctgcgtcct

SEQ ID NO: 28757 - DNA, 25 bp, Canis familiaris
agatagagtctgcatagggctccct

SEQ ID NO: 28758 - DNA, 25 bp, Canis familiaris
agatcaagctcaggacggagtcccc

SEQ ID NO: 28759 - DNA, 25 bp, Canis familiaris
agatcaactaggccaaggccctcgc

SEQ ID NO: 28760 - DNA, 25 bp, Canis familiaris
agacaacccagggtggtggctcctg

SEQ ID NO: 28761 - DNA, 25 bp, Canis familiaris
agacaaccgagttgtcctcccaata

SEQ ID NO: 28762 - DNA, 25 bp, Canis familiaris
agaggaaagagtctcccttcacaca

SEQ ID NO: 28763 - DNA, 25 bp, Canis familiaris
agaggaagactgtatataccttaaa

SEQ ID NO: 28764 - DNA, 25 bp, Canis familiaris
agaggcaacacaatgattccctttg

SEQ ID NO: 28765 - DNA, 25 bp, Canis familiaris
agatacggagacatcctcttttggg

SEQ ID NO: 28766 - DNA, 25 bp, Canis familiaris
agagagggagtcactccttgttaac

SEQ ID NO: 28767 - DNA, 25 bp, Canis familiaris
agatgggagggaaatgtgttgttac

SEQ ID NO: 28768 - DNA, 25 bp, Canis familiaris
agagaggggtgtttctttggctact

SEQ ID NO: 28769 - DNA, 25 bp, Canis familiaris
agagaggggtagatccagggcctcc

SEQ ID NO: 28770 - DNA, 25 bp, Canis familiaris
agaggatgaggctaccctaggtcag

SEQ ID NO: 28771 - DNA, 25 bp, Canis familiaris
agatggatagatcctcagcccaggt

SEQ ID NO: 28772 - DNA, 25 bp, Canis familiaris
agagagaaactcgatgccctgatgt

SEQ ID NO: 28773 - DNA, 25 bp, Canis familiaris
agaggactacagccatgacatcatg

SEQ ID NO: 28774 - DNA, 25 bp, Canis familiaris
agagtagcttgtcctacatctggtc

SEQ ID NO: 28775 - DNA, 25 bp, Canis familiaris
agatggtgaggtcctatccggtgtc

SEQ ID NO: 28776 - DNA, 25 bp, Canis familiaris
agatccgggatcgaatcccgcgtcg

SEQ ID NO: 28777 - DNA, 25 bp, Canis familiaris
aatacgggtaacacgacgtcatgta

SEQ ID NO: 28778 - DNA, 25 bp, Canis familiaris
aaagtggttaacatccctgaaggag

SEQ ID NO: 28779 - DNA, 25 bp, Canis familiaris
gagggggtaacagatccctgggtgg

SEQ ID NO: 28780 - DNA, 25 bp, Canis familiaris
agatgggggaatgtacccgcggtgg

SEQ ID NO: 28781 - DNA, 25 bp, Canis familiaris
agaggagggagtgaacgggcgcctg

SEQ ID NO: 28782 - DNA, 25 bp, Canis familiaris
agaggaggagagagaaaggagggat

SEQ ID NO: 28783 - DNA, 25 bp, Canis familiaris
agaggtgaaaggctattggcaggtt

SEQ ID NO: 28784 - DNA, 25 bp, Canis familiaris
agatggtgaactatgcctgggcagg

SEQ ID NO: 28785 - DNA, 25 bp, Canis familiaris
agatggatgcagacattatcttggc

SEQ ID NO: 28786 - DNA, 25 bp, Canis familiaris
agatgagccgacatactggcacggc

SEQ ID NO: 28787 - DNA, 25 bp, Canis familiaris
agaggcgccaacaagcggatcacct

SEQ ID NO: 28788 - DNA, 25 bp, Canis familiaris
agatctgtgccataacagttcccct

SEQ ID NO: 28789 - DNA, 25 bp, Canis familiaris
agatggtgtccatcagcaactaccc

SEQ ID NO: 28790 - DNA, 25 bp, Canis familiaris
agatggatgtacacgctagtcccac

SEQ ID NO: 28791 - DNA, 25 bp, Canis familiaris
agatggagatcctccaggtcctatt

SEQ ID NO: 28792 - DNA, 25 bp, Canis familiaris
agatgtgcgcattgacaccaggctc

SEQ ID NO: 28793 - DNA, 25 bp, Canis familiaris
agatgtgagctgtggtcagcctccc

SEQ ID NO: 28794 - DNA, 25 bp, Canis familiaris
agatgatgactatctggcgttatcc

SEQ ID NO: 28795 - DNA, 25 bp, Canis familiaris
agagcacctcaacagctatttcacc

SEQ ID NO: 28796 - DNA, 25 bp, Canis familiaris
agatgcccttcccgaatatagcact

SEQ ID NO: 28797 - DNA, 25 bp, Canis familiaris
agatgaggcttccgggataggcccg

SEQ ID NO: 28798 - DNA, 25 bp, Canis familiaris
agatgagtgccgctgcgtgagtggc

SEQ ID NO: 28799 - DNA, 25 bp, Canis familiaris
agatgactctgcccatggatggttg

SEQ ID NO: 28800 - DNA, 25 bp, Canis familiaris
agaggctgcagcctctggggttgta

SEQ ID NO: 28801 - DNA, 25 bp, Canis familiaris
agaggactgcttgggaggcttggac

SEQ ID NO: 28802 - DNA, 25 bp, Canis familiaris
agaggacttctgggatgagcatgca

SEQ ID NO: 28803 - DNA, 25 bp, Canis familiaris
agaggacagattgcgctgagcccgc

SEQ ID NO: 28804 - DNA, 25 bp, Canis familiaris
agaggtcaaagcccagattcacagc

SEQ ID NO: 28805 - DNA, 25 bp, Canis familiaris
agaggacatgtcgccagttcaaagg

SEQ ID NO: 28806 - DNA, 25 bp, Canis familiaris
agaggccatatcaccaggacaatac

SEQ ID NO: 28807 - DNA, 25 bp, Canis familiaris
agaggtctattttaggaacagccta

SEQ ID NO: 28808 - DNA, 25 bp, Canis familiaris
agaggttgatcttccggcaacagct

SEQ ID NO: 28809 - DNA, 25 bp, Canis familiaris
agaggatcagagaaccaccaagccc

SEQ ID NO: 28810 - DNA, 25 bp, Canis familiaris
agatgttcaagaagcccacgccatc

SEQ ID NO: 28811 - DNA, 25 bp, Canis familiaris
agatgttaaacaagtcaccctcgcc

SEQ ID NO: 28812 - DNA, 25 bp, Canis familiaris
agatggttcaaacacagtccttccc

SEQ ID NO: 28813 - DNA, 25 bp, Canis familiaris
agaggtttacagtacagatgcccac

SEQ ID NO: 28814 - DNA, 25 bp, Canis familiaris
agaggaacccagtgagtggccacac

SEQ ID NO: 28815 - DNA, 25 bp, Canis familiaris
agaggaggccccagggccacaagta

SEQ ID NO: 28816 - DNA, 25 bp, Canis familiaris
agaggaggtcctgagagcccaagat

SEQ ID NO: 28817 - DNA, 25 bp, Canis familiaris
agagggcgttcaggtggaccagaag

SEQ ID NO: 28818 - DNA, 25 bp, Canis familiaris
agatgggggtcccttactgcataat

SEQ ID NO: 28819 - DNA, 25 bp, Canis familiaris
agcatgggtggctgagttagttaag

SEQ ID NO: 28820 - DNA, 25 bp, Canis familiaris
agagggtggaaccagtccttaggcg

SEQ ID NO: 28821 - DNA, 25 bp, Canis familiaris
agaggagaggccaggctcctttgtg

SEQ ID NO: 28822 - DNA, 25 bp, Canis familiaris
agcatggggccctaactattttgtg

SEQ ID NO: 28823 - DNA, 25 bp, Canis familiaris
agatgagggcacagtacaattcctg

SEQ ID NO: 28824 - DNA, 25 bp, Canis familiaris
agaggcggagcagtaatccttccat

SEQ ID NO: 28825 - DNA, 25 bp, Canis familiaris
agaggcagggcaggggtattccact

SEQ ID NO: 28826 - DNA, 25 bp, Canis familiaris
agagtaagcacctggtttccacttg

SEQ ID NO: 28827 - DNA, 25 bp, Canis familiaris
agaggaaactttcatctatccctgt

SEQ ID NO: 28828 - DNA, 25 bp, Canis familiaris
agaggaaccaatccttttccagctg

SEQ ID NO: 28829 - DNA, 25 bp, Canis familiaris
agaggacggttcttatttccactgc

SEQ ID NO: 28830 - DNA, 25 bp, Canis familiaris
agatggaggggcatctttcttcctg

SEQ ID NO: 28831 - DNA, 25 bp, Canis familiaris
agatgggtggaaatcctcacctgcc

SEQ ID NO: 28832 - DNA, 25 bp, Canis familiaris
agagagggccatttggctgacctcc

SEQ ID NO: 28833 - DNA, 25 bp, Canis familiaris
agagagttcgtttagtgagcctgta

SEQ ID NO: 28834 - DNA, 25 bp, Canis familiaris
agagattctcgtgttcacagctctt

SEQ ID NO: 28835 - DNA, 25 bp, Canis familiaris
agagtaggcagtttcttcacttctt

SEQ ID NO: 28836 - DNA, 25 bp, Canis familiaris
agagttccacttttaccttattcat

SEQ ID NO: 28837 - DNA, 25 bp, Canis familiaris
agaggaactcttatcacatttttat

SEQ ID NO: 28838 - DNA, 25 bp, Canis familiaris
agatggcagactaaattcagcattt

SEQ ID NO: 28839 - DNA, 25 bp, Canis familiaris
agatctgcaggcagaagctcgccct

SEQ ID NO: 28840 - DNA, 25 bp, Canis familiaris
agatgatggagctcaacgaccgctt

SEQ ID NO: 28841 - DNA, 25 bp, Canis familiaris
agatgcggaaccgaaggcctcattc

SEQ ID NO: 28842 - DNA, 25 bp, Canis familiaris
agatctaccagcagaaagcctcttc

SEQ ID NO: 28843 - DNA, 25 bp, Canis familiaris
agatctagtagttacaaccttcagg

SEQ ID NO: 28844 - DNA, 25 bp, Canis familiaris
agatctgctgatttacacaactttt

SEQ ID NO: 28845 - DNA, 25 bp, Canis familiaris
agacctttaccatgactttgctaca

SEQ ID NO: 28846 - DNA, 25 bp, Canis familiaris
agatcctcagttgtagtcatttcta

SEQ ID NO: 28847 - DNA, 25 bp, Canis familiaris
agatgtctcccatatagtctttctt

SEQ ID NO: 28848 - DNA, 25 bp, Canis familiaris
agagattctctataagtttttccct

SEQ ID NO: 28849 - DNA, 25 bp, Canis familiaris
agaggttaggtatgatggtttccct

SEQ ID NO: 28850 - DNA, 25 bp, Canis familiaris
aaggacggggtgtggctttgatcct

SEQ ID NO: 28851 - DNA, 25 bp, Canis familiaris
acgagccgggggaggcattgttccg

SEQ ID NO: 28852 - DNA, 25 bp, Canis familiaris
agcaaacgggggagcaggggccctg

SEQ ID NO: 28853 - DNA, 25 bp, Canis familiaris
agaaccggttggagacggtacattg

SEQ ID NO: 28854 - DNA, 25 bp, Canis familiaris
agagtgcggttttacgagggtcctg

SEQ ID NO: 28855 - DNA, 25 bp, Canis familiaris
agagttcggttctacgagggtcctg

SEQ ID NO: 28856 - DNA, 25 bp, Canis familiaris
agaggtcggggtatgataggtcggg

SEQ ID NO: 28857 - DNA, 25 bp, Canis familiaris
agatgagggaggggggagtgggcgg

SEQ ID NO: 28858 - DNA, 25 bp, Canis familiaris
agatggggcagcaggatgggcggga

SEQ ID NO: 28859 - DNA, 25 bp, Canis familiaris
agatgtggggtggaggggcgtctat

SEQ ID NO: 28860 - DNA, 25 bp, Canis familiaris
agagggcaggtgtggcgccaatcta

SEQ ID NO: 28861 - DNA, 25 bp, Canis familiaris
agagatacaagttcgtggcacactt

SEQ ID NO: 28862 - DNA, 25 bp, Canis familiaris
agagttcaggattgaaaggacttcc

SEQ ID NO: 28863 - DNA, 25 bp, Canis familiaris
agatgtatagccttgcataagtcct

SEQ ID NO: 28864 - DNA, 25 bp, Canis familiaris
agatgctgttctttgcaagtgtaca

SEQ ID NO: 28865 - DNA, 25 bp, Canis familiaris
agatggtatgattctacatatataa

SEQ ID NO: 28866 - DNA, 25 bp, Canis familiaris
agatggcttattttgcattcatgca

SEQ ID NO: 28867 - DNA, 25 bp, Canis familiaris
agaggctttctcggtatcagcagtt

SEQ ID NO: 28868 - DNA, 25 bp, Canis familiaris
agatgggtttcagcccagcagaagc

SEQ ID NO: 28869 - DNA, 25 bp, Canis familiaris
agatgggttaaggctcgagagtgga

SEQ ID NO: 28870 - DNA, 25 bp, Canis familiaris
agatggtttgagttgggggctgggc

SEQ ID NO: 28871 - DNA, 25 bp, Canis familiaris
agaggttctgggaggccagcagggc

SEQ ID NO: 28872 - DNA, 25 bp, Canis familiaris
agagtgctttggctagcatcctgca

SEQ ID NO: 28873 - DNA, 25 bp, Canis familiaris
agaggctgctgctgcctaaggcagc

SEQ ID NO: 28874 - DNA, 25 bp, Canis familiaris
agaggcatcatgaggatcaagatcc

SEQ ID NO: 28875 - DNA, 25 bp, Canis familiaris
agacgcgtatcgccatgaaaccggg

SEQ ID NO: 28876 - DNA, 25 bp, Canis familiaris
agacctgttctgtagacccagggag

SEQ ID NO: 28877 - DNA, 25 bp, Canis familiaris
agaccttagtgggtgcctagaggca

SEQ ID NO: 28878 - DNA, 25 bp, Canis familiaris
agaagttggaggggcactcgggcga

SEQ ID NO: 28879 - DNA, 25 bp, Canis familiaris
agagagttggccctggacttggggt

SEQ ID NO: 28880 - DNA, 25 bp, Canis familiaris
agagagctaatgccacttactttgc

SEQ ID NO: 28881 - DNA, 25 bp, Canis familiaris
agaagaagacccatgagtttcccga

SEQ ID NO: 28882 - DNA, 25 bp, Canis familiaris
agatgctaagcagccttgatacatt

SEQ ID NO: 28883 - DNA, 25 bp, Canis familiaris
agatgatccagtgcctgagatccgc

SEQ ID NO: 28884 - DNA, 25 bp, Canis familiaris
agatgaaactggctgcagatgaaga

SEQ ID NO: 28885 - DNA, 25 bp, Canis familiaris
agaggtgactgggtgagatatgaac

SEQ ID NO: 28886 - DNA, 25 bp, Canis familiaris
agaggctgagctgacgccaaaggcc

SEQ ID NO: 28887 - DNA, 25 bp, Canis familiaris
agagtgcgggcttccagaagccgcc

SEQ ID NO: 28888 - DNA, 25 bp, Canis familiaris
agagtccgtctacggaagcttccct

SEQ ID NO: 28889 - DNA, 25 bp, Canis familiaris
agagtccagggccaggaatcttcca

SEQ ID NO: 28890 - DNA, 25 bp, Canis familiaris
agagtcgcacgtgaggcactgttca

SEQ ID NO: 28891 - DNA, 25 bp, Canis familiaris
agagccgcagatgacaaggcggtca

SEQ ID NO: 28892 - DNA, 25 bp, Canis familiaris
agatgcgcgagcagatacaggaggt

SEQ ID NO: 28893 - DNA, 25 bp, Canis familiaris
agatctgcggtggcaacgactgagc

SEQ ID NO: 28894 - DNA, 25 bp, Canis familiaris
agatcgggtcactttatcatgagct

SEQ ID NO: 28895 - DNA, 25 bp, Canis familiaris
agatcggtgctactacttatgagaa

SEQ ID NO: 28896 - DNA, 25 bp, Canis familiaris
agatctctgcttcgcatcaattaaa

SEQ ID NO: 28897 - DNA, 25 bp, Canis familiaris
agatctcttgcaaggcagatgctaa

SEQ ID NO: 28898 - DNA, 25 bp, Canis familiaris
agagccattgcaatgcatcaataaa

SEQ ID NO: 28899 - DNA, 25 bp, Canis familiaris
agagctgcatgacctgatcgtagag

SEQ ID NO: 28900 - DNA, 25 bp, Canis familiaris
agatgctcataggattctgatgggg

SEQ ID NO: 28901 - DNA, 25 bp, Canis familiaris
agatgctgctgtgctacgaggacga

SEQ ID NO: 28902 - DNA, 25 bp, Canis familiaris
agatctgctcagtccaggaaatcca

SEQ ID NO: 28903 - DNA, 25 bp, Canis familiaris
agatctccactcatggatacccatt

SEQ ID NO: 28904 - DNA, 25 bp, Canis familiaris
agatcccagccacggatgacaagaa

SEQ ID NO: 28905 - DNA, 25 bp, Canis familiaris
agagtcctgtccctgaggagcaaaa

SEQ ID NO: 28906 - DNA, 25 bp, Canis familiaris
agagtttctctgcccaaggaagaca

SEQ ID NO: 28907 - DNA, 25 bp, Canis familiaris
agactgagttcttcccaaaacacta

SEQ ID NO: 28908 - DNA, 25 bp, Canis familiaris
agactcagttcttctcggaagaaga

SEQ ID NO: 28909 - DNA, 25 bp, Canis familiaris
agatgccctttgtcctgggagaagg

SEQ ID NO: 28910 - DNA, 25 bp, Canis familiaris
agagtcccctcttcatgggaaaggt

SEQ ID NO: 28911 - DNA, 25 bp, Canis familiaris
agagtcccctcttcatgggaaaggt

SEQ ID NO: 28912 - DNA, 25 bp, Canis familiaris
agaggccttcctttgtgtattagtt

SEQ ID NO: 28913 - DNA, 25 bp, Canis familiaris
agatctcctgtaattttgtagtagt

SEQ ID NO: 28914 - DNA, 25 bp, Canis familiaris
agatgaccagcattgttttccctag

SEQ ID NO: 28915 - DNA, 25 bp, Canis familiaris
agatgcacccaacctggtgtcacaa

SEQ ID NO: 28916 - DNA, 25 bp, Canis familiaris
agagaccacaagctggaaccatcca

SEQ ID NO: 28917 - DNA, 25 bp, Canis familiaris
agaggcccagggcagagacctaagc

SEQ ID NO: 28918 - DNA, 25 bp, Canis familiaris
agaggagctaggcgaggttctacgc

SEQ ID NO: 28919 - DNA, 25 bp, Canis familiaris
agaggcagtcactgggttctctagg

SEQ ID NO: 28920 - DNA, 25 bp, Canis familiaris
agatggggaagggcctgtcttcacg

SEQ ID NO: 28921 - DNA, 25 bp, Canis familiaris
agatgggcatggaggccgtcatggc

SEQ ID NO: 28922 - DNA, 25 bp, Canis familiaris
agatggggtggagcacaggctggcg

SEQ ID NO: 28923 - DNA, 25 bp, Canis familiaris
agagggtgggttacagtcatagctg

SEQ ID NO: 28924 - DNA, 25 bp, Canis familiaris
agaggaggggtttgggcatattgtc

SEQ ID NO: 28925 - DNA, 25 bp, Canis familiaris
agaggggtgtgtcagggttgcccaa

SEQ ID NO: 28926 - DNA, 25 bp, Canis familiaris
agaggagggccacaaggtgtccaag

SEQ ID NO: 28927 - DNA, 25 bp, Canis familiaris
agatggaggcgctacctaggaacct

SEQ ID NO: 28928 - DNA, 25 bp, Canis familiaris
agaggatgcggctgccaaggcaaca

SEQ ID NO: 28929 - DNA, 25 bp, Canis familiaris
agatgttggtacccacagccaacct

SEQ ID NO: 28930 - DNA, 25 bp, Canis familiaris
agatgattgagaactggcggcggca

SEQ ID NO: 28931 - DNA, 25 bp, Canis familiaris
agatgggcagcaacaggggggcctc

SEQ ID NO: 28932 - DNA, 25 bp, Canis familiaris
agatgggagcttggtgtgggggtca

SEQ ID NO: 28933 - DNA, 25 bp, Canis familiaris
agaggctactatcactggtctggaa

SEQ ID NO: 28934 - DNA, 25 bp, Canis familiaris
agatgagctctttatactggtatgt

SEQ ID NO: 28935 - DNA, 25 bp, Canis familiaris
agagagcactgttttaagtattcca

SEQ ID NO: 28936 - DNA, 25 bp, Canis familiaris
agaggcattttgtaccagttatcca

SEQ ID NO: 28937 - DNA, 25 bp, Canis familiaris
agaggtctttgtgcattgttggtac

SEQ ID NO: 28938 - DNA, 25 bp, Canis familiaris
agagaatctgttccactatttagtt

SEQ ID NO: 28939 - DNA, 25 bp, Canis familiaris
agagctgtgtaaaccttattatatt

SEQ ID NO: 28940 - DNA, 25 bp, Canis familiaris
agatgattactaagctgttactata

SEQ ID NO: 28941 - DNA, 25 bp, Canis familiaris
agatgattattatatttttgttaag

SEQ ID NO: 28942 - DNA, 25 bp, Canis familiaris
agatgtgttctagattcgtctgtct

SEQ ID NO: 28943 - DNA, 25 bp, Canis familiaris
agaggtctccaaactgcagtctgag

SEQ ID NO: 28944 - DNA, 25 bp, Canis familiaris
agatgggcatcacaagtgaatgcga

SEQ ID NO: 28945 - DNA, 25 bp, Canis familiaris
agatgtggatcagcaagcaggagta

SEQ ID NO: 28946 - DNA, 25 bp, Canis familiaris
agagcttcatcaccatggcaaatat

SEQ ID NO: 28947 - DNA, 25 bp, Canis familiaris
agagatttgagttggcagtaagcat

SEQ ID NO: 28948 - DNA, 25 bp, Canis familiaris
agatgattgtggaccctgtagagcc

SEQ ID NO: 28949 - DNA, 25 bp, Canis familiaris
agaggatgtccgtcctgaatggcct

SEQ ID NO: 28950 - DNA, 25 bp, Canis familiaris
agagagtaccgctattgaaggccct

SEQ ID NO: 28951 - DNA, 25 bp, Canis familiaris
agaggtagctgccctagaggggctc

SEQ ID NO: 28952 - DNA, 25 bp, Canis familiaris
agatccacaagcgctcagaagggtc

SEQ ID NO: 28953 - DNA, 25 bp, Canis familiaris
agatgccacacagccaaaagtgttt

SEQ ID NO: 28954 - DNA, 25 bp, Canis familiaris
agatgcacaaccgtcaccaagtgac

SEQ ID NO: 28955 - DNA, 25 bp, Canis familiaris
agatgaacaacctactcaacgaccg

SEQ ID NO: 28956 - DNA, 25 bp, Canis familiaris
agatgatagcagaagccatccccga

SEQ ID NO: 28957 - DNA, 25 bp, Canis familiaris
agatgaaagtaggcccctggactcc

SEQ ID NO: 28958 - DNA, 25 bp, Canis familiaris
agatgacagaggcggccctgaggct

SEQ ID NO: 28959 - DNA, 25 bp, Canis familiaris
agatgtccggggctgcacgcgcgct

SEQ ID NO: 28960 - DNA, 25 bp, Canis familiaris
agatggacgctgtgcgtatcatggc

SEQ ID NO: 28961 - DNA, 25 bp, Canis familiaris
agagtgtatgcctcctatctttaaa

SEQ ID NO: 28962 - DNA, 25 bp, Canis familiaris
agatgctaagtctatcactgatttt

SEQ ID NO: 28963 - DNA, 25 bp, Canis familiaris
agatgtgacctcatcacttctttct

SEQ ID NO: 28964 - DNA, 25 bp, Canis familiaris
agatgtgcaacctctttgatatgtt

SEQ ID NO: 28965 - DNA, 25 bp, Canis familiaris
agatgaaaatcttgcgttgtatgtt

SEQ ID NO: 28966 - DNA, 25 bp, Canis familiaris
agatcccaatcgtcgatttcttccg

SEQ ID NO: 28967 - DNA, 25 bp, Canis familiaris
agagatccaagtaccattctttccc

SEQ ID NO: 28968 - DNA, 25 bp, Canis familiaris
agagtccaggtcaggtatttgccca

SEQ ID NO: 28969 - DNA, 25 bp, Canis familiaris
agagtcgtctggagtgttttcagaa

SEQ ID NO: 28970 - DNA, 25 bp, Canis familiaris
agagattttggtgttcctctcggat

SEQ ID NO: 28971 - DNA, 25 bp, Canis familiaris
agagtttgcaactaattcccttgga

SEQ ID NO: 28972 - DNA, 25 bp, Canis familiaris
agagttctgaacttgtcacccagtg

SEQ ID NO: 28973 - DNA, 25 bp, Canis familiaris
agagttgctaggaagttacacagag

SEQ ID NO: 28974 - DNA, 25 bp, Canis familiaris
agaggagccagacagttacttggaa

SEQ ID NO: 28975 - DNA, 25 bp, Canis familiaris
agagtatacgagagctttctaggaa

SEQ ID NO: 28976 - DNA, 25 bp, Canis familiaris
agagtaatccaaagtcattcgggtt

SEQ ID NO: 28977 - DNA, 25 bp, Canis familiaris
agagtaataaatctctctgcccctt

SEQ ID NO: 28978 - DNA, 25 bp, Canis familiaris
agatgtccagaaatgtccttaccct

SEQ ID NO: 28979 - DNA, 25 bp, Canis familiaris
agatgctccagaaagcacctcttcc

SEQ ID NO: 28980 - DNA, 25 bp, Canis familiaris
agatgctccagatatacagcccgct

SEQ ID NO: 28981 - DNA, 25 bp, Canis familiaris
agatgatcacagtttagccctctgg

SEQ ID NO: 28982 - DNA, 25 bp, Canis familiaris
agatgacgtgtttcccaatccacga

SEQ ID NO: 28983 - DNA, 25 bp, Canis familiaris
agagacctgttattccacagttaga

SEQ ID NO: 28984 - DNA, 25 bp, Canis familiaris
agagaagcttttgtcatagttggca

SEQ ID NO: 28985 - DNA, 25 bp, Canis familiaris
agagaagttgttataaagttgaatt

SEQ ID NO: 28986 - DNA, 25 bp, Canis familiaris
agagaagagtggagaaacctttaat

SEQ ID NO: 28987 - DNA, 25 bp, Canis familiaris
agaggcagacatgggtaacacctct

SEQ ID NO: 28988 - DNA, 25 bp, Canis familiaris
agaggcccatggggatacgaatctg

SEQ ID NO: 28989 - DNA, 25 bp, Canis familiaris
agaggccagtggggatagcgatgct

SEQ ID NO: 28990 - DNA, 25 bp, Canis familiaris
agatgcccatgaacgtggcggatct

SEQ ID NO: 28991 - DNA, 25 bp, Canis familiaris
agatgactatgacgacgctgcggac

SEQ ID NO: 28992 - DNA, 25 bp, Canis familiaris
agagagccggcattgcaggcaggaa

SEQ ID NO: 28993 - DNA, 25 bp, Canis familiaris
agatgaccggagtggcctgagaagc

SEQ ID NO: 28994 - DNA, 25 bp, Canis familiaris
agatgagccgggacgagcatcgagc

SEQ ID NO: 28995 - DNA, 25 bp, Canis familiaris
agatgagattcgccactggatcctc

SEQ ID NO: 28996 - DNA, 25 bp, Canis familiaris
agagcatttccacgtgagactccgt

SEQ ID NO: 28997 - DNA, 25 bp, Canis familiaris
agatgcattgttacaggaagtccct

SEQ ID NO: 28998 - DNA, 25 bp, Canis familiaris
agatgctggcattttggaacctctc

SEQ ID NO: 28999 - DNA, 25 bp, Canis familiaris
agatgggccatatgtaactctccta

SEQ ID NO: 29000 - DNA, 25 bp, Canis familiaris
agatgggccatcagcttacagcccc

SEQ ID NO: 29001 - DNA, 25 bp, Canis familiaris
agatgggatatgtccttccatcccc

SEQ ID NO: 29002 - DNA, 25 bp, Canis familiaris
agatggcgaacatcttggcaccggt

SEQ ID NO: 29003 - DNA, 25 bp, Canis familiaris
agatgatggaactcttgtctccctt

SEQ ID NO: 29004 - DNA, 25 bp, Canis familiaris
agagcagagtaggtcactttccgta

SEQ ID NO: 29005 - DNA, 25 bp, Canis familiaris
agatgaggttgagttcatttccccc

SEQ ID NO: 29006 - DNA, 25 bp, Canis familiaris
agaggggtgacttttatcccacatt

SEQ ID NO: 29007 - DNA, 25 bp, Canis familiaris
agatggggcgtgcagctgtacccca

SEQ ID NO: 29008 - DNA, 25 bp, Canis familiaris
agaggggcagtccagtgggaccact

SEQ ID NO: 29009 - DNA, 25 bp, Canis familiaris
agatggagccttggacggaagcgca

SEQ ID NO: 29010 - DNA, 25 bp, Canis familiaris
agagtgagcctctgattggaaggaa

SEQ ID NO: 29011 - DNA, 25 bp, Canis familiaris
agatgtagtctggttctgtaacaca

SEQ ID NO: 29012 - DNA, 25 bp, Canis familiaris
agatgacagactttgatcgttacaa

SEQ ID NO: 29013 - DNA, 25 bp, Canis familiaris
agagatcagtcttttcagcagtata

SEQ ID NO: 29014 - DNA, 25 bp, Canis familiaris
agagctactctatgactcagtaact

SEQ ID NO: 29015 - DNA, 25 bp, Canis familiaris
agagtgccttgacgatacagctaat

SEQ ID NO: 29016 - DNA, 25 bp, Canis familiaris
agagaccattatgacaactgagatg

SEQ ID NO: 29017 - DNA, 25 bp, Canis familiaris
agagaacattcatttaacagcaggt

SEQ ID NO: 29018 - DNA, 25 bp, Canis familiaris
agagtacttcagttccacaagggta

SEQ ID NO: 29019 - DNA, 25 bp, Canis familiaris
agagtacatgtgggggcacctgggt

SEQ ID NO: 29020 - DNA, 25 bp, Canis familiaris
agaggaagtcgtaggtctcggccat

SEQ ID NO: 29021 - DNA, 25 bp, Canis familiaris
agaggaagtcctggttctcgtggtc

SEQ ID NO: 29022 - DNA, 25 bp, Canis familiaris
agaggctatgtggctgatgttgcag

SEQ ID NO: 29023 - DNA, 25 bp, Canis familiaris
agatgtctactgggtggctgcaggt

SEQ ID NO: 29024 - DNA, 25 bp, Canis familiaris
agagtagacagcttcatgaggaggt

SEQ ID NO: 29025 - DNA, 25 bp, Canis familiaris
agaggagtgagcatcgggaagaacg

SEQ ID NO: 29026 - DNA, 25 bp, Canis familiaris
agatggcaggagctccgagccaaca

SEQ ID NO: 29027 - DNA, 25 bp, Canis familiaris
agagtgttcaggacacgagccgacc

SEQ ID NO: 29028 - DNA, 25 bp, Canis familiaris
agatgctgttcacgtttggcactac

SEQ ID NO: 29029 - DNA, 25 bp, Canis familiaris
agactgaatgcagcttcgcagccta

SEQ ID NO: 29030 - DNA, 25 bp, Canis familiaris
agatgctacagctatttccaactat

SEQ ID NO: 29031 - DNA, 25 bp, Canis familiaris
agatgctcaggctttgtttcaggct

SEQ ID NO: 29032 - DNA, 25 bp, Canis familiaris
agatgcatgtacttgtgttttgtgt

SEQ ID NO: 29033 - DNA, 25 bp, Canis familiaris
agatgatttctttgtttcttgccac

SEQ ID NO: 29034 - DNA, 25 bp, Canis familiaris
agatggttgatttgctttcactcct

SEQ ID NO: 29035 - DNA, 25 bp, Canis familiaris
agatgcctcttatcttgtgatctcc

SEQ ID NO: 29036 - DNA, 25 bp, Canis familiaris
agatgccatctgcctgaatgttgat

SEQ ID NO: 29037 - DNA, 25 bp, Canis familiaris
agatgccagctggggtgtttctgtc

SEQ ID NO: 29038 - DNA, 25 bp, Canis familiaris
agactccaatcgggcttttggcttc

SEQ ID NO: 29039 - DNA, 25 bp, Canis familiaris
agatgtgcaaatagccgttttggag

SEQ ID NO: 29040 - DNA, 25 bp, Canis familiaris
agatgagagagatgcttttttaagc

SEQ ID NO: 29041 - DNA, 25 bp, Canis familiaris
agatgctcgaggttttttctgtcac

SEQ ID NO: 29042 - DNA, 25 bp, Canis familiaris
agatgtctggtagggtttcgttgta

SEQ ID NO: 29043 - DNA, 25 bp, Canis familiaris
agagatgctacaacggctcttcgtt

SEQ ID NO: 29044 - DNA, 25 bp, Canis familiaris
agaggccacatggttgcttgtcttc

SEQ ID NO: 29045 - DNA, 25 bp, Canis familiaris
agaggcccagacttgttgtttttct

SEQ ID NO: 29046 - DNA, 25 bp, Canis familiaris
agaggtcaagccaggttcaactccc

SEQ ID NO: 29047 - DNA, 25 bp, Canis familiaris
agaggacagtctgtttccacagctc

SEQ ID NO: 29048 - DNA, 25 bp, Canis familiaris
agagtgacgctgttgtatcccaggt

SEQ ID NO: 29049 - DNA, 25 bp, Canis familiaris
agatgggcagtgttacatacctggt

SEQ ID NO: 29050 - DNA, 25 bp, Canis familiaris
agaggccggaaacttactggtgtga

SEQ ID NO: 29051 - DNA, 25 bp, Canis familiaris
agaggcgcaggagcagttacgagtg

SEQ ID NO: 29052 - DNA, 25 bp, Canis familiaris
agaggccgtaccgtagagcgagtta

SEQ ID NO: 29053 - DNA, 25 bp, Canis familiaris
agagttgtgtaccctgaagcagagt

SEQ ID NO: 29054 - DNA, 25 bp, Canis familiaris
agatgattttattcctgcagcagta

SEQ ID NO: 29055 - DNA, 25 bp, Canis familiaris
agatgtctgcttttactcacaatga

SEQ ID NO: 29056 - DNA, 25 bp, Canis familiaris
agagtctcctttccgacatatcttc

SEQ ID NO: 29057 - DNA, 25 bp, Canis familiaris
agagtctcctttccgacatatcttc

SEQ ID NO: 29058 - DNA, 25 bp, Canis familiaris
agatgtcttttcctctaaatttcca

SEQ ID NO: 29059 - DNA, 25 bp, Canis familiaris
agatgttgtttcccattttactcca

SEQ ID NO: 29060 - DNA, 25 bp, Canis familiaris
agagggacttgcccaatttcttctc

SEQ ID NO: 29061 - DNA, 25 bp, Canis familiaris
agaggtccttgcagaaggtcctcct

SEQ ID NO: 29062 - DNA, 25 bp, Canis familiaris
agaggaccattaggccagttggccc

SEQ ID NO: 29063 - DNA, 25 bp, Canis familiaris
agagaggacctacgtgcagttgggc

SEQ ID NO: 29064 - DNA, 25 bp, Canis familiaris
agaggggcccagggctgtaggcaga

SEQ ID NO: 29065 - DNA, 25 bp, Canis familiaris
agcggttccgctgccctgaggcact

SEQ ID NO: 29066 - DNA, 25 bp, Canis familiaris
agcggttccgatgccctgaggctct

SEQ ID NO: 29067 - DNA, 25 bp, Canis familiaris
agaggattacgagctctctggtgct

SEQ ID NO: 29068 - DNA, 25 bp, Canis familiaris
agaggagtcgtgtcttctctatgtg

SEQ ID NO: 29069 - DNA, 25 bp, Canis familiaris
agagggctcaggtcaagccctggcc

SEQ ID NO: 29070 - DNA, 25 bp, Canis familiaris
agaggcgtacgtgatgccctagtct

SEQ ID NO: 29071 - DNA, 25 bp, Canis familiaris
agagaggtaagggagcctgcgcacc

SEQ ID NO: 29072 - DNA, 25 bp, Canis familiaris
agaggtgtaaggttggcttctgcca

SEQ ID NO: 29073 - DNA, 25 bp, Canis familiaris
agatgtggtacagaaggccctccaa

SEQ ID NO: 29074 - DNA, 25 bp, Canis familiaris
agatggtgagaccgaatggccccta

SEQ ID NO: 29075 - DNA, 25 bp, Canis familiaris
agatgcttcggtcaaggactctctg

SEQ ID NO: 29076 - DNA, 25 bp, Canis familiaris
agagattttcataaagccactttga

SEQ ID NO: 29077 - DNA, 25 bp, Canis familiaris
agagtgtggtctcagcagcacgttt

SEQ ID NO: 29078 - DNA, 25 bp, Canis familiaris
agaggctgagccaagaggccgacct

SEQ ID NO: 29079 - DNA, 25 bp, Canis familiaris
agagattgactttggtgctccactt

SEQ ID NO: 29080 - DNA, 25 bp, Canis familiaris
agagcgtgaagtcagtgcactactg

SEQ ID NO: 29081 - DNA, 25 bp, Canis familiaris
agagcgtatttgaggcctttggcaa

SEQ ID NO: 29082 - DNA, 25 bp, Canis familiaris
agaggtattgtctgaccctctgacc

SEQ ID NO: 29083 - DNA, 25 bp, Canis familiaris
agatgttatgtgcttacctctctgt

SEQ ID NO: 29084 - DNA, 25 bp, Canis familiaris
agatgttactgatttgaaacttttg

SEQ ID NO: 29085 - DNA, 25 bp, Canis familiaris
agagctacttcattttaacttatta

SEQ ID NO: 29086 - DNA, 25 bp, Canis familiaris
agaggatcattcaaaccaacgtatt

SEQ ID NO: 29087 - DNA, 25 bp, Canis familiaris
agaggatcgttttctaatctgtatg

SEQ ID NO: 29088 - DNA, 25 bp, Canis familiaris
agagacaccggttctttgatgtagt

SEQ ID NO: 29089 - DNA, 25 bp, Canis familiaris
agatgaaccctagccttgttaattt

SEQ ID NO: 29090 - DNA, 25 bp, Canis familiaris
agagttccgtgcacctatttatatt

SEQ ID NO: 29091 - DNA, 25 bp, Canis familiaris
agatgtttcagggaattattctttt

SEQ ID NO: 29092 - DNA, 25 bp, Canis familiaris
agaggttcagcaggtaccagtcggt

SEQ ID NO: 29093 - DNA, 25 bp, Canis familiaris
agagggtcacgtggacggtcgtggc

SEQ ID NO: 29094 - DNA, 25 bp, Canis familiaris
agaggattaccaaccaggtccatgg

SEQ ID NO: 29095 - DNA, 25 bp, Canis familiaris
agatggttcccaagatcatgtgatc

SEQ ID NO: 29096 - DNA, 25 bp, Canis familiaris
agatgtctctcggacacttgagatt

SEQ ID NO: 29097 - DNA, 25 bp, Canis familiaris
agatgtgctccagccagctgggttt

SEQ ID NO: 29098 - DNA, 25 bp, Canis familiaris
agctgagatcctgcgaggggttcgt

SEQ ID NO: 29099 - DNA, 25 bp, Canis familiaris
agaggcagtcttacaggggcttctg

SEQ ID NO: 29100 - DNA, 25 bp, Canis familiaris
agaggcccttaatgtagctgactgc

SEQ ID NO: 29101 - DNA, 25 bp, Canis familiaris
agaggcagtcttcagagtccgacat

SEQ ID NO: 29102 - DNA, 25 bp, Canis familiaris
agaggatgttggtggttctccttca

SEQ ID NO: 29103 - DNA, 25 bp, Canis familiaris
agaggtgtgaggtgcctagtccttg

SEQ ID NO: 29104 - DNA, 25 bp, Canis familiaris
agagggtattggtcctgttcctgat

SEQ ID NO: 29105 - DNA, 25 bp, Canis familiaris
agactgggtttgtctttggcaccac

SEQ ID NO: 29106 - DNA, 25 bp, Canis familiaris
agagtggagttttttatgatgagga

SEQ ID NO: 29107 - DNA, 25 bp, Canis familiaris
agatggccaggttcaatttgtgcag

SEQ ID NO: 29108 - DNA, 25 bp, Canis familiaris
agatgggaagcttctcctgattcaa

SEQ ID NO: 29109 - DNA, 25 bp, Canis familiaris
agatgtggacactgctcctgttaac

SEQ ID NO: 29110 - DNA, 25 bp, Canis familiaris
agaggatcaccagtgcatccttcat

SEQ ID NO: 29111 - DNA, 25 bp, Canis familiaris
agatggcacaccatcacctatgctc

SEQ ID NO: 29112 - DNA, 25 bp, Canis familiaris
agatggccactgccgcatcctcttc

SEQ ID NO: 29113 - DNA, 25 bp, Canis familiaris
agatgtgccacacaatcctcattat

SEQ ID NO: 29114 - DNA, 25 bp, Canis familiaris
agatgtccagacgattgcactcttc

SEQ ID NO: 29115 - DNA, 25 bp, Canis familiaris
agatgtcacacaagcagtcacgttt

SEQ ID NO: 29116 - DNA, 25 bp, Canis familiaris
agagtatgcagcaggtccttttgcc

SEQ ID NO: 29117 - DNA, 25 bp, Canis familiaris
agagtatgcagcaggtccttttgcc

SEQ ID NO: 29118 - DNA, 25 bp, Canis familiaris
agagtatgcagcaggtccttttgcc

SEQ ID NO: 29119 - DNA, 25 bp, Canis familiaris
agatgtatgaaggcttttggtctcc

SEQ ID NO: 29120 - DNA, 25 bp, Canis familiaris
agatgtcaaaggctgctgctggccc

SEQ ID NO: 29121 - DNA, 25 bp, Canis familiaris
agatggcacaagcgctgcgtgactg

SEQ ID NO: 29122 - DNA, 25 bp, Canis familiaris
agagagccaagcggctgagctcagc

SEQ ID NO: 29123 - DNA, 25 bp, Canis familiaris
agatggccaagatgtgtcaagggtt

SEQ ID NO: 29124 - DNA, 25 bp, Canis familiaris
agaggccagtgcatgcatttggggt

SEQ ID NO: 29125 - DNA, 25 bp, Canis familiaris
agatgtgccaggggctgctggagga

SEQ ID NO: 29126 - DNA, 25 bp, Canis familiaris
agagagcacagggactgccaaggct

SEQ ID NO: 29127 - DNA, 25 bp, Canis familiaris
agagtctaggtgttgccaagtgccc

SEQ ID NO: 29128 - DNA, 25 bp, Canis familiaris
agagtctggtggtgactggagcctc

SEQ ID NO: 29129 - DNA, 25 bp, Canis familiaris
agagttaatgtgtgctctgggcctc

SEQ ID NO: 29130 - DNA, 25 bp, Canis familiaris
agatggtttgtgttcctgttgtcgt

SEQ ID NO: 29131 - DNA, 25 bp, Canis familiaris
agatggtattctctgccttagttgt

SEQ ID NO: 29132 - DNA, 25 bp, Canis familiaris
agaggctgaatcttctccatttgtt

SEQ ID NO: 29133 - DNA, 25 bp, Canis familiaris
agaggcagagcctggccttgttgtt

SEQ ID NO: 29134 - DNA, 25 bp, Canis familiaris
agaggcagagccagaatttgattct

SEQ ID NO: 29135 - DNA, 25 bp, Canis familiaris
agatggcccatcagaagcggttcat

SEQ ID NO: 29136 - DNA, 25 bp, Canis familiaris
agcagagccaacaaaggggtccggg

SEQ ID NO: 29137 - DNA, 25 bp, Canis familiaris
agagacaagaatcaagctggacctg

SEQ ID NO: 29138 - DNA, 25 bp, Canis familiaris
agaggcataagtagggtcccctggg

SEQ ID NO: 29139 - DNA, 25 bp, Canis familiaris
agatggaagagaatacgtcgccccg

SEQ ID NO: 29140 - DNA, 25 bp, Canis familiaris
agaggcagaagcagactccctgccc

SEQ ID NO: 29141 - DNA, 25 bp, Canis familiaris
agatgtatcaaaaatgcctcctccc

SEQ ID NO: 29142 - DNA, 25 bp, Canis familiaris
agatggctaaatatgaccttcccgc

SEQ ID NO: 29143 - DNA, 25 bp, Canis familiaris
agaggcgaacattcgactttccacc

SEQ ID NO: 29144 - DNA, 25 bp, Canis familiaris
agagggaaaagcagactctccaccg

SEQ ID NO: 29145 - DNA, 25 bp, Canis familiaris
agaggcagtagatgaaatccccccg

SEQ ID NO: 29146 - DNA, 25 bp, Canis familiaris
agagggtagaagccatcatgcatct

SEQ ID NO: 29147 - DNA, 25 bp, Canis familiaris
agatgtgtgtgatattcctgctgtg

SEQ ID NO: 29148 - DNA, 25 bp, Canis familiaris
agatgtggtgcatatacacacatgc

SEQ ID NO: 29149 - DNA, 25 bp, Canis familiaris
agatgtgtgtcataaaaagcacttt

SEQ ID NO: 29150 - DNA, 25 bp, Canis familiaris
agagctttttactaaggactgtgtc

SEQ ID NO: 29151 - DNA, 25 bp, Canis familiaris
agagttccccaacagagagctggcc

SEQ ID NO: 29152 - DNA, 25 bp, Canis familiaris
agagtcccccaccagggggaggctg

SEQ ID NO: 29153 - DNA, 25 bp, Canis familiaris
agactcctacaatcggccgtagagt

SEQ ID NO: 29154 - DNA, 25 bp, Canis familiaris
agactacgtctatctgaacgctggg

SEQ ID NO: 29155 - DNA, 25 bp, Canis familiaris
agagttcgtttagtgagcctgtagg

SEQ ID NO: 29156 - DNA, 25 bp, Canis familiaris
agatgtcccttgtaagaccttggct

SEQ ID NO: 29157 - DNA, 25 bp, Canis familiaris
agatgtcaatctttaaactcttgct

SEQ ID NO: 29158 - DNA, 25 bp, Canis familiaris
agcgtatctctcctaatattcggct

SEQ ID NO: 29159 - DNA, 25 bp, Canis familiaris
agagtactccgttatattctcgctt

SEQ ID NO: 29160 - DNA, 25 bp, Canis familiaris
agaggacacctgtacattcttccat

SEQ ID NO: 29161 - DNA, 25 bp, Canis familiaris
agaggcagtacagactattgtctca

SEQ ID NO: 29162 - DNA, 25 bp, Canis familiaris
agatggctgttcgagttattttccc

SEQ ID NO: 29163 - DNA, 25 bp, Canis familiaris
agagggtgtcctctatgtaggctcc

SEQ ID NO: 29164 - DNA, 25 bp, Canis familiaris
agatggtgttccactgagctagctc

SEQ ID NO: 29165 - DNA, 25 bp, Canis familiaris
agagtctttcctttgcagaacatcc

SEQ ID NO: 29166 - DNA, 25 bp, Canis familiaris
agagtcgttttgtgctatagccact

SEQ ID NO: 29167 - DNA, 25 bp, Canis familiaris
agatgtcgtttttattcaggaaata

SEQ ID NO: 29168 - DNA, 25 bp, Canis familiaris
agagctttttgtgataaggagtgat

SEQ ID NO: 29169 - DNA, 25 bp, Canis familiaris
agacgtctccttctaccaaggataa

SEQ ID NO: 29170 - DNA, 25 bp, Canis familiaris
cgacctcttttcataaatccgaacg

SEQ ID NO: 29171 - DNA, 25 bp, Canis familiaris
agacctttgacgctaaatgcctgaa

SEQ ID NO: 29172 - DNA, 25 bp, Canis familiaris
agaggtttacacctaaatcttcagg

SEQ ID NO: 29173 - DNA, 25 bp, Canis familiaris
agaggcttctattcttaaatcctat

SEQ ID NO: 29174 - DNA, 25 bp, Canis familiaris
agaggtgattggtctctcgacgaca

SEQ ID NO: 29175 - DNA, 25 bp, Canis familiaris
agaggtgtgggaatccccggatttg

SEQ ID NO: 29176 - DNA, 25 bp, Canis familiaris
agatggtgggacaatccccgtttag

SEQ ID NO: 29177 - DNA, 25 bp, Canis familiaris
agatggtgggaccttacgcagcttt

SEQ ID NO: 29178 - DNA, 25 bp, Canis familiaris
agatggggaaggagacgctgctgcg

SEQ ID NO: 29179 - DNA, 25 bp, Canis familiaris
agaggacaaaggcgacggctggacc

SEQ ID NO: 29180 - DNA, 25 bp, Canis familiaris
agagcgagcaaaccagtacggctgg

SEQ ID NO: 29181 - DNA, 25 bp, Canis familiaris
agaggcactcactagagtactactg

SEQ ID NO: 29182 - DNA, 25 bp, Canis familiaris
agaggcagcagccaaatcatcctat

SEQ ID NO: 29183 - DNA, 25 bp, Canis familiaris
agagatgcatggccggtgcacactt

SEQ ID NO: 29184 - DNA, 25 bp, Canis familiaris
agaggctgtgcgagcttgcagcctt

SEQ ID NO: 29185 - DNA, 25 bp, Canis familiaris
agaggcagtggtggctgcagcagcc

SEQ ID NO: 29186 - DNA, 25 bp, Canis familiaris
agatggcagtgcttgtctgcccact

SEQ ID NO: 29187 - DNA, 25 bp, Canis familiaris
agatggatgagcgtgttccgtgctg

SEQ ID NO: 29188 - DNA, 25 bp, Canis familiaris
agaggatgatgcagctccaggctct

SEQ ID NO: 29189 - DNA, 25 bp, Canis familiaris
agagtggctgatccttcaagcctct

SEQ ID NO: 29190 - DNA, 25 bp, Canis familiaris
agaggttgctcgctgcaagcagctc

SEQ ID NO: 29191 - DNA, 25 bp, Canis familiaris
agaggtctacgggccagacagcaac

SEQ ID NO: 29192 - DNA, 25 bp, Canis familiaris
agagaggccacaggctcaagacgca

SEQ ID NO: 29193 - DNA, 25 bp, Canis familiaris
agaggaggccattgtcaagcgccgc

SEQ ID NO: 29194 - DNA, 25 bp, Canis familiaris
agagtgagaagctagtcaagaacct

SEQ ID NO: 29195 - DNA, 25 bp, Canis familiaris
agagtagaacccaataagcacccgt

SEQ ID NO: 29196 - DNA, 25 bp, Canis familiaris
agatgggagacagactgaacccgcg

SEQ ID NO: 29197 - DNA, 25 bp, Canis familiaris
agatggggaaccagaccccagctgt

SEQ ID NO: 29198 - DNA, 25 bp, Canis familiaris
agatggggaacactgggccccagcc

SEQ ID NO: 29199 - DNA, 25 bp, Canis familiaris
agagatgggggatggctccctacac

SEQ ID NO: 29200 - DNA, 25 bp, Canis familiaris
agaggaggggtgggccttgatgtcc

SEQ ID NO: 29201 - DNA, 25 bp, Canis familiaris
agaggagcggggaacacactgatgg

SEQ ID NO: 29202 - DNA, 25 bp, Canis familiaris
agaggactatctccaaagccagagg

SEQ ID NO: 29203 - DNA, 25 bp, Canis familiaris
agagagaaatgcccacacggaacca

SEQ ID NO: 29204 - DNA, 25 bp, Canis familiaris
agatgtgaaagcccagatgccgacc

SEQ ID NO: 29205 - DNA, 25 bp, Canis familiaris
agaggaaaggcccagggccctggca

SEQ ID NO: 29206 - DNA, 25 bp, Canis familiaris
agaccaaaccactgtggccagtggc

SEQ ID NO: 29207 - DNA, 25 bp, Canis familiaris
agagccaaagggtgtgcccacaggc

SEQ ID NO: 29208 - DNA, 25 bp, Canis familiaris
agagtagggggataagcacacaggc

SEQ ID NO: 29209 - DNA, 25 bp, Canis familiaris
agaggggggtgttgacagcctactc

SEQ ID NO: 29210 - DNA, 25 bp, Canis familiaris
agaggtggggctcagagaccgtgct

SEQ ID NO: 29211 - DNA, 25 bp, Canis familiaris
agaggagggcctgcaaacctggcct

SEQ ID NO: 29212 - DNA, 25 bp, Canis familiaris
agaggagagcccggcaacatcggat

SEQ ID NO: 29213 - DNA, 25 bp, Canis familiaris
agagggatgcctgtagtacggctac

SEQ ID NO: 29214 - DNA, 25 bp, Canis familiaris
agaggaatgactgtttatgccattt

SEQ ID NO: 29215 - DNA, 25 bp, Canis familiaris
agaggagtgacttaaatatcttttt

SEQ ID NO: 29216 - DNA, 25 bp, Canis familiaris
agagagagggtatatgtcattgttt

SEQ ID NO: 29217 - DNA, 25 bp, Canis familiaris
agagaatgggcttctatctgcactg

SEQ ID NO: 29218 - DNA, 25 bp, Canis familiaris
agagtccaggtgcttgtgggacccg

SEQ ID NO: 29219 - DNA, 25 bp, Canis familiaris
agaggggtgtggagctggtactgtc

SEQ ID NO: 29220 - DNA, 25 bp, Canis familiaris
agagggaggtcagggctgtgttctg

SEQ ID NO: 29221 - DNA, 25 bp, Canis familiaris
agaggcggagtggaggctgtgtccc

SEQ ID NO: 29222 - DNA, 25 bp, Canis familiaris
agaggagctgagcaacgtgctggcg

SEQ ID NO: 29223 - DNA, 25 bp, Canis familiaris
agagggcagtgactacctgcttggg

SEQ ID NO: 29224 - DNA, 25 bp, Canis familiaris
agatgggggcacaaggctctgtggg

SEQ ID NO: 29225 - DNA, 25 bp, Canis familiaris
agatggctgggagccaggggctgcg

SEQ ID NO: 29226 - DNA, 25 bp, Canis familiaris
agatggtgggcagcatggtgggcgt

SEQ ID NO: 29227 - DNA, 25 bp, Canis familiaris
agaggggagagaatggcggggctgc

SEQ ID NO: 29228 - DNA, 25 bp, Canis familiaris
agatggcccaggagggggaccagga

SEQ ID NO: 29229 - DNA, 25 bp, Canis familiaris
agatggcccaggccttggagcagac

SEQ ID NO: 29230 - DNA, 25 bp, Canis familiaris
agagggccgggctggagctatggcc

SEQ ID NO: 29231 - DNA, 25 bp, Canis familiaris
agagagggccgggctggagctatgg

SEQ ID NO: 29232 - DNA, 25 bp, Canis familiaris
agaggaggaaggtgctggccatcga

SEQ ID NO: 29233 - DNA, 25 bp, Canis familiaris
agaggatgtgtggtgttgccccatt

SEQ ID NO: 29234 - DNA, 25 bp, Canis familiaris
agaggagatgatcacagtccccgaa

SEQ ID NO: 29235 - DNA, 25 bp, Canis familiaris
agaggcagaattggcatccctccgg

SEQ ID NO: 29236 - DNA, 25 bp, Canis familiaris
agagtgaacttgcaactctcctggc

SEQ ID NO: 29237 - DNA, 25 bp, Canis familiaris
agaggtcatctttgagactcaccag

SEQ ID NO: 29238 - DNA, 25 bp, Canis familiaris
agaggagccttgtaggtgtgccagg

SEQ ID NO: 29239 - DNA, 25 bp, Canis familiaris
agaggagccttgtgtgatctgtcat

SEQ ID NO: 29240 - DNA, 25 bp, Canis familiaris
agaggagtgttgggtctgctgtagc

SEQ ID NO: 29241 - DNA, 25 bp, Canis familiaris
agaggaatatgtggctttggtgtaa

SEQ ID NO: 29242 - DNA, 25 bp, Canis familiaris
agatggattcttgtatgtggcctac

SEQ ID NO: 29243 - DNA, 25 bp, Canis familiaris
agatgggatgttgctggattcacta

SEQ ID NO: 29244 - DNA, 25 bp, Canis familiaris
agaggagaggcggctgggtcatccg

SEQ ID NO: 29245 - DNA, 25 bp, Canis familiaris
agagtgagaagcaggggtaccgagc

SEQ ID NO: 29246 - DNA, 25 bp, Canis familiaris
agagtagtggcaatggggcctccga

SEQ ID NO: 29247 - DNA, 25 bp, Canis familiaris
agaggggagagtggagcccccagca

SEQ ID NO: 29248 - DNA, 25 bp, Canis familiaris
agagggaggagtactccccacagcg

SEQ ID NO: 29249 - DNA, 25 bp, Canis familiaris
agagggaggaggacacaggccctgc

SEQ ID NO: 29250 - DNA, 25 bp, Canis familiaris
agaggtaggggagcctcacactcct

SEQ ID NO: 29251 - DNA, 25 bp, Canis familiaris
agagatcctggggactgcccagtct

SEQ ID NO: 29252 - DNA, 25 bp, Canis familiaris
agagatcctggggactgcccagtct

SEQ ID NO: 29253 - DNA, 25 bp, Canis familiaris
agagatcacggaggttcctcctctc

SEQ ID NO: 29254 - DNA, 25 bp, Canis familiaris
agagataccagagctctttctctcc

SEQ ID NO: 29255 - DNA, 25 bp, Canis familiaris
agagaactagaggccaacgtccctg

SEQ ID NO: 29256 - DNA, 25 bp, Canis familiaris
agagttccaaggcaacagatctaca

SEQ ID NO: 29257 - DNA, 25 bp, Canis familiaris
agagttccccaggacctgtcataaa

SEQ ID NO: 29258 - DNA, 25 bp, Canis familiaris
agagttcctccattagacttctttt

SEQ ID NO: 29259 - DNA, 25 bp, Canis familiaris
agagattttccttagacttcacctt

SEQ ID NO: 29260 - DNA, 25 bp, Canis familiaris
agagtcctgttcagagacggccagc

SEQ ID NO: 29261 - DNA, 25 bp, Canis familiaris
agacctcattttaagttgactacct

SEQ ID NO: 29262 - DNA, 25 bp, Canis familiaris
agaggggctcttaattttctaccat

SEQ ID NO: 29263 - DNA, 25 bp, Canis familiaris
agaggtggtctgtaatggattcaaa

SEQ ID NO: 29264 - DNA, 25 bp, Canis familiaris
agaggggctcagaaatggacacaaa

SEQ ID NO: 29265 - DNA, 25 bp, Canis familiaris
agaggggctcagaaaggaccaaata

SEQ ID NO: 29266 - DNA, 25 bp, Canis familiaris
agaggggctcagaaaggaccaaata

SEQ ID NO: 29267 - DNA, 25 bp, Canis familiaris
agagtgggctcggagaggacctggt

SEQ ID NO: 29268 - DNA, 25 bp, Canis familiaris
agactctcctagagaggtccgggct

SEQ ID NO: 29269 - DNA, 25 bp, Canis familiaris
agagcttcctagaggcagtacagac

SEQ ID NO: 29270 - DNA, 25 bp, Canis familiaris
agaccaacatggaagaagatactga

SEQ ID NO: 29271 - DNA, 25 bp, Canis familiaris
agagctacatttctgaagtacttaa

SEQ ID NO: 29272 - DNA, 25 bp, Canis familiaris
agaggatcttgtatattttgcttta

SEQ ID NO: 29273 - DNA, 25 bp, Canis familiaris
agagttcttgtaaatggcttcccta

SEQ ID NO: 29274 - DNA, 25 bp, Canis familiaris
agagttatcgtttagctgctgcatc

SEQ ID NO: 29275 - DNA, 25 bp, Canis familiaris
agaggtagtgtttgattgctccccc

SEQ ID NO: 29276 - DNA, 25 bp, Canis familiaris
agaggtaggacatggactccccatt

SEQ ID NO: 29277 - DNA, 25 bp, Canis familiaris
agagtggcaggagagggctccacct

SEQ ID NO: 29278 - DNA, 25 bp, Canis familiaris
agagtggagacagactgacccgcgc

SEQ ID NO: 29279 - DNA, 25 bp, Canis familiaris
agagtggagacagactgacccgcgc

SEQ ID NO: 29280 - DNA, 25 bp, Canis familiaris
agagatggaggtacactgtccctgc

SEQ ID NO: 29281 - DNA, 25 bp, Canis familiaris
agagagtggagtgtctgtccctcct

SEQ ID NO: 29282 - DNA, 25 bp, Canis familiaris
agacaggcaggtgttgggtctccag

SEQ ID NO: 29283 - DNA, 25 bp, Canis familiaris
agagaggcggctgaggggcctctgg

SEQ ID NO: 29284 - DNA, 25 bp, Canis familiaris
agagaggcaggcagagggggaggga

SEQ ID NO: 29285 - DNA, 25 bp, Canis familiaris
agaggaaggggaggcaggggtggag

SEQ ID NO: 29286 - DNA, 25 bp, Canis familiaris
agagtgatggcgggaggcgggatgg

SEQ ID NO: 29287 - DNA, 25 bp, Canis familiaris
agaggatgacgaagaggcgcgccgc

SEQ ID NO: 29288 - DNA, 25 bp, Canis familiaris
agaggagaccaaagagcccatgccc

SEQ ID NO: 29289 - DNA, 25 bp, Canis familiaris
agaggagtacttgagctccacgccc

SEQ ID NO: 29290 - DNA, 25 bp, Canis familiaris
agagggttctggaagccagcctgca

SEQ ID NO: 29291 - DNA, 25 bp, Canis familiaris
agagaggctcatggagtatcccctg

SEQ ID NO: 29292 - DNA, 25 bp, Canis familiaris
agaggctctgctggagtacactgct

SEQ ID NO: 29293 - DNA, 25 bp, Canis familiaris
agaggtcctcaagacccatggactc

SEQ ID NO: 29294 - DNA, 25 bp, Canis familiaris
agaggtcctcaagacccatggactc

SEQ ID NO: 29295 - DNA, 25 bp, Canis familiaris
agagagtcctaaaggcatccgggct

SEQ ID NO: 29296 - DNA, 25 bp, Canis familiaris
agagtgtcccaagggtcctgacatc

SEQ ID NO: 29297 - DNA, 25 bp, Canis familiaris
agagtttcgaagtgcgccattcatc

SEQ ID NO: 29298 - DNA, 25 bp, Canis familiaris
agagttttatcatcggccattcagt

SEQ ID NO: 29299 - DNA, 25 bp, Canis familiaris
agagatttctactcagaccagcaaa

SEQ ID NO: 29300 - DNA, 25 bp, Canis familiaris
agaggtctcaatgtggaccagctga

SEQ ID NO: 29301 - DNA, 25 bp, Canis familiaris
agagacctgaatagggatccctgtt

SEQ ID NO: 29302 - DNA, 25 bp, Canis familiaris
agagacctgaactgggcagactgcc

SEQ ID NO: 29303 - DNA, 25 bp, Canis familiaris
agagacctgaactgggcagactgcc

SEQ ID NO: 29304 - DNA, 25 bp, Canis familiaris
agagacctgaactgggcagactgcc

SEQ ID NO: 29305 - DNA, 25 bp, Canis familiaris
agagacctgaactgggcagactgcc

SEQ ID NO: 29306 - DNA, 25 bp, Canis familiaris
agaggcggaaccttctgaactgcct

SEQ ID NO: 29307 - DNA, 25 bp, Canis familiaris
agaggggacaccacagatttccttc

SEQ ID NO: 29308 - DNA, 25 bp, Canis familiaris
agaggggaccacatagttactgttg

SEQ ID NO: 29309 - DNA, 25 bp, Canis familiaris
agaggggccccagagtgatgacggg

SEQ ID NO: 29310 - DNA, 25 bp, Canis familiaris
agagggtctccctgagagaccggcc

SEQ ID NO: 29311 - DNA, 25 bp, Canis familiaris
agaggaacttacgagacaacaccca

SEQ ID NO: 29312 - DNA, 25 bp, Canis familiaris
agaggatccttacagactacctcct

SEQ ID NO: 29313 - DNA, 25 bp, Canis familiaris
agatggcccttacgacaagcagccc

SEQ ID NO: 29314 - DNA, 25 bp, Canis familiaris
agagggaattgcaccaacgcagccc

SEQ ID NO: 29315 - DNA, 25 bp, Canis familiaris
agagaagtgcttcaccaacgaggcc

SEQ ID NO: 29316 - DNA, 25 bp, Canis familiaris
agagtttgctgacaccatcaagcag

SEQ ID NO: 29317 - DNA, 25 bp, Canis familiaris
agagtcgcgctgtaagaagcaacaa

SEQ ID NO: 29318 - DNA, 25 bp, Canis familiaris
agagcttcctgtaaaacacgtgaac

SEQ ID NO: 29319 - DNA, 25 bp, Canis familiaris
agagcctccagtgaccaaaggcata

SEQ ID NO: 29320 - DNA, 25 bp, Canis familiaris
agactctccttttccataaggacgc

SEQ ID NO: 29321 - DNA, 25 bp, Canis familiaris
agagtcacatccaggcctgaaggtg

SEQ ID NO: 29322 - DNA, 25 bp, Canis familiaris
agagccaactcacaccattaaggta

SEQ ID NO: 29323 - DNA, 25 bp, Canis familiaris
agaccaagccgtattccaaagtcac

SEQ ID NO: 29324 - DNA, 25 bp, Canis familiaris
agactatcctttctctaccaatgtc

SEQ ID NO: 29325 - DNA, 25 bp, Canis familiaris
agagatttctttcctctagccaaga

SEQ ID NO: 29326 - DNA, 25 bp, Canis familiaris
agagattgggttcctctcggaatga

SEQ ID NO: 29327 - DNA, 25 bp, Canis familiaris
agactgtgtggttggttcgttgggt

SEQ ID NO: 29328 - DNA, 25 bp, Canis familiaris
agaggtagctggtgttcagggctgg

SEQ ID NO: 29329 - DNA, 25 bp, Canis familiaris
agaggacagagtctgctttgggggc

SEQ ID NO: 29330 - DNA, 25 bp, Canis familiaris
agaggacaggtagcctcctggaacc

SEQ ID NO: 29331 - DNA, 25 bp, Canis familiaris
agagaacaggtaggcatcccgtggg

SEQ ID NO: 29332 - DNA, 25 bp, Canis familiaris
agagagggagaaacccagcctgggg

SEQ ID NO: 29333 - DNA, 25 bp, Canis familiaris
agaggaggagacaccggtctgcagc

SEQ ID NO: 29334 - DNA, 25 bp, Canis familiaris
agagaacgcaacaccagacttaagt

SEQ ID NO: 29335 - DNA, 25 bp, Canis familiaris
agagaacacccatcactggttaaaa

SEQ ID NO: 29336 - DNA, 25 bp, Canis familiaris
agagtcacactcataagctggttat

SEQ ID NO: 29337 - DNA, 25 bp, Canis familiaris
agagttcagatagctagcaggttat

SEQ ID NO: 29338 - DNA, 25 bp, Canis familiaris
agagatcccctggcttgcagaaaat

SEQ ID NO: 29339 - DNA, 25 bp, Canis familiaris
agagtccctctgaccgaggaggtgc

SEQ ID NO: 29340 - DNA, 25 bp, Canis familiaris
agaggcacctctgacagggacagcc

SEQ ID NO: 29341 - DNA, 25 bp, Canis familiaris
agaggcaggctccatacagggagcc

SEQ ID NO: 29342 - DNA, 25 bp, Canis familiaris
agaggtgccaccaacagggtgtcct

SEQ ID NO: 29343 - DNA, 25 bp, Canis familiaris
agaggatccccttaggtttggctgt

SEQ ID NO: 29344 - DNA, 25 bp, Canis familiaris
agagcaagaactcaaggtggggctt

SEQ ID NO: 29345 - DNA, 25 bp, Canis familiaris
agagaagtaagatgagagggggctt

SEQ ID NO: 29346 - DNA, 25 bp, Canis familiaris
agagatcgaaaatggggcacgacct

SEQ ID NO: 29347 - DNA, 25 bp, Canis familiaris
agagtccaagagtcaggtaacctcc

SEQ ID NO: 29348 - DNA, 25 bp, Canis familiaris
agactgctactgagggtaactacca

SEQ ID NO: 29349 - DNA, 25 bp, Canis familiaris
agagaccagctgtgggtaagccctc

SEQ ID NO: 29350 - DNA, 25 bp, Canis familiaris
agctgaccacgaacagggcaaccgt

SEQ ID NO: 29351 - DNA, 25 bp, Canis familiaris
agagaccatcgaagctgggcagcac

SEQ ID NO: 29352 - DNA, 25 bp, Canis familiaris
agagagatcttatgctgtgcctgcc

SEQ ID NO: 29353 - DNA, 25 bp, Canis familiaris
agaggatctgaacctctgctctaga

SEQ ID NO: 29354 - DNA, 25 bp, Canis familiaris
agagggtgcacacacatgacttgaa

SEQ ID NO: 29355 - DNA, 25 bp, Canis familiaris
agagatgtggtcctaatggcctgaa

SEQ ID NO: 29356 - DNA, 25 bp, Canis familiaris
agaggtggtggccacatggctctga

SEQ ID NO: 29357 - DNA, 25 bp, Canis familiaris
agagttttgagccctggttgtacaa

SEQ ID NO: 29358 - DNA, 25 bp, Canis familiaris
agagcatcgttacactagtttgata

SEQ ID NO: 29359 - DNA, 25 bp, Canis familiaris
agagcatcgttacactagtttgata

SEQ ID NO: 29360 - DNA, 25 bp, Canis familiaris
agagcattttgcaggtgatttggaa

SEQ ID NO: 29361 - DNA, 25 bp, Canis familiaris
agagcatttgtactagttttggagg

SEQ ID NO: 29362 - DNA, 25 bp, Canis familiaris
agagttcatttctagttcttgatag

SEQ ID NO: 29363 - DNA, 25 bp, Canis familiaris
agagtgtatccgttgttgttcttcc

SEQ ID NO: 29364 - DNA, 25 bp, Canis familiaris
agaggtctaatgttatatgttttca

SEQ ID NO: 29365 - DNA, 25 bp, Canis familiaris
agaggtcattagcttgtttcagtaa

SEQ ID NO: 29366 - DNA, 25 bp, Canis familiaris
agaggatcataatgggctttgagta

SEQ ID NO: 29367 - DNA, 25 bp, Canis familiaris
agaggtctgagatggtgcatttcta

SEQ ID NO: 29368 - DNA, 25 bp, Canis familiaris
agagctgtggagtagttaactgcta

SEQ ID NO: 29369 - DNA, 25 bp, Canis familiaris
agagagtggcgaagtctccagtgcc

SEQ ID NO: 29370 - DNA, 25 bp, Canis familiaris
agaggtgcagcatgttgtccaagcc

SEQ ID NO: 29371 - DNA, 25 bp, Canis familiaris
agagtggatatgctgtgcctcacac

SEQ ID NO: 29372 - DNA, 25 bp, Canis familiaris
agaggagtcatgctgatgattctaa

SEQ ID NO: 29373 - DNA, 25 bp, Canis familiaris
agagaggttgtccagatttgatgaa

SEQ ID NO: 29374 - DNA, 25 bp, Canis familiaris
agagcgattttctgaatgggagact

SEQ ID NO: 29375 - DNA, 25 bp, Canis familiaris
agaggttttctgtaaggtgcatgtc

SEQ ID NO: 29376 - DNA, 25 bp, Canis familiaris
agaggatttacttgccatggttgtg

SEQ ID NO: 29377 - DNA, 25 bp, Canis familiaris
agaggaaagacaatctctggttttc

SEQ ID NO: 29378 - DNA, 25 bp, Canis familiaris
agagtgataaacccctgaggctttt

SEQ ID NO: 29379 - DNA, 25 bp, Canis familiaris
agagtttgaatgccccagagagcct

SEQ ID NO: 29380 - DNA, 25 bp, Canis familiaris
agaggtggagtcccctgagagttgt

SEQ ID NO: 29381 - DNA, 25 bp, Canis familiaris
agagggtgattccacctcgatggtt

SEQ ID NO: 29382 - DNA, 25 bp, Canis familiaris
agaggtgagattgccatccgagtgt

SEQ ID NO: 29383 - DNA, 25 bp, Canis familiaris
agaggtgagttggcacgacgtggcc

SEQ ID NO: 29384 - DNA, 25 bp, Canis familiaris
agaggtgaggtggcacagtcctccc

SEQ ID NO: 29385 - DNA, 25 bp, Canis familiaris
agagaagagggcgacctcgtccaac

SEQ ID NO: 29386 - DNA, 25 bp, Canis familiaris
agagatggagctgccacacttgacc

SEQ ID NO: 29387 - DNA, 25 bp, Canis familiaris
agagagggttcaatccggacacctt

SEQ ID NO: 29388 - DNA, 25 bp, Canis familiaris
agagggggctgatatcctgaacctg

SEQ ID NO: 29389 - DNA, 25 bp, Canis familiaris
agaggaggaggggaccgaggctatg

SEQ ID NO: 29390 - DNA, 25 bp, Canis familiaris
agaggatcgaggcgatccgcgggca

SEQ ID NO: 29391 - DNA, 25 bp, Canis familiaris
agaggacaaggcagatcctggtcac

SEQ ID NO: 29392 - DNA, 25 bp, Canis familiaris
agagcacagaaggcccttctggaac

SEQ ID NO: 29393 - DNA, 25 bp, Canis familiaris
agaggagacggtggctcagggacac

SEQ ID NO: 29394 - DNA, 25 bp, Canis familiaris
agaggagggggactcagctgctatc

SEQ ID NO: 29395 - DNA, 25 bp, Canis familiaris
agagagaggggccacgagtctactt

SEQ ID NO: 29396 - DNA, 25 bp, Canis familiaris
agagaggacggcacgaggctctgtt

SEQ ID NO: 29397 - DNA, 25 bp, Canis familiaris
agaggacacgggccatgagccctgt

SEQ ID NO: 29398 - DNA, 25 bp, Canis familiaris
agagttgccagggcctggctgcctt

SEQ ID NO: 29399 - DNA, 25 bp, Canis familiaris
agagatgatccaggtcctgggcccc

SEQ ID NO: 29400 - DNA, 25 bp, Canis familiaris
agagagatgccaaggactacgccga

SEQ ID NO: 29401 - DNA, 25 bp, Canis familiaris
agagagaatgcttgagacttcactc

SEQ ID NO: 29402 - DNA, 25 bp, Canis familiaris
agaggagctctttgacttcctgcat

SEQ ID NO: 29403 - DNA, 25 bp, Canis familiaris
agaggactgtattgtctctctgctg

SEQ ID NO: 29404 - DNA, 25 bp, Canis familiaris
agaggggagcattgtcctctttcac

SEQ ID NO: 29405 - DNA, 25 bp, Canis familiaris
agagggaaggcgtgtcttctcacac

SEQ ID NO: 29406 - DNA, 25 bp, Canis familiaris
agaggaggggacttttgtctcgcac

SEQ ID NO: 29407 - DNA, 25 bp, Canis familiaris
agaggagggaactttccgcagctcc

SEQ ID NO: 29408 - DNA, 25 bp, Canis familiaris
agaggagaggcctaccttcgagtac

SEQ ID NO: 29409 - DNA, 25 bp, Canis familiaris
agaggagagagaccctcttcgtggg

SEQ ID NO: 29410 - DNA, 25 bp, Canis familiaris
agagagaggaagcccctttggggtg

SEQ ID NO: 29411 - DNA, 25 bp, Canis familiaris
agagagaggtgtgcgacttccgggt

SEQ ID NO: 29412 - DNA, 25 bp, Canis familiaris
agagcgacgtggaggaccactcggt

SEQ ID NO: 29413 - DNA, 25 bp, Canis familiaris
agagctgggtggagtacctgtccct

SEQ ID NO: 29414 - DNA, 25 bp, Canis familiaris
agagctcgatgcagaactacccatc

SEQ ID NO: 29415 - DNA, 25 bp, Canis familiaris
agagcatgctggtgaactcggccat

SEQ ID NO: 29416 - DNA, 25 bp, Canis familiaris
agagatcggataccaatcctgccaa

SEQ ID NO: 29417 - DNA, 25 bp, Canis familiaris
agagttggaagcacactttcatggc

SEQ ID NO: 29418 - DNA, 25 bp, Canis familiaris
agagggtgaacagactcctgctgag

SEQ ID NO: 29419 - DNA, 25 bp, Canis familiaris
agaggggaatcttagcctgcagtcg

SEQ ID NO: 29420 - DNA, 25 bp, Canis familiaris
agaggtggtgttcgaggtcgtggag

SEQ ID NO: 29421 - DNA, 25 bp, Canis familiaris
agaggtggtgttgtagtcagtggct

SEQ ID NO: 29422 - DNA, 25 bp, Canis familiaris
agagtgctgggtttctacgagggtc

SEQ ID NO: 29423 - DNA, 25 bp, Canis familiaris
agagtgatagggttccagccatggg

SEQ ID NO: 29424 - DNA, 25 bp, Canis familiaris
agagggcatgggcatccgcctggat

SEQ ID NO: 29425 - DNA, 25 bp, Canis familiaris
agagggaggaggagcccaggcttct

SEQ ID NO: 29426 - DNA, 25 bp, Canis familiaris
agagctgggagacgaagcccgcttt

SEQ ID NO: 29427 - DNA, 25 bp, Canis familiaris
agagggaggagtgatggccgccttc

SEQ ID NO: 29428 - DNA, 25 bp, Canis familiaris
agaggggggatggcagtgtccctcc

SEQ ID NO: 29429 - DNA, 25 bp, Canis familiaris
agagggggagagccagactcccttc

SEQ ID NO: 29430 - DNA, 25 bp, Canis familiaris
agagagaggggaccatggcagccgt

SEQ ID NO: 29431 - DNA, 25 bp, Canis familiaris
agagaacgagaaccagggccactac

SEQ ID NO: 29432 - DNA, 25 bp, Canis familiaris
agagaacgacagcgcgaagctctct

SEQ ID NO: 29433 - DNA, 25 bp, Canis familiaris
agagacccacagaagctggcagctg

SEQ ID NO: 29434 - DNA, 25 bp, Canis familiaris
agagaccagggaggcaggacggact

SEQ ID NO: 29435 - DNA, 25 bp, Canis familiaris
agaggaggaggagagagaggcagac

SEQ ID NO: 29436 - DNA, 25 bp, Canis familiaris
agaggagaggaagagagaagagaga

SEQ ID NO: 29437 - DNA, 25 bp, Canis familiaris
agagagcgagagagacaagaagtgt

SEQ ID NO: 29438 - DNA, 25 bp, Canis familiaris
agagagatgagaagtctctagaaat

SEQ ID NO: 29439 - DNA, 25 bp, Canis familiaris
agagcagacagatatcaatgaaatt

SEQ ID NO: 29440 - DNA, 25 bp, Canis familiaris
agagcagaccacggagaggccattt

SEQ ID NO: 29441 - DNA, 25 bp, Canis familiaris
agagatgaagcagccaggtccctct

SEQ ID NO: 29442 - DNA, 25 bp, Canis familiaris
agaggtagagctgcaggcacctgtc

SEQ ID NO: 29443 - DNA, 25 bp, Canis familiaris
agaggtgacatcttcaaccctatcc

SEQ ID NO: 29444 - DNA, 25 bp, Canis familiaris
agaggtacatcaactatctagcatt

SEQ ID NO: 29445 - DNA, 25 bp, Canis familiaris
agaggtgtctatgcatcaatgaatt

SEQ ID NO: 29446 - DNA, 25 bp, Canis familiaris
agaggtctctgctcatcaagaagtc

SEQ ID NO: 29447 - DNA, 25 bp, Canis familiaris
agaggttctgaaccaccacaatctg

SEQ ID NO: 29448 - DNA, 25 bp, Canis familiaris
agagttttagtccacatccatctcg

SEQ ID NO: 29449 - DNA, 25 bp, Canis familiaris
agagtatatcaagcgagccctggcc

SEQ ID NO: 29450 - DNA, 25 bp, Canis familiaris
agagtgttggagtgacctctggctc

SEQ ID NO: 29451 - DNA, 25 bp, Canis familiaris
agaggtttgagttgtgccaggagcc

SEQ ID NO: 29452 - DNA, 25 bp, Canis familiaris
agaggtatcaaatggtgtggagccc

SEQ ID NO: 29453 - DNA, 25 bp, Canis familiaris
agaggttctttccagagtggctacc

SEQ ID NO: 29454 - DNA, 25 bp, Canis familiaris
agagaggttctttcaggctgcctca

SEQ ID NO: 29455 - DNA, 25 bp, Canis familiaris
agagaggtgacttcatagcgtcccc

SEQ ID NO: 29456 - DNA, 25 bp, Canis familiaris
agaggaggaatattgtcgtgcgcac

SEQ ID NO: 29457 - DNA, 25 bp, Canis familiaris
agagctgcaggccaaggtctgcgtc

SEQ ID NO: 29458 - DNA, 25 bp, Canis familiaris
agagtagtgcagcaggtcctgttcg

SEQ ID NO: 29459 - DNA, 25 bp, Canis familiaris
agagtagatctccatcgtcgttatc

SEQ ID NO: 29460 - DNA, 25 bp, Canis familiaris
agagtatgtctgctcctgtgatctt

SEQ ID NO: 29461 - DNA, 25 bp, Canis familiaris
agaggaggctgctactctgctattt

SEQ ID NO: 29462 - DNA, 25 bp, Canis familiaris
agaggatgtgtcactcttcttccat

SEQ ID NO: 29463 - DNA, 25 bp, Canis familiaris
agagctggttgcaccaggttgcctt

SEQ ID NO: 29464 - DNA, 25 bp, Canis familiaris
agagtgactatcaccagttgccttc

SEQ ID NO: 29465 - DNA, 25 bp, Canis familiaris
agaggttttctggcatgttgccctc

SEQ ID NO: 29466 - DNA, 25 bp, Canis familiaris
agaggtattgtcattgttgcccgat

SEQ ID NO: 29467 - DNA, 25 bp, Canis familiaris
agagtttggctcactttcagccgtt

SEQ ID NO: 29468 - DNA, 25 bp, Canis familiaris
agagtgggagccactgcttgcagcc

SEQ ID NO: 29469 - DNA, 25 bp, Canis familiaris
agagggcagcgccaagctgcctgca

SEQ ID NO: 29470 - DNA, 25 bp, Canis familiaris
agagaggcagccaaggcatgcccca

SEQ ID NO: 29471 - DNA, 25 bp, Canis familiaris
agagagatctgggatggcagcccct

SEQ ID NO: 29472 - DNA, 25 bp, Canis familiaris
agagatgtctgagatgccctagctt

SEQ ID NO: 29473 - DNA, 25 bp, Canis familiaris
agagtgatgcgagcactccgtcttg

SEQ ID NO: 29474 - DNA, 25 bp, Canis familiaris
agagttggagtcttccagctctgga

SEQ ID NO: 29475 - DNA, 25 bp, Canis familiaris
agagtggaattggctccagctctgg

SEQ ID NO: 29476 - DNA, 25 bp, Canis familiaris
agagtgatgacatcttgcccttggg

SEQ ID NO: 29477 - DNA, 25 bp, Canis familiaris
agagtgatgagctgaagtcccggcg

SEQ ID NO: 29478 - DNA, 25 bp, Canis familiaris
agagtgatgcacagaccaaccaggc

SEQ ID NO: 29479 - DNA, 25 bp, Canis familiaris
agagtgtgcagcaagaccaccagtg

SEQ ID NO: 29480 - DNA, 25 bp, Canis familiaris
agagatgtctctgagctcacaggat

SEQ ID NO: 29481 - DNA, 25 bp, Canis familiaris
agagatctgtctgcaacaacgcttc

SEQ ID NO: 29482 - DNA, 25 bp, Canis familiaris
agaccatgagattaggaacagcttt

SEQ ID NO: 29483 - DNA, 25 bp, Canis familiaris
agaccaagcaacctagaccttgtaa

SEQ ID NO: 29484 - DNA, 25 bp, Canis familiaris
agaccaagagtactaacgtgttatt

SEQ ID NO: 29485 - DNA, 25 bp, Canis familiaris
agacccagggtcatacttctgtctt

SEQ ID NO: 29486 - DNA, 25 bp, Canis familiaris
agacaccaaaccataacttatcctt

SEQ ID NO: 29487 - DNA, 25 bp, Canis familiaris
agaccccaccatataagtttatcca

SEQ ID NO: 29488 - DNA, 25 bp, Canis familiaris
agaccaacccagttgtagttttcag

SEQ ID NO: 29489 - DNA, 25 bp, Canis familiaris
agagccacacgctggttgaattgtt

SEQ ID NO: 29490 - DNA, 25 bp, Canis familiaris
agacttgcccttggtggaattgccc

SEQ ID NO: 29491 - DNA, 25 bp, Canis familiaris
agacccgactctggtggaatcttcc

SEQ ID NO: 29492 - DNA, 25 bp, Canis familiaris
agacgatcagataccgtcgtagttc

SEQ ID NO: 29493 - DNA, 25 bp, Canis familiaris
agagcggcgaagacgtcgaggttcc

SEQ ID NO: 29494 - DNA, 25 bp, Canis familiaris
agagggcgcgaggtgttgaacgtcc

SEQ ID NO: 29495 - DNA, 25 bp, Canis familiaris
agaggtgggagctgtccaaggacca

SEQ ID NO: 29496 - DNA, 25 bp, Canis familiaris
agaggtggggatggtggccacggcc

SEQ ID NO: 29497 - DNA, 25 bp, Canis familiaris
agagtgtggctgggttgtggacctc

SEQ ID NO: 29498 - DNA, 25 bp, Canis familiaris
agaggtgagctgcagtttgccatcc

SEQ ID NO: 29499 - DNA, 25 bp, Canis familiaris
agagagaacatgcaggtggccaccc

SEQ ID NO: 29500 - DNA, 25 bp, Canis familiaris
agagtgggttgcggtgggcactcac

SEQ ID NO: 29501 - DNA, 25 bp, Canis familiaris
agagtgaccttcgtctaggagctca

SEQ ID NO: 29502 - DNA, 25 bp, Canis familiaris
agctgcgacttcagctcgaggtctc

SEQ ID NO: 29503 - DNA, 25 bp, Canis familiaris
cagttatttgccgtcgaagttcccg

SEQ ID NO: 29504 - DNA, 25 bp, Canis familiaris
agagtttgagcgggcgtacatcccc

SEQ ID NO: 29505 - DNA, 25 bp, Canis familiaris
agagccttggacaggtacatctccc

SEQ ID NO: 29506 - DNA, 25 bp, Canis familiaris
agactattaacctctacacacacac

SEQ ID NO: 29507 - DNA, 25 bp, Canis familiaris
agagtgcatatatcctttcaaatta

SEQ ID NO: 29508 - DNA, 25 bp, Canis familiaris
agagctgtctactctattacctctg

SEQ ID NO: 29509 - DNA, 25 bp, Canis familiaris
agaggtctatgtgctattgcccagg

SEQ ID NO: 29510 - DNA, 25 bp, Canis familiaris
agagtgtttgctttcagatgccctg

SEQ ID NO: 29511 - DNA, 25 bp, Canis familiaris
agagtgttggtcttcaggcatggca

SEQ ID NO: 29512 - DNA, 25 bp, Canis familiaris
agaggtgtgtggtatcggcaggtgt

SEQ ID NO: 29513 - DNA, 25 bp, Canis familiaris
agagggtcattcatgggcagtgatg

SEQ ID NO: 29514 - DNA, 25 bp, Canis familiaris
agagtcggcaccagtgggctgtgcc

SEQ ID NO: 29515 - DNA, 25 bp, Canis familiaris
agaccagaccctatgagtttccaaa

SEQ ID NO: 29516 - DNA, 25 bp, Canis familiaris
agagccacatccccagggatttgga

SEQ ID NO: 29517 - DNA, 25 bp, Canis familiaris
agagcgctacggtggagttgtgggg

SEQ ID NO: 29518 - DNA, 25 bp, Canis familiaris
agagccgaattgagagagttgggaa

SEQ ID NO: 29519 - DNA, 25 bp, Canis familiaris
agagcgggatctcttggttttgcac

SEQ ID NO: 29520 - DNA, 25 bp, Canis familiaris
agagcaaggcttcctgtgctttttg

SEQ ID NO: 29521 - DNA, 25 bp, Canis familiaris
agagacggtgtcttctgtcttgttg

SEQ ID NO: 29522 - DNA, 25 bp, Canis familiaris
agagagctttgtgtttcagtttgcc

SEQ ID NO: 29523 - DNA, 25 bp, Canis familiaris
agagagctttgggcctgtgtgtact

SEQ ID NO: 29524 - DNA, 25 bp, Canis familiaris
agaggtgattttgcttggtggcctg

SEQ ID NO: 29525 - DNA, 25 bp, Canis familiaris
agagatgtaatttgcctcggggcct

SEQ ID NO: 29526 - DNA, 25 bp, Canis familiaris
caagagtaaacatccaggggcccct

SEQ ID NO: 29527 - DNA, 25 bp, Canis familiaris
agagggcaacaatctcgtggtccac

SEQ ID NO: 29528 - DNA, 25 bp, Canis familiaris
agagggagggagagcctgtgtccac

SEQ ID NO: 29529 - DNA, 25 bp, Canis familiaris
agaggtggggagcagccaggagccc

SEQ ID NO: 29530 - DNA, 25 bp, Canis familiaris
agagggtgggcacgcatgtgagggc

SEQ ID NO: 29531 - DNA, 25 bp, Canis familiaris
agagggtgggatgctgtggaggccc

SEQ ID NO: 29532 - DNA, 25 bp, Canis familiaris
agagaggctggagtcctacggctcc

SEQ ID NO: 29533 - DNA, 25 bp, Canis familiaris
agacggcggagcgctacattggact

SEQ ID NO: 29534 - DNA, 25 bp, Canis familiaris
agacggacgactgctgatataaaca

SEQ ID NO: 29535 - DNA, 25 bp, Canis familiaris
agacttgtgctgatcgtgctaaatt

SEQ ID NO: 29536 - DNA, 25 bp, Canis familiaris
agacgctgtctgaccaggtgcaaga

SEQ ID NO: 29537 - DNA, 25 bp, Canis familiaris
agagcctggcttccaggccgaagct

SEQ ID NO: 29538 - DNA, 25 bp, Canis familiaris
agacctgtctttcagcaaggactgg

SEQ ID NO: 29539 - DNA, 25 bp, Canis familiaris
agagactagctctgggaaggaaggt

SEQ ID NO: 29540 - DNA, 25 bp, Canis familiaris
agagaccctcctgggatacgagaga

SEQ ID NO: 29541 - DNA, 25 bp, Canis familiaris
agagcccagccctgggacaacatgc

SEQ ID NO: 29542 - DNA, 25 bp, Canis familiaris
agacccacgagagggacgcaagcgt

SEQ ID NO: 29543 - DNA, 25 bp, Canis familiaris
agacccctgagctggaggccagaag

SEQ ID NO: 29544 - DNA, 25 bp, Canis familiaris
agacctttgggtcgaggcacgaggc

SEQ ID NO: 29545 - DNA, 25 bp, Canis familiaris
agaccattccgcttcaaggcagagc

SEQ ID NO: 29546 - DNA, 25 bp, Canis familiaris
agaccttctggcttcagagggggag

SEQ ID NO: 29547 - DNA, 25 bp, Canis familiaris
aagcgtcctgaggccaataaatggg

SEQ ID NO: 29548 - DNA, 25 bp, Canis familiaris
agagcttcaattaccagtgaatcat

SEQ ID NO: 29549 - DNA, 25 bp, Canis familiaris
agagctgtcgatttccaggaagcac

SEQ ID NO: 29550 - DNA, 25 bp, Canis familiaris
agagtcttgattttctgtgctacct

SEQ ID NO: 29551 - DNA, 25 bp, Canis familiaris
agagctttgtaatttttactcaagt

SEQ ID NO: 29552 - DNA, 25 bp, Canis familiaris
agacctcagaaattttctactggga

SEQ ID NO: 29553 - DNA, 25 bp, Canis familiaris
agagcccccaattcgtatgactggg

SEQ ID NO: 29554 - DNA, 25 bp, Canis familiaris
agcaccccgagatcattacctgggc

SEQ ID NO: 29555 - DNA, 25 bp, Canis familiaris
agaacaggggtttcatcaccttggc

SEQ ID NO: 29556 - DNA, 25 bp, Canis familiaris
agacctggaggggacacccattggc

SEQ ID NO: 29557 - DNA, 25 bp, Canis familiaris
agacctgtgagctggagcccagtaa

SEQ ID NO: 29558 - DNA, 25 bp, Canis familiaris
agagctgctgtgaaggagacgccag

SEQ ID NO: 29559 - DNA, 25 bp, Canis familiaris
agagtctgggatcgaacctcagtcc

SEQ ID NO: 29560 - DNA, 25 bp, Canis familiaris
agagactgggcaccaaacacgcatg

SEQ ID NO: 29561 - DNA, 25 bp, Canis familiaris
agagcacgttgcttcaaagctcaat

SEQ ID NO: 29562 - DNA, 25 bp, Canis familiaris
agagcaagctggtttacatgtttat

SEQ ID NO: 29563 - DNA, 25 bp, Canis familiaris
agagcagggtctataatgatgatta

SEQ ID NO: 29564 - DNA, 25 bp, Canis familiaris
agagcagaggactgtaagggtcaga

SEQ ID NO: 29565 - DNA, 25 bp, Canis familiaris
agaggggacagctgaatggattcga

SEQ ID NO: 29566 - DNA, 25 bp, Canis familiaris
agagggagacagggcacaggtacac

SEQ ID NO: 29567 - DNA, 25 bp, Canis familiaris
agagcgtgaatcacgtcacctacct

SEQ ID NO: 29568 - DNA, 25 bp, Canis familiaris
agagttgacatgagctgtccttccc

SEQ ID NO: 29569 - DNA, 25 bp, Canis familiaris
agagggagctatactctcagttcct

SEQ ID NO: 29570 - DNA, 25 bp, Canis familiaris
agaggggttccttcatgaggcttag

SEQ ID NO: 29571 - DNA, 25 bp, Canis familiaris
agagggacttctacacagaggtgga

SEQ ID NO: 29572 - DNA, 25 bp, Canis familiaris
agagaggtcttttgcttgaagtgag

SEQ ID NO: 29573 - DNA, 25 bp, Canis familiaris
agacctgatcttctgcttgatgcag

SEQ ID NO: 29574 - DNA, 25 bp, Canis familiaris
agacctgcttgtctccatatggtcc

SEQ ID NO: 29575 - DNA, 25 bp, Canis familiaris
agcactctgcagtggcctagttgtc

SEQ ID NO: 29576 - DNA, 25 bp, Canis familiaris
agagctcatctgtggccatagtcta

SEQ ID NO: 29577 - DNA, 25 bp, Canis familiaris
agagctgcattgactaccagattta

SEQ ID NO: 29578 - DNA, 25 bp, Canis familiaris
agagtcaatcctcccagatagctaa

SEQ ID NO: 29579 - DNA, 25 bp, Canis familiaris
agagaagtctctccaagtagcagag

SEQ ID NO: 29580 - DNA, 25 bp, Canis familiaris
agagacatttctccaatctctcgtt

SEQ ID NO: 29581 - DNA, 25 bp, Canis familiaris
agagacatttctccaatctctcgtt

SEQ ID NO: 29582 - DNA, 25 bp, Canis familiaris
agagatcattcttcacaaactggga

SEQ ID NO: 29583 - DNA, 25 bp, Canis familiaris
agagatgcaccgccaagcaaaggga

SEQ ID NO: 29584 - DNA, 25 bp, Canis familiaris
agagatgtctcagcaatcaccatgt

SEQ ID NO: 29585 - DNA, 25 bp, Canis familiaris
agagatgttcagtcagtctgctccc

SEQ ID NO: 29586 - DNA, 25 bp, Canis familiaris
agagattgggtcgacatcaccacca

SEQ ID NO: 29587 - DNA, 25 bp, Canis familiaris
agagcatgtgtctttactactaaca

SEQ ID NO: 29588 - DNA, 25 bp, Canis familiaris
agagagtaactgaactcctcccgtt

SEQ ID NO: 29589 - DNA, 25 bp, Canis familiaris
agagaccactctgacaagttccgtt

SEQ ID NO: 29590 - DNA, 25 bp, Canis familiaris
agcacacctgttaacaagtcccgtt

SEQ ID NO: 29591 - DNA, 25 bp, Canis familiaris
agactgccaaaaataaatctccggt

SEQ ID NO: 29592 - DNA, 25 bp, Canis familiaris
agaccacagcataggaaaatcccag

SEQ ID NO: 29593 - DNA, 25 bp, Canis familiaris
agagaacacaatcaaaccagtcggt

SEQ ID NO: 29594 - DNA, 25 bp, Canis familiaris
agagaaccacatcaagtccatcatc

SEQ ID NO: 29595 - DNA, 25 bp, Canis familiaris
agaaacgccagcatagctgctgccg

SEQ ID NO: 29596 - DNA, 25 bp, Canis familiaris
agagaacggagccgagctctggtgc

SEQ ID NO: 29597 - DNA, 25 bp, Canis familiaris
agagtccgtgaagggctctgttgcc

SEQ ID NO: 29598 - DNA, 25 bp, Canis familiaris
agagggctgtgaagggtctggcctg

SEQ ID NO: 29599 - DNA, 25 bp, Canis familiaris
agagagtgctggtggttcttgtctg

SEQ ID NO: 29600 - DNA, 25 bp, Canis familiaris
agaaatgggctacattttctaccca

SEQ ID NO: 29601 - DNA, 25 bp, Canis familiaris
agacgaggtgtctgctttttacaac

SEQ ID NO: 29602 - DNA, 25 bp, Canis familiaris
agacgaggtggctgttgtaattgca

SEQ ID NO: 29603 - DNA, 25 bp, Canis familiaris
agaccaaatccatgtctggtattga

SEQ ID NO: 29604 - DNA, 25 bp, Canis familiaris
agaccaagacgtatcaggatacggt

SEQ ID NO: 29605 - DNA, 25 bp, Canis familiaris
agagcaagagacgatttcccattcc

SEQ ID NO: 29606 - DNA, 25 bp, Canis familiaris
agagcataaggagttcccactgccc

SEQ ID NO: 29607 - DNA, 25 bp, Canis familiaris
agagatggaggagctcttagcccac

SEQ ID NO: 29608 - DNA, 25 bp, Canis familiaris
agagtcagggactcttatcccagct

SEQ ID NO: 29609 - DNA, 25 bp, Canis familiaris
agagaagtggactcttcagcagccc

SEQ ID NO: 29610 - DNA, 25 bp, Canis familiaris
agagacctggatcagatcccagccc

SEQ ID NO: 29611 - DNA, 25 bp, Canis familiaris
agagactgctgagaagatccccttc

SEQ ID NO: 29612 - DNA, 25 bp, Canis familiaris
agagaccatgaagagcctgctcctt

SEQ ID NO: 29613 - DNA, 25 bp, Canis familiaris
agagaccatgaagagcctgctcctt

SEQ ID NO: 29614 - DNA, 25 bp, Canis familiaris
agagaccatgaagagcctgctcctt

SEQ ID NO: 29615 - DNA, 25 bp, Canis familiaris
agagaccatgaagagcctgctcctt

SEQ ID NO: 29616 - DNA, 25 bp, Canis familiaris
agagaccatgaagagcctgctcctt

SEQ ID NO: 29617 - DNA, 25 bp, Canis familiaris
agactgaatgaacatcacttttttc

SEQ ID NO: 29618 - DNA, 25 bp, Canis familiaris
agagctgaacaaaaccaagcctatt

SEQ ID NO: 29619 - DNA, 25 bp, Canis familiaris
agagtaaaattagccacctgcgtgg

SEQ ID NO: 29620 - DNA, 25 bp, Canis familiaris
agagtataagtctacctatccctgt

SEQ ID NO: 29621 - DNA, 25 bp, Canis familiaris
agactaacatgttgaccatttttca

SEQ ID NO: 29622 - DNA, 25 bp, Canis familiaris
agactacttgtccccatatataata

SEQ ID NO: 29623 - DNA, 25 bp, Canis familiaris
agagcaactttttctgtcaaataaa

SEQ ID NO: 29624 - DNA, 25 bp, Canis familiaris
agagaatattttttacatcctacta

SEQ ID NO: 29625 - DNA, 25 bp, Canis familiaris
aaactattagcgttacaggccagaa

SEQ ID NO: 29626 - DNA, 25 bp, Canis familiaris
agaacttgtaggactcacgaccggg

SEQ ID NO: 29627 - DNA, 25 bp, Canis familiaris
agaccttgaaggaaagcgactacag

SEQ ID NO: 29628 - DNA, 25 bp, Canis familiaris
agaccttgaagtgagggatccctgg

SEQ ID NO: 29629 - DNA, 25 bp, Canis familiaris
agactctaactgtaggggatccctg

SEQ ID NO: 29630 - DNA, 25 bp, Canis familiaris
agaccatcggtggaggggacgactc

SEQ ID NO: 29631 - DNA, 25 bp, Canis familiaris
agagacagagggtaacactgacgac

SEQ ID NO: 29632 - DNA, 25 bp, Canis familiaris
agagaaggggtcggaccagcgtcca

SEQ ID NO: 29633 - DNA, 25 bp, Canis familiaris
agagagaggggcccgaggaggccac

SEQ ID NO: 29634 - DNA, 25 bp, Canis familiaris
agagtggctctggggagaggatggc

SEQ ID NO: 29635 - DNA, 25 bp, Canis familiaris
agagtctgctttgggggcagctgtc

SEQ ID NO: 29636 - DNA, 25 bp, Canis familiaris
agagtctgcatttctaaccagctcc

SEQ ID NO: 29637 - DNA, 25 bp, Canis familiaris
agagttctctgcctgaaagactgcc

SEQ ID NO: 29638 - DNA, 25 bp, Canis familiaris
agagcttcctgagggaaccagccct

SEQ ID NO: 29639 - DNA, 25 bp, Canis familiaris
agcatttccaaacacatcacgtctc

SEQ ID NO: 29640 - DNA, 25 bp, Canis familiaris
agagttcaccaataagagcttccta

SEQ ID NO: 29641 - DNA, 25 bp, Canis familiaris
agagttacacaatatacatgccttt

SEQ ID NO: 29642 - DNA, 25 bp, Canis familiaris
agcagtttagcttaatttgcctaag

SEQ ID NO: 29643 - DNA, 25 bp, Canis familiaris
agagtactaccttatattgcctaac

SEQ ID NO: 29644 - DNA, 25 bp, Canis familiaris
agagtttcctctttgttcacaaaat

SEQ ID NO: 29645 - DNA, 25 bp, Canis familiaris
agagtttcctctgtgatgtcaagca

SEQ ID NO: 29646 - DNA, 25 bp, Canis familiaris
agagttaccctcatgagtgaacact

SEQ ID NO: 29647 - DNA, 25 bp, Canis familiaris
agagcccccctcgatagaaggaatt

SEQ ID NO: 29648 - DNA, 25 bp, Canis familiaris
agaccagcccctatgtcaaggaatt

SEQ ID NO: 29649 - DNA, 25 bp, Canis familiaris
agaccagccagtttatcctagtaag

SEQ ID NO: 29650 - DNA, 25 bp, Canis familiaris
agagccccaagagttcgctgaaagg

SEQ ID NO: 29651 - DNA, 25 bp, Canis familiaris
agagtcccaatgtccatgagctgaa

SEQ ID NO: 29652 - DNA, 25 bp, Canis familiaris
agagtcatccattctcagtgatata

SEQ ID NO: 29653 - DNA, 25 bp, Canis familiaris
agagttcactcagtagagtccactc

SEQ ID NO: 29654 - DNA, 25 bp, Canis familiaris
agacttgcaccagtactgccaatgc

SEQ ID NO: 29655 - DNA, 25 bp, Canis familiaris
agacttatctgaattctcctaccag

SEQ ID NO: 29656 - DNA, 25 bp, Canis familiaris
agagtctatctaaaaccttgtgcag

SEQ ID NO: 29657 - DNA, 25 bp, Canis familiaris
agagtacactgaaagacttcttgga

SEQ ID NO: 29658 - DNA, 25 bp, Canis familiaris
agactacctgcaagtatttcttggt

SEQ ID NO: 29659 - DNA, 25 bp, Canis familiaris
agagtcaactagcttttctgcggtc

SEQ ID NO: 29660 - DNA, 25 bp, Canis familiaris
agagtccactctttggagaccaggc

SEQ ID NO: 29661 - DNA, 25 bp, Canis familiaris
agagtctgactcagggtggccagga

SEQ ID NO: 29662 - DNA, 25 bp, Canis familiaris
agagtcagagacatgggcagaggga

SEQ ID NO: 29663 - DNA, 25 bp, Canis familiaris
agagagcagtgcttttggcggggag

SEQ ID NO: 29664 - DNA, 25 bp, Canis familiaris
agagacgtgaatattgaggatgaag

SEQ ID NO: 29665 - DNA, 25 bp, Canis familiaris
agaacgctagcagaagggatacatg

SEQ ID NO: 29666 - DNA, 25 bp, Canis familiaris
agaccgtgagtcttaggtatacgat

SEQ ID NO: 29667 - DNA, 25 bp, Canis familiaris
agaccactggtgttagagcttatcc

SEQ ID NO: 29668 - DNA, 25 bp, Canis familiaris
agagctactgtatttagacttagga

SEQ ID NO: 29669 - DNA, 25 bp, Canis familiaris
agagctactgtttctatgcaacttg

SEQ ID NO: 29670 - DNA, 25 bp, Canis familiaris
agagcttcgggatggcatagtgcag

SEQ ID NO: 29671 - DNA, 25 bp, Canis familiaris
agagcttcgggcgggatgtggacga

SEQ ID NO: 29672 - DNA, 25 bp, Canis familiaris
agacgctcgaggagtatttacagag

SEQ ID NO: 29673 - DNA, 25 bp, Canis familiaris
agacctcaaaacactgttgtcagag

SEQ ID NO: 29674 - DNA, 25 bp, Canis familiaris
agacctcgccaaggcctgatgagtc

SEQ ID NO: 29675 - DNA, 25 bp, Canis familiaris
agagcactgctgcaagctgtcttat

SEQ ID NO: 29676 - DNA, 25 bp, Canis familiaris
agagccgcaggtgtgtgctgctatg

SEQ ID NO: 29677 - DNA, 25 bp, Canis familiaris
agagcctcagttcttctaatgaaag

SEQ ID NO: 29678 - DNA, 25 bp, Canis familiaris
agacttcagtagcttcgtgataatg

SEQ ID NO: 29679 - DNA, 25 bp, Canis familiaris
agagcttcgaggtttcgtcaggatc

SEQ ID NO: 29680 - DNA, 25 bp, Canis familiaris
agagtcttgatgatttcctccttct

SEQ ID NO: 29681 - DNA, 25 bp, Canis familiaris
agagttagcatgttttttttttgtg

SEQ ID NO: 29682 - DNA, 25 bp, Canis familiaris
agagtcatacttatttatttgttta

SEQ ID NO: 29683 - DNA, 25 bp, Canis familiaris
agagtctacagcacgtttttattta

SEQ ID NO: 29684 - DNA, 25 bp, Canis familiaris
agacctacagcctgacttgactttt

SEQ ID NO: 29685 - DNA, 25 bp, Canis familiaris
agaccaagggaatctgtgactcttc

SEQ ID NO: 29686 - DNA, 25 bp, Canis familiaris
agagccctggagcaaatcacaccat

SEQ ID NO: 29687 - DNA, 25 bp, Canis familiaris
agagcccggatccatcaaaggccat

SEQ ID NO: 29688 - DNA, 25 bp, Canis familiaris
agagagctctggccaaccaagttct

SEQ ID NO: 29689 - DNA, 25 bp, Canis familiaris
agagcagctctgggaacttggattc

SEQ ID NO: 29690 - DNA, 25 bp, Canis familiaris
agagagcctctgagcacttggagct

SEQ ID NO: 29691 - DNA, 25 bp, Canis familiaris
agagttttctcaacttggagtatat

SEQ ID NO: 29692 - DNA, 25 bp, Canis familiaris
agagtttctctcatcatgtggctac

SEQ ID NO: 29693 - DNA, 25 bp, Canis familiaris
agagttgttcacatgctgtctgtac

SEQ ID NO: 29694 - DNA, 25 bp, Canis familiaris
agagtattgtctcttgttgggccca

SEQ ID NO: 29695 - DNA, 25 bp, Canis familiaris
agagatgtggtcctttttccacacc

SEQ ID NO: 29696 - DNA, 25 bp, Canis familiaris
agagttgcctctggattttcagcct

SEQ ID NO: 29697 - DNA, 25 bp, Canis familiaris
agagcccaatccgagtttcgatctc

SEQ ID NO: 29698 - DNA, 25 bp, Canis familiaris
agacttcctcccttattaatatata

SEQ ID NO: 29699 - DNA, 25 bp, Canis familiaris
agactgtccctctgactggaaaaca

SEQ ID NO: 29700 - DNA, 25 bp, Canis familiaris
agaaaccacggtcctggagaaacag

SEQ ID NO: 29701 - DNA, 25 bp, Canis familiaris
agagaaccactgcgtcttagatgag

SEQ ID NO: 29702 - DNA, 25 bp, Canis familiaris
agagagacaccggttctttgatgta

SEQ ID NO: 29703 - DNA, 25 bp, Canis familiaris
agagaagcattccgtgtgtttgata

SEQ ID NO: 29704 - DNA, 25 bp, Canis familiaris
agagaatcatactgcgttttattgc

SEQ ID NO: 29705 - DNA, 25 bp, Canis familiaris
agagagtcatactgttttgttttgt

SEQ ID NO: 29706 - DNA, 25 bp, Canis familiaris
agagatgctcattttcttttctttt

SEQ ID NO: 29707 - DNA, 25 bp, Canis familiaris
agagaccatgtgcgcttttctaaag

SEQ ID NO: 29708 - DNA, 25 bp, Canis familiaris
agagactgtgtcccttctcttaaaa

SEQ ID NO: 29709 - DNA, 25 bp, Canis familiaris
agagacaatatcacttctctctcca

SEQ ID NO: 29710 - DNA, 25 bp, Canis familiaris
agagacatcgtacgtctgttctcca

SEQ ID NO: 29711 - DNA, 25 bp, Canis familiaris
agagactggagacgcacagatcccc

SEQ ID NO: 29712 - DNA, 25 bp, Canis familiaris
agagtttgcagtggccagacaccct

SEQ ID NO: 29713 - DNA, 25 bp, Canis familiaris
agagccccatgtggcaaggcactga

SEQ ID NO: 29714 - DNA, 25 bp, Canis familiaris
agagctgccctagacagcagcacca

SEQ ID NO: 29715 - DNA, 25 bp, Canis familiaris
agagctgggctttatcagccagtca

SEQ ID NO: 29716 - DNA, 25 bp, Canis familiaris
agagctggcgccaggcagaggtcaa

SEQ ID NO: 29717 - DNA, 25 bp, Canis familiaris
agagcataagcctggctgtgaccca

SEQ ID NO: 29718 - DNA, 25 bp, Canis familiaris
agagctagacctgagcagctgtgcc

SEQ ID NO: 29719 - DNA, 25 bp, Canis familiaris
agagttgtcctgtgagcacatcgcc

SEQ ID NO: 29720 - DNA, 25 bp, Canis familiaris
agagactctccttggaactcttgca

SEQ ID NO: 29721 - DNA, 25 bp, Canis familiaris
agagacttcttgttcagagcctcct

SEQ ID NO: 29722 - DNA, 25 bp, Canis familiaris
agagccttctgagtgatacccactt

SEQ ID NO: 29723 - DNA, 25 bp, Canis familiaris
agagctcatttgcatatccatcctc

SEQ ID NO: 29724 - DNA, 25 bp, Canis familiaris
agagtatctctttgacacagcacac

SEQ ID NO: 29725 - DNA, 25 bp, Canis familiaris
agagcttttcttggcacagatccta

SEQ ID NO: 29726 - DNA, 25 bp, Canis familiaris
agagctaaccttagctgcttccata

SEQ ID NO: 29727 - DNA, 25 bp, Canis familiaris
agacctcagcctatctgactacaaa

SEQ ID NO: 29728 - DNA, 25 bp, Canis familiaris
agacctagacttggactttcagaaa

SEQ ID NO: 29729 - DNA, 25 bp, Canis familiaris
agagttaagtggaatctttcgtaat

SEQ ID NO: 29730 - DNA, 25 bp, Canis familiaris
cggattaagtccttttatcgtatca

SEQ ID NO: 29731 - DNA, 25 bp, Canis familiaris
agagttaggtccttggttgctggcc

SEQ ID NO: 29732 - DNA, 25 bp, Canis familiaris
agagctttggtcactggtttgctgg

SEQ ID NO: 29733 - DNA, 25 bp, Canis familiaris
agagtatttctctgtctttctctgg

SEQ ID NO: 29734 - DNA, 25 bp, Canis familiaris
agagcgatttcctgtgctactgtat

SEQ ID NO: 29735 - DNA, 25 bp, Canis familiaris
catgctatgtccatcatggctctga

SEQ ID NO: 29736 - DNA, 25 bp, Canis familiaris
agacagacccgcagggaggggaaga

SEQ ID NO: 29737 - DNA, 25 bp, Canis familiaris
agagccagtcccaggtgggggagat

SEQ ID NO: 29738 - DNA, 25 bp, Canis familiaris
agacccttcagcagagtcggggctt

SEQ ID NO: 29739 - DNA, 25 bp, Canis familiaris
agacctctgctgtgggatctggagc

SEQ ID NO: 29740 - DNA, 25 bp, Canis familiaris
agacttctgctgaccaggagctggt

SEQ ID NO: 29741 - DNA, 25 bp, Canis familiaris
agactattggacaagcatcgatgat

SEQ ID NO: 29742 - DNA, 25 bp, Canis familiaris
agagccttgtacaccagattcttga

SEQ ID NO: 29743 - DNA, 25 bp, Canis familiaris
agagccgtcctggaccagattgcat

SEQ ID NO: 29744 - DNA, 25 bp, Canis familiaris
agacggatcaggaacccatgtgccc

SEQ ID NO: 29745 - DNA, 25 bp, Canis familiaris
agactcgtgcggacaactatctggc

SEQ ID NO: 29746 - DNA, 25 bp, Canis familiaris
agacgtaccggcggctactgatgct

SEQ ID NO: 29747 - DNA, 25 bp, Canis familiaris
agagcgtgaatcagtcactactgga

SEQ ID NO: 29748 - DNA, 25 bp, Canis familiaris
agagttcaattcctccttgttggac

SEQ ID NO: 29749 - DNA, 25 bp, Canis familiaris
agagcttaattttttcacttgtgaa

SEQ ID NO: 29750 - DNA, 25 bp, Canis familiaris
agcagctaatttttttcttactaga

SEQ ID NO: 29751 - DNA, 25 bp, Canis familiaris
agaccaatccaattctgtttgacta

SEQ ID NO: 29752 - DNA, 25 bp, Canis familiaris
agagaaggccagttattctttcatt

SEQ ID NO: 29753 - DNA, 25 bp, Canis familiaris
agagttcaatattttatgctttcat

SEQ ID NO: 29754 - DNA, 25 bp, Canis familiaris
agagttctcatgtatttctttgcca

SEQ ID NO: 29755 - DNA, 25 bp, Canis familiaris
agagatatgctcacttcttttccaa

SEQ ID NO: 29756 - DNA, 25 bp, Canis familiaris
agagctctgagcacttgctttgggc

SEQ ID NO: 29757 - DNA, 25 bp, Canis familiaris
agagctcagagcacccttctggtgc

SEQ ID NO: 29758 - DNA, 25 bp, Canis familiaris
agagctgcagaggtgatccctgggt

SEQ ID NO: 29759 - DNA, 25 bp, Canis familiaris
agagctcgaatgggcacttgggctt

SEQ ID NO: 29760 - DNA, 25 bp, Canis familiaris
agagatcgcaagtgcatcctgaggg

SEQ ID NO: 29761 - DNA, 25 bp, Canis familiaris
aacgccaagtcatccaagggttgcg

SEQ ID NO: 29762 - DNA, 25 bp, Canis familiaris
agacccaagcctcctaggaggggct

SEQ ID NO: 29763 - DNA, 25 bp, Canis familiaris
agacccagagatgaggaggaagatg

SEQ ID NO: 29764 - DNA, 25 bp, Canis familiaris
agaccacaggatcagcttttagagc

SEQ ID NO: 29765 - DNA, 25 bp, Canis familiaris
agacccaggtctggggttgcggctg

SEQ ID NO: 29766 - DNA, 25 bp, Canis familiaris
agactcagggtcagtagctgcccgg

SEQ ID NO: 29767 - DNA, 25 bp, Canis familiaris
agacattaggtacgggctgccagca

SEQ ID NO: 29768 - DNA, 25 bp, Canis familiaris
agacattcaggattctggacattga

SEQ ID NO: 29769 - DNA, 25 bp, Canis familiaris
agagcactggtatttggatttgcca

SEQ ID NO: 29770 - DNA, 25 bp, Canis familiaris
agagcatctgaaattttgtttgtac

SEQ ID NO: 29771 - DNA, 25 bp, Canis familiaris
agactggagactccggttttcagct

SEQ ID NO: 29772 - DNA, 25 bp, Canis familiaris
agagccgagagcaggtttgtccact

SEQ ID NO: 29773 - DNA, 25 bp, Canis familiaris
agagcccagcactgagagggtctcc

SEQ ID NO: 29774 - DNA, 25 bp, Canis familiaris
agagctgcacagactaaggggccct

SEQ ID NO: 29775 - DNA, 25 bp, Canis familiaris
agagatcaaacagaagcgcccagct

SEQ ID NO: 29776 - DNA, 25 bp, Canis familiaris
agagctcaaaagaacagtcccagtt

SEQ ID NO: 29777 - DNA, 25 bp, Canis familiaris
agagaagaagagaatctgttccact

SEQ ID NO: 29778 - DNA, 25 bp, Canis familiaris
agagcagagcaataggcttctcccc

SEQ ID NO: 29779 - DNA, 25 bp, Canis familiaris
agagagaaaatacccttcctctgcc

SEQ ID NO: 29780 - DNA, 25 bp, Canis familiaris
agagagatataattccccatcaccc

SEQ ID NO: 29781 - DNA, 25 bp, Canis familiaris
agagcatatgtgaaatcccttcccc

SEQ ID NO: 29782 - DNA, 25 bp, Canis familiaris
agagctagtgtaggggctctcccaa

SEQ ID NO: 29783 - DNA, 25 bp, Canis familiaris
agaccagtgcgaaggccaacatcaa

SEQ ID NO: 29784 - DNA, 25 bp, Canis familiaris
agagcggtggcatgggcaagatccc

SEQ ID NO: 29785 - DNA, 25 bp, Canis familiaris
agagctaatacatgccgacgggcgc

SEQ ID NO: 29786 - DNA, 25 bp, Canis familiaris
agagctaatacatgccgacgggcgc

SEQ ID NO: 29787 - DNA, 25 bp, Canis familiaris
agacgattacaagcggaggcgctgc

SEQ ID NO: 29788 - DNA, 25 bp, Canis familiaris
agacgattacaagcggaggcgctgc

SEQ ID NO: 29789 - DNA, 25 bp, Canis familiaris
agacgttcgaatgggtcgtcgccgc

SEQ ID NO: 29790 - DNA, 25 bp, Canis familiaris
agaccgccaggtgggaaggccaggc

SEQ ID NO: 29791 - DNA, 25 bp, Canis familiaris
agagccctcctgagggggcatcagc

SEQ ID NO: 29792 - DNA, 25 bp, Canis familiaris
agagccacccagaggtggatgctgc

SEQ ID NO: 29793 - DNA, 25 bp, Canis familiaris
agactcacctggaggacctgtactg

SEQ ID NO: 29794 - DNA, 25 bp, Canis familiaris
agacgattatggccgagacctgtcc

SEQ ID NO: 29795 - DNA, 25 bp, Canis familiaris
agacaggttggacaagatctgacag

SEQ ID NO: 29796 - DNA, 25 bp, Canis familiaris
agagagattgggagaacattgcaca

SEQ ID NO: 29797 - DNA, 25 bp, Canis familiaris
agagaatctgctctagactctgccc

SEQ ID NO: 29798 - DNA, 25 bp, Canis familiaris
agaaagccattgagatccgctccgt

SEQ ID NO: 29799 - DNA, 25 bp, Canis familiaris
agaccccatgtttcatctatgatcc

SEQ ID NO: 29800 - DNA, 25 bp, Canis familiaris
agactctggcatgctaactagttac

SEQ ID NO: 29801 - DNA, 25 bp, Canis familiaris
agaccatgtgtcctaactaagctac

SEQ ID NO: 29802 - DNA, 25 bp, Canis familiaris
agacctgtgctgtctaccagtagct

SEQ ID NO: 29803 - DNA, 25 bp, Canis familiaris
agaccttgctttccatagagactca

SEQ ID NO: 29804 - DNA, 25 bp, Canis familiaris
agaccaccattgtgcagaaagccaa

SEQ ID NO: 29805 - DNA, 25 bp, Canis familiaris
agagccacttttggtccaagcagcc

SEQ ID NO: 29806 - DNA, 25 bp, Canis familiaris
agagctcctttctgttagatgggat

SEQ ID NO: 29807 - DNA, 25 bp, Canis familiaris
agacccttgttgctttgacagtgct

SEQ ID NO: 29808 - DNA, 25 bp, Canis familiaris
agaccacttttccttaactagcatt

SEQ ID NO: 29809 - DNA, 25 bp, Canis familiaris
agaccacttgatttcattaactttt

SEQ ID NO: 29810 - DNA, 25 bp, Canis familiaris
agagcagctcttaatttgccaacta

SEQ ID NO: 29811 - DNA, 25 bp, Canis familiaris
agagcgcttcttatgtacacaacga

SEQ ID NO: 29812 - DNA, 25 bp, Canis familiaris
agagatgcttcgaaaggcaaggagg

SEQ ID NO: 29813 - DNA, 25 bp, Canis familiaris
agagattatctcaaaagcagcaaaa

SEQ ID NO: 29814 - DNA, 25 bp, Canis familiaris
agagatgatgcagccacaacagcca

SEQ ID NO: 29815 - DNA, 25 bp, Canis familiaris
agagatcaagcccagattcatccag

SEQ ID NO: 29816 - DNA, 25 bp, Canis familiaris
agagatctcagaggtttctccagcc

SEQ ID NO: 29817 - DNA, 25 bp, Canis familiaris
agagctgccagacaattgctcctgc

SEQ ID NO: 29818 - DNA, 25 bp, Canis familiaris
agactcacaacacaggtgcctgggt

SEQ ID NO: 29819 - DNA, 25 bp, Canis familiaris
agaccatccaagaaggacagcgcag

SEQ ID NO: 29820 - DNA, 25 bp, Canis familiaris
agacgcacaggacactgcagcagcg

SEQ ID NO: 29821 - DNA, 25 bp, Canis familiaris
agaccaaggcaggcagctgccctga

SEQ ID NO: 29822 - DNA, 25 bp, Canis familiaris
agagagcaaggcttgccagcactct

SEQ ID NO: 29823 - DNA, 25 bp, Canis familiaris
agagagcaagccatcgcatgcactt

SEQ ID NO: 29824 - DNA, 25 bp, Canis familiaris
agagagcaagcatttcagcgcctac

SEQ ID NO: 29825 - DNA, 25 bp, Canis familiaris
agagactcagctagtcatgccctat

SEQ ID NO: 29826 - DNA, 25 bp, Canis familiaris
agagaatggttgtcagccttcatcc

SEQ ID NO: 29827 - DNA, 25 bp, Canis familiaris
agagagaggtacggctgctacatcg

SEQ ID NO: 29828 - DNA, 25 bp, Canis familiaris
agagatgagctctctggctctactc

SEQ ID NO: 29829 - DNA, 25 bp, Canis familiaris
agagagtcacatcctactggttcat

SEQ ID NO: 29830 - DNA, 25 bp, Canis familiaris
agagagtgcacacacagtggtggag

SEQ ID NO: 29831 - DNA, 25 bp, Canis familiaris
agagctgtgccagcaggggggctgt

SEQ ID NO: 29832 - DNA, 25 bp, Canis familiaris
agagatgtgccaggggctgctggag

SEQ ID NO: 29833 - DNA, 25 bp, Canis familiaris
agagcattaagccctggctgtgaac

SEQ ID NO: 29834 - DNA, 25 bp, Canis familiaris
agagcggatcagtctcttgctggac

SEQ ID NO: 29835 - DNA, 25 bp, Canis familiaris
agagctgggcagattctggagagaa

SEQ ID NO: 29836 - DNA, 25 bp, Canis familiaris
agagcgggagtcgttggcccgcatg

SEQ ID NO: 29837 - DNA, 25 bp, Canis familiaris
agagagggattgctggtgcctccac

SEQ ID NO: 29838 - DNA, 25 bp, Canis familiaris
agagaggtcattcttctctctcttc

SEQ ID NO: 29839 - DNA, 25 bp, Canis familiaris
agagagactgggttatccctcctat

SEQ ID NO: 29840 - DNA, 25 bp, Canis familiaris
agagagacttctcaaacccactatc

SEQ ID NO: 29841 - DNA, 25 bp, Canis familiaris
agagagactcaccagagaacccacc

SEQ ID NO: 29842 - DNA, 25 bp, Canis familiaris
agagagacgcgcagagacacggaca

SEQ ID NO: 29843 - DNA, 25 bp, Canis familiaris
aaagcaagccacgtgcaagggtcct

SEQ ID NO: 29844 - DNA, 25 bp, Canis familiaris
aaaagacaatcgcagaatggtacat

SEQ ID NO: 29845 - DNA, 25 bp, Canis familiaris
agaaagaagtcgctgcaaggcataa

SEQ ID NO: 29846 - DNA, 25 bp, Canis familiaris
agagaaaatgtggcacagcatacca

SEQ ID NO: 29847 - DNA, 25 bp, Canis familiaris
agagagagactgaccaggaacctcc

SEQ ID NO: 29848 - DNA, 25 bp, Canis familiaris
agagaggttgtgcaggaactcatcg

SEQ ID NO: 29849 - DNA, 25 bp, Canis familiaris
agagcaggggtgacgtgcagaccat

SEQ ID NO: 29850 - DNA, 25 bp, Canis familiaris
agagcactgggtcctggaactagat

SEQ ID NO: 29851 - DNA, 25 bp, Canis familiaris
agagaatgtgacacggacacggata

SEQ ID NO: 29852 - DNA, 25 bp, Canis familiaris
agagagcaataattcctgacacggg

SEQ ID NO: 29853 - DNA, 25 bp, Canis familiaris
agaaacatacagtcctatcaagggg

SEQ ID NO: 29854 - DNA, 25 bp, Canis familiaris
agaccctgacgagatcatgcaagtc

SEQ ID NO: 29855 - DNA, 25 bp, Canis familiaris
agagacactgatcaacctcatcgtc

SEQ ID NO: 29856 - DNA, 25 bp, Canis familiaris
agagccacggtgtcgtttgatgacc

SEQ ID NO: 29857 - DNA, 25 bp, Canis familiaris
agagaccgggagctgattgaccttt

SEQ ID NO: 29858 - DNA, 25 bp, Canis familiaris
agagacactggccctgtagtctcct

SEQ ID NO: 29859 - DNA, 25 bp, Canis familiaris
agagacgtagtgcctggagcttctt

SEQ ID NO: 29860 - DNA, 25 bp, Canis familiaris
agagagcagatctgggggggtctcc

SEQ ID NO: 29861 - DNA, 25 bp, Canis familiaris
agagagcatgagcgggcagcgcgtg

SEQ ID NO: 29862 - DNA, 25 bp, Canis familiaris
agagagtgcggcctgatggctggtg

SEQ ID NO: 29863 - DNA, 25 bp, Canis familiaris
agagactgggacttggctgggtacc

SEQ ID NO: 29864 - DNA, 25 bp, Canis familiaris
agagaagtcgaaatcgtggcccacc

SEQ ID NO: 29865 - DNA, 25 bp, Canis familiaris
agagaaccaagttcgtgggccactg

SEQ ID NO: 29866 - DNA, 25 bp, Canis familiaris
agagacaccattgttgggaccctgg

SEQ ID NO: 29867 - DNA, 25 bp, Canis familiaris
agagagccctctggtttggagagcc

SEQ ID NO: 29868 - DNA, 25 bp, Canis familiaris
agagaccacccgagtatgaggcatc

SEQ ID NO: 29869 - DNA, 25 bp, Canis familiaris
agagaccaccgcctggagagagaga

SEQ ID NO: 29870 - DNA, 25 bp, Canis familiaris
agagacagacaagatggcggcggcg

SEQ ID NO: 29871 - DNA, 25 bp, Canis familiaris
agagacatggggtttgcgacgtcga

SEQ ID NO: 29872 - DNA, 25 bp, Canis familiaris
agagcaaggcggtggagcaggtgaa

SEQ ID NO: 29873 - DNA, 25 bp, Canis familiaris
agagcaatatgcagtaacacatggt

SEQ ID NO: 29874 - DNA, 25 bp, Canis familiaris
agaccatactccaatatccatgcgc

SEQ ID NO: 29875 - DNA, 25 bp, Canis familiaris
agactatgagtctaatatccaacaa

SEQ ID NO: 29876 - DNA, 25 bp, Canis familiaris
agagctacagtctgatgtaagcaaa

SEQ ID NO: 29877 - DNA, 25 bp, Canis familiaris
agagcgacatgttcacatgcgtaaa

SEQ ID NO: 29878 - DNA, 25 bp, Canis familiaris
agagcagagagtaccgctattgaag

SEQ ID NO: 29879 - DNA, 25 bp, Canis familiaris
agagagagatgtgttttgtgtgaga

SEQ ID NO: 29880 - DNA, 25 bp, Canis familiaris
agagagtgtttatttgttgaggaga

SEQ ID NO: 29881 - DNA, 25 bp, Canis familiaris
agagcagagtttcttgttatgtgaa

SEQ ID NO: 29882 - DNA, 25 bp, Canis familiaris
agagaagccttgatattgatactgc

SEQ ID NO: 29883 - DNA, 25 bp, Canis familiaris
agagagatgcccttttgtacctggg

SEQ ID NO: 29884 - DNA, 25 bp, Canis familiaris
aaatacaatgtttgggatgcctggg

SEQ ID NO: 29885 - DNA, 25 bp, Canis familiaris
agagaaagcttcagtcgtgcctggg

SEQ ID NO: 29886 - DNA, 25 bp, Canis familiaris
agagacagggttagagcggccggga

SEQ ID NO: 29887 - DNA, 25 bp, Canis familiaris
agaaaggaggcgtggcgtcgggatt

SEQ ID NO: 29888 - DNA, 25 bp, Canis familiaris
agagaagggcggccagggtccgcct

SEQ ID NO: 29889 - DNA, 25 bp, Canis familiaris
agagaatggagcgccagggcacacg

SEQ ID NO: 29890 - DNA, 25 bp, Canis familiaris
agaaaagacgctcaggtgccacgat

SEQ ID NO: 29891 - DNA, 25 bp, Canis familiaris
agagaaaccgtgggcatctgtgctc

SEQ ID NO: 29892 - DNA, 25 bp, Canis familiaris
agagaaagtggtctgctgcttcacc

SEQ ID NO: 29893 - DNA, 25 bp, Canis familiaris
agagaaggggatcccttgtccctga

SEQ ID NO: 29894 - DNA, 25 bp, Canis familiaris
agagaaggagggcctctcttgctcc

SEQ ID NO: 29895 - DNA, 25 bp, Canis familiaris
agagaaagaccaaccctgtggcacg

SEQ ID NO: 29896 - DNA, 25 bp, Canis familiaris
agaaaatgctccgcagcacttggca

SEQ ID NO: 29897 - DNA, 25 bp, Canis familiaris
agacttctgtcctcatgcattaggc

SEQ ID NO: 29898 - DNA, 25 bp, Canis familiaris
agacttctccactgaattgctgacg

SEQ ID NO: 29899 - DNA, 25 bp, Canis familiaris
agacctcccagatatttctaggctt

SEQ ID NO: 29900 - DNA, 25 bp, Canis familiaris
agacctttagttttctgcttggctt

SEQ ID NO: 29901 - DNA, 25 bp, Canis familiaris
agagcctttacagcttttctggcct

SEQ ID NO: 29902 - DNA, 25 bp, Canis familiaris
agagctttctaagccagtcttctcc

SEQ ID NO: 29903 - DNA, 25 bp, Canis familiaris
agagagacctaaggccttttcctca

SEQ ID NO: 29904 - DNA, 25 bp, Canis familiaris
agagagactctaacaaatccttggt

SEQ ID NO: 29905 - DNA, 25 bp, Canis familiaris
agagaaggcatctcagaaccctgag

SEQ ID NO: 29906 - DNA, 25 bp, Canis familiaris
agagcaagaataccagcaggccctg

SEQ ID NO: 29907 - DNA, 25 bp, Canis familiaris
agacataaaactccggccagctaaa

SEQ ID NO: 29908 - DNA, 25 bp, Canis familiaris
agactcataatgtttgggccagcta

SEQ ID NO: 29909 - DNA, 25 bp, Canis familiaris
agactaatatttcgatgactactaa

SEQ ID NO: 29910 - DNA, 25 bp, Canis familiaris
agactaactttccaagctactttga

SEQ ID NO: 29911 - DNA, 25 bp, Canis familiaris
agactgcaacttttaacttgccctg

SEQ ID NO: 29912 - DNA, 25 bp, Canis familiaris
agacttgagccttaaacctgcctct

SEQ ID NO: 29913 - DNA, 25 bp, Canis familiaris
agacattaactggaactgcccgtgc

SEQ ID NO: 29914 - DNA, 25 bp, Canis familiaris
agacttagcagcctaagcctcctac

SEQ ID NO: 29915 - DNA, 25 bp, Canis familiaris
agacggtgagccaaggcattcctcc

SEQ ID NO: 29916 - DNA, 25 bp, Canis familiaris
agacggtgcagaacgacagcagccc

SEQ ID NO: 29917 - DNA, 25 bp, Canis familiaris
agagctggtgcgagctggcacccac

SEQ ID NO: 29918 - DNA, 25 bp, Canis familiaris
agagcagttggagctggactcctga

SEQ ID NO: 29919 - DNA, 25 bp, Canis familiaris
agagaataggcatcggacccgagag

SEQ ID NO: 29920 - DNA, 25 bp, Canis familiaris
agagaacaggcttcggagcgccttc

SEQ ID NO: 29921 - DNA, 25 bp, Canis familiaris
agagcaaatggcatcagggccccat

SEQ ID NO: 29922 - DNA, 25 bp, Canis familiaris
agagcgcaatggccgcaagggtgcc

SEQ ID NO: 29923 - DNA, 25 bp, Canis familiaris
agagcgcaggtgggacagctggtcg

SEQ ID NO: 29924 - DNA, 25 bp, Canis familiaris
agaccagcctggccaacatggtgaa

SEQ ID NO: 29925 - DNA, 25 bp, Canis familiaris
agacgaccgtcttcacatggtcaac

SEQ ID NO: 29926 - DNA, 25 bp, Canis familiaris
agactaactttgtcactggtcccaa

SEQ ID NO: 29927 - DNA, 25 bp, Canis familiaris
agacgaagattttcccgtctctgcc

SEQ ID NO: 29928 - DNA, 25 bp, Canis familiaris
agagcagaagactgtggccttccgc

SEQ ID NO: 29929 - DNA, 25 bp, Canis familiaris
aagcgatgctttagtggcctaaccc

SEQ ID NO: 29930 - DNA, 25 bp, Canis familiaris
agacgtctgtataatgatgcgctat

SEQ ID NO: 29931 - DNA, 25 bp, Canis familiaris
aaagactcagtccagatcagcattg

SEQ ID NO: 29932 - DNA, 25 bp, Canis familiaris
agagaacctgatccagtatgactgg

SEQ ID NO: 29933 - DNA, 25 bp, Canis familiaris
agagaccctgacgagatcatgcaag

SEQ ID NO: 29934 - DNA, 25 bp, Canis familiaris
agagactcaccacgagtatgaggca

SEQ ID NO: 29935 - DNA, 25 bp, Canis familiaris
agagactgccatgggtgtggtgcca

SEQ ID NO: 29936 - DNA, 25 bp, Canis familiaris
agagagccctgtcatgtgggccaca

SEQ ID NO: 29937 - DNA, 25 bp, Canis familiaris
agagaccctggaactgggcagactg

SEQ ID NO: 29938 - DNA, 25 bp, Canis familiaris
agaccctcgagttctggggatggtt

SEQ ID NO: 29939 - DNA, 25 bp, Canis familiaris
agaccctcaagttgtaggacagctg

SEQ ID NO: 29940 - DNA, 25 bp, Canis familiaris
agaccgttcagcttgtcaggacaga

SEQ ID NO: 29941 - DNA, 25 bp, Canis familiaris
agaccagttacagcatcgatgacca

SEQ ID NO: 29942 - DNA, 25 bp, Canis familiaris
agagactttctcatcatcgattcca

SEQ ID NO: 29943 - DNA, 25 bp, Canis familiaris
agagacattttcatccacagtggct

SEQ ID NO: 29944 - DNA, 25 bp, Canis familiaris
agagagcttttccattacactgtga

SEQ ID NO: 29945 - DNA, 25 bp, Canis familiaris
agagcagcctttcgagaaacgttca

SEQ ID NO: 29946 - DNA, 25 bp, Canis familiaris
agagccgtgtagcaagaacagttgt

SEQ ID NO: 29947 - DNA, 25 bp, Canis familiaris
agaccaggctcgcacagaagcttct

SEQ ID NO: 29948 - DNA, 25 bp, Canis familiaris
agagcgaggctcacaaaatgtccgt

SEQ ID NO: 29949 - DNA, 25 bp, Canis familiaris
agagcagaccacactaagcagcatc

SEQ ID NO: 29950 - DNA, 25 bp, Canis familiaris
agcaaacgcaaagaagcaccctacc

SEQ ID NO: 29951 - DNA, 25 bp, Canis familiaris
agaacacgaatagagaagccccaaa

SEQ ID NO: 29952 - DNA, 25 bp, Canis familiaris
agaccacagcaatttcagcaagcct

SEQ ID NO: 29953 - DNA, 25 bp, Canis familiaris
agagcacacgagcatctctaatccg

SEQ ID NO: 29954 - DNA, 25 bp, Canis familiaris
agagaatgctggctattaagagatg

SEQ ID NO: 29955 - DNA, 25 bp, Canis familiaris
agaacctgatggacatgttcaggga

SEQ ID NO: 29956 - DNA, 25 bp, Canis familiaris
agacaccagctggttttcacgtggc

SEQ ID NO: 29957 - DNA, 25 bp, Canis familiaris
agaccaacctgaatttacagatgac

SEQ ID NO: 29958 - DNA, 25 bp, Canis familiaris
agacctacttggagctcgagatcac

SEQ ID NO: 29959 - DNA, 25 bp, Canis familiaris
gctcacttcggggtgtttcatgtgg

SEQ ID NO: 29960 - DNA, 25 bp, Canis familiaris
agaccaagctggctctcaaaggctc

SEQ ID NO: 29961 - DNA, 25 bp, Canis familiaris
agaccagatgggttgccccaggatc

SEQ ID NO: 29962 - DNA, 25 bp, Canis familiaris
agaccaggaggttgcccagggattg

SEQ ID NO: 29963 - DNA, 25 bp, Canis familiaris
aacttggaggcatccctggaacttt

SEQ ID NO: 29964 - DNA, 25 bp, Canis familiaris
agactgtggatggcccctctggaaa

SEQ ID NO: 29965 - DNA, 25 bp, Canis familiaris
agactgggacttcttgctggatttg

SEQ ID NO: 29966 - DNA, 25 bp, Canis familiaris
agactgctaagtgtgtttggtttaa

SEQ ID NO: 29967 - DNA, 25 bp, Canis familiaris
agagcagaagtagtttttggattta

SEQ ID NO: 29968 - DNA, 25 bp, Canis familiaris
agaaaagctactccctacagttttg

SEQ ID NO: 29969 - DNA, 25 bp, Canis familiaris
acagaaaatctcccccaattgttgt

SEQ ID NO: 29970 - DNA, 25 bp, Canis familiaris
agaagagaatctgttccactattta

SEQ ID NO: 29971 - DNA, 25 bp, Canis familiaris
agacggagttggcggagctgcagtc

SEQ ID NO: 29972 - DNA, 25 bp, Canis familiaris
agacccaatttgccaagcactgcgt

SEQ ID NO: 29973 - DNA, 25 bp, Canis familiaris
agagcccattaaatcttgcactcgt

SEQ ID NO: 29974 - DNA, 25 bp, Canis familiaris
agagcttcaataaccatcggcctgt

SEQ ID NO: 29975 - DNA, 25 bp, Canis familiaris
agacttcaataaaacgtgcttttct

SEQ ID NO: 29976 - DNA, 25 bp, Canis familiaris
agacttcaaaccagctatcatatta

SEQ ID NO: 29977 - DNA, 25 bp, Canis familiaris
agagctccagaagttcctgtaatct

SEQ ID NO: 29978 - DNA, 25 bp, Canis familiaris
agagccacagaaggaccgtgaggcc

SEQ ID NO: 29979 - DNA, 25 bp, Canis familiaris
agagccatgggagacccagcggtct

SEQ ID NO: 29980 - DNA, 25 bp, Canis familiaris
agacctgtatgagaccccattgtcg

SEQ ID NO: 29981 - DNA, 25 bp, Canis familiaris
agacctctaaggtccctttggctct

SEQ ID NO: 29982 - DNA, 25 bp, Canis familiaris
agcttcctgaaggctcccttcagtg

SEQ ID NO: 29983 - DNA, 25 bp, Canis familiaris
agagacatctaagcacccttgagtg

SEQ ID NO: 29984 - DNA, 25 bp, Canis familiaris
agaactataaactccgaagctactc

SEQ ID NO: 29985 - DNA, 25 bp, Canis familiaris
agacttagaaacgggcataactcct

SEQ ID NO: 29986 - DNA, 25 bp, Canis familiaris
agactctacatgtaggatggtaacc

SEQ ID NO: 29987 - DNA, 25 bp, Canis familiaris
agagcatctatatctgcaatctgta

SEQ ID NO: 29988 - DNA, 25 bp, Canis familiaris
agagcacataccgacagcatctgaa

SEQ ID NO: 29989 - DNA, 25 bp, Canis familiaris
agagcacttcatccaaggtagcacc

SEQ ID NO: 29990 - DNA, 25 bp, Canis familiaris
agaccatcttccaaggtgagacagg

SEQ ID NO: 29991 - DNA, 25 bp, Canis familiaris
agacttcttgctgcatgtgctggac

SEQ ID NO: 29992 - DNA, 25 bp, Canis familiaris
agactggttagccttcattgagccc

SEQ ID NO: 29993 - DNA, 25 bp, Canis familiaris
agagctggggaggttcatgctgcgc

SEQ ID NO: 29994 - DNA, 25 bp, Canis familiaris
agagctggttatgattatgcctcat

SEQ ID NO: 29995 - DNA, 25 bp, Canis familiaris
agagctttttgatttgctgctccat

SEQ ID NO: 29996 - DNA, 25 bp, Canis familiaris
agagcgcttttagttgattccctac

SEQ ID NO: 29997 - DNA, 25 bp, Canis familiaris
agagcacctattacctgattgtggt

SEQ ID NO: 29998 - DNA, 25 bp, Canis familiaris
agagcagccctgaacaatattttgt

SEQ ID NO: 29999 - DNA, 25 bp, Canis familiaris
agagcaccttcatcatgttctttag

SEQ ID NO: 30000 - DNA, 25 bp, Canis familiaris
agagctccttttagcttctgctcta

SEQ ID NO: 30001 - DNA, 25 bp, Canis familiaris
agagctgtactcattttgctgcctt

SEQ ID NO: 30002 - DNA, 25 bp, Canis familiaris
agcacgtcgcttatattgggatgac

SEQ ID NO: 30003 - DNA, 25 bp, Canis familiaris
agagctatcctggtttgggggcatc

SEQ ID NO: 30004 - DNA, 25 bp, Canis familiaris
agagctttgccgtttggggcagctg

SEQ ID NO: 30005 - DNA, 25 bp, Canis familiaris
agaccttgcactctttggacatgct

SEQ ID NO: 30006 - DNA, 25 bp, Canis familiaris
agacgtggacgttttagctccttat

SEQ ID NO: 30007 - DNA, 25 bp, Canis familiaris
agacctgaacgtgtctgcagctcgt

SEQ ID NO: 30008 - DNA, 25 bp, Canis familiaris
agagctgtgagttgtgtctccagtc

SEQ ID NO: 30009 - DNA, 25 bp, Canis familiaris
agagcattgctggggttccatgatc

SEQ ID NO: 30010 - DNA, 25 bp, Canis familiaris
agagcatggcttggcgtgtgctcct

SEQ ID NO: 30011 - DNA, 25 bp, Canis familiaris
agacatgtgtgttcgagtgccgtgt

SEQ ID NO: 30012 - DNA, 25 bp, Canis familiaris
agacctgtgttccataacgtgtccc

SEQ ID NO: 30013 - DNA, 25 bp, Canis familiaris
agagccgtcttgttcaagcgtctac

SEQ ID NO: 30014 - DNA, 25 bp, Canis familiaris
agagccttttgctcacaggtctctt

SEQ ID NO: 30015 - DNA, 25 bp, Canis familiaris
agagaatgggccttccaggtctctt

SEQ ID NO: 30016 - DNA, 25 bp, Canis familiaris
agagaacagcatgccccagggcatg

SEQ ID NO: 30017 - DNA, 25 bp, Canis familiaris
agagaattggtgccctggaagctgt

SEQ ID NO: 30018 - DNA, 25 bp, Canis familiaris
agagaactttgccgtcgaagctgct

SEQ ID NO: 30019 - DNA, 25 bp, Canis familiaris
agagaaactttgctggaaccattaa

SEQ ID NO: 30020 - DNA, 25 bp, Canis familiaris
agaactacttattgactgaaactta

SEQ ID NO: 30021 - DNA, 25 bp, Canis familiaris
agacactacctccaagatgaaacct

SEQ ID NO: 30022 - DNA, 25 bp, Canis familiaris
agaccagacccaacagaaaagcctc

SEQ ID NO: 30023 - DNA, 25 bp, Canis familiaris
agaccagagttcaaaatagggctta

SEQ ID NO: 30024 - DNA, 25 bp, Canis familiaris
agaccagagtccactactgagcctt

SEQ ID NO: 30025 - DNA, 25 bp, Canis familiaris
agacctgaattctttagtgcccatt

SEQ ID NO: 30026 - DNA, 25 bp, Canis familiaris
agacctgcaactgttccgcaaactg

SEQ ID NO: 30027 - DNA, 25 bp, Canis familiaris
agaccagaccttttctctgaaacat

SEQ ID NO: 30028 - DNA, 25 bp, Canis familiaris
agaccattcagtagattttgaaact

SEQ ID NO: 30029 - DNA, 25 bp, Canis familiaris
agacgatccagtggttcctgtgaat

SEQ ID NO: 30030 - DNA, 25 bp, Canis familiaris
agaccaacatcgccttcctgcagaa

SEQ ID NO: 30031 - DNA, 25 bp, Canis familiaris
agaccagaccagccgtaggcagcat

SEQ ID NO: 30032 - DNA, 25 bp, Canis familiaris
agactgcgcaccagtgtcaggagct

SEQ ID NO: 30033 - DNA, 25 bp, Canis familiaris
agacatgccaggggatgccaggcct

SEQ ID NO: 30034 - DNA, 25 bp, Canis familiaris
agagcaggaggaggcagctgcggcc

SEQ ID NO: 30035 - DNA, 25 bp, Canis familiaris
agagctggatcggcaggtgcaggcc

SEQ ID NO: 30036 - DNA, 25 bp, Canis familiaris
agagctggctcctgagtgtggaagg

SEQ ID NO: 30037 - DNA, 25 bp, Canis familiaris
agagcatagaccaggctgtggaaga

SEQ ID NO: 30038 - DNA, 25 bp, Canis familiaris
agagaagacagacggccagggagag

SEQ ID NO: 30039 - DNA, 25 bp, Canis familiaris
agagcaagacgctgagcctggtgtc

SEQ ID NO: 30040 - DNA, 25 bp, Canis familiaris
agagcagaaacttgccctgttctat

SEQ ID NO: 30041 - DNA, 25 bp, Canis familiaris
agacgaatgacttgtcctcatgctc

SEQ ID NO: 30042 - DNA, 25 bp, Canis familiaris
agactcagatcgagtgcctgctcta

SEQ ID NO: 30043 - DNA, 25 bp, Canis familiaris
agaccaataacactgactcctactc

SEQ ID NO: 30044 - DNA, 25 bp, Canis familiaris
agaccagagaggctgagtcccgtca

SEQ ID NO: 30045 - DNA, 25 bp, Canis familiaris
agagcctggagtcagagacccagcc

SEQ ID NO: 30046 - DNA, 25 bp, Canis familiaris
agagcagttcgtcaggaacctgtcc

SEQ ID NO: 30047 - DNA, 25 bp, Canis familiaris
agacagaggttccagtaactcccca

SEQ ID NO: 30048 - DNA, 25 bp, Canis familiaris
agagcaaggtgagcattttctcccc

SEQ ID NO: 30049 - DNA, 25 bp, Canis familiaris
agagcagacagtttccatttcttcc

SEQ ID NO: 30050 - DNA, 25 bp, Canis familiaris
agagcaggggcctcaagtctggcct

SEQ ID NO: 30051 - DNA, 25 bp, Canis familiaris
agagctgaggtgggggcagtcgggc

SEQ ID NO: 30052 - DNA, 25 bp, Canis familiaris
agagcagaggctggcgatggcacac

SEQ ID NO: 30053 - DNA, 25 bp, Canis familiaris
agagctgcaggctgcacaggcactg

SEQ ID NO: 30054 - DNA, 25 bp, Canis familiaris
agagcatcgagtagccagacctctg

SEQ ID NO: 30055 - DNA, 25 bp, Canis familiaris
agagcatccgtcatagacctgttgc

SEQ ID NO: 30056 - DNA, 25 bp, Canis familiaris
agacaccgacaaaaccattagcaat

SEQ ID NO: 30057 - DNA, 25 bp, Canis familiaris
agacccgcacaaataccggatccta

SEQ ID NO: 30058 - DNA, 25 bp, Canis familiaris
agactccagcctaaagcgggtttct

SEQ ID NO: 30059 - DNA, 25 bp, Canis familiaris
agacaccatgcaactccagagggct

SEQ ID NO: 30060 - DNA, 25 bp, Canis familiaris
agagctctgcatgtcaccaagtgac

SEQ ID NO: 30061 - DNA, 25 bp, Canis familiaris
agagctctgcatgtcaccaagtgac

SEQ ID NO: 30062 - DNA, 25 bp, Canis familiaris
agagctcatgctttcaatcggtgcc

SEQ ID NO: 30063 - DNA, 25 bp, Canis familiaris
agagcagcagcgttgcttggctggc

SEQ ID NO: 30064 - DNA, 25 bp, Canis familiaris
agagcaggtgcagtctggcagctgt

SEQ ID NO: 30065 - DNA, 25 bp, Canis familiaris
agagcaagtcattctgtgtcttcgt

SEQ ID NO: 30066 - DNA, 25 bp, Canis familiaris
agagcaggatcttattacttcaatg

SEQ ID NO: 30067 - DNA, 25 bp, Canis familiaris
agcaccgtctaaaaattcctgaatt

SEQ ID NO: 30068 - DNA, 25 bp, Canis familiaris
agacacgtcctaaagaggccagaac

SEQ ID NO: 30069 - DNA, 25 bp, Canis familiaris
agactatggcctctgaaggccccac

SEQ ID NO: 30070 - DNA, 25 bp, Canis familiaris
agacttcggcatcggacaggacatc

SEQ ID NO: 30071 - DNA, 25 bp, Canis familiaris
agacctccgctgcagacggatgaca

SEQ ID NO: 30072 - DNA, 25 bp, Canis familiaris
agactcctggctgagcagggagcca

SEQ ID NO: 30073 - DNA, 25 bp, Canis familiaris
agactcgtacgggagggggcagcga

SEQ ID NO: 30074 - DNA, 25 bp, Canis familiaris
agagccgacgggaagcgcaggaagc

SEQ ID NO: 30075 - DNA, 25 bp, Canis familiaris
agaacaacgttgtacaaagaagcag

SEQ ID NO: 30076 - DNA, 25 bp, Canis familiaris
agagcacagagtccttcacaaacaa

SEQ ID NO: 30077 - DNA, 25 bp, Canis familiaris
agagcaagcaacatgtacaaacctg

SEQ ID NO: 30078 - DNA, 25 bp, Canis familiaris
agagcatgaacgcgaacaccatcac

SEQ ID NO: 30079 - DNA, 25 bp, Canis familiaris
agagcagaagcagacccatctctct

SEQ ID NO: 30080 - DNA, 25 bp, Canis familiaris
agagcaaagcatgaccacactccta

SEQ ID NO: 30081 - DNA, 25 bp, Canis familiaris
agcacaaagccagccacggttaaaa

SEQ ID NO: 30082 - DNA, 25 bp, Canis familiaris
agcaccaacgcagccaagatcttta

SEQ ID NO: 30083 - DNA, 25 bp, Canis familiaris
agacctaccatcccaatgttgatta

SEQ ID NO: 30084 - DNA, 25 bp, Canis familiaris
agacctgatctcaccagtggttttt

SEQ ID NO: 30085 - DNA, 25 bp, Canis familiaris
agaactatcttagagtacagttact

SEQ ID NO: 30086 - DNA, 25 bp, Canis familiaris
agaactttatgtgatcccttctacc

SEQ ID NO: 30087 - DNA, 25 bp, Canis familiaris
agaaatacctgtacacaccttgtcc

SEQ ID NO: 30088 - DNA, 25 bp, Canis familiaris
agcagaaactcaaacaccacttcct

SEQ ID NO: 30089 - DNA, 25 bp, Canis familiaris
agctggtcagaagacccctgatcct

SEQ ID NO: 30090 - DNA, 25 bp, Canis familiaris
acaggtcaatcagcccttggacctc

SEQ ID NO: 30091 - DNA, 25 bp, Canis familiaris
agaaatcaagccccgtgggatccct

SEQ ID NO: 30092 - DNA, 25 bp, Canis familiaris
agaacttagcttgttggggcacctg

SEQ ID NO: 30093 - DNA, 25 bp, Canis familiaris
agaatttggtgtggacgttggccct

SEQ ID NO: 30094 - DNA, 25 bp, Canis familiaris
agaagtggaaacacgtatgaaccat

SEQ ID NO: 30095 - DNA, 25 bp, Canis familiaris
agaaatccgaacaacgtgatcagtc

SEQ ID NO: 30096 - DNA, 25 bp, Canis familiaris
agaaaccctgaagctgtacagcgcc

SEQ ID NO: 30097 - DNA, 25 bp, Canis familiaris
agaagagctccgtgcgtttactgat

SEQ ID NO: 30098 - DNA, 25 bp, Canis familiaris
agaagagccggctcgtgttggtcga

SEQ ID NO: 30099 - DNA, 25 bp, Canis familiaris
agacgagcgcatgtccgctgattgt

SEQ ID NO: 30100 - DNA, 25 bp, Canis familiaris
agagctactgctgaatcctgttctc

SEQ ID NO: 30101 - DNA, 25 bp, Canis familiaris
agagccctgctgcagatactgtatc

SEQ ID NO: 30102 - DNA, 25 bp, Canis familiaris
agagctctactctatcaacttcatc

SEQ ID NO: 30103 - DNA, 25 bp, Canis familiaris
agagctttatcattcaactcctaac

SEQ ID NO: 30104 - DNA, 25 bp, Canis familiaris
agagctttatttctctctaatcctc

SEQ ID NO: 30105 - DNA, 25 bp, Canis familiaris
agactgaatttccttgctttacttt

SEQ ID NO: 30106 - DNA, 25 bp, Canis familiaris
agactggacttcaatggcttctact

SEQ ID NO: 30107 - DNA, 25 bp, Canis familiaris
agactgaactgtaaccctggagctg

SEQ ID NO: 30108 - DNA, 25 bp, Canis familiaris
agacgtgccgatagaacccacagtg

SEQ ID NO: 30109 - DNA, 25 bp, Canis familiaris
agacctgggaaacccctcagagaag

SEQ ID NO: 30110 - DNA, 25 bp, Canis familiaris
agactttgaaaacgcgctgccggat

SEQ ID NO: 30111 - DNA, 25 bp, Canis familiaris
agacggtgaagacatggctccagga

SEQ ID NO: 30112 - DNA, 25 bp, Canis familiaris
agagcggagcaaagtcacgaccagg

SEQ ID NO: 30113 - DNA, 25 bp, Canis familiaris
agagctatgagctgcctgacggcca

SEQ ID NO: 30114 - DNA, 25 bp, Canis familiaris
agagctatagctggcgcagcacgct

SEQ ID NO: 30115 - DNA, 25 bp, Canis familiaris
agagctatacagcacagcacagccg

SEQ ID NO: 30116 - DNA, 25 bp, Canis familiaris
agagcatgatgctggaaccctggga

SEQ ID NO: 30117 - DNA, 25 bp, Canis familiaris
agacagatgtctggacgagccggga

SEQ ID NO: 30118 - DNA, 25 bp, Canis familiaris
agacagatgccccccaaactggggc

SEQ ID NO: 30119 - DNA, 25 bp, Canis familiaris
agacaggatccgaagcaaagttgag

SEQ ID NO: 30120 - DNA, 25 bp, Canis familiaris
agagcatggatgcatttcaaatgtt

SEQ ID NO: 30121 - DNA, 25 bp, Canis familiaris
agagcaggtcgtttgcgggttggaa

SEQ ID NO: 30122 - DNA, 25 bp, Canis familiaris
agactgtgtcagtgtccgtgtctgt

SEQ ID NO: 30123 - DNA, 25 bp, Canis familiaris
agacttgtcattgttcgtcctatcc

SEQ ID NO: 30124 - DNA, 25 bp, Canis familiaris
agactttactgtcttactcaatccc

SEQ ID NO: 30125 - DNA, 25 bp, Canis familiaris
agactttactgctacttgggaatta

SEQ ID NO: 30126 - DNA, 25 bp, Canis familiaris
agaccccaccaatttgtgcgagttc

SEQ ID NO: 30127 - DNA, 25 bp, Canis familiaris
agaccaataccgttgagcgctgtga

SEQ ID NO: 30128 - DNA, 25 bp, Canis familiaris
agagcctatcacggtattcttctac

SEQ ID NO: 30129 - DNA, 25 bp, Canis familiaris
agagcctcaacgtttttatgtccgc

SEQ ID NO: 30130 - DNA, 25 bp, Canis familiaris
agacctcaaccaattctggtgactc

SEQ ID NO: 30131 - DNA, 25 bp, Canis familiaris
agaccacagaaactgtctgggagag

SEQ ID NO: 30132 - DNA, 25 bp, Canis familiaris
agacgcgagagacgtgcttccgaag

SEQ ID NO: 30133 - DNA, 25 bp, Canis familiaris
agacctgggcagttgtgtctaaact

SEQ ID NO: 30134 - DNA, 25 bp, Canis familiaris
agacctggagctttgtggccaaggg

SEQ ID NO: 30135 - DNA, 25 bp, Canis familiaris
agagcctgggcctgctgagcaggcg

SEQ ID NO: 30136 - DNA, 25 bp, Canis familiaris
agactttggcgatcaagcaccgtca

SEQ ID NO: 30137 - DNA, 25 bp, Canis familiaris
agagcattttggagcagagcacccc

SEQ ID NO: 30138 - DNA, 25 bp, Canis familiaris
agacttcttataccagagccactct

SEQ ID NO: 30139 - DNA, 25 bp, Canis familiaris
agactatgttcttggctccagactc

SEQ ID NO: 30140 - DNA, 25 bp, Canis familiaris
agactatcttcttttgacgacgaca

SEQ ID NO: 30141 - DNA, 25 bp, Canis familiaris
agactacttcacttctacagaaccc

SEQ ID NO: 30142 - DNA, 25 bp, Canis familiaris
agactcttctaacttaaaaacacat

SEQ ID NO: 30143 - DNA, 25 bp, Canis familiaris
agaccttgtaacagaaacaacacaa

SEQ ID NO: 30144 - DNA, 25 bp, Canis familiaris
agaccttgtaacagatacacacaag

SEQ ID NO: 30145 - DNA, 25 bp, Canis familiaris
agacactttaccagaaggacgataa

SEQ ID NO: 30146 - DNA, 25 bp, Canis familiaris
agacttttctttatcaggacctgag

SEQ ID NO: 30147 - DNA, 25 bp, Canis familiaris
agactttgtctcataaatggagggc

SEQ ID NO: 30148 - DNA, 25 bp, Canis familiaris
agacctattctcctgctactggaga

SEQ ID NO: 30149 - DNA, 25 bp, Canis familiaris
agagcgcttttcgtgaatctggacc

SEQ ID NO: 30150 - DNA, 25 bp, Canis familiaris
agagctgatcttggctgtggtctgg

SEQ ID NO: 30151 - DNA, 25 bp, Canis familiaris
agagctgtgtgtgcttggtgggggg

SEQ ID NO: 30152 - DNA, 25 bp, Canis familiaris
agagctgggacctggagggagtcag

SEQ ID NO: 30153 - DNA, 25 bp, Canis familiaris
agagcggaagcctgtgagggtacac

SEQ ID NO: 30154 - DNA, 25 bp, Canis familiaris
agagccagggcccggaggctaaatt

SEQ ID NO: 30155 - DNA, 25 bp, Canis familiaris
agagccaggcctgggagagctgctt

SEQ ID NO: 30156 - DNA, 25 bp, Canis familiaris
agagcctggagtgggactctgcttg

SEQ ID NO: 30157 - DNA, 25 bp, Canis familiaris
agacctgggtgaagttctctgggct

SEQ ID NO: 30158 - DNA, 25 bp, Canis familiaris
agaactgcggggttttctatggcca

SEQ ID NO: 30159 - DNA, 25 bp, Canis familiaris
aaacgtcggcgtattgctttgaaga

SEQ ID NO: 30160 - DNA, 25 bp, Canis familiaris
aaacgtcggcgtattgctttgaaga

SEQ ID NO: 30161 - DNA, 25 bp, Canis familiaris
aaacgtcggcgtattgctttgaaga

SEQ ID NO: 30162 - DNA, 25 bp, Canis familiaris
agaaagtacacggactggcttggag

SEQ ID NO: 30163 - DNA, 25 bp, Canis familiaris
agaacctaatagcagggctgaagca

SEQ ID NO: 30164 - DNA, 25 bp, Canis familiaris
agaaccaaaaactgagtgtgagaga

SEQ ID NO: 30165 - DNA, 25 bp, Canis familiaris
agcagccacaaataccaagtgtgta

SEQ ID NO: 30166 - DNA, 25 bp, Canis familiaris
agagcccagggaccacaagtgagtc

SEQ ID NO: 30167 - DNA, 25 bp, Canis familiaris
agacccagggcttcacagaggatgc

SEQ ID NO: 30168 - DNA, 25 bp, Canis familiaris
agacccacgtgaacaaggagccgcc

SEQ ID NO: 30169 - DNA, 25 bp, Canis familiaris
agacgggggcaagaggaccacactc

SEQ ID NO: 30170 - DNA, 25 bp, Canis familiaris
agagcggtgggctaaagccacgccc

SEQ ID NO: 30171 - DNA, 25 bp, Canis familiaris
agagcggtgggctaaatccacgccc

SEQ ID NO: 30172 - DNA, 25 bp, Canis familiaris
agacgggtgcaccatgcagatctga

SEQ ID NO: 30173 - DNA, 25 bp, Canis familiaris
agactgggctaccagcttctagtct

SEQ ID NO: 30174 - DNA, 25 bp, Canis familiaris
agactgaatctcacctcagctagtc

SEQ ID NO: 30175 - DNA, 25 bp, Canis familiaris
agaccatgaatcgcccatgcaaact

SEQ ID NO: 30176 - DNA, 25 bp, Canis familiaris
agaccagccatcgcgatacaagatg

SEQ ID NO: 30177 - DNA, 25 bp, Canis familiaris
agaccattctcaacgcattcaaagt

SEQ ID NO: 30178 - DNA, 25 bp, Canis familiaris
agactattctgcaacgtacactgag

SEQ ID NO: 30179 - DNA, 25 bp, Canis familiaris
agaccaactccacgtagacatacta

SEQ ID NO: 30180 - DNA, 25 bp, Canis familiaris
agaccaacctagtaagcatgacctg

SEQ ID NO: 30181 - DNA, 25 bp, Canis familiaris
agaccaatcgtcctaactacgtgaa

SEQ ID NO: 30182 - DNA, 25 bp, Canis familiaris
agaccattctgtgggaggatacttt

SEQ ID NO: 30183 - DNA, 25 bp, Canis familiaris
agaccagcatcggcggagatatagt

SEQ ID NO: 30184 - DNA, 25 bp, Canis familiaris
agaccaccgcctggagagagagagg

SEQ ID NO: 30185 - DNA, 25 bp, Canis familiaris
agaccctccacccaaaggatgatga

SEQ ID NO: 30186 - DNA, 25 bp, Canis familiaris
agactgtctcaccctgacaaagatt

SEQ ID NO: 30187 - DNA, 25 bp, Canis familiaris
agagcgtctcacacagctggagagt

SEQ ID NO: 30188 - DNA, 25 bp, Canis familiaris
agagccgatgacaaatctggagatc

SEQ ID NO: 30189 - DNA, 25 bp, Canis familiaris
agagccgctcaatgatctggatcag

SEQ ID NO: 30190 - DNA, 25 bp, Canis familiaris
agagccccagatatattgcacagaa

SEQ ID NO: 30191 - DNA, 25 bp, Canis familiaris
agagcccaagatacaaggtcacagg

SEQ ID NO: 30192 - DNA, 25 bp, Canis familiaris
agaccaccagtaaagactacgcaga

SEQ ID NO: 30193 - DNA, 25 bp, Canis familiaris
agacacaccctgataactcaaggta

SEQ ID NO: 30194 - DNA, 25 bp, Canis familiaris
agacaatgcccggctaacttctcgt

SEQ ID NO: 30195 - DNA, 25 bp, Canis familiaris
agacctgctcgctgagaaagtcctt

SEQ ID NO: 30196 - DNA, 25 bp, Canis familiaris
agacgctgcctgggagcaaggctgc

SEQ ID NO: 30197 - DNA, 25 bp, Canis familiaris
agactctccagtaagaatgccgcca

SEQ ID NO: 30198 - DNA, 25 bp, Canis familiaris
agacttcgcacgacagacatcagcc

SEQ ID NO: 30199 - DNA, 25 bp, Canis familiaris
agactctcctcaccaaacaggaaac

SEQ ID NO: 30200 - DNA, 25 bp, Canis familiaris
agaccacccaggagcagctggcaaa

SEQ ID NO: 30201 - DNA, 25 bp, Canis familiaris
caaacccttgggcactggtaatttg

SEQ ID NO: 30202 - DNA, 25 bp, Canis familiaris
aaaccgcactgtctgtcggtaaccg

SEQ ID NO: 30203 - DNA, 25 bp, Canis familiaris
agaacccactgggtgacgacgaggc

SEQ ID NO: 30204 - DNA, 25 bp, Canis familiaris
agaccctgacgggcaaaactatcac

SEQ ID NO: 30205 - DNA, 25 bp, Canis familiaris
agagcctaactgtccataaactgat

SEQ ID NO: 30206 - DNA, 25 bp, Canis familiaris
agaccatagtctttgtcaccactgt

SEQ ID NO: 30207 - DNA, 25 bp, Canis familiaris
agaccagcagtttcaatcacaccat

SEQ ID NO: 30208 - DNA, 25 bp, Canis familiaris
agactagcctgtgctgacacatcct

SEQ ID NO: 30209 - DNA, 25 bp, Canis familiaris
agacccctgatcagtcagagctctg

SEQ ID NO: 30210 - DNA, 25 bp, Canis familiaris
agcagcccctgttagttggctggca

SEQ ID NO: 30211 - DNA, 25 bp, Canis familiaris
agagcccctggcttgttgggaatga

SEQ ID NO: 30212 - DNA, 25 bp, Canis familiaris
agaccgcctgcgttcatatgaggac

SEQ ID NO: 30213 - DNA, 25 bp, Canis familiaris
agactcaccacgagtatgaggcatc

SEQ ID NO: 30214 - DNA, 25 bp, Canis familiaris
agaccacagagcaggatctcggcca

SEQ ID NO: 30215 - DNA, 25 bp, Canis familiaris
agaccacacaggaatgcatctcccc

SEQ ID NO: 30216 - DNA, 25 bp, Canis familiaris
agactgcacacaggagacacgctgc

SEQ ID NO: 30217 - DNA, 25 bp, Canis familiaris
agacatgccgctgggacaggatgcc

SEQ ID NO: 30218 - DNA, 25 bp, Canis familiaris
agaaatgtgctgctgatctgggcct

SEQ ID NO: 30219 - DNA, 25 bp, Canis familiaris
agcaaatgtaagttttgactgatcc

SEQ ID NO: 30220 - DNA, 25 bp, Canis familiaris
agaaagaatgaggatgtgtgtgtgt

SEQ ID NO: 30221 - DNA, 25 bp, Canis familiaris
agaagcaacgagagcttatgtgtat

SEQ ID NO: 30222 - DNA, 25 bp, Canis familiaris
agacattacagctaccttcagttat

SEQ ID NO: 30223 - DNA, 25 bp, Canis familiaris
agacatattcagaacattccatcct

SEQ ID NO: 30224 - DNA, 25 bp, Canis familiaris
agacatgatggccaacttccacttc

SEQ ID NO: 30225 - DNA, 25 bp, Canis familiaris
agacacagtccatcactgcacttat

SEQ ID NO: 30226 - DNA, 25 bp, Canis familiaris
agacaatgacctaactccttgacgc

SEQ ID NO: 30227 - DNA, 25 bp, Canis familiaris
agaaacacctagtctccatttattt

SEQ ID NO: 30228 - DNA, 25 bp, Canis familiaris
agaaacagactatccttcctgttgt

SEQ ID NO: 30229 - DNA, 25 bp, Canis familiaris
agaccagcagactgttttgcctctt

SEQ ID NO: 30230 - DNA, 25 bp, Canis familiaris
agagccagagattcagggcctcctc

SEQ ID NO: 30231 - DNA, 25 bp, Canis familiaris
agagccaagtgatcttgccatccac

SEQ ID NO: 30232 - DNA, 25 bp, Canis familiaris
agagccaaaagcttttcatctctcc

SEQ ID NO: 30233 - DNA, 25 bp, Canis familiaris
agaccaaagagctgggactccacaa

SEQ ID NO: 30234 - DNA, 25 bp, Canis familiaris
agagcgtctagagcgcggagtctaa

SEQ ID NO: 30235 - DNA, 25 bp, Canis familiaris
agagcgccgagagcgatgggcatct

SEQ ID NO: 30236 - DNA, 25 bp, Canis familiaris
agacttctaggtgatgcaagcatct

SEQ ID NO: 30237 - DNA, 25 bp, Canis familiaris
agacttctaacggtcatcatcctcg

SEQ ID NO: 30238 - DNA, 25 bp, Canis familiaris
agacattctgcatgtgccatttcct

SEQ ID NO: 30239 - DNA, 25 bp, Canis familiaris
agactatctggactgccaatgttcc

SEQ ID NO: 30240 - DNA, 25 bp, Canis familiaris
agaaatctgatgtcccttggttttt

SEQ ID NO: 30241 - DNA, 25 bp, Canis familiaris
agcatgtcctggcaacttttttttt

SEQ ID NO: 30242 - DNA, 25 bp, Canis familiaris
agcccctacctacaattattttatg

SEQ ID NO: 30243 - DNA, 25 bp, Canis familiaris
agaaacttcctataatgaattttgg

SEQ ID NO: 30244 - DNA, 25 bp, Canis familiaris
agaccacttccttaacagctgtatt

SEQ ID NO: 30245 - DNA, 25 bp, Canis familiaris
agaccatcttacttaattgcgtcat

SEQ ID NO: 30246 - DNA, 25 bp, Canis familiaris
agaccatcattctaatttgtggata

SEQ ID NO: 30247 - DNA, 25 bp, Canis familiaris
agactactctcaatatgcttctgga

SEQ ID NO: 30248 - DNA, 25 bp, Canis familiaris
agactcggctaaagtttgcacaccc

SEQ ID NO: 30249 - DNA, 25 bp, Canis familiaris
agcatctcgggggagagttgcaaac

SEQ ID NO: 30250 - DNA, 25 bp, Canis familiaris
agaccagctggggccagtggcaatt

SEQ ID NO: 30251 - DNA, 25 bp, Canis familiaris
agacactctagggacgcttcaaaat

SEQ ID NO: 30252 - DNA, 25 bp, Canis familiaris
agaccttttgtcctgtgtcaacaga

SEQ ID NO: 30253 - DNA, 25 bp, Canis familiaris
agacctaatgcatcctgattcagac

SEQ ID NO: 30254 - DNA, 25 bp, Canis familiaris
agacctatatgatctgccagtcctc

SEQ ID NO: 30255 - DNA, 25 bp, Canis familiaris
agaccctgaagactgtctgcttctg

SEQ ID NO: 30256 - DNA, 25 bp, Canis familiaris
agaccgaaatgctcactgttctgaa

SEQ ID NO: 30257 - DNA, 25 bp, Canis familiaris
agactagaaagatgcatctcttcta

SEQ ID NO: 30258 - DNA, 25 bp, Canis familiaris
agaccagaaatctagctctaccaca

SEQ ID NO: 30259 - DNA, 25 bp, Canis familiaris
agaccaacactctagagtaccctgc

SEQ ID NO: 30260 - DNA, 25 bp, Canis familiaris
agaccacgcgtctaactacgagtag

SEQ ID NO: 30261 - DNA, 25 bp, Canis familiaris
agaccagcggtctaaatacgatgaa

SEQ ID NO: 30262 - DNA, 25 bp, Canis familiaris
agaaacgtttgaaaatctgatgact

SEQ ID NO: 30263 - DNA, 25 bp, Canis familiaris
aacaacgttgtacaaagaagcaggc

SEQ ID NO: 30264 - DNA, 25 bp, Canis familiaris
agaacaagttgtactataaaagcag

SEQ ID NO: 30265 - DNA, 25 bp, Canis familiaris
agaccaagggtgacagtaaagactg

SEQ ID NO: 30266 - DNA, 25 bp, Canis familiaris
agaccggtggtgggagaaagcagtg

SEQ ID NO: 30267 - DNA, 25 bp, Canis familiaris
agaccagagtcgacgggtacagcgc

SEQ ID NO: 30268 - DNA, 25 bp, Canis familiaris
agaccaggtccttggggaatccctg

SEQ ID NO: 30269 - DNA, 25 bp, Canis familiaris
agagccgggactggagcggggacac

SEQ ID NO: 30270 - DNA, 25 bp, Canis familiaris
agacacgggggccaagggaatcacg

SEQ ID NO: 30271 - DNA, 25 bp, Canis familiaris
agacacgggggccaagggaatcacg

SEQ ID NO: 30272 - DNA, 25 bp, Canis familiaris
agacacgggggccaagggaatcacg

SEQ ID NO: 30273 - DNA, 25 bp, Canis familiaris
agaacggctgggtggaggactactg

SEQ ID NO: 30274 - DNA, 25 bp, Canis familiaris
agaacgagggcctggacgactacat

SEQ ID NO: 30275 - DNA, 25 bp, Canis familiaris
agacttgcagggctcggaccctgcc

SEQ ID NO: 30276 - DNA, 25 bp, Canis familiaris
acctgtcagatgagtccaacccagc

SEQ ID NO: 30277 - DNA, 25 bp, Canis familiaris
actgtacagaccgcaatacccatag

SEQ ID NO: 30278 - DNA, 25 bp, Canis familiaris
acgtatgaacgctataaacccaatt

SEQ ID NO: 30279 - DNA, 25 bp, Canis familiaris
aagtggacccacacaatccaaactc

SEQ ID NO: 30280 - DNA, 25 bp, Canis familiaris
agaaggtcccaaacaacattccact

SEQ ID NO: 30281 - DNA, 25 bp, Canis familiaris
agaaaggcccaaaaacctgcacttg

SEQ ID NO: 30282 - DNA, 25 bp, Canis familiaris
agaaacagccattaaacctacattt

SEQ ID NO: 30283 - DNA, 25 bp, Canis familiaris
agacttcacctttaggcatcaacat

SEQ ID NO: 30284 - DNA, 25 bp, Canis familiaris
agacttaagcctttgagctctccag

SEQ ID NO: 30285 - DNA, 25 bp, Canis familiaris
agacttgcactggctggtggtgcgc

SEQ ID NO: 30286 - DNA, 25 bp, Canis familiaris
agactaactgacttatgtgtgcccc

SEQ ID NO: 30287 - DNA, 25 bp, Canis familiaris
agactaatctctgtcagctgggctc

SEQ ID NO: 30288 - DNA, 25 bp, Canis familiaris
agaccacaccggaagctgatgactg

SEQ ID NO: 30289 - DNA, 25 bp, Canis familiaris
agacccccaggcctggatgagtatg

SEQ ID NO: 30290 - DNA, 25 bp, Canis familiaris
agacctcactcaccactggatggtg

SEQ ID NO: 30291 - DNA, 25 bp, Canis familiaris
agacctgactgacaaacggctggaa

SEQ ID NO: 30292 - DNA, 25 bp, Canis familiaris
agaccatgggaatatcgcggctgtg

SEQ ID NO: 30293 - DNA, 25 bp, Canis familiaris
agactcagccgctgtctcgccgtgt

SEQ ID NO: 30294 - DNA, 25 bp, Canis familiaris
agacacggtgattgttcccatggtt

SEQ ID NO: 30295 - DNA, 25 bp, Canis familiaris
agactcaggcgatgtgctttatggc

SEQ ID NO: 30296 - DNA, 25 bp, Canis familiaris
agactcaggcgatgtgctttatggc

SEQ ID NO: 30297 - DNA, 25 bp, Canis familiaris
agactgcaacgagggcttcttgggt

SEQ ID NO: 30298 - DNA, 25 bp, Canis familiaris
agacctacgaggcctggttgggccg

SEQ ID NO: 30299 - DNA, 25 bp, Canis familiaris
agacctgcccatggggtttgcaggc

SEQ ID NO: 30300 - DNA, 25 bp, Canis familiaris
agaccatcactctcgaggttgagcc

SEQ ID NO: 30301 - DNA, 25 bp, Canis familiaris
agaccatcactctcgaggttgagcc

SEQ ID NO: 30302 - DNA, 25 bp, Canis familiaris
agagccatctttactgggtctactc

SEQ ID NO: 30303 - DNA, 25 bp, Canis familiaris
agaacctcctacagatgttactccc

SEQ ID NO: 30304 - DNA, 25 bp, Canis familiaris
agacctctcctctggatgttgaatc

SEQ ID NO: 30305 - DNA, 25 bp, Canis familiaris
agaccgccttctctgagtttattta

SEQ ID NO: 30306 - DNA, 25 bp, Canis familiaris
agactccattttcctggttatgcac

SEQ ID NO: 30307 - DNA, 25 bp, Canis familiaris
agaccagcttttcatcaatttgccc

SEQ ID NO: 30308 - DNA, 25 bp, Canis familiaris
agaccagctgtaagggcgttgtccc

SEQ ID NO: 30309 - DNA, 25 bp, Canis familiaris
agaccatggagccgggttagtccgc

SEQ ID NO: 30310 - DNA, 25 bp, Canis familiaris
agaacggagcggggttacacacagc

SEQ ID NO: 30311 - DNA, 25 bp, Canis familiaris
agaacgataccatagcttagcacca

SEQ ID NO: 30312 - DNA, 25 bp, Canis familiaris
agacggaaccaaagcttcagcagca

SEQ ID NO: 30313 - DNA, 25 bp, Canis familiaris
agaagccaaccattgttccaacaag

SEQ ID NO: 30314 - DNA, 25 bp, Canis familiaris
agactcacaactattctccagaaga

SEQ ID NO: 30315 - DNA, 25 bp, Canis familiaris
agactcaaacatacaacaacaaaaa

SEQ ID NO: 30316 - DNA, 25 bp, Canis familiaris
agacctatgctcaccacaacaagag

SEQ ID NO: 30317 - DNA, 25 bp, Canis familiaris
agacctcatggtatacaaaggcagg

SEQ ID NO: 30318 - DNA, 25 bp, Canis familiaris
agaattatggtttattacaggagtg

SEQ ID NO: 30319 - DNA, 25 bp, Canis familiaris
agactttgttccttttcattgctgg

SEQ ID NO: 30320 - DNA, 25 bp, Canis familiaris
agactttgttgggtttgcttctgct

SEQ ID NO: 30321 - DNA, 25 bp, Canis familiaris
agacctgagtttctgttgatttgct

SEQ ID NO: 30322 - DNA, 25 bp, Canis familiaris
agacactggcccactgttattttta

SEQ ID NO: 30323 - DNA, 25 bp, Canis familiaris
agactctaggtcaaattttatttgc

SEQ ID NO: 30324 - DNA, 25 bp, Canis familiaris
agaccgcgtgtctatttatttcttc

SEQ ID NO: 30325 - DNA, 25 bp, Canis familiaris
agaccgcggcctaataatgagtgat

SEQ ID NO: 30326 - DNA, 25 bp, Canis familiaris
agaccagcattcccactaagggatc

SEQ ID NO: 30327 - DNA, 25 bp, Canis familiaris
agacccgtcaggagatagggcatct

SEQ ID NO: 30328 - DNA, 25 bp, Canis familiaris
agacagccttagggcttgggccact

SEQ ID NO: 30329 - DNA, 25 bp, Canis familiaris
agaactttactccttgggctacata

SEQ ID NO: 30330 - DNA, 25 bp, Canis familiaris
agaagctttacaacccgtacactat

SEQ ID NO: 30331 - DNA, 25 bp, Canis familiaris
agaaattcaaatatccttcccctgg

SEQ ID NO: 30332 - DNA, 25 bp, Canis familiaris
agacaattgtagtatttttagccct

SEQ ID NO: 30333 - DNA, 25 bp, Canis familiaris
agacgtgtctgtttttctaagccat

SEQ ID NO: 30334 - DNA, 25 bp, Canis familiaris
agacggactctaatttcgcatccca

SEQ ID NO: 30335 - DNA, 25 bp, Canis familiaris
agacccacatcaacattgtggtcat

SEQ ID NO: 30336 - DNA, 25 bp, Canis familiaris
agacccacatctggtttgctttatg

SEQ ID NO: 30337 - DNA, 25 bp, Canis familiaris
agacttcagccgcttgttgttgagc

SEQ ID NO: 30338 - DNA, 25 bp, Canis familiaris
agaaatcagcctatggtttaagcct

SEQ ID NO: 30339 - DNA, 25 bp, Canis familiaris
agaaattgccaaatagtactatgac

SEQ ID NO: 30340 - DNA, 25 bp, Canis familiaris
agaaaagcagcaagtagtcgttatc

SEQ ID NO: 30341 - DNA, 25 bp, Canis familiaris
agaacaagacaactgtgccgttttg

SEQ ID NO: 30342 - DNA, 25 bp, Canis familiaris
agaaataaaactccctctctcttgt

SEQ ID NO: 30343 - DNA, 25 bp, Canis familiaris
agaaataaaactccctctctcttgt

SEQ ID NO: 30344 - DNA, 25 bp, Canis familiaris
agaaataaaactccctctctcttgt

SEQ ID NO: 30345 - DNA, 25 bp, Canis familiaris
agaccaaaacttccctgttgcaatc

SEQ ID NO: 30346 - DNA, 25 bp, Canis familiaris
agaatgtaacacttgacgcgttcaa

SEQ ID NO: 30347 - DNA, 25 bp, Canis familiaris
agaagaaaaggtgctgccccaacag

SEQ ID NO: 30348 - DNA, 25 bp, Canis familiaris
agaaataaagcagccttacccacac

SEQ ID NO: 30349 - DNA, 25 bp, Canis familiaris
agaaactgtacaagtgcttcaccga

SEQ ID NO: 30350 - DNA, 25 bp, Canis familiaris
agaaagtcattcatcgactcaccca

SEQ ID NO: 30351 - DNA, 25 bp, Canis familiaris
agacatagctattagtacactagac

SEQ ID NO: 30352 - DNA, 25 bp, Canis familiaris
agacatagccattagtgacactata

SEQ ID NO: 30353 - DNA, 25 bp, Canis familiaris
agacttgcttagctgcagcgtgtgc

SEQ ID NO: 30354 - DNA, 25 bp, Canis familiaris
agacttgcacaacggcagtgcgcca

SEQ ID NO: 30355 - DNA, 25 bp, Canis familiaris
agacatagcatcacatggcggcgga

SEQ ID NO: 30356 - DNA, 25 bp, Canis familiaris
agacaactcatcctgagctctgagg

SEQ ID NO: 30357 - DNA, 25 bp, Canis familiaris
agacagagcctgtggccaaggccaa

SEQ ID NO: 30358 - DNA, 25 bp, Canis familiaris
agaagctgccactgagtagggccca

SEQ ID NO: 30359 - DNA, 25 bp, Canis familiaris
agaacattcatctggggcccaatct

SEQ ID NO: 30360 - DNA, 25 bp, Canis familiaris
agaccatatcagataggcgccccta

SEQ ID NO: 30361 - DNA, 25 bp, Canis familiaris
agaccatttgatacacctatccctt

SEQ ID NO: 30362 - DNA, 25 bp, Canis familiaris
agaaattctttagcataccccatcg

SEQ ID NO: 30363 - DNA, 25 bp, Canis familiaris
agaacatttttctcaagtccacatg

SEQ ID NO: 30364 - DNA, 25 bp, Canis familiaris
agaaaatctttctaattgccaacaa

SEQ ID NO: 30365 - DNA, 25 bp, Canis familiaris
agaaaagactttaactgagcaatag

SEQ ID NO: 30366 - DNA, 25 bp, Canis familiaris
agaaaggccttcgtacactgtagag

SEQ ID NO: 30367 - DNA, 25 bp, Canis familiaris
agaccaggatcttgcctacactggc

SEQ ID NO: 30368 - DNA, 25 bp, Canis familiaris
agaccgaactgcccttcaaggcaaa

SEQ ID NO: 30369 - DNA, 25 bp, Canis familiaris
agaactgtaatgcccttttgtggaa

SEQ ID NO: 30370 - DNA, 25 bp, Canis familiaris
agaagcggtgaggccggttggcgag

SEQ ID NO: 30371 - DNA, 25 bp, Canis familiaris
agaacgttcgtgaggttctgcaggc

SEQ ID NO: 30372 - DNA, 25 bp, Canis familiaris
agaactgttcagtattggttggact

SEQ ID NO: 30373 - DNA, 25 bp, Canis familiaris
agacttggaaagagctggtggactg

SEQ ID NO: 30374 - DNA, 25 bp, Canis familiaris
agactgctggaactggggggtggct

SEQ ID NO: 30375 - DNA, 25 bp, Canis familiaris
agacctgtctactggggaggatgct

SEQ ID NO: 30376 - DNA, 25 bp, Canis familiaris
agacctctctcctgacagggtgatc

SEQ ID NO: 30377 - DNA, 25 bp, Canis familiaris
agacctctatgccaacacagtgttg

SEQ ID NO: 30378 - DNA, 25 bp, Canis familiaris
agacagcctgatgaccagcagtgcc

SEQ ID NO: 30379 - DNA, 25 bp, Canis familiaris
agacatcatcttggcatctgtgggc

SEQ ID NO: 30380 - DNA, 25 bp, Canis familiaris
agactcatgtgaggcatctgtggat

SEQ ID NO: 30381 - DNA, 25 bp, Canis familiaris
agactcaggaccaattgcgtctgat

SEQ ID NO: 30382 - DNA, 25 bp, Canis familiaris
agaccaggccacagtgctctgtgct

SEQ ID NO: 30383 - DNA, 25 bp, Canis familiaris
agaccagagccagatagctcctgcc

SEQ ID NO: 30384 - DNA, 25 bp, Canis familiaris
agacctgaactcttcagtctcttca

SEQ ID NO: 30385 - DNA, 25 bp, Canis familiaris
agacctgatactttggatcctgcac

SEQ ID NO: 30386 - DNA, 25 bp, Canis familiaris
agacctgaagtgttcttagtcaaac

SEQ ID NO: 30387 - DNA, 25 bp, Canis familiaris
agaaatgacagtttttatacaagta

SEQ ID NO: 30388 - DNA, 25 bp, Canis familiaris
agacacaacatcagcttattaaaaa

SEQ ID NO: 30389 - DNA, 25 bp, Canis familiaris
agacgcaggcacaactctttatacg

SEQ ID NO: 30390 - DNA, 25 bp, Canis familiaris
agacataggcacaattcgtttacat

SEQ ID NO: 30391 - DNA, 25 bp, Canis familiaris
agaccagagctcgattcgatgtttt

SEQ ID NO: 30392 - DNA, 25 bp, Canis familiaris
agaccatccatctataccagtttta

SEQ ID NO: 30393 - DNA, 25 bp, Canis familiaris
agacttgctgatgaatctcctttat

SEQ ID NO: 30394 - DNA, 25 bp, Canis familiaris
agacctgaaaatactctctgctttt

SEQ ID NO: 30395 - DNA, 25 bp, Canis familiaris
agaccagagctacatatctccttat

SEQ ID NO: 30396 - DNA, 25 bp, Canis familiaris
agacagcagtgcagtggtctccttc

SEQ ID NO: 30397 - DNA, 25 bp, Canis familiaris
agaatctgcagcagtaccatcccac

SEQ ID NO: 30398 - DNA, 25 bp, Canis familiaris
agaacgcagagaatccctacaaggt

SEQ ID NO: 30399 - DNA, 25 bp, Canis familiaris
agaaccatggtcacacaacggagtt

SEQ ID NO: 30400 - DNA, 25 bp, Canis familiaris
agacaccaggtctccaggtgtgggt

SEQ ID NO: 30401 - DNA, 25 bp, Canis familiaris
agacccatggactcctggtctgagc

SEQ ID NO: 30402 - DNA, 25 bp, Canis familiaris
agacccatggactcctggtctgagc

SEQ ID NO: 30403 - DNA, 25 bp, Canis familiaris
agacccatggactcctggtctgagc

SEQ ID NO: 30404 - DNA, 25 bp, Canis familiaris
agacactgggactctttgtcatgca

SEQ ID NO: 30405 - DNA, 25 bp, Canis familiaris
agacaggggagctggtcttcgatcc

SEQ ID NO: 30406 - DNA, 25 bp, Canis familiaris
agactcggaggctgactcctaatcc

SEQ ID NO: 30407 - DNA, 25 bp, Canis familiaris
agactgtggcatgcaaactcccacc

SEQ ID NO: 30408 - DNA, 25 bp, Canis familiaris
agacattggattcacatctctgccc

SEQ ID NO: 30409 - DNA, 25 bp, Canis familiaris
agacgaggtcaggagcacttcctcc

SEQ ID NO: 30410 - DNA, 25 bp, Canis familiaris
agaccaggggcatcagtctctgccc

SEQ ID NO: 30411 - DNA, 25 bp, Canis familiaris
agacgccagggagtcatgtcctccc

SEQ ID NO: 30412 - DNA, 25 bp, Canis familiaris
agacccggctgagtgcagacatggc

SEQ ID NO: 30413 - DNA, 25 bp, Canis familiaris
agaccctggagaagcagcacagcct

SEQ ID NO: 30414 - DNA, 25 bp, Canis familiaris
agacccgagacaaatgtgagccatc

SEQ ID NO: 30415 - DNA, 25 bp, Canis familiaris
agacggaggaccagtaccagctgtg

SEQ ID NO: 30416 - DNA, 25 bp, Canis familiaris
agacggcaggaaactaacctggtgt

SEQ ID NO: 30417 - DNA, 25 bp, Canis familiaris
agacaaaataaattccacctggatg

SEQ ID NO: 30418 - DNA, 25 bp, Canis familiaris
agaaagagtcaactctccacctggt

SEQ ID NO: 30419 - DNA, 25 bp, Canis familiaris
agaacaggtcaatcagcccttggac

SEQ ID NO: 30420 - DNA, 25 bp, Canis familiaris
agaaagtgtagacagccacccaaca

SEQ ID NO: 30421 - DNA, 25 bp, Canis familiaris
agacaagtagaagccagcacccagc

SEQ ID NO: 30422 - DNA, 25 bp, Canis familiaris
agacagactgaggaggcttgaaccc

SEQ ID NO: 30423 - DNA, 25 bp, Canis familiaris
agacagaggaaactggctaccccgg

SEQ ID NO: 30424 - DNA, 25 bp, Canis familiaris
agaaggggaagccaggaccccagcg

SEQ ID NO: 30425 - DNA, 25 bp, Canis familiaris
agaagtggaaccctggggccgatga

SEQ ID NO: 30426 - DNA, 25 bp, Canis familiaris
agaagtggacccaggctggtgccac

SEQ ID NO: 30427 - DNA, 25 bp, Canis familiaris
agaaagtggccacgggcaagctgcc

SEQ ID NO: 30428 - DNA, 25 bp, Canis familiaris
agaacagcgggatggaggattgaga

SEQ ID NO: 30429 - DNA, 25 bp, Canis familiaris
agaacctgatcgtgatgagcgttta

SEQ ID NO: 30430 - DNA, 25 bp, Canis familiaris
agaaaccatcaatggtggcttccac

SEQ ID NO: 30431 - DNA, 25 bp, Canis familiaris
agaaacttagtaaagagcttcctag

SEQ ID NO: 30432 - DNA, 25 bp, Canis familiaris
agacaacccagaaaagcgcttccta

SEQ ID NO: 30433 - DNA, 25 bp, Canis familiaris
agacaactctcaattaatcccctaa

SEQ ID NO: 30434 - DNA, 25 bp, Canis familiaris
agacatactatgtttaatcttacaa

SEQ ID NO: 30435 - DNA, 25 bp, Canis familiaris
agacatatttgcttatacctctgcc

SEQ ID NO: 30436 - DNA, 25 bp, Canis familiaris
agaaattgcctgttggcctcatgca

SEQ ID NO: 30437 - DNA, 25 bp, Canis familiaris
agaagctctgggttatcactgatgc

SEQ ID NO: 30438 - DNA, 25 bp, Canis familiaris
agaacgtggaatctactatgtagga

SEQ ID NO: 30439 - DNA, 25 bp, Canis familiaris
agaaagtgtgattttatgatatgta

SEQ ID NO: 30440 - DNA, 25 bp, Canis familiaris
agactggtgcttttgctaatgtgta

SEQ ID NO: 30441 - DNA, 25 bp, Canis familiaris
agacttgtgctttggctgaacgtgc

SEQ ID NO: 30442 - DNA, 25 bp, Canis familiaris
agacattatcttggcagcgaatccc

SEQ ID NO: 30443 - DNA, 25 bp, Canis familiaris
agactatacttggcaggcgaatccc

SEQ ID NO: 30444 - DNA, 25 bp, Canis familiaris
agacattccttttgtgtagtgccct

SEQ ID NO: 30445 - DNA, 25 bp, Canis familiaris
agaccccatttatgagagtgccctc

SEQ ID NO: 30446 - DNA, 25 bp, Canis familiaris
agacccacttattctggcagtttct

SEQ ID NO: 30447 - DNA, 25 bp, Canis familiaris
agaccctagtattcaggactctgta

SEQ ID NO: 30448 - DNA, 25 bp, Canis familiaris
agacctggtgtcttctggacatctt

SEQ ID NO: 30449 - DNA, 25 bp, Canis familiaris
agacctgtttctttccaacatgtga

SEQ ID NO: 30450 - DNA, 25 bp, Canis familiaris
agaacaacgttactccagacatgga

SEQ ID NO: 30451 - DNA, 25 bp, Canis familiaris
agaaagattgaccgcccaacatgta

SEQ ID NO: 30452 - DNA, 25 bp, Canis familiaris
agacaagttgtctgagagcccagtt

SEQ ID NO: 30453 - DNA, 25 bp, Canis familiaris
ctgaaaaagtactcccacagttgag

SEQ ID NO: 30454 - DNA, 25 bp, Canis familiaris
agaagaaagttctcgccaccaaagt

SEQ ID NO: 30455 - DNA, 25 bp, Canis familiaris
agaagaaagtttagccatcttccgg

SEQ ID NO: 30456 - DNA, 25 bp, Canis familiaris
agaaacatagcgctaccttggggga

SEQ ID NO: 30457 - DNA, 25 bp, Canis familiaris
agaaaacagaggcacctgcatggct

SEQ ID NO: 30458 - DNA, 25 bp, Canis familiaris
agacgaaagagccctcactgctctg

SEQ ID NO: 30459 - DNA, 25 bp, Canis familiaris
agacccagaacttctcatctgtgtg

SEQ ID NO: 30460 - DNA, 25 bp, Canis familiaris
agacacacagagactacgacttatg

SEQ ID NO: 30461 - DNA, 25 bp, Canis familiaris
agacaccatggtgcatctgactgct

SEQ ID NO: 30462 - DNA, 25 bp, Canis familiaris
agaatccacatatgtctgactccaa

SEQ ID NO: 30463 - DNA, 25 bp, Canis familiaris
agacataccatatgattgctctcat

SEQ ID NO: 30464 - DNA, 25 bp, Canis familiaris
agactacatatgtacaattccatgt

SEQ ID NO: 30465 - DNA, 25 bp, Canis familiaris
agacttcatcaaaccattgccatgg

SEQ ID NO: 30466 - DNA, 25 bp, Canis familiaris
agaaatgtcagttgctgcattcctg

SEQ ID NO: 30467 - DNA, 25 bp, Canis familiaris
agaaatccagtatgcaccacagttg

SEQ ID NO: 30468 - DNA, 25 bp, Canis familiaris
agaagagccgggagcgactgatcag

SEQ ID NO: 30469 - DNA, 25 bp, Canis familiaris
agaaagcacgcgagaggaatgagat

SEQ ID NO: 30470 - DNA, 25 bp, Canis familiaris
agaatcacccgcaggcggcaattcg

SEQ ID NO: 30471 - DNA, 25 bp, Canis familiaris
agactacacgacgggcggcgagtcg

SEQ ID NO: 30472 - DNA, 25 bp, Canis familiaris
agactcaatcgtcctacagtcggtc

SEQ ID NO: 30473 - DNA, 25 bp, Canis familiaris
agactcgagcttctagacagggacc

SEQ ID NO: 30474 - DNA, 25 bp, Canis familiaris
agacgaggctactttgacagagcaa

SEQ ID NO: 30475 - DNA, 25 bp, Canis familiaris
agacggtctgtttggacgacacaac

SEQ ID NO: 30476 - DNA, 25 bp, Canis familiaris
acgggtcatttacactatcccacgc

SEQ ID NO: 30477 - DNA, 25 bp, Canis familiaris
agcggtggttttcacgacacctgtg

SEQ ID NO: 30478 - DNA, 25 bp, Canis familiaris
acaacggttaatttcgagactcgct

SEQ ID NO: 30479 - DNA, 25 bp, Canis familiaris
aaatcaggcttagacacctaccgtg

SEQ ID NO: 30480 - DNA, 25 bp, Canis familiaris
agaacacggtgaggaacccagccct

SEQ ID NO: 30481 - DNA, 25 bp, Canis familiaris
agaaattggccaaacaccacacctt

SEQ ID NO: 30482 - DNA, 25 bp, Canis familiaris
agaaagtgtcctggacaccccagct

SEQ ID NO: 30483 - DNA, 25 bp, Canis familiaris
agaaaggatctcgaacacccatcat

SEQ ID NO: 30484 - DNA, 25 bp, Canis familiaris
agaacttcatctggcaccaacgact

SEQ ID NO: 30485 - DNA, 25 bp, Canis familiaris
agaaaactctgttctcaactcactt

SEQ ID NO: 30486 - DNA, 25 bp, Canis familiaris
agaaaacctgaagatggctgcatat

SEQ ID NO: 30487 - DNA, 25 bp, Canis familiaris
agaagaaccaccagagactcaaaac

SEQ ID NO: 30488 - DNA, 25 bp, Canis familiaris
agaagaaacccaagagactctaaca

SEQ ID NO: 30489 - DNA, 25 bp, Canis familiaris
agacaggtaatcgcgaaccatatac

SEQ ID NO: 30490 - DNA, 25 bp, Canis familiaris
agcaagggaggcgcgaaccaagacg

SEQ ID NO: 30491 - DNA, 25 bp, Canis familiaris
agacaaggggatgcagaactgagag

SEQ ID NO: 30492 - DNA, 25 bp, Canis familiaris
agaacagagacgtaaggacatggcg

SEQ ID NO: 30493 - DNA, 25 bp, Canis familiaris
agaaacagactcttcagtatagtga

SEQ ID NO: 30494 - DNA, 25 bp, Canis familiaris
agacccaggtggtcagagtcagcgc

SEQ ID NO: 30495 - DNA, 25 bp, Canis familiaris
agaccccgctgttgtgattcagctc

SEQ ID NO: 30496 - DNA, 25 bp, Canis familiaris
agaccccagctgtctggagtggacc

SEQ ID NO: 30497 - DNA, 25 bp, Canis familiaris
agaacctagtgccttactggtctcc

SEQ ID NO: 30498 - DNA, 25 bp, Canis familiaris
agacacccaggccatgaaggagatg

SEQ ID NO: 30499 - DNA, 25 bp, Canis familiaris
agactcacctgggctcaaggttggc

SEQ ID NO: 30500 - DNA, 25 bp, Canis familiaris
agaacccggagcgggtgtgggcctg

SEQ ID NO: 30501 - DNA, 25 bp, Canis familiaris
agaaccctgccctcttggagaggga

SEQ ID NO: 30502 - DNA, 25 bp, Canis familiaris
agaaacggactcacaggaaaggcga

SEQ ID NO: 30503 - DNA, 25 bp, Canis familiaris
aaatacggaccatcacggaggaggg

SEQ ID NO: 30504 - DNA, 25 bp, Canis familiaris
agaacacggacgagacctactgcat

SEQ ID NO: 30505 - DNA, 25 bp, Canis familiaris
agaagccagaacctcagacagtagc

SEQ ID NO: 30506 - DNA, 25 bp, Canis familiaris
agacccagcaggcctaggcagaagg

SEQ ID NO: 30507 - DNA, 25 bp, Canis familiaris
agactcgcctggctgaggagagagc

SEQ ID NO: 30508 - DNA, 25 bp, Canis familiaris
agacacgtctggtacggcgagagca

SEQ ID NO: 30509 - DNA, 25 bp, Canis familiaris
agaacccagtgatctggccgaaccc

SEQ ID NO: 30510 - DNA, 25 bp, Canis familiaris
agaacacacaaatctagggagacta

SEQ ID NO: 30511 - DNA, 25 bp, Canis familiaris
agaagaactaaactcgggcagccca

SEQ ID NO: 30512 - DNA, 25 bp, Canis familiaris
agacaccccaaactcgggtgaccat

SEQ ID NO: 30513 - DNA, 25 bp, Canis familiaris
agacagcgcaccaacagtggcggag

SEQ ID NO: 30514 - DNA, 25 bp, Canis familiaris
agcaccacacatcagctgggagggt

SEQ ID NO: 30515 - DNA, 25 bp, Canis familiaris
agacatgtccatcagcatgcagatg

SEQ ID NO: 30516 - DNA, 25 bp, Canis familiaris
agcaatgtactccagctgcaacatg

SEQ ID NO: 30517 - DNA, 25 bp, Canis familiaris
agaacatcatccctgcatccactgg

SEQ ID NO: 30518 - DNA, 25 bp, Canis familiaris
agaaaattcttcttcctggcaggta

SEQ ID NO: 30519 - DNA, 25 bp, Canis familiaris
agaaatctttccttcatcttgcagg

SEQ ID NO: 30520 - DNA, 25 bp, Canis familiaris
agaaagccttctttgtctctggata

SEQ ID NO: 30521 - DNA, 25 bp, Canis familiaris
agaaacctacatttcatgtctttaa

SEQ ID NO: 30522 - DNA, 25 bp, Canis familiaris
agacaaactgaatctgcgatctcaa

SEQ ID NO: 30523 - DNA, 25 bp, Canis familiaris
agaaaatctaatatcgcagcataac

SEQ ID NO: 30524 - DNA, 25 bp, Canis familiaris
agaaagatgcatctcttctagaatt

SEQ ID NO: 30525 - DNA, 25 bp, Canis familiaris
agaaagatgcccctttggacgtgtt

SEQ ID NO: 30526 - DNA, 25 bp, Canis familiaris
agaaatatcccctgttgaccatttt

SEQ ID NO: 30527 - DNA, 25 bp, Canis familiaris
agaaagaccccgatggcctctttct

SEQ ID NO: 30528 - DNA, 25 bp, Canis familiaris
agaaaagtcctgtgtggccctggac

SEQ ID NO: 30529 - DNA, 25 bp, Canis familiaris
agaacaagttctcggggcttcttag

SEQ ID NO: 30530 - DNA, 25 bp, Canis familiaris
agaaaatgtttggccgtggctcccg

SEQ ID NO: 30531 - DNA, 25 bp, Canis familiaris
agaaaggaagtggctgcctgcctca

SEQ ID NO: 30532 - DNA, 25 bp, Canis familiaris
agaaagtgaggaggcccttccaacg

SEQ ID NO: 30533 - DNA, 25 bp, Canis familiaris
agaaatgatgcagaactccccagac

SEQ ID NO: 30534 - DNA, 25 bp, Canis familiaris
agaaagataccaacctacagagccc

SEQ ID NO: 30535 - DNA, 25 bp, Canis familiaris
agaaattagccaaggctcaccctcc

SEQ ID NO: 30536 - DNA, 25 bp, Canis familiaris
agaaatgaagcctaggacccctgac

SEQ ID NO: 30537 - DNA, 25 bp, Canis familiaris
agacagctgaaagatgggcccactc

SEQ ID NO: 30538 - DNA, 25 bp, Canis familiaris
agacattaacaggctggtccactcc

SEQ ID NO: 30539 - DNA, 25 bp, Canis familiaris
agacactgacaagctcattaacttc

SEQ ID NO: 30540 - DNA, 25 bp, Canis familiaris
agacactataaccacgctgtgcctt

SEQ ID NO: 30541 - DNA, 25 bp, Canis familiaris
agacaaaagactccgtctctttcca

SEQ ID NO: 30542 - DNA, 25 bp, Canis familiaris
agacaaagcaaccaagaccttgtaa

SEQ ID NO: 30543 - DNA, 25 bp, Canis familiaris
agaaaaagacaaacaccatatgatt

SEQ ID NO: 30544 - DNA, 25 bp, Canis familiaris
agaaaaaaccagtatgcatagccat

SEQ ID NO: 30545 - DNA, 25 bp, Canis familiaris
agaacagagaactaccagatgatcc

SEQ ID NO: 30546 - DNA, 25 bp, Canis familiaris
agaacgaagagatcctgaattccct

SEQ ID NO: 30547 - DNA, 25 bp, Canis familiaris
agaaagaaagtcgcgccatatccct

SEQ ID NO: 30548 - DNA, 25 bp, Canis familiaris
agaataaaggtcatcccgttcctca

SEQ ID NO: 30549 - DNA, 25 bp, Canis familiaris
agaaaaagccaaacccgcttctctg

SEQ ID NO: 30550 - DNA, 25 bp, Canis familiaris
agaaaaagccaaacccgcttctctg

SEQ ID NO: 30551 - DNA, 25 bp, Canis familiaris
agaaaaagccaaacccgcttctctg

SEQ ID NO: 30552 - DNA, 25 bp, Canis familiaris
agaaaaagccaaacccgcttctctg

SEQ ID NO: 30553 - DNA, 25 bp, Canis familiaris
agaaaaagccaaacccgcttctctg

SEQ ID NO: 30554 - DNA, 25 bp, Canis familiaris
agaaaaagccaaacccgcttctctg

SEQ ID NO: 30555 - DNA, 25 bp, Canis familiaris
agaacaatagtatttcccctctgtc

SEQ ID NO: 30556 - DNA, 25 bp, Canis familiaris
agacgggagttgagctcctctcgta

SEQ ID NO: 30557 - DNA, 25 bp, Canis familiaris
agaagggaatccagctcccgagtac

SEQ ID NO: 30558 - DNA, 25 bp, Canis familiaris
agaagaggagctatttcccgagtcc

SEQ ID NO: 30559 - DNA, 25 bp, Canis familiaris
agaaagtggtcttttccagccaccg

SEQ ID NO: 30560 - DNA, 25 bp, Canis familiaris
aactcaagataatttgctgcccgtg

SEQ ID NO: 30561 - DNA, 25 bp, Canis familiaris
agactgagattcacatacctacccc

SEQ ID NO: 30562 - DNA, 25 bp, Canis familiaris
agacgggtgcatttacccagctacc

SEQ ID NO: 30563 - DNA, 25 bp, Canis familiaris
agcagagtactgattacccctgact

SEQ ID NO: 30564 - DNA, 25 bp, Canis familiaris
agacgtacaagtgagcgcgggcagc

SEQ ID NO: 30565 - DNA, 25 bp, Canis familiaris
agaagtacaacgtgcggtccatgcc

SEQ ID NO: 30566 - DNA, 25 bp, Canis familiaris
agacgtgaagccggtggtgtccagc

SEQ ID NO: 30567 - DNA, 25 bp, Canis familiaris
agacggcattgccttgtggtacacc

SEQ ID NO: 30568 - DNA, 25 bp, Canis familiaris
agacaagtatgcttttggtcaaggc

SEQ ID NO: 30569 - DNA, 25 bp, Canis familiaris
agacaaatagcacatccctcagggc

SEQ ID NO: 30570 - DNA, 25 bp, Canis familiaris
agactgaaagagcacctctccgtgt

SEQ ID NO: 30571 - DNA, 25 bp, Canis familiaris
agaatgaaaggccctccatcggctt

SEQ ID NO: 30572 - DNA, 25 bp, Canis familiaris
agaatgcccagggcttcgagtggct

SEQ ID NO: 30573 - DNA, 25 bp, Canis familiaris
agaagcaacagcggaaggagcggct

SEQ ID NO: 30574 - DNA, 25 bp, Canis familiaris
agacgcggctgcagaaccagcagac

SEQ ID NO: 30575 - DNA, 25 bp, Canis familiaris
agacggggctgagcagcgagcagac

SEQ ID NO: 30576 - DNA, 25 bp, Canis familiaris
agacagtggctggcttcggaagagt

SEQ ID NO: 30577 - DNA, 25 bp, Canis familiaris
agacgatgtcacgtattgccaagag

SEQ ID NO: 30578 - DNA, 25 bp, Canis familiaris
agacggtactgttagccagggtcca

SEQ ID NO: 30579 - DNA, 25 bp, Canis familiaris
gcgaaagttcttgacggggctcgaa

SEQ ID NO: 30580 - DNA, 25 bp, Canis familiaris
agaacgtgtttcccaggggcatcta

SEQ ID NO: 30581 - DNA, 25 bp, Canis familiaris
agactcgtgtcttccaagagagcga

SEQ ID NO: 30582 - DNA, 25 bp, Canis familiaris
agacttgtcatcactaatcaatcta

SEQ ID NO: 30583 - DNA, 25 bp, Canis familiaris
agacagtatcttcctcgacaatatt

SEQ ID NO: 30584 - DNA, 25 bp, Canis familiaris
agacaatttcagctagccacatatt

SEQ ID NO: 30585 - DNA, 25 bp, Canis familiaris
agaagagtaaggaaacacagtttgt

SEQ ID NO: 30586 - DNA, 25 bp, Canis familiaris
agacgagctcttcaaaatgccttag

SEQ ID NO: 30587 - DNA, 25 bp, Canis familiaris
agacagacaccacaatacagcctta

SEQ ID NO: 30588 - DNA, 25 bp, Canis familiaris
agacaacagctgtcccaacagcctt

SEQ ID NO: 30589 - DNA, 25 bp, Canis familiaris
agacaagcagcagctgcccaagccc

SEQ ID NO: 30590 - DNA, 25 bp, Canis familiaris
agacaccatgcagattcaaaccctc

SEQ ID NO: 30591 - DNA, 25 bp, Canis familiaris
agacactcatgacttgttaaccgta

SEQ ID NO: 30592 - DNA, 25 bp, Canis familiaris
agaactctatttgtatcagaactac

SEQ ID NO: 30593 - DNA, 25 bp, Canis familiaris
agacactgctgtatttagaaatttc

SEQ ID NO: 30594 - DNA, 25 bp, Canis familiaris
agacactgctggatttagaaattct

SEQ ID NO: 30595 - DNA, 25 bp, Canis familiaris
agacatcccgggtctacaagttctg

SEQ ID NO: 30596 - DNA, 25 bp, Canis familiaris
agactccacttggactacattgggc

SEQ ID NO: 30597 - DNA, 25 bp, Canis familiaris
agaatccacttgggtcctcaggttt

SEQ ID NO: 30598 - DNA, 25 bp, Canis familiaris
agaactacaggaagcccttggcact

SEQ ID NO: 30599 - DNA, 25 bp, Canis familiaris
agaacgagcaggaggccgtgtgcac

SEQ ID NO: 30600 - DNA, 25 bp, Canis familiaris
agaacatggcagctaccaaggtagc

SEQ ID NO: 30601 - DNA, 25 bp, Canis familiaris
agaacttgcagggctcctgggtaga

SEQ ID NO: 30602 - DNA, 25 bp, Canis familiaris
agaaattgcatcactcacattttaa

SEQ ID NO: 30603 - DNA, 25 bp, Canis familiaris
agacagtttctgttacttgtaatta

SEQ ID NO: 30604 - DNA, 25 bp, Canis familiaris
agacactgttctaatcacttgggat

SEQ ID NO: 30605 - DNA, 25 bp, Canis familiaris
agaacacttaattatcctggagctt

SEQ ID NO: 30606 - DNA, 25 bp, Canis familiaris
agaaagctgtatttccacccagttc

SEQ ID NO: 30607 - DNA, 25 bp, Canis familiaris
agaaagtcttcaatcacacaacgtg

SEQ ID NO: 30608 - DNA, 25 bp, Canis familiaris
agaagagttatcacccatttgtaca

SEQ ID NO: 30609 - DNA, 25 bp, Canis familiaris
agaaggagatttacccaatccccag

SEQ ID NO: 30610 - DNA, 25 bp, Canis familiaris
agaagcgagtttcaccagtgggcct

SEQ ID NO: 30611 - DNA, 25 bp, Canis familiaris
agaagtataatctttgccagctgga

SEQ ID NO: 30612 - DNA, 25 bp, Canis familiaris
agactgctgaaaagctggcccgtga

SEQ ID NO: 30613 - DNA, 25 bp, Canis familiaris
agacttgagaaacatgcccgcattg

SEQ ID NO: 30614 - DNA, 25 bp, Canis familiaris
agactctggaagccaatgcaacggc

SEQ ID NO: 30615 - DNA, 25 bp, Canis familiaris
agactctaagaccaacggaggcccg

SEQ ID NO: 30616 - DNA, 25 bp, Canis familiaris
agaatcatagccaccacggagggcc

SEQ ID NO: 30617 - DNA, 25 bp, Canis familiaris
agaatctggtaccgccggtagtgcc

SEQ ID NO: 30618 - DNA, 25 bp, Canis familiaris
agaacggtgaccgcggtgagactgg

SEQ ID NO: 30619 - DNA, 25 bp, Canis familiaris
agaacgggaaggcccaagaggctgg

SEQ ID NO: 30620 - DNA, 25 bp, Canis familiaris
agaacctgcgaatttccaagaggtg

SEQ ID NO: 30621 - DNA, 25 bp, Canis familiaris
agaaccgagaagcgccttggagtct

SEQ ID NO: 30622 - DNA, 25 bp, Canis familiaris
aaaccagaagggcgcggacgtgccg

SEQ ID NO: 30623 - DNA, 25 bp, Canis familiaris
agaaccagccggccgtgaagacggc

SEQ ID NO: 30624 - DNA, 25 bp, Canis familiaris
agacaccagtaggcagaggaagagc

SEQ ID NO: 30625 - DNA, 25 bp, Canis familiaris
agaagcctgccaccaagggaggaaa

SEQ ID NO: 30626 - DNA, 25 bp, Canis familiaris
agaacacgcgcaccaacgagaaggt

SEQ ID NO: 30627 - DNA, 25 bp, Canis familiaris
agaacaggcagtctgacggccgtac

SEQ ID NO: 30628 - DNA, 25 bp, Canis familiaris
agaacacgtgctgctgaggagccgt

SEQ ID NO: 30629 - DNA, 25 bp, Canis familiaris
agacattcggccgtgtttgccgtgc

SEQ ID NO: 30630 - DNA, 25 bp, Canis familiaris
agacagatttccttggttgcctact

SEQ ID NO: 30631 - DNA, 25 bp, Canis familiaris
agacaggtatgcgaaggttgcccct

SEQ ID NO: 30632 - DNA, 25 bp, Canis familiaris
agactgagtctgccagggtttaccc

SEQ ID NO: 30633 - DNA, 25 bp, Canis familiaris
agcactttctgggtgagtgttacca

SEQ ID NO: 30634 - DNA, 25 bp, Canis familiaris
agacttctgggcatggttccttaac

SEQ ID NO: 30635 - DNA, 25 bp, Canis familiaris
agacatccgtgtcatttttcttttc

SEQ ID NO: 30636 - DNA, 25 bp, Canis familiaris
agactcactttagatattttgcttt

SEQ ID NO: 30637 - DNA, 25 bp, Canis familiaris
agactgcagttctcaacttttggtt

SEQ ID NO: 30638 - DNA, 25 bp, Canis familiaris
agactgcattttctcacatctgctt

SEQ ID NO: 30639 - DNA, 25 bp, Canis familiaris
agactgttatgtttctattgctttt

SEQ ID NO: 30640 - DNA, 25 bp, Canis familiaris
agactgttctttgtctcgagtgtct

SEQ ID NO: 30641 - DNA, 25 bp, Canis familiaris
agactgtctttcacagtgtggagtt

SEQ ID NO: 30642 - DNA, 25 bp, Canis familiaris
agacttttatcttcctgtaagcttt

SEQ ID NO: 30643 - DNA, 25 bp, Canis familiaris
agacattataatcacctggacagct

SEQ ID NO: 30644 - DNA, 25 bp, Canis familiaris
agactctctcatttactctggatct

SEQ ID NO: 30645 - DNA, 25 bp, Canis familiaris
agacatctgttcttctttggtttgg

SEQ ID NO: 30646 - DNA, 25 bp, Canis familiaris
agactctgtgctttgatttcattaa

SEQ ID NO: 30647 - DNA, 25 bp, Canis familiaris
agacatccgtttcttcatgatacat

SEQ ID NO: 30648 - DNA, 25 bp, Canis familiaris
agaacacgatggttcctctggaatg

SEQ ID NO: 30649 - DNA, 25 bp, Canis familiaris
agaattcttgactcttgctgtggtg

SEQ ID NO: 30650 - DNA, 25 bp, Canis familiaris
agaatttctatcagccttggggcct

SEQ ID NO: 30651 - DNA, 25 bp, Canis familiaris
agaacaggcttcatgcccaggagcc

SEQ ID NO: 30652 - DNA, 25 bp, Canis familiaris
agacaaggtgacaagaagcaggcgt

SEQ ID NO: 30653 - DNA, 25 bp, Canis familiaris
agaaagggactatcagtggcgccac

SEQ ID NO: 30654 - DNA, 25 bp, Canis familiaris
agaaaaacctaccagggctcagcac

SEQ ID NO: 30655 - DNA, 25 bp, Canis familiaris
agaagtaccactgcaagaaccgccg

SEQ ID NO: 30656 - DNA, 25 bp, Canis familiaris
agaagtcttacccggaggaggctgg

SEQ ID NO: 30657 - DNA, 25 bp, Canis familiaris
agaagaccttctccgagaggacgct

SEQ ID NO: 30658 - DNA, 25 bp, Canis familiaris
agaaacacagacaggggaggcctgt

SEQ ID NO: 30659 - DNA, 25 bp, Canis familiaris
agctggaaaacaagcgggcacccct

SEQ ID NO: 30660 - DNA, 25 bp, Canis familiaris
agctgagaaactatcgtaccctaca

SEQ ID NO: 30661 - DNA, 25 bp, Canis familiaris
agctgataacccagagtaatcctta

SEQ ID NO: 30662 - DNA, 25 bp, Canis familiaris
agaaagacccctagacagatcctct

SEQ ID NO: 30663 - DNA, 25 bp, Canis familiaris
agaattgcacacattcaaaggcctt

SEQ ID NO: 30664 - DNA, 25 bp, Canis familiaris
agacagtgagacatctttcgtgccc

SEQ ID NO: 30665 - DNA, 25 bp, Canis familiaris
agacactgtgaccctgtctagttcc

SEQ ID NO: 30666 - DNA, 25 bp, Canis familiaris
agaacttggccccaatatgtttctc

SEQ ID NO: 30667 - DNA, 25 bp, Canis familiaris
agaagttcagctcctcaaagttcat

SEQ ID NO: 30668 - DNA, 25 bp, Canis familiaris
agaagattcagcagctcacagccct

SEQ ID NO: 30669 - DNA, 25 bp, Canis familiaris
agacagagtagcagtggtatccatg

SEQ ID NO: 30670 - DNA, 25 bp, Canis familiaris
agacatactggcaggcgaatccctt

SEQ ID NO: 30671 - DNA, 25 bp, Canis familiaris
agacatactggcaggcgaatccctt

SEQ ID NO: 30672 - DNA, 25 bp, Canis familiaris
agacatactggcaggcgaatccctt

SEQ ID NO: 30673 - DNA, 25 bp, Canis familiaris
agacatatctggccaggcgaatccc

SEQ ID NO: 30674 - DNA, 25 bp, Canis familiaris
agacatgatctcatcagagccactc

SEQ ID NO: 30675 - DNA, 25 bp, Canis familiaris
agaatgcgtatttggccgatgcggc

SEQ ID NO: 30676 - DNA, 25 bp, Canis familiaris
agaatgcgtatttggccgatgcggc

SEQ ID NO: 30677 - DNA, 25 bp, Canis familiaris
agaatggttcgggcctaggcggagc

SEQ ID NO: 30678 - DNA, 25 bp, Canis familiaris
agaatgcgcatttggacctgggggt

SEQ ID NO: 30679 - DNA, 25 bp, Canis familiaris
agaagcagcttctgcctttgtgggc

SEQ ID NO: 30680 - DNA, 25 bp, Canis familiaris
agacagcctcctggtatttttgctc

SEQ ID NO: 30681 - DNA, 25 bp, Canis familiaris
agacactgccagcagtatttccctc

SEQ ID NO: 30682 - DNA, 25 bp, Canis familiaris
agccagtgctgacagtaaacccgct

SEQ ID NO: 30683 - DNA, 25 bp, Canis familiaris
agccatggcaaggcctagaacccgc

SEQ ID NO: 30684 - DNA, 25 bp, Canis familiaris
agaaggccaggttgagaaccctgcc

SEQ ID NO: 30685 - DNA, 25 bp, Canis familiaris
agaagctcaatttcgaagaccccac

SEQ ID NO: 30686 - DNA, 25 bp, Canis familiaris
agacagcggtcgtgttatctaccac

SEQ ID NO: 30687 - DNA, 25 bp, Canis familiaris
agaacaagtgccctattctgaaccc

SEQ ID NO: 30688 - DNA, 25 bp, Canis familiaris
agaatcaagcccccacattgggctc

SEQ ID NO: 30689 - DNA, 25 bp, Canis familiaris
agaagcggctccccaagggagcccg

SEQ ID NO: 30690 - DNA, 25 bp, Canis familiaris
gaagagggctggtcgacagcgcagc

SEQ ID NO: 30691 - DNA, 25 bp, Canis familiaris
agacagggagcccggatgctagact

SEQ ID NO: 30692 - DNA, 25 bp, Canis familiaris
agaagggtccgtcttagtcatgtgc

SEQ ID NO: 30693 - DNA, 25 bp, Canis familiaris
agaaggtgccacgtgactaacctgg

SEQ ID NO: 30694 - DNA, 25 bp, Canis familiaris
agaacccccatgtaaagcatcagtg

SEQ ID NO: 30695 - DNA, 25 bp, Canis familiaris
agaactgccccttaaagtcattcat

SEQ ID NO: 30696 - DNA, 25 bp, Canis familiaris
agaaccccctaatgcttgattgttt

SEQ ID NO: 30697 - DNA, 25 bp, Canis familiaris
agacacccatggaaaggcttatttt

SEQ ID NO: 30698 - DNA, 25 bp, Canis familiaris
agacaatactgtcaaggcttatccc

SEQ ID NO: 30699 - DNA, 25 bp, Canis familiaris
agaaatcaatccaacagccttctcc

SEQ ID NO: 30700 - DNA, 25 bp, Canis familiaris
agacacatctaccaattgctcttct

SEQ ID NO: 30701 - DNA, 25 bp, Canis familiaris
agacagcctactaatggcctcgctt

SEQ ID NO: 30702 - DNA, 25 bp, Canis familiaris
agacagccatcgttactgtctcctc

SEQ ID NO: 30703 - DNA, 25 bp, Canis familiaris
agacagcctcatcatggtgtgctcc

SEQ ID NO: 30704 - DNA, 25 bp, Canis familiaris
agacatcttctgtatatgcctctca

SEQ ID NO: 30705 - DNA, 25 bp, Canis familiaris
agacacttttattgtatctctgtaa

SEQ ID NO: 30706 - DNA, 25 bp, Canis familiaris
agaacttcccatcgtgtttttagca

SEQ ID NO: 30707 - DNA, 25 bp, Canis familiaris
agaaattcaactctgttccctacat

SEQ ID NO: 30708 - DNA, 25 bp, Canis familiaris
aaatcctaaggagattccctactga

SEQ ID NO: 30709 - DNA, 25 bp, Canis familiaris
agaatcccaagggttgttcctggcg

SEQ ID NO: 30710 - DNA, 25 bp, Canis familiaris
aaatcctggtggagggtgcctgggt

SEQ ID NO: 30711 - DNA, 25 bp, Canis familiaris
agaatcacgatgggtggggggaggg

SEQ ID NO: 30712 - DNA, 25 bp, Canis familiaris
agaaccagggtgacggcggctgggg

SEQ ID NO: 30713 - DNA, 25 bp, Canis familiaris
agaacgagggctacatgcgtcgggg

SEQ ID NO: 30714 - DNA, 25 bp, Canis familiaris
agaacggtgttgcatcgatacaggc

SEQ ID NO: 30715 - DNA, 25 bp, Canis familiaris
agaacctggctatatccaactgcgc

SEQ ID NO: 30716 - DNA, 25 bp, Canis familiaris
agaacttcgggagcagcaatctctg

SEQ ID NO: 30717 - DNA, 25 bp, Canis familiaris
agaactctggcaaggcacctttctg

SEQ ID NO: 30718 - DNA, 25 bp, Canis familiaris
agaacctgacacagacctacttgct

SEQ ID NO: 30719 - DNA, 25 bp, Canis familiaris
agaaactgcacccaggactatcttc

SEQ ID NO: 30720 - DNA, 25 bp, Canis familiaris
agacaaccccaacgagtgatctcga

SEQ ID NO: 30721 - DNA, 25 bp, Canis familiaris
agaaatccccatgaaggctttgaac

SEQ ID NO: 30722 - DNA, 25 bp, Canis familiaris
agaatagtcacttaaggagctttgt

SEQ ID NO: 30723 - DNA, 25 bp, Canis familiaris
agaacattatccaaatggggtctgc

SEQ ID NO: 30724 - DNA, 25 bp, Canis familiaris
agcacacttttgtcaaaggagtctg

SEQ ID NO: 30725 - DNA, 25 bp, Canis familiaris
agacatctgtttagcaagaacctgt

SEQ ID NO: 30726 - DNA, 25 bp, Canis familiaris
agacattttttatcaggcatctgtt

SEQ ID NO: 30727 - DNA, 25 bp, Canis familiaris
agacattttagaatcggcagccatt

SEQ ID NO: 30728 - DNA, 25 bp, Canis familiaris
agaagctgtgtagacgccaccattc

SEQ ID NO: 30729 - DNA, 25 bp, Canis familiaris
agaaaatgtggcacagcataccact

SEQ ID NO: 30730 - DNA, 25 bp, Canis familiaris
agaaacttgtccgagaacaacatca

SEQ ID NO: 30731 - DNA, 25 bp, Canis familiaris
agaaagcttgtgccagttgttccat

SEQ ID NO: 30732 - DNA, 25 bp, Canis familiaris
agaaagagagctccaacgattccac

SEQ ID NO: 30733 - DNA, 25 bp, Canis familiaris
agaatgaggagcccaaacctaacaa

SEQ ID NO: 30734 - DNA, 25 bp, Canis familiaris
agaagggacgaagctcctacatcca

SEQ ID NO: 30735 - DNA, 25 bp, Canis familiaris
agaaagggaacctatcctgtcttca

SEQ ID NO: 30736 - DNA, 25 bp, Canis familiaris
agaaagggacccttttgcactactg

SEQ ID NO: 30737 - DNA, 25 bp, Canis familiaris
agaacgggtccgatgttgactcaca

SEQ ID NO: 30738 - DNA, 25 bp, Canis familiaris
agaacgggtatctgagttagaactc

SEQ ID NO: 30739 - DNA, 25 bp, Canis familiaris
agacaccggttctttgatgtagttc

SEQ ID NO: 30740 - DNA, 25 bp, Canis familiaris
agaagtttgttcctctatgttgccc

SEQ ID NO: 30741 - DNA, 25 bp, Canis familiaris
agcatttaagccagttttatccgta

SEQ ID NO: 30742 - DNA, 25 bp, Canis familiaris
agaattaatcctcgtttacatccgc

SEQ ID NO: 30743 - DNA, 25 bp, Canis familiaris
agaaaaacagtgctgcctgacctcc

SEQ ID NO: 30744 - DNA, 25 bp, Canis familiaris
agaacaaccatgtcggtcggactct

SEQ ID NO: 30745 - DNA, 25 bp, Canis familiaris
agaagaactgctgcgtccggcagct

SEQ ID NO: 30746 - DNA, 25 bp, Canis familiaris
agaaatagtttcatccctgtgctac

SEQ ID NO: 30747 - DNA, 25 bp, Canis familiaris
agaacatttagtatctactctgtta

SEQ ID NO: 30748 - DNA, 25 bp, Canis familiaris
agaacattattttattacacaggta

SEQ ID NO: 30749 - DNA, 25 bp, Canis familiaris
agaaataaccagcattggcaaggat

SEQ ID NO: 30750 - DNA, 25 bp, Canis familiaris
agaagacaaaagcaccccaggatat

SEQ ID NO: 30751 - DNA, 25 bp, Canis familiaris
agaataaaagcaagtccccaaggat

SEQ ID NO: 30752 - DNA, 25 bp, Canis familiaris
agaatagagaagagaccaccgtgga

SEQ ID NO: 30753 - DNA, 25 bp, Canis familiaris
agacatctcagatgggacaccggct

SEQ ID NO: 30754 - DNA, 25 bp, Canis familiaris
agacactgcccggagaagcttggag

SEQ ID NO: 30755 - DNA, 25 bp, Canis familiaris
agacacgcggctatgagcacgtggg

SEQ ID NO: 30756 - DNA, 25 bp, Canis familiaris
agacagacggctgggcatgaccggc

SEQ ID NO: 30757 - DNA, 25 bp, Canis familiaris
agacaggaggcggcgctgacaggtc

SEQ ID NO: 30758 - DNA, 25 bp, Canis familiaris
agacaggtcgtggcctagaggaccc

SEQ ID NO: 30759 - DNA, 25 bp, Canis familiaris
agaaggtcggttagtggtggccgcg

SEQ ID NO: 30760 - DNA, 25 bp, Canis familiaris
agaaggttgcctgaatggttcccct

SEQ ID NO: 30761 - DNA, 25 bp, Canis familiaris
agaagttctacccgatggtgtgctc

SEQ ID NO: 30762 - DNA, 25 bp, Canis familiaris
agaaattcccacagaagtctctctc

SEQ ID NO: 30763 - DNA, 25 bp, Canis familiaris
agaaatgtcccagctgagaggcctt

SEQ ID NO: 30764 - DNA, 25 bp, Canis familiaris
agaagtccccaggatggtccagtat

SEQ ID NO: 30765 - DNA, 25 bp, Canis familiaris
agaatgagattccagggggccagta

SEQ ID NO: 30766 - DNA, 25 bp, Canis familiaris
agacatagacaccaggaggaccacc

SEQ ID NO: 30767 - DNA, 25 bp, Canis familiaris
agaatagaccgacagctaagcccat

SEQ ID NO: 30768 - DNA, 25 bp, Canis familiaris
agaacaaaccaggattcaagcccat

SEQ ID NO: 30769 - DNA, 25 bp, Canis familiaris
agacacaccaaagatctctcgttcc

SEQ ID NO: 30770 - DNA, 25 bp, Canis familiaris
agaacacaaaagctctgccgttata

SEQ ID NO: 30771 - DNA, 25 bp, Canis familiaris
agaaccaggatacgtctgagggtat

SEQ ID NO: 30772 - DNA, 25 bp, Canis familiaris
agaactgaggtagcttagagatgta

SEQ ID NO: 30773 - DNA, 25 bp, Canis familiaris
agaacgggctgagctctcagaaagc

SEQ ID NO: 30774 - DNA, 25 bp, Canis familiaris
agaagccggctgttccggagactgc

SEQ ID NO: 30775 - DNA, 25 bp, Canis familiaris
agaactctggagtctaccaaggctc

SEQ ID NO: 30776 - DNA, 25 bp, Canis familiaris
agaactttatagtaccaacctcata

SEQ ID NO: 30777 - DNA, 25 bp, Canis familiaris
agaaatctgtatcgtgacccagtcc

SEQ ID NO: 30778 - DNA, 25 bp, Canis familiaris
agacagccttatttggcccaatggc

SEQ ID NO: 30779 - DNA, 25 bp, Canis familiaris
agaaccattcagatggctccattta

SEQ ID NO: 30780 - DNA, 25 bp, Canis familiaris
agaaactgtctggtttgcctttgtc

SEQ ID NO: 30781 - DNA, 25 bp, Canis familiaris
agcaaggttacctgtgctctttggc

SEQ ID NO: 30782 - DNA, 25 bp, Canis familiaris
aaattgtggacctgctgtctccagg

SEQ ID NO: 30783 - DNA, 25 bp, Canis familiaris
agaaagggagcctgaagctgccggg

SEQ ID NO: 30784 - DNA, 25 bp, Canis familiaris
agaaatcctcccttgaagagccgga

SEQ ID NO: 30785 - DNA, 25 bp, Canis familiaris
agaacttgtcctggtgaatggacgg

SEQ ID NO: 30786 - DNA, 25 bp, Canis familiaris
agaactttcctcttcaaacagcaaa

SEQ ID NO: 30787 - DNA, 25 bp, Canis familiaris
agaacttggaacttcaactcaaaga

SEQ ID NO: 30788 - DNA, 25 bp, Canis familiaris
agaaggggaagctgattgccaagag

SEQ ID NO: 30789 - DNA, 25 bp, Canis familiaris
agaaggggcaatgtcagggcgcagg

SEQ ID NO: 30790 - DNA, 25 bp, Canis familiaris
agaaggggctttcgagagccggctg

SEQ ID NO: 30791 - DNA, 25 bp, Canis familiaris
agaaggaagtctctggtgcctgtcc

SEQ ID NO: 30792 - DNA, 25 bp, Canis familiaris
agaagaaggtctgtgggccatggcc

SEQ ID NO: 30793 - DNA, 25 bp, Canis familiaris
agcaggaggagtgccgggggtctcc

SEQ ID NO: 30794 - DNA, 25 bp, Canis familiaris
agaaatggggacgcctgggtagctc

SEQ ID NO: 30795 - DNA, 25 bp, Canis familiaris
agaaatgggggtgcatgctgggccc

SEQ ID NO: 30796 - DNA, 25 bp, Canis familiaris
agaaagtagcagttccttacagccc

SEQ ID NO: 30797 - DNA, 25 bp, Canis familiaris
agaagcagtacacgtccattcatca

SEQ ID NO: 30798 - DNA, 25 bp, Canis familiaris
agaaggatacggtttgttatgcaga

SEQ ID NO: 30799 - DNA, 25 bp, Canis familiaris
agaagtttcctgttatttatgtgta

SEQ ID NO: 30800 - DNA, 25 bp, Canis familiaris
agaaaggttctgctcattctctgtg

SEQ ID NO: 30801 - DNA, 25 bp, Canis familiaris
agaaagtggctcagctcctctgagg

SEQ ID NO: 30802 - DNA, 25 bp, Canis familiaris
agaaaacgtacaggcccgatgtggg

SEQ ID NO: 30803 - DNA, 25 bp, Canis familiaris
agaaaacatgaattcctccgctggg

SEQ ID NO: 30804 - DNA, 25 bp, Canis familiaris
agaaaacattgattcctcagcggga

SEQ ID NO: 30805 - DNA, 25 bp, Canis familiaris
agaaaacagtgctcatccatgggaa

SEQ ID NO: 30806 - DNA, 25 bp, Canis familiaris
agacagaggggatcacctgagccaa

SEQ ID NO: 30807 - DNA, 25 bp, Canis familiaris
agacagagttgctatgcaccctggc

SEQ ID NO: 30808 - DNA, 25 bp, Canis familiaris
agacagcagttaacgcactcatgac

SEQ ID NO: 30809 - DNA, 25 bp, Canis familiaris
agacagctgggtgccaatctcacct

SEQ ID NO: 30810 - DNA, 25 bp, Canis familiaris
agacaggaggagccaggaccactct

SEQ ID NO: 30811 - DNA, 25 bp, Canis familiaris
agacatgaggtgtccagggccaggc

SEQ ID NO: 30812 - DNA, 25 bp, Canis familiaris
agaaagatgtgtctcagcagccagg

SEQ ID NO: 30813 - DNA, 25 bp, Canis familiaris
agaaagagctgcctgacaaccatcc

SEQ ID NO: 30814 - DNA, 25 bp, Canis familiaris
agaagcaggctgccatgggaccaac

SEQ ID NO: 30815 - DNA, 25 bp, Canis familiaris
agaaatttgctttgtgacacaatgc

SEQ ID NO: 30816 - DNA, 25 bp, Canis familiaris
agaaactggcttttcatacaatgca

SEQ ID NO: 30817 - DNA, 25 bp, Canis familiaris
agaaacactgcacatttgaactcaa

SEQ ID NO: 30818 - DNA, 25 bp, Canis familiaris
agaaaactatccatcttcactcaca

SEQ ID NO: 30819 - DNA, 25 bp, Canis familiaris
agaaaacctctgttctttccacaga

SEQ ID NO: 30820 - DNA, 25 bp, Canis familiaris
agaaaatcctggtacttgatcgtta

SEQ ID NO: 30821 - DNA, 25 bp, Canis familiaris
agaaagtccggagtcataaaaatca

SEQ ID NO: 30822 - DNA, 25 bp, Canis familiaris
agaaacacctgtgcacaataaaaaa

SEQ ID NO: 30823 - DNA, 25 bp, Canis familiaris
agaaacaccctggcgcaacagaatc

SEQ ID NO: 30824 - DNA, 25 bp, Canis familiaris
agaaaaacgccaggaacagattgcc

SEQ ID NO: 30825 - DNA, 25 bp, Canis familiaris
agaaggacacccggacaatgctggc

SEQ ID NO: 30826 - DNA, 25 bp, Canis familiaris
agacagggcagaaccagccacggtc

SEQ ID NO: 30827 - DNA, 25 bp, Canis familiaris
agacagggagacccagcgatcacgg

SEQ ID NO: 30828 - DNA, 25 bp, Canis familiaris
agacagcctggagtgattcgcataa

SEQ ID NO: 30829 - DNA, 25 bp, Canis familiaris
agacacacgagaggctgtggccaca

SEQ ID NO: 30830 - DNA, 25 bp, Canis familiaris
agaaacgaggacgtgagctcccgag

SEQ ID NO: 30831 - DNA, 25 bp, Canis familiaris
agaaactgggatctgagcctttgtg

SEQ ID NO: 30832 - DNA, 25 bp, Canis familiaris
agaaatgtgggtctctgctcttact

SEQ ID NO: 30833 - DNA, 25 bp, Canis familiaris
agaaatctgggtggcatctcttatt

SEQ ID NO: 30834 - DNA, 25 bp, Canis familiaris
agaacatcatgtcggcgaactctta

SEQ ID NO: 30835 - DNA, 25 bp, Canis familiaris
agacacacactggtggcagatccct

SEQ ID NO: 30836 - DNA, 25 bp, Canis familiaris
agaacgcagctcttcaagattccct

SEQ ID NO: 30837 - DNA, 25 bp, Canis familiaris
agaacctcatcactgcaaatgcaac

SEQ ID NO: 30838 - DNA, 25 bp, Canis familiaris
agaaccccaggcaacatgaggccct

SEQ ID NO: 30839 - DNA, 25 bp, Canis familiaris
agaaggcactagccaaccagttcct

SEQ ID NO: 30840 - DNA, 25 bp, Canis familiaris
agaaggcccagaagacgccgtacat

SEQ ID NO: 30841 - DNA, 25 bp, Canis familiaris
agaaggcccggcaaggccaaggctc

SEQ ID NO: 30842 - DNA, 25 bp, Canis familiaris
agaaggcctaggacagagccctgag

SEQ ID NO: 30843 - DNA, 25 bp, Canis familiaris
agaagcagccgatcaaagtccagat

SEQ ID NO: 30844 - DNA, 25 bp, Canis familiaris
caaggccctgtacacagtccgggcc

SEQ ID NO: 30845 - DNA, 25 bp, Canis familiaris
aaggccctgtacacagtccgggcct

SEQ ID NO: 30846 - DNA, 25 bp, Canis familiaris
aaagtcctgtttgccttctgggaca

SEQ ID NO: 30847 - DNA, 25 bp, Canis familiaris
agaagaccgtttggccattcatgac

SEQ ID NO: 30848 - DNA, 25 bp, Canis familiaris
agaataccgatacttctctgtagaa

SEQ ID NO: 30849 - DNA, 25 bp, Canis familiaris
agacagacctgtcttctgtggagcc

SEQ ID NO: 30850 - DNA, 25 bp, Canis familiaris
agaaacagctgttcttgggcgactc

SEQ ID NO: 30851 - DNA, 25 bp, Canis familiaris
agaaacctgttcttggcagcagctc

SEQ ID NO: 30852 - DNA, 25 bp, Canis familiaris
agaaccagctgtactgacctggctc

SEQ ID NO: 30853 - DNA, 25 bp, Canis familiaris
agaaagcacttgagatcctggctca

SEQ ID NO: 30854 - DNA, 25 bp, Canis familiaris
agaacacacgtgaaaactgcccagg

SEQ ID NO: 30855 - DNA, 25 bp, Canis familiaris
agaacacagcgtgaaacgtgcccag

SEQ ID NO: 30856 - DNA, 25 bp, Canis familiaris
agaacactgtgggaagccgagcccc

SEQ ID NO: 30857 - DNA, 25 bp, Canis familiaris
agaagggtcagaaagctccagccca

SEQ ID NO: 30858 - DNA, 25 bp, Canis familiaris
agaagtggcaatgtagcctactaca

SEQ ID NO: 30859 - DNA, 25 bp, Canis familiaris
agaaatcgcaagaacataataatta

SEQ ID NO: 30860 - DNA, 25 bp, Canis familiaris
agaaccgcaagtactacatggatct

SEQ ID NO: 30861 - DNA, 25 bp, Canis familiaris
agaacacagcaagagtgccagcctc

SEQ ID NO: 30862 - DNA, 25 bp, Canis familiaris
agacagaccaaaggctccagtcacc

SEQ ID NO: 30863 - DNA, 25 bp, Canis familiaris
agaaaagccacaggctactgtccct

SEQ ID NO: 30864 - DNA, 25 bp, Canis familiaris
agaacagggcacagttttcacgctt

SEQ ID NO: 30865 - DNA, 25 bp, Canis familiaris
agaaagggcacgctcttatcacctt

SEQ ID NO: 30866 - DNA, 25 bp, Canis familiaris
agaaagaggcatgacctgcccactc

SEQ ID NO: 30867 - DNA, 25 bp, Canis familiaris
agaaacgagatatctgtgtggcttc

SEQ ID NO: 30868 - DNA, 25 bp, Canis familiaris
agaatgggcaaatcagtgtgcctta

SEQ ID NO: 30869 - DNA, 25 bp, Canis familiaris
agaagaagagaatctgttccactat

SEQ ID NO: 30870 - DNA, 25 bp, Canis familiaris
agaagaaacccattgtctcacatcc

SEQ ID NO: 30871 - DNA, 25 bp, Canis familiaris
agaaataaacactgtcgctctgccg

SEQ ID NO: 30872 - DNA, 25 bp, Canis familiaris
agaagaaccaaactgggtctgtgag

SEQ ID NO: 30873 - DNA, 25 bp, Canis familiaris
agaaggacccaactgggtctgtgag

SEQ ID NO: 30874 - DNA, 25 bp, Canis familiaris
agaaggaagctggactggagtgtgt

SEQ ID NO: 30875 - DNA, 25 bp, Canis familiaris
agaatgtgaaccgccgagtgctgga

SEQ ID NO: 30876 - DNA, 25 bp, Canis familiaris
agaagatcagaaatgcccagttagc

SEQ ID NO: 30877 - DNA, 25 bp, Canis familiaris
agaatttgaatgccgaagttactga

SEQ ID NO: 30878 - DNA, 25 bp, Canis familiaris
agaatttagattccaccttcactct

SEQ ID NO: 30879 - DNA, 25 bp, Canis familiaris
agaatttgttttccctagcagtctt

SEQ ID NO: 30880 - DNA, 25 bp, Canis familiaris
agaactttttccacatcacagtcct

SEQ ID NO: 30881 - DNA, 25 bp, Canis familiaris
agaacgtttctggcaaatattttgt

SEQ ID NO: 30882 - DNA, 25 bp, Canis familiaris
agaaagtcttttgcagttctcttcc

SEQ ID NO: 30883 - DNA, 25 bp, Canis familiaris
agaaagccttcagtgcacgtttatc

SEQ ID NO: 30884 - DNA, 25 bp, Canis familiaris
agacaaccatatttagcagtgccaa

SEQ ID NO: 30885 - DNA, 25 bp, Canis familiaris
agacaaccagctgatagtgccgtca

SEQ ID NO: 30886 - DNA, 25 bp, Canis familiaris
agaactccgtttaatgtctgtctcc

SEQ ID NO: 30887 - DNA, 25 bp, Canis familiaris
agaaggggttagggctgcttctcac

SEQ ID NO: 30888 - DNA, 25 bp, Canis familiaris
agaaaggggacggtgtgtctctgcc

SEQ ID NO: 30889 - DNA, 25 bp, Canis familiaris
agaacctgggaaggttgccctgctg

SEQ ID NO: 30890 - DNA, 25 bp, Canis familiaris
agaacacaggtgtagtttgcctcac

SEQ ID NO: 30891 - DNA, 25 bp, Canis familiaris
agaaccaggacagggtgtgccatcc

SEQ ID NO: 30892 - DNA, 25 bp, Canis familiaris
agaaccactgaattggagtcctccc

SEQ ID NO: 30893 - DNA, 25 bp, Canis familiaris
agaagcccatgaactgtgtttccct

SEQ ID NO: 30894 - DNA, 25 bp, Canis familiaris
agaagctggctgggcagcgtttcac

SEQ ID NO: 30895 - DNA, 25 bp, Canis familiaris
agaacatccgcaggactgcttctct

SEQ ID NO: 30896 - DNA, 25 bp, Canis familiaris
agaaagtgctcagggtgctgcttct

SEQ ID NO: 30897 - DNA, 25 bp, Canis familiaris
agacaatactacagtctgccttcct

SEQ ID NO: 30898 - DNA, 25 bp, Canis familiaris
agaaattctctcaagcttctcgttc

SEQ ID NO: 30899 - DNA, 25 bp, Canis familiaris
agaagattctgtcagcctttgcgga

SEQ ID NO: 30900 - DNA, 25 bp, Canis familiaris
agaaacctgctgcacttttcggata

SEQ ID NO: 30901 - DNA, 25 bp, Canis familiaris
agaaactctgtccctattacacaat

SEQ ID NO: 30902 - DNA, 25 bp, Canis familiaris
agaacacctgttcctgatgtatata

SEQ ID NO: 30903 - DNA, 25 bp, Canis familiaris
agaaacgtggcgctgacttaactcc

SEQ ID NO: 30904 - DNA, 25 bp, Canis familiaris
agaaagggctggctgactgttctct

SEQ ID NO: 30905 - DNA, 25 bp, Canis familiaris
agaagaggccggcgaggattcctgt

SEQ ID NO: 30906 - DNA, 25 bp, Canis familiaris
agaaagaagccttggggacacctgg

SEQ ID NO: 30907 - DNA, 25 bp, Canis familiaris
agaattgaagcctcggggcagcctg

SEQ ID NO: 30908 - DNA, 25 bp, Canis familiaris
agaagatgacgacgaaggggcccgc

SEQ ID NO: 30909 - DNA, 25 bp, Canis familiaris
agaaagcacgagtacggacacgccc

SEQ ID NO: 30910 - DNA, 25 bp, Canis familiaris
agaagagcacaaggtgccggcggca

SEQ ID NO: 30911 - DNA, 25 bp, Canis familiaris
agaagagcacagcagggcctcgaag

SEQ ID NO: 30912 - DNA, 25 bp, Canis familiaris
agaaggtcgccaaggagatcgccag

SEQ ID NO: 30913 - DNA, 25 bp, Canis familiaris
agaagttcctcgagcgatctggacc

SEQ ID NO: 30914 - DNA, 25 bp, Canis familiaris
agaagtttatagtacagatgcccac

SEQ ID NO: 30915 - DNA, 25 bp, Canis familiaris
aaatagttaactccagtgccaacga

SEQ ID NO: 30916 - DNA, 25 bp, Canis familiaris
aaatgacttacccaaggccaaacat

SEQ ID NO: 30917 - DNA, 25 bp, Canis familiaris
agaaatttacttcgagcaccaaact

SEQ ID NO: 30918 - DNA, 25 bp, Canis familiaris
agaaaattacttcatgcacacacac

SEQ ID NO: 30919 - DNA, 25 bp, Canis familiaris
agaaacacaagaatggaaccaacag

SEQ ID NO: 30920 - DNA, 25 bp, Canis familiaris
agaaatgccaacaggaaccagcaga

SEQ ID NO: 30921 - DNA, 25 bp, Canis familiaris
agaaagcctacaagaagtcatcaaa

SEQ ID NO: 30922 - DNA, 25 bp, Canis familiaris
agaaaatctcctcagagtctgcaag

SEQ ID NO: 30923 - DNA, 25 bp, Canis familiaris
agaacattccactacaagtcatgaa

SEQ ID NO: 30924 - DNA, 25 bp, Canis familiaris
agaaatacacacttcaatgtcaatt

SEQ ID NO: 30925 - DNA, 25 bp, Canis familiaris
agaatataccatctgccattagcat

SEQ ID NO: 30926 - DNA, 25 bp, Canis familiaris
agaataatacatttgtcattactga

SEQ ID NO: 30927 - DNA, 25 bp, Canis familiaris
agaatacatacactcctcgtgaggc

SEQ ID NO: 30928 - DNA, 25 bp, Canis familiaris
agaagacagacggccagggagagtc

SEQ ID NO: 30929 - DNA, 25 bp, Canis familiaris
agaagacatccgcaagggagagtca

SEQ ID NO: 30930 - DNA, 25 bp, Canis familiaris
acaaaatgtaagggggggtgcagag

SEQ ID NO: 30931 - DNA, 25 bp, Canis familiaris
agaagcctacaacctgggggtcagg

SEQ ID NO: 30932 - DNA, 25 bp, Canis familiaris
agaagctcagaatgcctggcgtggg

SEQ ID NO: 30933 - DNA, 25 bp, Canis familiaris
agaagctggagctccgggggaggct

SEQ ID NO: 30934 - DNA, 25 bp, Canis familiaris
agaagcgggagatgggcgcgggcct

SEQ ID NO: 30935 - DNA, 25 bp, Canis familiaris
agaaggccgaggtgcggcgggagct

SEQ ID NO: 30936 - DNA, 25 bp, Canis familiaris
agaagggccagggtggggctggagc

SEQ ID NO: 30937 - DNA, 25 bp, Canis familiaris
agaagggccagggtggggctggagc

SEQ ID NO: 30938 - DNA, 25 bp, Canis familiaris
agaagtgagccgcggggcgggatcc

SEQ ID NO: 30939 - DNA, 25 bp, Canis familiaris
agaagtacacgatgggggacgctcc

SEQ ID NO: 30940 - DNA, 25 bp, Canis familiaris
agaaattctagctcaggggatctct

SEQ ID NO: 30941 - DNA, 25 bp, Canis familiaris
agaagcttctggtggcagggtctgt

SEQ ID NO: 30942 - DNA, 25 bp, Canis familiaris
agaactcctagggtagtagacatat

SEQ ID NO: 30943 - DNA, 25 bp, Canis familiaris
agcaaccctcgggtaatgtccaagc

SEQ ID NO: 30944 - DNA, 25 bp, Canis familiaris
agaacctttggcagaatgtccccta

SEQ ID NO: 30945 - DNA, 25 bp, Canis familiaris
agaatccccttgagatcagtgctcc

SEQ ID NO: 30946 - DNA, 25 bp, Canis familiaris
agaacctttgtacgctttgctcaaa

SEQ ID NO: 30947 - DNA, 25 bp, Canis familiaris
agaaatctattttgcactataacca

SEQ ID NO: 30948 - DNA, 25 bp, Canis familiaris
agaactctgatattcatcacatcta

SEQ ID NO: 30949 - DNA, 25 bp, Canis familiaris
agccactttttcccatctgaagggg

SEQ ID NO: 30950 - DNA, 25 bp, Canis familiaris
agcatctgttaaaccctccagaagg

SEQ ID NO: 30951 - DNA, 25 bp, Canis familiaris
agctattatggaacttacacaactg

SEQ ID NO: 30952 - DNA, 25 bp, Canis familiaris
agaatataagcttccccacaactga

SEQ ID NO: 30953 - DNA, 25 bp, Canis familiaris
agaacaggactgtggccaaagcaga

SEQ ID NO: 30954 - DNA, 25 bp, Canis familiaris
agaacctatcgatgtgcaaaacaga

SEQ ID NO: 30955 - DNA, 25 bp, Canis familiaris
agaaccttccagatcacacaattga

SEQ ID NO: 30956 - DNA, 25 bp, Canis familiaris
agaaccaaaagaacacacgcgtgcg

SEQ ID NO: 30957 - DNA, 25 bp, Canis familiaris
agaacgaacaacacagatccctgag

SEQ ID NO: 30958 - DNA, 25 bp, Canis familiaris
agaagagaacccagatgtccctgca

SEQ ID NO: 30959 - DNA, 25 bp, Canis familiaris
agaagtggacgccaggctgtcgttc

SEQ ID NO: 30960 - DNA, 25 bp, Canis familiaris
agaagggacacacgtcagtcttcct

SEQ ID NO: 30961 - DNA, 25 bp, Canis familiaris
agaaggtgacctgtggtcttgcctc

SEQ ID NO: 30962 - DNA, 25 bp, Canis familiaris
agaaggagccctttgtgtttgcttc

SEQ ID NO: 30963 - DNA, 25 bp, Canis familiaris
agaaagccctctttgatggctctgt

SEQ ID NO: 30964 - DNA, 25 bp, Canis familiaris
agaacacttctccttgaatgctctg

SEQ ID NO: 30965 - DNA, 25 bp, Canis familiaris
agaacctgtgcatggtgacctctga

SEQ ID NO: 30966 - DNA, 25 bp, Canis familiaris
agaaatcttatgcagtgacctccca

SEQ ID NO: 30967 - DNA, 25 bp, Canis familiaris
agaatgcctttttgtgatccttgcc

SEQ ID NO: 30968 - DNA, 25 bp, Canis familiaris
agaagcctcttttaatctatccctt

SEQ ID NO: 30969 - DNA, 25 bp, Canis familiaris
agaagctttgttttcatttcccgct

SEQ ID NO: 30970 - DNA, 25 bp, Canis familiaris
agaagctttgttttcatttcccgct

SEQ ID NO: 30971 - DNA, 25 bp, Canis familiaris
agaagattcgttcaatcgtcctcct

SEQ ID NO: 30972 - DNA, 25 bp, Canis familiaris
agaagaagcctttagactgtctccc

SEQ ID NO: 30973 - DNA, 25 bp, Canis familiaris
agaagctcacctacgtggatttcct

SEQ ID NO: 30974 - DNA, 25 bp, Canis familiaris
agaactcacctgccaggagctgtcc

SEQ ID NO: 30975 - DNA, 25 bp, Canis familiaris
agaattcaactgatgggcttcccgt

SEQ ID NO: 30976 - DNA, 25 bp, Canis familiaris
agaattaaatgctgacctcttccgt

SEQ ID NO: 30977 - DNA, 25 bp, Canis familiaris
agaaatgaccgctaagcctcttgcc

SEQ ID NO: 30978 - DNA, 25 bp, Canis familiaris
agaaggaccctggtgtccttgaccg

SEQ ID NO: 30979 - DNA, 25 bp, Canis familiaris
agaaagagcccagatgtccattgac

SEQ ID NO: 30980 - DNA, 25 bp, Canis familiaris
agaaagcagcccggaactcttccgg

SEQ ID NO: 30981 - DNA, 25 bp, Canis familiaris
agaaaacacgggtacatcttcctgt

SEQ ID NO: 30982 - DNA, 25 bp, Canis familiaris
agaaaaagtgctcttcttcctcttt

SEQ ID NO: 30983 - DNA, 25 bp, Canis familiaris
agaactcaaattgttctctcgagtt

SEQ ID NO: 30984 - DNA, 25 bp, Canis familiaris
agcaactaaaacagtgccttggcac

SEQ ID NO: 30985 - DNA, 25 bp, Canis familiaris
agaatcaaagcatcggcctggggac

SEQ ID NO: 30986 - DNA, 25 bp, Canis familiaris
agaaaaatgacccgtcggcctgagc

SEQ ID NO: 30987 - DNA, 25 bp, Canis familiaris
aaatcaaagaacaatgtcccctgga

SEQ ID NO: 30988 - DNA, 25 bp, Canis familiaris
agaatcatgaaacaaatcccccgca

SEQ ID NO: 30989 - DNA, 25 bp, Canis familiaris
agaaatgcactacaaggccgtccac

SEQ ID NO: 30990 - DNA, 25 bp, Canis familiaris
agaaagcatctaaaacccacaagca

SEQ ID NO: 30991 - DNA, 25 bp, Canis familiaris
agaacagtatggaaacgcctcagaa

SEQ ID NO: 30992 - DNA, 25 bp, Canis familiaris
agaagaatattacgcacgcctcaca

SEQ ID NO: 30993 - DNA, 25 bp, Canis familiaris
agaaggtcatgacccacgtcagcaa

SEQ ID NO: 30994 - DNA, 25 bp, Canis familiaris
agaagttatcagtaccagcagcaag

SEQ ID NO: 30995 - DNA, 25 bp, Canis familiaris
agaaacatgctcacccagagccagc

SEQ ID NO: 30996 - DNA, 25 bp, Canis familiaris
agaaagctgctcatggccaagacca

SEQ ID NO: 30997 - DNA, 25 bp, Canis familiaris
agaaagatctcttgtgtggaaacac

SEQ ID NO: 30998 - DNA, 25 bp, Canis familiaris
agcgaattctcctcaggacgacaaa

SEQ ID NO: 30999 - DNA, 25 bp, Canis familiaris
agcatgtcctttttcaggattacac

SEQ ID NO: 31000 - DNA, 25 bp, Canis familiaris
agcaggcctttatacaagtcaccct

SEQ ID NO: 31001 - DNA, 25 bp, Canis familiaris
agcacccttttaaaaatctccaatg

SEQ ID NO: 31002 - DNA, 25 bp, Canis familiaris
agaacactatttatttactccaaga

SEQ ID NO: 31003 - DNA, 25 bp, Canis familiaris
agaacatcattttttttggcttgaa

SEQ ID NO: 31004 - DNA, 25 bp, Canis familiaris
agaacactgccttattttagtcaag

SEQ ID NO: 31005 - DNA, 25 bp, Canis familiaris
agaagcttgcctgtttacattccaa

SEQ ID NO: 31006 - DNA, 25 bp, Canis familiaris
agaactattctctcttcaattaaga

SEQ ID NO: 31007 - DNA, 25 bp, Canis familiaris
agaacatttgccatcatttactgag

SEQ ID NO: 31008 - DNA, 25 bp, Canis familiaris
agaaccttcatcatttcgagtggat

SEQ ID NO: 31009 - DNA, 25 bp, Canis familiaris
agaaagttcttttcatcggtgccta

SEQ ID NO: 31010 - DNA, 25 bp, Canis familiaris
agaaagttcttaaatcaatgaccta

SEQ ID NO: 31011 - DNA, 25 bp, Canis familiaris
agaactgtgtttaaaaatcaaatat

SEQ ID NO: 31012 - DNA, 25 bp, Canis familiaris
aaatcggacctatatccatcctata

SEQ ID NO: 31013 - DNA, 25 bp, Canis familiaris
agcaccgaacagaaagactccctta

SEQ ID NO: 31014 - DNA, 25 bp, Canis familiaris
agaacttactgcaagggtcctctta

SEQ ID NO: 31015 - DNA, 25 bp, Canis familiaris
agaacttactacacactgaccttga

SEQ ID NO: 31016 - DNA, 25 bp, Canis familiaris
agaacttatctagaattggccaaga

SEQ ID NO: 31017 - DNA, 25 bp, Canis familiaris
agaacttatccggtagcggcgtcga

SEQ ID NO: 31018 - DNA, 25 bp, Canis familiaris
agaacttgcccggaaggcagctgcc

SEQ ID NO: 31019 - DNA, 25 bp, Canis familiaris
agaactttcttggcaaggctgcata

SEQ ID NO: 31020 - DNA, 25 bp, Canis familiaris
agaacattgatgatggcacctcaga

SEQ ID NO: 31021 - DNA, 25 bp, Canis familiaris
agaagctgtgctatgttgctctaga

SEQ ID NO: 31022 - DNA, 25 bp, Canis familiaris
agaacagcagctactttgtcgagtg

SEQ ID NO: 31023 - DNA, 25 bp, Canis familiaris
agaaagcagcacattcgtcggcatc

SEQ ID NO: 31024 - DNA, 25 bp, Canis familiaris
agaaccagcctgttctgtagcacac

SEQ ID NO: 31025 - DNA, 25 bp, Canis familiaris
agcagacaagcagagttttacacag

SEQ ID NO: 31026 - DNA, 25 bp, Canis familiaris
agaagaggatcgttttctaatctgt

SEQ ID NO: 31027 - DNA, 25 bp, Canis familiaris
agaaacactagccatcttccatact

SEQ ID NO: 31028 - DNA, 25 bp, Canis familiaris
agaacacatttccatccttgtactg

SEQ ID NO: 31029 - DNA, 25 bp, Canis familiaris
agaagcagattgtactcagttttat

SEQ ID NO: 31030 - DNA, 25 bp, Canis familiaris
agaacttctcattccagctgtttat

SEQ ID NO: 31031 - DNA, 25 bp, Canis familiaris
agaactgtgtcttttctgctttttc

SEQ ID NO: 31032 - DNA, 25 bp, Canis familiaris
agaactggcagaatgtttctctttt

SEQ ID NO: 31033 - DNA, 25 bp, Canis familiaris
agaacatccatgtgtattggttatt

SEQ ID NO: 31034 - DNA, 25 bp, Canis familiaris
agaacactgctgtagaagtctttat

SEQ ID NO: 31035 - DNA, 25 bp, Canis familiaris
agaactctgcatttcatggtcctct

SEQ ID NO: 31036 - DNA, 25 bp, Canis familiaris
agaacactcacattagcctacagct

SEQ ID NO: 31037 - DNA, 25 bp, Canis familiaris
agaacagctccaggttctacgtggt

SEQ ID NO: 31038 - DNA, 25 bp, Canis familiaris
agaagcacctgcaggatctgtcggg

SEQ ID NO: 31039 - DNA, 25 bp, Canis familiaris
agaagcgctgctgggatatcgcctt

SEQ ID NO: 31040 - DNA, 25 bp, Canis familiaris
agaagccgcggcggatcatactgct

SEQ ID NO: 31041 - DNA, 25 bp, Canis familiaris
agaaccctgagctgttccagcttcg

SEQ ID NO: 31042 - DNA, 25 bp, Canis familiaris
agaacccagagctgttccagctgcg

SEQ ID NO: 31043 - DNA, 25 bp, Canis familiaris
agaaaagcgggtgtccagcatggcc

SEQ ID NO: 31044 - DNA, 25 bp, Canis familiaris
agaaaagatgtgcttctccttgccc

SEQ ID NO: 31045 - DNA, 25 bp, Canis familiaris
agaagtgagttgctttcctggtacc

SEQ ID NO: 31046 - DNA, 25 bp, Canis familiaris
agaattgcttagctagtcccctact

SEQ ID NO: 31047 - DNA, 25 bp, Canis familiaris
agaattgttcagtgaatccctcctc

SEQ ID NO: 31048 - DNA, 25 bp, Canis familiaris
agaattaaatgcttgagaccctccc

SEQ ID NO: 31049 - DNA, 25 bp, Canis familiaris
agaagctaattagggcctcttcctc

SEQ ID NO: 31050 - DNA, 25 bp, Canis familiaris
agaaccatttcacggtgtcgtccat

SEQ ID NO: 31051 - DNA, 25 bp, Canis familiaris
agaaacttgtgatgaggggcgcctg

SEQ ID NO: 31052 - DNA, 25 bp, Canis familiaris
agaatatgggaatgacagggcagcc

SEQ ID NO: 31053 - DNA, 25 bp, Canis familiaris
agaatctgggagcacagcaggacag

SEQ ID NO: 31054 - DNA, 25 bp, Canis familiaris
agctacgggggatgagaccggtgct

SEQ ID NO: 31055 - DNA, 25 bp, Canis familiaris
agctacgggggatgagaccggtgct

SEQ ID NO: 31056 - DNA, 25 bp, Canis familiaris
agcaaccggtggtggactcatggtc

SEQ ID NO: 31057 - DNA, 25 bp, Canis familiaris
agaatccgtttgaacttcctgtctc

SEQ ID NO: 31058 - DNA, 25 bp, Canis familiaris
agaaccgatttgattccgtactcac

SEQ ID NO: 31059 - DNA, 25 bp, Canis familiaris
agaagtagtgttctacacgtcctcc

SEQ ID NO: 31060 - DNA, 25 bp, Canis familiaris
agaacaaggccaactatcacgtccc

SEQ ID NO: 31061 - DNA, 25 bp, Canis familiaris
agaaccatggaaccattgccaaccc

SEQ ID NO: 31062 - DNA, 25 bp, Canis familiaris
agaagatcatggagacagaccccct

SEQ ID NO: 31063 - DNA, 25 bp, Canis familiaris
agaagagcagtgagggacgcctggg

SEQ ID NO: 31064 - DNA, 25 bp, Canis familiaris
agaaggacttctcggagggtgacga

SEQ ID NO: 31065 - DNA, 25 bp, Canis familiaris
agaaggaactcttggagcaggcccg

SEQ ID NO: 31066 - DNA, 25 bp, Canis familiaris
agaaggcttctgggcaggagatccc

SEQ ID NO: 31067 - DNA, 25 bp, Canis familiaris
agaaggtctctgagtctgagtcccg

SEQ ID NO: 31068 - DNA, 25 bp, Canis familiaris
agaaggatccacggttggtctccga

SEQ ID NO: 31069 - DNA, 25 bp, Canis familiaris
agaagattccagggcgtgtgtccac

SEQ ID NO: 31070 - DNA, 25 bp, Canis familiaris
agaagaacctgggggagctcatcac

SEQ ID NO: 31071 - DNA, 25 bp, Canis familiaris
agaaaagccagcaagggacctcata

SEQ ID NO: 31072 - DNA, 25 bp, Canis familiaris
agaaaagccagccatcggaaccaag

SEQ ID NO: 31073 - DNA, 25 bp, Canis familiaris
agaagtagtcatccactggtgccca

SEQ ID NO: 31074 - DNA, 25 bp, Canis familiaris
agaagaagctctcacggatggcgcc

SEQ ID NO: 31075 - DNA, 25 bp, Canis familiaris
agaagctgtgctgccacggcaggcc

SEQ ID NO: 31076 - DNA, 25 bp, Canis familiaris
agaaggtgctgaaccggagcctgtt

SEQ ID NO: 31077 - DNA, 25 bp, Canis familiaris
agaagtgctcaaaattggactcatt

SEQ ID NO: 31078 - DNA, 25 bp, Canis familiaris
agaagctggcaaaataggacacgat

SEQ ID NO: 31079 - DNA, 25 bp, Canis familiaris
agaagcaatgtaaatgtgaggggat

SEQ ID NO: 31080 - DNA, 25 bp, Canis familiaris
agaacacatcttttgtgccaggcca

SEQ ID NO: 31081 - DNA, 25 bp, Canis familiaris
agaacagcatcttaggggaaccatt

SEQ ID NO: 31082 - DNA, 25 bp, Canis familiaris
agaacagaatcttccggcagactct

SEQ ID NO: 31083 - DNA, 25 bp, Canis familiaris
agaacttttcatactggagactttt

SEQ ID NO: 31084 - DNA, 25 bp, Canis familiaris
agaactttctatatctgggctgcct

SEQ ID NO: 31085 - DNA, 25 bp, Canis familiaris
agaactttcaaaatcgcacctggct

SEQ ID NO: 31086 - DNA, 25 bp, Canis familiaris
agaacttgcatatattcaacaccgc

SEQ ID NO: 31087 - DNA, 25 bp, Canis familiaris
agaactctagaaattaaccagctct

SEQ ID NO: 31088 - DNA, 25 bp, Canis familiaris
agaactctcggattacttctgagct

SEQ ID NO: 31089 - DNA, 25 bp, Canis familiaris
agaagctgttgccaagacctcaagt

SEQ ID NO: 31090 - DNA, 25 bp, Canis familiaris
agaagctgttgccaagacctcaagt

SEQ ID NO: 31091 - DNA, 25 bp, Canis familiaris
agaagctgttgccaagacctcaagt

SEQ ID NO: 31092 - DNA, 25 bp, Canis familiaris
agaattcttgtgtgacctcaaaaaa

SEQ ID NO: 31093 - DNA, 25 bp, Canis familiaris
agaaccaagtgagtggcttaaccaa

SEQ ID NO: 31094 - DNA, 25 bp, Canis familiaris
agaacaaagatggctccctagtcct

SEQ ID NO: 31095 - DNA, 25 bp, Canis familiaris
agaaaaagagcccatcagtcagccc

SEQ ID NO: 31096 - DNA, 25 bp, Canis familiaris
agcacaagacattcacgtaccgtcc

SEQ ID NO: 31097 - DNA, 25 bp, Canis familiaris
agcaaggattaccctaacagcccta

SEQ ID NO: 31098 - DNA, 25 bp, Canis familiaris
agaagtttgatccctgagcaccttc

SEQ ID NO: 31099 - DNA, 25 bp, Canis familiaris
agaactatgttccactgacaccttt

SEQ ID NO: 31100 - DNA, 25 bp, Canis familiaris
agaacttatatccatcgtcatctca

SEQ ID NO: 31101 - DNA, 25 bp, Canis familiaris
agaacttagtcgtgattccatgccc

SEQ ID NO: 31102 - DNA, 25 bp, Canis familiaris
agaactaagggctgatcctggctct

SEQ ID NO: 31103 - DNA, 25 bp, Canis familiaris
agaagcaaaatgcccaacccgcttc

SEQ ID NO: 31104 - DNA, 25 bp, Canis familiaris
agaacaacaatgaccacacacacac

SEQ ID NO: 31105 - DNA, 25 bp, Canis familiaris
agaacaacactgacatgcatccact

SEQ ID NO: 31106 - DNA, 25 bp, Canis familiaris
agaaaagagctggctaccctgcagc

SEQ ID NO: 31107 - DNA, 25 bp, Canis familiaris
agaacagcaacttctactgcctgaa

SEQ ID NO: 31108 - DNA, 25 bp, Canis familiaris
agaagcagactctctgcctgatctg

SEQ ID NO: 31109 - DNA, 25 bp, Canis familiaris
agaacagcacgctcaactgtgccag

SEQ ID NO: 31110 - DNA, 25 bp, Canis familiaris
agaagcagacgcccaactgctgagc

SEQ ID NO: 31111 - DNA, 25 bp, Canis familiaris
agaactagccatccacaatcgaggg

SEQ ID NO: 31112 - DNA, 25 bp, Canis familiaris
agaagcaacaaaactgacagaggag

SEQ ID NO: 31113 - DNA, 25 bp, Canis familiaris
agcaagacagcatttaggacggagt

SEQ ID NO: 31114 - DNA, 25 bp, Canis familiaris
agcagagctacaatggaggaactac

SEQ ID NO: 31115 - DNA, 25 bp, Canis familiaris
acgcgggttggagaatgcccattcc

SEQ ID NO: 31116 - DNA, 25 bp, Canis familiaris
agcacgggttgtgaaagccacctcc

SEQ ID NO: 31117 - DNA, 25 bp, Canis familiaris
aaagcaggtagtgaacatcccgtcc

SEQ ID NO: 31118 - DNA, 25 bp, Canis familiaris
agcaaaagtcatgtaacatcccgtc

SEQ ID NO: 31119 - DNA, 25 bp, Canis familiaris
agaacaagactcatcaactctccgc

SEQ ID NO: 31120 - DNA, 25 bp, Canis familiaris
agaacataatccaatagacctcccc

SEQ ID NO: 31121 - DNA, 25 bp, Canis familiaris
agaactgaatgtgaacccatgccct

SEQ ID NO: 31122 - DNA, 25 bp, Canis familiaris
agaactgagaaggcaccccatggct

SEQ ID NO: 31123 - DNA, 25 bp, Canis familiaris
agaagcacaataggatccccggtac

SEQ ID NO: 31124 - DNA, 25 bp, Canis familiaris
agaagcaatattgaccaccctgtac

SEQ ID NO: 31125 - DNA, 25 bp, Canis familiaris
agaacattgtataaccatcctgctg

SEQ ID NO: 31126 - DNA, 25 bp, Canis familiaris
agaactagaagtacagcatcctgct

SEQ ID NO: 31127 - DNA, 25 bp, Canis familiaris
agaaggagacccaatgcactgcagt

SEQ ID NO: 31128 - DNA, 25 bp, Canis familiaris
agaagcagagacccacagactgcca

SEQ ID NO: 31129 - DNA, 25 bp, Canis familiaris
agaacgtgcaggacctgctgctgct

SEQ ID NO: 31130 - DNA, 25 bp, Canis familiaris
agaacatgatggctgcctgtgaccc

SEQ ID NO: 31131 - DNA, 25 bp, Canis familiaris
agaacatcagcaatcaccttatcat

SEQ ID NO: 31132 - DNA, 25 bp, Canis familiaris
agaatccatatgctactgttcagac

SEQ ID NO: 31133 - DNA, 25 bp, Canis familiaris
agaacgatatctcaatcattattag

SEQ ID NO: 31134 - DNA, 25 bp, Canis familiaris
agaatcccatctcatatatgtgaaa

SEQ ID NO: 31135 - DNA, 25 bp, Canis familiaris
agcaatcccatgtgattatctgcat

SEQ ID NO: 31136 - DNA, 25 bp, Canis familiaris
agcaatgcctcaagtgtgtcctgaa

SEQ ID NO: 31137 - DNA, 25 bp, Canis familiaris
agaagccacaaggctgcacctgtgt

SEQ ID NO: 31138 - DNA, 25 bp, Canis familiaris
agaaccagaaggaccctggtgtcct

SEQ ID NO: 31139 - DNA, 25 bp, Canis familiaris
agaaccagaaggaccctggtgtcct

SEQ ID NO: 31140 - DNA, 25 bp, Canis familiaris
agaactggaagaaccacatgggtcc

SEQ ID NO: 31141 - DNA, 25 bp, Canis familiaris
agaatgggtagcccaccagggagca

SEQ ID NO: 31142 - DNA, 25 bp, Canis familiaris
agaaggcggacggcagccagtccga

SEQ ID NO: 31143 - DNA, 25 bp, Canis familiaris
agaattgggaggggtcactcgccag

SEQ ID NO: 31144 - DNA, 25 bp, Canis familiaris
agaatagggaaggagtcagccagcc

SEQ ID NO: 31145 - DNA, 25 bp, Canis familiaris
agaagcaggaacaggagcagccgcc

SEQ ID NO: 31146 - DNA, 25 bp, Canis familiaris
agaagcaggcttccaggagggaccg

SEQ ID NO: 31147 - DNA, 25 bp, Canis familiaris
agaagcaggttccctgtgggagcct

SEQ ID NO: 31148 - DNA, 25 bp, Canis familiaris
agaactggttccatgctagggcttg

SEQ ID NO: 31149 - DNA, 25 bp, Canis familiaris
agaattggattccctcatcaaggct

SEQ ID NO: 31150 - DNA, 25 bp, Canis familiaris
agaattggcagaacgtccgggcttt

SEQ ID NO: 31151 - DNA, 25 bp, Canis familiaris
agaattggcagaacgtccgggcttt

SEQ ID NO: 31152 - DNA, 25 bp, Canis familiaris
agaagattgctgagcggctgggggt

SEQ ID NO: 31153 - DNA, 25 bp, Canis familiaris
agaagctggctgcacgagggctaag

SEQ ID NO: 31154 - DNA, 25 bp, Canis familiaris
agaagctggcgctgctgaaggccac

SEQ ID NO: 31155 - DNA, 25 bp, Canis familiaris
agaagctcccaggaagagtgccctc

SEQ ID NO: 31156 - DNA, 25 bp, Canis familiaris
agaagctgccaagaagtgaccctgt

SEQ ID NO: 31157 - DNA, 25 bp, Canis familiaris
agcaacagcccacagggaacacgtt

SEQ ID NO: 31158 - DNA, 25 bp, Canis familiaris
agaacatgccatcctagaagccaca

SEQ ID NO: 31159 - DNA, 25 bp, Canis familiaris
agaacagctctaccagtatgtcacc

SEQ ID NO: 31160 - DNA, 25 bp, Canis familiaris
agaagagcatgtcactgtccttcct

SEQ ID NO: 31161 - DNA, 25 bp, Canis familiaris
agaagcacattgcatcttttctcac

SEQ ID NO: 31162 - DNA, 25 bp, Canis familiaris
agaactctgaggatctgttctcccc

SEQ ID NO: 31163 - DNA, 25 bp, Canis familiaris
agaactgttgatttcatttccctcc

SEQ ID NO: 31164 - DNA, 25 bp, Canis familiaris
agaaggatctcatcgatttcccacc

SEQ ID NO: 31165 - DNA, 25 bp, Canis familiaris
agaacgtcgcattctgtgttgtcct

SEQ ID NO: 31166 - DNA, 25 bp, Canis familiaris
agcaacgagagcttatgtgtattcc

SEQ ID NO: 31167 - DNA, 25 bp, Canis familiaris
agaagctggacctgtggatgctgcc

SEQ ID NO: 31168 - DNA, 25 bp, Canis familiaris
agaacagtgatcgctgggtggccac

SEQ ID NO: 31169 - DNA, 25 bp, Canis familiaris
agaagatgtgatgagcttactagaa

SEQ ID NO: 31170 - DNA, 25 bp, Canis familiaris
agaaggctggggctcacttgaaagg

SEQ ID NO: 31171 - DNA, 25 bp, Canis familiaris
agaagacggggtccacaggcaagac

SEQ ID NO: 31172 - DNA, 25 bp, Canis familiaris
agaagacgtcgctttgaacgcgcca

SEQ ID NO: 31173 - DNA, 25 bp, Canis familiaris
agaagacattccaagtgacacgctg

SEQ ID NO: 31174 - DNA, 25 bp, Canis familiaris
agcaaggaccgcaagtacactctaa

SEQ ID NO: 31175 - DNA, 25 bp, Canis familiaris
agcaaggaccgcaagtacactctaa

SEQ ID NO: 31176 - DNA, 25 bp, Canis familiaris
agaagaagcacctgtatgccctgga

SEQ ID NO: 31177 - DNA, 25 bp, Canis familiaris
agaacgaacatcttttcctcttggt

SEQ ID NO: 31178 - DNA, 25 bp, Canis familiaris
agaacgtacatgttggcgcttcttg

SEQ ID NO: 31179 - DNA, 25 bp, Canis familiaris
agaagttactgggagctgctatttt

SEQ ID NO: 31180 - DNA, 25 bp, Canis familiaris
agaagttcaagccagagcactttct

SEQ ID NO: 31181 - DNA, 25 bp, Canis familiaris
agaagttcagaatggcatccttgat

SEQ ID NO: 31182 - DNA, 25 bp, Canis familiaris
agaagtttgcattgcaggtccattt

SEQ ID NO: 31183 - DNA, 25 bp, Canis familiaris
agaatgttggcaagcaggaccccca

SEQ ID NO: 31184 - DNA, 25 bp, Canis familiaris
agaatactgcaggagccaactaccc

SEQ ID NO: 31185 - DNA, 25 bp, Canis familiaris
agaatcactaggtccaggcgaggcc

SEQ ID NO: 31186 - DNA, 25 bp, Canis familiaris
agcagaagtaggtcctgccgtgtcc

SEQ ID NO: 31187 - DNA, 25 bp, Canis familiaris
agcagaatgctcaggtagacgtgtc

SEQ ID NO: 31188 - DNA, 25 bp, Canis familiaris
agcacaagaccggatgacccgtcgg

SEQ ID NO: 31189 - DNA, 25 bp, Canis familiaris
agaatgtgaggtgtgccctggtctg

SEQ ID NO: 31190 - DNA, 25 bp, Canis familiaris
agaaggtggccggaccatggcatct

SEQ ID NO: 31191 - DNA, 25 bp, Canis familiaris
agaaggatgccgcagaccattatct

SEQ ID NO: 31192 - DNA, 25 bp, Canis familiaris
agaagaatccagcagatcctcaact

SEQ ID NO: 31193 - DNA, 25 bp, Canis familiaris
agaatcactacacattcctcagtct

SEQ ID NO: 31194 - DNA, 25 bp, Canis familiaris
agaagagcttatcttccttgtcctc

SEQ ID NO: 31195 - DNA, 25 bp, Canis familiaris
agaagagtctgggtcatacccaccc

SEQ ID NO: 31196 - DNA, 25 bp, Canis familiaris
agaagaggagtactcaacacccctg

SEQ ID NO: 31197 - DNA, 25 bp, Canis familiaris
agaagggtgtacaaaccacttggca

SEQ ID NO: 31198 - DNA, 25 bp, Canis familiaris
agaaggctgtgtatagtccatttcc

SEQ ID NO: 31199 - DNA, 25 bp, Canis familiaris
agcacggtagtgaacactcccgtcc

SEQ ID NO: 31200 - DNA, 25 bp, Canis familiaris
agcacgcctcggaaacccgaaagtg

SEQ ID NO: 31201 - DNA, 25 bp, Canis familiaris
agaaggacgttttctccgagaagat

SEQ ID NO: 31202 - DNA, 25 bp, Canis familiaris
agaaggggttgtctaagagatgaga

SEQ ID NO: 31203 - DNA, 25 bp, Canis familiaris
agaaccggaagtctgaagcgagccc

SEQ ID NO: 31204 - DNA, 25 bp, Canis familiaris
agaagcgggaagccagctgagctgc

SEQ ID NO: 31205 - DNA, 25 bp, Canis familiaris
agaagtggagaagctgtagcccagc

SEQ ID NO: 31206 - DNA, 25 bp, Canis familiaris
agcaagatggatcacctggactggg

SEQ ID NO: 31207 - DNA, 25 bp, Canis familiaris
agcaaggagagcagcccgaaggggc

SEQ ID NO: 31208 - DNA, 25 bp, Canis familiaris
agcaaggcacagggtcttctagggg

SEQ ID NO: 31209 - DNA, 25 bp, Canis familiaris
agaaggaagaggattattggttgga

SEQ ID NO: 31210 - DNA, 25 bp, Canis familiaris
agaaggtgatggccgtttgggttca

SEQ ID NO: 31211 - DNA, 25 bp, Canis familiaris
agaagacagaggctgtttggccccg

SEQ ID NO: 31212 - DNA, 25 bp, Canis familiaris
agaaggagcgcgactttgaggaccc

SEQ ID NO: 31213 - DNA, 25 bp, Canis familiaris
agaagaaggccttcatgctgggacc

SEQ ID NO: 31214 - DNA, 25 bp, Canis familiaris
agaataagcccttcgtcagagagcc

SEQ ID NO: 31215 - DNA, 25 bp, Canis familiaris
agaagtaccttgtcagtcaatgttc

SEQ ID NO: 31216 - DNA, 25 bp, Canis familiaris
agaagctgttttacttcctgttcct

SEQ ID NO: 31217 - DNA, 25 bp, Canis familiaris
agaagtgttcttgcatctcgatctt

SEQ ID NO: 31218 - DNA, 25 bp, Canis familiaris
agaacgtgcgcttcgacagcgacgt

SEQ ID NO: 31219 - DNA, 25 bp, Canis familiaris
agcaaggcagccttccataggaaga

SEQ ID NO: 31220 - DNA, 25 bp, Canis familiaris
agcagcaacacctgattaaattgca

SEQ ID NO: 31221 - DNA, 25 bp, Canis familiaris
agcacaatcacatccaaaaagtcat

SEQ ID NO: 31222 - DNA, 25 bp, Canis familiaris
agcaaaaaaggctaagcaagcatct

SEQ ID NO: 31223 - DNA, 25 bp, Canis familiaris
agaagaatatagattgccagcagca

SEQ ID NO: 31224 - DNA, 25 bp, Canis familiaris
agaagaggctggtttgccctgcaaa

SEQ ID NO: 31225 - DNA, 25 bp, Canis familiaris
agaagaacgggctgagctctcagaa

SEQ ID NO: 31226 - DNA, 25 bp, Canis familiaris
agaagatccaggaccttcctcagaa

SEQ ID NO: 31227 - DNA, 25 bp, Canis familiaris
agaaccaaggtgctatcctgcagac

SEQ ID NO: 31228 - DNA, 25 bp, Canis familiaris
agaaccaaggtgctatcctgcagac

SEQ ID NO: 31229 - DNA, 25 bp, Canis familiaris
agaaccaaggtgctatcctgcagac

SEQ ID NO: 31230 - DNA, 25 bp, Canis familiaris
agaaccaaggtgctatcctgcagac

SEQ ID NO: 31231 - DNA, 25 bp, Canis familiaris
agaactcccaattttccgagacata

SEQ ID NO: 31232 - DNA, 25 bp, Canis familiaris
agaacccagcaaatatgtcaaaata

SEQ ID NO: 31233 - DNA, 25 bp, Canis familiaris
agaagccacggaattgctaagtata

SEQ ID NO: 31234 - DNA, 25 bp, Canis familiaris
agaaccaggtctatgcacaactaac

SEQ ID NO: 31235 - DNA, 25 bp, Canis familiaris
agaattgcacttcttggcaactgaa

SEQ ID NO: 31236 - DNA, 25 bp, Canis familiaris
agaagctgccttcttaagaggacag

SEQ ID NO: 31237 - DNA, 25 bp, Canis familiaris
agaactggcttcttgtagctggggt

SEQ ID NO: 31238 - DNA, 25 bp, Canis familiaris
agaactgactcttcttatctggggc

SEQ ID NO: 31239 - DNA, 25 bp, Canis familiaris
agaactacagattttaagtgggata

SEQ ID NO: 31240 - DNA, 25 bp, Canis familiaris
agaacttcactattccatattggga

SEQ ID NO: 31241 - DNA, 25 bp, Canis familiaris
agaactcactctgtcaatataagga

SEQ ID NO: 31242 - DNA, 25 bp, Canis familiaris
agaactcccatttgcacttgattgg

SEQ ID NO: 31243 - DNA, 25 bp, Canis familiaris
agaacctctctttgacttgtacaga

SEQ ID NO: 31244 - DNA, 25 bp, Canis familiaris
agaagccttatatacattgatttga

SEQ ID NO: 31245 - DNA, 25 bp, Canis familiaris
agcaacttgttatacactgggaatc

SEQ ID NO: 31246 - DNA, 25 bp, Canis familiaris
agcaacttttttcctattgtgcatt

SEQ ID NO: 31247 - DNA, 25 bp, Canis familiaris
agaagcttctttttaacatgtgttg

SEQ ID NO: 31248 - DNA, 25 bp, Canis familiaris
agaacttattctgatatagctgggc

SEQ ID NO: 31249 - DNA, 25 bp, Canis familiaris
agaactctaatatgtatagctgatg

SEQ ID NO: 31250 - DNA, 25 bp, Canis familiaris
agaactctatacctgaatattcaga

SEQ ID NO: 31251 - DNA, 25 bp, Canis familiaris
agaactcatacaacttaaagcagaa

SEQ ID NO: 31252 - DNA, 25 bp, Canis familiaris
agaactaccatgacttcaagtgctt

SEQ ID NO: 31253 - DNA, 25 bp, Canis familiaris
agaatcgacgcaagagctgccaggc

SEQ ID NO: 31254 - DNA, 25 bp, Canis familiaris
agaaggcgctcaagacgctgggcat

SEQ ID NO: 31255 - DNA, 25 bp, Canis familiaris
agaagcaggcacagatcctggcctc

SEQ ID NO: 31256 - DNA, 25 bp, Canis familiaris
agaagcaggctacctgcctggagcc

SEQ ID NO: 31257 - DNA, 25 bp, Canis familiaris
agcaatcagttaccagtctgggggg

SEQ ID NO: 31258 - DNA, 25 bp, Canis familiaris
agcaaaggctaaattctctgtgaag

SEQ ID NO: 31259 - DNA, 25 bp, Canis familiaris
agaacggcaacacactgtgatgtac

SEQ ID NO: 31260 - DNA, 25 bp, Canis familiaris
agaacggcaagctggctggaggccc

SEQ ID NO: 31261 - DNA, 25 bp, Canis familiaris
agaagcggcaaatggaaaggatcct

SEQ ID NO: 31262 - DNA, 25 bp, Canis familiaris
agcaacggaacggcagaaagacact

SEQ ID NO: 31263 - DNA, 25 bp, Canis familiaris
agcaagccgagagacaccaaggatt

SEQ ID NO: 31264 - DNA, 25 bp, Canis familiaris
acgactgccatgcacacacaaagga

SEQ ID NO: 31265 - DNA, 25 bp, Canis familiaris
agaactgagctcgataccaaaggag

SEQ ID NO: 31266 - DNA, 25 bp, Canis familiaris
agaatctgagtccacccagaaggcc

SEQ ID NO: 31267 - DNA, 25 bp, Canis familiaris
agaattgggctcatgctccaaggcc

SEQ ID NO: 31268 - DNA, 25 bp, Canis familiaris
agcacaatgtgtcaagagccaaggc

SEQ ID NO: 31269 - DNA, 25 bp, Canis familiaris
agcagaactgtccaagggcgagtcc

SEQ ID NO: 31270 - DNA, 25 bp, Canis familiaris
agcacaacttacaggggcttgaccc

SEQ ID NO: 31271 - DNA, 25 bp, Canis familiaris
agcagtactccgggggctgctatac

SEQ ID NO: 31272 - DNA, 25 bp, Canis familiaris
agaatactgagggctggcactcctt

SEQ ID NO: 31273 - DNA, 25 bp, Canis familiaris
agaatactcattgcagcagccttcc

SEQ ID NO: 31274 - DNA, 25 bp, Canis familiaris
agaagatcttcttcgacgttcagcc

SEQ ID NO: 31275 - DNA, 25 bp, Canis familiaris
agaagacgtttcgcgttgctgtgtc

SEQ ID NO: 31276 - DNA, 25 bp, Canis familiaris
agaagacgatgtccgccagtatgtt

SEQ ID NO: 31277 - DNA, 25 bp, Canis familiaris
agaagcctgaggacgccgttttaca

SEQ ID NO: 31278 - DNA, 25 bp, Canis familiaris
agaagccacaggacccttgatttcc

SEQ ID NO: 31279 - DNA, 25 bp, Canis familiaris
agcaggcccgagccgcctggatacc

SEQ ID NO: 31280 - DNA, 25 bp, Canis familiaris
agcaggcccgagccgcctggatacc

SEQ ID NO: 31281 - DNA, 25 bp, Canis familiaris
agaagcccggagtcctggacatgca

SEQ ID NO: 31282 - DNA, 25 bp, Canis familiaris
agaactcccaattactggactaatg

SEQ ID NO: 31283 - DNA, 25 bp, Canis familiaris
agaactcccaatttggcagcttgga

SEQ ID NO: 31284 - DNA, 25 bp, Canis familiaris
agaactcccaggtcatgtgctttgg

SEQ ID NO: 31285 - DNA, 25 bp, Canis familiaris
agcaatcccctaggattcttgtcag

SEQ ID NO: 31286 - DNA, 25 bp, Canis familiaris
agcaaccctgtatgatgtttaatgc

SEQ ID NO: 31287 - DNA, 25 bp, Canis familiaris
agaatttcgactctgctgattaagc

SEQ ID NO: 31288 - DNA, 25 bp, Canis familiaris
agcaattgctgccatctttgctgtt

SEQ ID NO: 31289 - DNA, 25 bp, Canis familiaris
agaatcattggtgtctctgcttggc

SEQ ID NO: 31290 - DNA, 25 bp, Canis familiaris
agaatgcagtggaactcactccggc

SEQ ID NO: 31291 - DNA, 25 bp, Canis familiaris
agaatcagctggacactcaagtgga

SEQ ID NO: 31292 - DNA, 25 bp, Canis familiaris
agaatactggcctgaatgttatagc

SEQ ID NO: 31293 - DNA, 25 bp, Canis familiaris
agaagacatcccctacatgtattcc

SEQ ID NO: 31294 - DNA, 25 bp, Canis familiaris
agcaaaccccagctgcagtttcagc

SEQ ID NO: 31295 - DNA, 25 bp, Canis familiaris
agaataccattcgctagttccagcc

SEQ ID NO: 31296 - DNA, 25 bp, Canis familiaris
agaattccattctgctagttcctgg

SEQ ID NO: 31297 - DNA, 25 bp, Canis familiaris
agctattccgtctgaaggatgccct

SEQ ID NO: 31298 - DNA, 25 bp, Canis familiaris
agctattcagaattctagggtccct

SEQ ID NO: 31299 - DNA, 25 bp, Canis familiaris
agctttagaagtcccaggtctgctc

SEQ ID NO: 31300 - DNA, 25 bp, Canis familiaris
agctttagggctgtaggattttgtg

SEQ ID NO: 31301 - DNA, 25 bp, Canis familiaris
aaataaaggttgtgagtattgtatg

SEQ ID NO: 31302 - DNA, 25 bp, Canis familiaris
agaacccagttttggcgctactttg

SEQ ID NO: 31303 - DNA, 25 bp, Canis familiaris
agaatccggttttgccagtacatca

SEQ ID NO: 31304 - DNA, 25 bp, Canis familiaris
agaacgtgtgttagtcgcagtcctt

SEQ ID NO: 31305 - DNA, 25 bp, Canis familiaris
agaagatggttcaaacacagtcctt

SEQ ID NO: 31306 - DNA, 25 bp, Canis familiaris
agaatgagttatgtagcagctctcc

SEQ ID NO: 31307 - DNA, 25 bp, Canis familiaris
agaagagttccgatgagcagctgca

SEQ ID NO: 31308 - DNA, 25 bp, Canis familiaris
agaagcagaggcccctaactgcatc

SEQ ID NO: 31309 - DNA, 25 bp, Canis familiaris
agaagaagtggttcatagacagcta

SEQ ID NO: 31310 - DNA, 25 bp, Canis familiaris
agaaccgtggattataccagcaact

SEQ ID NO: 31311 - DNA, 25 bp, Canis familiaris
agaagtcagtgccatggatacccat

SEQ ID NO: 31312 - DNA, 25 bp, Canis familiaris
agaagacgctcgcagatacactctt

SEQ ID NO: 31313 - DNA, 25 bp, Canis familiaris
agcagacacgcactttggacttttt

SEQ ID NO: 31314 - DNA, 25 bp, Canis familiaris
agaagctggcagctgctgagccttt

SEQ ID NO: 31315 - DNA, 25 bp, Canis familiaris
agaagggccctgggcctgtgtgggt

SEQ ID NO: 31316 - DNA, 25 bp, Canis familiaris
agcaaggcgccttggggcttgaggc

SEQ ID NO: 31317 - DNA, 25 bp, Canis familiaris
agcaaggccagtgggcgctttgggc

SEQ ID NO: 31318 - DNA, 25 bp, Canis familiaris
agaagcccgtggccgattatttcct

SEQ ID NO: 31319 - DNA, 25 bp, Canis familiaris
agaagatccgggccaaggctttcca

SEQ ID NO: 31320 - DNA, 25 bp, Canis familiaris
agaaggctccagcccagaaggttcc

SEQ ID NO: 31321 - DNA, 25 bp, Canis familiaris
agaaggctccagcccagaaggttcc

SEQ ID NO: 31322 - DNA, 25 bp, Canis familiaris
agaaggcttggtcagactgttctcc

SEQ ID NO: 31323 - DNA, 25 bp, Canis familiaris
agaagcctttgtcgaagtgtcctgc

SEQ ID NO: 31324 - DNA, 25 bp, Canis familiaris
agcaaggtgttgtgaatttcccata

SEQ ID NO: 31325 - DNA, 25 bp, Canis familiaris
agaagaggctttggttcttcctgct

SEQ ID NO: 31326 - DNA, 25 bp, Canis familiaris
agaagagcatgccttctgcttttgc

SEQ ID NO: 31327 - DNA, 25 bp, Canis familiaris
agaagatgccatcctggcttcaggc

SEQ ID NO: 31328 - DNA, 25 bp, Canis familiaris
agaagtccagcggatgctgcacgtc

SEQ ID NO: 31329 - DNA, 25 bp, Canis familiaris
agaaggtgcaggccgtgcacaacct

SEQ ID NO: 31330 - DNA, 25 bp, Canis familiaris
agaagcgtgagacgccaccattcct

SEQ ID NO: 31331 - DNA, 25 bp, Canis familiaris
agaagtgaagcaccgactcatgtct

SEQ ID NO: 31332 - DNA, 25 bp, Canis familiaris
agaaggccactgacgactatcacta

SEQ ID NO: 31333 - DNA, 25 bp, Canis familiaris
agaattgccagtgaagccatcctat

SEQ ID NO: 31334 - DNA, 25 bp, Canis familiaris
agaaccacagtggatgtcctacatc

SEQ ID NO: 31335 - DNA, 25 bp, Canis familiaris
agaacgaatgagggtcctctcatcg

SEQ ID NO: 31336 - DNA, 25 bp, Canis familiaris
agcaactttgagggtagatttgtgg

SEQ ID NO: 31337 - DNA, 25 bp, Canis familiaris
agcaactttgagtgccttctcttgt

SEQ ID NO: 31338 - DNA, 25 bp, Canis familiaris
agaagttctcagtgcgctattacct

SEQ ID NO: 31339 - DNA, 25 bp, Canis familiaris
agaagacttcaatcagtgctcgcac

SEQ ID NO: 31340 - DNA, 25 bp, Canis familiaris
agaagtcttaagtctgtggcacact

SEQ ID NO: 31341 - DNA, 25 bp, Canis familiaris
agaagctctatgacattgatgtggc

SEQ ID NO: 31342 - DNA, 25 bp, Canis familiaris
agaagcttgcttctgatgaggcaga

SEQ ID NO: 31343 - DNA, 25 bp, Canis familiaris
agaagactgttctggagctcatgaa

SEQ ID NO: 31344 - DNA, 25 bp, Canis familiaris
agaagacagttctgggccgtctact

SEQ ID NO: 31345 - DNA, 25 bp, Canis familiaris
agaagaagagtctgtgtgcctgcct

SEQ ID NO: 31346 - DNA, 25 bp, Canis familiaris
agaataactgtcaagttccccacct

SEQ ID NO: 31347 - DNA, 25 bp, Canis familiaris
aaatcaacgggacttgtccaaagtg

SEQ ID NO: 31348 - DNA, 25 bp, Canis familiaris
agaataccgggaatctgacccaccg

SEQ ID NO: 31349 - DNA, 25 bp, Canis familiaris
agaattccaggattactacccactt

SEQ ID NO: 31350 - DNA, 25 bp, Canis familiaris
agaatttggctgttgcactactcgc

SEQ ID NO: 31351 - DNA, 25 bp, Canis familiaris
agaatatgtgcggttatcctctcag

SEQ ID NO: 31352 - DNA, 25 bp, Canis familiaris
agaattgtggtctctgcccatagac

SEQ ID NO: 31353 - DNA, 25 bp, Canis familiaris
agcaacgtggtctctggacacaacc

SEQ ID NO: 31354 - DNA, 25 bp, Canis familiaris
accacttcgtggatgagtacgaccc

SEQ ID NO: 31355 - DNA, 25 bp, Canis familiaris
agcacctaagggagtctgagccacc

SEQ ID NO: 31356 - DNA, 25 bp, Canis familiaris
agcatcctaagactgggttagtcta

SEQ ID NO: 31357 - DNA, 25 bp, Canis familiaris
agcatctataaccgggaggagttcg

SEQ ID NO: 31358 - DNA, 25 bp, Canis familiaris
agcagcttcaaaaggggggggcatc

SEQ ID NO: 31359 - DNA, 25 bp, Canis familiaris
agcagcttttaatacagggtagata

SEQ ID NO: 31360 - DNA, 25 bp, Canis familiaris
agcacatttcaataaaattgtttgg

SEQ ID NO: 31361 - DNA, 25 bp, Canis familiaris
agcctcctgccgctaaatggtttag

SEQ ID NO: 31362 - DNA, 25 bp, Canis familiaris
agccctggcctgcaaagggttatag

SEQ ID NO: 31363 - DNA, 25 bp, Canis familiaris
actcagggtaataaagccgtttcag

SEQ ID NO: 31364 - DNA, 25 bp, Canis familiaris
agccagtagtgataaagcgtttttc

SEQ ID NO: 31365 - DNA, 25 bp, Canis familiaris
agaagttgttataaagttgaattgt

SEQ ID NO: 31366 - DNA, 25 bp, Canis familiaris
agaatgttgtgttaagttaattaga

SEQ ID NO: 31367 - DNA, 25 bp, Canis familiaris
agaatttagtgattccttacttaca

SEQ ID NO: 31368 - DNA, 25 bp, Canis familiaris
agaagttctgtttgcctaactctca

SEQ ID NO: 31369 - DNA, 25 bp, Canis familiaris
agaatgttctgcggtggtacaccca

SEQ ID NO: 31370 - DNA, 25 bp, Canis familiaris
agaatgggtcaggccttacaccaag

SEQ ID NO: 31371 - DNA, 25 bp, Canis familiaris
agaagaggtgcagactttcccatct

SEQ ID NO: 31372 - DNA, 25 bp, Canis familiaris
agaagtggtgctcactttctccatt

SEQ ID NO: 31373 - DNA, 25 bp, Canis familiaris
agaattggggccattttactctgtc

SEQ ID NO: 31374 - DNA, 25 bp, Canis familiaris
agaaggggtccttatttactcactg

SEQ ID NO: 31375 - DNA, 25 bp, Canis familiaris
agaagggtgtttgctttttgctctg

SEQ ID NO: 31376 - DNA, 25 bp, Canis familiaris
aaacaggtttcagctttaggtcact

SEQ ID NO: 31377 - DNA, 25 bp, Canis familiaris
agcaactggtttattttcatggggt

SEQ ID NO: 31378 - DNA, 25 bp, Canis familiaris
agaagttgtatggtgtctctctctg

SEQ ID NO: 31379 - DNA, 25 bp, Canis familiaris
agaagtattctgctgtttctctctg

SEQ ID NO: 31380 - DNA, 25 bp, Canis familiaris
agaagtatcagtctgtctttccccc

SEQ ID NO: 31381 - DNA, 25 bp, Canis familiaris
agcacaaaagttgcattcttccccc

SEQ ID NO: 31382 - DNA, 25 bp, Canis familiaris
agcaacagaagtacctgtcggcgcc

SEQ ID NO: 31383 - DNA, 25 bp, Canis familiaris
agcaagaacgtcactgtgctcagag

SEQ ID NO: 31384 - DNA, 25 bp, Canis familiaris
agaagatcgatgacctcttctcggg

SEQ ID NO: 31385 - DNA, 25 bp, Canis familiaris
agaagatcatgaatccttctgcccc

SEQ ID NO: 31386 - DNA, 25 bp, Canis familiaris
agaagcatctgttgtcatcttcctc

SEQ ID NO: 31387 - DNA, 25 bp, Canis familiaris
agaagcatcttctttctaggaattt

SEQ ID NO: 31388 - DNA, 25 bp, Canis familiaris
agcatagcacttttactacgatgtt

SEQ ID NO: 31389 - DNA, 25 bp, Canis familiaris
agcaatgcctgataccatgaccttt

SEQ ID NO: 31390 - DNA, 25 bp, Canis familiaris
agcaatgacagatacccaccatttg

SEQ ID NO: 31391 - DNA, 25 bp, Canis familiaris
agcaagcaaatcaaaatcaccaggt

SEQ ID NO: 31392 - DNA, 25 bp, Canis familiaris
agaagcacacattaaacatcctaaa

SEQ ID NO: 31393 - DNA, 25 bp, Canis familiaris
agaagcctggacaaagcaattatga

SEQ ID NO: 31394 - DNA, 25 bp, Canis familiaris
agaagcctggtccatctaagctgag

SEQ ID NO: 31395 - DNA, 25 bp, Canis familiaris
agcaacgtggtcctggacatccagc

SEQ ID NO: 31396 - DNA, 25 bp, Canis familiaris
agaagctgtggtgcgtgcaggtcgc

SEQ ID NO: 31397 - DNA, 25 bp, Canis familiaris
agaagctggagggcggcagcgagcg

SEQ ID NO: 31398 - DNA, 25 bp, Canis familiaris
agaagctgaaggccacgcaggtgtc

SEQ ID NO: 31399 - DNA, 25 bp, Canis familiaris
agaagccatgggaagcagggtgtgc

SEQ ID NO: 31400 - DNA, 25 bp, Canis familiaris
agaagggggccattggggctctttg

SEQ ID NO: 31401 - DNA, 25 bp, Canis familiaris
agaagttgggcccagaggactgcct

SEQ ID NO: 31402 - DNA, 25 bp, Canis familiaris
actagttctgggctgagaccacctt

SEQ ID NO: 31403 - DNA, 25 bp, Canis familiaris
actacttacaggctgataccagttt

SEQ ID NO: 31404 - DNA, 25 bp, Canis familiaris
agcaaagtgaagacattgtaccaga

SEQ ID NO: 31405 - DNA, 25 bp, Canis familiaris
agcaagagctacactgattaccgag

SEQ ID NO: 31406 - DNA, 25 bp, Canis familiaris
agcagagagtaccgctattgaaggc

SEQ ID NO: 31407 - DNA, 25 bp, Canis familiaris
agcacgtgtacctcattcacagagc

SEQ ID NO: 31408 - DNA, 25 bp, Canis familiaris
agaatgtctaccagacccgacttta

SEQ ID NO: 31409 - DNA, 25 bp, Canis familiaris
agaatggctatgaaagacccgactt

SEQ ID NO: 31410 - DNA, 25 bp, Canis familiaris
agaagtgtatgatgagccacaagtt

SEQ ID NO: 31411 - DNA, 25 bp, Canis familiaris
agaagagcaagactgcagccaagaa

SEQ ID NO: 31412 - DNA, 25 bp, Canis familiaris
agaagagactggtgcgcaaggaggc

SEQ ID NO: 31413 - DNA, 25 bp, Canis familiaris
agaagagtgggctgccaagggctgt

SEQ ID NO: 31414 - DNA, 25 bp, Canis familiaris
agcaaaatttgctcccaacactgct

SEQ ID NO: 31415 - DNA, 25 bp, Canis familiaris
agcacaagtttgtacctcaaagcag

SEQ ID NO: 31416 - DNA, 25 bp, Canis familiaris
agcaacctggtgagcctcgagaatg

SEQ ID NO: 31417 - DNA, 25 bp, Canis familiaris
agaatcctcgtattgtctctgaaag

SEQ ID NO: 31418 - DNA, 25 bp, Canis familiaris
agcacaatctgccttttaccaaaga

SEQ ID NO: 31419 - DNA, 25 bp, Canis familiaris
agaagtcatgttaaacacacacaca

SEQ ID NO: 31420 - DNA, 25 bp, Canis familiaris
agaagtgttctaaagccatgccaaa

SEQ ID NO: 31421 - DNA, 25 bp, Canis familiaris
agaagactggctgaagctctgccca

SEQ ID NO: 31422 - DNA, 25 bp, Canis familiaris
agaagaagctctgcaatgtcaccaa

SEQ ID NO: 31423 - DNA, 25 bp, Canis familiaris
agaagtcagtgctctgtgttcaaag

SEQ ID NO: 31424 - DNA, 25 bp, Canis familiaris
agcaagtagctcactagatttggaa

SEQ ID NO: 31425 - DNA, 25 bp, Canis familiaris
agaagtgccgattgtgaaattaaaa

SEQ ID NO: 31426 - DNA, 25 bp, Canis familiaris
agaagtgcctttctacttctacacc

SEQ ID NO: 31427 - DNA, 25 bp, Canis familiaris
agaaggcctgggctattcctgacat

SEQ ID NO: 31428 - DNA, 25 bp, Canis familiaris
agaaggactgggccgagtccacact

SEQ ID NO: 31429 - DNA, 25 bp, Canis familiaris
agaagaagggccccaatgccaactc

SEQ ID NO: 31430 - DNA, 25 bp, Canis familiaris
agaagaagggggccatcccagagcc

SEQ ID NO: 31431 - DNA, 25 bp, Canis familiaris
agaagagaggggccggggctgagcc

SEQ ID NO: 31432 - DNA, 25 bp, Canis familiaris
agaatgagaggggccccaggctgac

SEQ ID NO: 31433 - DNA, 25 bp, Canis familiaris
agcacgtgggtcgccatatggctag

SEQ ID NO: 31434 - DNA, 25 bp, Canis familiaris
agcacagatgggaaccctttttggt

SEQ ID NO: 31435 - DNA, 25 bp, Canis familiaris
agcaagctgtggcacactctgtaca

SEQ ID NO: 31436 - DNA, 25 bp, Canis familiaris
agcacagcgaacacctgttcacggc

SEQ ID NO: 31437 - DNA, 25 bp, Canis familiaris
agcacaagatacccctttactttga

SEQ ID NO: 31438 - DNA, 25 bp, Canis familiaris
agcaatagatattctggttctggct

SEQ ID NO: 31439 - DNA, 25 bp, Canis familiaris
agcactagattgttccctgatcgaa

SEQ ID NO: 31440 - DNA, 25 bp, Canis familiaris
agcagctgaagcagcccgcatatta

SEQ ID NO: 31441 - DNA, 25 bp, Canis familiaris
agcagcatgactgagatgcccatat

SEQ ID NO: 31442 - DNA, 25 bp, Canis familiaris
agcagtgccattagggacattttaa

SEQ ID NO: 31443 - DNA, 25 bp, Canis familiaris
agcagtgaacttgtcagccaattaa

SEQ ID NO: 31444 - DNA, 25 bp, Canis familiaris
agcatggcaattaacagcatctcaa

SEQ ID NO: 31445 - DNA, 25 bp, Canis familiaris
agaagcagttgttcatgcactaaga

SEQ ID NO: 31446 - DNA, 25 bp, Canis familiaris
agaagagctatgagctgcctgacgg

SEQ ID NO: 31447 - DNA, 25 bp, Canis familiaris
agaagatcgagatcagccagcacgc

SEQ ID NO: 31448 - DNA, 25 bp, Canis familiaris
agaatggaagcaccagcgcatcacc

SEQ ID NO: 31449 - DNA, 25 bp, Canis familiaris
agcactgtagtgcccaggcaccgtt

SEQ ID NO: 31450 - DNA, 25 bp, Canis familiaris
agcctgtggtctagcatcagagcat

SEQ ID NO: 31451 - DNA, 25 bp, Canis familiaris
agcacgaggctgtatgaaggacata

SEQ ID NO: 31452 - DNA, 25 bp, Canis familiaris
agcaggaatctggtgtggaacatcg

SEQ ID NO: 31453 - DNA, 25 bp, Canis familiaris
agaagaacggctggtacacacgctc

SEQ ID NO: 31454 - DNA, 25 bp, Canis familiaris
agaagcagtcgcatagttaacacat

SEQ ID NO: 31455 - DNA, 25 bp, Canis familiaris
agcaacctctcttccattaaagcat

SEQ ID NO: 31456 - DNA, 25 bp, Canis familiaris
agaatctcctctttgcctagattgt

SEQ ID NO: 31457 - DNA, 25 bp, Canis familiaris
agaattcgctgttgccctaattcaa

SEQ ID NO: 31458 - DNA, 25 bp, Canis familiaris
agaattagctctggcacccatacat

SEQ ID NO: 31459 - DNA, 25 bp, Canis familiaris
agaatttctcgccccaatatattat

SEQ ID NO: 31460 - DNA, 25 bp, Canis familiaris
cagttttccccttgcttaagtaatg

SEQ ID NO: 31461 - DNA, 25 bp, Canis familiaris
agcagtgtttaggttggtacgtcaa

SEQ ID NO: 31462 - DNA, 25 bp, Canis familiaris
agaattcttcccttgagtagctgga

SEQ ID NO: 31463 - DNA, 25 bp, Canis familiaris
agcaatttccccgggcaagctgaac

SEQ ID NO: 31464 - DNA, 25 bp, Canis familiaris
agaaggtcacctctggtagcacaac

SEQ ID NO: 31465 - DNA, 25 bp, Canis familiaris
agaaggagacctccgtatcatgcca

SEQ ID NO: 31466 - DNA, 25 bp, Canis familiaris
agaaggcgactgcagctttcagcaa

SEQ ID NO: 31467 - DNA, 25 bp, Canis familiaris
agaaggcgagctcagagggcagcgt

SEQ ID NO: 31468 - DNA, 25 bp, Canis familiaris
agaaggtgtgccgagtggctggcga

SEQ ID NO: 31469 - DNA, 25 bp, Canis familiaris
agaaggctgtgccttctgtgtgtgc

SEQ ID NO: 31470 - DNA, 25 bp, Canis familiaris
agaagcagctggcttctgtgctcct

SEQ ID NO: 31471 - DNA, 25 bp, Canis familiaris
agaagcagcggccttctgtttttct

SEQ ID NO: 31472 - DNA, 25 bp, Canis familiaris
agaatacagtgggttgattgatttc

SEQ ID NO: 31473 - DNA, 25 bp, Canis familiaris
agaatacactgccagtctcttgtct

SEQ ID NO: 31474 - DNA, 25 bp, Canis familiaris
agaatcaagctggacctgttctctg

SEQ ID NO: 31475 - DNA, 25 bp, Canis familiaris
agcaacatccagggcagcgttatct

SEQ ID NO: 31476 - DNA, 25 bp, Canis familiaris
agaatcatgcaagggccgctgcaca

SEQ ID NO: 31477 - DNA, 25 bp, Canis familiaris
agaagcagctgaagcagcccgcata

SEQ ID NO: 31478 - DNA, 25 bp, Canis familiaris
agaatgtgctcaacaaccagcagtt

SEQ ID NO: 31479 - DNA, 25 bp, Canis familiaris
agaaggctcagaggaccagctgctc

SEQ ID NO: 31480 - DNA, 25 bp, Canis familiaris
agaatggcactgtgaacacccacgt

SEQ ID NO: 31481 - DNA, 25 bp, Canis familiaris
agaagaagcagctgaagcagcccgc

SEQ ID NO: 31482 - DNA, 25 bp, Canis familiaris
agaagagcagcgggagcagcagcag

SEQ ID NO: 31483 - DNA, 25 bp, Canis familiaris
agaagcacatggcagctgccagcgc

SEQ ID NO: 31484 - DNA, 25 bp, Canis familiaris
agaagtctgtgccatctggaggccc

SEQ ID NO: 31485 - DNA, 25 bp, Canis familiaris
agaaggctgcactgctgtaggcctc

SEQ ID NO: 31486 - DNA, 25 bp, Canis familiaris
agaaggctcagctggtagtgatagc

SEQ ID NO: 31487 - DNA, 25 bp, Canis familiaris
agaaggcctgccagccagagatggc

SEQ ID NO: 31488 - DNA, 25 bp, Canis familiaris
agaagtgcctggccgtaggcatggt

SEQ ID NO: 31489 - DNA, 25 bp, Canis familiaris
agcacattctggtggtcaggcagtt

SEQ ID NO: 31490 - DNA, 25 bp, Canis familiaris
agcaccaaggcgagctcagggctca

SEQ ID NO: 31491 - DNA, 25 bp, Canis familiaris
agcagaagacggaggatgaggtatt

SEQ ID NO: 31492 - DNA, 25 bp, Canis familiaris
agaatggtgtggaagaaatggtaat

SEQ ID NO: 31493 - DNA, 25 bp, Canis familiaris
agaaggctgccctagcagaaggtaa

SEQ ID NO: 31494 - DNA, 25 bp, Canis familiaris
agaatgcactctccaaagcactggg

SEQ ID NO: 31495 - DNA, 25 bp, Canis familiaris
agaatgtgtctcagaagctctagta

SEQ ID NO: 31496 - DNA, 25 bp, Canis familiaris
agaagttgctaccagagccgacaga

SEQ ID NO: 31497 - DNA, 25 bp, Canis familiaris
agaatcatttaccaggcacacaagc

SEQ ID NO: 31498 - DNA, 25 bp, Canis familiaris
agaatcctgtagctcgaaaatccga

SEQ ID NO: 31499 - DNA, 25 bp, Canis familiaris
agaatccactatgatggaaaacagt

SEQ ID NO: 31500 - DNA, 25 bp, Canis familiaris
agaattccgataacgaacgagactc

SEQ ID NO: 31501 - DNA, 25 bp, Canis familiaris
agaatatcccttgtacctagtctct

SEQ ID NO: 31502 - DNA, 25 bp, Canis familiaris
agaagacggcgtgtgtcttacctgc

SEQ ID NO: 31503 - DNA, 25 bp, Canis familiaris
agaagggagcctgctttgtactctg

SEQ ID NO: 31504 - DNA, 25 bp, Canis familiaris
agaaggaggcagcctcttcttcctc

SEQ ID NO: 31505 - DNA, 25 bp, Canis familiaris
agaatggacaactcttttgcccact

SEQ ID NO: 31506 - DNA, 25 bp, Canis familiaris
agaatggaaggctctttctgaaaga

SEQ ID NO: 31507 - DNA, 25 bp, Canis familiaris
agcggaaatgactccttctgaaatg

SEQ ID NO: 31508 - DNA, 25 bp, Canis familiaris
agcgtaacttccagcttctggtcat

SEQ ID NO: 31509 - DNA, 25 bp, Canis familiaris
agaataaattccctgcttcttgtcc

SEQ ID NO: 31510 - DNA, 25 bp, Canis familiaris
agcaatataatatcggtggttctat

SEQ ID NO: 31511 - DNA, 25 bp, Canis familiaris
agaatgtattttggtgtggtggcta

SEQ ID NO: 31512 - DNA, 25 bp, Canis familiaris
agcaagttcctgagtgggggcacga

SEQ ID NO: 31513 - DNA, 25 bp, Canis familiaris
agaagtaccgagcctgagggctaga

SEQ ID NO: 31514 - DNA, 25 bp, Canis familiaris
agaagtaccactccatagatggcat

SEQ ID NO: 31515 - DNA, 25 bp, Canis familiaris
agaagttgaactccatagagtttgc

SEQ ID NO: 31516 - DNA, 25 bp, Canis familiaris
agaatgttgaaccacttgccttctc

SEQ ID NO: 31517 - DNA, 25 bp, Canis familiaris
agaagtaatgatgcttcccttccct

SEQ ID NO: 31518 - DNA, 25 bp, Canis familiaris
agcaacctatgtgttcgtgtttcct

SEQ ID NO: 31519 - DNA, 25 bp, Canis familiaris
agaatcgttcttgtcctgtttctta

SEQ ID NO: 31520 - DNA, 25 bp, Canis familiaris
agaattgtttgtcctgtttccttct

SEQ ID NO: 31521 - DNA, 25 bp, Canis familiaris
agaagtgctttcaagcgcctttctt

SEQ ID NO: 31522 - DNA, 25 bp, Canis familiaris
agaagtctaataaggcactctccgt

SEQ ID NO: 31523 - DNA, 25 bp, Canis familiaris
agaattccaatcaaggtcacctcag

SEQ ID NO: 31524 - DNA, 25 bp, Canis familiaris
agcaacccaattattcactccagct

SEQ ID NO: 31525 - DNA, 25 bp, Canis familiaris
agcaatcccaaaaatggcctacaat

SEQ ID NO: 31526 - DNA, 25 bp, Canis familiaris
agaatcggggtggcagggcccagat

SEQ ID NO: 31527 - DNA, 25 bp, Canis familiaris
agaatagcgagggtctgggcaccgt

SEQ ID NO: 31528 - DNA, 25 bp, Canis familiaris
agaagagcaggcttctggggcacct

SEQ ID NO: 31529 - DNA, 25 bp, Canis familiaris
agaagaggggtctcatggctctgct

SEQ ID NO: 31530 - DNA, 25 bp, Canis familiaris
agaagaggcttgcctccagtgtcct

SEQ ID NO: 31531 - DNA, 25 bp, Canis familiaris
agcaagaggctatctcctgagtctt

SEQ ID NO: 31532 - DNA, 25 bp, Canis familiaris
agaagagactggtccctgtacttgc

SEQ ID NO: 31533 - DNA, 25 bp, Canis familiaris
agaaggattcggtcgtgtcacatct

SEQ ID NO: 31534 - DNA, 25 bp, Canis familiaris
agaaggattcactgcaggctccatt

SEQ ID NO: 31535 - DNA, 25 bp, Canis familiaris
agaaggacaatctagactccctgct

SEQ ID NO: 31536 - DNA, 25 bp, Canis familiaris
agaatggaatctcagcactccctat

SEQ ID NO: 31537 - DNA, 25 bp, Canis familiaris
agaaggagtctaactctgcaccgtg

SEQ ID NO: 31538 - DNA, 25 bp, Canis familiaris
agaatggagtccgactctgcacctg

SEQ ID NO: 31539 - DNA, 25 bp, Canis familiaris
agaatggcatgtagcccttctactg

SEQ ID NO: 31540 - DNA, 25 bp, Canis familiaris
agaatgcctgattccttgtgctact

SEQ ID NO: 31541 - DNA, 25 bp, Canis familiaris
agaattctgtatccttggctcacaa

SEQ ID NO: 31542 - DNA, 25 bp, Canis familiaris
agcagatttgtaacccagtatccat

SEQ ID NO: 31543 - DNA, 25 bp, Canis familiaris
agctggggttacacagtttctctta

SEQ ID NO: 31544 - DNA, 25 bp, Canis familiaris
agcacagtggttcttcgtgtatttt

SEQ ID NO: 31545 - DNA, 25 bp, Canis familiaris
agaatatggtgtcctctcggaatga

SEQ ID NO: 31546 - DNA, 25 bp, Canis familiaris
agaatgtggcgtcgctctgaggcac

SEQ ID NO: 31547 - DNA, 25 bp, Canis familiaris
agaaggacgaggacgcagacacgcc

SEQ ID NO: 31548 - DNA, 25 bp, Canis familiaris
agaaggacgagcccaagtgcggcga

SEQ ID NO: 31549 - DNA, 25 bp, Canis familiaris
agaagggcgagcaggagccggaacc

SEQ ID NO: 31550 - DNA, 25 bp, Canis familiaris
agcaagggggcaaggactctggctc

SEQ ID NO: 31551 - DNA, 25 bp, Canis familiaris
agaagtctggtgaggcctctgtgac

SEQ ID NO: 31552 - DNA, 25 bp, Canis familiaris
agaagtcgattaagtgctgccctga

SEQ ID NO: 31553 - DNA, 25 bp, Canis familiaris
agcaagtctagtttgactgcccgta

SEQ ID NO: 31554 - DNA, 25 bp, Canis familiaris
agcagagtctgactgtggatccagt

SEQ ID NO: 31555 - DNA, 25 bp, Canis familiaris
agcaggttgtttgataaatggcagc

SEQ ID NO: 31556 - DNA, 25 bp, Canis familiaris
agcactgttgtatgaggtccggcac

SEQ ID NO: 31557 - DNA, 25 bp, Canis familiaris
agcactgtggccctgggtagggaca

SEQ ID NO: 31558 - DNA, 25 bp, Canis familiaris
agcactgggccaaaggaaattgagc

SEQ ID NO: 31559 - DNA, 25 bp, Canis familiaris
agcaatgcatgcccaaaatgtaact

SEQ ID NO: 31560 - DNA, 25 bp, Canis familiaris
agaattctgatccctactaatgcta

SEQ ID NO: 31561 - DNA, 25 bp, Canis familiaris
agcagaaggccggtacttttactct

SEQ ID NO: 31562 - DNA, 25 bp, Canis familiaris
agcagtatttttgacatttttcttt

SEQ ID NO: 31563 - DNA, 25 bp, Canis familiaris
agctgttactaatgcctttttgttt

SEQ ID NO: 31564 - DNA, 25 bp, Canis familiaris
agaattgaccaatatcttttgtctt

SEQ ID NO: 31565 - DNA, 25 bp, Canis familiaris
agcagttcccagctacttaggtatt

SEQ ID NO: 31566 - DNA, 25 bp, Canis familiaris
agcgttcctcggatcaaagcgtacc

SEQ ID NO: 31567 - DNA, 25 bp, Canis familiaris
agctgaccggggatgagaacttcac

SEQ ID NO: 31568 - DNA, 25 bp, Canis familiaris
agctgaagcaggagaaggaggggaa

SEQ ID NO: 31569 - DNA, 25 bp, Canis familiaris
agcgaggggccagagctgggggact

SEQ ID NO: 31570 - DNA, 25 bp, Canis familiaris
agcaaggggacgagtgcggggtcgc

SEQ ID NO: 31571 - DNA, 25 bp, Canis familiaris
agcagagtgggagccgtgcaggggc

SEQ ID NO: 31572 - DNA, 25 bp, Canis familiaris
agcaacgggagcaaactcacgggcc

SEQ ID NO: 31573 - DNA, 25 bp, Canis familiaris
agaagggtgggaagccagagccgcc

SEQ ID NO: 31574 - DNA, 25 bp, Canis familiaris
agaaggggagatgtgcagccccctc

SEQ ID NO: 31575 - DNA, 25 bp, Canis familiaris
agaaggcctatgtggaggctaacca

SEQ ID NO: 31576 - DNA, 25 bp, Canis familiaris
agaaggcctatgtggaggccaacca

SEQ ID NO: 31577 - DNA, 25 bp, Canis familiaris
agaaggcgaagatggcggccaagac

SEQ ID NO: 31578 - DNA, 25 bp, Canis familiaris
agaatggtgaggttgcgtgcagcga

SEQ ID NO: 31579 - DNA, 25 bp, Canis familiaris
agaagtagatggaggtgctgcaggc

SEQ ID NO: 31580 - DNA, 25 bp, Canis familiaris
agaagtcctggaggtggctggcact

SEQ ID NO: 31581 - DNA, 25 bp, Canis familiaris
agcaagtcctcttgggacgatcctc

SEQ ID NO: 31582 - DNA, 25 bp, Canis familiaris
agcagcacttttttgtgacgatggg

SEQ ID NO: 31583 - DNA, 25 bp, Canis familiaris
agcacttttttgtgacgatgggaaa

SEQ ID NO: 31584 - DNA, 25 bp, Canis familiaris
agcagtctctttgttccttggagaa

SEQ ID NO: 31585 - DNA, 25 bp, Canis familiaris
agcagtttatattttcctaatggct

SEQ ID NO: 31586 - DNA, 25 bp, Canis familiaris
agaattctgatcaaactcctaagtt

SEQ ID NO: 31587 - DNA, 25 bp, Canis familiaris
agcacagttgttcagctcctagagc

SEQ ID NO: 31588 - DNA, 25 bp, Canis familiaris
agcacttctgttcaccacgaataat

SEQ ID NO: 31589 - DNA, 25 bp, Canis familiaris
actttcgtcacgtcaaccaaaacat

SEQ ID NO: 31590 - DNA, 25 bp, Canis familiaris
agcattttcatagtgtcaaaaaaaa

SEQ ID NO: 31591 - DNA, 25 bp, Canis familiaris
agcagtctaatgtgccacgaaatta

SEQ ID NO: 31592 - DNA, 25 bp, Canis familiaris
agcatgcctttctctgggaagatct

SEQ ID NO: 31593 - DNA, 25 bp, Canis familiaris
agcacaccattccattgggcaagca

SEQ ID NO: 31594 - DNA, 25 bp, Canis familiaris
agcacatccaggctggggaatcccc

SEQ ID NO: 31595 - DNA, 25 bp, Canis familiaris
agcacccttgagtggtgcacacccg

SEQ ID NO: 31596 - DNA, 25 bp, Canis familiaris
agcaccaaatggcggatgacgccgg

SEQ ID NO: 31597 - DNA, 25 bp, Canis familiaris
agcatcgcaaaggggcttgtccctc

SEQ ID NO: 31598 - DNA, 25 bp, Canis familiaris
agcaccactagctggctgggtgccc

SEQ ID NO: 31599 - DNA, 25 bp, Canis familiaris
agcaactctcgaatcacggtttctc

SEQ ID NO: 31600 - DNA, 25 bp, Canis familiaris
agcaattgatgctctcagggaattt

SEQ ID NO: 31601 - DNA, 25 bp, Canis familiaris
agaagtgatcatctctggctctaat

SEQ ID NO: 31602 - DNA, 25 bp, Canis familiaris
agaattgtcatcctcttctatcaag

SEQ ID NO: 31603 - DNA, 25 bp, Canis familiaris
agaatcttccgcatctgtaattgaa

SEQ ID NO: 31604 - DNA, 25 bp, Canis familiaris
agaatcttacagcatctttgataaa

SEQ ID NO: 31605 - DNA, 25 bp, Canis familiaris
agaatgttaatccatattggcagaa

SEQ ID NO: 31606 - DNA, 25 bp, Canis familiaris
agcaattagccacaatagccaaact

SEQ ID NO: 31607 - DNA, 25 bp, Canis familiaris
agcactatcccttaatagcccaaaa

SEQ ID NO: 31608 - DNA, 25 bp, Canis familiaris
agcaccaaactcacataactcaaag

SEQ ID NO: 31609 - DNA, 25 bp, Canis familiaris
agcaacgtaacttaaggccaatcag

SEQ ID NO: 31610 - DNA, 25 bp, Canis familiaris
agaaggaaatctgcaacgcctacac

SEQ ID NO: 31611 - DNA, 25 bp, Canis familiaris
agaaggatccctgatgttgaccaca

SEQ ID NO: 31612 - DNA, 25 bp, Canis familiaris
agaaggccctagaagagctcaccaa

SEQ ID NO: 31613 - DNA, 25 bp, Canis familiaris
agaaggcacgctggaagactggcca

SEQ ID NO: 31614 - DNA, 25 bp, Canis familiaris
agcacttccagagctgaagctggcc

SEQ ID NO: 31615 - DNA, 25 bp, Canis familiaris
agcgttgccaggagagcgacgactc

SEQ ID NO: 31616 - DNA, 25 bp, Canis familiaris
agcagtcctagtaaggggccacctg

SEQ ID NO: 31617 - DNA, 25 bp, Canis familiaris
agctgtttaaagcaggccctgactg

SEQ ID NO: 31618 - DNA, 25 bp, Canis familiaris
agcttacgcaagggacccctgacat

SEQ ID NO: 31619 - DNA, 25 bp, Canis familiaris
agcttaaactttgactcgtacataa

SEQ ID NO: 31620 - DNA, 25 bp, Canis familiaris
agcagtacaagtttccctgccttca

SEQ ID NO: 31621 - DNA, 25 bp, Canis familiaris
agaatacaatgtggctttccccgaa

SEQ ID NO: 31622 - DNA, 25 bp, Canis familiaris
agaattcacagaacttgtcccatgc

SEQ ID NO: 31623 - DNA, 25 bp, Canis familiaris
agcaatccaggaactggtcacatct

SEQ ID NO: 31624 - DNA, 25 bp, Canis familiaris
agaatgctgcagtacagggctcttc

SEQ ID NO: 31625 - DNA, 25 bp, Canis familiaris
agcaggtcaaaatgcagatcttcgt

SEQ ID NO: 31626 - DNA, 25 bp, Canis familiaris
agcagccatagataataattcccct

SEQ ID NO: 31627 - DNA, 25 bp, Canis familiaris
agcactctaaaagacattctgtccc

SEQ ID NO: 31628 - DNA, 25 bp, Canis familiaris
agcacctgatatgtaggtcctaccc

SEQ ID NO: 31629 - DNA, 25 bp, Canis familiaris
agcatccatatacggagcgtcctac

SEQ ID NO: 31630 - DNA, 25 bp, Canis familiaris
agcacgactcatcaaggtaccaaca

SEQ ID NO: 31631 - DNA, 25 bp, Canis familiaris
agcaaggtcaaggagttccgccaca

SEQ ID NO: 31632 - DNA, 25 bp, Canis familiaris
agcaagtgtaacagccacaccacac

SEQ ID NO: 31633 - DNA, 25 bp, Canis familiaris
agaaggctgaacagcccacatccgc

SEQ ID NO: 31634 - DNA, 25 bp, Canis familiaris
agaaggctgtaaatgccaagaaaga

SEQ ID NO: 31635 - DNA, 25 bp, Canis familiaris
agaatagccatatttgggagaaaga

SEQ ID NO: 31636 - DNA, 25 bp, Canis familiaris
agcagcaaggacatccggatgaaaa

SEQ ID NO: 31637 - DNA, 25 bp, Canis familiaris
agcagcaaggacatccggatgaaaa

SEQ ID NO: 31638 - DNA, 25 bp, Canis familiaris
agcagcccccgaggcagtagaagaa

SEQ ID NO: 31639 - DNA, 25 bp, Canis familiaris
agcacccaggcctggggcaggagag

SEQ ID NO: 31640 - DNA, 25 bp, Canis familiaris
agcaccgaagtcctggaggaccagg

SEQ ID NO: 31641 - DNA, 25 bp, Canis familiaris
agcacaataattttgggagcccagt

SEQ ID NO: 31642 - DNA, 25 bp, Canis familiaris
agcaggaagtgtgttggggccaatg

SEQ ID NO: 31643 - DNA, 25 bp, Canis familiaris
actcacttcagtgttgggaaccatg

SEQ ID NO: 31644 - DNA, 25 bp, Canis familiaris
agcgagctatttcttctcagaacca

SEQ ID NO: 31645 - DNA, 25 bp, Canis familiaris
agcgaggtgttgcttttaaaccata

SEQ ID NO: 31646 - DNA, 25 bp, Canis familiaris
agcaagttttttctctaatatgtct

SEQ ID NO: 31647 - DNA, 25 bp, Canis familiaris
agcctgcttttttgtacaaacttgt

SEQ ID NO: 31648 - DNA, 25 bp, Canis familiaris
agcactcgttgtcagcttcacaact

SEQ ID NO: 31649 - DNA, 25 bp, Canis familiaris
agcagttgtgttgctgttacaaatt

SEQ ID NO: 31650 - DNA, 25 bp, Canis familiaris
agcagtttggtttattgccatattt

SEQ ID NO: 31651 - DNA, 25 bp, Canis familiaris
agcactctgggtgaaatgatttctt

SEQ ID NO: 31652 - DNA, 25 bp, Canis familiaris
agcaccttgcttgtaattgtctctt

SEQ ID NO: 31653 - DNA, 25 bp, Canis familiaris
agaatctacctcctaactgcattct

SEQ ID NO: 31654 - DNA, 25 bp, Canis familiaris
agcaatcttaccttaatccactgat

SEQ ID NO: 31655 - DNA, 25 bp, Canis familiaris
agcaacttctctttctgaacactgt

SEQ ID NO: 31656 - DNA, 25 bp, Canis familiaris
agaatcttctggtatcatttcgctc

SEQ ID NO: 31657 - DNA, 25 bp, Canis familiaris
agaatttctttgatgtctgctgcaa

SEQ ID NO: 31658 - DNA, 25 bp, Canis familiaris
agaattgtagtccaggctgctgctc

SEQ ID NO: 31659 - DNA, 25 bp, Canis familiaris
agaatctgggtttgatgctgctgct

SEQ ID NO: 31660 - DNA, 25 bp, Canis familiaris
agaatctgtggtacttgggcattgt

SEQ ID NO: 31661 - DNA, 25 bp, Canis familiaris
agaatctgctggcgatagcggcttc

SEQ ID NO: 31662 - DNA, 25 bp, Canis familiaris
agcagccgcgagcagctcagcggct

SEQ ID NO: 31663 - DNA, 25 bp, Canis familiaris
agcagccaggagcagcttcctgtca

SEQ ID NO: 31664 - DNA, 25 bp, Canis familiaris
agcagccatggacaattcggagatt

SEQ ID NO: 31665 - DNA, 25 bp, Canis familiaris
agcagcctgcagctggattacgcaa

SEQ ID NO: 31666 - DNA, 25 bp, Canis familiaris
agcagcttctgccaggaacctggac

SEQ ID NO: 31667 - DNA, 25 bp, Canis familiaris
agcagtattagagaacacagattgt

SEQ ID NO: 31668 - DNA, 25 bp, Canis familiaris
agcaaattcgctgcaacctgttgat

SEQ ID NO: 31669 - DNA, 25 bp, Canis familiaris
agcaagtatactgacctggtttcca

SEQ ID NO: 31670 - DNA, 25 bp, Canis familiaris
agcaacatgtacaaacctgcagttt

SEQ ID NO: 31671 - DNA, 25 bp, Canis familiaris
agcaatatccacagatactgccttt

SEQ ID NO: 31672 - DNA, 25 bp, Canis familiaris
agcaaatctgccaaggagtccctct

SEQ ID NO: 31673 - DNA, 25 bp, Canis familiaris
accaaggctcaagtagtcccagtaa

SEQ ID NO: 31674 - DNA, 25 bp, Canis familiaris
agcacatagccttaatggtaccgta

SEQ ID NO: 31675 - DNA, 25 bp, Canis familiaris
agaatagcacctgtgatgtcactgg

SEQ ID NO: 31676 - DNA, 25 bp, Canis familiaris
agcacaagtcgctggattctctggc

SEQ ID NO: 31677 - DNA, 25 bp, Canis familiaris
agcacctgtcaccaggatcttcttt

SEQ ID NO: 31678 - DNA, 25 bp, Canis familiaris
agcacctggcactggacatagtttt

SEQ ID NO: 31679 - DNA, 25 bp, Canis familiaris
agcattggcaaatggtataattttt

SEQ ID NO: 31680 - DNA, 25 bp, Canis familiaris
agcatctgacaaactggttcaaatt

SEQ ID NO: 31681 - DNA, 25 bp, Canis familiaris
agcactatgcagggccttctaaagt

SEQ ID NO: 31682 - DNA, 25 bp, Canis familiaris
agcaagagaggccctatcccaactc

SEQ ID NO: 31683 - DNA, 25 bp, Canis familiaris
agaaggagcgttgttccagtgcctt

SEQ ID NO: 31684 - DNA, 25 bp, Canis familiaris
agcaagggactttttccactggtct

SEQ ID NO: 31685 - DNA, 25 bp, Canis familiaris
agcgagggactatagacccgcgtcg

SEQ ID NO: 31686 - DNA, 25 bp, Canis familiaris
agcaggggcttcttggacccctgtc

SEQ ID NO: 31687 - DNA, 25 bp, Canis familiaris
agcaagtatttcatgggcactcctg

SEQ ID NO: 31688 - DNA, 25 bp, Canis familiaris
agaatctatcttccgtgtactcttt

SEQ ID NO: 31689 - DNA, 25 bp, Canis familiaris
agcactgcgtttcagagtttcttgt

SEQ ID NO: 31690 - DNA, 25 bp, Canis familiaris
agcaaggcattaacgagtttctcag

SEQ ID NO: 31691 - DNA, 25 bp, Canis familiaris
agaattctggagccagcattctttc

SEQ ID NO: 31692 - DNA, 25 bp, Canis familiaris
agcaaatcggtgcactgatcgctgc

SEQ ID NO: 31693 - DNA, 25 bp, Canis familiaris
agcaaatcggtgcactgatcgctgc

SEQ ID NO: 31694 - DNA, 25 bp, Canis familiaris
agcaatcactggggatgcgctgccc

SEQ ID NO: 31695 - DNA, 25 bp, Canis familiaris
agaatgcacatgcttgctgagatgc

SEQ ID NO: 31696 - DNA, 25 bp, Canis familiaris
agaatgagtgcatttgcccatgccc

SEQ ID NO: 31697 - DNA, 25 bp, Canis familiaris
agaatcatgatctatacgcaaccgg

SEQ ID NO: 31698 - DNA, 25 bp, Canis familiaris
agaatttgccagacgctatctcagg

SEQ ID NO: 31699 - DNA, 25 bp, Canis familiaris
agaattcagctaacgcttccagacc

SEQ ID NO: 31700 - DNA, 25 bp, Canis familiaris
agaatgtagatgtctttctccagcc

SEQ ID NO: 31701 - DNA, 25 bp, Canis familiaris
agaataagctgctgtgttccgctcc

SEQ ID NO: 31702 - DNA, 25 bp, Canis familiaris
agaaggacttcattgctttctgctc

SEQ ID NO: 31703 - DNA, 25 bp, Canis familiaris
agaaggaagatcgtgcttctcgccc

SEQ ID NO: 31704 - DNA, 25 bp, Canis familiaris
agaaggcacagactctgctgctgcc

SEQ ID NO: 31705 - DNA, 25 bp, Canis familiaris
agcagagagccaagtttctccttct

SEQ ID NO: 31706 - DNA, 25 bp, Canis familiaris
agcaagatactatcacttcctacca

SEQ ID NO: 31707 - DNA, 25 bp, Canis familiaris
agcaagaacttgccagctttatccc

SEQ ID NO: 31708 - DNA, 25 bp, Canis familiaris
agcagtggacttgccttggatccag

SEQ ID NO: 31709 - DNA, 25 bp, Canis familiaris
agcacgaggccgaaatgaggaccag

SEQ ID NO: 31710 - DNA, 25 bp, Canis familiaris
agcacgagcagcacgactgggacta

SEQ ID NO: 31711 - DNA, 25 bp, Canis familiaris
agcagctggagcacgatgcgggaga

SEQ ID NO: 31712 - DNA, 25 bp, Canis familiaris
agcagtgggctgccaaggtgggctg

SEQ ID NO: 31713 - DNA, 25 bp, Canis familiaris
agcagtcaggcgacgggagcgatgc

SEQ ID NO: 31714 - DNA, 25 bp, Canis familiaris
agcaggagggactggagccaagatg

SEQ ID NO: 31715 - DNA, 25 bp, Canis familiaris
agcaacctggacttggagaccgatc

SEQ ID NO: 31716 - DNA, 25 bp, Canis familiaris
agcaatgccttagctgggacacgca

SEQ ID NO: 31717 - DNA, 25 bp, Canis familiaris
agcaagccttacaagtgggtgcgca

SEQ ID NO: 31718 - DNA, 25 bp, Canis familiaris
agcaactcttgagtcgtggcgtgcg

SEQ ID NO: 31719 - DNA, 25 bp, Canis familiaris
agcacaatcctcatgagtggcttca

SEQ ID NO: 31720 - DNA, 25 bp, Canis familiaris
agcacaaagttggaaggcttcacac

SEQ ID NO: 31721 - DNA, 25 bp, Canis familiaris
agcaaagagatttacaggtgtaatt

SEQ ID NO: 31722 - DNA, 25 bp, Canis familiaris
agcaaacaatctcaagtaggaatct

SEQ ID NO: 31723 - DNA, 25 bp, Canis familiaris
aaaccactccaagtccagatgaatt

SEQ ID NO: 31724 - DNA, 25 bp, Canis familiaris
agcaacccataatgctgccaaccat

SEQ ID NO: 31725 - DNA, 25 bp, Canis familiaris
agaatgcctaaatgtctgaccactt

SEQ ID NO: 31726 - DNA, 25 bp, Canis familiaris
agcattccaaaaattctataccttt

SEQ ID NO: 31727 - DNA, 25 bp, Canis familiaris
agctctaccaaaatgaactaacctt

SEQ ID NO: 31728 - DNA, 25 bp, Canis familiaris
agctctacccatttttgctaaattc

SEQ ID NO: 31729 - DNA, 25 bp, Canis familiaris
agcttccattgtaatatcctaaatc

SEQ ID NO: 31730 - DNA, 25 bp, Canis familiaris
agaatcactcttaaagccacatatt

SEQ ID NO: 31731 - DNA, 25 bp, Canis familiaris
agcaattcttgtaacagtatattta

SEQ ID NO: 31732 - DNA, 25 bp, Canis familiaris
agaattgcttgaagtcctctctttc

SEQ ID NO: 31733 - DNA, 25 bp, Canis familiaris
agaatcgcattgaccgacgcttacc

SEQ ID NO: 31734 - DNA, 25 bp, Canis familiaris
agcaacagcattcagccaacttcac

SEQ ID NO: 31735 - DNA, 25 bp, Canis familiaris
agcagtcagagtcgatgcccaaacc

SEQ ID NO: 31736 - DNA, 25 bp, Canis familiaris
agcagtcaagtgcctggacgggcct

SEQ ID NO: 31737 - DNA, 25 bp, Canis familiaris
agcagatcaagttcgagagagacct

SEQ ID NO: 31738 - DNA, 25 bp, Canis familiaris
agaatcagagcttcgaggtttcgtc

SEQ ID NO: 31739 - DNA, 25 bp, Canis familiaris
agaatctgcaattcgcacgtttcct

SEQ ID NO: 31740 - DNA, 25 bp, Canis familiaris
agcaagctgaacgagcacgttaact

SEQ ID NO: 31741 - DNA, 25 bp, Canis familiaris
agcacagcagaacatcacgtgatgc

SEQ ID NO: 31742 - DNA, 25 bp, Canis familiaris
agaatgagagacacatcaagatgtt

SEQ ID NO: 31743 - DNA, 25 bp, Canis familiaris
agaatggcatccttgataacttttt

SEQ ID NO: 31744 - DNA, 25 bp, Canis familiaris
agcaatgttcagttgtataccttga

SEQ ID NO: 31745 - DNA, 25 bp, Canis familiaris
agaatggctcatcatcttggcctcg

SEQ ID NO: 31746 - DNA, 25 bp, Canis familiaris
agaatggcatatccttgttactgtg

SEQ ID NO: 31747 - DNA, 25 bp, Canis familiaris
agcactgacaagcatgctgcttact

SEQ ID NO: 31748 - DNA, 25 bp, Canis familiaris
agcacaggcagccagagctttctat

SEQ ID NO: 31749 - DNA, 25 bp, Canis familiaris
agcacatggcaccatccacatatac

SEQ ID NO: 31750 - DNA, 25 bp, Canis familiaris
agcaaggcactgaaaatgccaagat

SEQ ID NO: 31751 - DNA, 25 bp, Canis familiaris
agcaaggcactgaaaatgccaagat

SEQ ID NO: 31752 - DNA, 25 bp, Canis familiaris
agcaaggcagctcagaggcagatag

SEQ ID NO: 31753 - DNA, 25 bp, Canis familiaris
agcacagcaacagaggagagcacag

SEQ ID NO: 31754 - DNA, 25 bp, Canis familiaris
agcacccaattactgcaagcagcac

SEQ ID NO: 31755 - DNA, 25 bp, Canis familiaris
agcacatccctgaatggagcaaccg

SEQ ID NO: 31756 - DNA, 25 bp, Canis familiaris
agcaccatttattgagagcaatgtc

SEQ ID NO: 31757 - DNA, 25 bp, Canis familiaris
agcaccatttattgaagagactgtc

SEQ ID NO: 31758 - DNA, 25 bp, Canis familiaris
agcagcactttactaacagcttagc

SEQ ID NO: 31759 - DNA, 25 bp, Canis familiaris
agcagcctgaggacagaacacatta

SEQ ID NO: 31760 - DNA, 25 bp, Canis familiaris
agcacttatgtgactgacctcagtt

SEQ ID NO: 31761 - DNA, 25 bp, Canis familiaris
agcaactatgtgacagacctcttcc

SEQ ID NO: 31762 - DNA, 25 bp, Canis familiaris
agcacaatcagtgcatggacccctc

SEQ ID NO: 31763 - DNA, 25 bp, Canis familiaris
agcaaagagatactgtgcccatccc

SEQ ID NO: 31764 - DNA, 25 bp, Canis familiaris
agcagacatagatgctggccacctc

SEQ ID NO: 31765 - DNA, 25 bp, Canis familiaris
agcaacagcagcaagctcttggccc

SEQ ID NO: 31766 - DNA, 25 bp, Canis familiaris
agaatgcataaactccatggcccat

SEQ ID NO: 31767 - DNA, 25 bp, Canis familiaris
agcacatcaagaagcccattcgctc

SEQ ID NO: 31768 - DNA, 25 bp, Canis familiaris
agcacaagtgatggcccttgagccc

SEQ ID NO: 31769 - DNA, 25 bp, Canis familiaris
agcacaaagtgactccttgctccag

SEQ ID NO: 31770 - DNA, 25 bp, Canis familiaris
agcagtcggttggagcgagcatccc

SEQ ID NO: 31771 - DNA, 25 bp, Canis familiaris
agcagtagtgttggaggtcggccct

SEQ ID NO: 31772 - DNA, 25 bp, Canis familiaris
agcaatttgcacgcatgtttggcat

SEQ ID NO: 31773 - DNA, 25 bp, Canis familiaris
agcaagcattcaagccttcattctc

SEQ ID NO: 31774 - DNA, 25 bp, Canis familiaris
agcagcagcttcacgctggcattaa

SEQ ID NO: 31775 - DNA, 25 bp, Canis familiaris
agcaggaatcacggggcatttacct

SEQ ID NO: 31776 - DNA, 25 bp, Canis familiaris
agcaatgaaagcgggtatttaccta

SEQ ID NO: 31777 - DNA, 25 bp, Canis familiaris
agctaccaaactgctttgtattcta

SEQ ID NO: 31778 - DNA, 25 bp, Canis familiaris
agctacatcaaaacctgcttggata

SEQ ID NO: 31779 - DNA, 25 bp, Canis familiaris
agcaacagacatactccacttggct

SEQ ID NO: 31780 - DNA, 25 bp, Canis familiaris
agcaccaggaacacatcctgcgctt

SEQ ID NO: 31781 - DNA, 25 bp, Canis familiaris
agcagcctgaataatagcatccccc

SEQ ID NO: 31782 - DNA, 25 bp, Canis familiaris
agcagcctgtggaatcaggccccga

SEQ ID NO: 31783 - DNA, 25 bp, Canis familiaris
agcagccagagtaacgagacgccca

SEQ ID NO: 31784 - DNA, 25 bp, Canis familiaris
agctgcacgagaaactggaaccgtt

SEQ ID NO: 31785 - DNA, 25 bp, Canis familiaris
agctaccggacagtgcgtatcgagt

SEQ ID NO: 31786 - DNA, 25 bp, Canis familiaris
agcttgccgatcatctttgacgatt

SEQ ID NO: 31787 - DNA, 25 bp, Canis familiaris
agcaatccaatacttgttgccggat

SEQ ID NO: 31788 - DNA, 25 bp, Canis familiaris
agcatggccacccttattggcctgt

SEQ ID NO: 31789 - DNA, 25 bp, Canis familiaris
agcagttcagcagtttcctggggtt

SEQ ID NO: 31790 - DNA, 25 bp, Canis familiaris
agaattcgcatcttgattctgggcg

SEQ ID NO: 31791 - DNA, 25 bp, Canis familiaris
agcaactgcagcaggacagcggcgg

SEQ ID NO: 31792 - DNA, 25 bp, Canis familiaris
agcaagctgcaggcccagaagagcc

SEQ ID NO: 31793 - DNA, 25 bp, Canis familiaris
agcagagcttcagccagagagtggc

SEQ ID NO: 31794 - DNA, 25 bp, Canis familiaris
agcaagttacgccagagaaacctgt

SEQ ID NO: 31795 - DNA, 25 bp, Canis familiaris
agcactgttccagagggaagagtgt

SEQ ID NO: 31796 - DNA, 25 bp, Canis familiaris
agcagtgttgcaactagtggcctag

SEQ ID NO: 31797 - DNA, 25 bp, Canis familiaris
agcactcagtctactatgcttgccc

SEQ ID NO: 31798 - DNA, 25 bp, Canis familiaris
agcacgcatgtcatgctctcattcc

SEQ ID NO: 31799 - DNA, 25 bp, Canis familiaris
agcagcagcttgagttattcccact

SEQ ID NO: 31800 - DNA, 25 bp, Canis familiaris
agcaactctatttctttggcatcct

SEQ ID NO: 31801 - DNA, 25 bp, Canis familiaris
agcacctgctttccttgatgtgctc

SEQ ID NO: 31802 - DNA, 25 bp, Canis familiaris
agcaccagatccaacctgtgatgcc

SEQ ID NO: 31803 - DNA, 25 bp, Canis familiaris
agctctagacatgatcttggacctg

SEQ ID NO: 31804 - DNA, 25 bp, Canis familiaris
agctgtcagaatggatttgcagtga

SEQ ID NO: 31805 - DNA, 25 bp, Canis familiaris
agcaacatgaatgacctggtgtctg

SEQ ID NO: 31806 - DNA, 25 bp, Canis familiaris
agcacacgtgatcaccggtgttgat

SEQ ID NO: 31807 - DNA, 25 bp, Canis familiaris
agcacaggtgtgaagcgcgagggaa

SEQ ID NO: 31808 - DNA, 25 bp, Canis familiaris
agcacacccagcaagcgaagttgaa

SEQ ID NO: 31809 - DNA, 25 bp, Canis familiaris
agcacacccagaaggccctggaaat

SEQ ID NO: 31810 - DNA, 25 bp, Canis familiaris
agcaagatccagaagtcctcgggca

SEQ ID NO: 31811 - DNA, 25 bp, Canis familiaris
agcaagcacgcgaaggtggcaggtg

SEQ ID NO: 31812 - DNA, 25 bp, Canis familiaris
agcaatcaagggcctgggcagcggc

SEQ ID NO: 31813 - DNA, 25 bp, Canis familiaris
agcaataacggctggagcgcgtcct

SEQ ID NO: 31814 - DNA, 25 bp, Canis familiaris
agcaataacaggtctgtgatgccct

SEQ ID NO: 31815 - DNA, 25 bp, Canis familiaris
agcacaaacagtggttctcctcaac

SEQ ID NO: 31816 - DNA, 25 bp, Canis familiaris
agcagcggaagtggctggtcagctc

SEQ ID NO: 31817 - DNA, 25 bp, Canis familiaris
agcagtggtatcagcagttcctcta

SEQ ID NO: 31818 - DNA, 25 bp, Canis familiaris
agcagtggtatcagcagttcctcta

SEQ ID NO: 31819 - DNA, 25 bp, Canis familiaris
agcagtggtatcagcagttcctcta

SEQ ID NO: 31820 - DNA, 25 bp, Canis familiaris
agcagtggtatcagcagttcctcta

SEQ ID NO: 31821 - DNA, 25 bp, Canis familiaris
agcagtggtatcagcagttcctcta

SEQ ID NO: 31822 - DNA, 25 bp, Canis familiaris
agcaatggttgctcatgttcaacct

SEQ ID NO: 31823 - DNA, 25 bp, Canis familiaris
agcaaagcattctcatcagtcgcaa

SEQ ID NO: 31824 - DNA, 25 bp, Canis familiaris
agcaacatgctattttggcatcaga

SEQ ID NO: 31825 - DNA, 25 bp, Canis familiaris
agcacacgctaaagtagctcataac

SEQ ID NO: 31826 - DNA, 25 bp, Canis familiaris
agcacaaagaacatggccaagacgt

SEQ ID NO: 31827 - DNA, 25 bp, Canis familiaris
agcaactggaggatggccgtacttt

SEQ ID NO: 31828 - DNA, 25 bp, Canis familiaris
agcaactggaggatggccgtacttt

SEQ ID NO: 31829 - DNA, 25 bp, Canis familiaris
agcaactggaggatggccgtacttt

SEQ ID NO: 31830 - DNA, 25 bp, Canis familiaris
agcaactgtcaaggctggcccttgc

SEQ ID NO: 31831 - DNA, 25 bp, Canis familiaris
agcaacaaacgactgtgccatttca

SEQ ID NO: 31832 - DNA, 25 bp, Canis familiaris
agaatcaagttggtctccatttacc

SEQ ID NO: 31833 - DNA, 25 bp, Canis familiaris
agcaacaagcttgttccctgaactc

SEQ ID NO: 31834 - DNA, 25 bp, Canis familiaris
agcttagagctttgttacctgtact

SEQ ID NO: 31835 - DNA, 25 bp, Canis familiaris
agcacttggtgtttatattcgtatt

SEQ ID NO: 31836 - DNA, 25 bp, Canis familiaris
agcactgggagttattctatatgtt

SEQ ID NO: 31837 - DNA, 25 bp, Canis familiaris
agcactgatgtctttaccgctagtt

SEQ ID NO: 31838 - DNA, 25 bp, Canis familiaris
agcactgaggacacagcctctggac

SEQ ID NO: 31839 - DNA, 25 bp, Canis familiaris
agcactgggaacagcctgtctacac

SEQ ID NO: 31840 - DNA, 25 bp, Canis familiaris
agcacaggaggacttgatttcaaac

SEQ ID NO: 31841 - DNA, 25 bp, Canis familiaris
agcaactcatcgattgatttacggc

SEQ ID NO: 31842 - DNA, 25 bp, Canis familiaris
agcaagccatggagttctgtcagcg

SEQ ID NO: 31843 - DNA, 25 bp, Canis familiaris
agcacaggatggcgctagttccgat

SEQ ID NO: 31844 - DNA, 25 bp, Canis familiaris
agcacaggcacaaagtaaactggaa

SEQ ID NO: 31845 - DNA, 25 bp, Canis familiaris
agcacccacaaaccacgaaggagac

SEQ ID NO: 31846 - DNA, 25 bp, Canis familiaris
agctactgaaaaccaccaactgacc

SEQ ID NO: 31847 - DNA, 25 bp, Canis familiaris
gagctaataaaatgccgaacggggc

SEQ ID NO: 31848 - DNA, 25 bp, Canis familiaris
agctgaacgagcacgttaactgggt

SEQ ID NO: 31849 - DNA, 25 bp, Canis familiaris
agctgaaaaggctgatttacggtta

SEQ ID NO: 31850 - DNA, 25 bp, Canis familiaris
agctaaaatggaatgttacaccctt

SEQ ID NO: 31851 - DNA, 25 bp, Canis familiaris
agcttatttaaaagtagcaccactt

SEQ ID NO: 31852 - DNA, 25 bp, Canis familiaris
agcattttgctagcccataaacctt

SEQ ID NO: 31853 - DNA, 25 bp, Canis familiaris
agcattttccctggccaaagtcagt

SEQ ID NO: 31854 - DNA, 25 bp, Canis familiaris
agcagtgttttctgctgcaaagtct

SEQ ID NO: 31855 - DNA, 25 bp, Canis familiaris
agcaggttggtcttcctgcgtgtct

SEQ ID NO: 31856 - DNA, 25 bp, Canis familiaris
agcaggggcgatatcctctgacgta

SEQ ID NO: 31857 - DNA, 25 bp, Canis familiaris
agcaaggtgggatcacatctgacca

SEQ ID NO: 31858 - DNA, 25 bp, Canis familiaris
agcacagaggggtacccagcacagc

SEQ ID NO: 31859 - DNA, 25 bp, Canis familiaris
agcacagaaagatacccaacacatg

SEQ ID NO: 31860 - DNA, 25 bp, Canis familiaris
agcacaaccaggcagcaggcaaaat

SEQ ID NO: 31861 - DNA, 25 bp, Canis familiaris
agcaaatcacatagtcaagcccaaa

SEQ ID NO: 31862 - DNA, 25 bp, Canis familiaris
agcaatgcatcctgcaccaccaact

SEQ ID NO: 31863 - DNA, 25 bp, Canis familiaris
agcaatgatcatatggatacccact

SEQ ID NO: 31864 - DNA, 25 bp, Canis familiaris
agcaatatgccttaagtcaccactt

SEQ ID NO: 31865 - DNA, 25 bp, Canis familiaris
agaatagctacttactattccattt

SEQ ID NO: 31866 - DNA, 25 bp, Canis familiaris
agcacataatgactacctttccctt

SEQ ID NO: 31867 - DNA, 25 bp, Canis familiaris
agcactaaggttactacctcctctc

SEQ ID NO: 31868 - DNA, 25 bp, Canis familiaris
agcagttactgttgaccacctggtc

SEQ ID NO: 31869 - DNA, 25 bp, Canis familiaris
agcacagtactaggaccacctgggc

SEQ ID NO: 31870 - DNA, 25 bp, Canis familiaris
agcacagtaatgactaccactcaga

SEQ ID NO: 31871 - DNA, 25 bp, Canis familiaris
agcaagtgccttgatgccattccat

SEQ ID NO: 31872 - DNA, 25 bp, Canis familiaris
agcaaactgcttttccattaatgga

SEQ ID NO: 31873 - DNA, 25 bp, Canis familiaris
agctaaccttactcataaaggagct

SEQ ID NO: 31874 - DNA, 25 bp, Canis familiaris
accagtcctctgtgaatagggggta

SEQ ID NO: 31875 - DNA, 25 bp, Canis familiaris
acatccggatcgtgactaggggtgg

SEQ ID NO: 31876 - DNA, 25 bp, Canis familiaris
acaccgacctgacacgggaggggct

SEQ ID NO: 31877 - DNA, 25 bp, Canis familiaris
agcaccggcctcagaaggtgggggc

SEQ ID NO: 31878 - DNA, 25 bp, Canis familiaris
agcacaccacccagcatcgggtggg

SEQ ID NO: 31879 - DNA, 25 bp, Canis familiaris
agcacacccctagacagtggaggag

SEQ ID NO: 31880 - DNA, 25 bp, Canis familiaris
agcacacccctgggaaaccgtgata

SEQ ID NO: 31881 - DNA, 25 bp, Canis familiaris
agcagagccctgcaggaaaccagta

SEQ ID NO: 31882 - DNA, 25 bp, Canis familiaris
agcagcccctcgaaaaactatgtga

SEQ ID NO: 31883 - DNA, 25 bp, Canis familiaris
agcacggtttccaagcacacgtgga

SEQ ID NO: 31884 - DNA, 25 bp, Canis familiaris
agcactttatttcaccacgggattt

SEQ ID NO: 31885 - DNA, 25 bp, Canis familiaris
agcacatttttcttacaactggact

SEQ ID NO: 31886 - DNA, 25 bp, Canis familiaris
agcacagttttcttgaacagcatgg

SEQ ID NO: 31887 - DNA, 25 bp, Canis familiaris
agcatagtgatttcctgttagtgag

SEQ ID NO: 31888 - DNA, 25 bp, Canis familiaris
agctcaagcttaactcagaagtggg

SEQ ID NO: 31889 - DNA, 25 bp, Canis familiaris
agctctctgttcactcagaaacttg

SEQ ID NO: 31890 - DNA, 25 bp, Canis familiaris
agcaactctgtctctaacaacttga

SEQ ID NO: 31891 - DNA, 25 bp, Canis familiaris
agcaccctgtgctgctcaccgaggc

SEQ ID NO: 31892 - DNA, 25 bp, Canis familiaris
agcaataatggctgcctctctgggg

SEQ ID NO: 31893 - DNA, 25 bp, Canis familiaris
agcaatattggctgccctggagcct

SEQ ID NO: 31894 - DNA, 25 bp, Canis familiaris
agcaataaggcggcgctctggacct

SEQ ID NO: 31895 - DNA, 25 bp, Canis familiaris
agcaaaggtcctggcctggaggtgt

SEQ ID NO: 31896 - DNA, 25 bp, Canis familiaris
agcataaccttttcgctggagttgt

SEQ ID NO: 31897 - DNA, 25 bp, Canis familiaris
agcacaaccactaccagaagcagtt

SEQ ID NO: 31898 - DNA, 25 bp, Canis familiaris
agcaccccctcacagagagaaggtc

SEQ ID NO: 31899 - DNA, 25 bp, Canis familiaris
agcacacgccctgcagagaaggagt

SEQ ID NO: 31900 - DNA, 25 bp, Canis familiaris
agcactccgattcccaaatgaagat

SEQ ID NO: 31901 - DNA, 25 bp, Canis familiaris
agcctcggattccttcttgaaaaag

SEQ ID NO: 31902 - DNA, 25 bp, Canis familiaris
agctctctggtagccttggtcaaag

SEQ ID NO: 31903 - DNA, 25 bp, Canis familiaris
agcttcggtgggtggaggacagggt

SEQ ID NO: 31904 - DNA, 25 bp, Canis familiaris
agctatgggtcgtggcggaatcggt

SEQ ID NO: 31905 - DNA, 25 bp, Canis familiaris
agcagtgggtggtgggcaacctggc

SEQ ID NO: 31906 - DNA, 25 bp, Canis familiaris
acagggggggactcaatcctagatg

SEQ ID NO: 31907 - DNA, 25 bp, Canis familiaris
acaggtcggaggaaccaagccaatt

SEQ ID NO: 31908 - DNA, 25 bp, Canis familiaris
agccgtcgtcacctgaacggaacct

SEQ ID NO: 31909 - DNA, 25 bp, Canis familiaris
agcacgtcccccaggggagagctgc

SEQ ID NO: 31910 - DNA, 25 bp, Canis familiaris
acctaccaccaagggggctgtgcat

SEQ ID NO: 31911 - DNA, 25 bp, Canis familiaris
agcttgacgcaccaagcggaactgc

SEQ ID NO: 31912 - DNA, 25 bp, Canis familiaris
agcttggccatcacatcctgaaggc

SEQ ID NO: 31913 - DNA, 25 bp, Canis familiaris
agcatttacaacccctgaagtgctt

SEQ ID NO: 31914 - DNA, 25 bp, Canis familiaris
agcatttactgaccacttactgtgt

SEQ ID NO: 31915 - DNA, 25 bp, Canis familiaris
agctcactggcatggccttccgtgt

SEQ ID NO: 31916 - DNA, 25 bp, Canis familiaris
accactggggatcttgcctgtggac

SEQ ID NO: 31917 - DNA, 25 bp, Canis familiaris
agcacctggaggagtgtgaccctga

SEQ ID NO: 31918 - DNA, 25 bp, Canis familiaris
agcagcccagggaggctgaccacag

SEQ ID NO: 31919 - DNA, 25 bp, Canis familiaris
agcagcacctggctgaagctgacca

SEQ ID NO: 31920 - DNA, 25 bp, Canis familiaris
agcacaaatgtccatcaactgatga

SEQ ID NO: 31921 - DNA, 25 bp, Canis familiaris
agcacaactgtcaacatctgttgct

SEQ ID NO: 31922 - DNA, 25 bp, Canis familiaris
agcacacactacacagcttttttgt

SEQ ID NO: 31923 - DNA, 25 bp, Canis familiaris
agcaaccaaatccaactgttgattt

SEQ ID NO: 31924 - DNA, 25 bp, Canis familiaris
agcagacagcaaggataacattttt

SEQ ID NO: 31925 - DNA, 25 bp, Canis familiaris
agcagaagaatacaatttcttttaa

SEQ ID NO: 31926 - DNA, 25 bp, Canis familiaris
agcagagaaccacactttatataaa

SEQ ID NO: 31927 - DNA, 25 bp, Canis familiaris
agcagtaactgacaacttgaataat

SEQ ID NO: 31928 - DNA, 25 bp, Canis familiaris
agcacagacaggcccagacttgaag

SEQ ID NO: 31929 - DNA, 25 bp, Canis familiaris
agcaaaggggcctacttgctcatgg

SEQ ID NO: 31930 - DNA, 25 bp, Canis familiaris
agcttaggaggccacacagttcatg

SEQ ID NO: 31931 - DNA, 25 bp, Canis familiaris
agcagacgccagctacaagttcagc

SEQ ID NO: 31932 - DNA, 25 bp, Canis familiaris
agcagcgcgccacaataaattcacg

SEQ ID NO: 31933 - DNA, 25 bp, Canis familiaris
agcagcagcttccacaagcacaaat

SEQ ID NO: 31934 - DNA, 25 bp, Canis familiaris
agcagtcttctggaggagcagttcc

SEQ ID NO: 31935 - DNA, 25 bp, Canis familiaris
agcagtcttctggaggagcagttcc

SEQ ID NO: 31936 - DNA, 25 bp, Canis familiaris
agcagtcttctggaggagcagttcc

SEQ ID NO: 31937 - DNA, 25 bp, Canis familiaris
agcatgttgattggaggccctacgc

SEQ ID NO: 31938 - DNA, 25 bp, Canis familiaris
agcatttctagagggcccgaggctt

SEQ ID NO: 31939 - DNA, 25 bp, Canis familiaris
agcgttaagagctgaccgatggtta

SEQ ID NO: 31940 - DNA, 25 bp, Canis familiaris
agctttaaccataaccgcatttcat

SEQ ID NO: 31941 - DNA, 25 bp, Canis familiaris
agcagttagacctaaccacgctaac

SEQ ID NO: 31942 - DNA, 25 bp, Canis familiaris
agcagcttgagttattcccactgat

SEQ ID NO: 31943 - DNA, 25 bp, Canis familiaris
agcacattgagtttcccaagctgac

SEQ ID NO: 31944 - DNA, 25 bp, Canis familiaris
agcaattgcgtaagacaacatgtac

SEQ ID NO: 31945 - DNA, 25 bp, Canis familiaris
agcaaactctacacagtgcagctcc

SEQ ID NO: 31946 - DNA, 25 bp, Canis familiaris
agcacaaccattactactactcatc

SEQ ID NO: 31947 - DNA, 25 bp, Canis familiaris
agcacacaacaaatatcagatacca

SEQ ID NO: 31948 - DNA, 25 bp, Canis familiaris
agcaccggaagttcaagcacacaca

SEQ ID NO: 31949 - DNA, 25 bp, Canis familiaris
agcaccgtgggatctacacgcactt

SEQ ID NO: 31950 - DNA, 25 bp, Canis familiaris
agcacccgtgggaatatcacctttt

SEQ ID NO: 31951 - DNA, 25 bp, Canis familiaris
agctcaccgtgtctatatactcgct

SEQ ID NO: 31952 - DNA, 25 bp, Canis familiaris
agcacagaagtgtttagaacttgtc

SEQ ID NO: 31953 - DNA, 25 bp, Canis familiaris
agcaaaggtgttcatgatccctccc

SEQ ID NO: 31954 - DNA, 25 bp, Canis familiaris
agcacaagcggctggagtggcccgc

SEQ ID NO: 31955 - DNA, 25 bp, Canis familiaris
agcagcagggtcagggctgcagccg

SEQ ID NO: 31956 - DNA, 25 bp, Canis familiaris
agcagcagcgttgcttggctggcta

SEQ ID NO: 31957 - DNA, 25 bp, Canis familiaris
agcagcaggggccatggacggcatg

SEQ ID NO: 31958 - DNA, 25 bp, Canis familiaris
agcagtggaaccttgaagtgcatgt

SEQ ID NO: 31959 - DNA, 25 bp, Canis familiaris
agctgggaaccagtggaggcgttca

SEQ ID NO: 31960 - DNA, 25 bp, Canis familiaris
agctggttttagggcgtgtgttcac

SEQ ID NO: 31961 - DNA, 25 bp, Canis familiaris
agctggtaacagggcgcgtatggaa

SEQ ID NO: 31962 - DNA, 25 bp, Canis familiaris
agctctggaagaggggttcagggca

SEQ ID NO: 31963 - DNA, 25 bp, Canis familiaris
agctctgggaaggtggtgcccggct

SEQ ID NO: 31964 - DNA, 25 bp, Canis familiaris
agcactggcagagcgcagtggccgg

SEQ ID NO: 31965 - DNA, 25 bp, Canis familiaris
agcaagtcagcagcacagctgcccc

SEQ ID NO: 31966 - DNA, 25 bp, Canis familiaris
agcacagatccagtgcaactcgccc

SEQ ID NO: 31967 - DNA, 25 bp, Canis familiaris
agcacaggacacgaactcgcaaacc

SEQ ID NO: 31968 - DNA, 25 bp, Canis familiaris
agcaaggtcactgcgcacaatagac

SEQ ID NO: 31969 - DNA, 25 bp, Canis familiaris
agcaaggacactgagcaagagaggc

SEQ ID NO: 31970 - DNA, 25 bp, Canis familiaris
agcacaggcaacaaaagcgagagta

SEQ ID NO: 31971 - DNA, 25 bp, Canis familiaris
agcacgtggagcaagaaggcacgct

SEQ ID NO: 31972 - DNA, 25 bp, Canis familiaris
agcagcgcgtgagaagagcagccct

SEQ ID NO: 31973 - DNA, 25 bp, Canis familiaris
agcactggtgattcaagccccagcc

SEQ ID NO: 31974 - DNA, 25 bp, Canis familiaris
agcacttccattcagaactcatcct

SEQ ID NO: 31975 - DNA, 25 bp, Canis familiaris
agcacttacagatagaccttcttct

SEQ ID NO: 31976 - DNA, 25 bp, Canis familiaris
agcaagtgtcaagagtccattccct

SEQ ID NO: 31977 - DNA, 25 bp, Canis familiaris
agcagttgtcactgaatcgctccac

SEQ ID NO: 31978 - DNA, 25 bp, Canis familiaris
agcaggtgtctctagtcatcaacta

SEQ ID NO: 31979 - DNA, 25 bp, Canis familiaris
agcaagcattctgagatagctcctt

SEQ ID NO: 31980 - DNA, 25 bp, Canis familiaris
agcacagcttgtggtataacctatt

SEQ ID NO: 31981 - DNA, 25 bp, Canis familiaris
agcaacgtcttgaacaggcgctgat

SEQ ID NO: 31982 - DNA, 25 bp, Canis familiaris
agcagacaacctgcaggtgcctgat

SEQ ID NO: 31983 - DNA, 25 bp, Canis familiaris
agcaacaaccgcaaatgtgccagcc

SEQ ID NO: 31984 - DNA, 25 bp, Canis familiaris
agcttccacgtggaattcaccacgt

SEQ ID NO: 31985 - DNA, 25 bp, Canis familiaris
agcttgtcatcaatggaaatcccat

SEQ ID NO: 31986 - DNA, 25 bp, Canis familiaris
agcagctgaatcgatgaagaaccca

SEQ ID NO: 31987 - DNA, 25 bp, Canis familiaris
agcagctccatttcaaagactccaa

SEQ ID NO: 31988 - DNA, 25 bp, Canis familiaris
agcacatgccattttaataatccga

SEQ ID NO: 31989 - DNA, 25 bp, Canis familiaris
agcacatcagacactttaattcgac

SEQ ID NO: 31990 - DNA, 25 bp, Canis familiaris
agcacatagagcactatctcattct

SEQ ID NO: 31991 - DNA, 25 bp, Canis familiaris
agcactggatgcttctcaccagact

SEQ ID NO: 31992 - DNA, 25 bp, Canis familiaris
agcacttatctttaccaatttccga

SEQ ID NO: 31993 - DNA, 25 bp, Canis familiaris
agcacggacgtgtacgagctgttcc

SEQ ID NO: 31994 - DNA, 25 bp, Canis familiaris
agcacggaaggctgtggctgtgtgt

SEQ ID NO: 31995 - DNA, 25 bp, Canis familiaris
agcacttgaacgtcgagttgttggt

SEQ ID NO: 31996 - DNA, 25 bp, Canis familiaris
agcactggaacgcgatgtcgggcgc

SEQ ID NO: 31997 - DNA, 25 bp, Canis familiaris
agcagctgctggtagttgcatttgg

SEQ ID NO: 31998 - DNA, 25 bp, Canis familiaris
agcacgtgggaaatgcaacatgtgg

SEQ ID NO: 31999 - DNA, 25 bp, Canis familiaris
agcagcctgggttaagacttgggac

SEQ ID NO: 32000 - DNA, 25 bp, Canis familiaris
agcacctggtgcttaagcctggata

SEQ ID NO: 32001 - DNA, 25 bp, Canis familiaris
agcaccggacttttcacggatgcac

SEQ ID NO: 32002 - DNA, 25 bp, Canis familiaris
agcacagctaacatttatgcagtgt

SEQ ID NO: 32003 - DNA, 25 bp, Canis familiaris
agcagcagatagatcctctagagtc

SEQ ID NO: 32004 - DNA, 25 bp, Canis familiaris
agcacgttgctgtcgattaagaccg

SEQ ID NO: 32005 - DNA, 25 bp, Canis familiaris
agccttgggacgatgtagaccaaca

SEQ ID NO: 32006 - DNA, 25 bp, Canis familiaris
agcaccttgtaaactgtaacctatc

SEQ ID NO: 32007 - DNA, 25 bp, Canis familiaris
agcacctgttctcagtgtaaccttc

SEQ ID NO: 32008 - DNA, 25 bp, Canis familiaris
agcacacgttggcatttaacgtctt

SEQ ID NO: 32009 - DNA, 25 bp, Canis familiaris
accaaaggtgcctttagccgtcttg

SEQ ID NO: 32010 - DNA, 25 bp, Canis familiaris
accaaagccttgagacacgcgtttt

SEQ ID NO: 32011 - DNA, 25 bp, Canis familiaris
acccaaccagtgccgtacggattcg

SEQ ID NO: 32012 - DNA, 25 bp, Canis familiaris
acccggtccgatgttctggatccgg

SEQ ID NO: 32013 - DNA, 25 bp, Canis familiaris
agcccagggaaattttgtggtggcg

SEQ ID NO: 32014 - DNA, 25 bp, Canis familiaris
agcaactgggtaacttattggggct

SEQ ID NO: 32015 - DNA, 25 bp, Canis familiaris
agcaacggagtgtcttattggggga

SEQ ID NO: 32016 - DNA, 25 bp, Canis familiaris
agcaacgccctgtttatcatttgtg

SEQ ID NO: 32017 - DNA, 25 bp, Canis familiaris
agcaaactattgacattcacatttt

SEQ ID NO: 32018 - DNA, 25 bp, Canis familiaris
agcaacaatataacttcatcctagt

SEQ ID NO: 32019 - DNA, 25 bp, Canis familiaris
agcacaacatcgttttcatgccggt

SEQ ID NO: 32020 - DNA, 25 bp, Canis familiaris
agctgcatattctttctgtatacgg

SEQ ID NO: 32021 - DNA, 25 bp, Canis familiaris
agcaaattccatcgtgtgatcaagg

SEQ ID NO: 32022 - DNA, 25 bp, Canis familiaris
agcaaatgtgacactgtctatcagt

SEQ ID NO: 32023 - DNA, 25 bp, Canis familiaris
agcagagcaggaccctgtcgagctg

SEQ ID NO: 32024 - DNA, 25 bp, Canis familiaris
agcagacaaatgggcgtctccggga

SEQ ID NO: 32025 - DNA, 25 bp, Canis familiaris
agcaaaactgggactaccgctggca

SEQ ID NO: 32026 - DNA, 25 bp, Canis familiaris
agcacagtactgcttctgaccattc

SEQ ID NO: 32027 - DNA, 25 bp, Canis familiaris
agcacatgacacattcttagtctgt

SEQ ID NO: 32028 - DNA, 25 bp, Canis familiaris
agcatcgtagcatttcttaactttt

SEQ ID NO: 32029 - DNA, 25 bp, Canis familiaris
agcacaggactttcatatatattat

SEQ ID NO: 32030 - DNA, 25 bp, Canis familiaris
agcacacagcacacaatacatttta

SEQ ID NO: 32031 - DNA, 25 bp, Canis familiaris
agcaccttttataacactttgatgg

SEQ ID NO: 32032 - DNA, 25 bp, Canis familiaris
agcaccctttagtacacttgatggt

SEQ ID NO: 32033 - DNA, 25 bp, Canis familiaris
agcccgataaaggccctcttgatct

SEQ ID NO: 32034 - DNA, 25 bp, Canis familiaris
agcaacctaaacagcctttgacttc

SEQ ID NO: 32035 - DNA, 25 bp, Canis familiaris
agctaactaaactgcaataggaaaa

SEQ ID NO: 32036 - DNA, 25 bp, Canis familiaris
agcaacttaaaatacttcgcataga

SEQ ID NO: 32037 - DNA, 25 bp, Canis familiaris
agcacccataggtaaggcttcctgg

SEQ ID NO: 32038 - DNA, 25 bp, Canis familiaris
agcacccctggccaaggtcatccat

SEQ ID NO: 32039 - DNA, 25 bp, Canis familiaris
agcacgtcgggaagggtatggcatc

SEQ ID NO: 32040 - DNA, 25 bp, Canis familiaris
agcagggcgggttctgcgtaggact

SEQ ID NO: 32041 - DNA, 25 bp, Canis familiaris
agccagggccgggtggctaaggctt

SEQ ID NO: 32042 - DNA, 25 bp, Canis familiaris
agcacggtgcccagtgagctaaggg

SEQ ID NO: 32043 - DNA, 25 bp, Canis familiaris
agcccagtgacacacgtctgaaggg

SEQ ID NO: 32044 - DNA, 25 bp, Canis familiaris
accagagataatcacagcttgaagt

SEQ ID NO: 32045 - DNA, 25 bp, Canis familiaris
accgagctgaatccaaactaaaaat

SEQ ID NO: 32046 - DNA, 25 bp, Canis familiaris
agcgcttgtttgcagataaaaaaaa

SEQ ID NO: 32047 - DNA, 25 bp, Canis familiaris
agccttgtttgcagtccctaaaaat

SEQ ID NO: 32048 - DNA, 25 bp, Canis familiaris
agcgcacgtgttaggacccgaaaga

SEQ ID NO: 32049 - DNA, 25 bp, Canis familiaris
agctgccgtattgggccacaagaca

SEQ ID NO: 32050 - DNA, 25 bp, Canis familiaris
agcaggctgttggaagccaagaaga

SEQ ID NO: 32051 - DNA, 25 bp, Canis familiaris
agcaggtccagatagccacgggagt

SEQ ID NO: 32052 - DNA, 25 bp, Canis familiaris
acgatcaacgccgaggccgaggagt

SEQ ID NO: 32053 - DNA, 25 bp, Canis familiaris
agcgaaagcggcaggatcgacgcgc

SEQ ID NO: 32054 - DNA, 25 bp, Canis familiaris
agcggcacgagtacggtcgaacagt

SEQ ID NO: 32055 - DNA, 25 bp, Canis familiaris
agcctaccgttctgatcgacaagct

SEQ ID NO: 32056 - DNA, 25 bp, Canis familiaris
agctccacccttttctgagaaagta

SEQ ID NO: 32057 - DNA, 25 bp, Canis familiaris
agcatcccatccttgtactaaaatg

SEQ ID NO: 32058 - DNA, 25 bp, Canis familiaris
agcagccaaccatctttcaaaataa

SEQ ID NO: 32059 - DNA, 25 bp, Canis familiaris
agcagccttcctcattatcagaaat

SEQ ID NO: 32060 - DNA, 25 bp, Canis familiaris
agcacctgactccttttgaaataat

SEQ ID NO: 32061 - DNA, 25 bp, Canis familiaris
agcaggctgattgtcttggaaagaa

SEQ ID NO: 32062 - DNA, 25 bp, Canis familiaris
agcagagtacgcgaatagttattga

SEQ ID NO: 32063 - DNA, 25 bp, Canis familiaris
agcagagtacgcaaatattattata

SEQ ID NO: 32064 - DNA, 25 bp, Canis familiaris
agctaggacctaatattaatctgaa

SEQ ID NO: 32065 - DNA, 25 bp, Canis familiaris
agcttggtcaagtctattaatccac

SEQ ID NO: 32066 - DNA, 25 bp, Canis familiaris
agctattgtcaggccctgtgttcct

SEQ ID NO: 32067 - DNA, 25 bp, Canis familiaris
agctagagtacccaagcttctgcct

SEQ ID NO: 32068 - DNA, 25 bp, Canis familiaris
agcagagattgaggctccagcttcc

SEQ ID NO: 32069 - DNA, 25 bp, Canis familiaris
agcatgtgattgaggccctacgcag

SEQ ID NO: 32070 - DNA, 25 bp, Canis familiaris
agcatgtgattgaggccctacgcag

SEQ ID NO: 32071 - DNA, 25 bp, Canis familiaris
agcatgtgattgaggccctacgcag

SEQ ID NO: 32072 - DNA, 25 bp, Canis familiaris
agcatgacatttgaccctagactgg

SEQ ID NO: 32073 - DNA, 25 bp, Canis familiaris
agcagcacttagggctgcctgtcct

SEQ ID NO: 32074 - DNA, 25 bp, Canis familiaris
agcactgcttagggacaatttcttt

SEQ ID NO: 32075 - DNA, 25 bp, Canis familiaris
agcactgaatctctccaatttttgt

SEQ ID NO: 32076 - DNA, 25 bp, Canis familiaris
agcacttcatctatttttacttggg

SEQ ID NO: 32077 - DNA, 25 bp, Canis familiaris
agcactggtctgacttaatctacag

SEQ ID NO: 32078 - DNA, 25 bp, Canis familiaris
agcactggtctctgtagttcactgc

SEQ ID NO: 32079 - DNA, 25 bp, Canis familiaris
agcactggtctatgcctgtttacaa

SEQ ID NO: 32080 - DNA, 25 bp, Canis familiaris
agcactgttttatagtttcagcaac

SEQ ID NO: 32081 - DNA, 25 bp, Canis familiaris
agcactgtaattatagctactagaa

SEQ ID NO: 32082 - DNA, 25 bp, Canis familiaris
agcagatcaaatattatgtcctgaa

SEQ ID NO: 32083 - DNA, 25 bp, Canis familiaris
agcagtcaatcatttctggtcaaag

SEQ ID NO: 32084 - DNA, 25 bp, Canis familiaris
agcgtacgcatttctgcaaaaagcc

SEQ ID NO: 32085 - DNA, 25 bp, Canis familiaris
agcattactgtcccagcaaacacac

SEQ ID NO: 32086 - DNA, 25 bp, Canis familiaris
agcagtaccatcccactgatatcac

SEQ ID NO: 32087 - DNA, 25 bp, Canis familiaris
agcagtacagagtccacgatacctt

SEQ ID NO: 32088 - DNA, 25 bp, Canis familiaris
agcagtgccgaaggacaggcacctt

SEQ ID NO: 32089 - DNA, 25 bp, Canis familiaris
agcatatccggacacaggatgccgt

SEQ ID NO: 32090 - DNA, 25 bp, Canis familiaris
agcactccaggtctcaggagcatcc

SEQ ID NO: 32091 - DNA, 25 bp, Canis familiaris
agctttagggcccagacaacccaat

SEQ ID NO: 32092 - DNA, 25 bp, Canis familiaris
agctttggggctgggtgcataccaa

SEQ ID NO: 32093 - DNA, 25 bp, Canis familiaris
agcttttattccctgtgcaacaaaa

SEQ ID NO: 32094 - DNA, 25 bp, Canis familiaris
agctatcttatcactcttgcaaata

SEQ ID NO: 32095 - DNA, 25 bp, Canis familiaris
agctgaccttcttccgagaacaata

SEQ ID NO: 32096 - DNA, 25 bp, Canis familiaris
agctaaccatcctgcaagaaatatt

SEQ ID NO: 32097 - DNA, 25 bp, Canis familiaris
agcatatcacccttaaccaaatctt

SEQ ID NO: 32098 - DNA, 25 bp, Canis familiaris
agcttcttccccaactgaaattttg

SEQ ID NO: 32099 - DNA, 25 bp, Canis familiaris
agcttttccctttgaatccaattgg

SEQ ID NO: 32100 - DNA, 25 bp, Canis familiaris
agcttttccggtctatctgagtaaa

SEQ ID NO: 32101 - DNA, 25 bp, Canis familiaris
agcttttcttttccttggtgtacat

SEQ ID NO: 32102 - DNA, 25 bp, Canis familiaris
agctttttcattagttccggcaact

SEQ ID NO: 32103 - DNA, 25 bp, Canis familiaris
agcagcttgtgtttggttagcagga

SEQ ID NO: 32104 - DNA, 25 bp, Canis familiaris
agcactctgtgctggcaggtgtagg

SEQ ID NO: 32105 - DNA, 25 bp, Canis familiaris
agcacattgggctacaggatgccat

SEQ ID NO: 32106 - DNA, 25 bp, Canis familiaris
agcacatgcatctcaacaggtctca

SEQ ID NO: 32107 - DNA, 25 bp, Canis familiaris
agcactgccatccaacagttgttca

SEQ ID NO: 32108 - DNA, 25 bp, Canis familiaris
agcagctgttaatccttgttatctt

SEQ ID NO: 32109 - DNA, 25 bp, Canis familiaris
agcagctgttcgagccgttttagct

SEQ ID NO: 32110 - DNA, 25 bp, Canis familiaris
agcagctgtacgaggcagttttagc

SEQ ID NO: 32111 - DNA, 25 bp, Canis familiaris
agcagctgtacgagccactttagct

SEQ ID NO: 32112 - DNA, 25 bp, Canis familiaris
agcatgtcacactcagacctttagc

SEQ ID NO: 32113 - DNA, 25 bp, Canis familiaris
agcatgtcactaaacaggccttttg

SEQ ID NO: 32114 - DNA, 25 bp, Canis familiaris
agcagtatctgaaaacgctctccgt

SEQ ID NO: 32115 - DNA, 25 bp, Canis familiaris
agcttcatcatgaccagaagcttga

SEQ ID NO: 32116 - DNA, 25 bp, Canis familiaris
agcttcatcatgaccagaagcttga

SEQ ID NO: 32117 - DNA, 25 bp, Canis familiaris
agcagagcatccacatgacagcctg

SEQ ID NO: 32118 - DNA, 25 bp, Canis familiaris
agcagaacaccatatgcacctgcca

SEQ ID NO: 32119 - DNA, 25 bp, Canis familiaris
agcactagaccaagatgacctccag

SEQ ID NO: 32120 - DNA, 25 bp, Canis familiaris
agcactgagacttgagagacatgcc

SEQ ID NO: 32121 - DNA, 25 bp, Canis familiaris
agcatccagtcaatgagtaagccta

SEQ ID NO: 32122 - DNA, 25 bp, Canis familiaris
agcacacagctctacttaagatcga

SEQ ID NO: 32123 - DNA, 25 bp, Canis familiaris
agcacagagcttcctatcagacata

SEQ ID NO: 32124 - DNA, 25 bp, Canis familiaris
agcacaggtggcatatgcgagcaaa

SEQ ID NO: 32125 - DNA, 25 bp, Canis familiaris
agcacagagtcggcgggagaaggcc

SEQ ID NO: 32126 - DNA, 25 bp, Canis familiaris
agcagcagaggcggcgggagaaggc

SEQ ID NO: 32127 - DNA, 25 bp, Canis familiaris
agcgcaagtgcgcggggacagacga

SEQ ID NO: 32128 - DNA, 25 bp, Canis familiaris
agcagctagagcctggggaagagac

SEQ ID NO: 32129 - DNA, 25 bp, Canis familiaris
agcagctcagagacgaggagaagat

SEQ ID NO: 32130 - DNA, 25 bp, Canis familiaris
agcagctgggcacgcatggagaatg

SEQ ID NO: 32131 - DNA, 25 bp, Canis familiaris
agcagccattgcccagagcataagt

SEQ ID NO: 32132 - DNA, 25 bp, Canis familiaris
agcagctgcactgcctgagcaaagc

SEQ ID NO: 32133 - DNA, 25 bp, Canis familiaris
agcagtcctcccaatgaatacagta

SEQ ID NO: 32134 - DNA, 25 bp, Canis familiaris
agcagtgttcctacagacagaagta

SEQ ID NO: 32135 - DNA, 25 bp, Canis familiaris
agcactgttgtgggcaaggacttat

SEQ ID NO: 32136 - DNA, 25 bp, Canis familiaris
agcactgctctgggtgccaggaatg

SEQ ID NO: 32137 - DNA, 25 bp, Canis familiaris
agcagctcatcacaggcaaggaaga

SEQ ID NO: 32138 - DNA, 25 bp, Canis familiaris
agcagctcatcacaggcaaggaaga

SEQ ID NO: 32139 - DNA, 25 bp, Canis familiaris
agcagtatctgcagtccatagaaga

SEQ ID NO: 32140 - DNA, 25 bp, Canis familiaris
agcagatagatcagctccttccgat

SEQ ID NO: 32141 - DNA, 25 bp, Canis familiaris
agcagaagacccccttctgctatcc

SEQ ID NO: 32142 - DNA, 25 bp, Canis familiaris
agcaggagatccagctccttggtct

SEQ ID NO: 32143 - DNA, 25 bp, Canis familiaris
agcaccaactcagcattcttgtttt

SEQ ID NO: 32144 - DNA, 25 bp, Canis familiaris
agcatcaatgcctaccttttgagtt

SEQ ID NO: 32145 - DNA, 25 bp, Canis familiaris
agcacagctgccaaagcttcttttt

SEQ ID NO: 32146 - DNA, 25 bp, Canis familiaris
agccatgtccatgagatatctttgt

SEQ ID NO: 32147 - DNA, 25 bp, Canis familiaris
agcactggctatgttatctatctgg

SEQ ID NO: 32148 - DNA, 25 bp, Canis familiaris
agcactactgtcttctttgtgtgtg

SEQ ID NO: 32149 - DNA, 25 bp, Canis familiaris
agcactttctggtctgtgtgtgtgt

SEQ ID NO: 32150 - DNA, 25 bp, Canis familiaris
agcactgtgtgcgtcttgtagatgg

SEQ ID NO: 32151 - DNA, 25 bp, Canis familiaris
agcacgaatgaggccatggagtgga

SEQ ID NO: 32152 - DNA, 25 bp, Canis familiaris
agcacagtagagtatatgtgtgtgt

SEQ ID NO: 32153 - DNA, 25 bp, Canis familiaris
agcacttatgcatatactttttctg

SEQ ID NO: 32154 - DNA, 25 bp, Canis familiaris
agcactttacaaacattgccttctg

SEQ ID NO: 32155 - DNA, 25 bp, Canis familiaris
agctttctgaataaagtgccttttt

SEQ ID NO: 32156 - DNA, 25 bp, Canis familiaris
agcatcttctttctaggaatttttt

SEQ ID NO: 32157 - DNA, 25 bp, Canis familiaris
agcagtcttacttttgtagttttat

SEQ ID NO: 32158 - DNA, 25 bp, Canis familiaris
agcagtttttgtcctttgcttcttc

SEQ ID NO: 32159 - DNA, 25 bp, Canis familiaris
agcacctttgtgtgtatctcttact

SEQ ID NO: 32160 - DNA, 25 bp, Canis familiaris
agcacgtattttagtatttttctgt

SEQ ID NO: 32161 - DNA, 25 bp, Canis familiaris
agcttgtgatttcttatgaccttaa

SEQ ID NO: 32162 - DNA, 25 bp, Canis familiaris
agcttggtccttgtaactgttgcag

SEQ ID NO: 32163 - DNA, 25 bp, Canis familiaris
agctttcccacacatagactgtagt

SEQ ID NO: 32164 - DNA, 25 bp, Canis familiaris
agctttcctcagccgtaaaacagta

SEQ ID NO: 32165 - DNA, 25 bp, Canis familiaris
agctttgcctggccacggaacaagt

SEQ ID NO: 32166 - DNA, 25 bp, Canis familiaris
agctcattgtggaaacggatacctt

SEQ ID NO: 32167 - DNA, 25 bp, Canis familiaris
agcacagtgtgagcatccaggtacc

SEQ ID NO: 32168 - DNA, 25 bp, Canis familiaris
agcatgcaccgtgccgaggtgatcc

SEQ ID NO: 32169 - DNA, 25 bp, Canis familiaris
agcatcacggacagtccgtgtctct

SEQ ID NO: 32170 - DNA, 25 bp, Canis familiaris
agcaccaggtggtctcctctgactt

SEQ ID NO: 32171 - DNA, 25 bp, Canis familiaris
agcaccgagtggactttcttcagct

SEQ ID NO: 32172 - DNA, 25 bp, Canis familiaris
agcacgagagtattctaactagact

SEQ ID NO: 32173 - DNA, 25 bp, Canis familiaris
agcactagaactttgaagcatccct

SEQ ID NO: 32174 - DNA, 25 bp, Canis familiaris
agcactacaagtgtgactcccactt

SEQ ID NO: 32175 - DNA, 25 bp, Canis familiaris
agcactgacatggtttgcatcctcc

SEQ ID NO: 32176 - DNA, 25 bp, Canis familiaris
agcctaggcttaggcatccatccac

SEQ ID NO: 32177 - DNA, 25 bp, Canis familiaris
agcatcatatgtttgacctcttcct

SEQ ID NO: 32178 - DNA, 25 bp, Canis familiaris
agcacatattaactttctcttagat

SEQ ID NO: 32179 - DNA, 25 bp, Canis familiaris
agctaatttagtcatctcttcaaga

SEQ ID NO: 32180 - DNA, 25 bp, Canis familiaris
agcgtgatattactgcttcctttaa

SEQ ID NO: 32181 - DNA, 25 bp, Canis familiaris
agctgtaatctctggaccttattca

SEQ ID NO: 32182 - DNA, 25 bp, Canis familiaris
agcattgctttcgtgtaaattatgt

SEQ ID NO: 32183 - DNA, 25 bp, Canis familiaris
agcattcttcatcttcaaagtagct

SEQ ID NO: 32184 - DNA, 25 bp, Canis familiaris
agcattcttcaggcactgtgagagc

SEQ ID NO: 32185 - DNA, 25 bp, Canis familiaris
agcactctcctggcagtcatggagc

SEQ ID NO: 32186 - DNA, 25 bp, Canis familiaris
agcaccatccagacaggcatgagac

SEQ ID NO: 32187 - DNA, 25 bp, Canis familiaris
agcagcctcacaatctgttagcctg

SEQ ID NO: 32188 - DNA, 25 bp, Canis familiaris
agcacccaacttgattgctcggtct

SEQ ID NO: 32189 - DNA, 25 bp, Canis familiaris
agcaccccaattgagcgctcaggtg

SEQ ID NO: 32190 - DNA, 25 bp, Canis familiaris
agctaccgcaaagggctctgggttt

SEQ ID NO: 32191 - DNA, 25 bp, Canis familiaris
agcagagctctggaaggacttcagg

SEQ ID NO: 32192 - DNA, 25 bp, Canis familiaris
agcaggcctgcctggtactatagca

SEQ ID NO: 32193 - DNA, 25 bp, Canis familiaris
agcaggccgtttatggtatcagagc

SEQ ID NO: 32194 - DNA, 25 bp, Canis familiaris
agcagagctcgtttagtgaaccgtc

SEQ ID NO: 32195 - DNA, 25 bp, Canis familiaris
agcaggcggctattggtaaacgctg

SEQ ID NO: 32196 - DNA, 25 bp, Canis familiaris
agcactgggtattatataagactga

SEQ ID NO: 32197 - DNA, 25 bp, Canis familiaris
agcaggagggcaaataaaactatta

SEQ ID NO: 32198 - DNA, 25 bp, Canis familiaris
agcacttcggcaggctacaacatct

SEQ ID NO: 32199 - DNA, 25 bp, Canis familiaris
agcatttgggaggctcttacttacc

SEQ ID NO: 32200 - DNA, 25 bp, Canis familiaris
agcagttggcagtcctatttcattt

SEQ ID NO: 32201 - DNA, 25 bp, Canis familiaris
agcatttgccaagaatgttttcatt

SEQ ID NO: 32202 - DNA, 25 bp, Canis familiaris
agcatttgccaagaatgttttcatt

SEQ ID NO: 32203 - DNA, 25 bp, Canis familiaris
agcatttgccaagaatgttttcatt

SEQ ID NO: 32204 - DNA, 25 bp, Canis familiaris
agcttagccaaatatattctcttat

SEQ ID NO: 32205 - DNA, 25 bp, Canis familiaris
agctaaggggcctttctctgttact

SEQ ID NO: 32206 - DNA, 25 bp, Canis familiaris
agcttgagggtggatggtttgcatt

SEQ ID NO: 32207 - DNA, 25 bp, Canis familiaris
agctgggattgttgggttggatatg

SEQ ID NO: 32208 - DNA, 25 bp, Canis familiaris
agcagggtgctcaacgtattggtag

SEQ ID NO: 32209 - DNA, 25 bp, Canis familiaris
agcagggtgtgcaaagtggtggtga

SEQ ID NO: 32210 - DNA, 25 bp, Canis familiaris
agcagacctgggcaatgtctggcta

SEQ ID NO: 32211 - DNA, 25 bp, Canis familiaris
agcagagacggaggacagcctggcc

SEQ ID NO: 32212 - DNA, 25 bp, Canis familiaris
agcatgaactggttcttgaccgccc

SEQ ID NO: 32213 - DNA, 25 bp, Canis familiaris
agctgacaatactgtgggccgcttc

SEQ ID NO: 32214 - DNA, 25 bp, Canis familiaris
agctgaaaccactatggggcctggc

SEQ ID NO: 32215 - DNA, 25 bp, Canis familiaris
agctacaagtatgaggtggcgctag

SEQ ID NO: 32216 - DNA, 25 bp, Canis familiaris
agctaagcagttgtggtatgggggc

SEQ ID NO: 32217 - DNA, 25 bp, Canis familiaris
agcgatatgcagtttggtttggagg

SEQ ID NO: 32218 - DNA, 25 bp, Canis familiaris
agcagatacacggaggtgtcgggtg

SEQ ID NO: 32219 - DNA, 25 bp, Canis familiaris
agcactacagccagggcctgggctg

SEQ ID NO: 32220 - DNA, 25 bp, Canis familiaris
agcatacaattcaacaggcctgggg

SEQ ID NO: 32221 - DNA, 25 bp, Canis familiaris
agcttagctgactgaggctctgggg

SEQ ID NO: 32222 - DNA, 25 bp, Canis familiaris
agcttattcaattcccatttgtggg

SEQ ID NO: 32223 - DNA, 25 bp, Canis familiaris
agcttctatccatggctatttgggc

SEQ ID NO: 32224 - DNA, 25 bp, Canis familiaris
agcattctagtcttggtttagtttc

SEQ ID NO: 32225 - DNA, 25 bp, Canis familiaris
agcatcattttctgacttacatgtt

SEQ ID NO: 32226 - DNA, 25 bp, Canis familiaris
agctcattgccagtaggctaccatt

SEQ ID NO: 32227 - DNA, 25 bp, Canis familiaris
agcatattcggttgcatcttctaca

SEQ ID NO: 32228 - DNA, 25 bp, Canis familiaris
agcactcttttattctttcaaacag

SEQ ID NO: 32229 - DNA, 25 bp, Canis familiaris
agcagcttcctgataaagtcaacca

SEQ ID NO: 32230 - DNA, 25 bp, Canis familiaris
agctctctcctacactttaaggcat

SEQ ID NO: 32231 - DNA, 25 bp, Canis familiaris
agcttccattagagtttacacacat

SEQ ID NO: 32232 - DNA, 25 bp, Canis familiaris
agcattccactcatcaaaataccca

SEQ ID NO: 32233 - DNA, 25 bp, Canis familiaris
agcagcctcccttcagatgaagacc

SEQ ID NO: 32234 - DNA, 25 bp, Canis familiaris
agcagcctggacggctgggtgagcc

SEQ ID NO: 32235 - DNA, 25 bp, Canis familiaris
agcagcctggacggctgggtgagcc

SEQ ID NO: 32236 - DNA, 25 bp, Canis familiaris
agcaggcgtaccatgcagggagccc

SEQ ID NO: 32237 - DNA, 25 bp, Canis familiaris
agcatatcttaactctggggacctc

SEQ ID NO: 32238 - DNA, 25 bp, Canis familiaris
agcagttctactcatgggtatacat

SEQ ID NO: 32239 - DNA, 25 bp, Canis familiaris
agcagttatagccttgtccttatta

SEQ ID NO: 32240 - DNA, 25 bp, Canis familiaris
agcatttaagcaagttttatcagta

SEQ ID NO: 32241 - DNA, 25 bp, Canis familiaris
agcatctattgagcagtgtttactg

SEQ ID NO: 32242 - DNA, 25 bp, Canis familiaris
agcatctgattattggttgtggacc

SEQ ID NO: 32243 - DNA, 25 bp, Canis familiaris
agcatagttcctggtactctgcagc

SEQ ID NO: 32244 - DNA, 25 bp, Canis familiaris
agcatgagttacaagcaaactgcta

SEQ ID NO: 32245 - DNA, 25 bp, Canis familiaris
agcagtattatcaacaatagccaat

SEQ ID NO: 32246 - DNA, 25 bp, Canis familiaris
agcagcaattagccacaatagccaa

SEQ ID NO: 32247 - DNA, 25 bp, Canis familiaris
agcagccataggaccaaatccagaa

SEQ ID NO: 32248 - DNA, 25 bp, Canis familiaris
agcaccagaggacccacacaggtga

SEQ ID NO: 32249 - DNA, 25 bp, Canis familiaris
agcaccagagcccgcaacaagggcc

SEQ ID NO: 32250 - DNA, 25 bp, Canis familiaris
agcacctgatccccaagattgagga

SEQ ID NO: 32251 - DNA, 25 bp, Canis familiaris
agcacggcatcgtcaccaactggga

SEQ ID NO: 32252 - DNA, 25 bp, Canis familiaris
agcaggtgctgcaccacaagctggg

SEQ ID NO: 32253 - DNA, 25 bp, Canis familiaris
agcaggagcagcccttaggcaggag

SEQ ID NO: 32254 - DNA, 25 bp, Canis familiaris
agcagcccgcatattaggcgcagat

SEQ ID NO: 32255 - DNA, 25 bp, Canis familiaris
agcatccagccattcattagtcgat

SEQ ID NO: 32256 - DNA, 25 bp, Canis familiaris
agcattcatcgatcatgtactcagt

SEQ ID NO: 32257 - DNA, 25 bp, Canis familiaris
agcttcactacttgtccatcatgtg

SEQ ID NO: 32258 - DNA, 25 bp, Canis familiaris
agcttccatttgtcccataggttgc

SEQ ID NO: 32259 - DNA, 25 bp, Canis familiaris
agctatattttttctcatgggtcca

SEQ ID NO: 32260 - DNA, 25 bp, Canis familiaris
agcatctaatgcatttactccttcc

SEQ ID NO: 32261 - DNA, 25 bp, Canis familiaris
agcattgaatctgcgatactactca

SEQ ID NO: 32262 - DNA, 25 bp, Canis familiaris
agcagcccacatacagatacgactc

SEQ ID NO: 32263 - DNA, 25 bp, Canis familiaris
agcagattcagtagcagatgccgtt

SEQ ID NO: 32264 - DNA, 25 bp, Canis familiaris
agcagattcagtagcagatgccgtt

SEQ ID NO: 32265 - DNA, 25 bp, Canis familiaris
agcagtctattttgctcactgtctg

SEQ ID NO: 32266 - DNA, 25 bp, Canis familiaris
agcagtcatgattctgtcgcctgta

SEQ ID NO: 32267 - DNA, 25 bp, Canis familiaris
agcatgtcattgtcagtgatccatt

SEQ ID NO: 32268 - DNA, 25 bp, Canis familiaris
agcagtcatttgttagccatgccca

SEQ ID NO: 32269 - DNA, 25 bp, Canis familiaris
agcagaatgcttttacctcctgcag

SEQ ID NO: 32270 - DNA, 25 bp, Canis familiaris
agcagaagctgggtaccctgctcgc

SEQ ID NO: 32271 - DNA, 25 bp, Canis familiaris
agctgaggatggcaatcccttcgtg

SEQ ID NO: 32272 - DNA, 25 bp, Canis familiaris
actggtggtaaatcctagagctaat

SEQ ID NO: 32273 - DNA, 25 bp, Canis familiaris
actggggctaaatccgcagcaaact

SEQ ID NO: 32274 - DNA, 25 bp, Canis familiaris
agcggggctgcagaagggaaaacct

SEQ ID NO: 32275 - DNA, 25 bp, Canis familiaris
agcgggtgcggttcgtggaaagata

SEQ ID NO: 32276 - DNA, 25 bp, Canis familiaris
agcgggtgcggttggtggaaagata

SEQ ID NO: 32277 - DNA, 25 bp, Canis familiaris
agcttggtgtcgtcatgggggaaac

SEQ ID NO: 32278 - DNA, 25 bp, Canis familiaris
agccttgactcttcttgggggaagg

SEQ ID NO: 32279 - DNA, 25 bp, Canis familiaris
agcctatacacagtttggaggaaaa

SEQ ID NO: 32280 - DNA, 25 bp, Canis familiaris
agcaccaagccctcttgggcaatat

SEQ ID NO: 32281 - DNA, 25 bp, Canis familiaris
acgcaattcccttctgttatgaact

SEQ ID NO: 32282 - DNA, 25 bp, Canis familiaris
agcggccttccttctgttgaaggcc

SEQ ID NO: 32283 - DNA, 25 bp, Canis familiaris
agcggcctctacaacttcataaacc

SEQ ID NO: 32284 - DNA, 25 bp, Canis familiaris
agcggttggatcaagtttaaatgac

SEQ ID NO: 32285 - DNA, 25 bp, Canis familiaris
agctggttaatgagtaacaaatgca

SEQ ID NO: 32286 - DNA, 25 bp, Canis familiaris
agcttcctcaagctgtacactacca

SEQ ID NO: 32287 - DNA, 25 bp, Canis familiaris
agccccttgggtaagtgctacacca

SEQ ID NO: 32288 - DNA, 25 bp, Canis familiaris
agcagtacttggctttgtgcctgct

SEQ ID NO: 32289 - DNA, 25 bp, Canis familiaris
agcagtttttgcatttgtttgttga

SEQ ID NO: 32290 - DNA, 25 bp, Canis familiaris
agcattttgttaatactgttgtctt

SEQ ID NO: 32291 - DNA, 25 bp, Canis familiaris
agctttttccaatggtgcattctgt

SEQ ID NO: 32292 - DNA, 25 bp, Canis familiaris
agcagttatttatatgaatccttgt

SEQ ID NO: 32293 - DNA, 25 bp, Canis familiaris
agcagtttttaatcaaagctggctt

SEQ ID NO: 32294 - DNA, 25 bp, Canis familiaris
agcagtttctgtatgcagtaggctg

SEQ ID NO: 32295 - DNA, 25 bp, Canis familiaris
agcagtttcctggggttggctgaga

SEQ ID NO: 32296 - DNA, 25 bp, Canis familiaris
agctttggcctgtggatagccggaa

SEQ ID NO: 32297 - DNA, 25 bp, Canis familiaris
agctgcattcagctggcaggtcagc

SEQ ID NO: 32298 - DNA, 25 bp, Canis familiaris
agcatttagcctggaaggactggat

SEQ ID NO: 32299 - DNA, 25 bp, Canis familiaris
agctctacgcctggtatggacggct

SEQ ID NO: 32300 - DNA, 25 bp, Canis familiaris
agctcaaggccaggaaaatcgtgtc

SEQ ID NO: 32301 - DNA, 25 bp, Canis familiaris
agctgctcatggaactagttatggg

SEQ ID NO: 32302 - DNA, 25 bp, Canis familiaris
agcagcctgatgaactaattagcca

SEQ ID NO: 32303 - DNA, 25 bp, Canis familiaris
agcagccctgaaaattctggctcag

SEQ ID NO: 32304 - DNA, 25 bp, Canis familiaris
agcagcttctcaacaaactggccaa

SEQ ID NO: 32305 - DNA, 25 bp, Canis familiaris
agcatggttaccaaacttgagtgag

SEQ ID NO: 32306 - DNA, 25 bp, Canis familiaris
agcatgttaccataacttgagctat

SEQ ID NO: 32307 - DNA, 25 bp, Canis familiaris
agcaggtgcttataacttacttgta

SEQ ID NO: 32308 - DNA, 25 bp, Canis familiaris
agcagggattaattccatggccatt

SEQ ID NO: 32309 - DNA, 25 bp, Canis familiaris
agcttaattacttgacttgccttga

SEQ ID NO: 32310 - DNA, 25 bp, Canis familiaris
agcttaatttgaatagggcccatga

SEQ ID NO: 32311 - DNA, 25 bp, Canis familiaris
agctatcgatttttagggcctctga

SEQ ID NO: 32312 - DNA, 25 bp, Canis familiaris
agctcatagcttgttgaagtcctcc

SEQ ID NO: 32313 - DNA, 25 bp, Canis familiaris
agcatattcacttttgtagcccatt

SEQ ID NO: 32314 - DNA, 25 bp, Canis familiaris
agcagttctctgtggatatgggttt

SEQ ID NO: 32315 - DNA, 25 bp, Canis familiaris
agcagcctcttggggcaagggtgcc

SEQ ID NO: 32316 - DNA, 25 bp, Canis familiaris
agcatgcactgcttgtggatgaaag

SEQ ID NO: 32317 - DNA, 25 bp, Canis familiaris
agcatgccgctggggatggagagta

SEQ ID NO: 32318 - DNA, 25 bp, Canis familiaris
agctgctgactggggaaataatttt

SEQ ID NO: 32319 - DNA, 25 bp, Canis familiaris
agcagctgagccagaatacatacac

SEQ ID NO: 32320 - DNA, 25 bp, Canis familiaris
agcagcggtggggcaaccaccggcc

SEQ ID NO: 32321 - DNA, 25 bp, Canis familiaris
agcagtgagggggcagcgcccccac

SEQ ID NO: 32322 - DNA, 25 bp, Canis familiaris
agcaggaggctgtcaaggcctaccc

SEQ ID NO: 32323 - DNA, 25 bp, Canis familiaris
agcagaacactgtaaaacctcccgt

SEQ ID NO: 32324 - DNA, 25 bp, Canis familiaris
agctgagacctgtgtaacctgctgc

SEQ ID NO: 32325 - DNA, 25 bp, Canis familiaris
agcataagcctggctgtgacccagc

SEQ ID NO: 32326 - DNA, 25 bp, Canis familiaris
agcatgaacctggctggagggctgg

SEQ ID NO: 32327 - DNA, 25 bp, Canis familiaris
agcagagccctggccgagttccgtg

SEQ ID NO: 32328 - DNA, 25 bp, Canis familiaris
agcagggcactggccagagtttgta

SEQ ID NO: 32329 - DNA, 25 bp, Canis familiaris
agcagtgtctttgctgcagtctgtt

SEQ ID NO: 32330 - DNA, 25 bp, Canis familiaris
agcagaattgtttgcgtgtctctct

SEQ ID NO: 32331 - DNA, 25 bp, Canis familiaris
agcagactcgtgggcagttgccttc

SEQ ID NO: 32332 - DNA, 25 bp, Canis familiaris
agcagatctggtggtgggtctaatc

SEQ ID NO: 32333 - DNA, 25 bp, Canis familiaris
agcagacagctggtgtcgtgtccac

SEQ ID NO: 32334 - DNA, 25 bp, Canis familiaris
agctagagctgcagccagggctcac

SEQ ID NO: 32335 - DNA, 25 bp, Canis familiaris
agcaggcgctgcggaggaagctcac

SEQ ID NO: 32336 - DNA, 25 bp, Canis familiaris
agcagtgcagcgctgaggaggacag

SEQ ID NO: 32337 - DNA, 25 bp, Canis familiaris
agcaggcacggattggcttacgcaa

SEQ ID NO: 32338 - DNA, 25 bp, Canis familiaris
agcggagcgagatttcctaagaacc

SEQ ID NO: 32339 - DNA, 25 bp, Canis familiaris
agcagaatgggcttttctacgaccc

SEQ ID NO: 32340 - DNA, 25 bp, Canis familiaris
agcagagaggtctttttcctatccc

SEQ ID NO: 32341 - DNA, 25 bp, Canis familiaris
agcagaatgaatcttgttctctctc

SEQ ID NO: 32342 - DNA, 25 bp, Canis familiaris
agcagcaaggagacttgcctcctcc

SEQ ID NO: 32343 - DNA, 25 bp, Canis familiaris
agcagcgggcagctgctggcttttc

SEQ ID NO: 32344 - DNA, 25 bp, Canis familiaris
agcagcgtggcgctgctgtcatcaa

SEQ ID NO: 32345 - DNA, 25 bp, Canis familiaris
agcagcagtgtggtggctttgctga

SEQ ID NO: 32346 - DNA, 25 bp, Canis familiaris
agcagcagtacttggctttgtgcct

SEQ ID NO: 32347 - DNA, 25 bp, Canis familiaris
agcgaggacgtggtgggtcctccgg

SEQ ID NO: 32348 - DNA, 25 bp, Canis familiaris
agcagggcaagtgggacgtgttctc

SEQ ID NO: 32349 - DNA, 25 bp, Canis familiaris
agcagatggagggggaggcatttta

SEQ ID NO: 32350 - DNA, 25 bp, Canis familiaris
agcagtggaggcggcgtgacaggct

SEQ ID NO: 32351 - DNA, 25 bp, Canis familiaris
agcagtggaggctaccagagcggca

SEQ ID NO: 32352 - DNA, 25 bp, Canis familiaris
agcagtggacgagaaggcagtctgg

SEQ ID NO: 32353 - DNA, 25 bp, Canis familiaris
agcaggctccctgcaaggagactga

SEQ ID NO: 32354 - DNA, 25 bp, Canis familiaris
agcagtgcccacgagacggagagtg

SEQ ID NO: 32355 - DNA, 25 bp, Canis familiaris
agcagctggccctgaaggaggcctc

SEQ ID NO: 32356 - DNA, 25 bp, Canis familiaris
agcgcttcctgacagcaggcaggac

SEQ ID NO: 32357 - DNA, 25 bp, Canis familiaris
agctttacatgccgacggcgctgac

SEQ ID NO: 32358 - DNA, 25 bp, Canis familiaris
agctaatacatgccgacgggcgctg

SEQ ID NO: 32359 - DNA, 25 bp, Canis familiaris
agctaatacatgccgacgggcgctg

SEQ ID NO: 32360 - DNA, 25 bp, Canis familiaris
agctaaacatgcttcatcgtcggtc

SEQ ID NO: 32361 - DNA, 25 bp, Canis familiaris
agctaccacatggactccacgtggc

SEQ ID NO: 32362 - DNA, 25 bp, Canis familiaris
agcatgtgccaaagactcccaaagc

SEQ ID NO: 32363 - DNA, 25 bp, Canis familiaris
agcttgcatctgaagacatcagcca

SEQ ID NO: 32364 - DNA, 25 bp, Canis familiaris
agctttgctgctagagttgtcaaga

SEQ ID NO: 32365 - DNA, 25 bp, Canis familiaris
agctttgcgaggttcgtgcaggatc

SEQ ID NO: 32366 - DNA, 25 bp, Canis familiaris
agcctgtggaacttccgccaaaatt

SEQ ID NO: 32367 - DNA, 25 bp, Canis familiaris
agctgtgggacattaacccaaaaca

SEQ ID NO: 32368 - DNA, 25 bp, Canis familiaris
agcttcgttctttcaccattaaata

SEQ ID NO: 32369 - DNA, 25 bp, Canis familiaris
agctattgtttatccttgtactaac

SEQ ID NO: 32370 - DNA, 25 bp, Canis familiaris
agctttgtgtataccgtttttctca

SEQ ID NO: 32371 - DNA, 25 bp, Canis familiaris
agctttgagtgttcaaggttttcct

SEQ ID NO: 32372 - DNA, 25 bp, Canis familiaris
agcatcttgaggctctagccttcct

SEQ ID NO: 32373 - DNA, 25 bp, Canis familiaris
agctttgggttgtacaccctcaact

SEQ ID NO: 32374 - DNA, 25 bp, Canis familiaris
acgtccgcgttaaatggcttcaact

SEQ ID NO: 32375 - DNA, 25 bp, Canis familiaris
agcagatccatgcatttttggctta

SEQ ID NO: 32376 - DNA, 25 bp, Canis familiaris
agcagatgaagcctatctcatcggc

SEQ ID NO: 32377 - DNA, 25 bp, Canis familiaris
agcagctgaagtacccagcagcctg

SEQ ID NO: 32378 - DNA, 25 bp, Canis familiaris
agcaggctcagtaagccgtgcctac

SEQ ID NO: 32379 - DNA, 25 bp, Canis familiaris
agcaggacagaaagccatggaccag

SEQ ID NO: 32380 - DNA, 25 bp, Canis familiaris
agcagaaggacaagattgcaatctc

SEQ ID NO: 32381 - DNA, 25 bp, Canis familiaris
agcaggaggctaatgataacttcat

SEQ ID NO: 32382 - DNA, 25 bp, Canis familiaris
agcatgggattcagaaacctcattc

SEQ ID NO: 32383 - DNA, 25 bp, Canis familiaris
agctcgcgcttcatttccctcattg

SEQ ID NO: 32384 - DNA, 25 bp, Canis familiaris
agcgtggcctgacttatgccaccat

SEQ ID NO: 32385 - DNA, 25 bp, Canis familiaris
agcagctgagcagctgccttctgcc

SEQ ID NO: 32386 - DNA, 25 bp, Canis familiaris
agcagctggcaggggtcatggccac

SEQ ID NO: 32387 - DNA, 25 bp, Canis familiaris
agcatgtggcaggagctgctgcagc

SEQ ID NO: 32388 - DNA, 25 bp, Canis familiaris
agcagggagccagatgcaggacgcc

SEQ ID NO: 32389 - DNA, 25 bp, Canis familiaris
agcaggagcccgagaggaagcaccg

SEQ ID NO: 32390 - DNA, 25 bp, Canis familiaris
agcatgaggcccggagagcagcaaa

SEQ ID NO: 32391 - DNA, 25 bp, Canis familiaris
agctgcccactctagatgtacataa

SEQ ID NO: 32392 - DNA, 25 bp, Canis familiaris
agcataccccatcgatgcaatctgc

SEQ ID NO: 32393 - DNA, 25 bp, Canis familiaris
agcagacctctgtagctgacctgct

SEQ ID NO: 32394 - DNA, 25 bp, Canis familiaris
agcattccattgtagcatgactcgc

SEQ ID NO: 32395 - DNA, 25 bp, Canis familiaris
agcttgcgttgattaagtccctgcc

SEQ ID NO: 32396 - DNA, 25 bp, Canis familiaris
agcagtggctctgctaagtgctccc

SEQ ID NO: 32397 - DNA, 25 bp, Canis familiaris
agcatggtgctggtaacagttcaac

SEQ ID NO: 32398 - DNA, 25 bp, Canis familiaris
agcatggcatgagttggtcctacaa

SEQ ID NO: 32399 - DNA, 25 bp, Canis familiaris
agcatgtgcagaattggactcctcc

SEQ ID NO: 32400 - DNA, 25 bp, Canis familiaris
agcatcagaactggtcacatctctc

SEQ ID NO: 32401 - DNA, 25 bp, Canis familiaris
agcagagacccaacttgatgctccc

SEQ ID NO: 32402 - DNA, 25 bp, Canis familiaris
agcagcaacagcatcatgggagctc

SEQ ID NO: 32403 - DNA, 25 bp, Canis familiaris
agcagcaacagcagctacagcggat

SEQ ID NO: 32404 - DNA, 25 bp, Canis familiaris
agcagcacataatgtcacagggaca

SEQ ID NO: 32405 - DNA, 25 bp, Canis familiaris
agcagcaatcaagggcctgggcagc

SEQ ID NO: 32406 - DNA, 25 bp, Canis familiaris
agcagcaacgatcggtgcgctgggc

SEQ ID NO: 32407 - DNA, 25 bp, Canis familiaris
agcagaacagtgagctctctgcccc

SEQ ID NO: 32408 - DNA, 25 bp, Canis familiaris
agcagagagggctcactgaccctcc

SEQ ID NO: 32409 - DNA, 25 bp, Canis familiaris
agcatggaggcctcaggaaccctct

SEQ ID NO: 32410 - DNA, 25 bp, Canis familiaris
agcattatagcctctagttccattc

SEQ ID NO: 32411 - DNA, 25 bp, Canis familiaris
agcataatacactctagttccatcc

SEQ ID NO: 32412 - DNA, 25 bp, Canis familiaris
agcataatatcctctagttccacct

SEQ ID NO: 32413 - DNA, 25 bp, Canis familiaris
agcatccaatttgtggtttcagctc

SEQ ID NO: 32414 - DNA, 25 bp, Canis familiaris
agcaggacacattttgttttagccc

SEQ ID NO: 32415 - DNA, 25 bp, Canis familiaris
agcatctgaaattttgtttgtacgt

SEQ ID NO: 32416 - DNA, 25 bp, Canis familiaris
agcaggtgcagttttcttttaatgt

SEQ ID NO: 32417 - DNA, 25 bp, Canis familiaris
agcaggtgccttatcttttgctttg

SEQ ID NO: 32418 - DNA, 25 bp, Canis familiaris
agctgtgggttttttgtctgtgtgt

SEQ ID NO: 32419 - DNA, 25 bp, Canis familiaris
agcatgtggtcttactagtgtttgg

SEQ ID NO: 32420 - DNA, 25 bp, Canis familiaris
agcattggtcactagcaactgtcgt

SEQ ID NO: 32421 - DNA, 25 bp, Canis familiaris
agctgctgcagaaaagctatttgga

SEQ ID NO: 32422 - DNA, 25 bp, Canis familiaris
agctctgctgaagactcagttacgc

SEQ ID NO: 32423 - DNA, 25 bp, Canis familiaris
agcatgcatgctgggcgcaatctgc

SEQ ID NO: 32424 - DNA, 25 bp, Canis familiaris
agcatggccaggcactcgggaagtt

SEQ ID NO: 32425 - DNA, 25 bp, Canis familiaris
agcatgccaaggctctgtgggagga

SEQ ID NO: 32426 - DNA, 25 bp, Canis familiaris
agcatgagccggtctagtaggcact

SEQ ID NO: 32427 - DNA, 25 bp, Canis familiaris
agctgagccagttgtcctatggaca

SEQ ID NO: 32428 - DNA, 25 bp, Canis familiaris
agcatttcgatcctcgtcaggtgca

SEQ ID NO: 32429 - DNA, 25 bp, Canis familiaris
agcatcattcatttgtctccagggc

SEQ ID NO: 32430 - DNA, 25 bp, Canis familiaris
agcatctgatcaacgtcgctaatgt

SEQ ID NO: 32431 - DNA, 25 bp, Canis familiaris
agcattctcatcagtcgcaatgatt

SEQ ID NO: 32432 - DNA, 25 bp, Canis familiaris
agcattgccatctggagttgaagcg

SEQ ID NO: 32433 - DNA, 25 bp, Canis familiaris
agcttccatcagcattttaaggagt

SEQ ID NO: 32434 - DNA, 25 bp, Canis familiaris
agctgttatgcttttttggccaggt

SEQ ID NO: 32435 - DNA, 25 bp, Canis familiaris
agcatgtgtggtgcttttggacggt

SEQ ID NO: 32436 - DNA, 25 bp, Canis familiaris
agcagtgtggtggctttgctgaggg

SEQ ID NO: 32437 - DNA, 25 bp, Canis familiaris
agcaggcaggtggatttcttggccc

SEQ ID NO: 32438 - DNA, 25 bp, Canis familiaris
agctactgagtggtgcttcatctgg

SEQ ID NO: 32439 - DNA, 25 bp, Canis familiaris
agcttctggtcatcactcacgatgt

SEQ ID NO: 32440 - DNA, 25 bp, Canis familiaris
agcatcctacactgtctatcgtgct

SEQ ID NO: 32441 - DNA, 25 bp, Canis familiaris
agcatctgcttctagttttcagtga

SEQ ID NO: 32442 - DNA, 25 bp, Canis familiaris
agctccgtcatacttggactgataa

SEQ ID NO: 32443 - DNA, 25 bp, Canis familiaris
agctacgggagccagtactacaacg

SEQ ID NO: 32444 - DNA, 25 bp, Canis familiaris
agcatactggaggccattcagaaaa

SEQ ID NO: 32445 - DNA, 25 bp, Canis familiaris
agcagttgagatccaagctacaaaa

SEQ ID NO: 32446 - DNA, 25 bp, Canis familiaris
agcagggagatccactgctccaact

SEQ ID NO: 32447 - DNA, 25 bp, Canis familiaris
agcaggctgagaagacggccgcctc

SEQ ID NO: 32448 - DNA, 25 bp, Canis familiaris
agcaggtggagacgatgccccctgc

SEQ ID NO: 32449 - DNA, 25 bp, Canis familiaris
agcaggaggcataggagccccgtgg

SEQ ID NO: 32450 - DNA, 25 bp, Canis familiaris
agcagatgaagaaggggcccagcgc

SEQ ID NO: 32451 - DNA, 25 bp, Canis familiaris
agcaggagactgagggctccagcct

SEQ ID NO: 32452 - DNA, 25 bp, Canis familiaris
agcagagagacgcgtggtgccgctt

SEQ ID NO: 32453 - DNA, 25 bp, Canis familiaris
agcagggacgtggtctgtcctgctc

SEQ ID NO: 32454 - DNA, 25 bp, Canis familiaris
agcaggtagcgggtgagtcgccgcc

SEQ ID NO: 32455 - DNA, 25 bp, Canis familiaris
agcgggagggagagtcccatcaata

SEQ ID NO: 32456 - DNA, 25 bp, Canis familiaris
agctggagctggcagaagtcaacca

SEQ ID NO: 32457 - DNA, 25 bp, Canis familiaris
agcaggagcatgctagaggtgcccc

SEQ ID NO: 32458 - DNA, 25 bp, Canis familiaris
agcagaggctccaagagcgtggccc

SEQ ID NO: 32459 - DNA, 25 bp, Canis familiaris
agctgctagtccagattttgccaaa

SEQ ID NO: 32460 - DNA, 25 bp, Canis familiaris
agctgatagtccacctcatcaggca

SEQ ID NO: 32461 - DNA, 25 bp, Canis familiaris
agctaagtcctgtcattgctacctc

SEQ ID NO: 32462 - DNA, 25 bp, Canis familiaris
agctcaagtcagctgctggctactc

SEQ ID NO: 32463 - DNA, 25 bp, Canis familiaris
agctcaagccacttgtggatctctg

SEQ ID NO: 32464 - DNA, 25 bp, Canis familiaris
agcatgcaggaactcgtggcacacg

SEQ ID NO: 32465 - DNA, 25 bp, Canis familiaris
agcatgcaagagctcagcaccatcc

SEQ ID NO: 32466 - DNA, 25 bp, Canis familiaris
agcatgccagcatgttgtgcctgtc

SEQ ID NO: 32467 - DNA, 25 bp, Canis familiaris
agcatcatcagaagttatgtcctct

SEQ ID NO: 32468 - DNA, 25 bp, Canis familiaris
agctacatgacaactggtcctcttc

SEQ ID NO: 32469 - DNA, 25 bp, Canis familiaris
agctcaaagacacagctcagccttc

SEQ ID NO: 32470 - DNA, 25 bp, Canis familiaris
agctaaggatccctatgcagcactt

SEQ ID NO: 32471 - DNA, 25 bp, Canis familiaris
agcatatagtttctttgcacccact

SEQ ID NO: 32472 - DNA, 25 bp, Canis familiaris
agctaaatgattctcttgctccaag

SEQ ID NO: 32473 - DNA, 25 bp, Canis familiaris
agcttctagtatctgtctcatgtaa

SEQ ID NO: 32474 - DNA, 25 bp, Canis familiaris
agctttactatcttctgtgattttt

SEQ ID NO: 32475 - DNA, 25 bp, Canis familiaris
agcatttatgtttgtctgtctattt

SEQ ID NO: 32476 - DNA, 25 bp, Canis familiaris
agcatctgttgtactatcgttgttg

SEQ ID NO: 32477 - DNA, 25 bp, Canis familiaris
agcttttgtacttcttgttcattaa

SEQ ID NO: 32478 - DNA, 25 bp, Canis familiaris
agcatttttactttctgtacaacaa

SEQ ID NO: 32479 - DNA, 25 bp, Canis familiaris
agcattcatcatctgctttcttacc

SEQ ID NO: 32480 - DNA, 25 bp, Canis familiaris
agcattgactggtctgtgtctgctg

SEQ ID NO: 32481 - DNA, 25 bp, Canis familiaris
agcattggctggggtagtgctgccc

SEQ ID NO: 32482 - DNA, 25 bp, Canis familiaris
agcatgacccatggagtttggccca

SEQ ID NO: 32483 - DNA, 25 bp, Canis familiaris
agctagaccataggctattagggac

SEQ ID NO: 32484 - DNA, 25 bp, Canis familiaris
agctttgccaaagtcacggggacag

SEQ ID NO: 32485 - DNA, 25 bp, Canis familiaris
agctatgtaaagttcccagtgggtg

SEQ ID NO: 32486 - DNA, 25 bp, Canis familiaris
agcttcaaattatcccactgaggga

SEQ ID NO: 32487 - DNA, 25 bp, Canis familiaris
agcttcattttcaagatcccatggg

SEQ ID NO: 32488 - DNA, 25 bp, Canis familiaris
agcattatactctaaatccatccgt

SEQ ID NO: 32489 - DNA, 25 bp, Canis familiaris
agcatgatcatctttgaaaccccca

SEQ ID NO: 32490 - DNA, 25 bp, Canis familiaris
agcatcatttttggaaactgcccca

SEQ ID NO: 32491 - DNA, 25 bp, Canis familiaris
agcattatttattgccacacgctcc

SEQ ID NO: 32492 - DNA, 25 bp, Canis familiaris
agcattgttatcaccacacaggctc

SEQ ID NO: 32493 - DNA, 25 bp, Canis familiaris
agcatgaacgagagccaccgtgtcc

SEQ ID NO: 32494 - DNA, 25 bp, Canis familiaris
agcatgaaggtgatccgctcgtgcg

SEQ ID NO: 32495 - DNA, 25 bp, Canis familiaris
agcgaagggctgaccaactggctga

SEQ ID NO: 32496 - DNA, 25 bp, Canis familiaris
agctgaacgggaagctcactggcat

SEQ ID NO: 32497 - DNA, 25 bp, Canis familiaris
agctgaacgggaagctcactggcat

SEQ ID NO: 32498 - DNA, 25 bp, Canis familiaris
agctcagaccggaagtcagctgccc

SEQ ID NO: 32499 - DNA, 25 bp, Canis familiaris
agctcagtcctggtaacacccagac

SEQ ID NO: 32500 - DNA, 25 bp, Canis familiaris
agctaggtgcgaaacacccacatcc

SEQ ID NO: 32501 - DNA, 25 bp, Canis familiaris
agctaggatgtgtgttctccagcct

SEQ ID NO: 32502 - DNA, 25 bp, Canis familiaris
agcatgagagggacgttcaccaccc

SEQ ID NO: 32503 - DNA, 25 bp, Canis familiaris
agcaggaggtcctattaccctctgc

SEQ ID NO: 32504 - DNA, 25 bp, Canis familiaris
agcagtggtgctgtattatccctcc

SEQ ID NO: 32505 - DNA, 25 bp, Canis familiaris
agcaggagttcttttatcatcaccc

SEQ ID NO: 32506 - DNA, 25 bp, Canis familiaris
agctggagtctgcgttcagacccac

SEQ ID NO: 32507 - DNA, 25 bp, Canis familiaris
agcaggagccagggatctcagggcc

SEQ ID NO: 32508 - DNA, 25 bp, Canis familiaris
agcagggcacgtttcatagccagca

SEQ ID NO: 32509 - DNA, 25 bp, Canis familiaris
agcaggctgacttcctagacaagca

SEQ ID NO: 32510 - DNA, 25 bp, Canis familiaris
agcaggtggcttacatatacaaatg

SEQ ID NO: 32511 - DNA, 25 bp, Canis familiaris
acggggcttgtcatgcccaaggggt

SEQ ID NO: 32512 - DNA, 25 bp, Canis familiaris
acggggtcgtcgtgactcaggacgt

SEQ ID NO: 32513 - DNA, 25 bp, Canis familiaris
agcgcggagtccggggactcggaga

SEQ ID NO: 32514 - DNA, 25 bp, Canis familiaris
agccgaggcccgaggactacggcta

SEQ ID NO: 32515 - DNA, 25 bp, Canis familiaris
accagagctacctctaagtagtggt

SEQ ID NO: 32516 - DNA, 25 bp, Canis familiaris
agctaagtcccccgaaatcagagga

SEQ ID NO: 32517 - DNA, 25 bp, Canis familiaris
agctaatctccctcatatataaaga

SEQ ID NO: 32518 - DNA, 25 bp, Canis familiaris
agcgagaccccactaacatcaaatg

SEQ ID NO: 32519 - DNA, 25 bp, Canis familiaris
agctgtgcccagaaaaattaaatga

SEQ ID NO: 32520 - DNA, 25 bp, Canis familiaris
agcaggcccggaaagaaaactgaga

SEQ ID NO: 32521 - DNA, 25 bp, Canis familiaris
agctgggggccaaagaacttatgaa

SEQ ID NO: 32522 - DNA, 25 bp, Canis familiaris
agcatttatgtggtaaacacttaca

SEQ ID NO: 32523 - DNA, 25 bp, Canis familiaris
agcatttttactatagcctgaagca

SEQ ID NO: 32524 - DNA, 25 bp, Canis familiaris
agcttttcttctactagtctgatgt

SEQ ID NO: 32525 - DNA, 25 bp, Canis familiaris
agcattggttcctctagatctggtt

SEQ ID NO: 32526 - DNA, 25 bp, Canis familiaris
agctctggctttccaaagttgttcc

SEQ ID NO: 32527 - DNA, 25 bp, Canis familiaris
agcataggttacccgacttgttgcc

SEQ ID NO: 32528 - DNA, 25 bp, Canis familiaris
aaaggcctactgcagccaatttcta

SEQ ID NO: 32529 - DNA, 25 bp, Canis familiaris
accaggccttgacggccaaacagct

SEQ ID NO: 32530 - DNA, 25 bp, Canis familiaris
agctatgaccatagggcctaataag

SEQ ID NO: 32531 - DNA, 25 bp, Canis familiaris
agctctgacctgtgtcacatggaca

SEQ ID NO: 32532 - DNA, 25 bp, Canis familiaris
agctctgacttctgtgtctggaacc

SEQ ID NO: 32533 - DNA, 25 bp, Canis familiaris
agctctgagttcttctttggatgac

SEQ ID NO: 32534 - DNA, 25 bp, Canis familiaris
agctatactagctttctctttatta

SEQ ID NO: 32535 - DNA, 25 bp, Canis familiaris
agctcaataagctctcattaaatgt

SEQ ID NO: 32536 - DNA, 25 bp, Canis familiaris
agctctggaggctgctaagaaacta

SEQ ID NO: 32537 - DNA, 25 bp, Canis familiaris
agctctcggactccgctaagtacta

SEQ ID NO: 32538 - DNA, 25 bp, Canis familiaris
agcttccgagacgcacaggtttaat

SEQ ID NO: 32539 - DNA, 25 bp, Canis familiaris
agctccctatacgcgtatattaaag

SEQ ID NO: 32540 - DNA, 25 bp, Canis familiaris
agctcctcaataccacctggaaaaa

SEQ ID NO: 32541 - DNA, 25 bp, Canis familiaris
agcatctttgggacacctgaggaaa

SEQ ID NO: 32542 - DNA, 25 bp, Canis familiaris
agctttcagaggtcccttagagagc

SEQ ID NO: 32543 - DNA, 25 bp, Canis familiaris
agctttagtggagaacttgaagctt

SEQ ID NO: 32544 - DNA, 25 bp, Canis familiaris
agcggggcgccggaagagtaacatt

SEQ ID NO: 32545 - DNA, 25 bp, Canis familiaris
agcgggggagggagtggccaattct

SEQ ID NO: 32546 - DNA, 25 bp, Canis familiaris
agcggggagctgggctactggaaat

SEQ ID NO: 32547 - DNA, 25 bp, Canis familiaris
agcaggggactgctccagtgtaagg

SEQ ID NO: 32548 - DNA, 25 bp, Canis familiaris
agcctacgacctaactgctctaagt

SEQ ID NO: 32549 - DNA, 25 bp, Canis familiaris
agcataacacccagttgcactagac

SEQ ID NO: 32550 - DNA, 25 bp, Canis familiaris
agctcaaatttttgcctcactagca

SEQ ID NO: 32551 - DNA, 25 bp, Canis familiaris
agcattaattctatctgcaacatta

SEQ ID NO: 32552 - DNA, 25 bp, Canis familiaris
agcatgtattttattcattctaata

SEQ ID NO: 32553 - DNA, 25 bp, Canis familiaris
agcttacttttcaccatcatcagaa

SEQ ID NO: 32554 - DNA, 25 bp, Canis familiaris
acggccgatttcaccaagatggact

SEQ ID NO: 32555 - DNA, 25 bp, Canis familiaris
acgaccgggagggccaatgtgagac

SEQ ID NO: 32556 - DNA, 25 bp, Canis familiaris
agctaccgaggggacctgtgtgaga

SEQ ID NO: 32557 - DNA, 25 bp, Canis familiaris
agcatcaccggtggtaccttgagaa

SEQ ID NO: 32558 - DNA, 25 bp, Canis familiaris
agcttgacgtgtggaactttacaac

SEQ ID NO: 32559 - DNA, 25 bp, Canis familiaris
accagaccgtggacgttgtagctcc

SEQ ID NO: 32560 - DNA, 25 bp, Canis familiaris
accaaaccatggaggtgtcctgtta

SEQ ID NO: 32561 - DNA, 25 bp, Canis familiaris
agcgtagacgatccagtggttcctg

SEQ ID NO: 32562 - DNA, 25 bp, Canis familiaris
agctggtacgagcaagtttagctgg

SEQ ID NO: 32563 - DNA, 25 bp, Canis familiaris
agctttacagtacagcctttgtgct

SEQ ID NO: 32564 - DNA, 25 bp, Canis familiaris
agctttactctatcatcttcttggc

SEQ ID NO: 32565 - DNA, 25 bp, Canis familiaris
agctttccgctgcaatcttaatact

SEQ ID NO: 32566 - DNA, 25 bp, Canis familiaris
agcttcatccccaaatagaataact

SEQ ID NO: 32567 - DNA, 25 bp, Canis familiaris
agcttcaccctctaaactgctaact

SEQ ID NO: 32568 - DNA, 25 bp, Canis familiaris
agcttccagcctgcaaagatctatc

SEQ ID NO: 32569 - DNA, 25 bp, Canis familiaris
agcttgccctcataaaggctgcaca

SEQ ID NO: 32570 - DNA, 25 bp, Canis familiaris
agctggtcaccaaatatgaagtcaa

SEQ ID NO: 32571 - DNA, 25 bp, Canis familiaris
agctgcagctgcagcagcaacaaca

SEQ ID NO: 32572 - DNA, 25 bp, Canis familiaris
agctactgaagggcacaacacatgt

SEQ ID NO: 32573 - DNA, 25 bp, Canis familiaris
agcttgtactgggatcaagccatga

SEQ ID NO: 32574 - DNA, 25 bp, Canis familiaris
agcatgtgctttcagctcagggcat

SEQ ID NO: 32575 - DNA, 25 bp, Canis familiaris
agcgtgtgtttgactacagtgagta

SEQ ID NO: 32576 - DNA, 25 bp, Canis familiaris
agctgtttgttgggctaatggtaaa

SEQ ID NO: 32577 - DNA, 25 bp, Canis familiaris
agctgttcaagtgttcctggttaag

SEQ ID NO: 32578 - DNA, 25 bp, Canis familiaris
agctttcaagtgcctttctgcagtt

SEQ ID NO: 32579 - DNA, 25 bp, Canis familiaris
agctgttcgagccgttttagctggg

SEQ ID NO: 32580 - DNA, 25 bp, Canis familiaris
agcatttcttggcttgggtgctggg

SEQ ID NO: 32581 - DNA, 25 bp, Canis familiaris
agctttcttggcctacagagtaaat

SEQ ID NO: 32582 - DNA, 25 bp, Canis familiaris
agctttgcctgtagcatatcagagt

SEQ ID NO: 32583 - DNA, 25 bp, Canis familiaris
agctttgcgcaggcgcaagggtctc

SEQ ID NO: 32584 - DNA, 25 bp, Canis familiaris
agctctgtcgcattacagggtctcc

SEQ ID NO: 32585 - DNA, 25 bp, Canis familiaris
agctcgtagcaatactggatcccac

SEQ ID NO: 32586 - DNA, 25 bp, Canis familiaris
agctcagtgagctggcaaagtacca

SEQ ID NO: 32587 - DNA, 25 bp, Canis familiaris
agctcaatcggcacacaatcttccg

SEQ ID NO: 32588 - DNA, 25 bp, Canis familiaris
agcatttcagacatacagatcattc

SEQ ID NO: 32589 - DNA, 25 bp, Canis familiaris
agcttccaactaactgatactcttc

SEQ ID NO: 32590 - DNA, 25 bp, Canis familiaris
acctggcaatactccaactgttcac

SEQ ID NO: 32591 - DNA, 25 bp, Canis familiaris
agcagggaggactcaaactcttcca

SEQ ID NO: 32592 - DNA, 25 bp, Canis familiaris
agctggggacactcaagtgcttcct

SEQ ID NO: 32593 - DNA, 25 bp, Canis familiaris
agcaggggtgcctaattgtgttccg

SEQ ID NO: 32594 - DNA, 25 bp, Canis familiaris
agcagggtggactgtgtgcttggcc

SEQ ID NO: 32595 - DNA, 25 bp, Canis familiaris
agcaggggtcagggagctgaatgtc

SEQ ID NO: 32596 - DNA, 25 bp, Canis familiaris
agcaggtggtcacttgagttgcagt

SEQ ID NO: 32597 - DNA, 25 bp, Canis familiaris
agcaggggacagcctgactggggac

SEQ ID NO: 32598 - DNA, 25 bp, Canis familiaris
agcaggcagtgctgactggctggtg

SEQ ID NO: 32599 - DNA, 25 bp, Canis familiaris
agcaggctgtgacagcagtgcagca

SEQ ID NO: 32600 - DNA, 25 bp, Canis familiaris
agctggtgctgagtagcagctgccc

SEQ ID NO: 32601 - DNA, 25 bp, Canis familiaris
agcatagacgaatctgtccccaggc

SEQ ID NO: 32602 - DNA, 25 bp, Canis familiaris
agcttgaagagttctctctgctccg

SEQ ID NO: 32603 - DNA, 25 bp, Canis familiaris
agcttctaactattcttgctctcat

SEQ ID NO: 32604 - DNA, 25 bp, Canis familiaris
agctgaaacccattctatgtcacat

SEQ ID NO: 32605 - DNA, 25 bp, Canis familiaris
agctgtaagccactgttaccacaca

SEQ ID NO: 32606 - DNA, 25 bp, Canis familiaris
agcttaatgaagccttacacacccc

SEQ ID NO: 32607 - DNA, 25 bp, Canis familiaris
agctctaaagccataaagcccactg

SEQ ID NO: 32608 - DNA, 25 bp, Canis familiaris
agctctgctcaaccttaggagggac

SEQ ID NO: 32609 - DNA, 25 bp, Canis familiaris
agctctgaaaccatctcacagggat

SEQ ID NO: 32610 - DNA, 25 bp, Canis familiaris
agcttgaagacagctcgcagtgcct

SEQ ID NO: 32611 - DNA, 25 bp, Canis familiaris
agcgtgaatgaagctgctgctcctt

SEQ ID NO: 32612 - DNA, 25 bp, Canis familiaris
agcatctttgaatctgagcttgata

SEQ ID NO: 32613 - DNA, 25 bp, Canis familiaris
agcttttgagaattggcctgtccgt

SEQ ID NO: 32614 - DNA, 25 bp, Canis familiaris
agctttgtaaaccacacagtctcct

SEQ ID NO: 32615 - DNA, 25 bp, Canis familiaris
agcttggtgaagtcgccaggtgcac

SEQ ID NO: 32616 - DNA, 25 bp, Canis familiaris
agctatgtgtccttccacagttact

SEQ ID NO: 32617 - DNA, 25 bp, Canis familiaris
agcttgtgagcgcatgtcagcagtt

SEQ ID NO: 32618 - DNA, 25 bp, Canis familiaris
agctgtgctatgttgctctagactt

SEQ ID NO: 32619 - DNA, 25 bp, Canis familiaris
agctgtgctatgttgctctagactt

SEQ ID NO: 32620 - DNA, 25 bp, Canis familiaris
agctatgctatgaccttaggtatat

SEQ ID NO: 32621 - DNA, 25 bp, Canis familiaris
agctttatcccaaatgccatagcat

SEQ ID NO: 32622 - DNA, 25 bp, Canis familiaris
agctttatgctgggattaattgcat

SEQ ID NO: 32623 - DNA, 25 bp, Canis familiaris
agctgttcgctggatggtaatcaga

SEQ ID NO: 32624 - DNA, 25 bp, Canis familiaris
agctctctctgaccatgggtatcta

SEQ ID NO: 32625 - DNA, 25 bp, Canis familiaris
agcatcctgctgcaaaaatgattgt

SEQ ID NO: 32626 - DNA, 25 bp, Canis familiaris
agcatgttgctgaagattgatgagt

SEQ ID NO: 32627 - DNA, 25 bp, Canis familiaris
agcgtatgtgcttgtgtgtgagtgt

SEQ ID NO: 32628 - DNA, 25 bp, Canis familiaris
agctttgtcagattcttgatgtgat

SEQ ID NO: 32629 - DNA, 25 bp, Canis familiaris
agctccgtcagcttctggaggttct

SEQ ID NO: 32630 - DNA, 25 bp, Canis familiaris
agctgggtacttaccagtgtcctcc

SEQ ID NO: 32631 - DNA, 25 bp, Canis familiaris
agcgggtctttaaaattgcaagtca

SEQ ID NO: 32632 - DNA, 25 bp, Canis familiaris
agccgagacttctggacttaggatc

SEQ ID NO: 32633 - DNA, 25 bp, Canis familiaris
agcctggacctgtcctgactaagga

SEQ ID NO: 32634 - DNA, 25 bp, Canis familiaris
agcctggaccgtcctggaggaggtc

SEQ ID NO: 32635 - DNA, 25 bp, Canis familiaris
agcctggaccgtcctggaggaggtc

SEQ ID NO: 32636 - DNA, 25 bp, Canis familiaris
agcctggaccgtcctggaggaggtc

SEQ ID NO: 32637 - DNA, 25 bp, Canis familiaris
agcatggggcccctctggaaggggc

SEQ ID NO: 32638 - DNA, 25 bp, Canis familiaris
actgggtgaacatctacgggggcct

SEQ ID NO: 32639 - DNA, 25 bp, Canis familiaris
acgtgggagattggctccggggcgt

SEQ ID NO: 32640 - DNA, 25 bp, Canis familiaris
agcattgcggaatttctccgaggga

SEQ ID NO: 32641 - DNA, 25 bp, Canis familiaris
agcatggggcattaatctctctgac

SEQ ID NO: 32642 - DNA, 25 bp, Canis familiaris
agcttggagctccagagactgagac

SEQ ID NO: 32643 - DNA, 25 bp, Canis familiaris
agcttctggctgaccaggctgaggc

SEQ ID NO: 32644 - DNA, 25 bp, Canis familiaris
agcttctggctgaccaggctgaggc

SEQ ID NO: 32645 - DNA, 25 bp, Canis familiaris
agcttctggctgaccaggctgaggc

SEQ ID NO: 32646 - DNA, 25 bp, Canis familiaris
agcttctggctgaccaggctgaggc

SEQ ID NO: 32647 - DNA, 25 bp, Canis familiaris
agcttcgtgctgtccagcttaactg

SEQ ID NO: 32648 - DNA, 25 bp, Canis familiaris
agcttccatcgttggcgtgaactgc

SEQ ID NO: 32649 - DNA, 25 bp, Canis familiaris
agcttccacagctggttgatatggc

SEQ ID NO: 32650 - DNA, 25 bp, Canis familiaris
agctcaccctgctgtgtttcagcag

SEQ ID NO: 32651 - DNA, 25 bp, Canis familiaris
agctccacattgggcttttgtgcac

SEQ ID NO: 32652 - DNA, 25 bp, Canis familiaris
agctccatgttgggttttgtgctca

SEQ ID NO: 32653 - DNA, 25 bp, Canis familiaris
agcatctcagtcttggttttggctc

SEQ ID NO: 32654 - DNA, 25 bp, Canis familiaris
agctctcagatcctgttttctgggg

SEQ ID NO: 32655 - DNA, 25 bp, Canis familiaris
agctcaggatcttgtttcctgcttg

SEQ ID NO: 32656 - DNA, 25 bp, Canis familiaris
agctctggttatttttctcttgtac

SEQ ID NO: 32657 - DNA, 25 bp, Canis familiaris
agctctggcttgttattatcccgaa

SEQ ID NO: 32658 - DNA, 25 bp, Canis familiaris
agctgatcagtttttccacctggaa

SEQ ID NO: 32659 - DNA, 25 bp, Canis familiaris
agcatagagtcttttagcccagtaa

SEQ ID NO: 32660 - DNA, 25 bp, Canis familiaris
agctacagtgtacttacatataata

SEQ ID NO: 32661 - DNA, 25 bp, Canis familiaris
agctgacaggctgtgaaatatggaa

SEQ ID NO: 32662 - DNA, 25 bp, Canis familiaris
agctgacaggctgtgaaatatggaa

SEQ ID NO: 32663 - DNA, 25 bp, Canis familiaris
agcgacgcgctggcgttacagcgca

SEQ ID NO: 32664 - DNA, 25 bp, Canis familiaris
agctgagccctggttgggcagtgcc

SEQ ID NO: 32665 - DNA, 25 bp, Canis familiaris
agcatgccacctgattctgagattg

SEQ ID NO: 32666 - DNA, 25 bp, Canis familiaris
agctgcgcatcagcaacctggactt

SEQ ID NO: 32667 - DNA, 25 bp, Canis familiaris
agcatagccacttagcgctgatact

SEQ ID NO: 32668 - DNA, 25 bp, Canis familiaris
agctacacacatcaaggatatccta

SEQ ID NO: 32669 - DNA, 25 bp, Canis familiaris
agctcagaatctcaacaaacgtagt

SEQ ID NO: 32670 - DNA, 25 bp, Canis familiaris
agctcgacattttaaacatggtagt

SEQ ID NO: 32671 - DNA, 25 bp, Canis familiaris
agcccaaattaatacatgcggaact

SEQ ID NO: 32672 - DNA, 25 bp, Canis familiaris
acaccaataaagttaccccaatctg

SEQ ID NO: 32673 - DNA, 25 bp, Canis familiaris
agcttactaaactgactgcctcaaa

SEQ ID NO: 32674 - DNA, 25 bp, Canis familiaris
agcttttaactacactttcagagaa

SEQ ID NO: 32675 - DNA, 25 bp, Canis familiaris
agctttcataacatactctttcaga

SEQ ID NO: 32676 - DNA, 25 bp, Canis familiaris
agcattttagtaacacttcattcag

SEQ ID NO: 32677 - DNA, 25 bp, Canis familiaris
agcatctttgggtacctttcagcag

SEQ ID NO: 32678 - DNA, 25 bp, Canis familiaris
agcattttgggatccttcagcagag

SEQ ID NO: 32679 - DNA, 25 bp, Canis familiaris
agcttgggggactttctacagtagt

SEQ ID NO: 32680 - DNA, 25 bp, Canis familiaris
agcctggagggatatcaatgacgga

SEQ ID NO: 32681 - DNA, 25 bp, Canis familiaris
acgcgggggcaaaacagccagggcg

SEQ ID NO: 32682 - DNA, 25 bp, Canis familiaris
accggtgcagtctgggaccagttcc

SEQ ID NO: 32683 - DNA, 25 bp, Canis familiaris
agctcgcccaatgcgggttgagtct

SEQ ID NO: 32684 - DNA, 25 bp, Canis familiaris
agctgccttccagggtggggaatct

SEQ ID NO: 32685 - DNA, 25 bp, Canis familiaris
agcccttcagtgctgtgacgggtct

SEQ ID NO: 32686 - DNA, 25 bp, Canis familiaris
agcccccaaggggcacagtagtcca

SEQ ID NO: 32687 - DNA, 25 bp, Canis familiaris
agcgcggcgagctggccaagaagat

SEQ ID NO: 32688 - DNA, 25 bp, Canis familiaris
agcggctgcgacagtatgctgagaa

SEQ ID NO: 32689 - DNA, 25 bp, Canis familiaris
agcggccgagggagcagcaggaggc

SEQ ID NO: 32690 - DNA, 25 bp, Canis familiaris
agctgtgcacattgaggaagacggg

SEQ ID NO: 32691 - DNA, 25 bp, Canis familiaris
agcttgcagacaccaaagcacctcg

SEQ ID NO: 32692 - DNA, 25 bp, Canis familiaris
agctatgcccaggctgaagtcctca

SEQ ID NO: 32693 - DNA, 25 bp, Canis familiaris
agcttgcccagattcggtgcagcaa

SEQ ID NO: 32694 - DNA, 25 bp, Canis familiaris
agcttgcccagattcggtgcagcaa

SEQ ID NO: 32695 - DNA, 25 bp, Canis familiaris
agcttgccactcagccagtgaaaat

SEQ ID NO: 32696 - DNA, 25 bp, Canis familiaris
agcatagggtgcactatttcacaat

SEQ ID NO: 32697 - DNA, 25 bp, Canis familiaris
agcatagtgtttcttttgatagtga

SEQ ID NO: 32698 - DNA, 25 bp, Canis familiaris
agctgatgtgtgcttttgtctaagt

SEQ ID NO: 32699 - DNA, 25 bp, Canis familiaris
agcttctgtgctttgctttcacaaa

SEQ ID NO: 32700 - DNA, 25 bp, Canis familiaris
agcttgctggcctctttatcaaggc

SEQ ID NO: 32701 - DNA, 25 bp, Canis familiaris
agctgctggaggtgctttgacagag

SEQ ID NO: 32702 - DNA, 25 bp, Canis familiaris
agcattgagggaagccagcgccctg

SEQ ID NO: 32703 - DNA, 25 bp, Canis familiaris
agcttgaggagaactcggccttcct

SEQ ID NO: 32704 - DNA, 25 bp, Canis familiaris
agcttgaggggtctgcacagtgtcc

SEQ ID NO: 32705 - DNA, 25 bp, Canis familiaris
agcatatgggcgcaggtgcacgctc

SEQ ID NO: 32706 - DNA, 25 bp, Canis familiaris
agcatagcagagctgcgcgtggcct

SEQ ID NO: 32707 - DNA, 25 bp, Canis familiaris
agcatcagcaggcatgaggcctccc

SEQ ID NO: 32708 - DNA, 25 bp, Canis familiaris
agctcatgcaggaggacctggccac

SEQ ID NO: 32709 - DNA, 25 bp, Canis familiaris
agctacaagttggcccgatggacct

SEQ ID NO: 32710 - DNA, 25 bp, Canis familiaris
agctgaatatgtggaccctggggcc

SEQ ID NO: 32711 - DNA, 25 bp, Canis familiaris
agcggaatgaaacccgtaggccgag

SEQ ID NO: 32712 - DNA, 25 bp, Canis familiaris
cagtccaagaaagacgggccctggg

SEQ ID NO: 32713 - DNA, 25 bp, Canis familiaris
agccgacagggtgacttaccctggt

SEQ ID NO: 32714 - DNA, 25 bp, Canis familiaris
agccgccagggtgacttccctgggt

SEQ ID NO: 32715 - DNA, 25 bp, Canis familiaris
agcttccacgttgaattcaccagtg

SEQ ID NO: 32716 - DNA, 25 bp, Canis familiaris
agctcccacgtaaagttcagcctta

SEQ ID NO: 32717 - DNA, 25 bp, Canis familiaris
cagttcgacttaccgaaatgcctta

SEQ ID NO: 32718 - DNA, 25 bp, Canis familiaris
agcttcgagcttatgcgggagccgt

SEQ ID NO: 32719 - DNA, 25 bp, Canis familiaris
agctctctgagcttattcgttgctg

SEQ ID NO: 32720 - DNA, 25 bp, Canis familiaris
agcttatagcttttccttctgagag

SEQ ID NO: 32721 - DNA, 25 bp, Canis familiaris
agctgttacaatttccttctaggtt

SEQ ID NO: 32722 - DNA, 25 bp, Canis familiaris
agctgattcaaatccttggaacgat

SEQ ID NO: 32723 - DNA, 25 bp, Canis familiaris
agcatttcaagaagccctcgatacc

SEQ ID NO: 32724 - DNA, 25 bp, Canis familiaris
agcgtgctaataacccaagcataac

SEQ ID NO: 32725 - DNA, 25 bp, Canis familiaris
agctctacagattccaccaatataa

SEQ ID NO: 32726 - DNA, 25 bp, Canis familiaris
agctctgacgtacccagatgcatat

SEQ ID NO: 32727 - DNA, 25 bp, Canis familiaris
agctgctgcatgtctgagtccagag

SEQ ID NO: 32728 - DNA, 25 bp, Canis familiaris
agctcatcaatgcatgcccagggct

SEQ ID NO: 32729 - DNA, 25 bp, Canis familiaris
agcttccatgagaacagcagggtag

SEQ ID NO: 32730 - DNA, 25 bp, Canis familiaris
agctctcgccgtacaagcggaaggc

SEQ ID NO: 32731 - DNA, 25 bp, Canis familiaris
agctccgccttgtcagtgaggaagg

SEQ ID NO: 32732 - DNA, 25 bp, Canis familiaris
agctatgtgagcttgtagtacagaa

SEQ ID NO: 32733 - DNA, 25 bp, Canis familiaris
agctatgctatggctgccgtgtgaa

SEQ ID NO: 32734 - DNA, 25 bp, Canis familiaris
agcatatgcttgtctcaaagattaa

SEQ ID NO: 32735 - DNA, 25 bp, Canis familiaris
agcatagccttcgaaattctaattt

SEQ ID NO: 32736 - DNA, 25 bp, Canis familiaris
agcattgctgctaccaatatttcta

SEQ ID NO: 32737 - DNA, 25 bp, Canis familiaris
agcttgtgtttctttgttgctgcaa

SEQ ID NO: 32738 - DNA, 25 bp, Canis familiaris
agcattgctgttatcatttttggaa

SEQ ID NO: 32739 - DNA, 25 bp, Canis familiaris
agcattttcttgtctttttggtggt

SEQ ID NO: 32740 - DNA, 25 bp, Canis familiaris
agctgtatttttttgtctagggagt

SEQ ID NO: 32741 - DNA, 25 bp, Canis familiaris
agctgtactataagttaattggttt

SEQ ID NO: 32742 - DNA, 25 bp, Canis familiaris
agcattaccatatctagtttgtgtt

SEQ ID NO: 32743 - DNA, 25 bp, Canis familiaris
agcattcctgcagactggcttttac

SEQ ID NO: 32744 - DNA, 25 bp, Canis familiaris
agcattcacaggttgcggctttctg

SEQ ID NO: 32745 - DNA, 25 bp, Canis familiaris
agcattcaagccttcattctcttgc

SEQ ID NO: 32746 - DNA, 25 bp, Canis familiaris
agcattcaaatctgctttctaccct

SEQ ID NO: 32747 - DNA, 25 bp, Canis familiaris
agctctaaagttgacgtgaccctct

SEQ ID NO: 32748 - DNA, 25 bp, Canis familiaris
agctacaaattctcctgttccaact

SEQ ID NO: 32749 - DNA, 25 bp, Canis familiaris
agcttacaagtcccttttcacgact

SEQ ID NO: 32750 - DNA, 25 bp, Canis familiaris
agcttcaaaccacattgctgtaccc

SEQ ID NO: 32751 - DNA, 25 bp, Canis familiaris
agctataccagtttttcatgtacct

SEQ ID NO: 32752 - DNA, 25 bp, Canis familiaris
agctttgtatttaattctctcactt

SEQ ID NO: 32753 - DNA, 25 bp, Canis familiaris
agcttttgttccattcccaataaag

SEQ ID NO: 32754 - DNA, 25 bp, Canis familiaris
actgttcctaagattgccaaaaaag

SEQ ID NO: 32755 - DNA, 25 bp, Canis familiaris
actatgtcctaactactgtaaaaga

SEQ ID NO: 32756 - DNA, 25 bp, Canis familiaris
agctacccatgaaccctgtaaaagg

SEQ ID NO: 32757 - DNA, 25 bp, Canis familiaris
agctccccgaatgggcttaagaaga

SEQ ID NO: 32758 - DNA, 25 bp, Canis familiaris
aacgccctgaaggtgcctcaaaggt

SEQ ID NO: 32759 - DNA, 25 bp, Canis familiaris
accaacctgaagtggcccagacgtt

SEQ ID NO: 32760 - DNA, 25 bp, Canis familiaris
accaagtggaagccaaaccctctgt

SEQ ID NO: 32761 - DNA, 25 bp, Canis familiaris
agcccagtgggacagaacccttgct

SEQ ID NO: 32762 - DNA, 25 bp, Canis familiaris
accaacggtgggccaatgaacttgt

SEQ ID NO: 32763 - DNA, 25 bp, Canis familiaris
accaaccgtgaagcacaagaccgga

SEQ ID NO: 32764 - DNA, 25 bp, Canis familiaris
acaacctggttagaagatgcccgcc

SEQ ID NO: 32765 - DNA, 25 bp, Canis familiaris
agctgctcctagagggagggcccag

SEQ ID NO: 32766 - DNA, 25 bp, Canis familiaris
acctcacgagcttgggttggaaagt

SEQ ID NO: 32767 - DNA, 25 bp, Canis familiaris
agcctgcgggccagtggggaaagat

SEQ ID NO: 32768 - DNA, 25 bp, Canis familiaris
agccgggagccaggggtgggaagtg

SEQ ID NO: 32769 - DNA, 25 bp, Canis familiaris
agctcgggagcccagtgtgggcgga

SEQ ID NO: 32770 - DNA, 25 bp, Canis familiaris
agcccagcgtccagtggggctgagc

SEQ ID NO: 32771 - DNA, 25 bp, Canis familiaris
agctgtgcacccctgggggaggagc

SEQ ID NO: 32772 - DNA, 25 bp, Canis familiaris
agcgatggccaaccggcaggagaag

SEQ ID NO: 32773 - DNA, 25 bp, Canis familiaris
agcgtgtgcctaccctgcgccggca

SEQ ID NO: 32774 - DNA, 25 bp, Canis familiaris
agcggtggatcatgccgtgatcggc

SEQ ID NO: 32775 - DNA, 25 bp, Canis familiaris
agcttctggaagtggtgatgggcat

SEQ ID NO: 32776 - DNA, 25 bp, Canis familiaris
agcttctcggaggcgtggagggcgc

SEQ ID NO: 32777 - DNA, 25 bp, Canis familiaris
agctactgccgggcactggagaagc

SEQ ID NO: 32778 - DNA, 25 bp, Canis familiaris
agctgatcagaccgcccaaaagatc

SEQ ID NO: 32779 - DNA, 25 bp, Canis familiaris
agcttagacccacagcagtggctcc

SEQ ID NO: 32780 - DNA, 25 bp, Canis familiaris
agctgtaggccaggcacacgggcct

SEQ ID NO: 32781 - DNA, 25 bp, Canis familiaris
agctgaagcagcccgcatattaggc

SEQ ID NO: 32782 - DNA, 25 bp, Canis familiaris
agctcaaaatcccattctagacgaa

SEQ ID NO: 32783 - DNA, 25 bp, Canis familiaris
agctcccttctctttataaggaatt

SEQ ID NO: 32784 - DNA, 25 bp, Canis familiaris
agccaccatcctattgcaaaggttc

SEQ ID NO: 32785 - DNA, 25 bp, Canis familiaris
agcgcccttcttcacagtaagaacc

SEQ ID NO: 32786 - DNA, 25 bp, Canis familiaris
agctccccatctgtacagtggggat

SEQ ID NO: 32787 - DNA, 25 bp, Canis familiaris
agctcccttgctgatgcagtgattg

SEQ ID NO: 32788 - DNA, 25 bp, Canis familiaris
agctctgcactgccatctatgaagc

SEQ ID NO: 32789 - DNA, 25 bp, Canis familiaris
agctctgcactgatttggagttgaa

SEQ ID NO: 32790 - DNA, 25 bp, Canis familiaris
agcttgccagagagatggagtcaga

SEQ ID NO: 32791 - DNA, 25 bp, Canis familiaris
agctcctcacagagtctgttctgaa

SEQ ID NO: 32792 - DNA, 25 bp, Canis familiaris
agccttaaactttgtgtctgctcct

SEQ ID NO: 32793 - DNA, 25 bp, Canis familiaris
aacttaaattttgcatttcacgcca

SEQ ID NO: 32794 - DNA, 25 bp, Canis familiaris
aattttaatttcactgttatccttg

SEQ ID NO: 32795 - DNA, 25 bp, Canis familiaris
aaacctatttactcagttatccagt

SEQ ID NO: 32796 - DNA, 25 bp, Canis familiaris
agcattccttttattctgtattcca

SEQ ID NO: 32797 - DNA, 25 bp, Canis familiaris
agctcatcacttgtttgtcttatat

SEQ ID NO: 32798 - DNA, 25 bp, Canis familiaris
agctagcacttgactttattttttt

SEQ ID NO: 32799 - DNA, 25 bp, Canis familiaris
agctacctgtataattctactttta

SEQ ID NO: 32800 - DNA, 25 bp, Canis familiaris
agcttggcattctgtttactttgtg

SEQ ID NO: 32801 - DNA, 25 bp, Canis familiaris
agcttgcagttgtcggttagtttct

SEQ ID NO: 32802 - DNA, 25 bp, Canis familiaris
agctcaagcctgtggaaagtccctc

SEQ ID NO: 32803 - DNA, 25 bp, Canis familiaris
agctcaagccggagcaaagtaggct

SEQ ID NO: 32804 - DNA, 25 bp, Canis familiaris
agctcaagtcggaccggatgaaccc

SEQ ID NO: 32805 - DNA, 25 bp, Canis familiaris
agctaggtggcctcgaggaagaccc

SEQ ID NO: 32806 - DNA, 25 bp, Canis familiaris
agctccgaatcctcagggagccacc

SEQ ID NO: 32807 - DNA, 25 bp, Canis familiaris
agctccgaccattacgggatccaga

SEQ ID NO: 32808 - DNA, 25 bp, Canis familiaris
agctcccaccaatctgtgggtctct

SEQ ID NO: 32809 - DNA, 25 bp, Canis familiaris
agctgcccaacactttgatttttta

SEQ ID NO: 32810 - DNA, 25 bp, Canis familiaris
agctctgaaatactcatttttttgg

SEQ ID NO: 32811 - DNA, 25 bp, Canis familiaris
agcttataaattcttccctcatgga

SEQ ID NO: 32812 - DNA, 25 bp, Canis familiaris
agctttaaacacttcttccagcaaa

SEQ ID NO: 32813 - DNA, 25 bp, Canis familiaris
agcttgatattggcacttcctgccc

SEQ ID NO: 32814 - DNA, 25 bp, Canis familiaris
agctgtgacactgaatgatcctcca

SEQ ID NO: 32815 - DNA, 25 bp, Canis familiaris
agcttaagtgctgcagtgccatcct

SEQ ID NO: 32816 - DNA, 25 bp, Canis familiaris
agctatcaagtcttcactcatcatc

SEQ ID NO: 32817 - DNA, 25 bp, Canis familiaris
agctcgacgtcattcagcttcacgg

SEQ ID NO: 32818 - DNA, 25 bp, Canis familiaris
acggatgagtcaatcgtccacgtgg

SEQ ID NO: 32819 - DNA, 25 bp, Canis familiaris
actgtatggctacaggcctctgttg

SEQ ID NO: 32820 - DNA, 25 bp, Canis familiaris
agctcttggatactaaccctttgtc

SEQ ID NO: 32821 - DNA, 25 bp, Canis familiaris
agctttgagcagatggaaacttgtg

SEQ ID NO: 32822 - DNA, 25 bp, Canis familiaris
agcttcttgagttctaggatcttag

SEQ ID NO: 32823 - DNA, 25 bp, Canis familiaris
agcttctgtccccaaggagttgaga

SEQ ID NO: 32824 - DNA, 25 bp, Canis familiaris
agcttcattcccctgaaagaggcct

SEQ ID NO: 32825 - DNA, 25 bp, Canis familiaris
agctctcttttcctgaccaaggact

SEQ ID NO: 32826 - DNA, 25 bp, Canis familiaris
agctctgtctccaggacctgaggac

SEQ ID NO: 32827 - DNA, 25 bp, Canis familiaris
agctcttcctcattggagctccagt

SEQ ID NO: 32828 - DNA, 25 bp, Canis familiaris
agcttcctcatcaggtgccatagtt

SEQ ID NO: 32829 - DNA, 25 bp, Canis familiaris
agcttccagcagaggtgcatcagca

SEQ ID NO: 32830 - DNA, 25 bp, Canis familiaris
agcttcctagaggcagtacagacta

SEQ ID NO: 32831 - DNA, 25 bp, Canis familiaris
agcgcccccaggagaaacaagcttg

SEQ ID NO: 32832 - DNA, 25 bp, Canis familiaris
agcgtcccagagaaaaaccaccttg

SEQ ID NO: 32833 - DNA, 25 bp, Canis familiaris
agcggcaccgcggagaaacaacttt

SEQ ID NO: 32834 - DNA, 25 bp, Canis familiaris
agcggctgggcctgaagaacatctt

SEQ ID NO: 32835 - DNA, 25 bp, Canis familiaris
agcggcgcggctatggaaaatttct

SEQ ID NO: 32836 - DNA, 25 bp, Canis familiaris
agcggccggatggtgaaatcctccc

SEQ ID NO: 32837 - DNA, 25 bp, Canis familiaris
acgtcgggacgtgatgatcgtgccc

SEQ ID NO: 32838 - DNA, 25 bp, Canis familiaris
agcgtctgggacatgaagctccgtc

SEQ ID NO: 32839 - DNA, 25 bp, Canis familiaris
agcttcccggaaacatctctatgtt

SEQ ID NO: 32840 - DNA, 25 bp, Canis familiaris
agctctgctcactgaaaccgtagtt

SEQ ID NO: 32841 - DNA, 25 bp, Canis familiaris
agctctgtaaaatgtcacttctgtt

SEQ ID NO: 32842 - DNA, 25 bp, Canis familiaris
agctttgccagatatgtacttagta

SEQ ID NO: 32843 - DNA, 25 bp, Canis familiaris
agcttgagctgcgagaagttttaaa

SEQ ID NO: 32844 - DNA, 25 bp, Canis familiaris
agcttgagagcttatagtttttaga

SEQ ID NO: 32845 - DNA, 25 bp, Canis familiaris
agcgcggaaatttgtgtttggacac

SEQ ID NO: 32846 - DNA, 25 bp, Canis familiaris
agcgggtgaagcagctgacttgggc

SEQ ID NO: 32847 - DNA, 25 bp, Canis familiaris
agcggagtgaggggtgttggggctc

SEQ ID NO: 32848 - DNA, 25 bp, Canis familiaris
agctgggcgggtgggagtgggccct

SEQ ID NO: 32849 - DNA, 25 bp, Canis familiaris
agctgaggcgtgttggatcgtgggc

SEQ ID NO: 32850 - DNA, 25 bp, Canis familiaris
agctggagctggagtgtctggggca

SEQ ID NO: 32851 - DNA, 25 bp, Canis familiaris
agctgaaagcagaggccttggccat

SEQ ID NO: 32852 - DNA, 25 bp, Canis familiaris
agcttcaaggtcagcctgctggctg

SEQ ID NO: 32853 - DNA, 25 bp, Canis familiaris
agcttgcaagcatattcctgatagt

SEQ ID NO: 32854 - DNA, 25 bp, Canis familiaris
ggaacataacatctcctcaagaggg

SEQ ID NO: 32855 - DNA, 25 bp, Canis familiaris
agctctcccaactatgtcaaggatg

SEQ ID NO: 32856 - DNA, 25 bp, Canis familiaris
agctcagccaaagatgctctaggga

SEQ ID NO: 32857 - DNA, 25 bp, Canis familiaris
agctcctgacctgggactagtggag

SEQ ID NO: 32858 - DNA, 25 bp, Canis familiaris
agctgcctatcccctgggattgaag

SEQ ID NO: 32859 - DNA, 25 bp, Canis familiaris
agctcttgcttcaacagtgtttgga

SEQ ID NO: 32860 - DNA, 25 bp, Canis familiaris
agctcttttcagccaattttagact

SEQ ID NO: 32861 - DNA, 25 bp, Canis familiaris
agctttttctggcattgttgctgtc

SEQ ID NO: 32862 - DNA, 25 bp, Canis familiaris
agctttattttgtatttgtgtattt

SEQ ID NO: 32863 - DNA, 25 bp, Canis familiaris
agctttctctttattagtgtggatt

SEQ ID NO: 32864 - DNA, 25 bp, Canis familiaris
agctattcctttatgatgacttcca

SEQ ID NO: 32865 - DNA, 25 bp, Canis familiaris
agctatatcctgaaactaaccccaa

SEQ ID NO: 32866 - DNA, 25 bp, Canis familiaris
agcttctttgtaagccatacctccc

SEQ ID NO: 32867 - DNA, 25 bp, Canis familiaris
agcgtctttggaaaatgtcccctct

SEQ ID NO: 32868 - DNA, 25 bp, Canis familiaris
agctgccttttaagaggtcctgtct

SEQ ID NO: 32869 - DNA, 25 bp, Canis familiaris
agcttctattttggtactacttctc

SEQ ID NO: 32870 - DNA, 25 bp, Canis familiaris
agcttttattgttagactcacgatc

SEQ ID NO: 32871 - DNA, 25 bp, Canis familiaris
agcggttcttattcacaacaccact

SEQ ID NO: 32872 - DNA, 25 bp, Canis familiaris
agctggtggctgatgatcccaacga

SEQ ID NO: 32873 - DNA, 25 bp, Canis familiaris
agctgttgacatactcattgcctac

SEQ ID NO: 32874 - DNA, 25 bp, Canis familiaris
agctggggctagcagatcttcaccc

SEQ ID NO: 32875 - DNA, 25 bp, Canis familiaris
agctttctgtggcagctttgacctc

SEQ ID NO: 32876 - DNA, 25 bp, Canis familiaris
agcttctgctttcatgctgtagtcc

SEQ ID NO: 32877 - DNA, 25 bp, Canis familiaris
agctttttgatttgctgctccatct

SEQ ID NO: 32878 - DNA, 25 bp, Canis familiaris
agctttgctggagatgctattcatt

SEQ ID NO: 32879 - DNA, 25 bp, Canis familiaris
agcttacttcagtctgcttgtcaat

SEQ ID NO: 32880 - DNA, 25 bp, Canis familiaris
agcttattatagaatgcttgtattt

SEQ ID NO: 32881 - DNA, 25 bp, Canis familiaris
agctacatgtcaagttttctatctg

SEQ ID NO: 32882 - DNA, 25 bp, Canis familiaris
agctgacctgcaggacatttttctt

SEQ ID NO: 32883 - DNA, 25 bp, Canis familiaris
agcgatgcctacctcagtggtatgc

SEQ ID NO: 32884 - DNA, 25 bp, Canis familiaris
agctgacctccgacaaggacatgta

SEQ ID NO: 32885 - DNA, 25 bp, Canis familiaris
agctgacaccgtcactggacggatt

SEQ ID NO: 32886 - DNA, 25 bp, Canis familiaris
agctgactcctaaactgatgaaggt

SEQ ID NO: 32887 - DNA, 25 bp, Canis familiaris
agctcattcctggtcactgtaagtg

SEQ ID NO: 32888 - DNA, 25 bp, Canis familiaris
agctttcacaagcctcgtagagggg

SEQ ID NO: 32889 - DNA, 25 bp, Canis familiaris
agcttctccaagcatcacctgggag

SEQ ID NO: 32890 - DNA, 25 bp, Canis familiaris
agcttctcctctgaagctctggagg

SEQ ID NO: 32891 - DNA, 25 bp, Canis familiaris
agctttgtggctgtgagtgcgggga

SEQ ID NO: 32892 - DNA, 25 bp, Canis familiaris
agctgttgaggtgtgatggcggccc

SEQ ID NO: 32893 - DNA, 25 bp, Canis familiaris
agctgtgaacgtttaggacgccccg

SEQ ID NO: 32894 - DNA, 25 bp, Canis familiaris
agctgtgaaggtgtcacttgtcccc

SEQ ID NO: 32895 - DNA, 25 bp, Canis familiaris
agctgtaatggtcatctgcacttcc

SEQ ID NO: 32896 - DNA, 25 bp, Canis familiaris
agctggaatttgtccgcatcgatcc

SEQ ID NO: 32897 - DNA, 25 bp, Canis familiaris
agctgaaattgttcccaggtttgat

SEQ ID NO: 32898 - DNA, 25 bp, Canis familiaris
agctgtagacggtcccggttcatta

SEQ ID NO: 32899 - DNA, 25 bp, Canis familiaris
agcttagcatctgtacccagtgtct

SEQ ID NO: 32900 - DNA, 25 bp, Canis familiaris
aactagcctctaatcagggttccca

SEQ ID NO: 32901 - DNA, 25 bp, Canis familiaris
agctctgagcgagtcaatcggtttc

SEQ ID NO: 32902 - DNA, 25 bp, Canis familiaris
agctgctgggtgtccattgccatat

SEQ ID NO: 32903 - DNA, 25 bp, Canis familiaris
agctgctgggtgtccattgccatat

SEQ ID NO: 32904 - DNA, 25 bp, Canis familiaris
agctagaggttgtcattgtattact

SEQ ID NO: 32905 - DNA, 25 bp, Canis familiaris
agctaatggatatgttctttttgga

SEQ ID NO: 32906 - DNA, 25 bp, Canis familiaris
agctaaaaaattgcttattatatgt

SEQ ID NO: 32907 - DNA, 25 bp, Canis familiaris
agctgaactaaatttgttttctctg

SEQ ID NO: 32908 - DNA, 25 bp, Canis familiaris
agctgaactgaatgagtttctcact

SEQ ID NO: 32909 - DNA, 25 bp, Canis familiaris
agctcaggctgcatgtagttactca

SEQ ID NO: 32910 - DNA, 25 bp, Canis familiaris
agctcggaattgagcttcatgtcaa

SEQ ID NO: 32911 - DNA, 25 bp, Canis familiaris
agctgcggacaggaactttgtgaat

SEQ ID NO: 32912 - DNA, 25 bp, Canis familiaris
agctcggaggtaatttgctgaaata

SEQ ID NO: 32913 - DNA, 25 bp, Canis familiaris
agctgggggtgttgttggacctagt

SEQ ID NO: 32914 - DNA, 25 bp, Canis familiaris
agctggaggggtttctttgacctgc

SEQ ID NO: 32915 - DNA, 25 bp, Canis familiaris
agctgatgaggtctgattctgttga

SEQ ID NO: 32916 - DNA, 25 bp, Canis familiaris
agctgtgggctgatgaatttatgag

SEQ ID NO: 32917 - DNA, 25 bp, Canis familiaris
agctctggagcaacttttatcatga

SEQ ID NO: 32918 - DNA, 25 bp, Canis familiaris
cactccaggaccatttacgacgttg

SEQ ID NO: 32919 - DNA, 25 bp, Canis familiaris
acgcacgaaccgattaagcactttg

SEQ ID NO: 32920 - DNA, 25 bp, Canis familiaris
accatacaacaccatttaacccgag

SEQ ID NO: 32921 - DNA, 25 bp, Canis familiaris
accacgctaacctgtatcaaaccag

SEQ ID NO: 32922 - DNA, 25 bp, Canis familiaris
actaccaaccaaggtccaaggctca

SEQ ID NO: 32923 - DNA, 25 bp, Canis familiaris
acgactccctgctggtcaaagtcat

SEQ ID NO: 32924 - DNA, 25 bp, Canis familiaris
agctgaaccaggctgtccaagaaca

SEQ ID NO: 32925 - DNA, 25 bp, Canis familiaris
agctcaacaaggcttcagttaacat

SEQ ID NO: 32926 - DNA, 25 bp, Canis familiaris
agctctcagcacagggttgttcaaa

SEQ ID NO: 32927 - DNA, 25 bp, Canis familiaris
agctttactggtccttgttaataca

SEQ ID NO: 32928 - DNA, 25 bp, Canis familiaris
agctttcgtggtatggcttgaatag

SEQ ID NO: 32929 - DNA, 25 bp, Canis familiaris
agctttcctgggaagagcctgcttt

SEQ ID NO: 32930 - DNA, 25 bp, Canis familiaris
agctctcacctttaaacacactatt

SEQ ID NO: 32931 - DNA, 25 bp, Canis familiaris
agctcctcttggtaaaccgctagta

SEQ ID NO: 32932 - DNA, 25 bp, Canis familiaris
agctccttcaggtcaaagacgtctt

SEQ ID NO: 32933 - DNA, 25 bp, Canis familiaris
agccgctgtcagttaagtgggtaga

SEQ ID NO: 32934 - DNA, 25 bp, Canis familiaris
cagtcctggctgttgggtacggaga

SEQ ID NO: 32935 - DNA, 25 bp, Canis familiaris
agctgcctccaggggggacgggagg

SEQ ID NO: 32936 - DNA, 25 bp, Canis familiaris
agctctcccacgggactgggagggg

SEQ ID NO: 32937 - DNA, 25 bp, Canis familiaris
agctcctcccaggagagggggctgg

SEQ ID NO: 32938 - DNA, 25 bp, Canis familiaris
agctcaccacccgaagagatgaatg

SEQ ID NO: 32939 - DNA, 25 bp, Canis familiaris
agctatgcactcgccagaatgggat

SEQ ID NO: 32940 - DNA, 25 bp, Canis familiaris
agctgcgctctctcaaaatcgctat

SEQ ID NO: 32941 - DNA, 25 bp, Canis familiaris
agccgtctcatcgaaggttgctgca

SEQ ID NO: 32942 - DNA, 25 bp, Canis familiaris
agcgcttcttcgagactcgcatgaa

SEQ ID NO: 32943 - DNA, 25 bp, Canis familiaris
agcgatgctcttcataaccatctga

SEQ ID NO: 32944 - DNA, 25 bp, Canis familiaris
agctgtgatcttcaagaccgtccta

SEQ ID NO: 32945 - DNA, 25 bp, Canis familiaris
agcgtgatttccaagaatttcttaa

SEQ ID NO: 32946 - DNA, 25 bp, Canis familiaris
agcggtttgatccaaatcccattac

SEQ ID NO: 32947 - DNA, 25 bp, Canis familiaris
agctgtttttctaaatgcaggttgc

SEQ ID NO: 32948 - DNA, 25 bp, Canis familiaris
agctctccttttagaaaggcctgcg

SEQ ID NO: 32949 - DNA, 25 bp, Canis familiaris
agctctcctattgaaacttgcccag

SEQ ID NO: 32950 - DNA, 25 bp, Canis familiaris
agctcatttttctggatcttgcatc

SEQ ID NO: 32951 - DNA, 25 bp, Canis familiaris
agctgattttcctgtcagccagctt

SEQ ID NO: 32952 - DNA, 25 bp, Canis familiaris
agctgtttgtcctgtgcatgaacat

SEQ ID NO: 32953 - DNA, 25 bp, Canis familiaris
agctcttcttccttaggagagtgat

SEQ ID NO: 32954 - DNA, 25 bp, Canis familiaris
agctttctgtctgaaggcacaccat

SEQ ID NO: 32955 - DNA, 25 bp, Canis familiaris
agctgttgttgtgaggcaagagcca

SEQ ID NO: 32956 - DNA, 25 bp, Canis familiaris
agctgtttgtggattcaaactcata

SEQ ID NO: 32957 - DNA, 25 bp, Canis familiaris
agctctgtcttgcaatatcaaatct

SEQ ID NO: 32958 - DNA, 25 bp, Canis familiaris
agcgctctgttgtactattaacttc

SEQ ID NO: 32959 - DNA, 25 bp, Canis familiaris
agcgcttgcagcatggctgaccaac

SEQ ID NO: 32960 - DNA, 25 bp, Canis familiaris
agctgtctggatgggtcagcctacc

SEQ ID NO: 32961 - DNA, 25 bp, Canis familiaris
agctatgaatatggcgcccaatacc

SEQ ID NO: 32962 - DNA, 25 bp, Canis familiaris
agctagagatgaggtgcccaccggc

SEQ ID NO: 32963 - DNA, 25 bp, Canis familiaris
agctcgagatgtggagtcctccgat

SEQ ID NO: 32964 - DNA, 25 bp, Canis familiaris
agctgaaggtgtgtgcactgcgcgt

SEQ ID NO: 32965 - DNA, 25 bp, Canis familiaris
agctgagggctaggctgagtcctgg

SEQ ID NO: 32966 - DNA, 25 bp, Canis familiaris
agctgaggaggggctcgtctaggac

SEQ ID NO: 32967 - DNA, 25 bp, Canis familiaris
agctggaataggcctgcttctagtg

SEQ ID NO: 32968 - DNA, 25 bp, Canis familiaris
agctgaaacggagcttctttgccct

SEQ ID NO: 32969 - DNA, 25 bp, Canis familiaris
agcgaaggaggagcactgcctctgc

SEQ ID NO: 32970 - DNA, 25 bp, Canis familiaris
agcgtctggggaggcacatttatgc

SEQ ID NO: 32971 - DNA, 25 bp, Canis familiaris
agcggcaggatcgacgcgcttctgt

SEQ ID NO: 32972 - DNA, 25 bp, Canis familiaris
agctggagcagctccagtgcctctt

SEQ ID NO: 32973 - DNA, 25 bp, Canis familiaris
agcggagagtgagcgatgcctcctc

SEQ ID NO: 32974 - DNA, 25 bp, Canis familiaris
agctctgggtgaggggctgttgctt

SEQ ID NO: 32975 - DNA, 25 bp, Canis familiaris
agctcaatgggcagctgcggtccat

SEQ ID NO: 32976 - DNA, 25 bp, Canis familiaris
agctaggggcaaacatgagtcactg

SEQ ID NO: 32977 - DNA, 25 bp, Canis familiaris
agctttgggcaagtatggccctgct

SEQ ID NO: 32978 - DNA, 25 bp, Canis familiaris
agctttgggcaagtatggccctgct

SEQ ID NO: 32979 - DNA, 25 bp, Canis familiaris
agctttgaggtcaattggctctctc

SEQ ID NO: 32980 - DNA, 25 bp, Canis familiaris
agctgtaggtctcattagctgcctc

SEQ ID NO: 32981 - DNA, 25 bp, Canis familiaris
agctagagtgtgagaccagctgccc

SEQ ID NO: 32982 - DNA, 25 bp, Canis familiaris
agctacgtgcaggtgtgccgtgagc

SEQ ID NO: 32983 - DNA, 25 bp, Canis familiaris
agctagctggcatgtgacactattc

SEQ ID NO: 32984 - DNA, 25 bp, Canis familiaris
agccatgatccatgtgcacttttcc

SEQ ID NO: 32985 - DNA, 25 bp, Canis familiaris
agctgaggattttgccttttctcct

SEQ ID NO: 32986 - DNA, 25 bp, Canis familiaris
agctgaggttattgcttttcatggc

SEQ ID NO: 32987 - DNA, 25 bp, Canis familiaris
agctgatagttcactgggtctggcc

SEQ ID NO: 32988 - DNA, 25 bp, Canis familiaris
agctggagtacttcgaggagcggcc

SEQ ID NO: 32989 - DNA, 25 bp, Canis familiaris
agcggagggcagactgcgaggggca

SEQ ID NO: 32990 - DNA, 25 bp, Canis familiaris
agcggacaggacaggagcgcggggc

SEQ ID NO: 32991 - DNA, 25 bp, Canis familiaris
agcgagaacaactgggagtgtggac

SEQ ID NO: 32992 - DNA, 25 bp, Canis familiaris
agctgggccaacatttgaagtggat

SEQ ID NO: 32993 - DNA, 25 bp, Canis familiaris
agctgggcaacaaggttgggccgtt

SEQ ID NO: 32994 - DNA, 25 bp, Canis familiaris
agcggtgcaaatccatgtggggccc

SEQ ID NO: 32995 - DNA, 25 bp, Canis familiaris
agcgtggcagcaggcctgatggatg

SEQ ID NO: 32996 - DNA, 25 bp, Canis familiaris
acggctgcatcaactgctgcaaggt

SEQ ID NO: 32997 - DNA, 25 bp, Canis familiaris
agcgagctggccatgccgaagtagt

SEQ ID NO: 32998 - DNA, 25 bp, Canis familiaris
agctgtccagcccagcggaagggct

SEQ ID NO: 32999 - DNA, 25 bp, Canis familiaris
agctcaccaggcccttgaggaggcc

SEQ ID NO: 33000 - DNA, 25 bp, Canis familiaris
agctatgccgcggacttggtgaggc

SEQ ID NO: 33001 - DNA, 25 bp, Canis familiaris
agctcgcttgtggactatgggcaac

SEQ ID NO: 33002 - DNA, 25 bp, Canis familiaris
agctctctggggacctgggagactt

SEQ ID NO: 33003 - DNA, 25 bp, Canis familiaris
agctcttctgggagtggggactgca

SEQ ID NO: 33004 - DNA, 25 bp, Canis familiaris
agctctttgtgacagggcttttcag

SEQ ID NO: 33005 - DNA, 25 bp, Canis familiaris
agctggttgagaatgaggcctttca

SEQ ID NO: 33006 - DNA, 25 bp, Canis familiaris
agctgagttacaggaggccactaga

SEQ ID NO: 33007 - DNA, 25 bp, Canis familiaris
actggttcatcagagccgcagatac

SEQ ID NO: 33008 - DNA, 25 bp, Canis familiaris
agctgtcatgtacggagccgagatt

SEQ ID NO: 33009 - DNA, 25 bp, Canis familiaris
agctctcttggctgcactgaggaat

SEQ ID NO: 33010 - DNA, 25 bp, Canis familiaris
agctctttggattattgcagtagtt

SEQ ID NO: 33011 - DNA, 25 bp, Canis familiaris
agctcttctaagttcacagtctctt

SEQ ID NO: 33012 - DNA, 25 bp, Canis familiaris
agctctccggaagaaggctcttgaa

SEQ ID NO: 33013 - DNA, 25 bp, Canis familiaris
agctctccagaggtgaaaggctatt

SEQ ID NO: 33014 - DNA, 25 bp, Canis familiaris
agctagccacagttcacacagatga

SEQ ID NO: 33015 - DNA, 25 bp, Canis familiaris
agctcagacactctacagctgagag

SEQ ID NO: 33016 - DNA, 25 bp, Canis familiaris
agctcaagcactgtagcgggtcact

SEQ ID NO: 33017 - DNA, 25 bp, Canis familiaris
agctcaacctgctgcagctggagga

SEQ ID NO: 33018 - DNA, 25 bp, Canis familiaris
agctgcaaaagctgccaggattggc

SEQ ID NO: 33019 - DNA, 25 bp, Canis familiaris
agctgccaaaatagtagagttcctt

SEQ ID NO: 33020 - DNA, 25 bp, Canis familiaris
agctgccaaatatgacgagcagtca

SEQ ID NO: 33021 - DNA, 25 bp, Canis familiaris
agctccccaaagtgcagcagcaaat

SEQ ID NO: 33022 - DNA, 25 bp, Canis familiaris
agctcaccacaagtgtagccaccat

SEQ ID NO: 33023 - DNA, 25 bp, Canis familiaris
agctcagagaaagttatgtcctaga

SEQ ID NO: 33024 - DNA, 25 bp, Canis familiaris
agctgagagaagactcgtatccaag

SEQ ID NO: 33025 - DNA, 25 bp, Canis familiaris
acgaagcatgcaactctcgatctca

SEQ ID NO: 33026 - DNA, 25 bp, Canis familiaris
agctgaagcccagctcagatgcctc

SEQ ID NO: 33027 - DNA, 25 bp, Canis familiaris
agctgagacccagccaggagcgagc

SEQ ID NO: 33028 - DNA, 25 bp, Canis familiaris
agctgtgccctctcaaggcactagc

SEQ ID NO: 33029 - DNA, 25 bp, Canis familiaris
agctgtgccccagtcaggatataac

SEQ ID NO: 33030 - DNA, 25 bp, Canis familiaris
agctgcctgacggccaggtcatcac

SEQ ID NO: 33031 - DNA, 25 bp, Canis familiaris
agctgcctgacggccaagtcatcac

SEQ ID NO: 33032 - DNA, 25 bp, Canis familiaris
agctcaatgactgggcagcactctc

SEQ ID NO: 33033 - DNA, 25 bp, Canis familiaris
agctcaaggctgtgaagtcctccac

SEQ ID NO: 33034 - DNA, 25 bp, Canis familiaris
agctcaaggctgatgaagaccccat

SEQ ID NO: 33035 - DNA, 25 bp, Canis familiaris
agctcatcgggtacagaattcactc

SEQ ID NO: 33036 - DNA, 25 bp, Canis familiaris
agctgggaggttggactgatcattc

SEQ ID NO: 33037 - DNA, 25 bp, Canis familiaris
agctggtaggtgtaactgctctagt

SEQ ID NO: 33038 - DNA, 25 bp, Canis familiaris
agctcgaactcgtaatcatgtcata

SEQ ID NO: 33039 - DNA, 25 bp, Canis familiaris
agctctgaccctcattcattataac

SEQ ID NO: 33040 - DNA, 25 bp, Canis familiaris
agctccaagttgcttcattctatat

SEQ ID NO: 33041 - DNA, 25 bp, Canis familiaris
agcccaagcttgtgtctgcagaaat

SEQ ID NO: 33042 - DNA, 25 bp, Canis familiaris
agctgcccagcttcttggggaaaag

SEQ ID NO: 33043 - DNA, 25 bp, Canis familiaris
agctcacgccattcattctgggagc

SEQ ID NO: 33044 - DNA, 25 bp, Canis familiaris
agctctcacgtatctgctgggagca

SEQ ID NO: 33045 - DNA, 25 bp, Canis familiaris
agctgtcacagacaacatggccacc

SEQ ID NO: 33046 - DNA, 25 bp, Canis familiaris
agctgaccgacttgttgaccaggtg

SEQ ID NO: 33047 - DNA, 25 bp, Canis familiaris
acatccgtgtcgagtgaaaggtggt

SEQ ID NO: 33048 - DNA, 25 bp, Canis familiaris
agctcacgatgcacacgggaaggtc

SEQ ID NO: 33049 - DNA, 25 bp, Canis familiaris
agctccgagccgtctgggaggagac

SEQ ID NO: 33050 - DNA, 25 bp, Canis familiaris
agctcaaagcctggctcctggagaa

SEQ ID NO: 33051 - DNA, 25 bp, Canis familiaris
agctcgcaagtttggcgcgtgagga

SEQ ID NO: 33052 - DNA, 25 bp, Canis familiaris
agctctggagctgctggaggtagga

SEQ ID NO: 33053 - DNA, 25 bp, Canis familiaris
agctctggtgcagctgcggagagag

SEQ ID NO: 33054 - DNA, 25 bp, Canis familiaris
agctcatgggcacggtggccaagca

SEQ ID NO: 33055 - DNA, 25 bp, Canis familiaris
agctgagtagcgctgtgtgtcggct

SEQ ID NO: 33056 - DNA, 25 bp, Canis familiaris
agctggaggcagatgagtggcggtt

SEQ ID NO: 33057 - DNA, 25 bp, Canis familiaris
agctgctatgcccagaggtggcgtt

SEQ ID NO: 33058 - DNA, 25 bp, Canis familiaris
agctctcatgtccaaaaatgctttt

SEQ ID NO: 33059 - DNA, 25 bp, Canis familiaris
agctcatcatgttaaatttttatgt

SEQ ID NO: 33060 - DNA, 25 bp, Canis familiaris
agctcttaactcacattgttatgct

SEQ ID NO: 33061 - DNA, 25 bp, Canis familiaris
agctgctctaggactactgtctttc

SEQ ID NO: 33062 - DNA, 25 bp, Canis familiaris
agcccaaggaggatgctgtgttcgg

SEQ ID NO: 33063 - DNA, 25 bp, Canis familiaris
agctcacaaggtgtgtcctggtgcc

SEQ ID NO: 33064 - DNA, 25 bp, Canis familiaris
agctctgcaaggtttgaagggtccc

SEQ ID NO: 33065 - DNA, 25 bp, Canis familiaris
agctgcagcatagttgtcaaagggg

SEQ ID NO: 33066 - DNA, 25 bp, Canis familiaris
agctgcctgcagaagccccaggcag

SEQ ID NO: 33067 - DNA, 25 bp, Canis familiaris
agctctgtcattgggcccatggagc

SEQ ID NO: 33068 - DNA, 25 bp, Canis familiaris
agctctcctctgaagccttggaggc

SEQ ID NO: 33069 - DNA, 25 bp, Canis familiaris
agctctcgtcatagaccaatgagga

SEQ ID NO: 33070 - DNA, 25 bp, Canis familiaris
agctccgtactgccctagagggcac

SEQ ID NO: 33071 - DNA, 25 bp, Canis familiaris
agctccctcagtgctcttaggagag

SEQ ID NO: 33072 - DNA, 25 bp, Canis familiaris
agctccctcgctgcgatctattgaa

SEQ ID NO: 33073 - DNA, 25 bp, Canis familiaris
agctccttaatttgaccctgaatta

SEQ ID NO: 33074 - DNA, 25 bp, Canis familiaris
agctacttagtcttactttggattt

SEQ ID NO: 33075 - DNA, 25 bp, Canis familiaris
agctgatcgggattctactctgtgc

SEQ ID NO: 33076 - DNA, 25 bp, Canis familiaris
agctcatctgaggaactacatagtc

SEQ ID NO: 33077 - DNA, 25 bp, Canis familiaris
agctctgctaataccttcgagtgcc

SEQ ID NO: 33078 - DNA, 25 bp, Canis familiaris
agctcctactcatcttctaggatcc

SEQ ID NO: 33079 - DNA, 25 bp, Canis familiaris
agctcttccactggccattgaatga

SEQ ID NO: 33080 - DNA, 25 bp, Canis familiaris
agctcatttcctggtatgacaatga

SEQ ID NO: 33081 - DNA, 25 bp, Canis familiaris
agctaatgatcacggatatgacaac

SEQ ID NO: 33082 - DNA, 25 bp, Canis familiaris
agctgagagaacttggtggaatcca

SEQ ID NO: 33083 - DNA, 25 bp, Canis familiaris
agctgacataattcacagggaccta

SEQ ID NO: 33084 - DNA, 25 bp, Canis familiaris
agctgaaaatataaggccatcctag

SEQ ID NO: 33085 - DNA, 25 bp, Canis familiaris
agcgttgcctatagaggcgacctcc

SEQ ID NO: 33086 - DNA, 25 bp, Canis familiaris
agctgtagccacttaagccaactcc

SEQ ID NO: 33087 - DNA, 25 bp, Canis familiaris
agctgaggccctaacagctcagccg

SEQ ID NO: 33088 - DNA, 25 bp, Canis familiaris
agctgagggcctacgtgagagccgg

SEQ ID NO: 33089 - DNA, 25 bp, Canis familiaris
agctgaggagcgcgaatggtgcccg

SEQ ID NO: 33090 - DNA, 25 bp, Canis familiaris
agctgaggagcggcaggttggccac

SEQ ID NO: 33091 - DNA, 25 bp, Canis familiaris
agctgggagcatgactttggccctt

SEQ ID NO: 33092 - DNA, 25 bp, Canis familiaris
agctggatgaggacctttgtgccgc

SEQ ID NO: 33093 - DNA, 25 bp, Canis familiaris
agctgagaaaagattgtgtcctgcc

SEQ ID NO: 33094 - DNA, 25 bp, Canis familiaris
agctcaaaaaaatatatgcactcct

SEQ ID NO: 33095 - DNA, 25 bp, Canis familiaris
agctcaataaacgcgctgtgcacct

SEQ ID NO: 33096 - DNA, 25 bp, Canis familiaris
agcgattgcaactggcctggccgca

SEQ ID NO: 33097 - DNA, 25 bp, Canis familiaris
agcgtctgaagatactctaccatga

SEQ ID NO: 33098 - DNA, 25 bp, Canis familiaris
agcgtctgcggatacttgcacaggt

SEQ ID NO: 33099 - DNA, 25 bp, Canis familiaris
agcctgcagctggattacgcaacag

SEQ ID NO: 33100 - DNA, 25 bp, Canis familiaris
agcctgcagctggattacgcaacag

SEQ ID NO: 33101 - DNA, 25 bp, Canis familiaris
agctctctgggaaatggcagcactg

SEQ ID NO: 33102 - DNA, 25 bp, Canis familiaris
agctgccggagcagcacgacacagt

SEQ ID NO: 33103 - DNA, 25 bp, Canis familiaris
agctcagcgcgagtgatgccgagcc

SEQ ID NO: 33104 - DNA, 25 bp, Canis familiaris
agctcagcagcaatggcacctgcgc

SEQ ID NO: 33105 - DNA, 25 bp, Canis familiaris
agctgacaggagccagctcatgccc

SEQ ID NO: 33106 - DNA, 25 bp, Canis familiaris
agctgacaggaccagtcatgcccat

SEQ ID NO: 33107 - DNA, 25 bp, Canis familiaris
agctgacaggaccagtcatgcccat

SEQ ID NO: 33108 - DNA, 25 bp, Canis familiaris
agctgacaggaccagtcatgcccat

SEQ ID NO: 33109 - DNA, 25 bp, Canis familiaris
agctgtcaggaccacatctgtcctc

SEQ ID NO: 33110 - DNA, 25 bp, Canis familiaris
agctgccacatagtgcacttgttcc

SEQ ID NO: 33111 - DNA, 25 bp, Canis familiaris
agctctacatattgtctgtgctgct

SEQ ID NO: 33112 - DNA, 25 bp, Canis familiaris
agcctcgttatgaagctgctctagc

SEQ ID NO: 33113 - DNA, 25 bp, Canis familiaris
agctgcctttataatctgagtacta

SEQ ID NO: 33114 - DNA, 25 bp, Canis familiaris
agctgctattctttatggagtcaca

SEQ ID NO: 33115 - DNA, 25 bp, Canis familiaris
agctcattgcttatattgttcagaa

SEQ ID NO: 33116 - DNA, 25 bp, Canis familiaris
agctctctgtgtgtttcattcgaag

SEQ ID NO: 33117 - DNA, 25 bp, Canis familiaris
agctcactgggactatttataactg

SEQ ID NO: 33118 - DNA, 25 bp, Canis familiaris
agctcacagctggatctaaattaag

SEQ ID NO: 33119 - DNA, 25 bp, Canis familiaris
agctctcagctggccaggaatcaaa

SEQ ID NO: 33120 - DNA, 25 bp, Canis familiaris
agctccctgcacgaggcgcatgagt

SEQ ID NO: 33121 - DNA, 25 bp, Canis familiaris
agctgcccatcatcggagtggtgga

SEQ ID NO: 33122 - DNA, 25 bp, Canis familiaris
agctccctgaacgacagctgtggga

SEQ ID NO: 33123 - DNA, 25 bp, Canis familiaris
agctgctcttaagcaagctgcggtt

SEQ ID NO: 33124 - DNA, 25 bp, Canis familiaris
agctctcgaattacaactgccgttg

SEQ ID NO: 33125 - DNA, 25 bp, Canis familiaris
agctctccaatttagaaacagtggc

SEQ ID NO: 33126 - DNA, 25 bp, Canis familiaris
agctgttcaacaaaaaaggcccaag

SEQ ID NO: 33127 - DNA, 25 bp, Canis familiaris
agctcttagaacagcaccaggcaca

SEQ ID NO: 33128 - DNA, 25 bp, Canis familiaris
agctgctgtctgaacccaaccagac

SEQ ID NO: 33129 - DNA, 25 bp, Canis familiaris
agctgcttttcatccatactagtct

SEQ ID NO: 33130 - DNA, 25 bp, Canis familiaris
agctccatttcatccaagttgtcaa

SEQ ID NO: 33131 - DNA, 25 bp, Canis familiaris
agctcctcgttcacaagtcattaac

SEQ ID NO: 33132 - DNA, 25 bp, Canis familiaris
agctggctttttcactgtattttca

SEQ ID NO: 33133 - DNA, 25 bp, Canis familiaris
agccgtttgttcatttgtatttcgt

SEQ ID NO: 33134 - DNA, 25 bp, Canis familiaris
agctccagctttacgttggttattg

SEQ ID NO: 33135 - DNA, 25 bp, Canis familiaris
agctccacaatatattctgcgatct

SEQ ID NO: 33136 - DNA, 25 bp, Canis familiaris
agctcagcaggttaaactggcactg

SEQ ID NO: 33137 - DNA, 25 bp, Canis familiaris
agctcagctctttgaaacatccagc

SEQ ID NO: 33138 - DNA, 25 bp, Canis familiaris
agctcagtgcttagtacacagtagc

SEQ ID NO: 33139 - DNA, 25 bp, Canis familiaris
agctcagctttacttctgtgtcagc

SEQ ID NO: 33140 - DNA, 25 bp, Canis familiaris
agctcagctttgtcctttgtgaggt

SEQ ID NO: 33141 - DNA, 25 bp, Canis familiaris
agctcagttcctgttatgtcgactt

SEQ ID NO: 33142 - DNA, 25 bp, Canis familiaris
agctctgttttacttttctgatctt

SEQ ID NO: 33143 - DNA, 25 bp, Canis familiaris
agctctgttttaattttccattcct

SEQ ID NO: 33144 - DNA, 25 bp, Canis familiaris
agctcgaaatttattaagccatcct

SEQ ID NO: 33145 - DNA, 25 bp, Canis familiaris
agctccaaaggtatgcgaagcctgc

SEQ ID NO: 33146 - DNA, 25 bp, Canis familiaris
agctccctaggtacaagagaactca

SEQ ID NO: 33147 - DNA, 25 bp, Canis familiaris
agctgccccaggtgctgaaagacat

SEQ ID NO: 33148 - DNA, 25 bp, Canis familiaris
agctctcatctctctggtaaaagta

SEQ ID NO: 33149 - DNA, 25 bp, Canis familiaris
agctcctctgccctagttaaatgct

SEQ ID NO: 33150 - DNA, 25 bp, Canis familiaris
agctccttgagcctctttacaagat

SEQ ID NO: 33151 - DNA, 25 bp, Canis familiaris
agccccgaggcctgtgactatgggc

SEQ ID NO: 33152 - DNA, 25 bp, Canis familiaris
agccccgaggcctgtgactatgggc

SEQ ID NO: 33153 - DNA, 25 bp, Canis familiaris
agccccaagtccctgtatttatggt

SEQ ID NO: 33154 - DNA, 25 bp, Canis familiaris
acccatgaaccctgtaaaaggatca

SEQ ID NO: 33155 - DNA, 25 bp, Canis familiaris
agccctgtaccctgaaaagtgaaag

SEQ ID NO: 33156 - DNA, 25 bp, Canis familiaris
agccaacggccctgggagagtaaca

SEQ ID NO: 33157 - DNA, 25 bp, Canis familiaris
accacccttctggggacaggataat

SEQ ID NO: 33158 - DNA, 25 bp, Canis familiaris
accaccctgccaaagccaaagaaag

SEQ ID NO: 33159 - DNA, 25 bp, Canis familiaris
agcccagccccaacaaaactgaaag

SEQ ID NO: 33160 - DNA, 25 bp, Canis familiaris
agctccagaccatccaagaaggaca

SEQ ID NO: 33161 - DNA, 25 bp, Canis familiaris
agccggtgctgctccaagggagaat

SEQ ID NO: 33162 - DNA, 25 bp, Canis familiaris
agccggtgtccccaagacaaaagca

SEQ ID NO: 33163 - DNA, 25 bp, Canis familiaris
agccggttccggtaacgatgacatt

SEQ ID NO: 33164 - DNA, 25 bp, Canis familiaris
agccggtttctgtgccacagtggtg

SEQ ID NO: 33165 - DNA, 25 bp, Canis familiaris
cagtcatggttttgggaaagggtct

SEQ ID NO: 33166 - DNA, 25 bp, Canis familiaris
accatggcttgatggacaaagggct

SEQ ID NO: 33167 - DNA, 25 bp, Canis familiaris
agccgccctggggaatgaagggatc

SEQ ID NO: 33168 - DNA, 25 bp, Canis familiaris
agctccttttggggaaatggagcac

SEQ ID NO: 33169 - DNA, 25 bp, Canis familiaris
agccctttgcggggaactggaagct

SEQ ID NO: 33170 - DNA, 25 bp, Canis familiaris
agccggttgtggttatgggagaagt

SEQ ID NO: 33171 - DNA, 25 bp, Canis familiaris
acctgagtctggtgttaggaaacat

SEQ ID NO: 33172 - DNA, 25 bp, Canis familiaris
acctaggggacttttggatccattg

SEQ ID NO: 33173 - DNA, 25 bp, Canis familiaris
accaaggggaacttcggagtctctg

SEQ ID NO: 33174 - DNA, 25 bp, Canis familiaris
acgtcgggtgcacgaatcgggtttg

SEQ ID NO: 33175 - DNA, 25 bp, Canis familiaris
agctccgggtgccgaacaggttgag

SEQ ID NO: 33176 - DNA, 25 bp, Canis familiaris
agctccgggggccaatgaggatgat

SEQ ID NO: 33177 - DNA, 25 bp, Canis familiaris
agctcccctggcccaggagaataga

SEQ ID NO: 33178 - DNA, 25 bp, Canis familiaris
agctgcccgaacccaggagattgaa

SEQ ID NO: 33179 - DNA, 25 bp, Canis familiaris
agcgcttcgggtccaggaatggcaa

SEQ ID NO: 33180 - DNA, 25 bp, Canis familiaris
agcgcttcgggtccaggaatggcaa

SEQ ID NO: 33181 - DNA, 25 bp, Canis familiaris
ggcgttcaggggcgacttaaagttg

SEQ ID NO: 33182 - DNA, 25 bp, Canis familiaris
agcgttcaggctcaaacttcacaag

SEQ ID NO: 33183 - DNA, 25 bp, Canis familiaris
agctgcttaagaacaaccaaccaac

SEQ ID NO: 33184 - DNA, 25 bp, Canis familiaris
agcgccttagtcacactctaaagac

SEQ ID NO: 33185 - DNA, 25 bp, Canis familiaris
agcccttgagctgtcctatgtaagg

SEQ ID NO: 33186 - DNA, 25 bp, Canis familiaris
agccctaacaaagctcttaagttgc

SEQ ID NO: 33187 - DNA, 25 bp, Canis familiaris
agccgtagaagctgttcttagactg

SEQ ID NO: 33188 - DNA, 25 bp, Canis familiaris
agctcgataacctgcttccacaggt

SEQ ID NO: 33189 - DNA, 25 bp, Canis familiaris
agcgcttaacttccttacacaggac

SEQ ID NO: 33190 - DNA, 25 bp, Canis familiaris
agctgtctaatcagatcttctctcg

SEQ ID NO: 33191 - DNA, 25 bp, Canis familiaris
agctgtacaatcgtttcatcattcg

SEQ ID NO: 33192 - DNA, 25 bp, Canis familiaris
agctgtacaatcgtttcatcattcg

SEQ ID NO: 33193 - DNA, 25 bp, Canis familiaris
agctgggcaatggttactactcaga

SEQ ID NO: 33194 - DNA, 25 bp, Canis familiaris
agctccacaatggattacagaccta

SEQ ID NO: 33195 - DNA, 25 bp, Canis familiaris
agctgccgcatcacttacatgatag

SEQ ID NO: 33196 - DNA, 25 bp, Canis familiaris
agctgtggcacactctgtacatttg

SEQ ID NO: 33197 - DNA, 25 bp, Canis familiaris
agctgctgtgacttgctttgctttt

SEQ ID NO: 33198 - DNA, 25 bp, Canis familiaris
agctccgaccatgttgctgtgtgat

SEQ ID NO: 33199 - DNA, 25 bp, Canis familiaris
agcccaacctacagcagcgatatct

SEQ ID NO: 33200 - DNA, 25 bp, Canis familiaris
agcggccacggagtagaggactcga

SEQ ID NO: 33201 - DNA, 25 bp, Canis familiaris
agcgagtcaagtgtgcgaggaacgc

SEQ ID NO: 33202 - DNA, 25 bp, Canis familiaris
agcgagtgcggtgatctcaggttcg

SEQ ID NO: 33203 - DNA, 25 bp, Canis familiaris
agcgtctgacttgagctcaggtcat

SEQ ID NO: 33204 - DNA, 25 bp, Canis familiaris
agctgccttgtttaccgagctgata

SEQ ID NO: 33205 - DNA, 25 bp, Canis familiaris
agctgcctttgctaaaagtgctgcc

SEQ ID NO: 33206 - DNA, 25 bp, Canis familiaris
agctgcctgaagaagcacaagtccg

SEQ ID NO: 33207 - DNA, 25 bp, Canis familiaris
agcgctttgacagtgagaaggccgg

SEQ ID NO: 33208 - DNA, 25 bp, Canis familiaris
agcgtgataccagaaagatgtctcg

SEQ ID NO: 33209 - DNA, 25 bp, Canis familiaris
agctgcttgcacaccagaaggtctc

SEQ ID NO: 33210 - DNA, 25 bp, Canis familiaris
agctgagtgcacacctcaaggatgc

SEQ ID NO: 33211 - DNA, 25 bp, Canis familiaris
agctgttgcactacctcggccatgt

SEQ ID NO: 33212 - DNA, 25 bp, Canis familiaris
agctctgctacatcctggatgccat

SEQ ID NO: 33213 - DNA, 25 bp, Canis familiaris
agctccatgttagctgctagtgctc

SEQ ID NO: 33214 - DNA, 25 bp, Canis familiaris
agctcctggtctgtgtatgtgtttg

SEQ ID NO: 33215 - DNA, 25 bp, Canis familiaris
agcccttgacagcactttatttcac

SEQ ID NO: 33216 - DNA, 25 bp, Canis familiaris
agcggctctgagggactttgaacat

SEQ ID NO: 33217 - DNA, 25 bp, Canis familiaris
agctggactgcaggcgactttggag

SEQ ID NO: 33218 - DNA, 25 bp, Canis familiaris
agctccatctgctggatttccaggg

SEQ ID NO: 33219 - DNA, 25 bp, Canis familiaris
agctccatcctgggcatgaagcctg

SEQ ID NO: 33220 - DNA, 25 bp, Canis familiaris
agctccatgcctgttaacgtggttc

SEQ ID NO: 33221 - DNA, 25 bp, Canis familiaris
agctcctgcctgcttggagatgggt

SEQ ID NO: 33222 - DNA, 25 bp, Canis familiaris
agctctgtgcccaagtggaggagtg

SEQ ID NO: 33223 - DNA, 25 bp, Canis familiaris
agctcgataccaaaggagacactgc

SEQ ID NO: 33224 - DNA, 25 bp, Canis familiaris
agctgcagtaactgggagatccagc

SEQ ID NO: 33225 - DNA, 25 bp, Canis familiaris
agctgaaatgtctgtgagcgtccag

SEQ ID NO: 33226 - DNA, 25 bp, Canis familiaris
agcgcctatggctactggatgactc

SEQ ID NO: 33227 - DNA, 25 bp, Canis familiaris
agcgtccaactcttgatctgagctc

SEQ ID NO: 33228 - DNA, 25 bp, Canis familiaris
agctgtatgcatttcattgccgact

SEQ ID NO: 33229 - DNA, 25 bp, Canis familiaris
agctgacagagcttctccgatacta

SEQ ID NO: 33230 - DNA, 25 bp, Canis familiaris
agctgcagaggttcatccagtggct

SEQ ID NO: 33231 - DNA, 25 bp, Canis familiaris
agctgtgcagaggaccctgatggct

SEQ ID NO: 33232 - DNA, 25 bp, Canis familiaris
agctgcgacaggaacgtgagtgatt

SEQ ID NO: 33233 - DNA, 25 bp, Canis familiaris
agctcgactggttggttggtttcct

SEQ ID NO: 33234 - DNA, 25 bp, Canis familiaris
agctctgtctggagatgctttgttt

SEQ ID NO: 33235 - DNA, 25 bp, Canis familiaris
agctgttctgatatgcatgttctga

SEQ ID NO: 33236 - DNA, 25 bp, Canis familiaris
agcgaactgatattcatggtgcatg

SEQ ID NO: 33237 - DNA, 25 bp, Canis familiaris
agcgagactgtcatcagtcgctccc

SEQ ID NO: 33238 - DNA, 25 bp, Canis familiaris
agcgtggctattacagccagccttc

SEQ ID NO: 33239 - DNA, 25 bp, Canis familiaris
agctctgggaatacagcccagcccc

SEQ ID NO: 33240 - DNA, 25 bp, Canis familiaris
agctgcgtgaagtccagcactaccc

SEQ ID NO: 33241 - DNA, 25 bp, Canis familiaris
accctgaaactgccactaccagatt

SEQ ID NO: 33242 - DNA, 25 bp, Canis familiaris
agcccaagaatctatcagtcccaga

SEQ ID NO: 33243 - DNA, 25 bp, Canis familiaris
agcgacacagtatcatatgtgcacc

SEQ ID NO: 33244 - DNA, 25 bp, Canis familiaris
agcctcaagatatcatttctaacct

SEQ ID NO: 33245 - DNA, 25 bp, Canis familiaris
agctccagaactcagtccctgagcc

SEQ ID NO: 33246 - DNA, 25 bp, Canis familiaris
agctctggaaatctgcccgatgaaa

SEQ ID NO: 33247 - DNA, 25 bp, Canis familiaris
agctctggaaagctcatccgggact

SEQ ID NO: 33248 - DNA, 25 bp, Canis familiaris
agcgtggctacagcttcaccaccac

SEQ ID NO: 33249 - DNA, 25 bp, Canis familiaris
agcgggatcacagtgagctcccatc

SEQ ID NO: 33250 - DNA, 25 bp, Canis familiaris
agcggatgaccaatggggccatgaa

SEQ ID NO: 33251 - DNA, 25 bp, Canis familiaris
agctggatggccattggcactaagc

SEQ ID NO: 33252 - DNA, 25 bp, Canis familiaris
agctcgctgcatgatatgtgacact

SEQ ID NO: 33253 - DNA, 25 bp, Canis familiaris
agctggctgctgcctgagggcagat

SEQ ID NO: 33254 - DNA, 25 bp, Canis familiaris
agcgaggcatcgtggagcagtgctg

SEQ ID NO: 33255 - DNA, 25 bp, Canis familiaris
agcgcgtgtgcgaggagattgccat

SEQ ID NO: 33256 - DNA, 25 bp, Canis familiaris
agctgcgtgtggcccctgaggagca

SEQ ID NO: 33257 - DNA, 25 bp, Canis familiaris
agctgcgcttcagcaccattgaaga

SEQ ID NO: 33258 - DNA, 25 bp, Canis familiaris
agcgcatcgtgcgcacgttgtgcaa

SEQ ID NO: 33259 - DNA, 25 bp, Canis familiaris
agcggcaggccgagatcatggacat

SEQ ID NO: 33260 - DNA, 25 bp, Canis familiaris
agctgtgcggccttggacaagtcat

SEQ ID NO: 33261 - DNA, 25 bp, Canis familiaris
agctgcttgtgactatggcaacctt

SEQ ID NO: 33262 - DNA, 25 bp, Canis familiaris
agctccatggagtagagattcctga

SEQ ID NO: 33263 - DNA, 25 bp, Canis familiaris
agctccttgtgaaggctgtcactgt

SEQ ID NO: 33264 - DNA, 25 bp, Canis familiaris
agctcctcctgatatggtcagcact

SEQ ID NO: 33265 - DNA, 25 bp, Canis familiaris
agctcctactgtgatgtgataatgc

SEQ ID NO: 33266 - DNA, 25 bp, Canis familiaris
agctcctatctgtttttcaatcttt

SEQ ID NO: 33267 - DNA, 25 bp, Canis familiaris
agctcccatccttatgtcataattt

SEQ ID NO: 33268 - DNA, 25 bp, Canis familiaris
agccctgccacttactagatgtgct

SEQ ID NO: 33269 - DNA, 25 bp, Canis familiaris
agctgccctgttttctaatgtgctg

SEQ ID NO: 33270 - DNA, 25 bp, Canis familiaris
agcgcaccttctattacattgtacc

SEQ ID NO: 33271 - DNA, 25 bp, Canis familiaris
agctgcttttctacttaattttcct

SEQ ID NO: 33272 - DNA, 25 bp, Canis familiaris
agctgccttttcattaatatatcca

SEQ ID NO: 33273 - DNA, 25 bp, Canis familiaris
agctccctatccatagcaaggcatc

SEQ ID NO: 33274 - DNA, 25 bp, Canis familiaris
agctcccaacagcattcaagcacac

SEQ ID NO: 33275 - DNA, 25 bp, Canis familiaris
agctcccgagcacagtggacaacgg

SEQ ID NO: 33276 - DNA, 25 bp, Canis familiaris
agccgggccaaagatgacatcacga

SEQ ID NO: 33277 - DNA, 25 bp, Canis familiaris
agcgggacacaagtcgaggccgcgc

SEQ ID NO: 33278 - DNA, 25 bp, Canis familiaris
agcgtgtacaaagtcagccgcctgg

SEQ ID NO: 33279 - DNA, 25 bp, Canis familiaris
agctgcagccgctaaagcagccgcc

SEQ ID NO: 33280 - DNA, 25 bp, Canis familiaris
agctgtgcctgaagtagcatgcccc

SEQ ID NO: 33281 - DNA, 25 bp, Canis familiaris
agctgtgcagccagggcaggcccag

SEQ ID NO: 33282 - DNA, 25 bp, Canis familiaris
agctgtgcagactgagtgtggcccg

SEQ ID NO: 33283 - DNA, 25 bp, Canis familiaris
agctgctgcaggagatgcgtgtccc

SEQ ID NO: 33284 - DNA, 25 bp, Canis familiaris
agctgctccgcaagcaggagtccac

SEQ ID NO: 33285 - DNA, 25 bp, Canis familiaris
agctgctccaggacaaggacaccta

SEQ ID NO: 33286 - DNA, 25 bp, Canis familiaris
agctgcctcagactccaggaaaggc

SEQ ID NO: 33287 - DNA, 25 bp, Canis familiaris
agctgcctctgacctaagtgatgag

SEQ ID NO: 33288 - DNA, 25 bp, Canis familiaris
agctgcccgacggataggtgacgcc

SEQ ID NO: 33289 - DNA, 25 bp, Canis familiaris
agctgccaccaagatgagcagagcc

SEQ ID NO: 33290 - DNA, 25 bp, Canis familiaris
agctccagcagcatgaagaagtctc

SEQ ID NO: 33291 - DNA, 25 bp, Canis familiaris
agcgccaaggcaaagaagttctacc

SEQ ID NO: 33292 - DNA, 25 bp, Canis familiaris
agcgagcaagagagagcatggggaa

SEQ ID NO: 33293 - DNA, 25 bp, Canis familiaris
agcggcaggcagagtgcagccggcg

SEQ ID NO: 33294 - DNA, 25 bp, Canis familiaris
agctggaggcagacgctcagctgct

SEQ ID NO: 33295 - DNA, 25 bp, Canis familiaris
agctggaggcaagatcctcaccttc

SEQ ID NO: 33296 - DNA, 25 bp, Canis familiaris
agctgggtaaatactccgcaactcg

SEQ ID NO: 33297 - DNA, 25 bp, Canis familiaris
agctgggaaaagcactccacatccg

SEQ ID NO: 33298 - DNA, 25 bp, Canis familiaris
agctggccaataggcccgaactcgg

SEQ ID NO: 33299 - DNA, 25 bp, Canis familiaris
agctgaacgaagcccagccaagcac

SEQ ID NO: 33300 - DNA, 25 bp, Canis familiaris
agcgaaggaagagtcggaggaatcg

SEQ ID NO: 33301 - DNA, 25 bp, Canis familiaris
agcgacgagaccatctggctggaac

SEQ ID NO: 33302 - DNA, 25 bp, Canis familiaris
agcgactgcgacgttcgatcttgca

SEQ ID NO: 33303 - DNA, 25 bp, Canis familiaris
agcgccgagacgatggcatctctcg

SEQ ID NO: 33304 - DNA, 25 bp, Canis familiaris
agccggagagcaagtacttcctgcc

SEQ ID NO: 33305 - DNA, 25 bp, Canis familiaris
agccgcttgacaatgcagatcttcg

SEQ ID NO: 33306 - DNA, 25 bp, Canis familiaris
agctcctcagacagtgacagctcca

SEQ ID NO: 33307 - DNA, 25 bp, Canis familiaris
agctcctctggcggtgaagtgcaat

SEQ ID NO: 33308 - DNA, 25 bp, Canis familiaris
agctgctgcagagccggaagtgacc

SEQ ID NO: 33309 - DNA, 25 bp, Canis familiaris
agctccagaacctgacactcaaggg

SEQ ID NO: 33310 - DNA, 25 bp, Canis familiaris
agcccaacagcacagtacccaaggg

SEQ ID NO: 33311 - DNA, 25 bp, Canis familiaris
agcccttccaagaagacccacaagg

SEQ ID NO: 33312 - DNA, 25 bp, Canis familiaris
agcccttccaagaagacccacaagg

SEQ ID NO: 33313 - DNA, 25 bp, Canis familiaris
agcccttcggaaacctcacaagaag

SEQ ID NO: 33314 - DNA, 25 bp, Canis familiaris
agccctactattgagttccacgaag

SEQ ID NO: 33315 - DNA, 25 bp, Canis familiaris
accgttgtgtatccgttccacaaag

SEQ ID NO: 33316 - DNA, 25 bp, Canis familiaris
acctttgttgttcttcctcagaagt

SEQ ID NO: 33317 - DNA, 25 bp, Canis familiaris
acctttgggtctgagtacccagagt

SEQ ID NO: 33318 - DNA, 25 bp, Canis familiaris
tgacctaggggtgtaaaccgaggca

SEQ ID NO: 33319 - DNA, 25 bp, Canis familiaris
accggagtggcctgagaagccgggc

SEQ ID NO: 33320 - DNA, 25 bp, Canis familiaris
accgcgagggggagcaagcaatacc

SEQ ID NO: 33321 - DNA, 25 bp, Canis familiaris
agccggggagggagaatcgctctcg

SEQ ID NO: 33322 - DNA, 25 bp, Canis familiaris
agctgcggggtggactggagtcttc

SEQ ID NO: 33323 - DNA, 25 bp, Canis familiaris
agctggcacaggttggcgtaggtgt

SEQ ID NO: 33324 - DNA, 25 bp, Canis familiaris
agctgcctcaggcggcgaagttgat

SEQ ID NO: 33325 - DNA, 25 bp, Canis familiaris
agctgcccggtttgcagtgagaagt

SEQ ID NO: 33326 - DNA, 25 bp, Canis familiaris
agctgccacggctcaagcaagaaac

SEQ ID NO: 33327 - DNA, 25 bp, Canis familiaris
agcgcgcaagagggcagaccgatag

SEQ ID NO: 33328 - DNA, 25 bp, Canis familiaris
agctgctggaaggcgcaggaagatc

SEQ ID NO: 33329 - DNA, 25 bp, Canis familiaris
agcgtgaacagctacgggagccagt

SEQ ID NO: 33330 - DNA, 25 bp, Canis familiaris
agctgttccagctgcggcctgcaca

SEQ ID NO: 33331 - DNA, 25 bp, Canis familiaris
agctgttctcaggtgcagagcactg

SEQ ID NO: 33332 - DNA, 25 bp, Canis familiaris
agctggagccaggtgctgagtcaga

SEQ ID NO: 33333 - DNA, 25 bp, Canis familiaris
agctgtgacacagctccgtgagaga

SEQ ID NO: 33334 - DNA, 25 bp, Canis familiaris
agcgatgaggcagtgatcctgtgta

SEQ ID NO: 33335 - DNA, 25 bp, Canis familiaris
agccagggttgtgtgttactgtacc

SEQ ID NO: 33336 - DNA, 25 bp, Canis familiaris
agctgcagttttaaattgttcgtaa

SEQ ID NO: 33337 - DNA, 25 bp, Canis familiaris
agcggttttatggattggagcggaa

SEQ ID NO: 33338 - DNA, 25 bp, Canis familiaris
agcggttgaggggttgagcatcggc

SEQ ID NO: 33339 - DNA, 25 bp, Canis familiaris
agctgcggcggagggattaatgtgg

SEQ ID NO: 33340 - DNA, 25 bp, Canis familiaris
agctgaggcccgggatggtatggtg

SEQ ID NO: 33341 - DNA, 25 bp, Canis familiaris
agctgggacagctgatgggcttgga

SEQ ID NO: 33342 - DNA, 25 bp, Canis familiaris
agctgggtagcaggtgtgtgtgtgt

SEQ ID NO: 33343 - DNA, 25 bp, Canis familiaris
agctgtgtgaaggagtgtgtgtgtg

SEQ ID NO: 33344 - DNA, 25 bp, Canis familiaris
agctgagccagccgaagtgtgtgtg

SEQ ID NO: 33345 - DNA, 25 bp, Canis familiaris
agctgcgcaagctgaagcggcgctt

SEQ ID NO: 33346 - DNA, 25 bp, Canis familiaris
agctgagcgagctgcgagagggcct

SEQ ID NO: 33347 - DNA, 25 bp, Canis familiaris
agcggctcagtcggaagcggagtgc

SEQ ID NO: 33348 - DNA, 25 bp, Canis familiaris
agctggagcaactgagacaggaggc

SEQ ID NO: 33349 - DNA, 25 bp, Canis familiaris
agctgggaagattgctacagaagcc

SEQ ID NO: 33350 - DNA, 25 bp, Canis familiaris
agctgtctgaagaagccacaagtcc

SEQ ID NO: 33351 - DNA, 25 bp, Canis familiaris
agctgcctgaaaatcctcagcgctc

SEQ ID NO: 33352 - DNA, 25 bp, Canis familiaris
agcccaggaatattccagtgcctca

SEQ ID NO: 33353 - DNA, 25 bp, Canis familiaris
agcccagactttcatcaacctgaga

SEQ ID NO: 33354 - DNA, 25 bp, Canis familiaris
agccctgactgaatttccaaacgag

SEQ ID NO: 33355 - DNA, 25 bp, Canis familiaris
agctgcctgcagcattggtaaataa

SEQ ID NO: 33356 - DNA, 25 bp, Canis familiaris
agccacggaattgctaagtatattc

SEQ ID NO: 33357 - DNA, 25 bp, Canis familiaris
accaaggcaactctgtatttcatta

SEQ ID NO: 33358 - DNA, 25 bp, Canis familiaris
accaacaaattctattctttcggcg

SEQ ID NO: 33359 - DNA, 25 bp, Canis familiaris
accaaatccttaaccttagcgatgg

SEQ ID NO: 33360 - DNA, 25 bp, Canis familiaris
agccaaacccaaactgcaaagccat

SEQ ID NO: 33361 - DNA, 25 bp, Canis familiaris
agccaaatcacatttgcctttccct

SEQ ID NO: 33362 - DNA, 25 bp, Canis familiaris
agccatcatgaattcctccattttc

SEQ ID NO: 33363 - DNA, 25 bp, Canis familiaris
agccatacatataccctctgatttc

SEQ ID NO: 33364 - DNA, 25 bp, Canis familiaris
agcgttcgaacgcactgatttcgac

SEQ ID NO: 33365 - DNA, 25 bp, Canis familiaris
agccctccaagagcctgtttcaggg

SEQ ID NO: 33366 - DNA, 25 bp, Canis familiaris
agcccctcaaagaagcggtctggcc

SEQ ID NO: 33367 - DNA, 25 bp, Canis familiaris
agctgccctagatggggtctcagaa

SEQ ID NO: 33368 - DNA, 25 bp, Canis familiaris
agctgcctgtatttgtgggattctt

SEQ ID NO: 33369 - DNA, 25 bp, Canis familiaris
agctgctgcccatatgtgtgtggtt

SEQ ID NO: 33370 - DNA, 25 bp, Canis familiaris
agctgctggccatggatgctttgta

SEQ ID NO: 33371 - DNA, 25 bp, Canis familiaris
agctgatgggcttggagctgctgtc

SEQ ID NO: 33372 - DNA, 25 bp, Canis familiaris
agctgtgggctgggagatgtgctca

SEQ ID NO: 33373 - DNA, 25 bp, Canis familiaris
agctgtgtggctgactttctatttt

SEQ ID NO: 33374 - DNA, 25 bp, Canis familiaris
cagttgtggctccagcccattaaat

SEQ ID NO: 33375 - DNA, 25 bp, Canis familiaris
agctggtggctggaccaatgtaaat

SEQ ID NO: 33376 - DNA, 25 bp, Canis familiaris
agctgggctttcacagattaggcat

SEQ ID NO: 33377 - DNA, 25 bp, Canis familiaris
agctgtacatttctccatttggcat

SEQ ID NO: 33378 - DNA, 25 bp, Canis familiaris
agctgtatatgttttcttcttggat

SEQ ID NO: 33379 - DNA, 25 bp, Canis familiaris
agctgctcacaatacatcttttggc

SEQ ID NO: 33380 - DNA, 25 bp, Canis familiaris
agcccaagatcatcactgttcattg

SEQ ID NO: 33381 - DNA, 25 bp, Canis familiaris
agccttcaacattccgcttatgagt

SEQ ID NO: 33382 - DNA, 25 bp, Canis familiaris
agctgcttaatcatcctgcttgtta

SEQ ID NO: 33383 - DNA, 25 bp, Canis familiaris
agctgtaaagcattttcatgtttag

SEQ ID NO: 33384 - DNA, 25 bp, Canis familiaris
agctgtagttcattgtattcatgtt

SEQ ID NO: 33385 - DNA, 25 bp, Canis familiaris
agctgctcaacgctgtcactagagt

SEQ ID NO: 33386 - DNA, 25 bp, Canis familiaris
agctgaaagctgcctacctaatgtc

SEQ ID NO: 33387 - DNA, 25 bp, Canis familiaris
agctgaaagatgggcccactctgtc

SEQ ID NO: 33388 - DNA, 25 bp, Canis familiaris
agctggaagatgggccagcctgtcc

SEQ ID NO: 33389 - DNA, 25 bp, Canis familiaris
agctgtccaaggaccagccttacct

SEQ ID NO: 33390 - DNA, 25 bp, Canis familiaris
agcgtccgcatgctaatcgcttttt

SEQ ID NO: 33391 - DNA, 25 bp, Canis familiaris
agctgattctggaagcaacgttctt

SEQ ID NO: 33392 - DNA, 25 bp, Canis familiaris
agctgttgctgttcgaaagcatctt

SEQ ID NO: 33393 - DNA, 25 bp, Canis familiaris
agcgtctttacgtccgcactataat

SEQ ID NO: 33394 - DNA, 25 bp, Canis familiaris
agcccttctgactcctaagtaattt

SEQ ID NO: 33395 - DNA, 25 bp, Canis familiaris
accttctgcgactacgtccagaaca

SEQ ID NO: 33396 - DNA, 25 bp, Canis familiaris
acctcactgccacacgttagaaatg

SEQ ID NO: 33397 - DNA, 25 bp, Canis familiaris
agcccacccccaagtgttagagagt

SEQ ID NO: 33398 - DNA, 25 bp, Canis familiaris
accaacccctgcagggcgagtgtgt

SEQ ID NO: 33399 - DNA, 25 bp, Canis familiaris
acccccagccagaggacgtagatgg

SEQ ID NO: 33400 - DNA, 25 bp, Canis familiaris
agcccccacggacacaagttattgg

SEQ ID NO: 33401 - DNA, 25 bp, Canis familiaris
agcccccgagaacacaaggtgctat

SEQ ID NO: 33402 - DNA, 25 bp, Canis familiaris
accactaggaaacaaagtccagctt

SEQ ID NO: 33403 - DNA, 25 bp, Canis familiaris
agccctaggaaaccaggagcctggc

SEQ ID NO: 33404 - DNA, 25 bp, Canis familiaris
agcgtctctgacaaaacgggcctgg

SEQ ID NO: 33405 - DNA, 25 bp, Canis familiaris
agccgtatgactgtgcacgggcctg

SEQ ID NO: 33406 - DNA, 25 bp, Canis familiaris
agccctagactgactccagtagcac

SEQ ID NO: 33407 - DNA, 25 bp, Canis familiaris
agctgacggatcaccagtgggcact

SEQ ID NO: 33408 - DNA, 25 bp, Canis familiaris
agctgaatgttcatggggcggccat

SEQ ID NO: 33409 - DNA, 25 bp, Canis familiaris
agcgagatgatcttctggcggggat

SEQ ID NO: 33410 - DNA, 25 bp, Canis familiaris
agctgcaggagaggctggcgggagc

SEQ ID NO: 33411 - DNA, 25 bp, Canis familiaris
agcgatggagcaggtcgggcaggct

SEQ ID NO: 33412 - DNA, 25 bp, Canis familiaris
agcgtgggcatcgaggcggacgatg

SEQ ID NO: 33413 - DNA, 25 bp, Canis familiaris
agctgtgcccacgggggaggttact

SEQ ID NO: 33414 - DNA, 25 bp, Canis familiaris
agctgacccaggggctgaaggctct

SEQ ID NO: 33415 - DNA, 25 bp, Canis familiaris
agctgaccacggtgtgcgaggactt

SEQ ID NO: 33416 - DNA, 25 bp, Canis familiaris
agctgaccccagatgacgaggacgt

SEQ ID NO: 33417 - DNA, 25 bp, Canis familiaris
agctgaccctcaagccacgagggag

SEQ ID NO: 33418 - DNA, 25 bp, Canis familiaris
agcgcctcgcgaacgccgggctgga

SEQ ID NO: 33419 - DNA, 25 bp, Canis familiaris
actccaacccgccattgggcggagc

SEQ ID NO: 33420 - DNA, 25 bp, Canis familiaris
agcccaatatcccaaagggcggcag

SEQ ID NO: 33421 - DNA, 25 bp, Canis familiaris
agcccaaacgcttagagaaaggagg

SEQ ID NO: 33422 - DNA, 25 bp, Canis familiaris
agccccatcccttaagacggtgatg

SEQ ID NO: 33423 - DNA, 25 bp, Canis familiaris
accaatcaatcctgaagttactgaa

SEQ ID NO: 33424 - DNA, 25 bp, Canis familiaris
agccccaatgcctgaatggttagaa

SEQ ID NO: 33425 - DNA, 25 bp, Canis familiaris
agcccccatgatatgattttccaat

SEQ ID NO: 33426 - DNA, 25 bp, Canis familiaris
accacccgattctttaagccaagag

SEQ ID NO: 33427 - DNA, 25 bp, Canis familiaris
accctcagctttctaggaccaaatg

SEQ ID NO: 33428 - DNA, 25 bp, Canis familiaris
acctccaggttgctaaagaaacatc

SEQ ID NO: 33429 - DNA, 25 bp, Canis familiaris
agccaccctcggcctataagaaaca

SEQ ID NO: 33430 - DNA, 25 bp, Canis familiaris
agctgcacccttctttactgaagat

SEQ ID NO: 33431 - DNA, 25 bp, Canis familiaris
agcccacactgtatttcctgaatgg

SEQ ID NO: 33432 - DNA, 25 bp, Canis familiaris
agcccccttgctttgtgttaatggg

SEQ ID NO: 33433 - DNA, 25 bp, Canis familiaris
accacccttttcatttctgtgggca

SEQ ID NO: 33434 - DNA, 25 bp, Canis familiaris
agcccggttggtgatattttattgt

SEQ ID NO: 33435 - DNA, 25 bp, Canis familiaris
agcccagttgcttttatttttaatg

SEQ ID NO: 33436 - DNA, 25 bp, Canis familiaris
accaatgttgtcttttactcgtatg

SEQ ID NO: 33437 - DNA, 25 bp, Canis familiaris
agcctcgttgtttgttaatccttga

SEQ ID NO: 33438 - DNA, 25 bp, Canis familiaris
agccttattttactctacttctgtt

SEQ ID NO: 33439 - DNA, 25 bp, Canis familiaris
agcctctttaattgcttcttctttt

SEQ ID NO: 33440 - DNA, 25 bp, Canis familiaris
agcctttctagatggtcccaagctc

SEQ ID NO: 33441 - DNA, 25 bp, Canis familiaris
agcctttccagtctttgtaactcat

SEQ ID NO: 33442 - DNA, 25 bp, Canis familiaris
agccacttccagacttgggtttctt

SEQ ID NO: 33443 - DNA, 25 bp, Canis familiaris
agcggttggcggatgggattgtttt

SEQ ID NO: 33444 - DNA, 25 bp, Canis familiaris
agcggtcgacgaatgtggggagttt

SEQ ID NO: 33445 - DNA, 25 bp, Canis familiaris
agcgggaagctgatgtgggaggtga

SEQ ID NO: 33446 - DNA, 25 bp, Canis familiaris
agccctgagcccatttggaggtgct

SEQ ID NO: 33447 - DNA, 25 bp, Canis familiaris
agcccaacccatatgatgacctttt

SEQ ID NO: 33448 - DNA, 25 bp, Canis familiaris
agcctcaacttgaggtctccttctt

SEQ ID NO: 33449 - DNA, 25 bp, Canis familiaris
agcggagaaatatggtacacctctt

SEQ ID NO: 33450 - DNA, 25 bp, Canis familiaris
agccgtaaaaagctacagttatcat

SEQ ID NO: 33451 - DNA, 25 bp, Canis familiaris
gaccgacttaaaccggcgttatgag

SEQ ID NO: 33452 - DNA, 25 bp, Canis familiaris
acctactcagaaagcccgggtgagc

SEQ ID NO: 33453 - DNA, 25 bp, Canis familiaris
agcctttagatcatgcccggaggtg

SEQ ID NO: 33454 - DNA, 25 bp, Canis familiaris
actcgttggaaccccaggggctgat

SEQ ID NO: 33455 - DNA, 25 bp, Canis familiaris
actcgttagaaccttcacgaaggag

SEQ ID NO: 33456 - DNA, 25 bp, Canis familiaris
agcggtcttcccttgatacgaagga

SEQ ID NO: 33457 - DNA, 25 bp, Canis familiaris
agcgcgtcctacaagttacgggaga

SEQ ID NO: 33458 - DNA, 25 bp, Canis familiaris
agcgcctcgtaagcaaacggtggag

SEQ ID NO: 33459 - DNA, 25 bp, Canis familiaris
agcccggaaactgaaattgatggta

SEQ ID NO: 33460 - DNA, 25 bp, Canis familiaris
agccctggttgtacaagacttgagg

SEQ ID NO: 33461 - DNA, 25 bp, Canis familiaris
agccctggtggggattacttgaaca

SEQ ID NO: 33462 - DNA, 25 bp, Canis familiaris
agccctggtggtgtagcagtttagc

SEQ ID NO: 33463 - DNA, 25 bp, Canis familiaris
agccctgggaggtagcggttgttgc

SEQ ID NO: 33464 - DNA, 25 bp, Canis familiaris
agcccggtgcaggagagacgattgt

SEQ ID NO: 33465 - DNA, 25 bp, Canis familiaris
agcccggacaggggactcttgtgga

SEQ ID NO: 33466 - DNA, 25 bp, Canis familiaris
agcccggacaagggtctgtgtgaga

SEQ ID NO: 33467 - DNA, 25 bp, Canis familiaris
agccctaaatcgggctctgcactca

SEQ ID NO: 33468 - DNA, 25 bp, Canis familiaris
acgtcgctaatccgtgatatcacta

SEQ ID NO: 33469 - DNA, 25 bp, Canis familiaris
agcgacaatacacagagaatcactt

SEQ ID NO: 33470 - DNA, 25 bp, Canis familiaris
agcgatcaatcggttgactgcaagt

SEQ ID NO: 33471 - DNA, 25 bp, Canis familiaris
agcgaacagggctgagctgacgtcc

SEQ ID NO: 33472 - DNA, 25 bp, Canis familiaris
agcgatgccaggctagcacgacggt

SEQ ID NO: 33473 - DNA, 25 bp, Canis familiaris
agctgagccggtcaaggaaggttgc

SEQ ID NO: 33474 - DNA, 25 bp, Canis familiaris
agcggctgggctgagagtgatgcag

SEQ ID NO: 33475 - DNA, 25 bp, Canis familiaris
agcgtcgggtcggaggctgagaggc

SEQ ID NO: 33476 - DNA, 25 bp, Canis familiaris
agcgtggggccttgaggagggccgc

SEQ ID NO: 33477 - DNA, 25 bp, Canis familiaris
agcctggggtgcctaatgagtgagc

SEQ ID NO: 33478 - DNA, 25 bp, Canis familiaris
agccttcaggcctacaagtggagct

SEQ ID NO: 33479 - DNA, 25 bp, Canis familiaris
agccgtagcagaatactaatcgagc

SEQ ID NO: 33480 - DNA, 25 bp, Canis familiaris
agcgcccaagaatcgacagctgtgg

SEQ ID NO: 33481 - DNA, 25 bp, Canis familiaris
accatgtctagaagagagtagcttg

SEQ ID NO: 33482 - DNA, 25 bp, Canis familiaris
acctaatgcgaaagatatatgttga

SEQ ID NO: 33483 - DNA, 25 bp, Canis familiaris
agcgctttgaaaagaaatttgtcct

SEQ ID NO: 33484 - DNA, 25 bp, Canis familiaris
agctgtcctttgtgaacttttcact

SEQ ID NO: 33485 - DNA, 25 bp, Canis familiaris
agcgattctttaagaccttccggct

SEQ ID NO: 33486 - DNA, 25 bp, Canis familiaris
accttcttctacgtgacttcagggc

SEQ ID NO: 33487 - DNA, 25 bp, Canis familiaris
accattcaggggggacttcagtgtc

SEQ ID NO: 33488 - DNA, 25 bp, Canis familiaris
agcctacggggaggatcctggcttc

SEQ ID NO: 33489 - DNA, 25 bp, Canis familiaris
agccattggggggtctttgtgcttc

SEQ ID NO: 33490 - DNA, 25 bp, Canis familiaris
agcctttggagggttgtggccctgc

SEQ ID NO: 33491 - DNA, 25 bp, Canis familiaris
agcctggtggagttccgagtgctcc

SEQ ID NO: 33492 - DNA, 25 bp, Canis familiaris
agcctgcaaggagctcctgcagctg

SEQ ID NO: 33493 - DNA, 25 bp, Canis familiaris
agcccactggagatgcctgaggaga

SEQ ID NO: 33494 - DNA, 25 bp, Canis familiaris
agccccataagctgcttgcgggaag

SEQ ID NO: 33495 - DNA, 25 bp, Canis familiaris
agccctctttgatggctctgtggag

SEQ ID NO: 33496 - DNA, 25 bp, Canis familiaris
agcccttgacagtctggtcttggag

SEQ ID NO: 33497 - DNA, 25 bp, Canis familiaris
agcccactgatcccattttaggagt

SEQ ID NO: 33498 - DNA, 25 bp, Canis familiaris
agcgccaagatcactgtttagcaca

SEQ ID NO: 33499 - DNA, 25 bp, Canis familiaris
agcgcttgatatcgacagtcttgac

SEQ ID NO: 33500 - DNA, 25 bp, Canis familiaris
agcgcttatttttgcatgttgatgt

SEQ ID NO: 33501 - DNA, 25 bp, Canis familiaris
agcgtccgctctggattgttgagtt

SEQ ID NO: 33502 - DNA, 25 bp, Canis familiaris
agctgtcatcctagcgagtgttcca

SEQ ID NO: 33503 - DNA, 25 bp, Canis familiaris
agcgcttcctaagttgttgcacact

SEQ ID NO: 33504 - DNA, 25 bp, Canis familiaris
agccttgcctatcttatgtagttac

SEQ ID NO: 33505 - DNA, 25 bp, Canis familiaris
agcccattcttgtgaattaattgac

SEQ ID NO: 33506 - DNA, 25 bp, Canis familiaris
agcccagtgttaaattgtacagtcc

SEQ ID NO: 33507 - DNA, 25 bp, Canis familiaris
agcgtacttattattcgactgatcc

SEQ ID NO: 33508 - DNA, 25 bp, Canis familiaris
agctgttcttttagggagagcagat

SEQ ID NO: 33509 - DNA, 25 bp, Canis familiaris
agcggtattgttctaggatgcatgt

SEQ ID NO: 33510 - DNA, 25 bp, Canis familiaris
agcggtagtgtgtctgctatgtaag

SEQ ID NO: 33511 - DNA, 25 bp, Canis familiaris
agcgttagctgccatcatcttgaat

SEQ ID NO: 33512 - DNA, 25 bp, Canis familiaris
agcggtgcatcgagtctctgattgc

SEQ ID NO: 33513 - DNA, 25 bp, Canis familiaris
agcggtgcatcgagtctctgattgc

SEQ ID NO: 33514 - DNA, 25 bp, Canis familiaris
agcggtgcatcgagtctctgattgc

SEQ ID NO: 33515 - DNA, 25 bp, Canis familiaris
agctggtgaagcagctcctcacaga

SEQ ID NO: 33516 - DNA, 25 bp, Canis familiaris
agctggtgaacacagctccactgac

SEQ ID NO: 33517 - DNA, 25 bp, Canis familiaris
agctgttgaaagtcctccacaggcc

SEQ ID NO: 33518 - DNA, 25 bp, Canis familiaris
agcgatttagtggcaccttcagccc

SEQ ID NO: 33519 - DNA, 25 bp, Canis familiaris
agcgaatttgggcactaagccagcc

SEQ ID NO: 33520 - DNA, 25 bp, Canis familiaris
agcgaaccggagcaatcaagcctcg

SEQ ID NO: 33521 - DNA, 25 bp, Canis familiaris
agcgtaccgagatgcagacggcctg

SEQ ID NO: 33522 - DNA, 25 bp, Canis familiaris
agcggcgtcgagtagatgactccgt

SEQ ID NO: 33523 - DNA, 25 bp, Canis familiaris
agcggacgcggttgtggatcatcgt

SEQ ID NO: 33524 - DNA, 25 bp, Canis familiaris
agctgtgccctcatatgtagacata

SEQ ID NO: 33525 - DNA, 25 bp, Canis familiaris
agctggccctcaatgagctggtgac

SEQ ID NO: 33526 - DNA, 25 bp, Canis familiaris
agcgtgccaatcaacatgctggtga

SEQ ID NO: 33527 - DNA, 25 bp, Canis familiaris
agcgtgccagtcatcaacagcatgg

SEQ ID NO: 33528 - DNA, 25 bp, Canis familiaris
agcggtcagctcatctagttgggac

SEQ ID NO: 33529 - DNA, 25 bp, Canis familiaris
agctggacaccagggactctgggtc

SEQ ID NO: 33530 - DNA, 25 bp, Canis familiaris
agctgtggcaccaggaccaggtggc

SEQ ID NO: 33531 - DNA, 25 bp, Canis familiaris
actgtacaaaagacctacgatacgg

SEQ ID NO: 33532 - DNA, 25 bp, Canis familiaris
agctgtacaatatgtccccatgacc

SEQ ID NO: 33533 - DNA, 25 bp, Canis familiaris
agctggagaagatcccaccaggcgc

SEQ ID NO: 33534 - DNA, 25 bp, Canis familiaris
agcggaaagtcaaccatcctggatg

SEQ ID NO: 33535 - DNA, 25 bp, Canis familiaris
agctggtacgtgcactaactgagat

SEQ ID NO: 33536 - DNA, 25 bp, Canis familiaris
agctggtagtgtaactgttctagtt

SEQ ID NO: 33537 - DNA, 25 bp, Canis familiaris
agcgccagagtgctgacgccttact

SEQ ID NO: 33538 - DNA, 25 bp, Canis familiaris
agcccagaggctctctggtttctcc

SEQ ID NO: 33539 - DNA, 25 bp, Canis familiaris
agccggtgcagtctgcgtgttttct

SEQ ID NO: 33540 - DNA, 25 bp, Canis familiaris
accaggctgagaactcgttcacctc

SEQ ID NO: 33541 - DNA, 25 bp, Canis familiaris
acctggatgtgaagcacttctcccc

SEQ ID NO: 33542 - DNA, 25 bp, Canis familiaris
acctggggtccaaattcacaccatc

SEQ ID NO: 33543 - DNA, 25 bp, Canis familiaris
accgtggtaccatatgtctactcaa

SEQ ID NO: 33544 - DNA, 25 bp, Canis familiaris
accggggaccatcatgtacccaatc

SEQ ID NO: 33545 - DNA, 25 bp, Canis familiaris
accaggaggaccaccgaacttatgc

SEQ ID NO: 33546 - DNA, 25 bp, Canis familiaris
ctccacggaaccatcctaaatttag

SEQ ID NO: 33547 - DNA, 25 bp, Canis familiaris
accaaggaagccatcattaaactgt

SEQ ID NO: 33548 - DNA, 25 bp, Canis familiaris
agcccagaaggacaattcactcagc

SEQ ID NO: 33549 - DNA, 25 bp, Canis familiaris
accacgaggtaggcattttcatcag

SEQ ID NO: 33550 - DNA, 25 bp, Canis familiaris
agccaaagttgggtttgccatctcc

SEQ ID NO: 33551 - DNA, 25 bp, Canis familiaris
acgcaacgtcgggattggactcaac

SEQ ID NO: 33552 - DNA, 25 bp, Canis familiaris
agcccaggaagggaccgagccaggc

SEQ ID NO: 33553 - DNA, 25 bp, Canis familiaris
agcctaggaattccaggggggcctg

SEQ ID NO: 33554 - DNA, 25 bp, Canis familiaris
agccgggatttggctacggaggccg

SEQ ID NO: 33555 - DNA, 25 bp, Canis familiaris
agccaaggttctgtgtccaaagcca

SEQ ID NO: 33556 - DNA, 25 bp, Canis familiaris
agccaaggttctgtgtccaaagcca

SEQ ID NO: 33557 - DNA, 25 bp, Canis familiaris
agccaacgaattgtgtgcaaactgc

SEQ ID NO: 33558 - DNA, 25 bp, Canis familiaris
acctagccaaagcttgaaactgcgc

SEQ ID NO: 33559 - DNA, 25 bp, Canis familiaris
agccaagccaacctattgtaagccc

SEQ ID NO: 33560 - DNA, 25 bp, Canis familiaris
accaccacttcggatttgaagccgc

SEQ ID NO: 33561 - DNA, 25 bp, Canis familiaris
accacattcctcaggttgaacctcg

SEQ ID NO: 33562 - DNA, 25 bp, Canis familiaris
agccctaaccgggtgatggactctc

SEQ ID NO: 33563 - DNA, 25 bp, Canis familiaris
agcccaaaatctgtatattatctct

SEQ ID NO: 33564 - DNA, 25 bp, Canis familiaris
agcccgcaccttgtataatgtcatt

SEQ ID NO: 33565 - DNA, 25 bp, Canis familiaris
agcgttacgcttacttgcattgtat

SEQ ID NO: 33566 - DNA, 25 bp, Canis familiaris
agctgtgtcccttttacttgtaagt

SEQ ID NO: 33567 - DNA, 25 bp, Canis familiaris
actttccgtgcagttacctgttcat

SEQ ID NO: 33568 - DNA, 25 bp, Canis familiaris
accactcgcagtgtacacacgttca

SEQ ID NO: 33569 - DNA, 25 bp, Canis familiaris
agcccatggcaaaaaacctgttcag

SEQ ID NO: 33570 - DNA, 25 bp, Canis familiaris
agccccacagaaaagcctctttaca

SEQ ID NO: 33571 - DNA, 25 bp, Canis familiaris
agcccccaaacattgaactactgaa

SEQ ID NO: 33572 - DNA, 25 bp, Canis familiaris
accggccaaccagtgaactttgcat

SEQ ID NO: 33573 - DNA, 25 bp, Canis familiaris
acctacacaattgcgagactcggcg

SEQ ID NO: 33574 - DNA, 25 bp, Canis familiaris
acctgatcccttgcaaggaggcggg

SEQ ID NO: 33575 - DNA, 25 bp, Canis familiaris
accaacccatctgccatggaggtag

SEQ ID NO: 33576 - DNA, 25 bp, Canis familiaris
agcccaacacagctccatggaagta

SEQ ID NO: 33577 - DNA, 25 bp, Canis familiaris
agccgaatccaccagcgtgagaatt

SEQ ID NO: 33578 - DNA, 25 bp, Canis familiaris
agcgcaacagcagcctgcagctgga

SEQ ID NO: 33579 - DNA, 25 bp, Canis familiaris
agcgatatctgtggccgcagtggct

SEQ ID NO: 33580 - DNA, 25 bp, Canis familiaris
agcgatgcactgggacggatggtat

SEQ ID NO: 33581 - DNA, 25 bp, Canis familiaris
agcgtgcctttgttcactggtatgt

SEQ ID NO: 33582 - DNA, 25 bp, Canis familiaris
agcgagcctttgctgattttctgtt

SEQ ID NO: 33583 - DNA, 25 bp, Canis familiaris
agctggtcttcacttgtttgtatat

SEQ ID NO: 33584 - DNA, 25 bp, Canis familiaris
agctggtttcagggacatccttctg

SEQ ID NO: 33585 - DNA, 25 bp, Canis familiaris
agcggtttatcggaaggtcctgctc

SEQ ID NO: 33586 - DNA, 25 bp, Canis familiaris
agcggttttcatggagactgtctca

SEQ ID NO: 33587 - DNA, 25 bp, Canis familiaris
agcgttcttcttcagaggtccaaaa

SEQ ID NO: 33588 - DNA, 25 bp, Canis familiaris
agcctttctcctaagacttcagaaa

SEQ ID NO: 33589 - DNA, 25 bp, Canis familiaris
agcgctttctcagtgggacaaagca

SEQ ID NO: 33590 - DNA, 25 bp, Canis familiaris
agcgctgttgctcaggagtgacaag

SEQ ID NO: 33591 - DNA, 25 bp, Canis familiaris
agcctgttctcattctgactgagca

SEQ ID NO: 33592 - DNA, 25 bp, Canis familiaris
agccagttggcacatactagccgac

SEQ ID NO: 33593 - DNA, 25 bp, Canis familiaris
accaggttggctaacacctgtgccc

SEQ ID NO: 33594 - DNA, 25 bp, Canis familiaris
agcctgttagtgcaacccagtgcat

SEQ ID NO: 33595 - DNA, 25 bp, Canis familiaris
accgattaggaggtaacatgtgtac

SEQ ID NO: 33596 - DNA, 25 bp, Canis familiaris
agcgcttgtaaacgctacacagtta

SEQ ID NO: 33597 - DNA, 25 bp, Canis familiaris
agcctctatggatggtacactttgg

SEQ ID NO: 33598 - DNA, 25 bp, Canis familiaris
acctcttgtagtggacatttctggg

SEQ ID NO: 33599 - DNA, 25 bp, Canis familiaris
agcccatttggtgaagatatccgga

SEQ ID NO: 33600 - DNA, 25 bp, Canis familiaris
agcccttaacccaaggaccgatgat

SEQ ID NO: 33601 - DNA, 25 bp, Canis familiaris
agcccttacgcacatcggaataatt

SEQ ID NO: 33602 - DNA, 25 bp, Canis familiaris
agccatctttgctggatcatgctga

SEQ ID NO: 33603 - DNA, 25 bp, Canis familiaris
agcccctctaagctcatgtaggttt

SEQ ID NO: 33604 - DNA, 25 bp, Canis familiaris
agccgggtcaagctcatcttggaat

SEQ ID NO: 33605 - DNA, 25 bp, Canis familiaris
agccgggctgaggcagccctggaga

SEQ ID NO: 33606 - DNA, 25 bp, Canis familiaris
agcgcttacgagacgctacggcagc

SEQ ID NO: 33607 - DNA, 25 bp, Canis familiaris
agcgcttgaaggcccagaggctggt

SEQ ID NO: 33608 - DNA, 25 bp, Canis familiaris
agcgcctgagggctcaagtgtggag

SEQ ID NO: 33609 - DNA, 25 bp, Canis familiaris
agcctcatgaaccagagccgttggg

SEQ ID NO: 33610 - DNA, 25 bp, Canis familiaris
agccctgagatctgggcgttgcctc

SEQ ID NO: 33611 - DNA, 25 bp, Canis familiaris
agcctgggatgagggacgcttccaa

SEQ ID NO: 33612 - DNA, 25 bp, Canis familiaris
agccatgtggtgactggagcttctt

SEQ ID NO: 33613 - DNA, 25 bp, Canis familiaris
agcgcatggggatgttggctcttgg

SEQ ID NO: 33614 - DNA, 25 bp, Canis familiaris
agcgctgggtgatatgctatatgtt

SEQ ID NO: 33615 - DNA, 25 bp, Canis familiaris
agcctggggctttggaagctgcatt

SEQ ID NO: 33616 - DNA, 25 bp, Canis familiaris
agcctagggctattgtctacttgtc

SEQ ID NO: 33617 - DNA, 25 bp, Canis familiaris
agctggggagcttttctatcatttt

SEQ ID NO: 33618 - DNA, 25 bp, Canis familiaris
agcggaggagccaatatcagacagt

SEQ ID NO: 33619 - DNA, 25 bp, Canis familiaris
agctggaggagcctgagaagccacc

SEQ ID NO: 33620 - DNA, 25 bp, Canis familiaris
agcgagagagagctggacagaatgc

SEQ ID NO: 33621 - DNA, 25 bp, Canis familiaris
agcgaggagcgaagagctgcaacgc

SEQ ID NO: 33622 - DNA, 25 bp, Canis familiaris
agcgcactgacaatccagctaatcc

SEQ ID NO: 33623 - DNA, 25 bp, Canis familiaris
agcgagcgcgctaacagattaactt

SEQ ID NO: 33624 - DNA, 25 bp, Canis familiaris
agcgaggtgctgaaacagtgcagat

SEQ ID NO: 33625 - DNA, 25 bp, Canis familiaris
agcgaagttctcacaggcagcaaac

SEQ ID NO: 33626 - DNA, 25 bp, Canis familiaris
agcgggcatttatcaggcacagtcc

SEQ ID NO: 33627 - DNA, 25 bp, Canis familiaris
agctggactgttgagcaggcctgtc

SEQ ID NO: 33628 - DNA, 25 bp, Canis familiaris
agcgcatgactgaacggagactcgt

SEQ ID NO: 33629 - DNA, 25 bp, Canis familiaris
agcgcagactacagaagcggagctc

SEQ ID NO: 33630 - DNA, 25 bp, Canis familiaris
agcgcaggccgcagaaggacatgct

SEQ ID NO: 33631 - DNA, 25 bp, Canis familiaris
agctggcccatgagctgggactgct

SEQ ID NO: 33632 - DNA, 25 bp, Canis familiaris
agcgaaccatctggctgaggagctg

SEQ ID NO: 33633 - DNA, 25 bp, Canis familiaris
agcgaatgccacccatgagaggatc

SEQ ID NO: 33634 - DNA, 25 bp, Canis familiaris
agcgcacagcctaactgcaaggttt

SEQ ID NO: 33635 - DNA, 25 bp, Canis familiaris
agcgaaagcatttgccaagaatgtt

SEQ ID NO: 33636 - DNA, 25 bp, Canis familiaris
agcgatctgagctcagccaggaagt

SEQ ID NO: 33637 - DNA, 25 bp, Canis familiaris
agcgtggagccccacataaggcttc

SEQ ID NO: 33638 - DNA, 25 bp, Canis familiaris
agcgtgtagcagctccaaagcactg

SEQ ID NO: 33639 - DNA, 25 bp, Canis familiaris
agcctatctcatcggccgcggcctg

SEQ ID NO: 33640 - DNA, 25 bp, Canis familiaris
agccatactcagatgctccagagga

SEQ ID NO: 33641 - DNA, 25 bp, Canis familiaris
agccattagcatctactcagggcag

SEQ ID NO: 33642 - DNA, 25 bp, Canis familiaris
agccttagccaggacgaggtgaaag

SEQ ID NO: 33643 - DNA, 25 bp, Canis familiaris
agcgctgtttacgacgagtgctcga

SEQ ID NO: 33644 - DNA, 25 bp, Canis familiaris
agccttgtaacagcgacttcacagc

SEQ ID NO: 33645 - DNA, 25 bp, Canis familiaris
agcctgagaaacggctaccacatcc

SEQ ID NO: 33646 - DNA, 25 bp, Canis familiaris
agcctagctcaccgtgctaaatcat

SEQ ID NO: 33647 - DNA, 25 bp, Canis familiaris
agcctgataacgcgaaacaagttga

SEQ ID NO: 33648 - DNA, 25 bp, Canis familiaris
agccgatatgcagtttaagataatt

SEQ ID NO: 33649 - DNA, 25 bp, Canis familiaris
gaggctgaaactctaactggttttt

SEQ ID NO: 33650 - DNA, 25 bp, Canis familiaris
agcgagcaaggcattaacgagtttc

SEQ ID NO: 33651 - DNA, 25 bp, Canis familiaris
agcccatcaggttggaacgtatatt

SEQ ID NO: 33652 - DNA, 25 bp, Canis familiaris
agcccacgcgcatataacttgcttt

SEQ ID NO: 33653 - DNA, 25 bp, Canis familiaris
agcccacatagcttaatgttggcct

SEQ ID NO: 33654 - DNA, 25 bp, Canis familiaris
agcctccaccattaatacgacgctc

SEQ ID NO: 33655 - DNA, 25 bp, Canis familiaris
agcctccagcagccagaaagcaagc

SEQ ID NO: 33656 - DNA, 25 bp, Canis familiaris
agcccagcgcagacagcgagaggag

SEQ ID NO: 33657 - DNA, 25 bp, Canis familiaris
agcgccgcaatgacattggccgtgc

SEQ ID NO: 33658 - DNA, 25 bp, Canis familiaris
agcgcctggtggagcagctcaagct

SEQ ID NO: 33659 - DNA, 25 bp, Canis familiaris
agccctgtcatgtgggccacatctt

SEQ ID NO: 33660 - DNA, 25 bp, Canis familiaris
agcccgtagctaacagcacagtgct

SEQ ID NO: 33661 - DNA, 25 bp, Canis familiaris
agcccagaagccactgaagtgtaat

SEQ ID NO: 33662 - DNA, 25 bp, Canis familiaris
agcccagaagccacttgatgatatg

SEQ ID NO: 33663 - DNA, 25 bp, Canis familiaris
agcccatgatgatgccatttggtca

SEQ ID NO: 33664 - DNA, 25 bp, Canis familiaris
agcgactacgaggctagtggtcaca

SEQ ID NO: 33665 - DNA, 25 bp, Canis familiaris
agccttgcaagcactaagttcagca

SEQ ID NO: 33666 - DNA, 25 bp, Canis familiaris
agcgctagtatcataaagctggcaa

SEQ ID NO: 33667 - DNA, 25 bp, Canis familiaris
agcgctgaggctctaaatgtctgca

SEQ ID NO: 33668 - DNA, 25 bp, Canis familiaris
agcctaactctttcaagtgctcaaa

SEQ ID NO: 33669 - DNA, 25 bp, Canis familiaris
agccttattcattacaatctcctta

SEQ ID NO: 33670 - DNA, 25 bp, Canis familiaris
agccttattcattacaatctcctta

SEQ ID NO: 33671 - DNA, 25 bp, Canis familiaris
agccttattcattacaatctcctta

SEQ ID NO: 33672 - DNA, 25 bp, Canis familiaris
agcctcttcatgtgaaacatcttca

SEQ ID NO: 33673 - DNA, 25 bp, Canis familiaris
agcctgcacctgttcaacagcatct

SEQ ID NO: 33674 - DNA, 25 bp, Canis familiaris
agccaggcgtgatgaactgctccaa

SEQ ID NO: 33675 - DNA, 25 bp, Canis familiaris
agccgggggagaactatgaacatca

SEQ ID NO: 33676 - DNA, 25 bp, Canis familiaris
agccctcgtggaaacttgcaactaa

SEQ ID NO: 33677 - DNA, 25 bp, Canis familiaris
agcccaccttgaattttgtatataa

SEQ ID NO: 33678 - DNA, 25 bp, Canis familiaris
accacaacgtgaattttgcaaacag

SEQ ID NO: 33679 - DNA, 25 bp, Canis familiaris
agcccaagccagtctttgtgaaaca

SEQ ID NO: 33680 - DNA, 25 bp, Canis familiaris
agcccaccatcgtcttggaaaagct

SEQ ID NO: 33681 - DNA, 25 bp, Canis familiaris
agccccctgaacccagaaagatcac

SEQ ID NO: 33682 - DNA, 25 bp, Canis familiaris
agccttcaggacgtgcgcagaaatt

SEQ ID NO: 33683 - DNA, 25 bp, Canis familiaris
agcgctatcggtcatgctagatcaa

SEQ ID NO: 33684 - DNA, 25 bp, Canis familiaris
acgtaagtctcagggtccaggggag

SEQ ID NO: 33685 - DNA, 25 bp, Canis familiaris
accggaggccatggaaggaggtggg

SEQ ID NO: 33686 - DNA, 25 bp, Canis familiaris
acctggcaggcctggtgtagagggg

SEQ ID NO: 33687 - DNA, 25 bp, Canis familiaris
agcctgagacccaggatgggggtga

SEQ ID NO: 33688 - DNA, 25 bp, Canis familiaris
agcgcgagacaccggagtgggacgt

SEQ ID NO: 33689 - DNA, 25 bp, Canis familiaris
agcgccagaagcgacatgctgtggg

SEQ ID NO: 33690 - DNA, 25 bp, Canis familiaris
agcgcagcgagtcaagtgtgcgagg

SEQ ID NO: 33691 - DNA, 25 bp, Canis familiaris
agcgcgtgagcccagagagagagag

SEQ ID NO: 33692 - DNA, 25 bp, Canis familiaris
agcgcatggtccaggaagctgagaa

SEQ ID NO: 33693 - DNA, 25 bp, Canis familiaris
agcgatggcatcatggtggctcgag

SEQ ID NO: 33694 - DNA, 25 bp, Canis familiaris
agcgatggatttccgtctctggtgt

SEQ ID NO: 33695 - DNA, 25 bp, Canis familiaris
agcgcgcgttatgtgtcgaggtgta

SEQ ID NO: 33696 - DNA, 25 bp, Canis familiaris
agcgcaggacctgagtctggtgtta

SEQ ID NO: 33697 - DNA, 25 bp, Canis familiaris
agcccagcacttgaattgttattac

SEQ ID NO: 33698 - DNA, 25 bp, Canis familiaris
agcccagacgttaatgtttatttca

SEQ ID NO: 33699 - DNA, 25 bp, Canis familiaris
agcccacagctgttatgcttttttg

SEQ ID NO: 33700 - DNA, 25 bp, Canis familiaris
agcccaatgtggaacttgatcccag

SEQ ID NO: 33701 - DNA, 25 bp, Canis familiaris
agccctgatgggaagtatctggcca

SEQ ID NO: 33702 - DNA, 25 bp, Canis familiaris
agccggtgggcaagaagcggcgccc

SEQ ID NO: 33703 - DNA, 25 bp, Canis familiaris
acgagcaggttcagaaggggcccct

SEQ ID NO: 33704 - DNA, 25 bp, Canis familiaris
acgatggagttccagacatgaagaa

SEQ ID NO: 33705 - DNA, 25 bp, Canis familiaris
agcctgcgagttggcccaggagagc

SEQ ID NO: 33706 - DNA, 25 bp, Canis familiaris
agcctggactgtgccctgaagaggc

SEQ ID NO: 33707 - DNA, 25 bp, Canis familiaris
agcctggactgtgccctgaagaggc

SEQ ID NO: 33708 - DNA, 25 bp, Canis familiaris
agcctgaacagagccacagaaggac

SEQ ID NO: 33709 - DNA, 25 bp, Canis familiaris
agccccaagcccatcatgaagaagg

SEQ ID NO: 33710 - DNA, 25 bp, Canis familiaris
agccccaggtgccctatgaaaaagc

SEQ ID NO: 33711 - DNA, 25 bp, Canis familiaris
agcccttggtctccgattcaaagga

SEQ ID NO: 33712 - DNA, 25 bp, Canis familiaris
agcccttaatcctagcttaactggt

SEQ ID NO: 33713 - DNA, 25 bp, Canis familiaris
agcgcctttttctgctgacaatgcg

SEQ ID NO: 33714 - DNA, 25 bp, Canis familiaris
agccctatccatattgctgcaaatg

SEQ ID NO: 33715 - DNA, 25 bp, Canis familiaris
agcccatcaccatcttccaggagcg

SEQ ID NO: 33716 - DNA, 25 bp, Canis familiaris
agccgctactcatgattctcggacc

SEQ ID NO: 33717 - DNA, 25 bp, Canis familiaris
agccctcactcatttgtgtgtgtgt

SEQ ID NO: 33718 - DNA, 25 bp, Canis familiaris
agcccagtgctatttgatgactgtt

SEQ ID NO: 33719 - DNA, 25 bp, Canis familiaris
agccctgatgtgtctgtgcatgata

SEQ ID NO: 33720 - DNA, 25 bp, Canis familiaris
agccgtcatcaattgtgctgacaac

SEQ ID NO: 33721 - DNA, 25 bp, Canis familiaris
agccttcatcacctgggcatcagga

SEQ ID NO: 33722 - DNA, 25 bp, Canis familiaris
agccaaatacggggccagagctgga

SEQ ID NO: 33723 - DNA, 25 bp, Canis familiaris
agcgcaaatcactgttcagcaggct

SEQ ID NO: 33724 - DNA, 25 bp, Canis familiaris
acgctaacctgtatcaaaccagggg

SEQ ID NO: 33725 - DNA, 25 bp, Canis familiaris
actgtgaccctggtttactacaagg

SEQ ID NO: 33726 - DNA, 25 bp, Canis familiaris
acatcataccctatggtacaaaagg

SEQ ID NO: 33727 - DNA, 25 bp, Canis familiaris
acgaaaccagattcatgtaccaagg

SEQ ID NO: 33728 - DNA, 25 bp, Canis familiaris
accacataccaaaattagctccaca

SEQ ID NO: 33729 - DNA, 25 bp, Canis familiaris
accaaagacaactattggccgcctg

SEQ ID NO: 33730 - DNA, 25 bp, Canis familiaris
agccaaatgccatcttctggctccc

SEQ ID NO: 33731 - DNA, 25 bp, Canis familiaris
agccgagaggctgtatgcttcatcc

SEQ ID NO: 33732 - DNA, 25 bp, Canis familiaris
agcccagatggcagtatatacacac

SEQ ID NO: 33733 - DNA, 25 bp, Canis familiaris
agcccagatctcagctacattcaac

SEQ ID NO: 33734 - DNA, 25 bp, Canis familiaris
agcccactgccagcaagctgggcac

SEQ ID NO: 33735 - DNA, 25 bp, Canis familiaris
agcctagctaactcagctggcgagc

SEQ ID NO: 33736 - DNA, 25 bp, Canis familiaris
agcgccagctatacgcactgggagg

SEQ ID NO: 33737 - DNA, 25 bp, Canis familiaris
agccctcttgatgctctgtggagga

SEQ ID NO: 33738 - DNA, 25 bp, Canis familiaris
agccccttgcactcaggagaggaga

SEQ ID NO: 33739 - DNA, 25 bp, Canis familiaris
agcgcgcctggaacagggagggata

SEQ ID NO: 33740 - DNA, 25 bp, Canis familiaris
agccgcgtggggcagggcggcaaca

SEQ ID NO: 33741 - DNA, 25 bp, Canis familiaris
agcccatgtgggtggtggtggttca

SEQ ID NO: 33742 - DNA, 25 bp, Canis familiaris
agccctgctggggtgggagtgggac

SEQ ID NO: 33743 - DNA, 25 bp, Canis familiaris
agccccttctcttgtgcaaggagaa

SEQ ID NO: 33744 - DNA, 25 bp, Canis familiaris
agcccccctcggatggagaagatgg

SEQ ID NO: 33745 - DNA, 25 bp, Canis familiaris
agccccagccaaggttgaagcgaag

SEQ ID NO: 33746 - DNA, 25 bp, Canis familiaris
agcccctgtcgactttaactgaagg

SEQ ID NO: 33747 - DNA, 25 bp, Canis familiaris
agccctgctaaactatgtacacgag

SEQ ID NO: 33748 - DNA, 25 bp, Canis familiaris
agcccatctaaaatcagtgcccagg

SEQ ID NO: 33749 - DNA, 25 bp, Canis familiaris
agcctcccaagaatgagtccctgga

SEQ ID NO: 33750 - DNA, 25 bp, Canis familiaris
agcccagcctagctaactcagctgg

SEQ ID NO: 33751 - DNA, 25 bp, Canis familiaris
agcccaggtgatgttgagccagtgc

SEQ ID NO: 33752 - DNA, 25 bp, Canis familiaris
agcgtcactatgacgaggacccgcc

SEQ ID NO: 33753 - DNA, 25 bp, Canis familiaris
agcctccttgcaggtgcagacctgc

SEQ ID NO: 33754 - DNA, 25 bp, Canis familiaris
agcctgcttctttgtcaaactgttc

SEQ ID NO: 33755 - DNA, 25 bp, Canis familiaris
agcccttctaggtctaagcgatctt

SEQ ID NO: 33756 - DNA, 25 bp, Canis familiaris
agccccttcattctaacacattgct

SEQ ID NO: 33757 - DNA, 25 bp, Canis familiaris
agcccagggcttcagacaaagtctg

SEQ ID NO: 33758 - DNA, 25 bp, Canis familiaris
agccctctggtcgggaagaagttgg

SEQ ID NO: 33759 - DNA, 25 bp, Canis familiaris
agcctcctgggcccagtagaagttg

SEQ ID NO: 33760 - DNA, 25 bp, Canis familiaris
agccaaatgtgtcccgtctaagagt

SEQ ID NO: 33761 - DNA, 25 bp, Canis familiaris
agccaagcggacacgactctgagaa

SEQ ID NO: 33762 - DNA, 25 bp, Canis familiaris
agcgcaggagatctacagacctaga

SEQ ID NO: 33763 - DNA, 25 bp, Canis familiaris
agccaaagattgtgaagcctgtgaa

SEQ ID NO: 33764 - DNA, 25 bp, Canis familiaris
agccctacactgagaacacctaaag

SEQ ID NO: 33765 - DNA, 25 bp, Canis familiaris
agccccaacatttgcacacaaaaaa

SEQ ID NO: 33766 - DNA, 25 bp, Canis familiaris
actcaaaccatcacaccagaacaaa

SEQ ID NO: 33767 - DNA, 25 bp, Canis familiaris
agccaagaatacacccagaaaacac

SEQ ID NO: 33768 - DNA, 25 bp, Canis familiaris
accacacagaactcttgggaaacct

SEQ ID NO: 33769 - DNA, 25 bp, Canis familiaris
acacaaagatacactttcaaaatct

SEQ ID NO: 33770 - DNA, 25 bp, Canis familiaris
agcccaagattcacctttacacatt

SEQ ID NO: 33771 - DNA, 25 bp, Canis familiaris
agccctatgttatatttctaccatc

SEQ ID NO: 33772 - DNA, 25 bp, Canis familiaris
agcccactgttatattcacttcttg

SEQ ID NO: 33773 - DNA, 25 bp, Canis familiaris
accacagctttatacccattgttct

SEQ ID NO: 33774 - DNA, 25 bp, Canis familiaris
accaaggttcaaaggccgtgtcatt

SEQ ID NO: 33775 - DNA, 25 bp, Canis familiaris
accaagggatccagcgggcatttat

SEQ ID NO: 33776 - DNA, 25 bp, Canis familiaris
agcccgtcttacacgggcactcaca

SEQ ID NO: 33777 - DNA, 25 bp, Canis familiaris
taccctttaaccaggccaacacctg

SEQ ID NO: 33778 - DNA, 25 bp, Canis familiaris
accactttaccactagcagtcaaca

SEQ ID NO: 33779 - DNA, 25 bp, Canis familiaris
agccactttcccattgaacagctct

SEQ ID NO: 33780 - DNA, 25 bp, Canis familiaris
agcccttcccaaattatacttgtga

SEQ ID NO: 33781 - DNA, 25 bp, Canis familiaris
agcctttcctcaattcaattcaatt

SEQ ID NO: 33782 - DNA, 25 bp, Canis familiaris
agcgcttgttgcctattacagaaat

SEQ ID NO: 33783 - DNA, 25 bp, Canis familiaris
agccttggtgtgtattccaacctcc

SEQ ID NO: 33784 - DNA, 25 bp, Canis familiaris
agccttcgaagttggagcataccac

SEQ ID NO: 33785 - DNA, 25 bp, Canis familiaris
agcgcaccaacagtggcggagaccc

SEQ ID NO: 33786 - DNA, 25 bp, Canis familiaris
agcgccttgacagactggaagccct

SEQ ID NO: 33787 - DNA, 25 bp, Canis familiaris
agccctctgattgacagctacagcc

SEQ ID NO: 33788 - DNA, 25 bp, Canis familiaris
agccgtcgtcatgatcatctaccgg

SEQ ID NO: 33789 - DNA, 25 bp, Canis familiaris
agccccgtcacgaatatcagctggg

SEQ ID NO: 33790 - DNA, 25 bp, Canis familiaris
agccctttgccgtaatcatccaggg

SEQ ID NO: 33791 - DNA, 25 bp, Canis familiaris
agcccctagctcctgaacttggggt

SEQ ID NO: 33792 - DNA, 25 bp, Canis familiaris
acctctacactcccaacgtgaaggt

SEQ ID NO: 33793 - DNA, 25 bp, Canis familiaris
accatctcgacccgaaatagtcggt

SEQ ID NO: 33794 - DNA, 25 bp, Canis familiaris
agcccaggactccagacaagagctt

SEQ ID NO: 33795 - DNA, 25 bp, Canis familiaris
acccaggtagtcgacaacttctttg

SEQ ID NO: 33796 - DNA, 25 bp, Canis familiaris
accacacgatatccgccaaattttg

SEQ ID NO: 33797 - DNA, 25 bp, Canis familiaris
accaatcgtttggccgaacttctca

SEQ ID NO: 33798 - DNA, 25 bp, Canis familiaris
accattaattctcccgaaatcccag

SEQ ID NO: 33799 - DNA, 25 bp, Canis familiaris
agccttgacctctcaggatagaccc

SEQ ID NO: 33800 - DNA, 25 bp, Canis familiaris
agccgtgaccactttagaatgaacc

SEQ ID NO: 33801 - DNA, 25 bp, Canis familiaris
agcgcgctaacagattaacttaagt

SEQ ID NO: 33802 - DNA, 25 bp, Canis familiaris
agccctaccactatgaagcggaagt

SEQ ID NO: 33803 - DNA, 25 bp, Canis familiaris
agcccaacggcgagaagccggacga

SEQ ID NO: 33804 - DNA, 25 bp, Canis familiaris
accaaatggcggatgacgccggtgc

SEQ ID NO: 33805 - DNA, 25 bp, Canis familiaris
agccgaagaaggagcgcggcggccc

SEQ ID NO: 33806 - DNA, 25 bp, Canis familiaris
agcccgaggaagaaggcggcggcgg

SEQ ID NO: 33807 - DNA, 25 bp, Canis familiaris
agccctactgggaggcgcggagggt

SEQ ID NO: 33808 - DNA, 25 bp, Canis familiaris
agcccctggggcatggggagggtct

SEQ ID NO: 33809 - DNA, 25 bp, Canis familiaris
aaacgcacggatctcgggaaggctc

SEQ ID NO: 33810 - DNA, 25 bp, Canis familiaris
aactgacgggtcactgttggacgcc

SEQ ID NO: 33811 - DNA, 25 bp, Canis familiaris
acctagcaaggtgcctttgtacctc

SEQ ID NO: 33812 - DNA, 25 bp, Canis familiaris
acctcctgggatgaactcgtaactc

SEQ ID NO: 33813 - DNA, 25 bp, Canis familiaris
agcccacagggcagaagtcgttgac

SEQ ID NO: 33814 - DNA, 25 bp, Canis familiaris
agcccagctgggacgaggaagtttc

SEQ ID NO: 33815 - DNA, 25 bp, Canis familiaris
agcgccagtgggaggatactgtaca

SEQ ID NO: 33816 - DNA, 25 bp, Canis familiaris
agcgccagtgggagagattagctgt

SEQ ID NO: 33817 - DNA, 25 bp, Canis familiaris
agcccagtgtgggcggatccatctc

SEQ ID NO: 33818 - DNA, 25 bp, Canis familiaris
agcccacttgggcagtgctatctgc

SEQ ID NO: 33819 - DNA, 25 bp, Canis familiaris
agcccacaggggcaagtttccaggt

SEQ ID NO: 33820 - DNA, 25 bp, Canis familiaris
agccaccggagagagagctgtcccg

SEQ ID NO: 33821 - DNA, 25 bp, Canis familiaris
agcccaagggagaaggaatccaaga

SEQ ID NO: 33822 - DNA, 25 bp, Canis familiaris
agcgccagaggccaatccgaataaa

SEQ ID NO: 33823 - DNA, 25 bp, Canis familiaris
agcgccgggctaatcagttgcaaat

SEQ ID NO: 33824 - DNA, 25 bp, Canis familiaris
agcccaagccaaacactacagaata

SEQ ID NO: 33825 - DNA, 25 bp, Canis familiaris
agcccgagccaggagcactagaaag

SEQ ID NO: 33826 - DNA, 25 bp, Canis familiaris
agccctgacgaggagccacaaaggt

SEQ ID NO: 33827 - DNA, 25 bp, Canis familiaris
agcctctacgcatgtccaaaagtga

SEQ ID NO: 33828 - DNA, 25 bp, Canis familiaris
accatctaacattgctgatcaagaa

SEQ ID NO: 33829 - DNA, 25 bp, Canis familiaris
agccctaatctcttcatcaaacaga

SEQ ID NO: 33830 - DNA, 25 bp, Canis familiaris
agcgccagctatgttcaatataaga

SEQ ID NO: 33831 - DNA, 25 bp, Canis familiaris
agcgccactagtgaaaatgatctca

SEQ ID NO: 33832 - DNA, 25 bp, Canis familiaris
agcccagccctgacaaaatgcttca

SEQ ID NO: 33833 - DNA, 25 bp, Canis familiaris
agcccctcatcgacgaaatgcactg

SEQ ID NO: 33834 - DNA, 25 bp, Canis familiaris
agccccgtgcgggagaggcacgact

SEQ ID NO: 33835 - DNA, 25 bp, Canis familiaris
agcccatctctggctgtagttgcac

SEQ ID NO: 33836 - DNA, 25 bp, Canis familiaris
agccctcactcagtgcttattatca

SEQ ID NO: 33837 - DNA, 25 bp, Canis familiaris
agcccttcatcatcttcatcgatga

SEQ ID NO: 33838 - DNA, 25 bp, Canis familiaris
agccacatcctgtactacacagcat

SEQ ID NO: 33839 - DNA, 25 bp, Canis familiaris
agcgcatacgcatgactacattaca

SEQ ID NO: 33840 - DNA, 25 bp, Canis familiaris
agcctgccatgatgttccagtactt

SEQ ID NO: 33841 - DNA, 25 bp, Canis familiaris
agcccctgtgtgtgctcagtgccat

SEQ ID NO: 33842 - DNA, 25 bp, Canis familiaris
agcccctctgtgtgctcagcgccat

SEQ ID NO: 33843 - DNA, 25 bp, Canis familiaris
agcccttctggaactagccgaagag

SEQ ID NO: 33844 - DNA, 25 bp, Canis familiaris
agccctgtcttaaaaaccaatgtct

SEQ ID NO: 33845 - DNA, 25 bp, Canis familiaris
agcccggatccatcaaaggccatga

SEQ ID NO: 33846 - DNA, 25 bp, Canis familiaris
agcccaggaccattatataaccagg

SEQ ID NO: 33847 - DNA, 25 bp, Canis familiaris
agcccaaggcctttattcactgggt

SEQ ID NO: 33848 - DNA, 25 bp, Canis familiaris
agcccaccgactttgaggagctgga

SEQ ID NO: 33849 - DNA, 25 bp, Canis familiaris
agcccccaactcttggacagaggat

SEQ ID NO: 33850 - DNA, 25 bp, Canis familiaris
agccgcctcaatctggtgcaaagga

SEQ ID NO: 33851 - DNA, 25 bp, Canis familiaris
agcgcaagtactctgtgtggatcgg

SEQ ID NO: 33852 - DNA, 25 bp, Canis familiaris
agccctgtgattctgtgtgcatatc

SEQ ID NO: 33853 - DNA, 25 bp, Canis familiaris
agccatttgactcattgctgttccc

SEQ ID NO: 33854 - DNA, 25 bp, Canis familiaris
agccttcaacgtttgctgtcaaagc

SEQ ID NO: 33855 - DNA, 25 bp, Canis familiaris
agcgctattacactaaggtcaataa

SEQ ID NO: 33856 - DNA, 25 bp, Canis familiaris
agcgccttgctccgaatggtaaagg

SEQ ID NO: 33857 - DNA, 25 bp, Canis familiaris
agccctatgtcgcaacttcaaagtc

SEQ ID NO: 33858 - DNA, 25 bp, Canis familiaris
agcccaagtgtgcatcaattgatga

SEQ ID NO: 33859 - DNA, 25 bp, Canis familiaris
agcccaagtgtccatggattaatga

SEQ ID NO: 33860 - DNA, 25 bp, Canis familiaris
agcccatggaccctggatgtgaaat

SEQ ID NO: 33861 - DNA, 25 bp, Canis familiaris
agccctaggccaatgagggacacat

SEQ ID NO: 33862 - DNA, 25 bp, Canis familiaris
agccgcaaaggcagcaggctaccgg

SEQ ID NO: 33863 - DNA, 25 bp, Canis familiaris
agccaacatggagggcatcgtcacc

SEQ ID NO: 33864 - DNA, 25 bp, Canis familiaris
agccaagtggggaggatcagccccc

SEQ ID NO: 33865 - DNA, 25 bp, Canis familiaris
agcgcctgatgttttagcgatcccg

SEQ ID NO: 33866 - DNA, 25 bp, Canis familiaris
agccttagttcattacgatctcctt

SEQ ID NO: 33867 - DNA, 25 bp, Canis familiaris
agccttatttcattactatctcctt

SEQ ID NO: 33868 - DNA, 25 bp, Canis familiaris
agcctcattttcacctatgtgcttt

SEQ ID NO: 33869 - DNA, 25 bp, Canis familiaris
agcccagtcttcatctgtgtgtgag

SEQ ID NO: 33870 - DNA, 25 bp, Canis familiaris
agcctagctggccattctgggaaat

SEQ ID NO: 33871 - DNA, 25 bp, Canis familiaris
agcccatgcgggagctggggcagct

SEQ ID NO: 33872 - DNA, 25 bp, Canis familiaris
agcccagttggggctgggacacagc

SEQ ID NO: 33873 - DNA, 25 bp, Canis familiaris
agcccgttagagaagagtgcagata

SEQ ID NO: 33874 - DNA, 25 bp, Canis familiaris
agcgcgtgtttgactacagtgagta

SEQ ID NO: 33875 - DNA, 25 bp, Canis familiaris
agcgcgagagtctcccagagactac

SEQ ID NO: 33876 - DNA, 25 bp, Canis familiaris
agcctgagaatctgtggaaggtcac

SEQ ID NO: 33877 - DNA, 25 bp, Canis familiaris
agcctgatgactattagcaagcctc

SEQ ID NO: 33878 - DNA, 25 bp, Canis familiaris
agccgagccataaagagcagaccct

SEQ ID NO: 33879 - DNA, 25 bp, Canis familiaris
agccgagaagtctaggcagacagcc

SEQ ID NO: 33880 - DNA, 25 bp, Canis familiaris
agccgaaggtcaccgggagcgagtc

SEQ ID NO: 33881 - DNA, 25 bp, Canis familiaris
agccaaaggactctgcagcagggat

SEQ ID NO: 33882 - DNA, 25 bp, Canis familiaris
accaagagtaatctcctgaggatca

SEQ ID NO: 33883 - DNA, 25 bp, Canis familiaris
accaaaatgtggctcccatggtcaa

SEQ ID NO: 33884 - DNA, 25 bp, Canis familiaris
accaaggagggcgtgcgcgaggtct

SEQ ID NO: 33885 - DNA, 25 bp, Canis familiaris
agcctggctatgtgttccgaggtct

SEQ ID NO: 33886 - DNA, 25 bp, Canis familiaris
agcctgtgccacaggatccgaggct

SEQ ID NO: 33887 - DNA, 25 bp, Canis familiaris
agcccatgtcaccaaaccaagactg

SEQ ID NO: 33888 - DNA, 25 bp, Canis familiaris
agcccaggcctatggaatgagacag

SEQ ID NO: 33889 - DNA, 25 bp, Canis familiaris
accaaggacatatggaatccacagg

SEQ ID NO: 33890 - DNA, 25 bp, Canis familiaris
agcccatacaagtgagaatctccgc

SEQ ID NO: 33891 - DNA, 25 bp, Canis familiaris
agccccatgaagaaggacactcctg

SEQ ID NO: 33892 - DNA, 25 bp, Canis familiaris
agcccacagcaactgaggcagcctc

SEQ ID NO: 33893 - DNA, 25 bp, Canis familiaris
accaaacaatgctggcatgtgtcat

SEQ ID NO: 33894 - DNA, 25 bp, Canis familiaris
accacacagcgatcgaagtacagga

SEQ ID NO: 33895 - DNA, 25 bp, Canis familiaris
agccatctcactttcagtcttagag

SEQ ID NO: 33896 - DNA, 25 bp, Canis familiaris
agccagcacatcacttgtcagtaag

SEQ ID NO: 33897 - DNA, 25 bp, Canis familiaris
agcccccagagagtgtcagatgaat

SEQ ID NO: 33898 - DNA, 25 bp, Canis familiaris
agccctcccagaatgaacagatcat

SEQ ID NO: 33899 - DNA, 25 bp, Canis familiaris
agcccttccgattaaatgtctgata

SEQ ID NO: 33900 - DNA, 25 bp, Canis familiaris
agcccttcacggatactctctgaag

SEQ ID NO: 33901 - DNA, 25 bp, Canis familiaris
agccgctgtgaggagcttgactctt

SEQ ID NO: 33902 - DNA, 25 bp, Canis familiaris
accactgtgagaatgaaactttccc

SEQ ID NO: 33903 - DNA, 25 bp, Canis familiaris
agccactaagagctaacatttacta

SEQ ID NO: 33904 - DNA, 25 bp, Canis familiaris
agccctaagattcaccagcttggta

SEQ ID NO: 33905 - DNA, 25 bp, Canis familiaris
agcccaagagctatgatgcccttag

SEQ ID NO: 33906 - DNA, 25 bp, Canis familiaris
agccaaggacttttcacctcttagt

SEQ ID NO: 33907 - DNA, 25 bp, Canis familiaris
agccataggttttctgaactcccct

SEQ ID NO: 33908 - DNA, 25 bp, Canis familiaris
accggacatttagaagttccactat

SEQ ID NO: 33909 - DNA, 25 bp, Canis familiaris
agcctggccattcttaagttaatta

SEQ ID NO: 33910 - DNA, 25 bp, Canis familiaris
agccttccagttttaggttccattg

SEQ ID NO: 33911 - DNA, 25 bp, Canis familiaris
agcctcccattttatattgtatcct

SEQ ID NO: 33912 - DNA, 25 bp, Canis familiaris
accttgcagtaataatgatgtatca

SEQ ID NO: 33913 - DNA, 25 bp, Canis familiaris
accacctgtgactagttgtgcttcg

SEQ ID NO: 33914 - DNA, 25 bp, Canis familiaris
accggttactcacttatctacgtat

SEQ ID NO: 33915 - DNA, 25 bp, Canis familiaris
acctggtaaccatatacccgtgatg

SEQ ID NO: 33916 - DNA, 25 bp, Canis familiaris
acctgttaaccatgtaccagtgatg

SEQ ID NO: 33917 - DNA, 25 bp, Canis familiaris
agcccttggagccaaggaccgatga

SEQ ID NO: 33918 - DNA, 25 bp, Canis familiaris
agccagcgtcaaggaagcggccgag

SEQ ID NO: 33919 - DNA, 25 bp, Canis familiaris
agccctggcaaccactggtgccagg

SEQ ID NO: 33920 - DNA, 25 bp, Canis familiaris
agccctcagacacggctggtacaac

SEQ ID NO: 33921 - DNA, 25 bp, Canis familiaris
agcccacagatccgggcgtcagaac

SEQ ID NO: 33922 - DNA, 25 bp, Canis familiaris
agcccgcatattaggcgcagataaa

SEQ ID NO: 33923 - DNA, 25 bp, Canis familiaris
agcccacatgatgctcgatacatta

SEQ ID NO: 33924 - DNA, 25 bp, Canis familiaris
agcccaagagccaggacatctacct

SEQ ID NO: 33925 - DNA, 25 bp, Canis familiaris
agcccaaagtcggagaagccgcctc

SEQ ID NO: 33926 - DNA, 25 bp, Canis familiaris
agcccaagtgcggcgaggaggcgct

SEQ ID NO: 33927 - DNA, 25 bp, Canis familiaris
agcccaagatagccatgactcaagg

SEQ ID NO: 33928 - DNA, 25 bp, Canis familiaris
agccctcagatagagacatgcccgc

SEQ ID NO: 33929 - DNA, 25 bp, Canis familiaris
agccccactcagtagcaagttctgc

SEQ ID NO: 33930 - DNA, 25 bp, Canis familiaris
agcccctggagccacaagatgttgg

SEQ ID NO: 33931 - DNA, 25 bp, Canis familiaris
agcccaacgtggccactgtgttggc

SEQ ID NO: 33932 - DNA, 25 bp, Canis familiaris
agcctaccttggccactgatatggg

SEQ ID NO: 33933 - DNA, 25 bp, Canis familiaris
agcccacagcaatgtcctagctgct

SEQ ID NO: 33934 - DNA, 25 bp, Canis familiaris
agccagccacagtgtccacgctggc

SEQ ID NO: 33935 - DNA, 25 bp, Canis familiaris
agccgccacaagggtgacatctgtc

SEQ ID NO: 33936 - DNA, 25 bp, Canis familiaris
agccgccagaagcgacaactgtggg

SEQ ID NO: 33937 - DNA, 25 bp, Canis familiaris
agcctgaaaaggccaccactgagca

SEQ ID NO: 33938 - DNA, 25 bp, Canis familiaris
agcctgagttagctctttctactcc

SEQ ID NO: 33939 - DNA, 25 bp, Canis familiaris
agcccaggtctgctgagttaaccct

SEQ ID NO: 33940 - DNA, 25 bp, Canis familiaris
agcccggatgctaatggttgtactt

SEQ ID NO: 33941 - DNA, 25 bp, Canis familiaris
agccccgtatttgtttatcttgtag

SEQ ID NO: 33942 - DNA, 25 bp, Canis familiaris
agccccaaatttattatcaacctag

SEQ ID NO: 33943 - DNA, 25 bp, Canis familiaris
agccctaacattcagtagttacctt

SEQ ID NO: 33944 - DNA, 25 bp, Canis familiaris
agccctgagacacctagttctagac

SEQ ID NO: 33945 - DNA, 25 bp, Canis familiaris
agcccatcacgctgtggtttgatga

SEQ ID NO: 33946 - DNA, 25 bp, Canis familiaris
agcctgagagcctgtgactggttga

SEQ ID NO: 33947 - DNA, 25 bp, Canis familiaris
agcctgaggagctctgacctggagc

SEQ ID NO: 33948 - DNA, 25 bp, Canis familiaris
agcccttgcagtgctgtccatgggc

SEQ ID NO: 33949 - DNA, 25 bp, Canis familiaris
agcctcttgtgtgtgtgccagaaaa

SEQ ID NO: 33950 - DNA, 25 bp, Canis familiaris
agccctgggtaaatgcccataaaat

SEQ ID NO: 33951 - DNA, 25 bp, Canis familiaris
agccaatttctaactctcctataaa

SEQ ID NO: 33952 - DNA, 25 bp, Canis familiaris
agccctttccatataccttgagaac

SEQ ID NO: 33953 - DNA, 25 bp, Canis familiaris
agccctcttcactggattttatacc

SEQ ID NO: 33954 - DNA, 25 bp, Canis familiaris
agccctttgcaatggctttgaactt

SEQ ID NO: 33955 - DNA, 25 bp, Canis familiaris
agccctttgctcctggaggtaactt

SEQ ID NO: 33956 - DNA, 25 bp, Canis familiaris
acctcagtagctattaaataacatc

SEQ ID NO: 33957 - DNA, 25 bp, Canis familiaris
agccttgagagaacttgaaatccct

SEQ ID NO: 33958 - DNA, 25 bp, Canis familiaris
agcctgggccagatgtgaagacttt

SEQ ID NO: 33959 - DNA, 25 bp, Canis familiaris
agcctggggcagagtgagactccct

SEQ ID NO: 33960 - DNA, 25 bp, Canis familiaris
agcctggcggaaactgaagctccca

SEQ ID NO: 33961 - DNA, 25 bp, Canis familiaris
agccccaggagtcctgaagtcctgc

SEQ ID NO: 33962 - DNA, 25 bp, Canis familiaris
agccccagtggacctaggtggactg

SEQ ID NO: 33963 - DNA, 25 bp, Canis familiaris
agccccaggggcagaggtagacagg

SEQ ID NO: 33964 - DNA, 25 bp, Canis familiaris
agccccaggaccacaggtagatgcc

SEQ ID NO: 33965 - DNA, 25 bp, Canis familiaris
agcccagggaccacaagtgagtcac

SEQ ID NO: 33966 - DNA, 25 bp, Canis familiaris
agcccagaacccagcaaatatgtca

SEQ ID NO: 33967 - DNA, 25 bp, Canis familiaris
agcccagtgacaccatcgagaacgt

SEQ ID NO: 33968 - DNA, 25 bp, Canis familiaris
agccctctgcacctgaagtgaactg

SEQ ID NO: 33969 - DNA, 25 bp, Canis familiaris
agcccatgctccattgagctgcaag

SEQ ID NO: 33970 - DNA, 25 bp, Canis familiaris
agccagcaccagatgcatgagctaa

SEQ ID NO: 33971 - DNA, 25 bp, Canis familiaris
actatgagcaacatgcagatctaca

SEQ ID NO: 33972 - DNA, 25 bp, Canis familiaris
agccatgagtatgctcagcttcaga

SEQ ID NO: 33973 - DNA, 25 bp, Canis familiaris
agcctggcagatttccttaaaaaga

SEQ ID NO: 33974 - DNA, 25 bp, Canis familiaris
agcctggtcaggccatttaaaaata

SEQ ID NO: 33975 - DNA, 25 bp, Canis familiaris
agccatttagggacactaaaggaca

SEQ ID NO: 33976 - DNA, 25 bp, Canis familiaris
accacttgagggggctgactcacag

SEQ ID NO: 33977 - DNA, 25 bp, Canis familiaris
agccctagcggagactgatcgttgc

SEQ ID NO: 33978 - DNA, 25 bp, Canis familiaris
agcccaccggagtaggatcagagtg

SEQ ID NO: 33979 - DNA, 25 bp, Canis familiaris
agccctccagggtggcagatgagct

SEQ ID NO: 33980 - DNA, 25 bp, Canis familiaris
agcccgaagttgtggcagtgcaccc

SEQ ID NO: 33981 - DNA, 25 bp, Canis familiaris
agccgggagtatctggggcaaccag

SEQ ID NO: 33982 - DNA, 25 bp, Canis familiaris
agcctgggaggtcagttggtaggaa

SEQ ID NO: 33983 - DNA, 25 bp, Canis familiaris
agcctgcggggaacgggcttggagc

SEQ ID NO: 33984 - DNA, 25 bp, Canis familiaris
agccgaggcgtgaggctggctttgg

SEQ ID NO: 33985 - DNA, 25 bp, Canis familiaris
agccagacccgttcctgggatagaa

SEQ ID NO: 33986 - DNA, 25 bp, Canis familiaris
agcccacccttatcagagaatcgta

SEQ ID NO: 33987 - DNA, 25 bp, Canis familiaris
agcccagcctctttcagaaaatcca

SEQ ID NO: 33988 - DNA, 25 bp, Canis familiaris
agcccagactctttcaatggtctcc

SEQ ID NO: 33989 - DNA, 25 bp, Canis familiaris
agcccagacacagttctgggccccg

SEQ ID NO: 33990 - DNA, 25 bp, Canis familiaris
agccacaacgagatccggcacatgc

SEQ ID NO: 33991 - DNA, 25 bp, Canis familiaris
agcccagaggtggtccgcaagatgg

SEQ ID NO: 33992 - DNA, 25 bp, Canis familiaris
agccctgggagatcctgcaagagga

SEQ ID NO: 33993 - DNA, 25 bp, Canis familiaris
agcccagggatgtgccaataagaga

SEQ ID NO: 33994 - DNA, 25 bp, Canis familiaris
accacggcgctacccatgaaaatgt

SEQ ID NO: 33995 - DNA, 25 bp, Canis familiaris
accaagggcttggccatcacatttg

SEQ ID NO: 33996 - DNA, 25 bp, Canis familiaris
accaagttgtgggactccagtcggg

SEQ ID NO: 33997 - DNA, 25 bp, Canis familiaris
accaagggtggagatgccccagctg

SEQ ID NO: 33998 - DNA, 25 bp, Canis familiaris
agccaaaggtagacgctcaaccact

SEQ ID NO: 33999 - DNA, 25 bp, Canis familiaris
agccaaacgggtcatcatctccgcc

SEQ ID NO: 34000 - DNA, 25 bp, Canis familiaris
agccaaacgggtcatcatctccgcc

SEQ ID NO: 34001 - DNA, 25 bp, Canis familiaris
agcctatcacggtattcttctacac

SEQ ID NO: 34002 - DNA, 25 bp, Canis familiaris
agcctgtcgagggaactatctaaca

SEQ ID NO: 34003 - DNA, 25 bp, Canis familiaris
agcctaccaaactgcttgataacag

SEQ ID NO: 34004 - DNA, 25 bp, Canis familiaris
agccgcccaaagtgcttgtcagagc

SEQ ID NO: 34005 - DNA, 25 bp, Canis familiaris
agccgtccaaggtgttcgcggcttc

SEQ ID NO: 34006 - DNA, 25 bp, Canis familiaris
agccagcttcattgggggttcgtgc

SEQ ID NO: 34007 - DNA, 25 bp, Canis familiaris
agccagctcccgagcggttgggcct

SEQ ID NO: 34008 - DNA, 25 bp, Canis familiaris
agccgtgaccagaagcgtttgtgaa

SEQ ID NO: 34009 - DNA, 25 bp, Canis familiaris
accaggacctcatcaggtttgcgca

SEQ ID NO: 34010 - DNA, 25 bp, Canis familiaris
acctggcacccaagggctttgacag

SEQ ID NO: 34011 - DNA, 25 bp, Canis familiaris
acctggagaccgtgattttgggcct

SEQ ID NO: 34012 - DNA, 25 bp, Canis familiaris
accttggcaccagaagtttgactta

SEQ ID NO: 34013 - DNA, 25 bp, Canis familiaris
accactgggccagatgactttacat

SEQ ID NO: 34014 - DNA, 25 bp, Canis familiaris
agccactttccctattcttgaaatg

SEQ ID NO: 34015 - DNA, 25 bp, Canis familiaris
agcctccttacctatgctatggatt

SEQ ID NO: 34016 - DNA, 25 bp, Canis familiaris
agccctgcgtgaattcatctttggt

SEQ ID NO: 34017 - DNA, 25 bp, Canis familiaris
agcccatgagtagcctctgtgtggt

SEQ ID NO: 34018 - DNA, 25 bp, Canis familiaris
accactgagcaaactttgtgagcgt

SEQ ID NO: 34019 - DNA, 25 bp, Canis familiaris
agccttgactgcacctgggagtgct

SEQ ID NO: 34020 - DNA, 25 bp, Canis familiaris
agccgtacatccactgctagaagct

SEQ ID NO: 34021 - DNA, 25 bp, Canis familiaris
agccctaaagatttgctataactta

SEQ ID NO: 34022 - DNA, 25 bp, Canis familiaris
agccctgtaaatttgctattttaat

SEQ ID NO: 34023 - DNA, 25 bp, Canis familiaris
agcccgaaagctttccttttgtgat

SEQ ID NO: 34024 - DNA, 25 bp, Canis familiaris
acgctaactactatcctatcttgga

SEQ ID NO: 34025 - DNA, 25 bp, Canis familiaris
agcctaacattctttctctagcagt

SEQ ID NO: 34026 - DNA, 25 bp, Canis familiaris
agccattaatggttctctatgagaa

SEQ ID NO: 34027 - DNA, 25 bp, Canis familiaris
agccactcagggatctcctgaaacc

SEQ ID NO: 34028 - DNA, 25 bp, Canis familiaris
agccccagctaaacaccttagatgc

SEQ ID NO: 34029 - DNA, 25 bp, Canis familiaris
accacagcggaaaccgcttcactcc

SEQ ID NO: 34030 - DNA, 25 bp, Canis familiaris
accaagctcgagacacgcaactcat

SEQ ID NO: 34031 - DNA, 25 bp, Canis familiaris
accacagttggagcaggagcctaca

SEQ ID NO: 34032 - DNA, 25 bp, Canis familiaris
accaccttggacgtatgggatcaca

SEQ ID NO: 34033 - DNA, 25 bp, Canis familiaris
agcccctttcacgtggtggatgata

SEQ ID NO: 34034 - DNA, 25 bp, Canis familiaris
agccccccagcacgggggagcagat

SEQ ID NO: 34035 - DNA, 25 bp, Canis familiaris
agcccgccgcggcggctagaagagc

SEQ ID NO: 34036 - DNA, 25 bp, Canis familiaris
agccgcagcccgttagggagacaag

SEQ ID NO: 34037 - DNA, 25 bp, Canis familiaris
accaacctgcctgaggagaccaatg

SEQ ID NO: 34038 - DNA, 25 bp, Canis familiaris
accaacccacacacagagtaaatct

SEQ ID NO: 34039 - DNA, 25 bp, Canis familiaris
acctacccagagaccagttttcatt

SEQ ID NO: 34040 - DNA, 25 bp, Canis familiaris
accaccccagttccagtgatttatt

SEQ ID NO: 34041 - DNA, 25 bp, Canis familiaris
agcccccaaaattcactgtgtatag

SEQ ID NO: 34042 - DNA, 25 bp, Canis familiaris
agccccgagaacaaatgtgtgctat

SEQ ID NO: 34043 - DNA, 25 bp, Canis familiaris
agccccaagttctcagagtctgatt

SEQ ID NO: 34044 - DNA, 25 bp, Canis familiaris
agcccctgagtttccaggaggcctt

SEQ ID NO: 34045 - DNA, 25 bp, Canis familiaris
agccctctaatatcaaggagctcct

SEQ ID NO: 34046 - DNA, 25 bp, Canis familiaris
agccctttctctggaagagcagctc

SEQ ID NO: 34047 - DNA, 25 bp, Canis familiaris
agcctgttcctttggcgagagctgc

SEQ ID NO: 34048 - DNA, 25 bp, Canis familiaris
agcctggtccactgggaactcaaaa

SEQ ID NO: 34049 - DNA, 25 bp, Canis familiaris
agcctgggcgacagagcgagactcc

SEQ ID NO: 34050 - DNA, 25 bp, Canis familiaris
agccggccaggcatgaggcaggcat

SEQ ID NO: 34051 - DNA, 25 bp, Canis familiaris
agccgagccaggcagctggaggagg

SEQ ID NO: 34052 - DNA, 25 bp, Canis familiaris
agcccctggtggccatgagaggaag

SEQ ID NO: 34053 - DNA, 25 bp, Canis familiaris
agcccctggtggccatgagaggaag

SEQ ID NO: 34054 - DNA, 25 bp, Canis familiaris
acctcctagcggtcaacggtagagc

SEQ ID NO: 34055 - DNA, 25 bp, Canis familiaris
ctgcttctccgtggtgatttggttg

SEQ ID NO: 34056 - DNA, 25 bp, Canis familiaris
agcctctatggatggacaatgggga

SEQ ID NO: 34057 - DNA, 25 bp, Canis familiaris
acctctcacgaaggaaaggaggaat

SEQ ID NO: 34058 - DNA, 25 bp, Canis familiaris
agcctcacccaagcacaagcgggtg

SEQ ID NO: 34059 - DNA, 25 bp, Canis familiaris
agccctctgcgctcaaaagctgagg

SEQ ID NO: 34060 - DNA, 25 bp, Canis familiaris
agcccctgccaccaaaggagaatgc

SEQ ID NO: 34061 - DNA, 25 bp, Canis familiaris
acctcctccatcgcaaggaaagggg

SEQ ID NO: 34062 - DNA, 25 bp, Canis familiaris
agcccttcgacaggctcaggaagag

SEQ ID NO: 34063 - DNA, 25 bp, Canis familiaris
agccctgcttaatctatgtacagag

SEQ ID NO: 34064 - DNA, 25 bp, Canis familiaris
agccctgccttgacagcgtaacagg

SEQ ID NO: 34065 - DNA, 25 bp, Canis familiaris
agccctcctatgacactgaaacaga

SEQ ID NO: 34066 - DNA, 25 bp, Canis familiaris
agcccctgaatgacagtaacgagag

SEQ ID NO: 34067 - DNA, 25 bp, Canis familiaris
agcccctaagtcattgattagaggc

SEQ ID NO: 34068 - DNA, 25 bp, Canis familiaris
agcccccgagtgatcgatctgtggg

SEQ ID NO: 34069 - DNA, 25 bp, Canis familiaris
agcctctccagtggttctgaatgag

SEQ ID NO: 34070 - DNA, 25 bp, Canis familiaris
agcctctctcgtcttgtgttgaggg

SEQ ID NO: 34071 - DNA, 25 bp, Canis familiaris
agccaactcggtttgcttttgtgga

SEQ ID NO: 34072 - DNA, 25 bp, Canis familiaris
accacatgcccgggagcttttggtg

SEQ ID NO: 34073 - DNA, 25 bp, Canis familiaris
agccacacctgccaaggactttggt

SEQ ID NO: 34074 - DNA, 25 bp, Canis familiaris
accaaatctgctcaaattgcgggtc

SEQ ID NO: 34075 - DNA, 25 bp, Canis familiaris
accaatgtctgtaaagtgctctgag

SEQ ID NO: 34076 - DNA, 25 bp, Canis familiaris
agcctctgcatcctaaacatgctct

SEQ ID NO: 34077 - DNA, 25 bp, Canis familiaris
agccttctcaaatactgctctcatt

SEQ ID NO: 34078 - DNA, 25 bp, Canis familiaris
acctttcctattttctggctgaagc

SEQ ID NO: 34079 - DNA, 25 bp, Canis familiaris
agccttttgctcatattctgccaaa

SEQ ID NO: 34080 - DNA, 25 bp, Canis familiaris
agccattttcatatgtcactgccac

SEQ ID NO: 34081 - DNA, 25 bp, Canis familiaris
agcctcatggtcttttccagaatct

SEQ ID NO: 34082 - DNA, 25 bp, Canis familiaris
agccctggtgctgtgttagatagtt

SEQ ID NO: 34083 - DNA, 25 bp, Canis familiaris
agcctgagggctggtttggagtgtg

SEQ ID NO: 34084 - DNA, 25 bp, Canis familiaris
agcctgtcgatggggttgggagtga

SEQ ID NO: 34085 - DNA, 25 bp, Canis familiaris
agccccagtctgcgttgggcatgga

SEQ ID NO: 34086 - DNA, 25 bp, Canis familiaris
agccctgagttgggttctatgctgg

SEQ ID NO: 34087 - DNA, 25 bp, Canis familiaris
agccctgcaggcaggttgccaggct

SEQ ID NO: 34088 - DNA, 25 bp, Canis familiaris
agccgcatgaaccggatgtctcggc

SEQ ID NO: 34089 - DNA, 25 bp, Canis familiaris
agccagagatgataggatgcccttt

SEQ ID NO: 34090 - DNA, 25 bp, Canis familiaris
agccacaacacattgaagctccgtt

SEQ ID NO: 34091 - DNA, 25 bp, Canis familiaris
agccaaaaaggctaagccagcatct

SEQ ID NO: 34092 - DNA, 25 bp, Canis familiaris
accaataaagactaaccaagcctca

SEQ ID NO: 34093 - DNA, 25 bp, Canis familiaris
aaattaaatacacacccaactcacg

SEQ ID NO: 34094 - DNA, 25 bp, Canis familiaris
accttttctacataccaaacaccag

SEQ ID NO: 34095 - DNA, 25 bp, Canis familiaris
agccgattaaaacacccataagcca

SEQ ID NO: 34096 - DNA, 25 bp, Canis familiaris
agccgtcgtaaacggcactctaagg

SEQ ID NO: 34097 - DNA, 25 bp, Canis familiaris
accgtcggaaagtgagtctatgagt

SEQ ID NO: 34098 - DNA, 25 bp, Canis familiaris
agccgacgggctttaattctatgag

SEQ ID NO: 34099 - DNA, 25 bp, Canis familiaris
accacacgggctcctatacttaggt

SEQ ID NO: 34100 - DNA, 25 bp, Canis familiaris
accaacggtgtctaaagctctgagt

SEQ ID NO: 34101 - DNA, 25 bp, Canis familiaris
accaaccaactctagaccactgggt

SEQ ID NO: 34102 - DNA, 25 bp, Canis familiaris
agcctttgcagagtcaagctccact

SEQ ID NO: 34103 - DNA, 25 bp, Canis familiaris
agcccgtgagcatcaacatcacctt

SEQ ID NO: 34104 - DNA, 25 bp, Canis familiaris
agcctcagtgaggagcaggtgcagc

SEQ ID NO: 34105 - DNA, 25 bp, Canis familiaris
agcctcagaagttggtgctctgccg

SEQ ID NO: 34106 - DNA, 25 bp, Canis familiaris
agccatccaggctgtgctgtccctg

SEQ ID NO: 34107 - DNA, 25 bp, Canis familiaris
accaactgagcattggcaaccctgt

SEQ ID NO: 34108 - DNA, 25 bp, Canis familiaris
accaacatggccatgaccaacgggc

SEQ ID NO: 34109 - DNA, 25 bp, Canis familiaris
accaatcagggtagaccgagatggg

SEQ ID NO: 34110 - DNA, 25 bp, Canis familiaris
agccaccggcgggaccagaagtggc

SEQ ID NO: 34111 - DNA, 25 bp, Canis familiaris
agccaccctgctgctaaggggtgcg

SEQ ID NO: 34112 - DNA, 25 bp, Canis familiaris
agccccactgcttcagggcaagggg

SEQ ID NO: 34113 - DNA, 25 bp, Canis familiaris
agcctcgggtcccaggaagtgggca

SEQ ID NO: 34114 - DNA, 25 bp, Canis familiaris
agcctggaggccctggagggtggcc

SEQ ID NO: 34115 - DNA, 25 bp, Canis familiaris
agcctggacagtcctggaggaggtc

SEQ ID NO: 34116 - DNA, 25 bp, Canis familiaris
agccagccaaggttctgaggggccc

SEQ ID NO: 34117 - DNA, 25 bp, Canis familiaris
agccacccatgatattgaagagacc

SEQ ID NO: 34118 - DNA, 25 bp, Canis familiaris
agccacaccaaaggcgagcagggcc

SEQ ID NO: 34119 - DNA, 25 bp, Canis familiaris
accagatgatccagcgggaggacca

SEQ ID NO: 34120 - DNA, 25 bp, Canis familiaris
accaagttcatcccaaaggtcgttg

SEQ ID NO: 34121 - DNA, 25 bp, Canis familiaris
accacgtttccggagagtttgccat

SEQ ID NO: 34122 - DNA, 25 bp, Canis familiaris
accaccttggccagaagttgtcctg

SEQ ID NO: 34123 - DNA, 25 bp, Canis familiaris
accacctttgtcacagacttctaca

SEQ ID NO: 34124 - DNA, 25 bp, Canis familiaris
accaccttacatgaagtatttcaca

SEQ ID NO: 34125 - DNA, 25 bp, Canis familiaris
accaatcgtactactagtatttgct

SEQ ID NO: 34126 - DNA, 25 bp, Canis familiaris
agcctttgtcttactattattgttg

SEQ ID NO: 34127 - DNA, 25 bp, Canis familiaris
agccttcgtttcctcatttaagatg

SEQ ID NO: 34128 - DNA, 25 bp, Canis familiaris
agccttagtgatacagttgtttaac

SEQ ID NO: 34129 - DNA, 25 bp, Canis familiaris
agccagccaggcatacctgtgtgtg

SEQ ID NO: 34130 - DNA, 25 bp, Canis familiaris
agccgcgagcagctcagcggctggt

SEQ ID NO: 34131 - DNA, 25 bp, Canis familiaris
agcccgtgaagttgcgtgtgcgtgg

SEQ ID NO: 34132 - DNA, 25 bp, Canis familiaris
agccacctaaattttgatcgttgac

SEQ ID NO: 34133 - DNA, 25 bp, Canis familiaris
agcctcctagtttattgactgcctt

SEQ ID NO: 34134 - DNA, 25 bp, Canis familiaris
agccccttcttattgagacgtgcat

SEQ ID NO: 34135 - DNA, 25 bp, Canis familiaris
agccagacctgcttctaggacagta

SEQ ID NO: 34136 - DNA, 25 bp, Canis familiaris
agccaatcacgctctagttagccaa

SEQ ID NO: 34137 - DNA, 25 bp, Canis familiaris
agccaaactgaacacttgatctgaa

SEQ ID NO: 34138 - DNA, 25 bp, Canis familiaris
accaaactggcccacttgattagga

SEQ ID NO: 34139 - DNA, 25 bp, Canis familiaris
acctcacctggtgtttgcaatcgga

SEQ ID NO: 34140 - DNA, 25 bp, Canis familiaris
agccatacctggatgctttcacgga

SEQ ID NO: 34141 - DNA, 25 bp, Canis familiaris
agccatttaggatttcttacattga

SEQ ID NO: 34142 - DNA, 25 bp, Canis familiaris
agcctgtgtttagtatttacattgg

SEQ ID NO: 34143 - DNA, 25 bp, Canis familiaris
agcctgtgtttagtaatttacactt

SEQ ID NO: 34144 - DNA, 25 bp, Canis familiaris
agcctcttatgtttttttatgcctt

SEQ ID NO: 34145 - DNA, 25 bp, Canis familiaris
agcctttgtgcttttttgtcatgtt

SEQ ID NO: 34146 - DNA, 25 bp, Canis familiaris
agcctctatgtgggtttagtgcagt

SEQ ID NO: 34147 - DNA, 25 bp, Canis familiaris
agccattagtgacactatagacagt

SEQ ID NO: 34148 - DNA, 25 bp, Canis familiaris
agcctccatctgccaagcttaaaat

SEQ ID NO: 34149 - DNA, 25 bp, Canis familiaris
agccccagtgcctatcttagaagga

SEQ ID NO: 34150 - DNA, 25 bp, Canis familiaris
agccgccgtgcttcaaatagagagt

SEQ ID NO: 34151 - DNA, 25 bp, Canis familiaris
agccgccttgtgtatcactgaggag

SEQ ID NO: 34152 - DNA, 25 bp, Canis familiaris
agccccatcttggtctcgcaggggc

SEQ ID NO: 34153 - DNA, 25 bp, Canis familiaris
agccccatagcgttcttgagctggg

SEQ ID NO: 34154 - DNA, 25 bp, Canis familiaris
accaagatacagatcatcaactggc

SEQ ID NO: 34155 - DNA, 25 bp, Canis familiaris
agccgggcaagtacagccagctggt

SEQ ID NO: 34156 - DNA, 25 bp, Canis familiaris
agccttccatttacatccactggat

SEQ ID NO: 34157 - DNA, 25 bp, Canis familiaris
agccataccagtgccaatactgcga

SEQ ID NO: 34158 - DNA, 25 bp, Canis familiaris
agccaacacgtgctcaaacatgctg

SEQ ID NO: 34159 - DNA, 25 bp, Canis familiaris
agccgactctagcgaaagcatgaca

SEQ ID NO: 34160 - DNA, 25 bp, Canis familiaris
agccgaatctcgtgatgaatcatca

SEQ ID NO: 34161 - DNA, 25 bp, Canis familiaris
agcctatcctggtgatgtgttctac

SEQ ID NO: 34162 - DNA, 25 bp, Canis familiaris
agcctcacctgcaaatgttgactct

SEQ ID NO: 34163 - DNA, 25 bp, Canis familiaris
agcctcgacgtccattgatgtgtgt

SEQ ID NO: 34164 - DNA, 25 bp, Canis familiaris
agcccgcagcttacatgtgtgcttt

SEQ ID NO: 34165 - DNA, 25 bp, Canis familiaris
agccggtgttcttatggtctgttgg

SEQ ID NO: 34166 - DNA, 25 bp, Canis familiaris
agcccgcttttgcagttctgggctc

SEQ ID NO: 34167 - DNA, 25 bp, Canis familiaris
acccacccttgtggttcattggctc

SEQ ID NO: 34168 - DNA, 25 bp, Canis familiaris
agccccaccttgacaggctgagggc

SEQ ID NO: 34169 - DNA, 25 bp, Canis familiaris
accaccacctagagcctgaggaggt

SEQ ID NO: 34170 - DNA, 25 bp, Canis familiaris
accgaccctcaaggcctatgtaggg

SEQ ID NO: 34171 - DNA, 25 bp, Canis familiaris
acccggcccaagcacacagtagggc

SEQ ID NO: 34172 - DNA, 25 bp, Canis familiaris
acccagacccgtgaccgattgggag

SEQ ID NO: 34173 - DNA, 25 bp, Canis familiaris
accaagacccagactgacctacatg

SEQ ID NO: 34174 - DNA, 25 bp, Canis familiaris
accaatgagttctacatgtcctatc

SEQ ID NO: 34175 - DNA, 25 bp, Canis familiaris
accaatgtcgtctactatttaccgg

SEQ ID NO: 34176 - DNA, 25 bp, Canis familiaris
accagaccctttcatttgtcctggg

SEQ ID NO: 34177 - DNA, 25 bp, Canis familiaris
accagggcttttctctgtgaactgt

SEQ ID NO: 34178 - DNA, 25 bp, Canis familiaris
accaagccttaatgactgtacctgt

SEQ ID NO: 34179 - DNA, 25 bp, Canis familiaris
accaacagttagtcaacttgcacca

SEQ ID NO: 34180 - DNA, 25 bp, Canis familiaris
accaagcatctgttaaaccctccag

SEQ ID NO: 34181 - DNA, 25 bp, Canis familiaris
agccagagtcgtagaaccagcttcc

SEQ ID NO: 34182 - DNA, 25 bp, Canis familiaris
agccagagggcttggtttgactcct

SEQ ID NO: 34183 - DNA, 25 bp, Canis familiaris
agccaagggttgatgcatctaagcc

SEQ ID NO: 34184 - DNA, 25 bp, Canis familiaris
accacaggtttggctctcaaagcca

SEQ ID NO: 34185 - DNA, 25 bp, Canis familiaris
accacatggtagcttcaacaaccat

SEQ ID NO: 34186 - DNA, 25 bp, Canis familiaris
accacgctaaccgtaatcaaccatg

SEQ ID NO: 34187 - DNA, 25 bp, Canis familiaris
accactggatacccttactgaacag

SEQ ID NO: 34188 - DNA, 25 bp, Canis familiaris
accaatctcaccctcttgaggacaa

SEQ ID NO: 34189 - DNA, 25 bp, Canis familiaris
accaagccacctatagagatgccta

SEQ ID NO: 34190 - DNA, 25 bp, Canis familiaris
accaagccaaccacagggcagcaga

SEQ ID NO: 34191 - DNA, 25 bp, Canis familiaris
accaggaacacccacggagaagact

SEQ ID NO: 34192 - DNA, 25 bp, Canis familiaris
accgtcgacaacccaggagacaact

SEQ ID NO: 34193 - DNA, 25 bp, Canis familiaris
atggtcatttcttcaaagaaggcat

SEQ ID NO: 34194 - DNA, 25 bp, Canis familiaris
aacttctgtatcgtgaagaaaacca

SEQ ID NO: 34195 - DNA, 25 bp, Canis familiaris
agcctcctgtacttggtgacaaacc

SEQ ID NO: 34196 - DNA, 25 bp, Canis familiaris
agcctactgtatttctgtgtatata

SEQ ID NO: 34197 - DNA, 25 bp, Canis familiaris
agcctactctatactcctgtaaatg

SEQ ID NO: 34198 - DNA, 25 bp, Canis familiaris
agcccctctatcacatatgatatca

SEQ ID NO: 34199 - DNA, 25 bp, Canis familiaris
agccactaccatgcagcatataaac

SEQ ID NO: 34200 - DNA, 25 bp, Canis familiaris
agccatctactctgagcaggacacg

SEQ ID NO: 34201 - DNA, 25 bp, Canis familiaris
acctgtacttcacgcagttcaaggc

SEQ ID NO: 34202 - DNA, 25 bp, Canis familiaris
agccggaactgctcgttcaggacat

SEQ ID NO: 34203 - DNA, 25 bp, Canis familiaris
cgccgtacccaactattcaggaata

SEQ ID NO: 34204 - DNA, 25 bp, Canis familiaris
accagtaccccgaagtcagtaatat

SEQ ID NO: 34205 - DNA, 25 bp, Canis familiaris
accagtagccaaagctgcagctctg

SEQ ID NO: 34206 - DNA, 25 bp, Canis familiaris
accagcttcacttagtagcctacta

SEQ ID NO: 34207 - DNA, 25 bp, Canis familiaris
agccagcattcattaagaacctact

SEQ ID NO: 34208 - DNA, 25 bp, Canis familiaris
agccgctaaataaaatctttgcatt

SEQ ID NO: 34209 - DNA, 25 bp, Canis familiaris
agccttaaagtattagcatgttgtt

SEQ ID NO: 34210 - DNA, 25 bp, Canis familiaris
agccttcatcgagactagactttct

SEQ ID NO: 34211 - DNA, 25 bp, Canis familiaris
agccattagagagcctaattattcc

SEQ ID NO: 34212 - DNA, 25 bp, Canis familiaris
agcctgatggattccctggtttttc

SEQ ID NO: 34213 - DNA, 25 bp, Canis familiaris
agccaggcgatctcctgatggactt

SEQ ID NO: 34214 - DNA, 25 bp, Canis familiaris
agcctgactggggacgatggcacct

SEQ ID NO: 34215 - DNA, 25 bp, Canis familiaris
agccgactgtcagaggtgcaggcct

SEQ ID NO: 34216 - DNA, 25 bp, Canis familiaris
agccaatgtgtcacagagccaaggc

SEQ ID NO: 34217 - DNA, 25 bp, Canis familiaris
agccaatgtactaccacgcaagaat

SEQ ID NO: 34218 - DNA, 25 bp, Canis familiaris
acgaagctcctacatccagagactg

SEQ ID NO: 34219 - DNA, 25 bp, Canis familiaris
accaaccgaagatttcaagatgctg

SEQ ID NO: 34220 - DNA, 25 bp, Canis familiaris
accagatcactatgttgtagttggg

SEQ ID NO: 34221 - DNA, 25 bp, Canis familiaris
agccgatcccggctgtgagatgtgc

SEQ ID NO: 34222 - DNA, 25 bp, Canis familiaris
agcctattcccaagatctcagagtc

SEQ ID NO: 34223 - DNA, 25 bp, Canis familiaris
agcctttctgccataccaggaatct

SEQ ID NO: 34224 - DNA, 25 bp, Canis familiaris
agccttgtctgagaaccaggtccct

SEQ ID NO: 34225 - DNA, 25 bp, Canis familiaris
agccttactatgtgacagggccctt

SEQ ID NO: 34226 - DNA, 25 bp, Canis familiaris
accatttctaagcacatgttcccta

SEQ ID NO: 34227 - DNA, 25 bp, Canis familiaris
agccttttcaagctggagacctgct

SEQ ID NO: 34228 - DNA, 25 bp, Canis familiaris
agcctctcatttaaggaggaccttc

SEQ ID NO: 34229 - DNA, 25 bp, Canis familiaris
agcctactcttcaaagctggccctt

SEQ ID NO: 34230 - DNA, 25 bp, Canis familiaris
agccagatttgaccaagctgcaccc

SEQ ID NO: 34231 - DNA, 25 bp, Canis familiaris
agccagatttaccaaggccatgctc

SEQ ID NO: 34232 - DNA, 25 bp, Canis familiaris
agccagatgtctgcaaaagcaacca

SEQ ID NO: 34233 - DNA, 25 bp, Canis familiaris
agccagctgcctgaaagacactctc

SEQ ID NO: 34234 - DNA, 25 bp, Canis familiaris
agccattggctacaaacaactccct

SEQ ID NO: 34235 - DNA, 25 bp, Canis familiaris
agccttatctagaatataacaccgc

SEQ ID NO: 34236 - DNA, 25 bp, Canis familiaris
agccttactcagttgatagacccct

SEQ ID NO: 34237 - DNA, 25 bp, Canis familiaris
accaatgatcacgttgggaccctcc

SEQ ID NO: 34238 - DNA, 25 bp, Canis familiaris
accagctgtaccattgaaaccacct

SEQ ID NO: 34239 - DNA, 25 bp, Canis familiaris
accaattacggttacaatgccaatt

SEQ ID NO: 34240 - DNA, 25 bp, Canis familiaris
accaagttcaagttcagcacagccc

SEQ ID NO: 34241 - DNA, 25 bp, Canis familiaris
accagaactcaactctactagcacc

SEQ ID NO: 34242 - DNA, 25 bp, Canis familiaris
agccaaggtcaccatttcattccac

SEQ ID NO: 34243 - DNA, 25 bp, Canis familiaris
accacaggcatcccagaatcatctt

SEQ ID NO: 34244 - DNA, 25 bp, Canis familiaris
accattgccatggacgtaattcata

SEQ ID NO: 34245 - DNA, 25 bp, Canis familiaris
agccttgcctggggtagtactgcaa

SEQ ID NO: 34246 - DNA, 25 bp, Canis familiaris
agccgggaggggcagtgcatgctga

SEQ ID NO: 34247 - DNA, 25 bp, Canis familiaris
agcctgaggaggtcgccaggctctg

SEQ ID NO: 34248 - DNA, 25 bp, Canis familiaris
agcctatgacagatggccagcctcc

SEQ ID NO: 34249 - DNA, 25 bp, Canis familiaris
agccttgaattgggctctgcactca

SEQ ID NO: 34250 - DNA, 25 bp, Canis familiaris
agccatggaaatgagttcatctcgt

SEQ ID NO: 34251 - DNA, 25 bp, Canis familiaris
agccacatgaaaatagtgccttctg

SEQ ID NO: 34252 - DNA, 25 bp, Canis familiaris
accaaaataatagtgctgtgtggtg

SEQ ID NO: 34253 - DNA, 25 bp, Canis familiaris
agccaacgttcttgctgtgtgtgcc

SEQ ID NO: 34254 - DNA, 25 bp, Canis familiaris
agccaacgtgtaatgattgcttgct

SEQ ID NO: 34255 - DNA, 25 bp, Canis familiaris
agccaacgagttgtatgtctcccgg

SEQ ID NO: 34256 - DNA, 25 bp, Canis familiaris
accaaccagtctgggaactcctgct

SEQ ID NO: 34257 - DNA, 25 bp, Canis familiaris
accaaagtgcctgacacattccgtt

SEQ ID NO: 34258 - DNA, 25 bp, Canis familiaris
accaagagctcctgagcacttgccc

SEQ ID NO: 34259 - DNA, 25 bp, Canis familiaris
accaaaattcaaggcacaatccctt

SEQ ID NO: 34260 - DNA, 25 bp, Canis familiaris
accagtggtatcaaccagttccttt

SEQ ID NO: 34261 - DNA, 25 bp, Canis familiaris
accagggcctcaaaagttctcaatt

SEQ ID NO: 34262 - DNA, 25 bp, Canis familiaris
agccagggtctagttcagtgttctt

SEQ ID NO: 34263 - DNA, 25 bp, Canis familiaris
agccaggttcacatatactgttctg

SEQ ID NO: 34264 - DNA, 25 bp, Canis familiaris
agccgtcttcagattactatgtgtg

SEQ ID NO: 34265 - DNA, 25 bp, Canis familiaris
accagtctataccatgctactcatg

SEQ ID NO: 34266 - DNA, 25 bp, Canis familiaris
accagtctgaacctctcactggcat

SEQ ID NO: 34267 - DNA, 25 bp, Canis familiaris
accagctgggcaacatctcccagcc

SEQ ID NO: 34268 - DNA, 25 bp, Canis familiaris
agccactgagccaggctcaaggccg

SEQ ID NO: 34269 - DNA, 25 bp, Canis familiaris
agccttgccgctgatgtcaagtgac

SEQ ID NO: 34270 - DNA, 25 bp, Canis familiaris
agccattcccatccagatcaatgtg

SEQ ID NO: 34271 - DNA, 25 bp, Canis familiaris
agccttcctgcagcatgtggtgctg

SEQ ID NO: 34272 - DNA, 25 bp, Canis familiaris
agccttccgcagagctgatggcgaa

SEQ ID NO: 34273 - DNA, 25 bp, Canis familiaris
agccttcctggctcagagcagaaag

SEQ ID NO: 34274 - DNA, 25 bp, Canis familiaris
agcctctgtctggcgcacagagctg

SEQ ID NO: 34275 - DNA, 25 bp, Canis familiaris
agcctcctgctgacagccatatgag

SEQ ID NO: 34276 - DNA, 25 bp, Canis familiaris
agcctcttgctttccatagaacaag

SEQ ID NO: 34277 - DNA, 25 bp, Canis familiaris
agcctcctgcattaccagcagaaag

SEQ ID NO: 34278 - DNA, 25 bp, Canis familiaris
acctcgctgctggtgacacagaacg

SEQ ID NO: 34279 - DNA, 25 bp, Canis familiaris
accattgctgcttgtgtgcacacag

SEQ ID NO: 34280 - DNA, 25 bp, Canis familiaris
agccttctgtatgtccaagattagg

SEQ ID NO: 34281 - DNA, 25 bp, Canis familiaris
agccattcttcaggtcgtagcattt

SEQ ID NO: 34282 - DNA, 25 bp, Canis familiaris
agcctgtgctatacaatctgaatgt

SEQ ID NO: 34283 - DNA, 25 bp, Canis familiaris
agcctggctcaatatctaatcaatg

SEQ ID NO: 34284 - DNA, 25 bp, Canis familiaris
agcctggctcaatatctaatcaatg

SEQ ID NO: 34285 - DNA, 25 bp, Canis familiaris
agcctggacacgcagtacagcaagg

SEQ ID NO: 34286 - DNA, 25 bp, Canis familiaris
acctgaagcctccagaagcacaaga

SEQ ID NO: 34287 - DNA, 25 bp, Canis familiaris
accatacagcctctaaccaaactag

SEQ ID NO: 34288 - DNA, 25 bp, Canis familiaris
accacactggcttctatagctgcaa

SEQ ID NO: 34289 - DNA, 25 bp, Canis familiaris
accatcaatggtcataacgcagaag

SEQ ID NO: 34290 - DNA, 25 bp, Canis familiaris
agccacacaggatcaacacggtcgt

SEQ ID NO: 34291 - DNA, 25 bp, Canis familiaris
accaccattgcatacagcatccggg

SEQ ID NO: 34292 - DNA, 25 bp, Canis familiaris
accaccaatgcaggagtgctttcgt

SEQ ID NO: 34293 - DNA, 25 bp, Canis familiaris
agccaccctggccaagagatttgct

SEQ ID NO: 34294 - DNA, 25 bp, Canis familiaris
accacatccgtgcccggaaatttcg

SEQ ID NO: 34295 - DNA, 25 bp, Canis familiaris
accacatcaatgcctctaggatttt

SEQ ID NO: 34296 - DNA, 25 bp, Canis familiaris
accactcactgcccatgagtagcct

SEQ ID NO: 34297 - DNA, 25 bp, Canis familiaris
agccactcattagctgtgtgactct

SEQ ID NO: 34298 - DNA, 25 bp, Canis familiaris
agccaccacacagcctgggtggccc

SEQ ID NO: 34299 - DNA, 25 bp, Canis familiaris
agccaccagcaaccactgggtggtc

SEQ ID NO: 34300 - DNA, 25 bp, Canis familiaris
agccacgaacagccctggtggaggc

SEQ ID NO: 34301 - DNA, 25 bp, Canis familiaris
acctcagaacagctggactgggcag

SEQ ID NO: 34302 - DNA, 25 bp, Canis familiaris
accacataggacctggtggtgacac

SEQ ID NO: 34303 - DNA, 25 bp, Canis familiaris
aaaataactttgagtgaacacttct

SEQ ID NO: 34304 - DNA, 25 bp, Canis familiaris
accaaaatttttatcaacagctgtt

SEQ ID NO: 34305 - DNA, 25 bp, Canis familiaris
accaaagttcttaattgccaagaat

SEQ ID NO: 34306 - DNA, 25 bp, Canis familiaris
accagaagggcttaaatccatgaaa

SEQ ID NO: 34307 - DNA, 25 bp, Canis familiaris
accaacagtggcggagacccgacaa

SEQ ID NO: 34308 - DNA, 25 bp, Canis familiaris
accaacatgttctgaactcccattc

SEQ ID NO: 34309 - DNA, 25 bp, Canis familiaris
accaaaattctaaactcccatccag

SEQ ID NO: 34310 - DNA, 25 bp, Canis familiaris
accatcaacattcacaaacgtatcc

SEQ ID NO: 34311 - DNA, 25 bp, Canis familiaris
agccaaattgaatccacaagttcca

SEQ ID NO: 34312 - DNA, 25 bp, Canis familiaris
agccaacattattggcacacatatt

SEQ ID NO: 34313 - DNA, 25 bp, Canis familiaris
agccaccatctgttccatatcagaa

SEQ ID NO: 34314 - DNA, 25 bp, Canis familiaris
agccatctccatgctaacatcagaa

SEQ ID NO: 34315 - DNA, 25 bp, Canis familiaris
accactgctcatactaccataaaga

SEQ ID NO: 34316 - DNA, 25 bp, Canis familiaris
accacgccaggcttcttgataagct

SEQ ID NO: 34317 - DNA, 25 bp, Canis familiaris
agcctcccaagcctttgagcaagat

SEQ ID NO: 34318 - DNA, 25 bp, Canis familiaris
accatctccaagccttgtggcaaac

SEQ ID NO: 34319 - DNA, 25 bp, Canis familiaris
acctcttctagacatgccaaatact

SEQ ID NO: 34320 - DNA, 25 bp, Canis familiaris
agccatttctggcccattaaacgct

SEQ ID NO: 34321 - DNA, 25 bp, Canis familiaris
agccatcattggtgcatcattatca

SEQ ID NO: 34322 - DNA, 25 bp, Canis familiaris
accaaagcactacatcgacagccag

SEQ ID NO: 34323 - DNA, 25 bp, Canis familiaris
acccggcccaggtgggcacagggag

SEQ ID NO: 34324 - DNA, 25 bp, Canis familiaris
accacccccaatgtcaggatcggga

SEQ ID NO: 34325 - DNA, 25 bp, Canis familiaris
accacaacccctctaggagcagtgg

SEQ ID NO: 34326 - DNA, 25 bp, Canis familiaris
agccagtacctgagagtaggaaggc

SEQ ID NO: 34327 - DNA, 25 bp, Canis familiaris
agccagtacccacagcataaatagg

SEQ ID NO: 34328 - DNA, 25 bp, Canis familiaris
agccagctagtcaaatagatatgga

SEQ ID NO: 34329 - DNA, 25 bp, Canis familiaris
accacgtgccaaagtgatatgggta

SEQ ID NO: 34330 - DNA, 25 bp, Canis familiaris
accacactccagacctactgagtta

SEQ ID NO: 34331 - DNA, 25 bp, Canis familiaris
accacattccagaattgtccagcct

SEQ ID NO: 34332 - DNA, 25 bp, Canis familiaris
agccagtgatccttttatcctgcta

SEQ ID NO: 34333 - DNA, 25 bp, Canis familiaris
agccaggttctgcaatgatcgtcta

SEQ ID NO: 34334 - DNA, 25 bp, Canis familiaris
agccagaggcctcgagtgatgtctc

SEQ ID NO: 34335 - DNA, 25 bp, Canis familiaris
agccatagcaactgatggtgcttgc

SEQ ID NO: 34336 - DNA, 25 bp, Canis familiaris
agccaggcatacctgtgtgtgtgtg

SEQ ID NO: 34337 - DNA, 25 bp, Canis familiaris
agccattgcagcggcatttggtcgg

SEQ ID NO: 34338 - DNA, 25 bp, Canis familiaris
accactgcacgcgatgatgctacac

SEQ ID NO: 34339 - DNA, 25 bp, Canis familiaris
accactggcatcgtgatggactccg

SEQ ID NO: 34340 - DNA, 25 bp, Canis familiaris
accaggtctctgcttgaccggaagt

SEQ ID NO: 34341 - DNA, 25 bp, Canis familiaris
accagcgatttctggacctgggcgt

SEQ ID NO: 34342 - DNA, 25 bp, Canis familiaris
accacaactatcgggactaggtcgg

SEQ ID NO: 34343 - DNA, 25 bp, Canis familiaris
accacaactatcggaactaggctcg

SEQ ID NO: 34344 - DNA, 25 bp, Canis familiaris
acccagaaatgggccctcaactcgt

SEQ ID NO: 34345 - DNA, 25 bp, Canis familiaris
acctcacacaatcccagttaactgt

SEQ ID NO: 34346 - DNA, 25 bp, Canis familiaris
agcctcagcaaacccaaagacgcta

SEQ ID NO: 34347 - DNA, 25 bp, Canis familiaris
agccattcataaccgcaagggacga

SEQ ID NO: 34348 - DNA, 25 bp, Canis familiaris
agccaccaatgccccaaggaagaaa

SEQ ID NO: 34349 - DNA, 25 bp, Canis familiaris
agccaccagcgtcccagggaaaaat

SEQ ID NO: 34350 - DNA, 25 bp, Canis familiaris
accagcctggccaacatggtgaaac

SEQ ID NO: 34351 - DNA, 25 bp, Canis familiaris
agccacctgctcatacagggaagcc

SEQ ID NO: 34352 - DNA, 25 bp, Canis familiaris
agccatttcctgagcggccaggact

SEQ ID NO: 34353 - DNA, 25 bp, Canis familiaris
accatgtaccctggcattgccgaca

SEQ ID NO: 34354 - DNA, 25 bp, Canis familiaris
accaatcacacttcaaatccgactc

SEQ ID NO: 34355 - DNA, 25 bp, Canis familiaris
accaaacacttaacgctgcagacac

SEQ ID NO: 34356 - DNA, 25 bp, Canis familiaris
agccacacacagtttgacctgatgt

SEQ ID NO: 34357 - DNA, 25 bp, Canis familiaris
agccacgcagagtatctggatagat

SEQ ID NO: 34358 - DNA, 25 bp, Canis familiaris
agcctgagctgggatctggatacac

SEQ ID NO: 34359 - DNA, 25 bp, Canis familiaris
agccatgtgctagatgctgaacaag

SEQ ID NO: 34360 - DNA, 25 bp, Canis familiaris
agccttgtcatcctctaagcagagc

SEQ ID NO: 34361 - DNA, 25 bp, Canis familiaris
agccataggcacctctacatgggct

SEQ ID NO: 34362 - DNA, 25 bp, Canis familiaris
accaatggcactttcctcagtgctg

SEQ ID NO: 34363 - DNA, 25 bp, Canis familiaris
agccaagtgcccatcaacagatgaa

SEQ ID NO: 34364 - DNA, 25 bp, Canis familiaris
agccaaccatctttcaaaataagaa

SEQ ID NO: 34365 - DNA, 25 bp, Canis familiaris
agccacaatccaaacaaaccaaaat

SEQ ID NO: 34366 - DNA, 25 bp, Canis familiaris
agccatcaaaatgacccactcaata

SEQ ID NO: 34367 - DNA, 25 bp, Canis familiaris
accattaaataacaccatcctacct

SEQ ID NO: 34368 - DNA, 25 bp, Canis familiaris
accatataccaacaacactcttttt

SEQ ID NO: 34369 - DNA, 25 bp, Canis familiaris
acctggacgacagaaacacttttcg

SEQ ID NO: 34370 - DNA, 25 bp, Canis familiaris
acccagtcggcagaaatcactattc

SEQ ID NO: 34371 - DNA, 25 bp, Canis familiaris
accacagtcccacagactcagagtt

SEQ ID NO: 34372 - DNA, 25 bp, Canis familiaris
acctcacccacacatgattcgggac

SEQ ID NO: 34373 - DNA, 25 bp, Canis familiaris
acctatgtccacgctgttggtggaa

SEQ ID NO: 34374 - DNA, 25 bp, Canis familiaris
accggctggcccgggatgtaggaca

SEQ ID NO: 34375 - DNA, 25 bp, Canis familiaris
accagcatttgccccggtgaaggga

SEQ ID NO: 34376 - DNA, 25 bp, Canis familiaris
agccactactccatctgggaagagg

SEQ ID NO: 34377 - DNA, 25 bp, Canis familiaris
agccaccctacaacaggtgccagat

SEQ ID NO: 34378 - DNA, 25 bp, Canis familiaris
agccacctgctgacatgaagggcgc

SEQ ID NO: 34379 - DNA, 25 bp, Canis familiaris
agccacggatgtcgttgcgtgctgc

SEQ ID NO: 34380 - DNA, 25 bp, Canis familiaris
agccattgctgagtgcctggggctc

SEQ ID NO: 34381 - DNA, 25 bp, Canis familiaris
agcctcgctttggcgtgggtatgaa

SEQ ID NO: 34382 - DNA, 25 bp, Canis familiaris
agcctttccctcctgagggcatagc

SEQ ID NO: 34383 - DNA, 25 bp, Canis familiaris
acctattccctactgggctgtacaa

SEQ ID NO: 34384 - DNA, 25 bp, Canis familiaris
accaatttccgatggggtatcacgg

SEQ ID NO: 34385 - DNA, 25 bp, Canis familiaris
accacattgtcccaagtacctgtgc

SEQ ID NO: 34386 - DNA, 25 bp, Canis familiaris
agccactgagctgcagacgtatcct

SEQ ID NO: 34387 - DNA, 25 bp, Canis familiaris
accaccacccagtcgtatgcagtgg

SEQ ID NO: 34388 - DNA, 25 bp, Canis familiaris
accacaagcctctgcgaacagcttg

SEQ ID NO: 34389 - DNA, 25 bp, Canis familiaris
accacgggcatcgtggagacgcact

SEQ ID NO: 34390 - DNA, 25 bp, Canis familiaris
agccaccgtgtatgtggacgcagtc

SEQ ID NO: 34391 - DNA, 25 bp, Canis familiaris
agccatccttggagaggccacaggt

SEQ ID NO: 34392 - DNA, 25 bp, Canis familiaris
accacatcctggttgataccacttt

SEQ ID NO: 34393 - DNA, 25 bp, Canis familiaris
acctaccatgaaagatacctatcgt

SEQ ID NO: 34394 - DNA, 25 bp, Canis familiaris
acctatcccatgtgtcacacttggt

SEQ ID NO: 34395 - DNA, 25 bp, Canis familiaris
accactgccccaggaacaatagcgt

SEQ ID NO: 34396 - DNA, 25 bp, Canis familiaris
agccactgcttcgccagagagaagg

SEQ ID NO: 34397 - DNA, 25 bp, Canis familiaris
agccatgctctggcgtccaaaatag

SEQ ID NO: 34398 - DNA, 25 bp, Canis familiaris
agccatgctctggtggccggaatag

SEQ ID NO: 34399 - DNA, 25 bp, Canis familiaris
agccaggctggggccgacaaggccc

SEQ ID NO: 34400 - DNA, 25 bp, Canis familiaris
agccatggggaagcagtccagtcct

SEQ ID NO: 34401 - DNA, 25 bp, Canis familiaris
agccagggcaggcccaggccagcca

SEQ ID NO: 34402 - DNA, 25 bp, Canis familiaris
accagaagaagagaggccccagggg

SEQ ID NO: 34403 - DNA, 25 bp, Canis familiaris
accacggaagatgcggtaccagtgc

SEQ ID NO: 34404 - DNA, 25 bp, Canis familiaris
accacggaggtccgtgagtccacca

SEQ ID NO: 34405 - DNA, 25 bp, Canis familiaris
agccagggaggtgagacaggccccc

SEQ ID NO: 34406 - DNA, 25 bp, Canis familiaris
accagtgacggggctggcatggccc

SEQ ID NO: 34407 - DNA, 25 bp, Canis familiaris
accaaagtgcgtggctgttggccct

SEQ ID NO: 34408 - DNA, 25 bp, Canis familiaris
accacacagggtggctgagttcccc

SEQ ID NO: 34409 - DNA, 25 bp, Canis familiaris
accaagcaacaggactgagcctccc

SEQ ID NO: 34410 - DNA, 25 bp, Canis familiaris
agccagagaacagcatttccctcgc

SEQ ID NO: 34411 - DNA, 25 bp, Canis familiaris
agccagaatacatacactcctcgtg

SEQ ID NO: 34412 - DNA, 25 bp, Canis familiaris
accaactaatacacctcctatgaaa

SEQ ID NO: 34413 - DNA, 25 bp, Canis familiaris
accaaattatgcatgggcccttaat

SEQ ID NO: 34414 - DNA, 25 bp, Canis familiaris
agccagaattgtcttccctttatat

SEQ ID NO: 34415 - DNA, 25 bp, Canis familiaris
agccagatattaagtctcttttgga

SEQ ID NO: 34416 - DNA, 25 bp, Canis familiaris
accacaatccaccagattttttgag

SEQ ID NO: 34417 - DNA, 25 bp, Canis familiaris
accacaattactctgtattttcaaa

SEQ ID NO: 34418 - DNA, 25 bp, Canis familiaris
agccacactttccatttttatttag

SEQ ID NO: 34419 - DNA, 25 bp, Canis familiaris
agccaccaaatgctctgttatttat

SEQ ID NO: 34420 - DNA, 25 bp, Canis familiaris
agccattaagtgctccctattatat

SEQ ID NO: 34421 - DNA, 25 bp, Canis familiaris
accttagaagaacccagcgttatgt

SEQ ID NO: 34422 - DNA, 25 bp, Canis familiaris
accttttaatagatcagcagttggg

SEQ ID NO: 34423 - DNA, 25 bp, Canis familiaris
acctaacaaatagctgggtcttgga

SEQ ID NO: 34424 - DNA, 25 bp, Canis familiaris
acctatctaaaagctaaggctctgg

SEQ ID NO: 34425 - DNA, 25 bp, Canis familiaris
accagactttaaactacaggctctt

SEQ ID NO: 34426 - DNA, 25 bp, Canis familiaris
accaaccttaaggctagccctagag

SEQ ID NO: 34427 - DNA, 25 bp, Canis familiaris
agccaacctattgtaagccctggac

SEQ ID NO: 34428 - DNA, 25 bp, Canis familiaris
agccacattctattgtaaatccatc

SEQ ID NO: 34429 - DNA, 25 bp, Canis familiaris
accaattgctctgggtaacacagga

SEQ ID NO: 34430 - DNA, 25 bp, Canis familiaris
accaatagacttgctcaacacgggc

SEQ ID NO: 34431 - DNA, 25 bp, Canis familiaris
accaatggccctggaacagccttgg

SEQ ID NO: 34432 - DNA, 25 bp, Canis familiaris
accacaggcactgcgacgaggttgg

SEQ ID NO: 34433 - DNA, 25 bp, Canis familiaris
accagcaaagcagagaaggccattg

SEQ ID NO: 34434 - DNA, 25 bp, Canis familiaris
accaccacagctgagagggaaatcg

SEQ ID NO: 34435 - DNA, 25 bp, Canis familiaris
accaccacagtttaccataaattgt

SEQ ID NO: 34436 - DNA, 25 bp, Canis familiaris
accactacagtatcccacaaagggc

SEQ ID NO: 34437 - DNA, 25 bp, Canis familiaris
agccactaggtaccgccagaagaag

SEQ ID NO: 34438 - DNA, 25 bp, Canis familiaris
agccacgtggtcacttgcaaggaca

SEQ ID NO: 34439 - DNA, 25 bp, Canis familiaris
accagcttggtaacttcattagcaa

SEQ ID NO: 34440 - DNA, 25 bp, Canis familiaris
accagttctggctctgtagctggca

SEQ ID NO: 34441 - DNA, 25 bp, Canis familiaris
accacttcggcatcgtggagggcct

SEQ ID NO: 34442 - DNA, 25 bp, Canis familiaris
accaattcagggtgaggcgggcgtc

SEQ ID NO: 34443 - DNA, 25 bp, Canis familiaris
accaatctcatgagggaggagggga

SEQ ID NO: 34444 - DNA, 25 bp, Canis familiaris
accacacatcagctgggagggtgcg

SEQ ID NO: 34445 - DNA, 25 bp, Canis familiaris
accaatgactggatcgagggcgaga

SEQ ID NO: 34446 - DNA, 25 bp, Canis familiaris
agccacccggtttgagatgggcaga

SEQ ID NO: 34447 - DNA, 25 bp, Canis familiaris
accaccactgttgacggggagatcg

SEQ ID NO: 34448 - DNA, 25 bp, Canis familiaris
agccacgtttttctggaggagcacg

SEQ ID NO: 34449 - DNA, 25 bp, Canis familiaris
accaaattgtcttcctgtagtcgca

SEQ ID NO: 34450 - DNA, 25 bp, Canis familiaris
agccttttgttgtgccatagtcgac

SEQ ID NO: 34451 - DNA, 25 bp, Canis familiaris
agccttaatttgtactgtcttcgac

SEQ ID NO: 34452 - DNA, 25 bp, Canis familiaris
agccttcatttttattgttttatct

SEQ ID NO: 34453 - DNA, 25 bp, Canis familiaris
agccatgttttattgtatctgtttt

SEQ ID NO: 34454 - DNA, 25 bp, Canis familiaris
agccagaaccaatgtttttttctat

SEQ ID NO: 34455 - DNA, 25 bp, Canis familiaris
agccaacttctcagttacttttttg

SEQ ID NO: 34456 - DNA, 25 bp, Canis familiaris
accaaattgctcaagcctggctctt

SEQ ID NO: 34457 - DNA, 25 bp, Canis familiaris
agccacaggtggcgactgagtactt

SEQ ID NO: 34458 - DNA, 25 bp, Canis familiaris
agccagcggggaccaagcagggctt

SEQ ID NO: 34459 - DNA, 25 bp, Canis familiaris
agccacagaaggaccgtgaggcctg

SEQ ID NO: 34460 - DNA, 25 bp, Canis familiaris
accaagaagctgaacgcgcagtgag

SEQ ID NO: 34461 - DNA, 25 bp, Canis familiaris
agccaggaagtttggttgtggacac

SEQ ID NO: 34462 - DNA, 25 bp, Canis familiaris
accggcaaattgtttctgggtcgcg

SEQ ID NO: 34463 - DNA, 25 bp, Canis familiaris
accagaagccgtttatgcgggacca

SEQ ID NO: 34464 - DNA, 25 bp, Canis familiaris
accagcaagccacagtacctgggcc

SEQ ID NO: 34465 - DNA, 25 bp, Canis familiaris
accagcacccagatgcagacctggg

SEQ ID NO: 34466 - DNA, 25 bp, Canis familiaris
accagacagaagactccacgacggg

SEQ ID NO: 34467 - DNA, 25 bp, Canis familiaris
accagaagactttccggacagaacg

SEQ ID NO: 34468 - DNA, 25 bp, Canis familiaris
accagaatcatttccacgaaaaatc

SEQ ID NO: 34469 - DNA, 25 bp, Canis familiaris
accaactattcagacgtgcaacaac

SEQ ID NO: 34470 - DNA, 25 bp, Canis familiaris
accaaagactcaaacatacaacaac

SEQ ID NO: 34471 - DNA, 25 bp, Canis familiaris
accagccaaccaaaaacatctcaga

SEQ ID NO: 34472 - DNA, 25 bp, Canis familiaris
accactccccagagaggattagcat

SEQ ID NO: 34473 - DNA, 25 bp, Canis familiaris
accacttcccctagacaataagcat

SEQ ID NO: 34474 - DNA, 25 bp, Canis familiaris
agccaagctccccttagaaaatatc

SEQ ID NO: 34475 - DNA, 25 bp, Canis familiaris
accacgcacaaccattcacgaaaat

SEQ ID NO: 34476 - DNA, 25 bp, Canis familiaris
agccaaccaaaaacatctcagaagt

SEQ ID NO: 34477 - DNA, 25 bp, Canis familiaris
agccaactcaggcatacactccaac

SEQ ID NO: 34478 - DNA, 25 bp, Canis familiaris
agccagcctaggaagcagcaatcaa

SEQ ID NO: 34479 - DNA, 25 bp, Canis familiaris
agccagctgctacatcacagacaac

SEQ ID NO: 34480 - DNA, 25 bp, Canis familiaris
agccagtgcttgctacagacaggat

SEQ ID NO: 34481 - DNA, 25 bp, Canis familiaris
accactgtctggtacaaccgatcag

SEQ ID NO: 34482 - DNA, 25 bp, Canis familiaris
accactgccatgtataaattcccag

SEQ ID NO: 34483 - DNA, 25 bp, Canis familiaris
accaccacccaatatttgcacgtat

SEQ ID NO: 34484 - DNA, 25 bp, Canis familiaris
acctagtcccaattctgttgcggtc

SEQ ID NO: 34485 - DNA, 25 bp, Canis familiaris
accaaacaccagtatcttgagggtt

SEQ ID NO: 34486 - DNA, 25 bp, Canis familiaris
accaactcccatccacttgagaggg

SEQ ID NO: 34487 - DNA, 25 bp, Canis familiaris
agccaacctccataccatgtggttg

SEQ ID NO: 34488 - DNA, 25 bp, Canis familiaris
agccaggcaatatttactcatttgt

SEQ ID NO: 34489 - DNA, 25 bp, Canis familiaris
agccagacacttgattatctttgct

SEQ ID NO: 34490 - DNA, 25 bp, Canis familiaris
agccaatacttgtttttatgctatg

SEQ ID NO: 34491 - DNA, 25 bp, Canis familiaris
agccaatacttgtttcttatgtcta

SEQ ID NO: 34492 - DNA, 25 bp, Canis familiaris
accaacagtatttttcacagagcta

SEQ ID NO: 34493 - DNA, 25 bp, Canis familiaris
accaatttctcttatcccaatggat

SEQ ID NO: 34494 - DNA, 25 bp, Canis familiaris
accattttccaaaagtatatgttgc

SEQ ID NO: 34495 - DNA, 25 bp, Canis familiaris
accaacatacgtaaaatcagtcttc

SEQ ID NO: 34496 - DNA, 25 bp, Canis familiaris
agccaaatcatcctatcaaccattt

SEQ ID NO: 34497 - DNA, 25 bp, Canis familiaris
agccaaatctctaaagactcaaatt

SEQ ID NO: 34498 - DNA, 25 bp, Canis familiaris
accagagatggtcaaagtaaatctt

SEQ ID NO: 34499 - DNA, 25 bp, Canis familiaris
agccagggaagcaagaaggaaatct

SEQ ID NO: 34500 - DNA, 25 bp, Canis familiaris
accaggtaagtatgggacacatgta

SEQ ID NO: 34501 - DNA, 25 bp, Canis familiaris
accaagctgggctaagtggacgctg

SEQ ID NO: 34502 - DNA, 25 bp, Canis familiaris
accaaggggctgtcgagccagcctg

SEQ ID NO: 34503 - DNA, 25 bp, Canis familiaris
accaagctgctactgacgaggctgc

SEQ ID NO: 34504 - DNA, 25 bp, Canis familiaris
accacaccttctacaatgagctgcg

SEQ ID NO: 34505 - DNA, 25 bp, Canis familiaris
accacaccttctacaatgagctgcg

SEQ ID NO: 34506 - DNA, 25 bp, Canis familiaris
accacaccttctacaatgagctgcg

SEQ ID NO: 34507 - DNA, 25 bp, Canis familiaris
agccacactcctcatctgagggagc

SEQ ID NO: 34508 - DNA, 25 bp, Canis familiaris
agccaattgacttctctgaggacac

SEQ ID NO: 34509 - DNA, 25 bp, Canis familiaris
accactatcgagtctatgccgacgc

SEQ ID NO: 34510 - DNA, 25 bp, Canis familiaris
accactgaatggtcgatggagacgg

SEQ ID NO: 34511 - DNA, 25 bp, Canis familiaris
accacagtgtgcctcgatgggacac

SEQ ID NO: 34512 - DNA, 25 bp, Canis familiaris
accaatgtgtttctgaggcaaatca

SEQ ID NO: 34513 - DNA, 25 bp, Canis familiaris
accaagttcgtgcgggacatgatcc

SEQ ID NO: 34514 - DNA, 25 bp, Canis familiaris
accactgttcgctggagggttgtcc

SEQ ID NO: 34515 - DNA, 25 bp, Canis familiaris
accactgtggtgctgggtggtggtc

SEQ ID NO: 34516 - DNA, 25 bp, Canis familiaris
accacgctggtgcagggatcgttac

SEQ ID NO: 34517 - DNA, 25 bp, Canis familiaris
agccagcggtgtaagggccgcttcc

SEQ ID NO: 34518 - DNA, 25 bp, Canis familiaris
accagctggggaaggggtggcctgc

SEQ ID NO: 34519 - DNA, 25 bp, Canis familiaris
accttgaggcaggggacggggtgcg

SEQ ID NO: 34520 - DNA, 25 bp, Canis familiaris
accttaggtagtgttgcgttatggg

SEQ ID NO: 34521 - DNA, 25 bp, Canis familiaris
acgtatagtgtagtattggtttcag

SEQ ID NO: 34522 - DNA, 25 bp, Canis familiaris
acttaaggttatatggactccgtgg

SEQ ID NO: 34523 - DNA, 25 bp, Canis familiaris
acctttggatttcatggacccgtag

SEQ ID NO: 34524 - DNA, 25 bp, Canis familiaris
aaattctactttcagggcctataat

SEQ ID NO: 34525 - DNA, 25 bp, Canis familiaris
acccttcaagttgcacgtgcctata

SEQ ID NO: 34526 - DNA, 25 bp, Canis familiaris
accaaccaaggtccaaggctcaaga

SEQ ID NO: 34527 - DNA, 25 bp, Canis familiaris
accacacggacggcgaaccaaagag

SEQ ID NO: 34528 - DNA, 25 bp, Canis familiaris
accactcagcgaaacgaagcccaga

SEQ ID NO: 34529 - DNA, 25 bp, Canis familiaris
acccccaatggagaccccatgaaat

SEQ ID NO: 34530 - DNA, 25 bp, Canis familiaris
acccccaaggggtgacatgtggagc

SEQ ID NO: 34531 - DNA, 25 bp, Canis familiaris
accaacacaagcgggggacagaggc

SEQ ID NO: 34532 - DNA, 25 bp, Canis familiaris
accaatacgagggggccaccagagt

SEQ ID NO: 34533 - DNA, 25 bp, Canis familiaris
accaataaagtgaccgcttccagca

SEQ ID NO: 34534 - DNA, 25 bp, Canis familiaris
agccagtatctgtgtgtcgtttcag

SEQ ID NO: 34535 - DNA, 25 bp, Canis familiaris
agccaggacctgagtctgtgttagg

SEQ ID NO: 34536 - DNA, 25 bp, Canis familiaris
agccatgtgaggatcttctgtgaat

SEQ ID NO: 34537 - DNA, 25 bp, Canis familiaris
agccatgcttgcctatttgctgtat

SEQ ID NO: 34538 - DNA, 25 bp, Canis familiaris
agccactgtgcttgtttattgattg

SEQ ID NO: 34539 - DNA, 25 bp, Canis familiaris
accacgtgacgcattgacgattatt

SEQ ID NO: 34540 - DNA, 25 bp, Canis familiaris
accacgctaagtgcttcgacatagt

SEQ ID NO: 34541 - DNA, 25 bp, Canis familiaris
accaaacaggtctctccactaatat

SEQ ID NO: 34542 - DNA, 25 bp, Canis familiaris
accatacaagggaccccactgctat

SEQ ID NO: 34543 - DNA, 25 bp, Canis familiaris
accaacatagggaggctcactcagt

SEQ ID NO: 34544 - DNA, 25 bp, Canis familiaris
accaatggagggctctccactcatg

SEQ ID NO: 34545 - DNA, 25 bp, Canis familiaris
accaatggatgggatgtctcagcct

SEQ ID NO: 34546 - DNA, 25 bp, Canis familiaris
accaaggcatggttgtcctctggcc

SEQ ID NO: 34547 - DNA, 25 bp, Canis familiaris
accaggaagatgtagaccgggacgg

SEQ ID NO: 34548 - DNA, 25 bp, Canis familiaris
acccctcagtgaaaccgttgacttg

SEQ ID NO: 34549 - DNA, 25 bp, Canis familiaris
accacctccttcaaagtgcttggct

SEQ ID NO: 34550 - DNA, 25 bp, Canis familiaris
accaagtctgctcaaagtgttcact

SEQ ID NO: 34551 - DNA, 25 bp, Canis familiaris
accacgtgtgggaacttgtttctgc

SEQ ID NO: 34552 - DNA, 25 bp, Canis familiaris
accacagggctgcaacttctatttg

SEQ ID NO: 34553 - DNA, 25 bp, Canis familiaris
accaagtcatcgctcttgtcttgtc

SEQ ID NO: 34554 - DNA, 25 bp, Canis familiaris
accaattgataggcagttttctgtt

SEQ ID NO: 34555 - DNA, 25 bp, Canis familiaris
accagttgtagtcctattcctgtgc

SEQ ID NO: 34556 - DNA, 25 bp, Canis familiaris
accaaggtagaccattatcctgagc

SEQ ID NO: 34557 - DNA, 25 bp, Canis familiaris
accacatggtgtaccggatctcggc

SEQ ID NO: 34558 - DNA, 25 bp, Canis familiaris
agccactggatttcacggattacac

SEQ ID NO: 34559 - DNA, 25 bp, Canis familiaris
agccactggatttcacggattacac

SEQ ID NO: 34560 - DNA, 25 bp, Canis familiaris
agccactggatttcacggattacac

SEQ ID NO: 34561 - DNA, 25 bp, Canis familiaris
agccactggatttcacggattacac

SEQ ID NO: 34562 - DNA, 25 bp, Canis familiaris
agccactggatttcacggattacac

SEQ ID NO: 34563 - DNA, 25 bp, Canis familiaris
agccacgggtccacaatgtggccaa

SEQ ID NO: 34564 - DNA, 25 bp, Canis familiaris
accacaagggccgacgaggtgtaca

SEQ ID NO: 34565 - DNA, 25 bp, Canis familiaris
accataagaagcctacatagaagta

SEQ ID NO: 34566 - DNA, 25 bp, Canis familiaris
agccacttgtagtccacatggtagt

SEQ ID NO: 34567 - DNA, 25 bp, Canis familiaris
accacctcgtgggcaatgtctatgt

SEQ ID NO: 34568 - DNA, 25 bp, Canis familiaris
accacccggggctgctgctgatgga

SEQ ID NO: 34569 - DNA, 25 bp, Canis familiaris
accaccctggaggcaacatggctgg

SEQ ID NO: 34570 - DNA, 25 bp, Canis familiaris
accaggcctggggccatttgggtat

SEQ ID NO: 34571 - DNA, 25 bp, Canis familiaris
accacccattggttcatcttcagag

SEQ ID NO: 34572 - DNA, 25 bp, Canis familiaris
agccacctctgagggtcctgtaact

SEQ ID NO: 34573 - DNA, 25 bp, Canis familiaris
agccacacacacaggtcctgtacac

SEQ ID NO: 34574 - DNA, 25 bp, Canis familiaris
accagcaccaaagggctcctaaggt

SEQ ID NO: 34575 - DNA, 25 bp, Canis familiaris
accgacgaacagtgccctggaagta

SEQ ID NO: 34576 - DNA, 25 bp, Canis familiaris
acctgggtagagtgtatatgtgtca

SEQ ID NO: 34577 - DNA, 25 bp, Canis familiaris
accgcggttgagtgtacacctttgg

SEQ ID NO: 34578 - DNA, 25 bp, Canis familiaris
accccctgtgaatgtacaacctacg

SEQ ID NO: 34579 - DNA, 25 bp, Canis familiaris
accacacttataacttactacctca

SEQ ID NO: 34580 - DNA, 25 bp, Canis familiaris
accacagcatctgtttttttcccta

SEQ ID NO: 34581 - DNA, 25 bp, Canis familiaris
acgatcagataccgtcgtagttccg

SEQ ID NO: 34582 - DNA, 25 bp, Canis familiaris
accacgatataccatagtttccacg

SEQ ID NO: 34583 - DNA, 25 bp, Canis familiaris
accagtcaatacgatagttgtcagc

SEQ ID NO: 34584 - DNA, 25 bp, Canis familiaris
accagacagtaacttgtgtgtcagc

SEQ ID NO: 34585 - DNA, 25 bp, Canis familiaris
accagcccagaaccatggtgtacca

SEQ ID NO: 34586 - DNA, 25 bp, Canis familiaris
accacggagatgtctaggggcacca

SEQ ID NO: 34587 - DNA, 25 bp, Canis familiaris
accacagcggattctcactggaaca

SEQ ID NO: 34588 - DNA, 25 bp, Canis familiaris
accacatctggtactactgagagag

SEQ ID NO: 34589 - DNA, 25 bp, Canis familiaris
accacttttgccactatgggaggat

SEQ ID NO: 34590 - DNA, 25 bp, Canis familiaris
accagtttccttcctctgaggaata

SEQ ID NO: 34591 - DNA, 25 bp, Canis familiaris
acctttgtcctctgttaggtacagt

SEQ ID NO: 34592 - DNA, 25 bp, Canis familiaris
accttggccaactctggatggacct

SEQ ID NO: 34593 - DNA, 25 bp, Canis familiaris
acccattccaactgatggaaacttg

SEQ ID NO: 34594 - DNA, 25 bp, Canis familiaris
acctcagacctcccggagaatacct

SEQ ID NO: 34595 - DNA, 25 bp, Canis familiaris
acctctacttcctggagaactacat

SEQ ID NO: 34596 - DNA, 25 bp, Canis familiaris
acctcccaggccctggggactgact

SEQ ID NO: 34597 - DNA, 25 bp, Canis familiaris
accatctccatggccgagggtgaag

SEQ ID NO: 34598 - DNA, 25 bp, Canis familiaris
agccaatggtggcggcaagtgatca

SEQ ID NO: 34599 - DNA, 25 bp, Canis familiaris
accagcagggggcgcaagatgactg

SEQ ID NO: 34600 - DNA, 25 bp, Canis familiaris
accacagaggagggccacaaggtgt

SEQ ID NO: 34601 - DNA, 25 bp, Canis familiaris
accacagaatggtgtcacggaggca

SEQ ID NO: 34602 - DNA, 25 bp, Canis familiaris
accacgtaagatctctaggggcacc

SEQ ID NO: 34603 - DNA, 25 bp, Canis familiaris
agccacctaagatctcaatttgcca

SEQ ID NO: 34604 - DNA, 25 bp, Canis familiaris
agccacccaaattcacacatttcta

SEQ ID NO: 34605 - DNA, 25 bp, Canis familiaris
agccacacccaaatatgcaactcct

SEQ ID NO: 34606 - DNA, 25 bp, Canis familiaris
agccacactgctcaacatgctgaac

SEQ ID NO: 34607 - DNA, 25 bp, Canis familiaris
accaactgaccaatgtgctgacaca

SEQ ID NO: 34608 - DNA, 25 bp, Canis familiaris
accaagctgcacccagttggcaaat

SEQ ID NO: 34609 - DNA, 25 bp, Canis familiaris
accagatgccaccaaattgacaact

SEQ ID NO: 34610 - DNA, 25 bp, Canis familiaris
accaggccaccttgcattaatatct

SEQ ID NO: 34611 - DNA, 25 bp, Canis familiaris
accatggtgctattctgtgtcaaac

SEQ ID NO: 34612 - DNA, 25 bp, Canis familiaris
accatggtgctattctgtgtcaaac

SEQ ID NO: 34613 - DNA, 25 bp, Canis familiaris
accatgttaactttgtgaaacgact

SEQ ID NO: 34614 - DNA, 25 bp, Canis familiaris
accatgttaactttgtgaaacgact

SEQ ID NO: 34615 - DNA, 25 bp, Canis familiaris
accttgggaattttaaagcagccag

SEQ ID NO: 34616 - DNA, 25 bp, Canis familiaris
accggcagtggaagcgtcataaacc

SEQ ID NO: 34617 - DNA, 25 bp, Canis familiaris
acgagcaggtggaaatccatctaag

SEQ ID NO: 34618 - DNA, 25 bp, Canis familiaris
accacggtgatgaaagccactctga

SEQ ID NO: 34619 - DNA, 25 bp, Canis familiaris
accagggatgtttagccccagatcc

SEQ ID NO: 34620 - DNA, 25 bp, Canis familiaris
accatgggggaccagcctggacagg

SEQ ID NO: 34621 - DNA, 25 bp, Canis familiaris
accagggggaggctgtgtcacatgg

SEQ ID NO: 34622 - DNA, 25 bp, Canis familiaris
accagggcggctgctggtgtttggg

SEQ ID NO: 34623 - DNA, 25 bp, Canis familiaris
accagcggggcatccgagtgtgagt

SEQ ID NO: 34624 - DNA, 25 bp, Canis familiaris
accagcctgttctccgagggaggaa

SEQ ID NO: 34625 - DNA, 25 bp, Canis familiaris
accacgcgtccatccagatgaacgt

SEQ ID NO: 34626 - DNA, 25 bp, Canis familiaris
accaccagcctctcacagaggcatc

SEQ ID NO: 34627 - DNA, 25 bp, Canis familiaris
accaccagccattacgctggactcc

SEQ ID NO: 34628 - DNA, 25 bp, Canis familiaris
accacacgcacttatcaggaacgcc

SEQ ID NO: 34629 - DNA, 25 bp, Canis familiaris
accagaccatcttacttaattgcgt

SEQ ID NO: 34630 - DNA, 25 bp, Canis familiaris
accagaccattccgcttcaaggcag

SEQ ID NO: 34631 - DNA, 25 bp, Canis familiaris
accaaggattgccagcaaccaccag

SEQ ID NO: 34632 - DNA, 25 bp, Canis familiaris
accacagtgtatgtcaactgcccag

SEQ ID NO: 34633 - DNA, 25 bp, Canis familiaris
accagcatggacagtaccccatatg

SEQ ID NO: 34634 - DNA, 25 bp, Canis familiaris
accagtatgactggaatcctactca

SEQ ID NO: 34635 - DNA, 25 bp, Canis familiaris
acctatatagcagcaatccccatca

SEQ ID NO: 34636 - DNA, 25 bp, Canis familiaris
accaaatagatttcacacacacaca

SEQ ID NO: 34637 - DNA, 25 bp, Canis familiaris
accacaataattgcacatcgtcccc

SEQ ID NO: 34638 - DNA, 25 bp, Canis familiaris
accaagacggtggactgcaccgccc

SEQ ID NO: 34639 - DNA, 25 bp, Canis familiaris
accaagaaggctcatccagttcctc

SEQ ID NO: 34640 - DNA, 25 bp, Canis familiaris
accaaaagcagccaaccatctttca

SEQ ID NO: 34641 - DNA, 25 bp, Canis familiaris
accatagaagagcctgccctctatt

SEQ ID NO: 34642 - DNA, 25 bp, Canis familiaris
accaacacacagacaccattcgatt

SEQ ID NO: 34643 - DNA, 25 bp, Canis familiaris
agccaactccagacaggtgtcggcc

SEQ ID NO: 34644 - DNA, 25 bp, Canis familiaris
accacgctgctcacagtggtaggac

SEQ ID NO: 34645 - DNA, 25 bp, Canis familiaris
accaggccccacttattatggacac

SEQ ID NO: 34646 - DNA, 25 bp, Canis familiaris
accggtacaccagattgtggaactc

SEQ ID NO: 34647 - DNA, 25 bp, Canis familiaris
accagtgtccccacgagtggaatcc

SEQ ID NO: 34648 - DNA, 25 bp, Canis familiaris
accaggaagcccaggagttgacatc

SEQ ID NO: 34649 - DNA, 25 bp, Canis familiaris
acctggaacccataacttgattcca

SEQ ID NO: 34650 - DNA, 25 bp, Canis familiaris
acctcgtactcatcatcaatttcat

SEQ ID NO: 34651 - DNA, 25 bp, Canis familiaris
acctcagtacgctcacacttaaatg

SEQ ID NO: 34652 - DNA, 25 bp, Canis familiaris
acctcatggtccccactttaaagat

SEQ ID NO: 34653 - DNA, 25 bp, Canis familiaris
acctactttccaactcttcaaagct

SEQ ID NO: 34654 - DNA, 25 bp, Canis familiaris
accaacctgccgaatccttaaatgg

SEQ ID NO: 34655 - DNA, 25 bp, Canis familiaris
accaagcgtaccatccagtttgtgg

SEQ ID NO: 34656 - DNA, 25 bp, Canis familiaris
accacggctatccttatagcttttt

SEQ ID NO: 34657 - DNA, 25 bp, Canis familiaris
accaatgcctttttagatgtatttt

SEQ ID NO: 34658 - DNA, 25 bp, Canis familiaris
accagtgaattttatagtctatgct

SEQ ID NO: 34659 - DNA, 25 bp, Canis familiaris
accaaatgttctttagtcatgaggc

SEQ ID NO: 34660 - DNA, 25 bp, Canis familiaris
accaatattttgtatttgctgaaat

SEQ ID NO: 34661 - DNA, 25 bp, Canis familiaris
accaaatttcagtttcctgtagaca

SEQ ID NO: 34662 - DNA, 25 bp, Canis familiaris
agccaaacctagcttctcactataa

SEQ ID NO: 34663 - DNA, 25 bp, Canis familiaris
agccaataaatatgttctcgtgtaa

SEQ ID NO: 34664 - DNA, 25 bp, Canis familiaris
accaaaacatcggttctgggcttca

SEQ ID NO: 34665 - DNA, 25 bp, Canis familiaris
accaactacatctctctctgagaca

SEQ ID NO: 34666 - DNA, 25 bp, Canis familiaris
accaaagccattgccttggcacaag

SEQ ID NO: 34667 - DNA, 25 bp, Canis familiaris
accaccagctttgagtctgctgcct

SEQ ID NO: 34668 - DNA, 25 bp, Canis familiaris
accacagtttgtggtgctcctcact

SEQ ID NO: 34669 - DNA, 25 bp, Canis familiaris
accaatgtgttgaccttctctatag

SEQ ID NO: 34670 - DNA, 25 bp, Canis familiaris
accaatgtctaagtctgctgttaca

SEQ ID NO: 34671 - DNA, 25 bp, Canis familiaris
accataattacctgtgtttcaacct

SEQ ID NO: 34672 - DNA, 25 bp, Canis familiaris
acctactcaacctggtgcttgatac

SEQ ID NO: 34673 - DNA, 25 bp, Canis familiaris
acctcagggacgaggtgctcttccc

SEQ ID NO: 34674 - DNA, 25 bp, Canis familiaris
acctcaggcgtcataagtggcatcc

SEQ ID NO: 34675 - DNA, 25 bp, Canis familiaris
accatagggcctaataagtgacact

SEQ ID NO: 34676 - DNA, 25 bp, Canis familiaris
accacaggcacattgctaaaggaca

SEQ ID NO: 34677 - DNA, 25 bp, Canis familiaris
accacaggccagataaacagtgcac

SEQ ID NO: 34678 - DNA, 25 bp, Canis familiaris
accaaggcttttcagagaggctcag

SEQ ID NO: 34679 - DNA, 25 bp, Canis familiaris
accacggttttacagattgccagca

SEQ ID NO: 34680 - DNA, 25 bp, Canis familiaris
accacaagtctgatcgcttttgcta

SEQ ID NO: 34681 - DNA, 25 bp, Canis familiaris
accacaacttcactagtgcttagaa

SEQ ID NO: 34682 - DNA, 25 bp, Canis familiaris
accatcaacctctcagagttccaac

SEQ ID NO: 34683 - DNA, 25 bp, Canis familiaris
acctcacacggaacaggaacctaca

SEQ ID NO: 34684 - DNA, 25 bp, Canis familiaris
accataccaactacaagaacctcca

SEQ ID NO: 34685 - DNA, 25 bp, Canis familiaris
accaagcttcacaaaagaaagccta

SEQ ID NO: 34686 - DNA, 25 bp, Canis familiaris
accatatgttaccgaggaatagatg

SEQ ID NO: 34687 - DNA, 25 bp, Canis familiaris
accactgttgacggggagatcgtgc

SEQ ID NO: 34688 - DNA, 25 bp, Canis familiaris
accacagctgagagggaaatcgtgc

SEQ ID NO: 34689 - DNA, 25 bp, Canis familiaris
accagcgccagtgggaggatactgt

SEQ ID NO: 34690 - DNA, 25 bp, Canis familiaris
accagagcgtgaggacaggaagtcc

SEQ ID NO: 34691 - DNA, 25 bp, Canis familiaris
accagaggtcaggagacatggggct

SEQ ID NO: 34692 - DNA, 25 bp, Canis familiaris
accagcgcgcctggaacagggaggg

SEQ ID NO: 34693 - DNA, 25 bp, Canis familiaris
accacaggccagcaaaggggtgcgt

SEQ ID NO: 34694 - DNA, 25 bp, Canis familiaris
accactgcagcccccaaaggggcta

SEQ ID NO: 34695 - DNA, 25 bp, Canis familiaris
accaccgccagccgcaaagtaggtg

SEQ ID NO: 34696 - DNA, 25 bp, Canis familiaris
accactcgacgacgaaagggagctg

SEQ ID NO: 34697 - DNA, 25 bp, Canis familiaris
accattcgccgccagaatgagggag

SEQ ID NO: 34698 - DNA, 25 bp, Canis familiaris
accatcttgcctggagccaaggata

SEQ ID NO: 34699 - DNA, 25 bp, Canis familiaris
accatcttggcatcctcaaacaaag

SEQ ID NO: 34700 - DNA, 25 bp, Canis familiaris
accattctcgtcccatatataaaga

SEQ ID NO: 34701 - DNA, 25 bp, Canis familiaris
accacccagatcagcaatttcgaca

SEQ ID NO: 34702 - DNA, 25 bp, Canis familiaris
acccccaatcttgctttgatgatcc

SEQ ID NO: 34703 - DNA, 25 bp, Canis familiaris
acccttacatttctttcagttctag

SEQ ID NO: 34704 - DNA, 25 bp, Canis familiaris
accctctatcactgactttcggtta

SEQ ID NO: 34705 - DNA, 25 bp, Canis familiaris
accaccttgagatagttgaaagtta

SEQ ID NO: 34706 - DNA, 25 bp, Canis familiaris
acccctcgagactctttaggtcttg

SEQ ID NO: 34707 - DNA, 25 bp, Canis familiaris
accacatctcgagtcttttcaagtt

SEQ ID NO: 34708 - DNA, 25 bp, Canis familiaris
accacactaggttatttctgagaga

SEQ ID NO: 34709 - DNA, 25 bp, Canis familiaris
accatgaccaggtttagtcttcaga

SEQ ID NO: 34710 - DNA, 25 bp, Canis familiaris
accagcacgagggttgatctttgct

SEQ ID NO: 34711 - DNA, 25 bp, Canis familiaris
accagcaggaggtcggcctttgctg

SEQ ID NO: 34712 - DNA, 25 bp, Canis familiaris
accaaaagctgtggagctcctggct

SEQ ID NO: 34713 - DNA, 25 bp, Canis familiaris
accaggagagcttctgagcctcagg

SEQ ID NO: 34714 - DNA, 25 bp, Canis familiaris
accatgcaaacctagagcctcgtac

SEQ ID NO: 34715 - DNA, 25 bp, Canis familiaris
acctacaaaatcagctcttttccca

SEQ ID NO: 34716 - DNA, 25 bp, Canis familiaris
accttcacagttaacgttcttgtca

SEQ ID NO: 34717 - DNA, 25 bp, Canis familiaris
accttcagtttttcgagttgtctat

SEQ ID NO: 34718 - DNA, 25 bp, Canis familiaris
accaatttaatttctaccattgtat

SEQ ID NO: 34719 - DNA, 25 bp, Canis familiaris
accaaattatttgccatagattatt

SEQ ID NO: 34720 - DNA, 25 bp, Canis familiaris
accagttttcctgccagacttgagt

SEQ ID NO: 34721 - DNA, 25 bp, Canis familiaris
accaggttcctgggcaaaatcgagt

SEQ ID NO: 34722 - DNA, 25 bp, Canis familiaris
accaggcttgccaggaatgcccggt

SEQ ID NO: 34723 - DNA, 25 bp, Canis familiaris
accagccattccagacattgacgag

SEQ ID NO: 34724 - DNA, 25 bp, Canis familiaris
accagcaattacagaatatatcagc

SEQ ID NO: 34725 - DNA, 25 bp, Canis familiaris
accagcctgggcaagattcaacagc

SEQ ID NO: 34726 - DNA, 25 bp, Canis familiaris
accagtggaggcaagtgctcacggc

SEQ ID NO: 34727 - DNA, 25 bp, Canis familiaris
accatagcacccaagattcagcgtc

SEQ ID NO: 34728 - DNA, 25 bp, Canis familiaris
accagacacaactaatgccagcatt

SEQ ID NO: 34729 - DNA, 25 bp, Canis familiaris
accaagtcaaagtcatgccgcacta

SEQ ID NO: 34730 - DNA, 25 bp, Canis familiaris
accaagtgcagatgcacggcccggt

SEQ ID NO: 34731 - DNA, 25 bp, Canis familiaris
aagaacggcttcaggcccagaagga

SEQ ID NO: 34732 - DNA, 25 bp, Canis familiaris
aactcccttatcagtgcccaaagga

SEQ ID NO: 34733 - DNA, 25 bp, Canis familiaris
aacttcctgcccagggcactaacta

SEQ ID NO: 34734 - DNA, 25 bp, Canis familiaris
aacttcctctggcaaggtcttattc

SEQ ID NO: 34735 - DNA, 25 bp, Canis familiaris
acctacctctggattagatcttact

SEQ ID NO: 34736 - DNA, 25 bp, Canis familiaris
acctagccacgaagttcctgttaat

SEQ ID NO: 34737 - DNA, 25 bp, Canis familiaris
acctacctcagcatttcctggaaag

SEQ ID NO: 34738 - DNA, 25 bp, Canis familiaris
accaatcgtcctaactacgtgaaag

SEQ ID NO: 34739 - DNA, 25 bp, Canis familiaris
accaaccctgccaacaactggattt

SEQ ID NO: 34740 - DNA, 25 bp, Canis familiaris
accatactacatcaactcctaatta

SEQ ID NO: 34741 - DNA, 25 bp, Canis familiaris
accacactaaaagctcatataattg

SEQ ID NO: 34742 - DNA, 25 bp, Canis familiaris
accacctgaaacttgctgcttcaag

SEQ ID NO: 34743 - DNA, 25 bp, Canis familiaris
accagagcgagttgcttgcttttac

SEQ ID NO: 34744 - DNA, 25 bp, Canis familiaris
accagccgatgcaaattctttaaca

SEQ ID NO: 34745 - DNA, 25 bp, Canis familiaris
accattggcagcattaccttaatcg

SEQ ID NO: 34746 - DNA, 25 bp, Canis familiaris
accattggctttctcccaaatattg

SEQ ID NO: 34747 - DNA, 25 bp, Canis familiaris
accactgagttgtatacctaaaaat

SEQ ID NO: 34748 - DNA, 25 bp, Canis familiaris
accacctttgtgaacctaaatgaga

SEQ ID NO: 34749 - DNA, 25 bp, Canis familiaris
accacccttggtccagaaattgcag

SEQ ID NO: 34750 - DNA, 25 bp, Canis familiaris
accacaccgtagcggaattcatgcg

SEQ ID NO: 34751 - DNA, 25 bp, Canis familiaris
acccccgatcctctgaatttggaga

SEQ ID NO: 34752 - DNA, 25 bp, Canis familiaris
accacccgtctctggtagttgtagc

SEQ ID NO: 34753 - DNA, 25 bp, Canis familiaris
accagtgccatgttcattgggggtt

SEQ ID NO: 34754 - DNA, 25 bp, Canis familiaris
accatgtcctatctgcaggtgggtc

SEQ ID NO: 34755 - DNA, 25 bp, Canis familiaris
accaacctgcgcaagatgggggctc

SEQ ID NO: 34756 - DNA, 25 bp, Canis familiaris
accaacctgcgcaagatgggggctc

SEQ ID NO: 34757 - DNA, 25 bp, Canis familiaris
accatcaccctggaggtggagccca

SEQ ID NO: 34758 - DNA, 25 bp, Canis familiaris
accaacagcctggtgttcggcacct

SEQ ID NO: 34759 - DNA, 25 bp, Canis familiaris
accacaagacggtgtcgagacctca

SEQ ID NO: 34760 - DNA, 25 bp, Canis familiaris
acctcttgagggtgcttggacccct

SEQ ID NO: 34761 - DNA, 25 bp, Canis familiaris
acccgtttggttcttgacaatccag

SEQ ID NO: 34762 - DNA, 25 bp, Canis familiaris
acccggtaatttcttatcttcacag

SEQ ID NO: 34763 - DNA, 25 bp, Canis familiaris
accacaagtacttctgccttatttc

SEQ ID NO: 34764 - DNA, 25 bp, Canis familiaris
accagtgttattttgccattttgcc

SEQ ID NO: 34765 - DNA, 25 bp, Canis familiaris
accagttttccaatggctttacaga

SEQ ID NO: 34766 - DNA, 25 bp, Canis familiaris
accagtgatgtgtgtttgtttaagc

SEQ ID NO: 34767 - DNA, 25 bp, Canis familiaris
accatgagctagtgtttatttgtaa

SEQ ID NO: 34768 - DNA, 25 bp, Canis familiaris
accagatgcggagtctctcggttgt

SEQ ID NO: 34769 - DNA, 25 bp, Canis familiaris
accacatgggcatactcggctgtga

SEQ ID NO: 34770 - DNA, 25 bp, Canis familiaris
accacatggacttgtcatcctcgta

SEQ ID NO: 34771 - DNA, 25 bp, Canis familiaris
accacttagctactatactcgcttc

SEQ ID NO: 34772 - DNA, 25 bp, Canis familiaris
accacttggctctaaatgctcagta

SEQ ID NO: 34773 - DNA, 25 bp, Canis familiaris
accatcctggcccagagctatagct

SEQ ID NO: 34774 - DNA, 25 bp, Canis familiaris
acctcgcagccagtgatgactatag

SEQ ID NO: 34775 - DNA, 25 bp, Canis familiaris
accatcacaccagaacaaaggtcag

SEQ ID NO: 34776 - DNA, 25 bp, Canis familiaris
acctgagttacctacacaattgcga

SEQ ID NO: 34777 - DNA, 25 bp, Canis familiaris
acctgggcatgtgcaacctcaagga

SEQ ID NO: 34778 - DNA, 25 bp, Canis familiaris
accagagtcatgttaacgtcaccgc

SEQ ID NO: 34779 - DNA, 25 bp, Canis familiaris
accaggtcatggttacaggactcgg

SEQ ID NO: 34780 - DNA, 25 bp, Canis familiaris
accaggtctggacaaaaaagcaggc

SEQ ID NO: 34781 - DNA, 25 bp, Canis familiaris
accaggtgtgtacaaaaaagcggct

SEQ ID NO: 34782 - DNA, 25 bp, Canis familiaris
accacgggacaggaccaaacagcgg

SEQ ID NO: 34783 - DNA, 25 bp, Canis familiaris
accgtggtaagtccctcagcaaggg

SEQ ID NO: 34784 - DNA, 25 bp, Canis familiaris
acctttgctccgtttacagcagggt

SEQ ID NO: 34785 - DNA, 25 bp, Canis familiaris
acctctgttactgtgctagcagcag

SEQ ID NO: 34786 - DNA, 25 bp, Canis familiaris
accactgtcttattggctgagatat

SEQ ID NO: 34787 - DNA, 25 bp, Canis familiaris
accagccctctgcatgattgatgtt

SEQ ID NO: 34788 - DNA, 25 bp, Canis familiaris
accatgccctgcacatatcgcatga

SEQ ID NO: 34789 - DNA, 25 bp, Canis familiaris
accacagcgtcgaattctgcatcag

SEQ ID NO: 34790 - DNA, 25 bp, Canis familiaris
accacacatttgtatgcttctcagc

SEQ ID NO: 34791 - DNA, 25 bp, Canis familiaris
accacacttgctctttgacagcatc

SEQ ID NO: 34792 - DNA, 25 bp, Canis familiaris
accacatctctcatttgtgatgcca

SEQ ID NO: 34793 - DNA, 25 bp, Canis familiaris
accagattctaactatggcatgcta

SEQ ID NO: 34794 - DNA, 25 bp, Canis familiaris
accagttcatgcagtatacctatct

SEQ ID NO: 34795 - DNA, 25 bp, Canis familiaris
accactatcgcacgtctaatgtatt

SEQ ID NO: 34796 - DNA, 25 bp, Canis familiaris
accacaatctctctcataaatacat

SEQ ID NO: 34797 - DNA, 25 bp, Canis familiaris
accacaattctagtcaaccaattat

SEQ ID NO: 34798 - DNA, 25 bp, Canis familiaris
accagcacttcttcacagacaaact

SEQ ID NO: 34799 - DNA, 25 bp, Canis familiaris
accatgcacccgtggatacataatc

SEQ ID NO: 34800 - DNA, 25 bp, Canis familiaris
accacacacctaatggtgacttttt

SEQ ID NO: 34801 - DNA, 25 bp, Canis familiaris
accagccaggctttgtgtgtgttca

SEQ ID NO: 34802 - DNA, 25 bp, Canis familiaris
accacaatgccattcttgttctgta

SEQ ID NO: 34803 - DNA, 25 bp, Canis familiaris
accaaatggcatatctgaatctgta

SEQ ID NO: 34804 - DNA, 25 bp, Canis familiaris
accaaatgtgtacctgtgtatgttt

SEQ ID NO: 34805 - DNA, 25 bp, Canis familiaris
accgaagattagtctctctagtttc

SEQ ID NO: 34806 - DNA, 25 bp, Canis familiaris
accgtagttaatcccaactgacatc

SEQ ID NO: 34807 - DNA, 25 bp, Canis familiaris
acctatagttatgcccgacatgacc

SEQ ID NO: 34808 - DNA, 25 bp, Canis familiaris
acctaagctcaactaccgagtgccc

SEQ ID NO: 34809 - DNA, 25 bp, Canis familiaris
acctcaactctaaaaagaacgcctg

SEQ ID NO: 34810 - DNA, 25 bp, Canis familiaris
acctaacttgcgcagaaaccgagat

SEQ ID NO: 34811 - DNA, 25 bp, Canis familiaris
acctagcctacgcagaaaccgagaa

SEQ ID NO: 34812 - DNA, 25 bp, Canis familiaris
acctaggtcctgttcaggtcaccag

SEQ ID NO: 34813 - DNA, 25 bp, Canis familiaris
accttgtcccactgaggtagccagt

SEQ ID NO: 34814 - DNA, 25 bp, Canis familiaris
accttagccatgttctgggtacagg

SEQ ID NO: 34815 - DNA, 25 bp, Canis familiaris
accattagcttgcatgcggtgtcca

SEQ ID NO: 34816 - DNA, 25 bp, Canis familiaris
accttcagcttaggagtgtgcccct

SEQ ID NO: 34817 - DNA, 25 bp, Canis familiaris
accattcagataaggaggttcctca

SEQ ID NO: 34818 - DNA, 25 bp, Canis familiaris
accagctgcctcaggaatttcctga

SEQ ID NO: 34819 - DNA, 25 bp, Canis familiaris
accagctgctctacgtgaaagttcc

SEQ ID NO: 34820 - DNA, 25 bp, Canis familiaris
accagcgctgatcttgcaaagcact

SEQ ID NO: 34821 - DNA, 25 bp, Canis familiaris
accagaggactttgctagagcccag

SEQ ID NO: 34822 - DNA, 25 bp, Canis familiaris
accaggtcatctaatgccaaatcca

SEQ ID NO: 34823 - DNA, 25 bp, Canis familiaris
accaggtacttgtctacaacagatt

SEQ ID NO: 34824 - DNA, 25 bp, Canis familiaris
accatgatctacctgtcgaccaggc

SEQ ID NO: 34825 - DNA, 25 bp, Canis familiaris
accattggatcacgacatgaccagg

SEQ ID NO: 34826 - DNA, 25 bp, Canis familiaris
accattgacacatgattaccgccaa

SEQ ID NO: 34827 - DNA, 25 bp, Canis familiaris
accaggcatagggagtaccccagag

SEQ ID NO: 34828 - DNA, 25 bp, Canis familiaris
accgcgccgggagagcgcccggcgc

SEQ ID NO: 34829 - DNA, 25 bp, Canis familiaris
accggaggagagtcgactgcccggc

SEQ ID NO: 34830 - DNA, 25 bp, Canis familiaris
accacctggagatcgacctccattc

SEQ ID NO: 34831 - DNA, 25 bp, Canis familiaris
accactctgtctacaagagcgacaa

SEQ ID NO: 34832 - DNA, 25 bp, Canis familiaris
accaccgttatctagagaacactct

SEQ ID NO: 34833 - DNA, 25 bp, Canis familiaris
actacctgaaagggagatacatgcc

SEQ ID NO: 34834 - DNA, 25 bp, Canis familiaris
accacataagatacggagtacatcc

SEQ ID NO: 34835 - DNA, 25 bp, Canis familiaris
accacaaaattgggcagctacaaga

SEQ ID NO: 34836 - DNA, 25 bp, Canis familiaris
accagaacttctgagtctatcaaca

SEQ ID NO: 34837 - DNA, 25 bp, Canis familiaris
accagaacatgctgcggatcatcaa

SEQ ID NO: 34838 - DNA, 25 bp, Canis familiaris
accagatcatctgaggcactgccac

SEQ ID NO: 34839 - DNA, 25 bp, Canis familiaris
accatgtacccaggcattgctgaca

SEQ ID NO: 34840 - DNA, 25 bp, Canis familiaris
accatggaccgcgaagtgcgcaaat

SEQ ID NO: 34841 - DNA, 25 bp, Canis familiaris
accacccccatggagatgctgaaga

SEQ ID NO: 34842 - DNA, 25 bp, Canis familiaris
accagaccactcagtatgctcaata

SEQ ID NO: 34843 - DNA, 25 bp, Canis familiaris
accagacagacaactatgactatat

SEQ ID NO: 34844 - DNA, 25 bp, Canis familiaris
accagcagggcaacggacatctagt

SEQ ID NO: 34845 - DNA, 25 bp, Canis familiaris
accactgatggtgaaagatctagta

SEQ ID NO: 34846 - DNA, 25 bp, Canis familiaris
accagcttggtgcagacagtctgac

SEQ ID NO: 34847 - DNA, 25 bp, Canis familiaris
accactgctgctggccagataggta

SEQ ID NO: 34848 - DNA, 25 bp, Canis familiaris
actcacagactgctaaaggttttta

SEQ ID NO: 34849 - DNA, 25 bp, Canis familiaris
accacagatcagcaactatacattt

SEQ ID NO: 34850 - DNA, 25 bp, Canis familiaris
accacagctctacatcaagcaattt

SEQ ID NO: 34851 - DNA, 25 bp, Canis familiaris
accacactgctttccatgaggtctt

SEQ ID NO: 34852 - DNA, 25 bp, Canis familiaris
accacagtgatttgacagtcggccc

SEQ ID NO: 34853 - DNA, 25 bp, Canis familiaris
accatcgtgctaagaactcggctcc

SEQ ID NO: 34854 - DNA, 25 bp, Canis familiaris
accattgtcatatacccggttcagc

SEQ ID NO: 34855 - DNA, 25 bp, Canis familiaris
accacattctctgaccacaagttag

SEQ ID NO: 34856 - DNA, 25 bp, Canis familiaris
accactatcctatacataatgtcca

SEQ ID NO: 34857 - DNA, 25 bp, Canis familiaris
accatcccacagataactatgcctc

SEQ ID NO: 34858 - DNA, 25 bp, Canis familiaris
accacatccaaggtagtcatgcatg

SEQ ID NO: 34859 - DNA, 25 bp, Canis familiaris
accacatccaaggaaggcagcaggc

SEQ ID NO: 34860 - DNA, 25 bp, Canis familiaris
accagcacgaaaaaccagcagagca

SEQ ID NO: 34861 - DNA, 25 bp, Canis familiaris
acctaggtgacaaacacagcacaga

SEQ ID NO: 34862 - DNA, 25 bp, Canis familiaris
acctggggaaatggtcagaccttgt

SEQ ID NO: 34863 - DNA, 25 bp, Canis familiaris
acctgatagtggtgactcgtccttc

SEQ ID NO: 34864 - DNA, 25 bp, Canis familiaris
actcgtttaatccactagtcctaag

SEQ ID NO: 34865 - DNA, 25 bp, Canis familiaris
accaggttcaaggcactggtcgctg

SEQ ID NO: 34866 - DNA, 25 bp, Canis familiaris
accaccctcaggagcggaagctgtt

SEQ ID NO: 34867 - DNA, 25 bp, Canis familiaris
accacgcctactaagcggaggtgtt

SEQ ID NO: 34868 - DNA, 25 bp, Canis familiaris
accccgtcctattcggacatgtttg

SEQ ID NO: 34869 - DNA, 25 bp, Canis familiaris
accacccctctgagttgacatgtgt

SEQ ID NO: 34870 - DNA, 25 bp, Canis familiaris
accgtccagcccatgtaacatgttt

SEQ ID NO: 34871 - DNA, 25 bp, Canis familiaris
accagacccaacatatacaatgtat

SEQ ID NO: 34872 - DNA, 25 bp, Canis familiaris
accagtgccaattaaaacaagtcat

SEQ ID NO: 34873 - DNA, 25 bp, Canis familiaris
accagtacaacgatgacaccagcct

SEQ ID NO: 34874 - DNA, 25 bp, Canis familiaris
accacttcggatttgaagccgctgc

SEQ ID NO: 34875 - DNA, 25 bp, Canis familiaris
accacttcggatttgaagccgctga

SEQ ID NO: 34876 - DNA, 25 bp, Canis familiaris
accacttcggtgcagaagacctgga

SEQ ID NO: 34877 - DNA, 25 bp, Canis familiaris
ctcaagttccggctaaacctgtatg

SEQ ID NO: 34878 - DNA, 25 bp, Canis familiaris
ctcagtgtgccctgttaaaacttgg

SEQ ID NO: 34879 - DNA, 25 bp, Canis familiaris
actcgtcacgcatgctctaaaactg

SEQ ID NO: 34880 - DNA, 25 bp, Canis familiaris
accaggcaccacgtttgaagatcga

SEQ ID NO: 34881 - DNA, 25 bp, Canis familiaris
actcaggactcgtgtctacagtcag

SEQ ID NO: 34882 - DNA, 25 bp, Canis familiaris
accagtcactcttcgtctatagaaa

SEQ ID NO: 34883 - DNA, 25 bp, Canis familiaris
accagacctgccagatgccataata

SEQ ID NO: 34884 - DNA, 25 bp, Canis familiaris
accagccccagcagaggaaattttc

SEQ ID NO: 34885 - DNA, 25 bp, Canis familiaris
actagcttgacgtgtggaactttac

SEQ ID NO: 34886 - DNA, 25 bp, Canis familiaris
accacttgaccggggagacttctgg

SEQ ID NO: 34887 - DNA, 25 bp, Canis familiaris
accacttacctgggtggtcttccag

SEQ ID NO: 34888 - DNA, 25 bp, Canis familiaris
acctgccaacctagttggtcctcta

SEQ ID NO: 34889 - DNA, 25 bp, Canis familiaris
acctgaaagcctatttttccttgca

SEQ ID NO: 34890 - DNA, 25 bp, Canis familiaris
accaggaattctaactttcttcttg

SEQ ID NO: 34891 - DNA, 25 bp, Canis familiaris
accacgatttcttattatcctccat

SEQ ID NO: 34892 - DNA, 25 bp, Canis familiaris
accatagtttatttctctttctaat

SEQ ID NO: 34893 - DNA, 25 bp, Canis familiaris
accatgttttatttgttcatccatc

SEQ ID NO: 34894 - DNA, 25 bp, Canis familiaris
accactgcttgtaagtgtttccttt

SEQ ID NO: 34895 - DNA, 25 bp, Canis familiaris
accactttgtcaagctcatttcctg

SEQ ID NO: 34896 - DNA, 25 bp, Canis familiaris
accagctttcgcagcagcatatttt

SEQ ID NO: 34897 - DNA, 25 bp, Canis familiaris
accacctttcagactgctcatttta

SEQ ID NO: 34898 - DNA, 25 bp, Canis familiaris
accaggttgtctcctgcgacttcaa

SEQ ID NO: 34899 - DNA, 25 bp, Canis familiaris
accagggtacatccatcgaaatgaa

SEQ ID NO: 34900 - DNA, 25 bp, Canis familiaris
accagtggtcacccatcagtttgga

SEQ ID NO: 34901 - DNA, 25 bp, Canis familiaris
accagggtcagtgcacatgtttgtg

SEQ ID NO: 34902 - DNA, 25 bp, Canis familiaris
accatgctggccgcaagacttgtgt

SEQ ID NO: 34903 - DNA, 25 bp, Canis familiaris
accacctgcggcagacagcttggtg

SEQ ID NO: 34904 - DNA, 25 bp, Canis familiaris
accacactgcgggtacacggcagag

SEQ ID NO: 34905 - DNA, 25 bp, Canis familiaris
accagcagggggacacagcctgccg

SEQ ID NO: 34906 - DNA, 25 bp, Canis familiaris
accacaggtaagtcaatgccccaga

SEQ ID NO: 34907 - DNA, 25 bp, Canis familiaris
acctcagaaccgtcattggtccgat

SEQ ID NO: 34908 - DNA, 25 bp, Canis familiaris
accatagtggcagtgtcttttccgc

SEQ ID NO: 34909 - DNA, 25 bp, Canis familiaris
accatcggccaggtatgtttcatca

SEQ ID NO: 34910 - DNA, 25 bp, Canis familiaris
accatgtcccaaatggaagccatga

SEQ ID NO: 34911 - DNA, 25 bp, Canis familiaris
accggcactgcagaggacaccagat

SEQ ID NO: 34912 - DNA, 25 bp, Canis familiaris
accttatcatgggaggctcaccgtc

SEQ ID NO: 34913 - DNA, 25 bp, Canis familiaris
accatttgctgtgggctcttactga

SEQ ID NO: 34914 - DNA, 25 bp, Canis familiaris
accatgcttgtggggatcttcaatg

SEQ ID NO: 34915 - DNA, 25 bp, Canis familiaris
accacattttgaattcttcagtgta

SEQ ID NO: 34916 - DNA, 25 bp, Canis familiaris
accactttagacacttagcagctcc

SEQ ID NO: 34917 - DNA, 25 bp, Canis familiaris
accttgttagtagatgtcagaccct

SEQ ID NO: 34918 - DNA, 25 bp, Canis familiaris
accattatcctgagccatgtaacca

SEQ ID NO: 34919 - DNA, 25 bp, Canis familiaris
acctttcctggtcctgagaagtcac

SEQ ID NO: 34920 - DNA, 25 bp, Canis familiaris
acctttgaacttctcagcgagtcat

SEQ ID NO: 34921 - DNA, 25 bp, Canis familiaris
accatcattgagactatgcctgcct

SEQ ID NO: 34922 - DNA, 25 bp, Canis familiaris
accacatcacagaaatgcttccttg

SEQ ID NO: 34923 - DNA, 25 bp, Canis familiaris
accaccaagtgatgatgccttctgg

SEQ ID NO: 34924 - DNA, 25 bp, Canis familiaris
accaggagactctgatcccttaggt

SEQ ID NO: 34925 - DNA, 25 bp, Canis familiaris
accagagggctaaatccctgaagtt

SEQ ID NO: 34926 - DNA, 25 bp, Canis familiaris
accagcggtctaaatacgatgaata

SEQ ID NO: 34927 - DNA, 25 bp, Canis familiaris
accacgcgtctaactacgagtagac

SEQ ID NO: 34928 - DNA, 25 bp, Canis familiaris
accacgcgtccactatgacgaggac

SEQ ID NO: 34929 - DNA, 25 bp, Canis familiaris
accaccagctccgtcagatgaagga

SEQ ID NO: 34930 - DNA, 25 bp, Canis familiaris
accaccagatccttcatgtttagct

SEQ ID NO: 34931 - DNA, 25 bp, Canis familiaris
accagccactcctgatgggattgct

SEQ ID NO: 34932 - DNA, 25 bp, Canis familiaris
accaccccatacctgggaagcatat

SEQ ID NO: 34933 - DNA, 25 bp, Canis familiaris
accactcccacacttgtggtagata

SEQ ID NO: 34934 - DNA, 25 bp, Canis familiaris
accacttgccacctgattttattaa

SEQ ID NO: 34935 - DNA, 25 bp, Canis familiaris
accacttctacactttatcctaaga

SEQ ID NO: 34936 - DNA, 25 bp, Canis familiaris
accacttacatcctctatatcaata

SEQ ID NO: 34937 - DNA, 25 bp, Canis familiaris
accacctcatcaatgactttactat

SEQ ID NO: 34938 - DNA, 25 bp, Canis familiaris
accaccttcatgcaccttagtgcat

SEQ ID NO: 34939 - DNA, 25 bp, Canis familiaris
accacgtgaatggatccctgggctc

SEQ ID NO: 34940 - DNA, 25 bp, Canis familiaris
accaccatggagaaggctggggctc

SEQ ID NO: 34941 - DNA, 25 bp, Canis familiaris
accagtatccaatggttgtactttt

SEQ ID NO: 34942 - DNA, 25 bp, Canis familiaris
accagttactattgtcctggacttt

SEQ ID NO: 34943 - DNA, 25 bp, Canis familiaris
accacctgactattctaaggagcat

SEQ ID NO: 34944 - DNA, 25 bp, Canis familiaris
accactctgatttagtgaagaggac

SEQ ID NO: 34945 - DNA, 25 bp, Canis familiaris
accactctttcgttgaaaggtgata

SEQ ID NO: 34946 - DNA, 25 bp, Canis familiaris
accatgttttagtaagaagcagtag

SEQ ID NO: 34947 - DNA, 25 bp, Canis familiaris
accattggttaattgaatccagtta

SEQ ID NO: 34948 - DNA, 25 bp, Canis familiaris
accatttattgagagcaatgtcttt

SEQ ID NO: 34949 - DNA, 25 bp, Canis familiaris
acctgcttttaaccatagtcttcca

SEQ ID NO: 34950 - DNA, 25 bp, Canis familiaris
accagattttaagagatgtttccca

SEQ ID NO: 34951 - DNA, 25 bp, Canis familiaris
accagagatttatgtaccctaccca

SEQ ID NO: 34952 - DNA, 25 bp, Canis familiaris
accagaatttggcatcacacacttt

SEQ ID NO: 34953 - DNA, 25 bp, Canis familiaris
accacatttctggttcatcaaattt

SEQ ID NO: 34954 - DNA, 25 bp, Canis familiaris
accactcgtcagctttgctaactat

SEQ ID NO: 34955 - DNA, 25 bp, Canis familiaris
accactctgtccattttaactctaa

SEQ ID NO: 34956 - DNA, 25 bp, Canis familiaris
accatctctattgatcttttacccc

SEQ ID NO: 34957 - DNA, 25 bp, Canis familiaris
accttcttgaatatgtgttacctgc

SEQ ID NO: 34958 - DNA, 25 bp, Canis familiaris
accttaatggtgttgcgactgtcct

SEQ ID NO: 34959 - DNA, 25 bp, Canis familiaris
accatctagtggtccggatcatgat

SEQ ID NO: 34960 - DNA, 25 bp, Canis familiaris
accatcgtggcccgaatgacagcca

SEQ ID NO: 34961 - DNA, 25 bp, Canis familiaris
accatagtgacccagactggccaca

SEQ ID NO: 34962 - DNA, 25 bp, Canis familiaris
accacgtgatcccatgggcatctac

SEQ ID NO: 34963 - DNA, 25 bp, Canis familiaris
accacggcacacccaggaaacaggg

SEQ ID NO: 34964 - DNA, 25 bp, Canis familiaris
accgtgatccctcagtgcataaagg

SEQ ID NO: 34965 - DNA, 25 bp, Canis familiaris
accagtgggctagatgtgcaaatag

SEQ ID NO: 34966 - DNA, 25 bp, Canis familiaris
accagatgttcttaagtcatgaggc

SEQ ID NO: 34967 - DNA, 25 bp, Canis familiaris
accactttctaatgtgcatgtgtgc

SEQ ID NO: 34968 - DNA, 25 bp, Canis familiaris
accaccttctgacaggcatcgagga

SEQ ID NO: 34969 - DNA, 25 bp, Canis familiaris
accagtgcccatgaaggtcagactg

SEQ ID NO: 34970 - DNA, 25 bp, Canis familiaris
accgagctccaggaaatgtccaccg

SEQ ID NO: 34971 - DNA, 25 bp, Canis familiaris
acggtcttctgtggagatctccagc

SEQ ID NO: 34972 - DNA, 25 bp, Canis familiaris
accagagctttgtgcagttcctgca

SEQ ID NO: 34973 - DNA, 25 bp, Canis familiaris
accagcagctttctgggctacacaa

SEQ ID NO: 34974 - DNA, 25 bp, Canis familiaris
accagagatcatgccttgagttcaa

SEQ ID NO: 34975 - DNA, 25 bp, Canis familiaris
accagtgcatgaggcttcttgcttc

SEQ ID NO: 34976 - DNA, 25 bp, Canis familiaris
accagcgcagcaggtttattcactg

SEQ ID NO: 34977 - DNA, 25 bp, Canis familiaris
accagctggatgcgtctgttcagag

SEQ ID NO: 34978 - DNA, 25 bp, Canis familiaris
accagctgggccaggtctcagagga

SEQ ID NO: 34979 - DNA, 25 bp, Canis familiaris
accactagacctcacatccgaggga

SEQ ID NO: 34980 - DNA, 25 bp, Canis familiaris
accatctccaaatacttcgtgagca

SEQ ID NO: 34981 - DNA, 25 bp, Canis familiaris
acctctacaatccgacttcgtcaga

SEQ ID NO: 34982 - DNA, 25 bp, Canis familiaris
acccatacaaggcaatacactcaca

SEQ ID NO: 34983 - DNA, 25 bp, Canis familiaris
accataaaaggccaatcgtatccga

SEQ ID NO: 34984 - DNA, 25 bp, Canis familiaris
accagaggaagcccaaactaccgct

SEQ ID NO: 34985 - DNA, 25 bp, Canis familiaris
accacgagagagccacagagtctac

SEQ ID NO: 34986 - DNA, 25 bp, Canis familiaris
accaccaatgacccagagcatgaaa

SEQ ID NO: 34987 - DNA, 25 bp, Canis familiaris
accatccacattgacgagatcaacc

SEQ ID NO: 34988 - DNA, 25 bp, Canis familiaris
accagccatgctttcggaataatct

SEQ ID NO: 34989 - DNA, 25 bp, Canis familiaris
accacgctgctttcacagtatttct

SEQ ID NO: 34990 - DNA, 25 bp, Canis familiaris
acctttcgtgtatgtgaatgtcttt

SEQ ID NO: 34991 - DNA, 25 bp, Canis familiaris
acctttcatttctgtgaagccactt

SEQ ID NO: 34992 - DNA, 25 bp, Canis familiaris
acctttctttactgacatcactctt

SEQ ID NO: 34993 - DNA, 25 bp, Canis familiaris
acctttacttactgccagaagctgt

SEQ ID NO: 34994 - DNA, 25 bp, Canis familiaris
acctgtcgactttcacggagccagg

SEQ ID NO: 34995 - DNA, 25 bp, Canis familiaris
accaggcggatctccatggagtcag

SEQ ID NO: 34996 - DNA, 25 bp, Canis familiaris
acctgagctgaaaccgagggtcaga

SEQ ID NO: 34997 - DNA, 25 bp, Canis familiaris
accggcgcaagacggaccagagcga

SEQ ID NO: 34998 - DNA, 25 bp, Canis familiaris
acctgaggccgggagacaagaaaca

SEQ ID NO: 34999 - DNA, 25 bp, Canis familiaris
acctgaacgtgggcagacgtgcaac

SEQ ID NO: 35000 - DNA, 25 bp, Canis familiaris
accagaagtttgtgcctgtgcggcc

SEQ ID NO: 35001 - DNA, 25 bp, Canis familiaris
accagaagtgtttgcccacatggca

SEQ ID NO: 35002 - DNA, 25 bp, Canis familiaris
accagatcagttatgcccaatttaa

SEQ ID NO: 35003 - DNA, 25 bp, Canis familiaris
cccgacagttttacgactcctgaag

SEQ ID NO: 35004 - DNA, 25 bp, Canis familiaris
accagaagatgaataacccccgaag

SEQ ID NO: 35005 - DNA, 25 bp, Canis familiaris
accatgaacatgtaaacacctccag

SEQ ID NO: 35006 - DNA, 25 bp, Canis familiaris
accaggaatggagattcgcatgcga

SEQ ID NO: 35007 - DNA, 25 bp, Canis familiaris
accatcacaatgcctccatttgcat

SEQ ID NO: 35008 - DNA, 25 bp, Canis familiaris
accattcagatggctccatttaaaa

SEQ ID NO: 35009 - DNA, 25 bp, Canis familiaris
accatatatatattccaatctttat

SEQ ID NO: 35010 - DNA, 25 bp, Canis familiaris
accatatttcacacagccttcgtgg

SEQ ID NO: 35011 - DNA, 25 bp, Canis familiaris
accatgaatccagatctgtcttcgg

SEQ ID NO: 35012 - DNA, 25 bp, Canis familiaris
acctgaaccgtgctggctttgaggc

SEQ ID NO: 35013 - DNA, 25 bp, Canis familiaris
accatgaacgcggcgtgtgcctgtg

SEQ ID NO: 35014 - DNA, 25 bp, Canis familiaris
accatcatcaagctggtggccttcg

SEQ ID NO: 35015 - DNA, 25 bp, Canis familiaris
accatcacacggatggcgcctactt

SEQ ID NO: 35016 - DNA, 25 bp, Canis familiaris
accagccacgtgttggggacacttg

SEQ ID NO: 35017 - DNA, 25 bp, Canis familiaris
acctgctcgttgggggtgaacttgt

SEQ ID NO: 35018 - DNA, 25 bp, Canis familiaris
accatcacggaggagggtgtttgtt

SEQ ID NO: 35019 - DNA, 25 bp, Canis familiaris
accatcctgtgtgcaggggtgtgtc

SEQ ID NO: 35020 - DNA, 25 bp, Canis familiaris
accaccttcttccatgcaggtgcgt

SEQ ID NO: 35021 - DNA, 25 bp, Canis familiaris
accaccatcctgtgtgcaggggtgt

SEQ ID NO: 35022 - DNA, 25 bp, Canis familiaris
accaggatacgtctgagggtatgat

SEQ ID NO: 35023 - DNA, 25 bp, Canis familiaris
accaggtctccaggtgtgggtgtga

SEQ ID NO: 35024 - DNA, 25 bp, Canis familiaris
accagttctcccaatggtggcgtga

SEQ ID NO: 35025 - DNA, 25 bp, Canis familiaris
accagtcaccgcgatatggggtctg

SEQ ID NO: 35026 - DNA, 25 bp, Canis familiaris
accagtatccctgaggacgcttggg

SEQ ID NO: 35027 - DNA, 25 bp, Canis familiaris
accagtacctggtgaaagctgtggc

SEQ ID NO: 35028 - DNA, 25 bp, Canis familiaris
accaccgcctggagagagagaggag

SEQ ID NO: 35029 - DNA, 25 bp, Canis familiaris
accacctccatggggagctacaagc

SEQ ID NO: 35030 - DNA, 25 bp, Canis familiaris
accagactccacttggactacattg

SEQ ID NO: 35031 - DNA, 25 bp, Canis familiaris
acctcaactacatggtctacatgtt

SEQ ID NO: 35032 - DNA, 25 bp, Canis familiaris
acgctaaactgatgatcctacttat

SEQ ID NO: 35033 - DNA, 25 bp, Canis familiaris
accttgagcacaaagattccacctt

SEQ ID NO: 35034 - DNA, 25 bp, Canis familiaris
accagatgcaccaacatggtcccac

SEQ ID NO: 35035 - DNA, 25 bp, Canis familiaris
accagatgatccagcagttctactc

SEQ ID NO: 35036 - DNA, 25 bp, Canis familiaris
accagctgagctgatgcagtgtcat

SEQ ID NO: 35037 - DNA, 25 bp, Canis familiaris
accagctggctgagtgcagtcaggg

SEQ ID NO: 35038 - DNA, 25 bp, Canis familiaris
accagctgatggcagatcagaccgt

SEQ ID NO: 35039 - DNA, 25 bp, Canis familiaris
accagagggccaggcaggccgtggt

SEQ ID NO: 35040 - DNA, 25 bp, Canis familiaris
accagcaggaggagcagagggggag

SEQ ID NO: 35041 - DNA, 25 bp, Canis familiaris
acctcaggacagagtcgggtgtgtg

SEQ ID NO: 35042 - DNA, 25 bp, Canis familiaris
acctcatggaagccattcggttcct

SEQ ID NO: 35043 - DNA, 25 bp, Canis familiaris
acctgtgaggagaattccgtcccct

SEQ ID NO: 35044 - DNA, 25 bp, Canis familiaris
accttgcggagagtctgcttctccc

SEQ ID NO: 35045 - DNA, 25 bp, Canis familiaris
acctgggaggattccattgccccat

SEQ ID NO: 35046 - DNA, 25 bp, Canis familiaris
accaggaggaattgccctgacccaa

SEQ ID NO: 35047 - DNA, 25 bp, Canis familiaris
accaggaagagggtcctcaccagaa

SEQ ID NO: 35048 - DNA, 25 bp, Canis familiaris
accaggaaaacttcccaccagctgg

SEQ ID NO: 35049 - DNA, 25 bp, Canis familiaris
accaggataaatcagctacgacagc

SEQ ID NO: 35050 - DNA, 25 bp, Canis familiaris
accaggacaaagcagccaaccagca

SEQ ID NO: 35051 - DNA, 25 bp, Canis familiaris
accagtatttagaagccaaccatga

SEQ ID NO: 35052 - DNA, 25 bp, Canis familiaris
accagtatttggagaccgtgctaaa

SEQ ID NO: 35053 - DNA, 25 bp, Canis familiaris
accagtttctggtgtccttcaaaga

SEQ ID NO: 35054 - DNA, 25 bp, Canis familiaris
acctatctttggaggccattagaag

SEQ ID NO: 35055 - DNA, 25 bp, Canis familiaris
accgagtattggaagtggttcaatc

SEQ ID NO: 35056 - DNA, 25 bp, Canis familiaris
accggtgtttgatatggtcatgaac

SEQ ID NO: 35057 - DNA, 25 bp, Canis familiaris
accttatttctagcagttctggaag

SEQ ID NO: 35058 - DNA, 25 bp, Canis familiaris
accttctttgctgccagttatcata

SEQ ID NO: 35059 - DNA, 25 bp, Canis familiaris
accagtcgttgtgtgcggctgatgt

SEQ ID NO: 35060 - DNA, 25 bp, Canis familiaris
acctgggctattgtaagcgtgtaga

SEQ ID NO: 35061 - DNA, 25 bp, Canis familiaris
accttggcttgtgttgggctgagct

SEQ ID NO: 35062 - DNA, 25 bp, Canis familiaris
accattggcatatttgtttttcctt

SEQ ID NO: 35063 - DNA, 25 bp, Canis familiaris
accttggtgtttgtttcatctgctt

SEQ ID NO: 35064 - DNA, 25 bp, Canis familiaris
accttgcctttatatagtccgttgt

SEQ ID NO: 35065 - DNA, 25 bp, Canis familiaris
actcccctatttctagtgacgttag

SEQ ID NO: 35066 - DNA, 25 bp, Canis familiaris
accctttatattctctgaacgttcg

SEQ ID NO: 35067 - DNA, 25 bp, Canis familiaris
acctgctatttctggtccaacagtt

SEQ ID NO: 35068 - DNA, 25 bp, Canis familiaris
accagatatattttcaccccaagtg

SEQ ID NO: 35069 - DNA, 25 bp, Canis familiaris
accatgacatcattaagcaccccat

SEQ ID NO: 35070 - DNA, 25 bp, Canis familiaris
accagcagcagatacagcagcagca

SEQ ID NO: 35071 - DNA, 25 bp, Canis familiaris
accagcagcagcagacggagcaggc

SEQ ID NO: 35072 - DNA, 25 bp, Canis familiaris
accaccagcaggcctggcaggcctg

SEQ ID NO: 35073 - DNA, 25 bp, Canis familiaris
accagcctggtgctggcagggctgt

SEQ ID NO: 35074 - DNA, 25 bp, Canis familiaris
accagtatattgctggcagctattg

SEQ ID NO: 35075 - DNA, 25 bp, Canis familiaris
accagctttgaggatggcactgaag

SEQ ID NO: 35076 - DNA, 25 bp, Canis familiaris
accagcgtctagagtccgacagttc

SEQ ID NO: 35077 - DNA, 25 bp, Canis familiaris
accgcagctgggatctcccaattat

SEQ ID NO: 35078 - DNA, 25 bp, Canis familiaris
accagccagaggattctacattatg

SEQ ID NO: 35079 - DNA, 25 bp, Canis familiaris
accaccagtgtgttctctagaatta

SEQ ID NO: 35080 - DNA, 25 bp, Canis familiaris
accagcacactggactccaaggtgg

SEQ ID NO: 35081 - DNA, 25 bp, Canis familiaris
accagcccctgagtctaggtctgga

SEQ ID NO: 35082 - DNA, 25 bp, Canis familiaris
accaccaggctggttcaggtgcttg

SEQ ID NO: 35083 - DNA, 25 bp, Canis familiaris
accagtggaggcgttcaaggcttgt

SEQ ID NO: 35084 - DNA, 25 bp, Canis familiaris
accaggtggtgtgatcagaagcttg

SEQ ID NO: 35085 - DNA, 25 bp, Canis familiaris
accaccactggtgtagaagatggaa

SEQ ID NO: 35086 - DNA, 25 bp, Canis familiaris
accacctctgtctgtaggagaagaa

SEQ ID NO: 35087 - DNA, 25 bp, Canis familiaris
acgaccacttctcttcgataaagcc

SEQ ID NO: 35088 - DNA, 25 bp, Canis familiaris
accagccctttctctaaagaatctc

SEQ ID NO: 35089 - DNA, 25 bp, Canis familiaris
accagccttttctctgttgaaactg

SEQ ID NO: 35090 - DNA, 25 bp, Canis familiaris
accagcctgcttttttgtacaaact

SEQ ID NO: 35091 - DNA, 25 bp, Canis familiaris
accaggatttgttttgcggaatatt

SEQ ID NO: 35092 - DNA, 25 bp, Canis familiaris
accaggacactttttgacttattct

SEQ ID NO: 35093 - DNA, 25 bp, Canis familiaris
accaccactttgttttctactgatt

SEQ ID NO: 35094 - DNA, 25 bp, Canis familiaris
accagacttcttttgctgtctcagt

SEQ ID NO: 35095 - DNA, 25 bp, Canis familiaris
accaggttgcttaattatgccagaa

SEQ ID NO: 35096 - DNA, 25 bp, Canis familiaris
accaggtggtgattctaattgcagc

SEQ ID NO: 35097 - DNA, 25 bp, Canis familiaris
accatggaggagtaccacaggcact

SEQ ID NO: 35098 - DNA, 25 bp, Canis familiaris
acctcaggagcttacgcaagggacc

SEQ ID NO: 35099 - DNA, 25 bp, Canis familiaris
accagaggacttacggaagaatcaa

SEQ ID NO: 35100 - DNA, 25 bp, Canis familiaris
accagtgaacttgcttgaaggccga

SEQ ID NO: 35101 - DNA, 25 bp, Canis familiaris
acccataacttgattccaggttgag

SEQ ID NO: 35102 - DNA, 25 bp, Canis familiaris
accctcaacttgtaaccacgtatct

SEQ ID NO: 35103 - DNA, 25 bp, Canis familiaris
accagtaagcaattcaatccggaac

SEQ ID NO: 35104 - DNA, 25 bp, Canis familiaris
accagtagaagctccaccatgtgaa

SEQ ID NO: 35105 - DNA, 25 bp, Canis familiaris
accagatcagggtggccatcaggat

SEQ ID NO: 35106 - DNA, 25 bp, Canis familiaris
accagacactgaacaggcccagttc

SEQ ID NO: 35107 - DNA, 25 bp, Canis familiaris
accagccacagtccaagcaggcagt

SEQ ID NO: 35108 - DNA, 25 bp, Canis familiaris
accagctcacctggaactccagagc

SEQ ID NO: 35109 - DNA, 25 bp, Canis familiaris
accagctaccgggacatacgctgcg

SEQ ID NO: 35110 - DNA, 25 bp, Canis familiaris
accagctcatttctacaacaggagc

SEQ ID NO: 35111 - DNA, 25 bp, Canis familiaris
accagcctctctttaaactcaagta

SEQ ID NO: 35112 - DNA, 25 bp, Canis familiaris
accaggatcctgctataacttatta

SEQ ID NO: 35113 - DNA, 25 bp, Canis familiaris
accaggattcatctaaaccgattac

SEQ ID NO: 35114 - DNA, 25 bp, Canis familiaris
accggtctcaaggaatcaccgtctc

SEQ ID NO: 35115 - DNA, 25 bp, Canis familiaris
accggtcttaaaagtctcgtctcat

SEQ ID NO: 35116 - DNA, 25 bp, Canis familiaris
acccggaattaattgtgccgatcct

SEQ ID NO: 35117 - DNA, 25 bp, Canis familiaris
accattgtaatttcaggatgcctgg

SEQ ID NO: 35118 - DNA, 25 bp, Canis familiaris
accttgctatatggtcggacctggt

SEQ ID NO: 35119 - DNA, 25 bp, Canis familiaris
accttgctaacaccgtcatacatgg

SEQ ID NO: 35120 - DNA, 25 bp, Canis familiaris
accattctcatatgaagttacgcgt

SEQ ID NO: 35121 - DNA, 25 bp, Canis familiaris
acctatcttaaatctttctgcgttg

SEQ ID NO: 35122 - DNA, 25 bp, Canis familiaris
accttgcttccaaaattcctttgtg

SEQ ID NO: 35123 - DNA, 25 bp, Canis familiaris
accatttacctgagttggtactgtt

SEQ ID NO: 35124 - DNA, 25 bp, Canis familiaris
accgtcccaagatgagtgggggttg

SEQ ID NO: 35125 - DNA, 25 bp, Canis familiaris
acccctccaaaataggtatcctctg

SEQ ID NO: 35126 - DNA, 25 bp, Canis familiaris
acccatatcgaattaaaggtgattt

SEQ ID NO: 35127 - DNA, 25 bp, Canis familiaris
acctcaaaatatttacagtgtcttc

SEQ ID NO: 35128 - DNA, 25 bp, Canis familiaris
acctacattatgtctttgccgcttt

SEQ ID NO: 35129 - DNA, 25 bp, Canis familiaris
accttactgatgtcttttactcttt

SEQ ID NO: 35130 - DNA, 25 bp, Canis familiaris
accttagtattcattctgcatttct

SEQ ID NO: 35131 - DNA, 25 bp, Canis familiaris
accagtttacacctctccaatgtgt

SEQ ID NO: 35132 - DNA, 25 bp, Canis familiaris
accatgtttcaccagtctgttttgt

SEQ ID NO: 35133 - DNA, 25 bp, Canis familiaris
acctgactattctaaaatctgttgt

SEQ ID NO: 35134 - DNA, 25 bp, Canis familiaris
accagattcctgcaacaagtgttgt

SEQ ID NO: 35135 - DNA, 25 bp, Canis familiaris
actagtttcctacaacagcttcttc

SEQ ID NO: 35136 - DNA, 25 bp, Canis familiaris
accagtttgaccaaaagcagctgtc

SEQ ID NO: 35137 - DNA, 25 bp, Canis familiaris
accaggcgctggagaacgcgcgcta

SEQ ID NO: 35138 - DNA, 25 bp, Canis familiaris
accaggccgaggtgaagcagcgcga

SEQ ID NO: 35139 - DNA, 25 bp, Canis familiaris
accagagactgacacacgagagccg

SEQ ID NO: 35140 - DNA, 25 bp, Canis familiaris
accatgagaagccagaccggagcca

SEQ ID NO: 35141 - DNA, 25 bp, Canis familiaris
accatccacatccagggcagtgagc

SEQ ID NO: 35142 - DNA, 25 bp, Canis familiaris
accatccaagaaggacagcgcagcc

SEQ ID NO: 35143 - DNA, 25 bp, Canis familiaris
acctacatgatcgcacacatcacag

SEQ ID NO: 35144 - DNA, 25 bp, Canis familiaris
accatgaatcgcccatgcaaactcc

SEQ ID NO: 35145 - DNA, 25 bp, Canis familiaris
accagatctcctccatgatggaagc

SEQ ID NO: 35146 - DNA, 25 bp, Canis familiaris
accatatctgcctaccatggagtcc

SEQ ID NO: 35147 - DNA, 25 bp, Canis familiaris
acctatctgcaaggctgttgagtcc

SEQ ID NO: 35148 - DNA, 25 bp, Canis familiaris
accatggagaaggctggggctcact

SEQ ID NO: 35149 - DNA, 25 bp, Canis familiaris
accaggggcactgatgaggcctata

SEQ ID NO: 35150 - DNA, 25 bp, Canis familiaris
accaggtatcctgcaggtgcctgtc

SEQ ID NO: 35151 - DNA, 25 bp, Canis familiaris
accagcagttcctggcaggcactgt

SEQ ID NO: 35152 - DNA, 25 bp, Canis familiaris
accagcagtcctctggggcagctgg

SEQ ID NO: 35153 - DNA, 25 bp, Canis familiaris
accatggtgaatccgggcagcagct

SEQ ID NO: 35154 - DNA, 25 bp, Canis familiaris
accaggtgatgaaagcagttgcagt

SEQ ID NO: 35155 - DNA, 25 bp, Canis familiaris
accagacgtgattagcaggcgcagc

SEQ ID NO: 35156 - DNA, 25 bp, Canis familiaris
accagggcgtgatggtgcgcatggg

SEQ ID NO: 35157 - DNA, 25 bp, Canis familiaris
accaggggtctaggagcgggagttg

SEQ ID NO: 35158 - DNA, 25 bp, Canis familiaris
accagttttctggggagcaggatgt

SEQ ID NO: 35159 - DNA, 25 bp, Canis familiaris
accttctttcctggggatggaatca

SEQ ID NO: 35160 - DNA, 25 bp, Canis familiaris
accatgatttgtataaggaaagact

SEQ ID NO: 35161 - DNA, 25 bp, Canis familiaris
accatttagtttggagagcaagccc

SEQ ID NO: 35162 - DNA, 25 bp, Canis familiaris
acctttgttctagaaggcgctcctt

SEQ ID NO: 35163 - DNA, 25 bp, Canis familiaris
acctttcctcttgaaggcttgccat

SEQ ID NO: 35164 - DNA, 25 bp, Canis familiaris
accattccccttgaagagttcagcg

SEQ ID NO: 35165 - DNA, 25 bp, Canis familiaris
accagaccgtctcggaagaccacgg

SEQ ID NO: 35166 - DNA, 25 bp, Canis familiaris
accaggcgcttcaaggaaaccaatg

SEQ ID NO: 35167 - DNA, 25 bp, Canis familiaris
acctggacgtgaagcagaacgccaa

SEQ ID NO: 35168 - DNA, 25 bp, Canis familiaris
acctgccacggagagaagaccacat

SEQ ID NO: 35169 - DNA, 25 bp, Canis familiaris
acctctgacggtggacggacgaata

SEQ ID NO: 35170 - DNA, 25 bp, Canis familiaris
gatcctttcggtcacgtttcaagac

SEQ ID NO: 35171 - DNA, 25 bp, Canis familiaris
acacgataaggtcaccttccacacc

SEQ ID NO: 35172 - DNA, 25 bp, Canis familiaris
accagatatcacgggactttccaga

SEQ ID NO: 35173 - DNA, 25 bp, Canis familiaris
accagttgcactgagacttgtaatg

SEQ ID NO: 35174 - DNA, 25 bp, Canis familiaris
acctttgctcatgaccttggaataa

SEQ ID NO: 35175 - DNA, 25 bp, Canis familiaris
accttctgacaatttctagctaaaa

SEQ ID NO: 35176 - DNA, 25 bp, Canis familiaris
accagttgatcattttcatggcatt

SEQ ID NO: 35177 - DNA, 25 bp, Canis familiaris
accatgctttcttctctgtagatgt

SEQ ID NO: 35178 - DNA, 25 bp, Canis familiaris
accatctgtatgttcactatagtta

SEQ ID NO: 35179 - DNA, 25 bp, Canis familiaris
accatcttgcagatccttcagagat

SEQ ID NO: 35180 - DNA, 25 bp, Canis familiaris
accattaagagttcattatcagtgc

SEQ ID NO: 35181 - DNA, 25 bp, Canis familiaris
accttaatcgttttgcatcattcac

SEQ ID NO: 35182 - DNA, 25 bp, Canis familiaris
acctgggcctttttcacagtacata

SEQ ID NO: 35183 - DNA, 25 bp, Canis familiaris
accgggcagatttttcagccaactc

SEQ ID NO: 35184 - DNA, 25 bp, Canis familiaris
gcgcctcgcgaacgccgggctggat

SEQ ID NO: 35185 - DNA, 25 bp, Canis familiaris
accttgtgtgtgagtgatcctggca

SEQ ID NO: 35186 - DNA, 25 bp, Canis familiaris
acctttgagaatatgatcgtggaca

SEQ ID NO: 35187 - DNA, 25 bp, Canis familiaris
accatcctaaatttagtggagatct

SEQ ID NO: 35188 - DNA, 25 bp, Canis familiaris
accatactccagtgtcagtgggtct

SEQ ID NO: 35189 - DNA, 25 bp, Canis familiaris
accatttgcataaggtttggatgtt

SEQ ID NO: 35190 - DNA, 25 bp, Canis familiaris
accagtttctggaattattgagttc

SEQ ID NO: 35191 - DNA, 25 bp, Canis familiaris
accagattttgacttcttcttcttc

SEQ ID NO: 35192 - DNA, 25 bp, Canis familiaris
accatattttgctttctcttatctc

SEQ ID NO: 35193 - DNA, 25 bp, Canis familiaris
accattctattcttcttttcttagt

SEQ ID NO: 35194 - DNA, 25 bp, Canis familiaris
accatctctataattttgtcctttc

SEQ ID NO: 35195 - DNA, 25 bp, Canis familiaris
accgtctgaatatttggctcctttt

SEQ ID NO: 35196 - DNA, 25 bp, Canis familiaris
accttcgagtacttgcagggcttcc

SEQ ID NO: 35197 - DNA, 25 bp, Canis familiaris
acctcatgggtttggcattggctgt

SEQ ID NO: 35198 - DNA, 25 bp, Canis familiaris
acctatgggacttccctacttggca

SEQ ID NO: 35199 - DNA, 25 bp, Canis familiaris
acctgtgggtattctcctagtcatg

SEQ ID NO: 35200 - DNA, 25 bp, Canis familiaris
accatgctggttacactttatagtg

SEQ ID NO: 35201 - DNA, 25 bp, Canis familiaris
accttgggtcacttttctaggcact

SEQ ID NO: 35202 - DNA, 25 bp, Canis familiaris
acctcaagggcatctttctagtcac

SEQ ID NO: 35203 - DNA, 25 bp, Canis familiaris
accataagggcagttcagtgttgta

SEQ ID NO: 35204 - DNA, 25 bp, Canis familiaris
accttcagacccaatcatgttagta

SEQ ID NO: 35205 - DNA, 25 bp, Canis familiaris
accatccaggcccaatcagtgctgg

SEQ ID NO: 35206 - DNA, 25 bp, Canis familiaris
accatcacggagcgcatgatgtgcg

SEQ ID NO: 35207 - DNA, 25 bp, Canis familiaris
accatcactcggtgcatcaggtgca

SEQ ID NO: 35208 - DNA, 25 bp, Canis familiaris
accagaccaggtcctatgcagtggt

SEQ ID NO: 35209 - DNA, 25 bp, Canis familiaris
acctggtagtgtcctcagcaatggt

SEQ ID NO: 35210 - DNA, 25 bp, Canis familiaris
accatcagtcacctaatgcagccat

SEQ ID NO: 35211 - DNA, 25 bp, Canis familiaris
acgtcagatcactgatcacctgcat

SEQ ID NO: 35212 - DNA, 25 bp, Canis familiaris
acgtcatcatcaagacaccctgaag

SEQ ID NO: 35213 - DNA, 25 bp, Canis familiaris
accccaaatgacgcctctagaagat

SEQ ID NO: 35214 - DNA, 25 bp, Canis familiaris
acgcccgacgaatcctaaacaatat

SEQ ID NO: 35215 - DNA, 25 bp, Canis familiaris
acacccgttaatgggcaaagactat

SEQ ID NO: 35216 - DNA, 25 bp, Canis familiaris
accccgctaagtggggccatgacta

SEQ ID NO: 35217 - DNA, 25 bp, Canis familiaris
acctcactctaagtgtagacccctt

SEQ ID NO: 35218 - DNA, 25 bp, Canis familiaris
acctgcaatgtggatctgttttccc

SEQ ID NO: 35219 - DNA, 25 bp, Canis familiaris
accatcagatgggttcattagaacc

SEQ ID NO: 35220 - DNA, 25 bp, Canis familiaris
accatcatgtctgttcactgtgtac

SEQ ID NO: 35221 - DNA, 25 bp, Canis familiaris
accctgcagctatgtcctgatgctg

SEQ ID NO: 35222 - DNA, 25 bp, Canis familiaris
accctgcagctatgtcctgatgctg

SEQ ID NO: 35223 - DNA, 25 bp, Canis familiaris
acctcatcagccatgacgagatgtt

SEQ ID NO: 35224 - DNA, 25 bp, Canis familiaris
acctctatgccaacacagtgttgtc

SEQ ID NO: 35225 - DNA, 25 bp, Canis familiaris
acctccagcaagaacgtcactgtgc

SEQ ID NO: 35226 - DNA, 25 bp, Canis familiaris
accatcctgaggatgcgctcaggag

SEQ ID NO: 35227 - DNA, 25 bp, Canis familiaris
acctctctgaggtggctacgggaag

SEQ ID NO: 35228 - DNA, 25 bp, Canis familiaris
acctgtcgggactctccatagaaga

SEQ ID NO: 35229 - DNA, 25 bp, Canis familiaris
accattttgttcactgtatttagca

SEQ ID NO: 35230 - DNA, 25 bp, Canis familiaris
acctttgccctatctgtttacgcaa

SEQ ID NO: 35231 - DNA, 25 bp, Canis familiaris
acctttccagtatatgttccatcct

SEQ ID NO: 35232 - DNA, 25 bp, Canis familiaris
acctttccaagaagaagtaccgctg

SEQ ID NO: 35233 - DNA, 25 bp, Canis familiaris
acctcttccaggtggagtacgcgca

SEQ ID NO: 35234 - DNA, 25 bp, Canis familiaris
acctcactctcctgggagtccaggc

SEQ ID NO: 35235 - DNA, 25 bp, Canis familiaris
acctcccatgactgtggcaagcaag

SEQ ID NO: 35236 - DNA, 25 bp, Canis familiaris
acctcgtcatcctgtcaaatatagc

SEQ ID NO: 35237 - DNA, 25 bp, Canis familiaris
acctcacaggccttccaaatatagt

SEQ ID NO: 35238 - DNA, 25 bp, Canis familiaris
acctgcctcaaacccataacaagtt

SEQ ID NO: 35239 - DNA, 25 bp, Canis familiaris
accggatagacactccataaaatga

SEQ ID NO: 35240 - DNA, 25 bp, Canis familiaris
acctggagaaatgcccagcaaatac

SEQ ID NO: 35241 - DNA, 25 bp, Canis familiaris
accagtggaacagcttctgcaaaac

SEQ ID NO: 35242 - DNA, 25 bp, Canis familiaris
accagtccacaagctctttatcagt

SEQ ID NO: 35243 - DNA, 25 bp, Canis familiaris
accatcgcccaagctgtatattcag

SEQ ID NO: 35244 - DNA, 25 bp, Canis familiaris
acctacctatatgatgttttgctgc

SEQ ID NO: 35245 - DNA, 25 bp, Canis familiaris
accatagcctttttgtattagtgaa

SEQ ID NO: 35246 - DNA, 25 bp, Canis familiaris
accaggccttcgagatttctctgta

SEQ ID NO: 35247 - DNA, 25 bp, Canis familiaris
accggcctcaccgaatgtatcttgt

SEQ ID NO: 35248 - DNA, 25 bp, Canis familiaris
accttgtacaccgatcatgaactcg

SEQ ID NO: 35249 - DNA, 25 bp, Canis familiaris
accatagagccctgctgcagatact

SEQ ID NO: 35250 - DNA, 25 bp, Canis familiaris
accataggctattagggacactata

SEQ ID NO: 35251 - DNA, 25 bp, Canis familiaris
acctgagacagattgaggcctccct

SEQ ID NO: 35252 - DNA, 25 bp, Canis familiaris
acctggaacctgaatggtcccattc

SEQ ID NO: 35253 - DNA, 25 bp, Canis familiaris
acctgtgggcacatagggcccatcc

SEQ ID NO: 35254 - DNA, 25 bp, Canis familiaris
acctgtgaggtgctgggacccacct

SEQ ID NO: 35255 - DNA, 25 bp, Canis familiaris
accagtgagtggtgagagccccatc

SEQ ID NO: 35256 - DNA, 25 bp, Canis familiaris
accaggagtggtggaacctcaggct

SEQ ID NO: 35257 - DNA, 25 bp, Canis familiaris
acctggggattgcacactccaggcc

SEQ ID NO: 35258 - DNA, 25 bp, Canis familiaris
acctgctggcgatcgactacacagg

SEQ ID NO: 35259 - DNA, 25 bp, Canis familiaris
acctgctggctagcgaggttcatgg

SEQ ID NO: 35260 - DNA, 25 bp, Canis familiaris
acctcagggaggcagggctatgggt

SEQ ID NO: 35261 - DNA, 25 bp, Canis familiaris
acctggttgaccagtggcgctggag

SEQ ID NO: 35262 - DNA, 25 bp, Canis familiaris
accgagatctataccgcttgggaaa

SEQ ID NO: 35263 - DNA, 25 bp, Canis familiaris
accagggaatacgcttgagggaaat

SEQ ID NO: 35264 - DNA, 25 bp, Canis familiaris
accgggttaagtcagcagaggaact

SEQ ID NO: 35265 - DNA, 25 bp, Canis familiaris
accgggcatgtcactggaagaccaa

SEQ ID NO: 35266 - DNA, 25 bp, Canis familiaris
acctcacgtcaaaggtgaagaccca

SEQ ID NO: 35267 - DNA, 25 bp, Canis familiaris
accatccctcaaacggcaaacaggc

SEQ ID NO: 35268 - DNA, 25 bp, Canis familiaris
accatccctctgaccaggagagaag

SEQ ID NO: 35269 - DNA, 25 bp, Canis familiaris
acctcacactccctagtaagctagg

SEQ ID NO: 35270 - DNA, 25 bp, Canis familiaris
acccagctcttcatctgtcgaaagg

SEQ ID NO: 35271 - DNA, 25 bp, Canis familiaris
acctgcacttccaggcccatagcat

SEQ ID NO: 35272 - DNA, 25 bp, Canis familiaris
acctcttattcacctgccgaagctg

SEQ ID NO: 35273 - DNA, 25 bp, Canis familiaris
accttctaaaacatctgcacactga

SEQ ID NO: 35274 - DNA, 25 bp, Canis familiaris
accttcagaagtattggctcagtaa

SEQ ID NO: 35275 - DNA, 25 bp, Canis familiaris
accccagaagtaccttgtcagtcaa

SEQ ID NO: 35276 - DNA, 25 bp, Canis familiaris
accatccggagtttctcatgtcata

SEQ ID NO: 35277 - DNA, 25 bp, Canis familiaris
acctgggtggtcttccagatattcc

SEQ ID NO: 35278 - DNA, 25 bp, Canis familiaris
acctacgatggtgtcgaatcttcct

SEQ ID NO: 35279 - DNA, 25 bp, Canis familiaris
acgcaaaatgcgagtcggccttcct

SEQ ID NO: 35280 - DNA, 25 bp, Canis familiaris
acgaagaagggcctgcagacctgtc

SEQ ID NO: 35281 - DNA, 25 bp, Canis familiaris
accggatacagggtgcagtccctca

SEQ ID NO: 35282 - DNA, 25 bp, Canis familiaris
accaggcagacagggctggtccggc

SEQ ID NO: 35283 - DNA, 25 bp, Canis familiaris
accaggcagacacagttggcgcagc

SEQ ID NO: 35284 - DNA, 25 bp, Canis familiaris
accatggagcgacagccgtgctcag

SEQ ID NO: 35285 - DNA, 25 bp, Canis familiaris
accaggacagctccatgcctgttaa

SEQ ID NO: 35286 - DNA, 25 bp, Canis familiaris
accatgtacgctctggcatgtgttt

SEQ ID NO: 35287 - DNA, 25 bp, Canis familiaris
acctggacctggtgagtggcgttgc

SEQ ID NO: 35288 - DNA, 25 bp, Canis familiaris
acctggaagctggaagcctgggctc

SEQ ID NO: 35289 - DNA, 25 bp, Canis familiaris
acctctgacagggacagccatgcaa

SEQ ID NO: 35290 - DNA, 25 bp, Canis familiaris
acctcagagcatcttagctgctgca

SEQ ID NO: 35291 - DNA, 25 bp, Canis familiaris
acctacggctttatgctgcagaacg

SEQ ID NO: 35292 - DNA, 25 bp, Canis familiaris
accttcttccttacctgaagtctgg

SEQ ID NO: 35293 - DNA, 25 bp, Canis familiaris
accttttccttcacttattgctgaa

SEQ ID NO: 35294 - DNA, 25 bp, Canis familiaris
accttttctccttatctttgatgta

SEQ ID NO: 35295 - DNA, 25 bp, Canis familiaris
accttctgttctctgcagttgtgtg

SEQ ID NO: 35296 - DNA, 25 bp, Canis familiaris
accttacttcgcagcaatctcagct

SEQ ID NO: 35297 - DNA, 25 bp, Canis familiaris
accttggcttctgtacatcttgcct

SEQ ID NO: 35298 - DNA, 25 bp, Canis familiaris
acctatggctttaaagctgcgtgct

SEQ ID NO: 35299 - DNA, 25 bp, Canis familiaris
acctaatcccataaatccatgctgt

SEQ ID NO: 35300 - DNA, 25 bp, Canis familiaris
acctctaccgtaatgataatctgat

SEQ ID NO: 35301 - DNA, 25 bp, Canis familiaris
accatgataccatttatatactatt

SEQ ID NO: 35302 - DNA, 25 bp, Canis familiaris
acgctgtagccatccatgtactggt

SEQ ID NO: 35303 - DNA, 25 bp, Canis familiaris
acctaatggccaactgtaatgggga

SEQ ID NO: 35304 - DNA, 25 bp, Canis familiaris
accataatgcagacaccctattgct

SEQ ID NO: 35305 - DNA, 25 bp, Canis familiaris
acctgaagatgttcgcgattatctt

SEQ ID NO: 35306 - DNA, 25 bp, Canis familiaris
acctggcaattggctaatcctccat

SEQ ID NO: 35307 - DNA, 25 bp, Canis familiaris
accatagtcactgcatacatctgtc

SEQ ID NO: 35308 - DNA, 25 bp, Canis familiaris
accatatggactgctcatatgtgga

SEQ ID NO: 35309 - DNA, 25 bp, Canis familiaris
acctcagcagattgccttctggaga

SEQ ID NO: 35310 - DNA, 25 bp, Canis familiaris
acctcagcatattaccttctggaga

SEQ ID NO: 35311 - DNA, 25 bp, Canis familiaris
acctcagtattcattcctgttacct

SEQ ID NO: 35312 - DNA, 25 bp, Canis familiaris
acctcaggttgcatcagaatcttac

SEQ ID NO: 35313 - DNA, 25 bp, Canis familiaris
acctcaagtccttcagaaccagaac

SEQ ID NO: 35314 - DNA, 25 bp, Canis familiaris
acctcaagtccttcagaaccagaac

SEQ ID NO: 35315 - DNA, 25 bp, Canis familiaris
acctcaagtccttcagaaccagaac

SEQ ID NO: 35316 - DNA, 25 bp, Canis familiaris
acctcaagtccttcagaaccagaac

SEQ ID NO: 35317 - DNA, 25 bp, Canis familiaris
acctcaagtccttcagaaccagaac

SEQ ID NO: 35318 - DNA, 25 bp, Canis familiaris
acctcaagtccttcagaaccagaac

SEQ ID NO: 35319 - DNA, 25 bp, Canis familiaris
acctcaagtccttcagaaccagaac

SEQ ID NO: 35320 - DNA, 25 bp, Canis familiaris
acctcaagtccttcagaaccagaac

SEQ ID NO: 35321 - DNA, 25 bp, Canis familiaris
acctcaagtccttcagaaccagatc

SEQ ID NO: 35322 - DNA, 25 bp, Canis familiaris
acctcagtagccatcactgaccgtc

SEQ ID NO: 35323 - DNA, 25 bp, Canis familiaris
acctcagctacctcattaaatgtct

SEQ ID NO: 35324 - DNA, 25 bp, Canis familiaris
accatcgctaccagcatgcgggatt

SEQ ID NO: 35325 - DNA, 25 bp, Canis familiaris
acctcgtcaacaggcgggtgatgga

SEQ ID NO: 35326 - DNA, 25 bp, Canis familiaris
acctcagtcctcggctggaggaggc

SEQ ID NO: 35327 - DNA, 25 bp, Canis familiaris
acctcagcactgtcaagcggaagat

SEQ ID NO: 35328 - DNA, 25 bp, Canis familiaris
accatgagcgcgtcaacacgcacgt

SEQ ID NO: 35329 - DNA, 25 bp, Canis familiaris
accaggagcggctagatcggctgat

SEQ ID NO: 35330 - DNA, 25 bp, Canis familiaris
acctggacggcatcatcgccgaggt

SEQ ID NO: 35331 - DNA, 25 bp, Canis familiaris
acctacagggggtctggctggtgtt

SEQ ID NO: 35332 - DNA, 25 bp, Canis familiaris
acctacagcctgtgacctgagggta

SEQ ID NO: 35333 - DNA, 25 bp, Canis familiaris
accatcagcaccagagagccttggg

SEQ ID NO: 35334 - DNA, 25 bp, Canis familiaris
acctcacagctcaagtacacctggg

SEQ ID NO: 35335 - DNA, 25 bp, Canis familiaris
acctcacgccagccatcaaggaggg

SEQ ID NO: 35336 - DNA, 25 bp, Canis familiaris
acctgctcgggcgagaagcggaggc

SEQ ID NO: 35337 - DNA, 25 bp, Canis familiaris
acctcacggccccaagaagatgatc

SEQ ID NO: 35338 - DNA, 25 bp, Canis familiaris
accttcccaccttgcagaagatgag

SEQ ID NO: 35339 - DNA, 25 bp, Canis familiaris
accatcttgccctggagcaaggata

SEQ ID NO: 35340 - DNA, 25 bp, Canis familiaris
accatcctgcaccttgttgtaatga

SEQ ID NO: 35341 - DNA, 25 bp, Canis familiaris
acaccccacgttcttaatcacgtgg

SEQ ID NO: 35342 - DNA, 25 bp, Canis familiaris
acccccacgagtgtctaagtcgtgt

SEQ ID NO: 35343 - DNA, 25 bp, Canis familiaris
acctcccgaggtgtcaatgttttgg

SEQ ID NO: 35344 - DNA, 25 bp, Canis familiaris
acctacccacctgtattgtggattt

SEQ ID NO: 35345 - DNA, 25 bp, Canis familiaris
acctacctgcccattgtggggtcat

SEQ ID NO: 35346 - DNA, 25 bp, Canis familiaris
accttgcctggtacagtatgggggt

SEQ ID NO: 35347 - DNA, 25 bp, Canis familiaris
accatgtcctggtttgttgaaaggg

SEQ ID NO: 35348 - DNA, 25 bp, Canis familiaris
accatgtcacggtctagactacgtc

SEQ ID NO: 35349 - DNA, 25 bp, Canis familiaris
acctgtctcaggttacacgttggta

SEQ ID NO: 35350 - DNA, 25 bp, Canis familiaris
accttcatcgattgtactctactgg

SEQ ID NO: 35351 - DNA, 25 bp, Canis familiaris
acctctatcatatttagccattggg

SEQ ID NO: 35352 - DNA, 25 bp, Canis familiaris
accatcgtctacaagagcagcattg

SEQ ID NO: 35353 - DNA, 25 bp, Canis familiaris
accatccccatagtgagcatcattg

SEQ ID NO: 35354 - DNA, 25 bp, Canis familiaris
accatgctccagatgctggcactgt

SEQ ID NO: 35355 - DNA, 25 bp, Canis familiaris
accatgtcccattgatgccaggtgg

SEQ ID NO: 35356 - DNA, 25 bp, Canis familiaris
acctgtgccaaacccggtagttatg

SEQ ID NO: 35357 - DNA, 25 bp, Canis familiaris
acctggccacaatccgtgtgttgga

SEQ ID NO: 35358 - DNA, 25 bp, Canis familiaris
accggccacttgatcttgtttggtg

SEQ ID NO: 35359 - DNA, 25 bp, Canis familiaris
accggcgagtgtgttgtcacttagg

SEQ ID NO: 35360 - DNA, 25 bp, Canis familiaris
acctggtggttggttctgacttttg

SEQ ID NO: 35361 - DNA, 25 bp, Canis familiaris
acctaatgtggtgtttgagagcttc

SEQ ID NO: 35362 - DNA, 25 bp, Canis familiaris
acccattcttgcggtttgaacttgc

SEQ ID NO: 35363 - DNA, 25 bp, Canis familiaris
acctcatgtagggcagtgtttagct

SEQ ID NO: 35364 - DNA, 25 bp, Canis familiaris
acctcatgggaggggcttgaagcca

SEQ ID NO: 35365 - DNA, 25 bp, Canis familiaris
acctctgggacttcttgtagcacca

SEQ ID NO: 35366 - DNA, 25 bp, Canis familiaris
acctagctcgactagcttgcttgtc

SEQ ID NO: 35367 - DNA, 25 bp, Canis familiaris
acctgatgtcatccatacttgctat

SEQ ID NO: 35368 - DNA, 25 bp, Canis familiaris
acgctgcgtcataaacctttcgtgc

SEQ ID NO: 35369 - DNA, 25 bp, Canis familiaris
accttacacagaaccacttcagatg

SEQ ID NO: 35370 - DNA, 25 bp, Canis familiaris
accttcatcagggtcccctgcagaa

SEQ ID NO: 35371 - DNA, 25 bp, Canis familiaris
accatttgatggtttcagctccaga

SEQ ID NO: 35372 - DNA, 25 bp, Canis familiaris
acctttatgagcttgtaacctgcat

SEQ ID NO: 35373 - DNA, 25 bp, Canis familiaris
accttttgtgcatttgtcactcttc

SEQ ID NO: 35374 - DNA, 25 bp, Canis familiaris
accttattgtggtcattattttaca

SEQ ID NO: 35375 - DNA, 25 bp, Canis familiaris
acctttttgggatcactgtaggaag

SEQ ID NO: 35376 - DNA, 25 bp, Canis familiaris
acctttgatccaccattactgtaaa

SEQ ID NO: 35377 - DNA, 25 bp, Canis familiaris
accattttcattcacaacttaacat

SEQ ID NO: 35378 - DNA, 25 bp, Canis familiaris
accatactttatgtacctttatata

SEQ ID NO: 35379 - DNA, 25 bp, Canis familiaris
acccctttcatcaccagtgttttat

SEQ ID NO: 35380 - DNA, 25 bp, Canis familiaris
accccttacaccgacgtgaacattg

SEQ ID NO: 35381 - DNA, 25 bp, Canis familiaris
accccattggcctcaaataacttgc

SEQ ID NO: 35382 - DNA, 25 bp, Canis familiaris
acctcctcctacttttatagacttg

SEQ ID NO: 35383 - DNA, 25 bp, Canis familiaris
accatccacttgtatcctttagtct

SEQ ID NO: 35384 - DNA, 25 bp, Canis familiaris
accattgccttgttcagttttgttg

SEQ ID NO: 35385 - DNA, 25 bp, Canis familiaris
actcactccttagagttttcttaga

SEQ ID NO: 35386 - DNA, 25 bp, Canis familiaris
acctctccttaaccttcatgttagg

SEQ ID NO: 35387 - DNA, 25 bp, Canis familiaris
accatcttcttttgggttgctgtga

SEQ ID NO: 35388 - DNA, 25 bp, Canis familiaris
acctttgcctcttgggttgttgtgc

SEQ ID NO: 35389 - DNA, 25 bp, Canis familiaris
acgctggcggtttggtttgttgtgc

SEQ ID NO: 35390 - DNA, 25 bp, Canis familiaris
acctggggtctagctgtttttgatt

SEQ ID NO: 35391 - DNA, 25 bp, Canis familiaris
accgtgtcagtatcattttgtttta

SEQ ID NO: 35392 - DNA, 25 bp, Canis familiaris
accgtctgcatttccgatgtggttt

SEQ ID NO: 35393 - DNA, 25 bp, Canis familiaris
acggactgcatgtgtaactggttag

SEQ ID NO: 35394 - DNA, 25 bp, Canis familiaris
accgaatgctgcctgtggacgagtt

SEQ ID NO: 35395 - DNA, 25 bp, Canis familiaris
acctatgctgctggctgtgaggggt

SEQ ID NO: 35396 - DNA, 25 bp, Canis familiaris
accatcgcttggcttggtggtgcca

SEQ ID NO: 35397 - DNA, 25 bp, Canis familiaris
acctgctgggggacatgtgggccca

SEQ ID NO: 35398 - DNA, 25 bp, Canis familiaris
acctgtgagtagtccctgggaggca

SEQ ID NO: 35399 - DNA, 25 bp, Canis familiaris
acctgtcagtatccggcagtggagc

SEQ ID NO: 35400 - DNA, 25 bp, Canis familiaris
accttcactaccttacttagcaatt

SEQ ID NO: 35401 - DNA, 25 bp, Canis familiaris
accatccttgtctttacttcatatt

SEQ ID NO: 35402 - DNA, 25 bp, Canis familiaris
accatgatgctttttgtactttgaa

SEQ ID NO: 35403 - DNA, 25 bp, Canis familiaris
accttctcatatgctatcctttaaa

SEQ ID NO: 35404 - DNA, 25 bp, Canis familiaris
accttctgctcatgtttctttataa

SEQ ID NO: 35405 - DNA, 25 bp, Canis familiaris
accttctgctcatgtttctttataa

SEQ ID NO: 35406 - DNA, 25 bp, Canis familiaris
accttctgctcatgtttctttataa

SEQ ID NO: 35407 - DNA, 25 bp, Canis familiaris
accttcctctcaattttgctgtgaa

SEQ ID NO: 35408 - DNA, 25 bp, Canis familiaris
accatttcatcccatctattgttaa

SEQ ID NO: 35409 - DNA, 25 bp, Canis familiaris
acctttcatgtccaaaatgttgatc

SEQ ID NO: 35410 - DNA, 25 bp, Canis familiaris
acctgtctggtcaaagacttcttcc

SEQ ID NO: 35411 - DNA, 25 bp, Canis familiaris
acctaccaacagaaacttcctcatg

SEQ ID NO: 35412 - DNA, 25 bp, Canis familiaris
accgcaccacacgaaccattcgtgt

SEQ ID NO: 35413 - DNA, 25 bp, Canis familiaris
accgcccaaccaactcaaggatatg

SEQ ID NO: 35414 - DNA, 25 bp, Canis familiaris
accttcataaccaccaatatatctg

SEQ ID NO: 35415 - DNA, 25 bp, Canis familiaris
acctgtaagaccaagccgtattcca

SEQ ID NO: 35416 - DNA, 25 bp, Canis familiaris
acctggagaatcctatccgactggc

SEQ ID NO: 35417 - DNA, 25 bp, Canis familiaris
acctgggaacattactctatcgggc

SEQ ID NO: 35418 - DNA, 25 bp, Canis familiaris
accgggatgcactcagcttacagtg

SEQ ID NO: 35419 - DNA, 25 bp, Canis familiaris
acctgacttacagagtctatcactc

SEQ ID NO: 35420 - DNA, 25 bp, Canis familiaris
acctacccacggatctatacagcta

SEQ ID NO: 35421 - DNA, 25 bp, Canis familiaris
acctacctcaagtactccatcaagg

SEQ ID NO: 35422 - DNA, 25 bp, Canis familiaris
accatactcccacacaagacaatgg

SEQ ID NO: 35423 - DNA, 25 bp, Canis familiaris
acctatatccactctaaggcgatgt

SEQ ID NO: 35424 - DNA, 25 bp, Canis familiaris
accttgatctaatcctgggctaatg

SEQ ID NO: 35425 - DNA, 25 bp, Canis familiaris
acctattgtaagccctggactgagt

SEQ ID NO: 35426 - DNA, 25 bp, Canis familiaris
accatctttggaacacgaagtgtgt

SEQ ID NO: 35427 - DNA, 25 bp, Canis familiaris
accttttgcagaccattgtgagtgt

SEQ ID NO: 35428 - DNA, 25 bp, Canis familiaris
accttcttgatgattaatgcagtat

SEQ ID NO: 35429 - DNA, 25 bp, Canis familiaris
accttcttgctgtaagagcacacca

SEQ ID NO: 35430 - DNA, 25 bp, Canis familiaris
acctgctttgtctcaggcagcatga

SEQ ID NO: 35431 - DNA, 25 bp, Canis familiaris
acctgttcaagcttgctgccagaga

SEQ ID NO: 35432 - DNA, 25 bp, Canis familiaris
accattgtaatactgaccgctgcac

SEQ ID NO: 35433 - DNA, 25 bp, Canis familiaris
accattggtatgttgtgccttgcct

SEQ ID NO: 35434 - DNA, 25 bp, Canis familiaris
acctaatgtgtgttgagagcttctc

SEQ ID NO: 35435 - DNA, 25 bp, Canis familiaris
acctgcactcgaagtgagacccact

SEQ ID NO: 35436 - DNA, 25 bp, Canis familiaris
accatcacctgattaagactccacc

SEQ ID NO: 35437 - DNA, 25 bp, Canis familiaris
accatcacctggttaaccacagtct

SEQ ID NO: 35438 - DNA, 25 bp, Canis familiaris
accataccttataaaccctgatctt

SEQ ID NO: 35439 - DNA, 25 bp, Canis familiaris
accattccttaagtacctccattgg

SEQ ID NO: 35440 - DNA, 25 bp, Canis familiaris
accttgcttatatgatagccgatat

SEQ ID NO: 35441 - DNA, 25 bp, Canis familiaris
accattttatatttgacttgctgat

SEQ ID NO: 35442 - DNA, 25 bp, Canis familiaris
accattccttattatcactaatcat

SEQ ID NO: 35443 - DNA, 25 bp, Canis familiaris
accatctgccttcaattcacaatgt

SEQ ID NO: 35444 - DNA, 25 bp, Canis familiaris
accattcactgtttatgtagcacat

SEQ ID NO: 35445 - DNA, 25 bp, Canis familiaris
accttgcactctttggacatgctca

SEQ ID NO: 35446 - DNA, 25 bp, Canis familiaris
acctggcagccatttaactcagcag

SEQ ID NO: 35447 - DNA, 25 bp, Canis familiaris
acctgccaaatatgatgacatcaag

SEQ ID NO: 35448 - DNA, 25 bp, Canis familiaris
acctccactatgtcagatcaccgtg

SEQ ID NO: 35449 - DNA, 25 bp, Canis familiaris
acctgccctagatggacctttggag

SEQ ID NO: 35450 - DNA, 25 bp, Canis familiaris
accggcttagtatcactctcttggt

SEQ ID NO: 35451 - DNA, 25 bp, Canis familiaris
accttgtttgtatagccactggatt

SEQ ID NO: 35452 - DNA, 25 bp, Canis familiaris
acctttggaggttgaacattggatt

SEQ ID NO: 35453 - DNA, 25 bp, Canis familiaris
accattctgggcctgaggaatcgga

SEQ ID NO: 35454 - DNA, 25 bp, Canis familiaris
accattgctgggccttggggagaga

SEQ ID NO: 35455 - DNA, 25 bp, Canis familiaris
accattgcggtcgcgcggatcatga

SEQ ID NO: 35456 - DNA, 25 bp, Canis familiaris
accctggcgtcagcgtggttataag

SEQ ID NO: 35457 - DNA, 25 bp, Canis familiaris
acctcttcctgggttgcagttacaa

SEQ ID NO: 35458 - DNA, 25 bp, Canis familiaris
acctgtcatctcgggtgaggtctcc

SEQ ID NO: 35459 - DNA, 25 bp, Canis familiaris
accttgcattccaagtggagccctc

SEQ ID NO: 35460 - DNA, 25 bp, Canis familiaris
accttgccacttgggagaccaacac

SEQ ID NO: 35461 - DNA, 25 bp, Canis familiaris
accttgagacttgggggcaaattct

SEQ ID NO: 35462 - DNA, 25 bp, Canis familiaris
acctacagactttagacctacattt

SEQ ID NO: 35463 - DNA, 25 bp, Canis familiaris
accattatgatgattagcaccttgt

SEQ ID NO: 35464 - DNA, 25 bp, Canis familiaris
accatatgagattcgctgggccatt

SEQ ID NO: 35465 - DNA, 25 bp, Canis familiaris
acccatgttcatgctggacctgtac

SEQ ID NO: 35466 - DNA, 25 bp, Canis familiaris
acccgaaatgcctgacacattcctt

SEQ ID NO: 35467 - DNA, 25 bp, Canis familiaris
acctcggaaggtcacacttcctctg

SEQ ID NO: 35468 - DNA, 25 bp, Canis familiaris
acctccggagaacacctgtatctcg

SEQ ID NO: 35469 - DNA, 25 bp, Canis familiaris
acctcctgcagagaaactactttcc

SEQ ID NO: 35470 - DNA, 25 bp, Canis familiaris
acctctctgccagccagaaggcttt

SEQ ID NO: 35471 - DNA, 25 bp, Canis familiaris
accctgctgatctggcagaagtgat

SEQ ID NO: 35472 - DNA, 25 bp, Canis familiaris
accggtgcaactcaaaggaagcctt

SEQ ID NO: 35473 - DNA, 25 bp, Canis familiaris
accgaggaagctccaaaggtatgcg

SEQ ID NO: 35474 - DNA, 25 bp, Canis familiaris
accgtagtagtgcgacaggatatct

SEQ ID NO: 35475 - DNA, 25 bp, Canis familiaris
accgggtagtgccgcaacagcaaca

SEQ ID NO: 35476 - DNA, 25 bp, Canis familiaris
accggttcagagagctgcagaccca

SEQ ID NO: 35477 - DNA, 25 bp, Canis familiaris
acctggttccagacagtgcaggccc

SEQ ID NO: 35478 - DNA, 25 bp, Canis familiaris
acctggtccgcaaagggatgccgtt

SEQ ID NO: 35479 - DNA, 25 bp, Canis familiaris
acctggtccctctgatggatgccag

SEQ ID NO: 35480 - DNA, 25 bp, Canis familiaris
acctgggcaccatgtcagaggccaa

SEQ ID NO: 35481 - DNA, 25 bp, Canis familiaris
acctgaagactcgctctcagatgcc

SEQ ID NO: 35482 - DNA, 25 bp, Canis familiaris
accctggactccgattcaaggtcgt

SEQ ID NO: 35483 - DNA, 25 bp, Canis familiaris
acctctgtgattgccatccaggatt

SEQ ID NO: 35484 - DNA, 25 bp, Canis familiaris
accattgtggtgtcagctactgctt

SEQ ID NO: 35485 - DNA, 25 bp, Canis familiaris
accatatgctggcctagctggctgc

SEQ ID NO: 35486 - DNA, 25 bp, Canis familiaris
accatacgctggtactgaggcttga

SEQ ID NO: 35487 - DNA, 25 bp, Canis familiaris
acctacctgcctatgagagctttga

SEQ ID NO: 35488 - DNA, 25 bp, Canis familiaris
acctcacctgacattcaaattttaa

SEQ ID NO: 35489 - DNA, 25 bp, Canis familiaris
acctcatccttcactaaagcttgtt

SEQ ID NO: 35490 - DNA, 25 bp, Canis familiaris
accttatctatcacaatccacttgc

SEQ ID NO: 35491 - DNA, 25 bp, Canis familiaris
accttgtgtactaatttgactgtgc

SEQ ID NO: 35492 - DNA, 25 bp, Canis familiaris
accttttacagcatcggatcctcat

SEQ ID NO: 35493 - DNA, 25 bp, Canis familiaris
accattatttctaaaaatcatccat

SEQ ID NO: 35494 - DNA, 25 bp, Canis familiaris
acctcttcttaaatacacattccat

SEQ ID NO: 35495 - DNA, 25 bp, Canis familiaris
acctcactgttggacatacattccc

SEQ ID NO: 35496 - DNA, 25 bp, Canis familiaris
acctcagcttattacagaagtgcca

SEQ ID NO: 35497 - DNA, 25 bp, Canis familiaris
acctctgtgttctagagcaacatca

SEQ ID NO: 35498 - DNA, 25 bp, Canis familiaris
acctcttgtaagaactaacactgtt

SEQ ID NO: 35499 - DNA, 25 bp, Canis familiaris
acctaggccaagtaccaatcaatgt

SEQ ID NO: 35500 - DNA, 25 bp, Canis familiaris
acctgggccaggttacagtgctcat

SEQ ID NO: 35501 - DNA, 25 bp, Canis familiaris
acctgggccatgactttgtgtccat

SEQ ID NO: 35502 - DNA, 25 bp, Canis familiaris
acctgtggtttcacgatgtgccata

SEQ ID NO: 35503 - DNA, 25 bp, Canis familiaris
accttggcttatcagtgttgcgctc

SEQ ID NO: 35504 - DNA, 25 bp, Canis familiaris
acctgggccctgacattgttagtct

SEQ ID NO: 35505 - DNA, 25 bp, Canis familiaris
acctgggctgcccgaaatgacagtt

SEQ ID NO: 35506 - DNA, 25 bp, Canis familiaris
accgtgcagatccagtgtcaaacag

SEQ ID NO: 35507 - DNA, 25 bp, Canis familiaris
accgctcaggtattgttgaaatgga

SEQ ID NO: 35508 - DNA, 25 bp, Canis familiaris
acctcacaggcatgttgtgagaata

SEQ ID NO: 35509 - DNA, 25 bp, Canis familiaris
acctcgcaagcatgttcatgaaaaa

SEQ ID NO: 35510 - DNA, 25 bp, Canis familiaris
acctctgctcaacggtctaaaccat

SEQ ID NO: 35511 - DNA, 25 bp, Canis familiaris
accctgacaacgtgaataaccatag

SEQ ID NO: 35512 - DNA, 25 bp, Canis familiaris
acacctacgacggaatacaaccaag

SEQ ID NO: 35513 - DNA, 25 bp, Canis familiaris
accccctgatcacacaataacaaaa

SEQ ID NO: 35514 - DNA, 25 bp, Canis familiaris
acctcctttcagcacatagagcact

SEQ ID NO: 35515 - DNA, 25 bp, Canis familiaris
accttagctccagtcctgagagcct

SEQ ID NO: 35516 - DNA, 25 bp, Canis familiaris
acctctcactccgtttaaactgtga

SEQ ID NO: 35517 - DNA, 25 bp, Canis familiaris
accattccaccagtttgtaaagaga

SEQ ID NO: 35518 - DNA, 25 bp, Canis familiaris
accattaccacatttctgcaagaac

SEQ ID NO: 35519 - DNA, 25 bp, Canis familiaris
accattatgtctttctcaatcagaa

SEQ ID NO: 35520 - DNA, 25 bp, Canis familiaris
acctctatgctcttcgacaatcaga

SEQ ID NO: 35521 - DNA, 25 bp, Canis familiaris
acctcatcttcgacagtgcacaaaa

SEQ ID NO: 35522 - DNA, 25 bp, Canis familiaris
accattcttcgccaggccaagaatc

SEQ ID NO: 35523 - DNA, 25 bp, Canis familiaris
acctttcctgcaaggcctgcagtac

SEQ ID NO: 35524 - DNA, 25 bp, Canis familiaris
acctgaacgtgaagtgctctgcgca

SEQ ID NO: 35525 - DNA, 25 bp, Canis familiaris
acctcatgaagggcttctctctgct

SEQ ID NO: 35526 - DNA, 25 bp, Canis familiaris
accttggatgtgttttctggctgtg

SEQ ID NO: 35527 - DNA, 25 bp, Canis familiaris
acctaaatctttttgtgctctgtgt

SEQ ID NO: 35528 - DNA, 25 bp, Canis familiaris
acttaaattttgtgaccatagagga

SEQ ID NO: 35529 - DNA, 25 bp, Canis familiaris
actcgaattctcctgttacctagag

SEQ ID NO: 35530 - DNA, 25 bp, Canis familiaris
acctgagatttttttgccttgggat

SEQ ID NO: 35531 - DNA, 25 bp, Canis familiaris
acctggaacttcttgctgttttcct

SEQ ID NO: 35532 - DNA, 25 bp, Canis familiaris
acctgtctactttctcttgtttaag

SEQ ID NO: 35533 - DNA, 25 bp, Canis familiaris
accttccacacttttgatttctaca

SEQ ID NO: 35534 - DNA, 25 bp, Canis familiaris
acctcccccttgtgattatagatga

SEQ ID NO: 35535 - DNA, 25 bp, Canis familiaris
acctcataccacatgcctatttaga

SEQ ID NO: 35536 - DNA, 25 bp, Canis familiaris
acctactcctgcaatcactattaag

SEQ ID NO: 35537 - DNA, 25 bp, Canis familiaris
acctgtatcaggaatccttaaaggc

SEQ ID NO: 35538 - DNA, 25 bp, Canis familiaris
accgtgatcatgataccttcctagc

SEQ ID NO: 35539 - DNA, 25 bp, Canis familiaris
acctgtgaaaattccatccttctgt

SEQ ID NO: 35540 - DNA, 25 bp, Canis familiaris
acctctggacaacatcacctttgtg

SEQ ID NO: 35541 - DNA, 25 bp, Canis familiaris
acctggcgaacacatcatttgcttg

SEQ ID NO: 35542 - DNA, 25 bp, Canis familiaris
acctaccatgagctgcactttgctt

SEQ ID NO: 35543 - DNA, 25 bp, Canis familiaris
acctcaagaggaatgactgtttatg

SEQ ID NO: 35544 - DNA, 25 bp, Canis familiaris
accgcagctaggaataatggaatag

SEQ ID NO: 35545 - DNA, 25 bp, Canis familiaris
accgagccaagcacactgcaaagag

SEQ ID NO: 35546 - DNA, 25 bp, Canis familiaris
acctgggcaagcttagctaccgcag

SEQ ID NO: 35547 - DNA, 25 bp, Canis familiaris
acctcaggcaagttatgtcctctct

SEQ ID NO: 35548 - DNA, 25 bp, Canis familiaris
acctcggccaggaagatacctgctt

SEQ ID NO: 35549 - DNA, 25 bp, Canis familiaris
acctggacttggagaccgatcctgg

SEQ ID NO: 35550 - DNA, 25 bp, Canis familiaris
acctgtcctgggagtcaggagcccc

SEQ ID NO: 35551 - DNA, 25 bp, Canis familiaris
acctccacggggactcagaggatgc

SEQ ID NO: 35552 - DNA, 25 bp, Canis familiaris
acctcttctctgggactcaagaact

SEQ ID NO: 35553 - DNA, 25 bp, Canis familiaris
acctctgatttttctctctagattt

SEQ ID NO: 35554 - DNA, 25 bp, Canis familiaris
acctctgtatctttcttctgaacta

SEQ ID NO: 35555 - DNA, 25 bp, Canis familiaris
accgtggtgctcttctacgaaaact

SEQ ID NO: 35556 - DNA, 25 bp, Canis familiaris
accctggctggcatcttggaaaaca

SEQ ID NO: 35557 - DNA, 25 bp, Canis familiaris
acccccttgcctacagtggaaagca

SEQ ID NO: 35558 - DNA, 25 bp, Canis familiaris
acctgcccctttgtgggcaaactat

SEQ ID NO: 35559 - DNA, 25 bp, Canis familiaris
acctgcccacgtgagctggggaaag

SEQ ID NO: 35560 - DNA, 25 bp, Canis familiaris
acctaccggaagctgtctggaaggc

SEQ ID NO: 35561 - DNA, 25 bp, Canis familiaris
acctccctggaagatttctgagagt

SEQ ID NO: 35562 - DNA, 25 bp, Canis familiaris
accccacgattacactcctgggtat

SEQ ID NO: 35563 - DNA, 25 bp, Canis familiaris
accccacgttcttaatcacgtggtg

SEQ ID NO: 35564 - DNA, 25 bp, Canis familiaris
acctccacgttgctgaaaccagtgg

SEQ ID NO: 35565 - DNA, 25 bp, Canis familiaris
accccgtgctaccgaagacaatggg

SEQ ID NO: 35566 - DNA, 25 bp, Canis familiaris
acccggtgccacctgaacagagggt

SEQ ID NO: 35567 - DNA, 25 bp, Canis familiaris
acctttgtgcccctgaactgggcta

SEQ ID NO: 35568 - DNA, 25 bp, Canis familiaris
acctttctgcccatttctacagaaa

SEQ ID NO: 35569 - DNA, 25 bp, Canis familiaris
acctttctgctcaaattgtctatct

SEQ ID NO: 35570 - DNA, 25 bp, Canis familiaris
acctttgcagccagtttctgtcatg

SEQ ID NO: 35571 - DNA, 25 bp, Canis familiaris
acctcttcaccattgttgctttggg

SEQ ID NO: 35572 - DNA, 25 bp, Canis familiaris
acccttctcaagtcttttctacagg

SEQ ID NO: 35573 - DNA, 25 bp, Canis familiaris
accttttcacgcttttctgtgactg

SEQ ID NO: 35574 - DNA, 25 bp, Canis familiaris
accttcttcgtgtcagattctgaga

SEQ ID NO: 35575 - DNA, 25 bp, Canis familiaris
acctgctgcttcatgaagaggctga

SEQ ID NO: 35576 - DNA, 25 bp, Canis familiaris
acctgctttcggctcagagcatgat

SEQ ID NO: 35577 - DNA, 25 bp, Canis familiaris
acctgcttcctgcttcaggagactc

SEQ ID NO: 35578 - DNA, 25 bp, Canis familiaris
acctccagctggtttcagggacatc

SEQ ID NO: 35579 - DNA, 25 bp, Canis familiaris
accggagtaggatcagagtgaaccc

SEQ ID NO: 35580 - DNA, 25 bp, Canis familiaris
accgtagtgatgtacctaggacttc

SEQ ID NO: 35581 - DNA, 25 bp, Canis familiaris
accttagtgtagatctatgtcttgt

SEQ ID NO: 35582 - DNA, 25 bp, Canis familiaris
accttagtgtagaaccatgtcctgg

SEQ ID NO: 35583 - DNA, 25 bp, Canis familiaris
accgtgggtggttaattgccttgag

SEQ ID NO: 35584 - DNA, 25 bp, Canis familiaris
acctgtttgggtccaatggcccatt

SEQ ID NO: 35585 - DNA, 25 bp, Canis familiaris
acctattgtatgatctccatgtgca

SEQ ID NO: 35586 - DNA, 25 bp, Canis familiaris
acctcggattgaatcccatgtcagg

SEQ ID NO: 35587 - DNA, 25 bp, Canis familiaris
accgagattggaaccagatgatagg

SEQ ID NO: 35588 - DNA, 25 bp, Canis familiaris
acctggtgcttaagcctggatagcc

SEQ ID NO: 35589 - DNA, 25 bp, Canis familiaris
acctggattcattagggtggagccc

SEQ ID NO: 35590 - DNA, 25 bp, Canis familiaris
accggtattgcatggagcgggcctc

SEQ ID NO: 35591 - DNA, 25 bp, Canis familiaris
acctgtgtgtttggtgtcgagtccc

SEQ ID NO: 35592 - DNA, 25 bp, Canis familiaris
accgttgtgcctgattcggtgttcc

SEQ ID NO: 35593 - DNA, 25 bp, Canis familiaris
accttctgtcctgttcatgatgtgt

SEQ ID NO: 35594 - DNA, 25 bp, Canis familiaris
acctacttcctgctgtttttatact

SEQ ID NO: 35595 - DNA, 25 bp, Canis familiaris
acctgccttcttctgtttgaattaa

SEQ ID NO: 35596 - DNA, 25 bp, Canis familiaris
acctacttcttggtgtgcttggcaa

SEQ ID NO: 35597 - DNA, 25 bp, Canis familiaris
acctatcatggtaccttgtctgagc

SEQ ID NO: 35598 - DNA, 25 bp, Canis familiaris
acctcaggaccaccatgttgtacat

SEQ ID NO: 35599 - DNA, 25 bp, Canis familiaris
acctcgtatccaggtggagtcaccc

SEQ ID NO: 35600 - DNA, 25 bp, Canis familiaris
acctcagtaccaagtatcattacct

SEQ ID NO: 35601 - DNA, 25 bp, Canis familiaris
acccgtacaaatcatgcaaagtcga

SEQ ID NO: 35602 - DNA, 25 bp, Canis familiaris
accgtgtactcattttaagctccga

SEQ ID NO: 35603 - DNA, 25 bp, Canis familiaris
accctggacttgatgtgaacttggc

SEQ ID NO: 35604 - DNA, 25 bp, Canis familiaris
acctctttctctgggtgtagcgtgg

SEQ ID NO: 35605 - DNA, 25 bp, Canis familiaris
accctggtcttgctgagttgagttg

SEQ ID NO: 35606 - DNA, 25 bp, Canis familiaris
cacccgttcttggggtcgactatgt

SEQ ID NO: 35607 - DNA, 25 bp, Canis familiaris
acctcgtcgtgtgaggccagacgga

SEQ ID NO: 35608 - DNA, 25 bp, Canis familiaris
acctcgtcgtgtgagggccagacgg

SEQ ID NO: 35609 - DNA, 25 bp, Canis familiaris
acctcgtcgtgtgagggccagacgg

SEQ ID NO: 35610 - DNA, 25 bp, Canis familiaris
acctcgtcgtgtgagggccagacgg

SEQ ID NO: 35611 - DNA, 25 bp, Canis familiaris
acctcgtcgtgtgagggccagacgg

SEQ ID NO: 35612 - DNA, 25 bp, Canis familiaris
acctcagtctttcttggcgcagagg

SEQ ID NO: 35613 - DNA, 25 bp, Canis familiaris
acctatacctgtgttgccgagatgt

SEQ ID NO: 35614 - DNA, 25 bp, Canis familiaris
acccgacacgactttcacgaattgt

SEQ ID NO: 35615 - DNA, 25 bp, Canis familiaris
acctccatactgttttccagagtgg

SEQ ID NO: 35616 - DNA, 25 bp, Canis familiaris
accttaatggtcatgctgccgcagg

SEQ ID NO: 35617 - DNA, 25 bp, Canis familiaris
acctgctaaggtgcctgcggagggt

SEQ ID NO: 35618 - DNA, 25 bp, Canis familiaris
acctttgagcacacaccgagagagt

SEQ ID NO: 35619 - DNA, 25 bp, Canis familiaris
accttatgaccttgtccgtgtgtgt

SEQ ID NO: 35620 - DNA, 25 bp, Canis familiaris
accttcagacctggaaagccctgct

SEQ ID NO: 35621 - DNA, 25 bp, Canis familiaris
acctgaggacctggaagcctttctc

SEQ ID NO: 35622 - DNA, 25 bp, Canis familiaris
acctaggactagcaggttcctctct

SEQ ID NO: 35623 - DNA, 25 bp, Canis familiaris
acctaggacttgcagaggccacact

SEQ ID NO: 35624 - DNA, 25 bp, Canis familiaris
acctcggaggagcacggaacatcta

SEQ ID NO: 35625 - DNA, 25 bp, Canis familiaris
acctttcaggccacggagagactag

SEQ ID NO: 35626 - DNA, 25 bp, Canis familiaris
accctctgggcctcggaggagggct

SEQ ID NO: 35627 - DNA, 25 bp, Canis familiaris
accccgtatcccatcgatgaggagg

SEQ ID NO: 35628 - DNA, 25 bp, Canis familiaris
acccgcgttagtctcgtggagacac

SEQ ID NO: 35629 - DNA, 25 bp, Canis familiaris
accgcttttcttctccgagaagcac

SEQ ID NO: 35630 - DNA, 25 bp, Canis familiaris
acctcttttcataaatccgaacgat

SEQ ID NO: 35631 - DNA, 25 bp, Canis familiaris
acctcgttctcaaattcctacagaa

SEQ ID NO: 35632 - DNA, 25 bp, Canis familiaris
acctgttgaccaatatacccagtga

SEQ ID NO: 35633 - DNA, 25 bp, Canis familiaris
acctggagagccagctgacccagga

SEQ ID NO: 35634 - DNA, 25 bp, Canis familiaris
acctggcagagaaacgagaacacga

SEQ ID NO: 35635 - DNA, 25 bp, Canis familiaris
acctggcagagaaactggggggcag

SEQ ID NO: 35636 - DNA, 25 bp, Canis familiaris
acctacaagaggatgggggagagca

SEQ ID NO: 35637 - DNA, 25 bp, Canis familiaris
acctgacacgggaggggctgccagg

SEQ ID NO: 35638 - DNA, 25 bp, Canis familiaris
acctaaggagcgactgggtgccctg

SEQ ID NO: 35639 - DNA, 25 bp, Canis familiaris
accgaagatcagccctaggtgacct

SEQ ID NO: 35640 - DNA, 25 bp, Canis familiaris
acctattgattttccagttgcacct

SEQ ID NO: 35641 - DNA, 25 bp, Canis familiaris
acctgaagtatttcagcggcgccca

SEQ ID NO: 35642 - DNA, 25 bp, Canis familiaris
accgaagacaatggggtgcccgaca

SEQ ID NO: 35643 - DNA, 25 bp, Canis familiaris
acctgataaaagctgttctccctac

SEQ ID NO: 35644 - DNA, 25 bp, Canis familiaris
acctgctaaaactttatctgccagt

SEQ ID NO: 35645 - DNA, 25 bp, Canis familiaris
acctgcatagaattccttaccactt

SEQ ID NO: 35646 - DNA, 25 bp, Canis familiaris
acctatcaaattacattctcacact

SEQ ID NO: 35647 - DNA, 25 bp, Canis familiaris
accgtcatagcaccatatatctgca

SEQ ID NO: 35648 - DNA, 25 bp, Canis familiaris
accgcatcattcacaatatccaaga

SEQ ID NO: 35649 - DNA, 25 bp, Canis familiaris
acctcattctcaaaatgctgcaaag

SEQ ID NO: 35650 - DNA, 25 bp, Canis familiaris
acctcatctgtcaaatgtggggaga

SEQ ID NO: 35651 - DNA, 25 bp, Canis familiaris
acctctcggacagtgtgtgtgccgt

SEQ ID NO: 35652 - DNA, 25 bp, Canis familiaris
acctcctgcagatgctgtgtctggt

SEQ ID NO: 35653 - DNA, 25 bp, Canis familiaris
acctgcgccagaagtgtcatgctgc

SEQ ID NO: 35654 - DNA, 25 bp, Canis familiaris
acctctgccgcatatgtatgtgata

SEQ ID NO: 35655 - DNA, 25 bp, Canis familiaris
acctgctgccctgcatggaatttat

SEQ ID NO: 35656 - DNA, 25 bp, Canis familiaris
acctctcctcagcagaagcttatca

SEQ ID NO: 35657 - DNA, 25 bp, Canis familiaris
acctctcctggggaagctcagaatc

SEQ ID NO: 35658 - DNA, 25 bp, Canis familiaris
acctcatcaaggtgacaccatcctc

SEQ ID NO: 35659 - DNA, 25 bp, Canis familiaris
acctgcatccggaagtgcagcctcc

SEQ ID NO: 35660 - DNA, 25 bp, Canis familiaris
acctgtccagttgtcagagtcactt

SEQ ID NO: 35661 - DNA, 25 bp, Canis familiaris
acctgctactttactccagaactct

SEQ ID NO: 35662 - DNA, 25 bp, Canis familiaris
acctcattcctttgcacaagtagct

SEQ ID NO: 35663 - DNA, 25 bp, Canis familiaris
acctcatcttcttggacaagcccat

SEQ ID NO: 35664 - DNA, 25 bp, Canis familiaris
acctgctcatacagggaagcctgag

SEQ ID NO: 35665 - DNA, 25 bp, Canis familiaris
acctgtaccggcggaacacgtggct

SEQ ID NO: 35666 - DNA, 25 bp, Canis familiaris
acgcctaccaagaggacctgggctt

SEQ ID NO: 35667 - DNA, 25 bp, Canis familiaris
acctcttgcttgacagggaccgggt

SEQ ID NO: 35668 - DNA, 25 bp, Canis familiaris
acctcatggcctacatggcctccaa

SEQ ID NO: 35669 - DNA, 25 bp, Canis familiaris
acctcatggcctacatggcctccaa

SEQ ID NO: 35670 - DNA, 25 bp, Canis familiaris
acctcaggactggatggctttaaag

SEQ ID NO: 35671 - DNA, 25 bp, Canis familiaris
acctcggacatgtcatggtgaatgg

SEQ ID NO: 35672 - DNA, 25 bp, Canis familiaris
acctcgaggctgaacgctgacaggg

SEQ ID NO: 35673 - DNA, 25 bp, Canis familiaris
acctcaacctggtgctcatagatga

SEQ ID NO: 35674 - DNA, 25 bp, Canis familiaris
acctcaattttgttgtcatggtgac

SEQ ID NO: 35675 - DNA, 25 bp, Canis familiaris
acccctttgggtgcagagtgattaa

SEQ ID NO: 35676 - DNA, 25 bp, Canis familiaris
acccgttcagggagcacagtcaaaa

SEQ ID NO: 35677 - DNA, 25 bp, Canis familiaris
accggtacatcaagggcatcgtgaa

SEQ ID NO: 35678 - DNA, 25 bp, Canis familiaris
accggtcagcactgtgagcactgtg

SEQ ID NO: 35679 - DNA, 25 bp, Canis familiaris
acctcaggcagcgggtggagcagtt

SEQ ID NO: 35680 - DNA, 25 bp, Canis familiaris
acctgcagccaggtgtggggcagct

SEQ ID NO: 35681 - DNA, 25 bp, Canis familiaris
acctgcacagcatggtgagcgtgtc

SEQ ID NO: 35682 - DNA, 25 bp, Canis familiaris
acctgaagacgtcgacgttccactt

SEQ ID NO: 35683 - DNA, 25 bp, Canis familiaris
acctgtggaaggccacgttctcacc

SEQ ID NO: 35684 - DNA, 25 bp, Canis familiaris
accggagacaggccctatgtgtgcc

SEQ ID NO: 35685 - DNA, 25 bp, Canis familiaris
accggcagaaggagctcttggagca

SEQ ID NO: 35686 - DNA, 25 bp, Canis familiaris
accgagcaaatgccaggtctagcaa

SEQ ID NO: 35687 - DNA, 25 bp, Canis familiaris
accggctcaacaaggtcatcagcga

SEQ ID NO: 35688 - DNA, 25 bp, Canis familiaris
acctggccttgaaagtcacgcagag

SEQ ID NO: 35689 - DNA, 25 bp, Canis familiaris
accgtgccttcagagttgacacagc

SEQ ID NO: 35690 - DNA, 25 bp, Canis familiaris
accgtgtccaactgtatatagccgc

SEQ ID NO: 35691 - DNA, 25 bp, Canis familiaris
acccccctacaggtgcataaggtgc

SEQ ID NO: 35692 - DNA, 25 bp, Canis familiaris
acccctttcggcgtgcataaggaat

SEQ ID NO: 35693 - DNA, 25 bp, Canis familiaris
acccaattgtgcccacctgaatgta

SEQ ID NO: 35694 - DNA, 25 bp, Canis familiaris
acccaactttgcacacgtatcatac

SEQ ID NO: 35695 - DNA, 25 bp, Canis familiaris
acgtctacttggtccaatgtcttat

SEQ ID NO: 35696 - DNA, 25 bp, Canis familiaris
acgtctgccctatcaactttcgatg

SEQ ID NO: 35697 - DNA, 25 bp, Canis familiaris
acgtgccctctatatgaggttgggg

SEQ ID NO: 35698 - DNA, 25 bp, Canis familiaris
acccgcctctttaaagcgtgcggcg

SEQ ID NO: 35699 - DNA, 25 bp, Canis familiaris
accctggctgccatttggagtgggg

SEQ ID NO: 35700 - DNA, 25 bp, Canis familiaris
acctcaggctgagatttggggcggg

SEQ ID NO: 35701 - DNA, 25 bp, Canis familiaris
acctcagtggatctgcttgcagggc

SEQ ID NO: 35702 - DNA, 25 bp, Canis familiaris
acctcagtgctgcaagtatcaccag

SEQ ID NO: 35703 - DNA, 25 bp, Canis familiaris
acctagtggctgcaattcacccagg

SEQ ID NO: 35704 - DNA, 25 bp, Canis familiaris
acctcaggaattattcagagccagt

SEQ ID NO: 35705 - DNA, 25 bp, Canis familiaris
accccacgattagcttgcagacagt

SEQ ID NO: 35706 - DNA, 25 bp, Canis familiaris
caccccaaatttctccagtagttag

SEQ ID NO: 35707 - DNA, 25 bp, Canis familiaris
accccacacagagaaccactagtta

SEQ ID NO: 35708 - DNA, 25 bp, Canis familiaris
acctcctcaagttggaccactagct

SEQ ID NO: 35709 - DNA, 25 bp, Canis familiaris
acctcctgcaagagcacagctcagc

SEQ ID NO: 35710 - DNA, 25 bp, Canis familiaris
acctgccctatgagacactgatcag

SEQ ID NO: 35711 - DNA, 25 bp, Canis familiaris
acctgcccatgctctaaggtcagtt

SEQ ID NO: 35712 - DNA, 25 bp, Canis familiaris
accgccacagaactagaggtcttct

SEQ ID NO: 35713 - DNA, 25 bp, Canis familiaris
accgctccagaatatagctagctcc

SEQ ID NO: 35714 - DNA, 25 bp, Canis familiaris
acccgtcaggaagtcacatcagact

SEQ ID NO: 35715 - DNA, 25 bp, Canis familiaris
accctgtgcaggaactacctacctg

SEQ ID NO: 35716 - DNA, 25 bp, Canis familiaris
accgctggctgtacatttacatcac

SEQ ID NO: 35717 - DNA, 25 bp, Canis familiaris
accctggtttctttttcagctcagg

SEQ ID NO: 35718 - DNA, 25 bp, Canis familiaris
acccgactctatttcttacagtgcg

SEQ ID NO: 35719 - DNA, 25 bp, Canis familiaris
acccgactgctgtagtcgttttcag

SEQ ID NO: 35720 - DNA, 25 bp, Canis familiaris
acctcagccactcagtgtgttttgc

SEQ ID NO: 35721 - DNA, 25 bp, Canis familiaris
acctgagtggctcagctggtccagt

SEQ ID NO: 35722 - DNA, 25 bp, Canis familiaris
accgttgagcgctgtgaataatggc

SEQ ID NO: 35723 - DNA, 25 bp, Canis familiaris
accgttcaggctctgcacaaacagt

SEQ ID NO: 35724 - DNA, 25 bp, Canis familiaris
accgcttcacgctggacgaaaagaa

SEQ ID NO: 35725 - DNA, 25 bp, Canis familiaris
accctgtctttgagaccattcaaac

SEQ ID NO: 35726 - DNA, 25 bp, Canis familiaris
accctcttgttttgagccttaacat

SEQ ID NO: 35727 - DNA, 25 bp, Canis familiaris
accctgtctgtttaggtctagagtt

SEQ ID NO: 35728 - DNA, 25 bp, Canis familiaris
accccaagtcttttgtccagagaat

SEQ ID NO: 35729 - DNA, 25 bp, Canis familiaris
acctgccatatttctcctggtaaaa

SEQ ID NO: 35730 - DNA, 25 bp, Canis familiaris
acctgaactcctatatggttaatac

SEQ ID NO: 35731 - DNA, 25 bp, Canis familiaris
acctcaactcccatttgtatttatt

SEQ ID NO: 35732 - DNA, 25 bp, Canis familiaris
acctacagccacttctgttctattt

SEQ ID NO: 35733 - DNA, 25 bp, Canis familiaris
acctgaactcatcatcagttgccat

SEQ ID NO: 35734 - DNA, 25 bp, Canis familiaris
acctgtgactgctgatcaatgacct

SEQ ID NO: 35735 - DNA, 25 bp, Canis familiaris
acctggccgaggacatcatgcggct

SEQ ID NO: 35736 - DNA, 25 bp, Canis familiaris
acctgaggcagaagctccaggcctt

SEQ ID NO: 35737 - DNA, 25 bp, Canis familiaris
acctgatggacatgttcagggatcg

SEQ ID NO: 35738 - DNA, 25 bp, Canis familiaris
acctgaagactccttgagctggcta

SEQ ID NO: 35739 - DNA, 25 bp, Canis familiaris
acctaaatctctatgcagtgtgtgt

SEQ ID NO: 35740 - DNA, 25 bp, Canis familiaris
accccaacttcttcaagatggtgga

SEQ ID NO: 35741 - DNA, 25 bp, Canis familiaris
accccaacaggcccaggaagtacat

SEQ ID NO: 35742 - DNA, 25 bp, Canis familiaris
acctccacaaggctcagaagagtca

SEQ ID NO: 35743 - DNA, 25 bp, Canis familiaris
acccccaggagtaagacaaggcctg

SEQ ID NO: 35744 - DNA, 25 bp, Canis familiaris
acctcccgagaggtaaacctgcctg

SEQ ID NO: 35745 - DNA, 25 bp, Canis familiaris
accccacagaggctagcacctcttt

SEQ ID NO: 35746 - DNA, 25 bp, Canis familiaris
accctactgggccatctgttgattt

SEQ ID NO: 35747 - DNA, 25 bp, Canis familiaris
acctgcatcatccggacatcggttg

SEQ ID NO: 35748 - DNA, 25 bp, Canis familiaris
acctgcctggtggacatggagtgtg

SEQ ID NO: 35749 - DNA, 25 bp, Canis familiaris
acctcctgctgtgacagctaaggca

SEQ ID NO: 35750 - DNA, 25 bp, Canis familiaris
acctgcctgctcaccaataaagaaa

SEQ ID NO: 35751 - DNA, 25 bp, Canis familiaris
acctgcctgctcaccaataaagaaa

SEQ ID NO: 35752 - DNA, 25 bp, Canis familiaris
acctcctctctgtggtctacaaaaa

SEQ ID NO: 35753 - DNA, 25 bp, Canis familiaris
acctcctctctatattttctaaata

SEQ ID NO: 35754 - DNA, 25 bp, Canis familiaris
acctccttttaagttcacagaacat

SEQ ID NO: 35755 - DNA, 25 bp, Canis familiaris
acctctcttttctgtctagcagttt

SEQ ID NO: 35756 - DNA, 25 bp, Canis familiaris
accctctttatgtgttagttttctg

SEQ ID NO: 35757 - DNA, 25 bp, Canis familiaris
accctctttatgtgttagttttctg

SEQ ID NO: 35758 - DNA, 25 bp, Canis familiaris
accctctttatgtgttagttttctg

SEQ ID NO: 35759 - DNA, 25 bp, Canis familiaris
accctctttatgtgttagttttctg

SEQ ID NO: 35760 - DNA, 25 bp, Canis familiaris
accctctttatgtgttagttttctg

SEQ ID NO: 35761 - DNA, 25 bp, Canis familiaris
accctctttatgtgttagttttctg

SEQ ID NO: 35762 - DNA, 25 bp, Canis familiaris
accctctttatgtgttagttttctg

SEQ ID NO: 35763 - DNA, 25 bp, Canis familiaris
acccttgactacacttgattatttc

SEQ ID NO: 35764 - DNA, 25 bp, Canis familiaris
acccattctgtagcctttttgcatt

SEQ ID NO: 35765 - DNA, 25 bp, Canis familiaris
acccgtatttccgcatgttgtatgc

SEQ ID NO: 35766 - DNA, 25 bp, Canis familiaris
acccctatcattcttactttcatgt

SEQ ID NO: 35767 - DNA, 25 bp, Canis familiaris
acctcaagcatctctttattttgat

SEQ ID NO: 35768 - DNA, 25 bp, Canis familiaris
acctctaatatcctttctgtttgtg

SEQ ID NO: 35769 - DNA, 25 bp, Canis familiaris
acctgcttttccacttgtgtttgaa

SEQ ID NO: 35770 - DNA, 25 bp, Canis familiaris
accgttcgtccagtctggttgttgg

SEQ ID NO: 35771 - DNA, 25 bp, Canis familiaris
acctgattcagttgcacctggtgtt

SEQ ID NO: 35772 - DNA, 25 bp, Canis familiaris
acctgaccagtgtgccaagtgtgtt

SEQ ID NO: 35773 - DNA, 25 bp, Canis familiaris
acctcacacctgttgaaatggcttt

SEQ ID NO: 35774 - DNA, 25 bp, Canis familiaris
acctcattcatccctaaaacatttt

SEQ ID NO: 35775 - DNA, 25 bp, Canis familiaris
accgcttcatgccactgaatacgtt

SEQ ID NO: 35776 - DNA, 25 bp, Canis familiaris
acctgcttagctcccagatagggga

SEQ ID NO: 35777 - DNA, 25 bp, Canis familiaris
acctcatgaagatcctgaccgagcg

SEQ ID NO: 35778 - DNA, 25 bp, Canis familiaris
acctcacaaatggcctcggcagtgg

SEQ ID NO: 35779 - DNA, 25 bp, Canis familiaris
accccaaatctgccacagagcagtc

SEQ ID NO: 35780 - DNA, 25 bp, Canis familiaris
acctctcagagaagccatcggagtc

SEQ ID NO: 35781 - DNA, 25 bp, Canis familiaris
acctcatcaacaacctgctgcaggt

SEQ ID NO: 35782 - DNA, 25 bp, Canis familiaris
acctcatctccaaccatgagcagct

SEQ ID NO: 35783 - DNA, 25 bp, Canis familiaris
acctgtctgcacatctcatgatagc

SEQ ID NO: 35784 - DNA, 25 bp, Canis familiaris
acctgtgctctgaactctgatggca

SEQ ID NO: 35785 - DNA, 25 bp, Canis familiaris
acctctgctgtgggatctggagcac

SEQ ID NO: 35786 - DNA, 25 bp, Canis familiaris
accccagccatgtatgtggccatcc

SEQ ID NO: 35787 - DNA, 25 bp, Canis familiaris
acctgccagactcatgtgaggcatc

SEQ ID NO: 35788 - DNA, 25 bp, Canis familiaris
acctcatgaactgtataggattcaa

SEQ ID NO: 35789 - DNA, 25 bp, Canis familiaris
acctcatgaactgtaaagaattcaa

SEQ ID NO: 35790 - DNA, 25 bp, Canis familiaris
actccgtcctttctaaattcaagat

SEQ ID NO: 35791 - DNA, 25 bp, Canis familiaris
acccccctcttctggagataacagt

SEQ ID NO: 35792 - DNA, 25 bp, Canis familiaris
acctgcagcccttaccaaggaaaca

SEQ ID NO: 35793 - DNA, 25 bp, Canis familiaris
accgcacagagtgacgacattaaac

SEQ ID NO: 35794 - DNA, 25 bp, Canis familiaris
accgcgtgggcatggagtgtacaac

SEQ ID NO: 35795 - DNA, 25 bp, Canis familiaris
accgcacgggcacaagttcaagttc

SEQ ID NO: 35796 - DNA, 25 bp, Canis familiaris
accgacgttcacacgtgtgcaagtg

SEQ ID NO: 35797 - DNA, 25 bp, Canis familiaris
accgtttctccccggaggagatcag

SEQ ID NO: 35798 - DNA, 25 bp, Canis familiaris
accgattatctctcctgggggacgg

SEQ ID NO: 35799 - DNA, 25 bp, Canis familiaris
acctgtcatttgtttgtgggggcgg

SEQ ID NO: 35800 - DNA, 25 bp, Canis familiaris
acgcttaccgccattaggctgtgcg

SEQ ID NO: 35801 - DNA, 25 bp, Canis familiaris
acctccaccagtctgttggtctagt

SEQ ID NO: 35802 - DNA, 25 bp, Canis familiaris
accccagccctgttttagagtagag

SEQ ID NO: 35803 - DNA, 25 bp, Canis familiaris
accccagtgttctccaaagctaggt

SEQ ID NO: 35804 - DNA, 25 bp, Canis familiaris
accccctgtctgttccagaagaagg

SEQ ID NO: 35805 - DNA, 25 bp, Canis familiaris
acccgctcctcgtgcaaataaagct

SEQ ID NO: 35806 - DNA, 25 bp, Canis familiaris
acccatgacccctcaaaggaaggtg

SEQ ID NO: 35807 - DNA, 25 bp, Canis familiaris
accgctatccccgaaaagtgacagc

SEQ ID NO: 35808 - DNA, 25 bp, Canis familiaris
acctgttccagttaagaaggagtgg

SEQ ID NO: 35809 - DNA, 25 bp, Canis familiaris
acctgttccagttaccactcagaac

SEQ ID NO: 35810 - DNA, 25 bp, Canis familiaris
acctgttcactcgataccgtgacat

SEQ ID NO: 35811 - DNA, 25 bp, Canis familiaris
acctgtcccatcgagacttgagact

SEQ ID NO: 35812 - DNA, 25 bp, Canis familiaris
acctgtccctaatctgatgtgcact

SEQ ID NO: 35813 - DNA, 25 bp, Canis familiaris
acctctctctataaaaatggcacat

SEQ ID NO: 35814 - DNA, 25 bp, Canis familiaris
accccttcttaacgagcaatatgcc

SEQ ID NO: 35815 - DNA, 25 bp, Canis familiaris
acctctcttctgaacttgagactca

SEQ ID NO: 35816 - DNA, 25 bp, Canis familiaris
acctgagctctcatacttatatcac

SEQ ID NO: 35817 - DNA, 25 bp, Canis familiaris
acctgcagtccttccttgaagacta

SEQ ID NO: 35818 - DNA, 25 bp, Canis familiaris
acctcatgttgcaccttaaacataa

SEQ ID NO: 35819 - DNA, 25 bp, Canis familiaris
acctctcatctggcatccttaaaat

SEQ ID NO: 35820 - DNA, 25 bp, Canis familiaris
acccctgtgcctgtatctaatatat

SEQ ID NO: 35821 - DNA, 25 bp, Canis familiaris
accccttgctctatacagtcagcat

SEQ ID NO: 35822 - DNA, 25 bp, Canis familiaris
acctctattgtcaagtatccccata

SEQ ID NO: 35823 - DNA, 25 bp, Canis familiaris
acctctaaggcattgttctgtacat

SEQ ID NO: 35824 - DNA, 25 bp, Canis familiaris
accgatcaaggctgctttgaccaga

SEQ ID NO: 35825 - DNA, 25 bp, Canis familiaris
accgaagcagagtccgttgggtctt

SEQ ID NO: 35826 - DNA, 25 bp, Canis familiaris
accgacatcacgggctttgggattt

SEQ ID NO: 35827 - DNA, 25 bp, Canis familiaris
acctgacacccaggtctgtggtgcc

SEQ ID NO: 35828 - DNA, 25 bp, Canis familiaris
accgaccatctagattgtggggctc

SEQ ID NO: 35829 - DNA, 25 bp, Canis familiaris
acctccccaggtaggctgagggctc

SEQ ID NO: 35830 - DNA, 25 bp, Canis familiaris
acctctttacgtatatgatgtggct

SEQ ID NO: 35831 - DNA, 25 bp, Canis familiaris
acctcttttctgactctggttagct

SEQ ID NO: 35832 - DNA, 25 bp, Canis familiaris
acctcatctttcaattcttctgtag

SEQ ID NO: 35833 - DNA, 25 bp, Canis familiaris
acctcttacatgaatctcttctaga

SEQ ID NO: 35834 - DNA, 25 bp, Canis familiaris
acctctccagcaacatatttccagt

SEQ ID NO: 35835 - DNA, 25 bp, Canis familiaris
acctctgtgagtgctgatttgcctt

SEQ ID NO: 35836 - DNA, 25 bp, Canis familiaris
acctcttgatgacatacatctgcct

SEQ ID NO: 35837 - DNA, 25 bp, Canis familiaris
acctctgctggattaacatctgcat

SEQ ID NO: 35838 - DNA, 25 bp, Canis familiaris
acctgctcggcatgatcttcagcat

SEQ ID NO: 35839 - DNA, 25 bp, Canis familiaris
acctctcggcagacactgctgaatt

SEQ ID NO: 35840 - DNA, 25 bp, Canis familiaris
acctctctggcaacactgatgacag

SEQ ID NO: 35841 - DNA, 25 bp, Canis familiaris
accccattgaacatggcattgttac

SEQ ID NO: 35842 - DNA, 25 bp, Canis familiaris
accgccgctgaacttgacaattgta

SEQ ID NO: 35843 - DNA, 25 bp, Canis familiaris
acctgccgcgacccaaagtagatgg

SEQ ID NO: 35844 - DNA, 25 bp, Canis familiaris
acctgccggcaacagcaatgccagg

SEQ ID NO: 35845 - DNA, 25 bp, Canis familiaris
acctgcccctagccaagagcagagt

SEQ ID NO: 35846 - DNA, 25 bp, Canis familiaris
acctcctcacgatgaagcagcttta

SEQ ID NO: 35847 - DNA, 25 bp, Canis familiaris
acctcccagctatctaagatgttgg

SEQ ID NO: 35848 - DNA, 25 bp, Canis familiaris
acctgcacgcaccaactaaggtctg

SEQ ID NO: 35849 - DNA, 25 bp, Canis familiaris
acctccatgctcaacacttgggatt

SEQ ID NO: 35850 - DNA, 25 bp, Canis familiaris
acctccatctcaacattgggattgt

SEQ ID NO: 35851 - DNA, 25 bp, Canis familiaris
acccacatcaacattgtggtcattg

SEQ ID NO: 35852 - DNA, 25 bp, Canis familiaris
accccacaaatgatacagtaatgag

SEQ ID NO: 35853 - DNA, 25 bp, Canis familiaris
acctctgcacaccgttagcttagag

SEQ ID NO: 35854 - DNA, 25 bp, Canis familiaris
acctccagctccatcaacctggagc

SEQ ID NO: 35855 - DNA, 25 bp, Canis familiaris
acctccctctgcagggacaggagca

SEQ ID NO: 35856 - DNA, 25 bp, Canis familiaris
acctccagctgctggtggacaggcc

SEQ ID NO: 35857 - DNA, 25 bp, Canis familiaris
acctgctgccgggcgtggataacat

SEQ ID NO: 35858 - DNA, 25 bp, Canis familiaris
acctctcttgcgttgtggtctgaat

SEQ ID NO: 35859 - DNA, 25 bp, Canis familiaris
acctctcgtcgggtggtctgtgagg

SEQ ID NO: 35860 - DNA, 25 bp, Canis familiaris
accctgttggcgtgtgcacggagga

SEQ ID NO: 35861 - DNA, 25 bp, Canis familiaris
accccaaggccaggacactggacca

SEQ ID NO: 35862 - DNA, 25 bp, Canis familiaris
accccaagcggctgtactgcaaaaa

SEQ ID NO: 35863 - DNA, 25 bp, Canis familiaris
acccgagggcactggaattaagaat

SEQ ID NO: 35864 - DNA, 25 bp, Canis familiaris
acaccggggacaagaaggcgaagat

SEQ ID NO: 35865 - DNA, 25 bp, Canis familiaris
accctgggcgactgcaaagcgcagg

SEQ ID NO: 35866 - DNA, 25 bp, Canis familiaris
accgccgggacagctgcaagggcga

SEQ ID NO: 35867 - DNA, 25 bp, Canis familiaris
acccccgtgacagctggaaggagaa

SEQ ID NO: 35868 - DNA, 25 bp, Canis familiaris
acctccctgcgtaactggtacagag

SEQ ID NO: 35869 - DNA, 25 bp, Canis familiaris
acctccaagggaactggtgccatgt

SEQ ID NO: 35870 - DNA, 25 bp, Canis familiaris
accccggggaaccagtgatagtgag

SEQ ID NO: 35871 - DNA, 25 bp, Canis familiaris
accccactaggaaccactgaaactg

SEQ ID NO: 35872 - DNA, 25 bp, Canis familiaris
accccatcttctaggccaagaaggc

SEQ ID NO: 35873 - DNA, 25 bp, Canis familiaris
accccacatttaacgaagcactatt

SEQ ID NO: 35874 - DNA, 25 bp, Canis familiaris
acctgcccactgatactaagttctg

SEQ ID NO: 35875 - DNA, 25 bp, Canis familiaris
acctgaagcctgcctttagaatact

SEQ ID NO: 35876 - DNA, 25 bp, Canis familiaris
acctgtgaactgtctttgaaatact

SEQ ID NO: 35877 - DNA, 25 bp, Canis familiaris
acctggcataatcccttagatatca

SEQ ID NO: 35878 - DNA, 25 bp, Canis familiaris
acctggtccagtgcattcagaacaa

SEQ ID NO: 35879 - DNA, 25 bp, Canis familiaris
accggagtagctgcttcgacagcga

SEQ ID NO: 35880 - DNA, 25 bp, Canis familiaris
accccagcttctgcttagcaaatga

SEQ ID NO: 35881 - DNA, 25 bp, Canis familiaris
acctcctcttcttctgtaataatac

SEQ ID NO: 35882 - DNA, 25 bp, Canis familiaris
accccctagttcttatacctagcag

SEQ ID NO: 35883 - DNA, 25 bp, Canis familiaris
acctcctcttgaatttatccccaag

SEQ ID NO: 35884 - DNA, 25 bp, Canis familiaris
acctcctttgcaattttctgcttta

SEQ ID NO: 35885 - DNA, 25 bp, Canis familiaris
accggtttcatcatggtttggtcca

SEQ ID NO: 35886 - DNA, 25 bp, Canis familiaris
acctctgcttacttcatgtgtttgg

SEQ ID NO: 35887 - DNA, 25 bp, Canis familiaris
acctcctgaatcatgtggttctgca

SEQ ID NO: 35888 - DNA, 25 bp, Canis familiaris
acctcggatataaggaatctcgata

SEQ ID NO: 35889 - DNA, 25 bp, Canis familiaris
acctcgtgtaaagtacctagcacag

SEQ ID NO: 35890 - DNA, 25 bp, Canis familiaris
acctcgtttggtaatgcttccactg

SEQ ID NO: 35891 - DNA, 25 bp, Canis familiaris
acgggttctgggagaccaggctgtc

SEQ ID NO: 35892 - DNA, 25 bp, Canis familiaris
acctgggaagggagactcagccggc

SEQ ID NO: 35893 - DNA, 25 bp, Canis familiaris
accgggtgggcgagagcttcacggt

SEQ ID NO: 35894 - DNA, 25 bp, Canis familiaris
accgggtgggcgagagcttcacggt

SEQ ID NO: 35895 - DNA, 25 bp, Canis familiaris
accgggtgggcgagagcttcacggt

SEQ ID NO: 35896 - DNA, 25 bp, Canis familiaris
accgggtgggcgagagcttcacggt

SEQ ID NO: 35897 - DNA, 25 bp, Canis familiaris
accgggtgggcgagagcttcacggt

SEQ ID NO: 35898 - DNA, 25 bp, Canis familiaris
accgggtgggcgagagcttcacggt

SEQ ID NO: 35899 - DNA, 25 bp, Canis familiaris
acctgggtggctcagtggtttagcg

SEQ ID NO: 35900 - DNA, 25 bp, Canis familiaris
acctgggtgtgttagctttctgtat

SEQ ID NO: 35901 - DNA, 25 bp, Canis familiaris
acctgacggctgagatcctggagtt

SEQ ID NO: 35902 - DNA, 25 bp, Canis familiaris
acctggcctctgatatttaagtttg

SEQ ID NO: 35903 - DNA, 25 bp, Canis familiaris
acctggcctcttctggacaattaat

SEQ ID NO: 35904 - DNA, 25 bp, Canis familiaris
acctcccttttatgtgaatgtactc

SEQ ID NO: 35905 - DNA, 25 bp, Canis familiaris
acctcccttttctgattggattctc

SEQ ID NO: 35906 - DNA, 25 bp, Canis familiaris
acctcctctggtacttgttggtgtt

SEQ ID NO: 35907 - DNA, 25 bp, Canis familiaris
accccttccttaggttggtgtgcat

SEQ ID NO: 35908 - DNA, 25 bp, Canis familiaris
accggctcatcctttgggaagggct

SEQ ID NO: 35909 - DNA, 25 bp, Canis familiaris
accgttcatggataccgtactggct

SEQ ID NO: 35910 - DNA, 25 bp, Canis familiaris
accctttgttaacggaccatggcat

SEQ ID NO: 35911 - DNA, 25 bp, Canis familiaris
acctcctgtggatcaggtgacctgg

SEQ ID NO: 35912 - DNA, 25 bp, Canis familiaris
acctcctttaaaggctgtccaagca

SEQ ID NO: 35913 - DNA, 25 bp, Canis familiaris
acctccagtttagcctgtgacacag

SEQ ID NO: 35914 - DNA, 25 bp, Canis familiaris
acctccagtttctgcatgctgtgag

SEQ ID NO: 35915 - DNA, 25 bp, Canis familiaris
acctccagttctttgctgacgagtc

SEQ ID NO: 35916 - DNA, 25 bp, Canis familiaris
acctcctttctctgtgcaggatgac

SEQ ID NO: 35917 - DNA, 25 bp, Canis familiaris
acctccctggttcatagtggaccgg

SEQ ID NO: 35918 - DNA, 25 bp, Canis familiaris
accccaaggtgtcctgagggtcctg

SEQ ID NO: 35919 - DNA, 25 bp, Canis familiaris
accgtctaggctggccaattgggcc

SEQ ID NO: 35920 - DNA, 25 bp, Canis familiaris
accctctgacctgccattcataggg

SEQ ID NO: 35921 - DNA, 25 bp, Canis familiaris
acccctacaggtccagatgctagag

SEQ ID NO: 35922 - DNA, 25 bp, Canis familiaris
acctgcacaccaagatacagatcat

SEQ ID NO: 35923 - DNA, 25 bp, Canis familiaris
accgcagaccagcaacagtagtgtg

SEQ ID NO: 35924 - DNA, 25 bp, Canis familiaris
acctgaccgcagctgaatgtattgg

SEQ ID NO: 35925 - DNA, 25 bp, Canis familiaris
acctgactggtgccttatggaccgt

SEQ ID NO: 35926 - DNA, 25 bp, Canis familiaris
acctgactgcgtgagactggggcgt

SEQ ID NO: 35927 - DNA, 25 bp, Canis familiaris
acctgtgtgcggggatgtggcgggt

SEQ ID NO: 35928 - DNA, 25 bp, Canis familiaris
acctgtggcaggtatgtctgttgac

SEQ ID NO: 35929 - DNA, 25 bp, Canis familiaris
accgtagcggaattcatgcgtggca

SEQ ID NO: 35930 - DNA, 25 bp, Canis familiaris
accgttcagagattaggcatctgga

SEQ ID NO: 35931 - DNA, 25 bp, Canis familiaris
accgttgctggatctgctgtttgaa

SEQ ID NO: 35932 - DNA, 25 bp, Canis familiaris
acctgtttgtcacgtcatcatttga

SEQ ID NO: 35933 - DNA, 25 bp, Canis familiaris
accgttatcctactgcacatatgga

SEQ ID NO: 35934 - DNA, 25 bp, Canis familiaris
acctgaattcctatgcaattggtca

SEQ ID NO: 35935 - DNA, 25 bp, Canis familiaris
acctgagtttctgttgatttgctac

SEQ ID NO: 35936 - DNA, 25 bp, Canis familiaris
acctgtttctctgtgtgatgtgtgt

SEQ ID NO: 35937 - DNA, 25 bp, Canis familiaris
acctgtgttctgcttttgtgttgct

SEQ ID NO: 35938 - DNA, 25 bp, Canis familiaris
acctgcttttgttttcattttgtgg

SEQ ID NO: 35939 - DNA, 25 bp, Canis familiaris
acctgttctaagtgtacttgtttga

SEQ ID NO: 35940 - DNA, 25 bp, Canis familiaris
acctgctcttaaccagctacgtggt

SEQ ID NO: 35941 - DNA, 25 bp, Canis familiaris
accgtctgtggagatgtacatgggc

SEQ ID NO: 35942 - DNA, 25 bp, Canis familiaris
accccagtgtcagattgatcttgga

SEQ ID NO: 35943 - DNA, 25 bp, Canis familiaris
acccagcagtttagcttaatttgcc

SEQ ID NO: 35944 - DNA, 25 bp, Canis familiaris
acctggcatatggttcttacttcag

SEQ ID NO: 35945 - DNA, 25 bp, Canis familiaris
acctggctaagttctaaatgctggg

SEQ ID NO: 35946 - DNA, 25 bp, Canis familiaris
acctggccaggtttaattgcagggc

SEQ ID NO: 35947 - DNA, 25 bp, Canis familiaris
acctggcccagtttatggtgcagaa

SEQ ID NO: 35948 - DNA, 25 bp, Canis familiaris
acctggctccagatgcttggtggaa

SEQ ID NO: 35949 - DNA, 25 bp, Canis familiaris
accgtgctgtcatctgtttttcaga

SEQ ID NO: 35950 - DNA, 25 bp, Canis familiaris
acgcgtgctgttttattgccattta

SEQ ID NO: 35951 - DNA, 25 bp, Canis familiaris
acctgctgtgtttcttcatgtatct

SEQ ID NO: 35952 - DNA, 25 bp, Canis familiaris
acctgcctggattgttcattattat

SEQ ID NO: 35953 - DNA, 25 bp, Canis familiaris
acctgtctggatgtgattctctact

SEQ ID NO: 35954 - DNA, 25 bp, Canis familiaris
acctcctggcaactgaattctcagc

SEQ ID NO: 35955 - DNA, 25 bp, Canis familiaris
acctcctcgatgtcataaattccct

SEQ ID NO: 35956 - DNA, 25 bp, Canis familiaris
acccctggcacttagcagtttccag

SEQ ID NO: 35957 - DNA, 25 bp, Canis familiaris
acccaggtactgtgactttgctcag

SEQ ID NO: 35958 - DNA, 25 bp, Canis familiaris
acgccggctgaccaaacatactggc

SEQ ID NO: 35959 - DNA, 25 bp, Canis familiaris
acccgtgtaccataccactgtggtg

SEQ ID NO: 35960 - DNA, 25 bp, Canis familiaris
acccccatcccatttgacactgggg

SEQ ID NO: 35961 - DNA, 25 bp, Canis familiaris
acccaccccagcaaggacactgagc

SEQ ID NO: 35962 - DNA, 25 bp, Canis familiaris
acccgataccgcaatggagacgcct

SEQ ID NO: 35963 - DNA, 25 bp, Canis familiaris
accggcaacctcatgggggacatgt

SEQ ID NO: 35964 - DNA, 25 bp, Canis familiaris
accgagaatcccattggagggcaag

SEQ ID NO: 35965 - DNA, 25 bp, Canis familiaris
acctggcctaccaatgtggggccat

SEQ ID NO: 35966 - DNA, 25 bp, Canis familiaris
acctgtccttccagccaaggactgg

SEQ ID NO: 35967 - DNA, 25 bp, Canis familiaris
accgtcctggccggacatgaggaca

SEQ ID NO: 35968 - DNA, 25 bp, Canis familiaris
acctgctccggaaccacgaggagac

SEQ ID NO: 35969 - DNA, 25 bp, Canis familiaris
acctccaggagatcccagctgggat

SEQ ID NO: 35970 - DNA, 25 bp, Canis familiaris
acctccagggactccctgagctgtg

SEQ ID NO: 35971 - DNA, 25 bp, Canis familiaris
acctgaagggacggccctgtgattg

SEQ ID NO: 35972 - DNA, 25 bp, Canis familiaris
accgagaggccagcgccatgctggt

SEQ ID NO: 35973 - DNA, 25 bp, Canis familiaris
accggagcagcatgaccacgggttc

SEQ ID NO: 35974 - DNA, 25 bp, Canis familiaris
accgatggcgaagaatcgtggttac

SEQ ID NO: 35975 - DNA, 25 bp, Canis familiaris
accgatccccaccaatagagaaata

SEQ ID NO: 35976 - DNA, 25 bp, Canis familiaris
acctgtcccacatcctgaagaagat

SEQ ID NO: 35977 - DNA, 25 bp, Canis familiaris
acctgtcctctacccagaagtatag

SEQ ID NO: 35978 - DNA, 25 bp, Canis familiaris
acgcgtccgaaagcatgagcaataa

SEQ ID NO: 35979 - DNA, 25 bp, Canis familiaris
acccccacagcaatggcaaacacaa

SEQ ID NO: 35980 - DNA, 25 bp, Canis familiaris
acccaaccacttgcaccaatatttt

SEQ ID NO: 35981 - DNA, 25 bp, Canis familiaris
acccaccctcttgacaaggttctgt

SEQ ID NO: 35982 - DNA, 25 bp, Canis familiaris
accccaagcgctctacaatggttct

SEQ ID NO: 35983 - DNA, 25 bp, Canis familiaris
acccggactgctgtgatcggtttca

SEQ ID NO: 35984 - DNA, 25 bp, Canis familiaris
acccggcatcttgtgttgggactct

SEQ ID NO: 35985 - DNA, 25 bp, Canis familiaris
acccttgtctgtttcttgcgaaatg

SEQ ID NO: 35986 - DNA, 25 bp, Canis familiaris
acctgtactctggctggttggcaga

SEQ ID NO: 35987 - DNA, 25 bp, Canis familiaris
acctgtatctatgtgatctcgcctg

SEQ ID NO: 35988 - DNA, 25 bp, Canis familiaris
acctgtcttcatgatcttgcggatg

SEQ ID NO: 35989 - DNA, 25 bp, Canis familiaris
acctgctttcatgatgtcactggat

SEQ ID NO: 35990 - DNA, 25 bp, Canis familiaris
acctgctggtgaacaatgctgccgt

SEQ ID NO: 35991 - DNA, 25 bp, Canis familiaris
acctgtgcgtgaacgtcatgcgggg

SEQ ID NO: 35992 - DNA, 25 bp, Canis familiaris
accgggtgaagcctcactgatggaa

SEQ ID NO: 35993 - DNA, 25 bp, Canis familiaris
accgaagttctgtctactgatgcag

SEQ ID NO: 35994 - DNA, 25 bp, Canis familiaris
acctgacggactacctcatgaagat

SEQ ID NO: 35995 - DNA, 25 bp, Canis familiaris
acctgcccaaatacgctcataatgt

SEQ ID NO: 35996 - DNA, 25 bp, Canis familiaris
acctgctccacatttcctgaaatgt

SEQ ID NO: 35997 - DNA, 25 bp, Canis familiaris
acctgcttactttctggaagattgc

SEQ ID NO: 35998 - DNA, 25 bp, Canis familiaris
acctgctgacacttcctagtagttt

SEQ ID NO: 35999 - DNA, 25 bp, Canis familiaris
accctacctgtgacttgtatgtcgt

SEQ ID NO: 36000 - DNA, 25 bp, Canis familiaris
accctgactccggcagtgaatgcct

SEQ ID NO: 36001 - DNA, 25 bp, Canis familiaris
acccggcattcagcgtcaagcgctg

SEQ ID NO: 36002 - DNA, 25 bp, Canis familiaris
acccggaatgctgggatcgaggctc

SEQ ID NO: 36003 - DNA, 25 bp, Canis familiaris
acccggaatgctgggatcgaggctc

SEQ ID NO: 36004 - DNA, 25 bp, Canis familiaris
accctgaatgacaatgcccggagct

SEQ ID NO: 36005 - DNA, 25 bp, Canis familiaris
acctgctgacatgaagggcgcggcg

SEQ ID NO: 36006 - DNA, 25 bp, Canis familiaris
accctgaatccaacacggctgggct

SEQ ID NO: 36007 - DNA, 25 bp, Canis familiaris
accctcagaacttcaccctgaagtc

SEQ ID NO: 36008 - DNA, 25 bp, Canis familiaris
accccaaaaacaggactaagtgcat

SEQ ID NO: 36009 - DNA, 25 bp, Canis familiaris
accctgaaaaactacagctccgcct

SEQ ID NO: 36010 - DNA, 25 bp, Canis familiaris
accgctaaaggtcgaatccactgcc

SEQ ID NO: 36011 - DNA, 25 bp, Canis familiaris
acctgctaccggaagactcttccac

SEQ ID NO: 36012 - DNA, 25 bp, Canis familiaris
accctcgggggatcattatccacct

SEQ ID NO: 36013 - DNA, 25 bp, Canis familiaris
acgcttcctgggcaagactttggcc

SEQ ID NO: 36014 - DNA, 25 bp, Canis familiaris
actgcctacggcctaaacttggagg

SEQ ID NO: 36015 - DNA, 25 bp, Canis familiaris
acgccttcacagccaaaaccgaggc

SEQ ID NO: 36016 - DNA, 25 bp, Canis familiaris
acccttctagacttcagaccacaga

SEQ ID NO: 36017 - DNA, 25 bp, Canis familiaris
accccttacacataatccatggcac

SEQ ID NO: 36018 - DNA, 25 bp, Canis familiaris
accccatgattgcctcaaaccagga

SEQ ID NO: 36019 - DNA, 25 bp, Canis familiaris
accccaatgtacagaaaaagatcca

SEQ ID NO: 36020 - DNA, 25 bp, Canis familiaris
accccactgtccagatttctagtta

SEQ ID NO: 36021 - DNA, 25 bp, Canis familiaris
accgtccttatcctatttaatgtat

SEQ ID NO: 36022 - DNA, 25 bp, Canis familiaris
accgccctatactcactttatatat

SEQ ID NO: 36023 - DNA, 25 bp, Canis familiaris
accgccctatactcactttatatat

SEQ ID NO: 36024 - DNA, 25 bp, Canis familiaris
acccaccaaaagacctcttgtagtg

SEQ ID NO: 36025 - DNA, 25 bp, Canis familiaris
acccccaaacatctcatgccttggg

SEQ ID NO: 36026 - DNA, 25 bp, Canis familiaris
accccctgcaacctgtagggcaggc

SEQ ID NO: 36027 - DNA, 25 bp, Canis familiaris
acccgctgctggaggctttcgggaa

SEQ ID NO: 36028 - DNA, 25 bp, Canis familiaris
acccgtgggcaggtgcttttggtgt

SEQ ID NO: 36029 - DNA, 25 bp, Canis familiaris
accctgaggggggtctgtttctgtg

SEQ ID NO: 36030 - DNA, 25 bp, Canis familiaris
accctgaacgtgtgcatttttctcg

SEQ ID NO: 36031 - DNA, 25 bp, Canis familiaris
accggaccggatagttttgctgatg

SEQ ID NO: 36032 - DNA, 25 bp, Canis familiaris
accggacaacggatgtttcagctgg

SEQ ID NO: 36033 - DNA, 25 bp, Canis familiaris
actcggccaacaggacgggctacgt

SEQ ID NO: 36034 - DNA, 25 bp, Canis familiaris
acctggccagaggtgtcggagagcc

SEQ ID NO: 36035 - DNA, 25 bp, Canis familiaris
accgggatgcggttctgtgaagcca

SEQ ID NO: 36036 - DNA, 25 bp, Canis familiaris
accggtggcaggttcaagaagccag

SEQ ID NO: 36037 - DNA, 25 bp, Canis familiaris
acctgggaagcctgcaaggagctcc

SEQ ID NO: 36038 - DNA, 25 bp, Canis familiaris
accggcagaaccagcagcgctggca

SEQ ID NO: 36039 - DNA, 25 bp, Canis familiaris
acccagggatcccatgcaggctatt

SEQ ID NO: 36040 - DNA, 25 bp, Canis familiaris
accgcagggactctggtcttgaagg

SEQ ID NO: 36041 - DNA, 25 bp, Canis familiaris
acccagaggccggtggtcatgtgag

SEQ ID NO: 36042 - DNA, 25 bp, Canis familiaris
accctcatgccctgtgggtgggtat

SEQ ID NO: 36043 - DNA, 25 bp, Canis familiaris
accctggccacacctggattggtgt

SEQ ID NO: 36044 - DNA, 25 bp, Canis familiaris
acccggctcacagtgtggacttttc

SEQ ID NO: 36045 - DNA, 25 bp, Canis familiaris
accgagtgctcctttaggcgtatat

SEQ ID NO: 36046 - DNA, 25 bp, Canis familiaris
acctggatctcttttgggtggccat

SEQ ID NO: 36047 - DNA, 25 bp, Canis familiaris
acctgtgatcttttatatgttccct

SEQ ID NO: 36048 - DNA, 25 bp, Canis familiaris
accgttttcaaatgcatgtccacct

SEQ ID NO: 36049 - DNA, 25 bp, Canis familiaris
aacgttcagctataagaaaccctct

SEQ ID NO: 36050 - DNA, 25 bp, Canis familiaris
aagcaaccagaagaccaaagcccct

SEQ ID NO: 36051 - DNA, 25 bp, Canis familiaris
acgaaccgtgacactgagacaccac

SEQ ID NO: 36052 - DNA, 25 bp, Canis familiaris
acccaaggccaaacataaacacgca

SEQ ID NO: 36053 - DNA, 25 bp, Canis familiaris
accgcaacgaccactgaaatcacta

SEQ ID NO: 36054 - DNA, 25 bp, Canis familiaris
accgaacagagcgtccaacataccg

SEQ ID NO: 36055 - DNA, 25 bp, Canis familiaris
accgaggcagcactaacaagccatc

SEQ ID NO: 36056 - DNA, 25 bp, Canis familiaris
acctggagcagccttctgcagaaca

SEQ ID NO: 36057 - DNA, 25 bp, Canis familiaris
acctggccaccattcatggcatgaa

SEQ ID NO: 36058 - DNA, 25 bp, Canis familiaris
acctggcccagttcatggtgcagaa

SEQ ID NO: 36059 - DNA, 25 bp, Canis familiaris
acctgagcccaggaaggtcagccag

SEQ ID NO: 36060 - DNA, 25 bp, Canis familiaris
acctgaggccacgaagcccaaaggg

SEQ ID NO: 36061 - DNA, 25 bp, Canis familiaris
acctgaggcccaggtccatacagag

SEQ ID NO: 36062 - DNA, 25 bp, Canis familiaris
acctggttccatgccttaagagaga

SEQ ID NO: 36063 - DNA, 25 bp, Canis familiaris
acacttgcattaccctttagggtat

SEQ ID NO: 36064 - DNA, 25 bp, Canis familiaris
acggctatcgacactttaggattct

SEQ ID NO: 36065 - DNA, 25 bp, Canis familiaris
accgctatggacttcttctaggata

SEQ ID NO: 36066 - DNA, 25 bp, Canis familiaris
accgctcagtatttgtaatgagaat

SEQ ID NO: 36067 - DNA, 25 bp, Canis familiaris
acctgacatccttttacagcaacat

SEQ ID NO: 36068 - DNA, 25 bp, Canis familiaris
acctgtgtctcttgtgtacacagac

SEQ ID NO: 36069 - DNA, 25 bp, Canis familiaris
acctggtctctcttggccaagaaga

SEQ ID NO: 36070 - DNA, 25 bp, Canis familiaris
acctggttgatcctgccagtagcat

SEQ ID NO: 36071 - DNA, 25 bp, Canis familiaris
acctgtgtgtgaaatgtcacttgca

SEQ ID NO: 36072 - DNA, 25 bp, Canis familiaris
accgtgtgtggagttcagctctgct

SEQ ID NO: 36073 - DNA, 25 bp, Canis familiaris
accgatgttccagtccacctggaat

SEQ ID NO: 36074 - DNA, 25 bp, Canis familiaris
accgtgttaccatactctgtgacaa

SEQ ID NO: 36075 - DNA, 25 bp, Canis familiaris
acgctgctttgaccacaactttaga

SEQ ID NO: 36076 - DNA, 25 bp, Canis familiaris
acctgactgcttccaaacatgttca

SEQ ID NO: 36077 - DNA, 25 bp, Canis familiaris
acctgactgcttacactactctaag

SEQ ID NO: 36078 - DNA, 25 bp, Canis familiaris
acgtatctttacatgaccaacaacc

SEQ ID NO: 36079 - DNA, 25 bp, Canis familiaris
acccttgttcctggactcatcaaag

SEQ ID NO: 36080 - DNA, 25 bp, Canis familiaris
accctttcctacgtcgatatcaaga

SEQ ID NO: 36081 - DNA, 25 bp, Canis familiaris
accgctcttcctttcatgaataaca

SEQ ID NO: 36082 - DNA, 25 bp, Canis familiaris
acctgtcaagccgttattcattacc

SEQ ID NO: 36083 - DNA, 25 bp, Canis familiaris
acatcctcaggaccttgagtttacc

SEQ ID NO: 36084 - DNA, 25 bp, Canis familiaris
accccagacaaatgacctattccga

SEQ ID NO: 36085 - DNA, 25 bp, Canis familiaris
accctgaaattatgacctgagccca

SEQ ID NO: 36086 - DNA, 25 bp, Canis familiaris
accccagaagtgttagcctgtggcg

SEQ ID NO: 36087 - DNA, 25 bp, Canis familiaris
accccagtatggctgacgagttgcg

SEQ ID NO: 36088 - DNA, 25 bp, Canis familiaris
acccttgataggctacgtgtcctgc

SEQ ID NO: 36089 - DNA, 25 bp, Canis familiaris
actcctatagggaaagctgttcgcc

SEQ ID NO: 36090 - DNA, 25 bp, Canis familiaris
acgccttactggcaatgcttccaca

SEQ ID NO: 36091 - DNA, 25 bp, Canis familiaris
acaccttagcggcaatcccaaaaga

SEQ ID NO: 36092 - DNA, 25 bp, Canis familiaris
acccttgagggattcccgctggaag

SEQ ID NO: 36093 - DNA, 25 bp, Canis familiaris
accctgctgggttttacatctagat

SEQ ID NO: 36094 - DNA, 25 bp, Canis familiaris
accctgtgtggctgctgtaacatta

SEQ ID NO: 36095 - DNA, 25 bp, Canis familiaris
acctggtctgtagctgtaactgtga

SEQ ID NO: 36096 - DNA, 25 bp, Canis familiaris
accgattctgaaactctaagctctg

SEQ ID NO: 36097 - DNA, 25 bp, Canis familiaris
acctgtatttgtatggactctctga

SEQ ID NO: 36098 - DNA, 25 bp, Canis familiaris
acctgataggattcttggagcctgt

SEQ ID NO: 36099 - DNA, 25 bp, Canis familiaris
acctgtacactgacttgagaccagt

SEQ ID NO: 36100 - DNA, 25 bp, Canis familiaris
accgaagcactgtccagaccaagaa

SEQ ID NO: 36101 - DNA, 25 bp, Canis familiaris
accccagcggatggagaccttgaac

SEQ ID NO: 36102 - DNA, 25 bp, Canis familiaris
accccagataatgagccctttggct

SEQ ID NO: 36103 - DNA, 25 bp, Canis familiaris
acccattgaatgttggccctcgggc

SEQ ID NO: 36104 - DNA, 25 bp, Canis familiaris
acccaagaggaccctcctcaatgga

SEQ ID NO: 36105 - DNA, 25 bp, Canis familiaris
acccggtgggccgagcttagagtgg

SEQ ID NO: 36106 - DNA, 25 bp, Canis familiaris
accccgtaggcagagtctagtctgg

SEQ ID NO: 36107 - DNA, 25 bp, Canis familiaris
accccggagaaggacaatcagacgg

SEQ ID NO: 36108 - DNA, 25 bp, Canis familiaris
acgcccgtagcagagaactaatcga

SEQ ID NO: 36109 - DNA, 25 bp, Canis familiaris
acccggtcacagaagatgactatgc

SEQ ID NO: 36110 - DNA, 25 bp, Canis familiaris
acccggccacaggccatgagatctc

SEQ ID NO: 36111 - DNA, 25 bp, Canis familiaris
acccggcattcagctcaagctgtga

SEQ ID NO: 36112 - DNA, 25 bp, Canis familiaris
accgctggttcctgacaggcatgac

SEQ ID NO: 36113 - DNA, 25 bp, Canis familiaris
acccatcgtctcctgataaactgac

SEQ ID NO: 36114 - DNA, 25 bp, Canis familiaris
accctagaatgcttaaatgtgctgt

SEQ ID NO: 36115 - DNA, 25 bp, Canis familiaris
acccatgagaagcaacgagagctta

SEQ ID NO: 36116 - DNA, 25 bp, Canis familiaris
accgtgcacaagtcagtcagaacct

SEQ ID NO: 36117 - DNA, 25 bp, Canis familiaris
acctgtgccagctgcaggcagcaga

SEQ ID NO: 36118 - DNA, 25 bp, Canis familiaris
acctgtggcgctggcagaagcagaa

SEQ ID NO: 36119 - DNA, 25 bp, Canis familiaris
acctgtgagtgctcctagcagacag

SEQ ID NO: 36120 - DNA, 25 bp, Canis familiaris
acccaagtccccagcatgaggagga

SEQ ID NO: 36121 - DNA, 25 bp, Canis familiaris
accccacttcccaagagaatgaaga

SEQ ID NO: 36122 - DNA, 25 bp, Canis familiaris
accgcaccattccggagtgtataga

SEQ ID NO: 36123 - DNA, 25 bp, Canis familiaris
accgagcgttgccaggagagcgacg

SEQ ID NO: 36124 - DNA, 25 bp, Canis familiaris
accgacagctactgcgagacgtggc

SEQ ID NO: 36125 - DNA, 25 bp, Canis familiaris
accgtcctgagctcagaggcaaggc

SEQ ID NO: 36126 - DNA, 25 bp, Canis familiaris
acccgcctacagctgtacaaggagg

SEQ ID NO: 36127 - DNA, 25 bp, Canis familiaris
accctcctaccactctcaaagggat

SEQ ID NO: 36128 - DNA, 25 bp, Canis familiaris
acctgtcctacatcttcacagagtg

SEQ ID NO: 36129 - DNA, 25 bp, Canis familiaris
acctgtggctactctatatgcactt

SEQ ID NO: 36130 - DNA, 25 bp, Canis familiaris
acctggtctacaattcatggcccta

SEQ ID NO: 36131 - DNA, 25 bp, Canis familiaris
acctgtgtccaaatattgttctcca

SEQ ID NO: 36132 - DNA, 25 bp, Canis familiaris
accgagttccatattcagcttcgca

SEQ ID NO: 36133 - DNA, 25 bp, Canis familiaris
acccaaactccgaacagcttctgga

SEQ ID NO: 36134 - DNA, 25 bp, Canis familiaris
acccgcttatcccaaagattcgtga

SEQ ID NO: 36135 - DNA, 25 bp, Canis familiaris
acgccgcatgttcaaaagttctctg

SEQ ID NO: 36136 - DNA, 25 bp, Canis familiaris
acccgagttctttatagtctcctct

SEQ ID NO: 36137 - DNA, 25 bp, Canis familiaris
accgcgcgggtgaacaagatccttt

SEQ ID NO: 36138 - DNA, 25 bp, Canis familiaris
accgtgcggtgtacaccatcaccgt

SEQ ID NO: 36139 - DNA, 25 bp, Canis familiaris
accggtgcgtggaacgacatacctc

SEQ ID NO: 36140 - DNA, 25 bp, Canis familiaris
acctggttctgacaggactgactcc

SEQ ID NO: 36141 - DNA, 25 bp, Canis familiaris
acctggtgttagtgtttgctctgcc

SEQ ID NO: 36142 - DNA, 25 bp, Canis familiaris
accgggattgtgttttgttcatgag

SEQ ID NO: 36143 - DNA, 25 bp, Canis familiaris
acctggtgttgtgttatatatcatt

SEQ ID NO: 36144 - DNA, 25 bp, Canis familiaris
accggtgttgtgttatcagtagtgt

SEQ ID NO: 36145 - DNA, 25 bp, Canis familiaris
accggcgtctgtttgagcagaatgt

SEQ ID NO: 36146 - DNA, 25 bp, Canis familiaris
accggcgagctttgcttacagtgat

SEQ ID NO: 36147 - DNA, 25 bp, Canis familiaris
accccatggctttgctgtaactgta

SEQ ID NO: 36148 - DNA, 25 bp, Canis familiaris
accccaactcattcctaacatgtag

SEQ ID NO: 36149 - DNA, 25 bp, Canis familiaris
acccgcaacacgttctaacacgaga

SEQ ID NO: 36150 - DNA, 25 bp, Canis familiaris
acccctcgcacatattagaacctga

SEQ ID NO: 36151 - DNA, 25 bp, Canis familiaris
acccctggcacagctggcaaaaagc

SEQ ID NO: 36152 - DNA, 25 bp, Canis familiaris
accctcttacacatacacaaacgga

SEQ ID NO: 36153 - DNA, 25 bp, Canis familiaris
acccatctgtaacttatgcattgcc

SEQ ID NO: 36154 - DNA, 25 bp, Canis familiaris
acccatttgaattttgcactgacta

SEQ ID NO: 36155 - DNA, 25 bp, Canis familiaris
acccagccactattttgttgactat

SEQ ID NO: 36156 - DNA, 25 bp, Canis familiaris
accgcaatcctacttttgatactcc

SEQ ID NO: 36157 - DNA, 25 bp, Canis familiaris
acccattcaccacgttctgtaaacg

SEQ ID NO: 36158 - DNA, 25 bp, Canis familiaris
accctatccctgctcaattaaacag

SEQ ID NO: 36159 - DNA, 25 bp, Canis familiaris
acccctagcctaacaatgggcaaag

SEQ ID NO: 36160 - DNA, 25 bp, Canis familiaris
acccctagccatggaaatgagttca

SEQ ID NO: 36161 - DNA, 25 bp, Canis familiaris
acccctagccagtgattatgattcg

SEQ ID NO: 36162 - DNA, 25 bp, Canis familiaris
accggtcccatgttgttcagtggag

SEQ ID NO: 36163 - DNA, 25 bp, Canis familiaris
accgatgacacgcagttgctcagct

SEQ ID NO: 36164 - DNA, 25 bp, Canis familiaris
accgggcatcatggcattggctagt

SEQ ID NO: 36165 - DNA, 25 bp, Canis familiaris
acctgggcatcatgtggctggccat

SEQ ID NO: 36166 - DNA, 25 bp, Canis familiaris
acctgtgtgcactggtaggcctagg

SEQ ID NO: 36167 - DNA, 25 bp, Canis familiaris
actcgttgtacggtaacccagtgca

SEQ ID NO: 36168 - DNA, 25 bp, Canis familiaris
accgaattctgtgtgcaaccgagta

SEQ ID NO: 36169 - DNA, 25 bp, Canis familiaris
accgaatacttcagcatgcacacgg

SEQ ID NO: 36170 - DNA, 25 bp, Canis familiaris
acccactgttttgtcagcacggaag

SEQ ID NO: 36171 - DNA, 25 bp, Canis familiaris
accccgtgggacttgagcacgtaat

SEQ ID NO: 36172 - DNA, 25 bp, Canis familiaris
acccacactgggtattaccatgtaa

SEQ ID NO: 36173 - DNA, 25 bp, Canis familiaris
acccaagtgggagctactgatgctg

SEQ ID NO: 36174 - DNA, 25 bp, Canis familiaris
acccacatactgcgactacatggta

SEQ ID NO: 36175 - DNA, 25 bp, Canis familiaris
acccactacggtctcaagtctatgt

SEQ ID NO: 36176 - DNA, 25 bp, Canis familiaris
accccttcattgacctcaactacat

SEQ ID NO: 36177 - DNA, 25 bp, Canis familiaris
accccttcattgatctcaactacat

SEQ ID NO: 36178 - DNA, 25 bp, Canis familiaris
acgcagccttcgattgcacggctac

SEQ ID NO: 36179 - DNA, 25 bp, Canis familiaris
acccccaggacaagcactggctggc

SEQ ID NO: 36180 - DNA, 25 bp, Canis familiaris
accccctggacatgcacatggacat

SEQ ID NO: 36181 - DNA, 25 bp, Canis familiaris
acccggggaagccctgtgattgact

SEQ ID NO: 36182 - DNA, 25 bp, Canis familiaris
acccggggtgcccacgatgatatga

SEQ ID NO: 36183 - DNA, 25 bp, Canis familiaris
acccgagaggtgcaacagaatgacg

SEQ ID NO: 36184 - DNA, 25 bp, Canis familiaris
accgccacaggacaccgaggaagat

SEQ ID NO: 36185 - DNA, 25 bp, Canis familiaris
accgcagaatgtctaccagacccga

SEQ ID NO: 36186 - DNA, 25 bp, Canis familiaris
acccagattcagttcaaagcccctg

SEQ ID NO: 36187 - DNA, 25 bp, Canis familiaris
accgagaccgaatgaagagacctga

SEQ ID NO: 36188 - DNA, 25 bp, Canis familiaris
accgcagtcacgtgggaggagccgg

SEQ ID NO: 36189 - DNA, 25 bp, Canis familiaris
acgcggccatggtggtgaaggtcgt

SEQ ID NO: 36190 - DNA, 25 bp, Canis familiaris
accgtgtcatcgtggagaagccctt

SEQ ID NO: 36191 - DNA, 25 bp, Canis familiaris
accggtatctgtcataagagtcgta

SEQ ID NO: 36192 - DNA, 25 bp, Canis familiaris
acccagttctgtgaccagagctcga

SEQ ID NO: 36193 - DNA, 25 bp, Canis familiaris
acgcgggttgtggacctggctggat

SEQ ID NO: 36194 - DNA, 25 bp, Canis familiaris
acgcgtgggtctgatttgaggaatg

SEQ ID NO: 36195 - DNA, 25 bp, Canis familiaris
accgtctgtgtgccgtttgaaaata

SEQ ID NO: 36196 - DNA, 25 bp, Canis familiaris
aaggttccttggctgtgaaaataca

SEQ ID NO: 36197 - DNA, 25 bp, Canis familiaris
actgtgtcccgtgcacggaaaatac

SEQ ID NO: 36198 - DNA, 25 bp, Canis familiaris
acgcttcatcccgcgggagaacggg

SEQ ID NO: 36199 - DNA, 25 bp, Canis familiaris
accctcactccagcttggaggtcag

SEQ ID NO: 36200 - DNA, 25 bp, Canis familiaris
accctcctagatgccaggcaggaaa

SEQ ID NO: 36201 - DNA, 25 bp, Canis familiaris
accctccagtcttcaagtcagaact

SEQ ID NO: 36202 - DNA, 25 bp, Canis familiaris
accctactgtcttctagtcaacaac

SEQ ID NO: 36203 - DNA, 25 bp, Canis familiaris
accctcactgctggggagtccctgc

SEQ ID NO: 36204 - DNA, 25 bp, Canis familiaris
accctctgctgtggcaagaacccac

SEQ ID NO: 36205 - DNA, 25 bp, Canis familiaris
acccctgctggacgaggaccagagt

SEQ ID NO: 36206 - DNA, 25 bp, Canis familiaris
acccccatgggccaggccaattgga

SEQ ID NO: 36207 - DNA, 25 bp, Canis familiaris
acccccatgtggctatgaattgtgt

SEQ ID NO: 36208 - DNA, 25 bp, Canis familiaris
acccattcagcccagtttatttgtg

SEQ ID NO: 36209 - DNA, 25 bp, Canis familiaris
acccattcagcccagtttatttgtg

SEQ ID NO: 36210 - DNA, 25 bp, Canis familiaris
acccattcagcccagtttatttgtg

SEQ ID NO: 36211 - DNA, 25 bp, Canis familiaris
acccagatgccccatttatctattt

SEQ ID NO: 36212 - DNA, 25 bp, Canis familiaris
acccccccatgaataattaattatg

SEQ ID NO: 36213 - DNA, 25 bp, Canis familiaris
acccccactgataccaattacgtga

SEQ ID NO: 36214 - DNA, 25 bp, Canis familiaris
accccacacgagatcacaagtcgtg

SEQ ID NO: 36215 - DNA, 25 bp, Canis familiaris
accctacccagtgcaagttgcttgt

SEQ ID NO: 36216 - DNA, 25 bp, Canis familiaris
acccaacccaatgcagagctacatg

SEQ ID NO: 36217 - DNA, 25 bp, Canis familiaris
accctgacagggaccagcagaacag

SEQ ID NO: 36218 - DNA, 25 bp, Canis familiaris
accgtgacggtcccatcaatgacgg

SEQ ID NO: 36219 - DNA, 25 bp, Canis familiaris
acccatacgtctgactgaggacggg

SEQ ID NO: 36220 - DNA, 25 bp, Canis familiaris
actcctatgtgggtgacgaggccca

SEQ ID NO: 36221 - DNA, 25 bp, Canis familiaris
accccttgggtaagatgctcctggt

SEQ ID NO: 36222 - DNA, 25 bp, Canis familiaris
accctgttggggagttcctgcagat

SEQ ID NO: 36223 - DNA, 25 bp, Canis familiaris
acccaggtttagaaggtgcctgcta

SEQ ID NO: 36224 - DNA, 25 bp, Canis familiaris
acgagggtttcagagtgtcctggtg

SEQ ID NO: 36225 - DNA, 25 bp, Canis familiaris
accggttctttcgagtggacaggtg

SEQ ID NO: 36226 - DNA, 25 bp, Canis familiaris
acccggattttccagggatcacatc

SEQ ID NO: 36227 - DNA, 25 bp, Canis familiaris
acccaagcttcttcttgggtgcact

SEQ ID NO: 36228 - DNA, 25 bp, Canis familiaris
acccatagattcagtggctgtgccc

SEQ ID NO: 36229 - DNA, 25 bp, Canis familiaris
acgaattgagtcgtgggcgagccgc

SEQ ID NO: 36230 - DNA, 25 bp, Canis familiaris
acgactagagactgctcatgccagc

SEQ ID NO: 36231 - DNA, 25 bp, Canis familiaris
acgacgcggccatgtgtgaagttcg

SEQ ID NO: 36232 - DNA, 25 bp, Canis familiaris
acgacggtccaggcggtagtgtagc

SEQ ID NO: 36233 - DNA, 25 bp, Canis familiaris
acgaccgcctgaacggttgttacag

SEQ ID NO: 36234 - DNA, 25 bp, Canis familiaris
acgacacgtcggaccgtcgtgaacg

SEQ ID NO: 36235 - DNA, 25 bp, Canis familiaris
acgaatctgtatggcacctggcgta

SEQ ID NO: 36236 - DNA, 25 bp, Canis familiaris
acccctgtgttcattgcagcattat

SEQ ID NO: 36237 - DNA, 25 bp, Canis familiaris
acccgcttctctggtatgaacatct

SEQ ID NO: 36238 - DNA, 25 bp, Canis familiaris
acccgcttctctggtatgaacatct

SEQ ID NO: 36239 - DNA, 25 bp, Canis familiaris
acccgcttctctggtatgaacatct

SEQ ID NO: 36240 - DNA, 25 bp, Canis familiaris
acccgcttctctggtatgaacatct

SEQ ID NO: 36241 - DNA, 25 bp, Canis familiaris
acccgcttctctggtatgaacatct

SEQ ID NO: 36242 - DNA, 25 bp, Canis familiaris
acccgcttctctggtatgaacatct

SEQ ID NO: 36243 - DNA, 25 bp, Canis familiaris
acccgcttctctggtatgaacatct

SEQ ID NO: 36244 - DNA, 25 bp, Canis familiaris
acccgcttctctggtatgaacatct

SEQ ID NO: 36245 - DNA, 25 bp, Canis familiaris
accctgcatggcaccaagtacacat

SEQ ID NO: 36246 - DNA, 25 bp, Canis familiaris
acccatggcctctcaaaagcacatt

SEQ ID NO: 36247 - DNA, 25 bp, Canis familiaris
accctcgcccataactataactgtt

SEQ ID NO: 36248 - DNA, 25 bp, Canis familiaris
acccagtcgcctaatcaataatcgg

SEQ ID NO: 36249 - DNA, 25 bp, Canis familiaris
acccagttcctcaagcagatcctgg

SEQ ID NO: 36250 - DNA, 25 bp, Canis familiaris
acccgcgctccgagcaaagcatgag

SEQ ID NO: 36251 - DNA, 25 bp, Canis familiaris
accctcccatatcatgcaagtcgag

SEQ ID NO: 36252 - DNA, 25 bp, Canis familiaris
acccccatcagacactcagtgtgat

SEQ ID NO: 36253 - DNA, 25 bp, Canis familiaris
accccataccagacaccagagatgt

SEQ ID NO: 36254 - DNA, 25 bp, Canis familiaris
accccatacgtcaactgtcagatga

SEQ ID NO: 36255 - DNA, 25 bp, Canis familiaris
accccaaggactctgcagcgaggat

SEQ ID NO: 36256 - DNA, 25 bp, Canis familiaris
accctctaccctctcaaggaatata

SEQ ID NO: 36257 - DNA, 25 bp, Canis familiaris
accctggacgtctccaaatgcgaaa

SEQ ID NO: 36258 - DNA, 25 bp, Canis familiaris
accgtggacgtctccggaggagata

SEQ ID NO: 36259 - DNA, 25 bp, Canis familiaris
accgaggacggtgactgggagtgga

SEQ ID NO: 36260 - DNA, 25 bp, Canis familiaris
accgggcacctgtggtgggggtgag

SEQ ID NO: 36261 - DNA, 25 bp, Canis familiaris
accgcggcacgtggagtcggagggt

SEQ ID NO: 36262 - DNA, 25 bp, Canis familiaris
accgcgtgcggtgggggtgacgcgt

SEQ ID NO: 36263 - DNA, 25 bp, Canis familiaris
accgtgtgagtgcgtgggtaccgtg

SEQ ID NO: 36264 - DNA, 25 bp, Canis familiaris
acttggtaggggtcggcaccaggag

SEQ ID NO: 36265 - DNA, 25 bp, Canis familiaris
cactgggggaggctctaggctttag

SEQ ID NO: 36266 - DNA, 25 bp, Canis familiaris
acgcggagggatctcgggctatata

SEQ ID NO: 36267 - DNA, 25 bp, Canis familiaris
accctgaccgatttcgtccataaag

SEQ ID NO: 36268 - DNA, 25 bp, Canis familiaris
accctgagcccatgatggaccaaag

SEQ ID NO: 36269 - DNA, 25 bp, Canis familiaris
acccggcctcagaattgatctctaa

SEQ ID NO: 36270 - DNA, 25 bp, Canis familiaris
accgcggcctaataatgagtgatca

SEQ ID NO: 36271 - DNA, 25 bp, Canis familiaris
accgaacctatatgattgcagatgt

SEQ ID NO: 36272 - DNA, 25 bp, Canis familiaris
accgaacacttaaagctgcagacac

SEQ ID NO: 36273 - DNA, 25 bp, Canis familiaris
acgagattaccgagcagcgcaaagg

SEQ ID NO: 36274 - DNA, 25 bp, Canis familiaris
acgaaatcccgtgccgaagaatgcg

SEQ ID NO: 36275 - DNA, 25 bp, Canis familiaris
acgagccaccatgtacacttagaac

SEQ ID NO: 36276 - DNA, 25 bp, Canis familiaris
acgccaacccagaaccctgggatca

SEQ ID NO: 36277 - DNA, 25 bp, Canis familiaris
acccaactcggactacgagaagatc

SEQ ID NO: 36278 - DNA, 25 bp, Canis familiaris
acccccttatgacactggcagtgat

SEQ ID NO: 36279 - DNA, 25 bp, Canis familiaris
accccgttctgagcattagctcgaa

SEQ ID NO: 36280 - DNA, 25 bp, Canis familiaris
acgcccgagctggagggggccgaat

SEQ ID NO: 36281 - DNA, 25 bp, Canis familiaris
accctctgagcgggtgctgcagagc

SEQ ID NO: 36282 - DNA, 25 bp, Canis familiaris
accgcatcggctgcattgtggtgga

SEQ ID NO: 36283 - DNA, 25 bp, Canis familiaris
accgacgccgacatggtcatgagct

SEQ ID NO: 36284 - DNA, 25 bp, Canis familiaris
accgatccatcgttgtgtctgtgat

SEQ ID NO: 36285 - DNA, 25 bp, Canis familiaris
accctcagcacttgctattctggag

SEQ ID NO: 36286 - DNA, 25 bp, Canis familiaris
acccctgccctgaagatcttagaaa

SEQ ID NO: 36287 - DNA, 25 bp, Canis familiaris
acccctcacacccaattcgaggaag

SEQ ID NO: 36288 - DNA, 25 bp, Canis familiaris
acccctgccaaagagtggtgagaac

SEQ ID NO: 36289 - DNA, 25 bp, Canis familiaris
acccgggcagaggccagtggggata

SEQ ID NO: 36290 - DNA, 25 bp, Canis familiaris
accccggaagctgctgtggaacatc

SEQ ID NO: 36291 - DNA, 25 bp, Canis familiaris
acacccgtacgcattgctgagaact

SEQ ID NO: 36292 - DNA, 25 bp, Canis familiaris
acccacgtcatcgatatatggcaca

SEQ ID NO: 36293 - DNA, 25 bp, Canis familiaris
accccttgcatccatcagaaataca

SEQ ID NO: 36294 - DNA, 25 bp, Canis familiaris
accgacctgttgaccaatataccca

SEQ ID NO: 36295 - DNA, 25 bp, Canis familiaris
accccctggagagcagtagctccca

SEQ ID NO: 36296 - DNA, 25 bp, Canis familiaris
acccttctggggacaaggaccagct

SEQ ID NO: 36297 - DNA, 25 bp, Canis familiaris
accctgccgagagacagacggccct

SEQ ID NO: 36298 - DNA, 25 bp, Canis familiaris
accgctgcacagtaaacaatcatag

SEQ ID NO: 36299 - DNA, 25 bp, Canis familiaris
accgctaagtattacccacagacat

SEQ ID NO: 36300 - DNA, 25 bp, Canis familiaris
acccattcagtttactcctgagaaa

SEQ ID NO: 36301 - DNA, 25 bp, Canis familiaris
acccattgtctacagtcccagaagt

SEQ ID NO: 36302 - DNA, 25 bp, Canis familiaris
acccgagactacggaccctggagat

SEQ ID NO: 36303 - DNA, 25 bp, Canis familiaris
acgcccgttagggagaccagtagat

SEQ ID NO: 36304 - DNA, 25 bp, Canis familiaris
acgccctggcagagggactcggagt

SEQ ID NO: 36305 - DNA, 25 bp, Canis familiaris
acccctggagctcaaggccattgag

SEQ ID NO: 36306 - DNA, 25 bp, Canis familiaris
acccctggagcgcagagcggatcat

SEQ ID NO: 36307 - DNA, 25 bp, Canis familiaris
accgcaagtgcttctaggcggactg

SEQ ID NO: 36308 - DNA, 25 bp, Canis familiaris
acccagagaccctgacgagatcatg

SEQ ID NO: 36309 - DNA, 25 bp, Canis familiaris
acccacatggacctcggagagtcca

SEQ ID NO: 36310 - DNA, 25 bp, Canis familiaris
acccatgtggaattccgaatggcca

SEQ ID NO: 36311 - DNA, 25 bp, Canis familiaris
acccgggagcagacatctcagatgg

SEQ ID NO: 36312 - DNA, 25 bp, Canis familiaris
accgggttgcacaatgcgcggtgca

SEQ ID NO: 36313 - DNA, 25 bp, Canis familiaris
accgagtgatgggaagcgcgcgagc

SEQ ID NO: 36314 - DNA, 25 bp, Canis familiaris
accctgtgcagcagtgggccaagct

SEQ ID NO: 36315 - DNA, 25 bp, Canis familiaris
acccttcagtggccaagatcaactc

SEQ ID NO: 36316 - DNA, 25 bp, Canis familiaris
accctgtcagagctccagttgactc

SEQ ID NO: 36317 - DNA, 25 bp, Canis familiaris
acgcctgtaatcccagcactttggg

SEQ ID NO: 36318 - DNA, 25 bp, Canis familiaris
acccctgactgcccagaccaggggc

SEQ ID NO: 36319 - DNA, 25 bp, Canis familiaris
accccgagcgtcgtggcatcagggg

SEQ ID NO: 36320 - DNA, 25 bp, Canis familiaris
accccaacgtgggccatgacggaga

SEQ ID NO: 36321 - DNA, 25 bp, Canis familiaris
acccaagacagcacctagcctgggc

SEQ ID NO: 36322 - DNA, 25 bp, Canis familiaris
accgctggaacaaagtacgcatggc

SEQ ID NO: 36323 - DNA, 25 bp, Canis familiaris
accctcagctactgagccacgaggc

SEQ ID NO: 36324 - DNA, 25 bp, Canis familiaris
acccatagcttccatgagaacagca

SEQ ID NO: 36325 - DNA, 25 bp, Canis familiaris
accgtggcatgttcatgaagccagg

SEQ ID NO: 36326 - DNA, 25 bp, Canis familiaris
accgggcattgactatgacatcagc

SEQ ID NO: 36327 - DNA, 25 bp, Canis familiaris
acgcatgggcattgcagccttgtgc

SEQ ID NO: 36328 - DNA, 25 bp, Canis familiaris
acgcagtgctgatgagcccatgact

SEQ ID NO: 36329 - DNA, 25 bp, Canis familiaris
acagccctcttagccatgttaatgt

SEQ ID NO: 36330 - DNA, 25 bp, Canis familiaris
accccttagtgctactcttagctat

SEQ ID NO: 36331 - DNA, 25 bp, Canis familiaris
acccacttatgtgaccttaaaggat

SEQ ID NO: 36332 - DNA, 25 bp, Canis familiaris
acaccacattttgaccttgtagggg

SEQ ID NO: 36333 - DNA, 25 bp, Canis familiaris
accgtatttgcttcacttgtgtggg

SEQ ID NO: 36334 - DNA, 25 bp, Canis familiaris
accgcttttctacagtttgtgagga

SEQ ID NO: 36335 - DNA, 25 bp, Canis familiaris
accgctttctacagtttggtgagga

SEQ ID NO: 36336 - DNA, 25 bp, Canis familiaris
accgcctttgggcttgtggtgtgga

SEQ ID NO: 36337 - DNA, 25 bp, Canis familiaris
accgaggggggcacttggtgggatg

SEQ ID NO: 36338 - DNA, 25 bp, Canis familiaris
accgagtcgggtggtgctggagtgg

SEQ ID NO: 36339 - DNA, 25 bp, Canis familiaris
accgaggcagtgcatgcatgttggg

SEQ ID NO: 36340 - DNA, 25 bp, Canis familiaris
accgagtgtgtcaagcagatctgcc

SEQ ID NO: 36341 - DNA, 25 bp, Canis familiaris
accgagtgggaacgacattgccagg

SEQ ID NO: 36342 - DNA, 25 bp, Canis familiaris
accgcagaggtacttgaattggcag

SEQ ID NO: 36343 - DNA, 25 bp, Canis familiaris
acccagcaattcctctttctggaat

SEQ ID NO: 36344 - DNA, 25 bp, Canis familiaris
accccagatttgtgtttgatagttc

SEQ ID NO: 36345 - DNA, 25 bp, Canis familiaris
acccaacctctgtgtcatgaatagt

SEQ ID NO: 36346 - DNA, 25 bp, Canis familiaris
acccacccctgaagatcccaggtgg

SEQ ID NO: 36347 - DNA, 25 bp, Canis familiaris
acccaccggcagtacatctggaggt

SEQ ID NO: 36348 - DNA, 25 bp, Canis familiaris
accccctgactgcatgcattgggac

SEQ ID NO: 36349 - DNA, 25 bp, Canis familiaris
accccgctgtctgtgcagaaagcac

SEQ ID NO: 36350 - DNA, 25 bp, Canis familiaris
acccacatctgcagtctcaggaagc

SEQ ID NO: 36351 - DNA, 25 bp, Canis familiaris
accgcctcatcaaggtggagagcgc

SEQ ID NO: 36352 - DNA, 25 bp, Canis familiaris
acgcgcgctacactgactggctcag

SEQ ID NO: 36353 - DNA, 25 bp, Canis familiaris
acgccttgagaaactgttatccgct

SEQ ID NO: 36354 - DNA, 25 bp, Canis familiaris
accctgcgaatgtatttttcaccta

SEQ ID NO: 36355 - DNA, 25 bp, Canis familiaris
accctggaatcatgacctgaaccaa

SEQ ID NO: 36356 - DNA, 25 bp, Canis familiaris
acccggtgagcaggatcctgccacc

SEQ ID NO: 36357 - DNA, 25 bp, Canis familiaris
acccgcgcatggtgaacttgaccac

SEQ ID NO: 36358 - DNA, 25 bp, Canis familiaris
acccaagcactgggatcgttcaccc

SEQ ID NO: 36359 - DNA, 25 bp, Canis familiaris
acccagggatgtggtggtgtactcc

SEQ ID NO: 36360 - DNA, 25 bp, Canis familiaris
acccagaagactgtggatggcccct

SEQ ID NO: 36361 - DNA, 25 bp, Canis familiaris
accctgcaagcctgtggaggccaag

SEQ ID NO: 36362 - DNA, 25 bp, Canis familiaris
accctcgacacataggctggaaaga

SEQ ID NO: 36363 - DNA, 25 bp, Canis familiaris
accccgaagcccacagggcagaagt

SEQ ID NO: 36364 - DNA, 25 bp, Canis familiaris
accgccggacggagcagcggaggct

SEQ ID NO: 36365 - DNA, 25 bp, Canis familiaris
acccctgtgactgttggccagagtc

SEQ ID NO: 36366 - DNA, 25 bp, Canis familiaris
accccagagcttcttggctagaatc

SEQ ID NO: 36367 - DNA, 25 bp, Canis familiaris
accccaagctaggctctcagaagaa

SEQ ID NO: 36368 - DNA, 25 bp, Canis familiaris
accgcccgatgggctcttgttgaat

SEQ ID NO: 36369 - DNA, 25 bp, Canis familiaris
accccagcaggggcttctgtgggta

SEQ ID NO: 36370 - DNA, 25 bp, Canis familiaris
accccagcaagaccagcatcttgag

SEQ ID NO: 36371 - DNA, 25 bp, Canis familiaris
acgctccaagagtattattaatgct

SEQ ID NO: 36372 - DNA, 25 bp, Canis familiaris
acgtgctcactaagaagttccatct

SEQ ID NO: 36373 - DNA, 25 bp, Canis familiaris
acgcgtagcgaattattctcctatc

SEQ ID NO: 36374 - DNA, 25 bp, Canis familiaris
acgatgggcagccactaattcccta

SEQ ID NO: 36375 - DNA, 25 bp, Canis familiaris
acgatgctgggcgctccaagaagta

SEQ ID NO: 36376 - DNA, 25 bp, Canis familiaris
acgagctggatggcattcccttgat

SEQ ID NO: 36377 - DNA, 25 bp, Canis familiaris
accgcgaagcgcttcacgcgttatt

SEQ ID NO: 36378 - DNA, 25 bp, Canis familiaris
acccgaactgcatcaggcgtggcag

SEQ ID NO: 36379 - DNA, 25 bp, Canis familiaris
accccaagcatcagcaggcatgagg

SEQ ID NO: 36380 - DNA, 25 bp, Canis familiaris
accccacatcatcagacactatggc

SEQ ID NO: 36381 - DNA, 25 bp, Canis familiaris
acccccatcaccaagaatcagactt

SEQ ID NO: 36382 - DNA, 25 bp, Canis familiaris
accgcccaaacttaaatcactcttg

SEQ ID NO: 36383 - DNA, 25 bp, Canis familiaris
accctccaaacgtaacacactctgg

SEQ ID NO: 36384 - DNA, 25 bp, Canis familiaris
accccaccaaggataccatcattga

SEQ ID NO: 36385 - DNA, 25 bp, Canis familiaris
acccaccgcacagagtgacgacatt

SEQ ID NO: 36386 - DNA, 25 bp, Canis familiaris
accccggatcagtcaggacgacagg

SEQ ID NO: 36387 - DNA, 25 bp, Canis familiaris
accgccagatgaaatcgaacagtcg

SEQ ID NO: 36388 - DNA, 25 bp, Canis familiaris
accgccagaaggacgagatcgaggg

SEQ ID NO: 36389 - DNA, 25 bp, Canis familiaris
accccagcaaggacactgagcaaga

SEQ ID NO: 36390 - DNA, 25 bp, Canis familiaris
accctctcatgatccactgggagat

SEQ ID NO: 36391 - DNA, 25 bp, Canis familiaris
acccttcgaagctctggatggatcc

SEQ ID NO: 36392 - DNA, 25 bp, Canis familiaris
acccctcaggaataggtgcgaactg

SEQ ID NO: 36393 - DNA, 25 bp, Canis familiaris
acccctagtgtccatgaggtcgttc

SEQ ID NO: 36394 - DNA, 25 bp, Canis familiaris
accccgatgatgcgatgcagggctg

SEQ ID NO: 36395 - DNA, 25 bp, Canis familiaris
accgccgatatgcagaaacactctt

SEQ ID NO: 36396 - DNA, 25 bp, Canis familiaris
acgcccgatatgctgagtccggttt

SEQ ID NO: 36397 - DNA, 25 bp, Canis familiaris
accgaaataagtagtccaagtagat

SEQ ID NO: 36398 - DNA, 25 bp, Canis familiaris
acaggaaacaaaagtggaagtcaca

SEQ ID NO: 36399 - DNA, 25 bp, Canis familiaris
acgcgcatacctgaagttttacaca

SEQ ID NO: 36400 - DNA, 25 bp, Canis familiaris
acccataaccagggctttgtacatg

SEQ ID NO: 36401 - DNA, 25 bp, Canis familiaris
acccattaaacatctgttacagctc

SEQ ID NO: 36402 - DNA, 25 bp, Canis familiaris
acccattttaatactgtttcactag

SEQ ID NO: 36403 - DNA, 25 bp, Canis familiaris
acccgtagttccatgtttcttgatg

SEQ ID NO: 36404 - DNA, 25 bp, Canis familiaris
accgcgtcagttgttatttctgcag

SEQ ID NO: 36405 - DNA, 25 bp, Canis familiaris
accgcgtgcaaggttttcgcggcac

SEQ ID NO: 36406 - DNA, 25 bp, Canis familiaris
acccgctgaagcattattggtcccc

SEQ ID NO: 36407 - DNA, 25 bp, Canis familiaris
accgcttagagcattgttttaccca

SEQ ID NO: 36408 - DNA, 25 bp, Canis familiaris
acgatttatgacaggtttatgttac

SEQ ID NO: 36409 - DNA, 25 bp, Canis familiaris
acgaatctcatgaaggtatggtatc

SEQ ID NO: 36410 - DNA, 25 bp, Canis familiaris
acgcattccagcagatccaggactt

SEQ ID NO: 36411 - DNA, 25 bp, Canis familiaris
acgcataatcaggagtcggagaccc

SEQ ID NO: 36412 - DNA, 25 bp, Canis familiaris
acgcaagtaccactgaagagggccc

SEQ ID NO: 36413 - DNA, 25 bp, Canis familiaris
acgcatgactacattacaacgggcc

SEQ ID NO: 36414 - DNA, 25 bp, Canis familiaris
aactatctacgacatgaacgcggcc

SEQ ID NO: 36415 - DNA, 25 bp, Canis familiaris
acccatataccacgtgatgacgagg

SEQ ID NO: 36416 - DNA, 25 bp, Canis familiaris
acccagacccattgtgagatcggaa

SEQ ID NO: 36417 - DNA, 25 bp, Canis familiaris
acccaactggctacaagccctgaag

SEQ ID NO: 36418 - DNA, 25 bp, Canis familiaris
accgctgacaggataagtgcccgag

SEQ ID NO: 36419 - DNA, 25 bp, Canis familiaris
accgcgaagcacacgtgatcaccgg

SEQ ID NO: 36420 - DNA, 25 bp, Canis familiaris
accgcgtggccatgcaggatgccac

SEQ ID NO: 36421 - DNA, 25 bp, Canis familiaris
acccctgcctgcagcagagattgag

SEQ ID NO: 36422 - DNA, 25 bp, Canis familiaris
accctgctccacctgatggtgatag

SEQ ID NO: 36423 - DNA, 25 bp, Canis familiaris
acgccctggacgtcatgcaggacag

SEQ ID NO: 36424 - DNA, 25 bp, Canis familiaris
acccccgagcaggctgcagagagac

SEQ ID NO: 36425 - DNA, 25 bp, Canis familiaris
accccgcatgtgcgcagatggcaga

SEQ ID NO: 36426 - DNA, 25 bp, Canis familiaris
acccaggcattgctgacaggatgca

SEQ ID NO: 36427 - DNA, 25 bp, Canis familiaris
acccggcactgactacaagatctac

SEQ ID NO: 36428 - DNA, 25 bp, Canis familiaris
acccggcctatcacaaatgtcacgg

SEQ ID NO: 36429 - DNA, 25 bp, Canis familiaris
accctccctgtccacaaagtagagg

SEQ ID NO: 36430 - DNA, 25 bp, Canis familiaris
acccacaggcttcccagtgagaaag

SEQ ID NO: 36431 - DNA, 25 bp, Canis familiaris
acccacgttccccagatagatatat

SEQ ID NO: 36432 - DNA, 25 bp, Canis familiaris
accctgctttcagcctgatggatat

SEQ ID NO: 36433 - DNA, 25 bp, Canis familiaris
acccctttgcagacacatttgacat

SEQ ID NO: 36434 - DNA, 25 bp, Canis familiaris
acgcacgtgttcataatttgcactg

SEQ ID NO: 36435 - DNA, 25 bp, Canis familiaris
acccagtttctggtttggctgcagt

SEQ ID NO: 36436 - DNA, 25 bp, Canis familiaris
accctgtttcttcattggtggctca

SEQ ID NO: 36437 - DNA, 25 bp, Canis familiaris
acccctttcattgttggctgacaag

SEQ ID NO: 36438 - DNA, 25 bp, Canis familiaris
acgcctgtacgaacttaggctccaa

SEQ ID NO: 36439 - DNA, 25 bp, Canis familiaris
accctctcaaggaatatatttcaaa

SEQ ID NO: 36440 - DNA, 25 bp, Canis familiaris
accccgaagtcagtaatatgtaaga

SEQ ID NO: 36441 - DNA, 25 bp, Canis familiaris
accccgtttcatgacgatgtccaac

SEQ ID NO: 36442 - DNA, 25 bp, Canis familiaris
acccacactttacaggaacacaact

SEQ ID NO: 36443 - DNA, 25 bp, Canis familiaris
accgccctgctcaacaaggagaaca

SEQ ID NO: 36444 - DNA, 25 bp, Canis familiaris
actcgtcacctcaacattatgaaaa

SEQ ID NO: 36445 - DNA, 25 bp, Canis familiaris
accctgtccatcaactgcaataaaa

SEQ ID NO: 36446 - DNA, 25 bp, Canis familiaris
accctgttaatctaatcataaaaca

SEQ ID NO: 36447 - DNA, 25 bp, Canis familiaris
accctgttcaattataatctccaag

SEQ ID NO: 36448 - DNA, 25 bp, Canis familiaris
acggtttccatgtaatactcctact

SEQ ID NO: 36449 - DNA, 25 bp, Canis familiaris
acgtgtactacttttcattcctact

SEQ ID NO: 36450 - DNA, 25 bp, Canis familiaris
acgttttattttttgtgcacctctg

SEQ ID NO: 36451 - DNA, 25 bp, Canis familiaris
acccttatttcattacaatcctcct

SEQ ID NO: 36452 - DNA, 25 bp, Canis familiaris
accccttttgattcgagtactcgct

SEQ ID NO: 36453 - DNA, 25 bp, Canis familiaris
accccatttatgagagtgccctcct

SEQ ID NO: 36454 - DNA, 25 bp, Canis familiaris
accccacttatatgtgtgattatcc

SEQ ID NO: 36455 - DNA, 25 bp, Canis familiaris
acgcagccacaccatatatatatat

SEQ ID NO: 36456 - DNA, 25 bp, Canis familiaris
accgcttccacttcaatgagattta

SEQ ID NO: 36457 - DNA, 25 bp, Canis familiaris
acccatccacactctcaagatttag

SEQ ID NO: 36458 - DNA, 25 bp, Canis familiaris
acgccccaatgctgtacaattatgt

SEQ ID NO: 36459 - DNA, 25 bp, Canis familiaris
accctcgacatgggtcacaccatat

SEQ ID NO: 36460 - DNA, 25 bp, Canis familiaris
accgctgcaatagggtcaccgcgat

SEQ ID NO: 36461 - DNA, 25 bp, Canis familiaris
acccctgcatagagctttctgctca

SEQ ID NO: 36462 - DNA, 25 bp, Canis familiaris
acccactaggcaagctttgagcaga

SEQ ID NO: 36463 - DNA, 25 bp, Canis familiaris
acgcactctcaccaagctataggag

SEQ ID NO: 36464 - DNA, 25 bp, Canis familiaris
acgaagcgaccaactaatctagaga

SEQ ID NO: 36465 - DNA, 25 bp, Canis familiaris
acgaaccagccaacacactgggctc

SEQ ID NO: 36466 - DNA, 25 bp, Canis familiaris
acggcaccacgtcaaatgggtccat

SEQ ID NO: 36467 - DNA, 25 bp, Canis familiaris
acccaccaagtgcccacatgggtca

SEQ ID NO: 36468 - DNA, 25 bp, Canis familiaris
accctctagagtgtgcacattacca

SEQ ID NO: 36469 - DNA, 25 bp, Canis familiaris
acccattagggtggctgctataaaa

SEQ ID NO: 36470 - DNA, 25 bp, Canis familiaris
accccattctacgagctgttgaaaa

SEQ ID NO: 36471 - DNA, 25 bp, Canis familiaris
accccaacttcggctttgcagaagg

SEQ ID NO: 36472 - DNA, 25 bp, Canis familiaris
accccaacttcaagctctaggagag

SEQ ID NO: 36473 - DNA, 25 bp, Canis familiaris
accctgagcactccaggtctcagga

SEQ ID NO: 36474 - DNA, 25 bp, Canis familiaris
accgcgcagccgcatgaaccggatg

SEQ ID NO: 36475 - DNA, 25 bp, Canis familiaris
acgcgtcccagattacaccatggac

SEQ ID NO: 36476 - DNA, 25 bp, Canis familiaris
accctgcccaagatcaccaggaact

SEQ ID NO: 36477 - DNA, 25 bp, Canis familiaris
acccatcaccatctttaaggctgac

SEQ ID NO: 36478 - DNA, 25 bp, Canis familiaris
acccatgtccatccattaaagaatg

SEQ ID NO: 36479 - DNA, 25 bp, Canis familiaris
accctggccaacttgcacaaggctt

SEQ ID NO: 36480 - DNA, 25 bp, Canis familiaris
acccgtgcctagtctgacaagagct

SEQ ID NO: 36481 - DNA, 25 bp, Canis familiaris
acccctggcgagtctgacggaggga

SEQ ID NO: 36482 - DNA, 25 bp, Canis familiaris
accgcctggagagagagaggaggga

SEQ ID NO: 36483 - DNA, 25 bp, Canis familiaris
acccctaatgcagaggaagagacag

SEQ ID NO: 36484 - DNA, 25 bp, Canis familiaris
acccagcttagcccaggagctagaa

SEQ ID NO: 36485 - DNA, 25 bp, Canis familiaris
acccagcttaggtcctgagcctgga

SEQ ID NO: 36486 - DNA, 25 bp, Canis familiaris
acccggccgagacttggcgatggag

SEQ ID NO: 36487 - DNA, 25 bp, Canis familiaris
acccggacgcagctgctggaggaag

SEQ ID NO: 36488 - DNA, 25 bp, Canis familiaris
accctcaaccacttgctgaagagat

SEQ ID NO: 36489 - DNA, 25 bp, Canis familiaris
acccctcaccatctgtggaatcata

SEQ ID NO: 36490 - DNA, 25 bp, Canis familiaris
acccagtcaccgtggagtacatcac

SEQ ID NO: 36491 - DNA, 25 bp, Canis familiaris
acccagtccccttgatgagtaattc

SEQ ID NO: 36492 - DNA, 25 bp, Canis familiaris
acgctcggctacctgtgaagtggat

SEQ ID NO: 36493 - DNA, 25 bp, Canis familiaris
acgtcaggctccctgcatggagcct

SEQ ID NO: 36494 - DNA, 25 bp, Canis familiaris
acgtcaaccacgtcatggacaacca

SEQ ID NO: 36495 - DNA, 25 bp, Canis familiaris
acgagcagccgctggctgagaaccc

SEQ ID NO: 36496 - DNA, 25 bp, Canis familiaris
acgcaagctccgggctgatatacag

SEQ ID NO: 36497 - DNA, 25 bp, Canis familiaris
acccttccgagccatgattagcttc

SEQ ID NO: 36498 - DNA, 25 bp, Canis familiaris
accctctctggacatgtttgctgag

SEQ ID NO: 36499 - DNA, 25 bp, Canis familiaris
accccattgggaagatgctgtctga

SEQ ID NO: 36500 - DNA, 25 bp, Canis familiaris
accccccttgcaaatgcatgtgcat

SEQ ID NO: 36501 - DNA, 25 bp, Canis familiaris
acgtagcccccagagatgtcaaaat

SEQ ID NO: 36502 - DNA, 25 bp, Canis familiaris
acccaggcatccctcaagttaaaat

SEQ ID NO: 36503 - DNA, 25 bp, Canis familiaris
acccaggctccacctgatggtgaga

SEQ ID NO: 36504 - DNA, 25 bp, Canis familiaris
acccaggccacgggaggaggactgg

SEQ ID NO: 36505 - DNA, 25 bp, Canis familiaris
acccccgcatccagggagaactgga

SEQ ID NO: 36506 - DNA, 25 bp, Canis familiaris
acgcccccgacggggacaagctgag

SEQ ID NO: 36507 - DNA, 25 bp, Canis familiaris
accccacgcggaggggactgcgtgg

SEQ ID NO: 36508 - DNA, 25 bp, Canis familiaris
accccccagtatgctagactgagct

SEQ ID NO: 36509 - DNA, 25 bp, Canis familiaris
accccaccagtaactcacttgagat

SEQ ID NO: 36510 - DNA, 25 bp, Canis familiaris
acccccggattggtcacatatgcgt

SEQ ID NO: 36511 - DNA, 25 bp, Canis familiaris
acccccgtgttaggagtcacatgtc

SEQ ID NO: 36512 - DNA, 25 bp, Canis familiaris
acccccagagtgttctagtactgct

SEQ ID NO: 36513 - DNA, 25 bp, Canis familiaris
acccccaagctgtatctttattata

SEQ ID NO: 36514 - DNA, 25 bp, Canis familiaris
actcccaaagccgtctactatatta

SEQ ID NO: 36515 - DNA, 25 bp, Canis familiaris
acggagaccagcggtctaaatacga

SEQ ID NO: 36516 - DNA, 25 bp, Canis familiaris
acgggtccattctccaaatgacatc

SEQ ID NO: 36517 - DNA, 25 bp, Canis familiaris
acgggcgtatgttaggcagaaggat

SEQ ID NO: 36518 - DNA, 25 bp, Canis familiaris
acgtcacttagtccagtaagggatt

SEQ ID NO: 36519 - DNA, 25 bp, Canis familiaris
acagtccattatagccttacaaggg

SEQ ID NO: 36520 - DNA, 25 bp, Canis familiaris
accctctatattgttcaataggaga

SEQ ID NO: 36521 - DNA, 25 bp, Canis familiaris
accctccattctctgtatctaggaa

SEQ ID NO: 36522 - DNA, 25 bp, Canis familiaris
accctccttcatttttctcagagta

SEQ ID NO: 36523 - DNA, 25 bp, Canis familiaris
acgtaggttcagttattcatcgagt

SEQ ID NO: 36524 - DNA, 25 bp, Canis familiaris
acgtccagttaatacttgggcggct

SEQ ID NO: 36525 - DNA, 25 bp, Canis familiaris
actgtccatttacaagtctggctta

SEQ ID NO: 36526 - DNA, 25 bp, Canis familiaris
acgtctgatgatacacaaactcgcg

SEQ ID NO: 36527 - DNA, 25 bp, Canis familiaris
acgcacgtgtacaagacccacgcgt

SEQ ID NO: 36528 - DNA, 25 bp, Canis familiaris
accctgttgaggaacctgacgcaag

SEQ ID NO: 36529 - DNA, 25 bp, Canis familiaris
accctttagtctttgctcacgagga

SEQ ID NO: 36530 - DNA, 25 bp, Canis familiaris
accctgttatctattgtcatctatg

SEQ ID NO: 36531 - DNA, 25 bp, Canis familiaris
accctatagacttgtggtattgcat

SEQ ID NO: 36532 - DNA, 25 bp, Canis familiaris
accctcatagacctgttgcatgcaa

SEQ ID NO: 36533 - DNA, 25 bp, Canis familiaris
accctccagcacaatgttctgcagg

SEQ ID NO: 36534 - DNA, 25 bp, Canis familiaris
actcccctgaaaatcctgggaatga

SEQ ID NO: 36535 - DNA, 25 bp, Canis familiaris
accctcctagacacctggtagatgg

SEQ ID NO: 36536 - DNA, 25 bp, Canis familiaris
acccctttgtcaatcgtggtcggtg

SEQ ID NO: 36537 - DNA, 25 bp, Canis familiaris
cacgacttttgtcacgtttcgaagg

SEQ ID NO: 36538 - DNA, 25 bp, Canis familiaris
acgacgttcgtcgagtgttttatat

SEQ ID NO: 36539 - DNA, 25 bp, Canis familiaris
acgacaggttgaggtggcttatttt

SEQ ID NO: 36540 - DNA, 25 bp, Canis familiaris
acgggccgtaggggctctagattct

SEQ ID NO: 36541 - DNA, 25 bp, Canis familiaris
actggtccggtggggatttgggatg

SEQ ID NO: 36542 - DNA, 25 bp, Canis familiaris
acggtcactttgctggtttcagttc

SEQ ID NO: 36543 - DNA, 25 bp, Canis familiaris
acgttcctggttcagtttcagtacg

SEQ ID NO: 36544 - DNA, 25 bp, Canis familiaris
acgtggccgaggccgagttcgacta

SEQ ID NO: 36545 - DNA, 25 bp, Canis familiaris
acgcggccatgtgtgaagttcgtgg

SEQ ID NO: 36546 - DNA, 25 bp, Canis familiaris
acgcggtcatagtgtgcggtcgggc

SEQ ID NO: 36547 - DNA, 25 bp, Canis familiaris
acgggatggactatcgtgtccggcc

SEQ ID NO: 36548 - DNA, 25 bp, Canis familiaris
acgcagtgggaacatcgtgccctgt

SEQ ID NO: 36549 - DNA, 25 bp, Canis familiaris
accctcagtgactgaagatgccctt

SEQ ID NO: 36550 - DNA, 25 bp, Canis familiaris
acgcccaggacaagaagatctccct

SEQ ID NO: 36551 - DNA, 25 bp, Canis familiaris
acgacctggacgagaccatccagcc

SEQ ID NO: 36552 - DNA, 25 bp, Canis familiaris
acgacctggtggctagcagccaacg

SEQ ID NO: 36553 - DNA, 25 bp, Canis familiaris
acgtcctggtcagtttcagtacgga

SEQ ID NO: 36554 - DNA, 25 bp, Canis familiaris
acccctttcctgctgcagtgagagg

SEQ ID NO: 36555 - DNA, 25 bp, Canis familiaris
accctgccctcttggagagggaggg

SEQ ID NO: 36556 - DNA, 25 bp, Canis familiaris
accccatcctctttcgaggtgttgg

SEQ ID NO: 36557 - DNA, 25 bp, Canis familiaris
acccctccacattgccagaggtggt

SEQ ID NO: 36558 - DNA, 25 bp, Canis familiaris
acccctgaagatcccaggtgggcga

SEQ ID NO: 36559 - DNA, 25 bp, Canis familiaris
accccggcagatcatcagttagagg

SEQ ID NO: 36560 - DNA, 25 bp, Canis familiaris
accccgcgaatgcagcagtgtcagc

SEQ ID NO: 36561 - DNA, 25 bp, Canis familiaris
acccccagagtgtagatgctatggc

SEQ ID NO: 36562 - DNA, 25 bp, Canis familiaris
acccccagattctgctgctatgagg

SEQ ID NO: 36563 - DNA, 25 bp, Canis familiaris
accctccggtctgtgtatgacgacc

SEQ ID NO: 36564 - DNA, 25 bp, Canis familiaris
acccatcttgggaggtcaaggaccg

SEQ ID NO: 36565 - DNA, 25 bp, Canis familiaris
acccaatctgggaaggtcagggacg

SEQ ID NO: 36566 - DNA, 25 bp, Canis familiaris
acccaagtggataagctgtctgagg

SEQ ID NO: 36567 - DNA, 25 bp, Canis familiaris
acgcagaaggggagttgtcagtgag

SEQ ID NO: 36568 - DNA, 25 bp, Canis familiaris
actcagaatttcctgggttcgcggt

SEQ ID NO: 36569 - DNA, 25 bp, Canis familiaris
actcgtttttagatggtcgcacagg

SEQ ID NO: 36570 - DNA, 25 bp, Canis familiaris
acccactgttaagttggtggctcag

SEQ ID NO: 36571 - DNA, 25 bp, Canis familiaris
acgccctgaccaccaagttggtcac

SEQ ID NO: 36572 - DNA, 25 bp, Canis familiaris
acgcgtctaactacgagtagactac

SEQ ID NO: 36573 - DNA, 25 bp, Canis familiaris
acgcgatgttgactgcacaggtaat

SEQ ID NO: 36574 - DNA, 25 bp, Canis familiaris
acccgttgagtgtggatgatctcag

SEQ ID NO: 36575 - DNA, 25 bp, Canis familiaris
accctctggttgtagtgtgttcgac

SEQ ID NO: 36576 - DNA, 25 bp, Canis familiaris
accctttgttgatgtagtctggcta

SEQ ID NO: 36577 - DNA, 25 bp, Canis familiaris
acgccttctttattcaactttgcca

SEQ ID NO: 36578 - DNA, 25 bp, Canis familiaris
acgctttctatatacaacttgccaa

SEQ ID NO: 36579 - DNA, 25 bp, Canis familiaris
acagcttcgggataaacgtggttcg

SEQ ID NO: 36580 - DNA, 25 bp, Canis familiaris
acgtccgggacaactatcatcggtt

SEQ ID NO: 36581 - DNA, 25 bp, Canis familiaris
acgcccggctgatggaatttggtct

SEQ ID NO: 36582 - DNA, 25 bp, Canis familiaris
acgcgcgcgttcatgggatttagaa

SEQ ID NO: 36583 - DNA, 25 bp, Canis familiaris
accctcttctcttaggcttgtagga

SEQ ID NO: 36584 - DNA, 25 bp, Canis familiaris
actcgtccattttcaacttggcagc

SEQ ID NO: 36585 - DNA, 25 bp, Canis familiaris
accctgccttttgacatagtcctat

SEQ ID NO: 36586 - DNA, 25 bp, Canis familiaris
acgcctacgtgttgctgatgcatgg

SEQ ID NO: 36587 - DNA, 25 bp, Canis familiaris
accctactgatgatgtgttgttgcc

SEQ ID NO: 36588 - DNA, 25 bp, Canis familiaris
accctacttgcactgctgtggattt

SEQ ID NO: 36589 - DNA, 25 bp, Canis familiaris
acccattttgcacccatgagtttgt

SEQ ID NO: 36590 - DNA, 25 bp, Canis familiaris
acccacttgtgactcctgagtttct

SEQ ID NO: 36591 - DNA, 25 bp, Canis familiaris
acccacttggttcttgcttgttgtg

SEQ ID NO: 36592 - DNA, 25 bp, Canis familiaris
acccactgttttatctgcttgttgt

SEQ ID NO: 36593 - DNA, 25 bp, Canis familiaris
acccactcagtatttaattttatgt

SEQ ID NO: 36594 - DNA, 25 bp, Canis familiaris
acccacatggtattttagtttattg

SEQ ID NO: 36595 - DNA, 25 bp, Canis familiaris
acccgcggatcatctttttctacgg

SEQ ID NO: 36596 - DNA, 25 bp, Canis familiaris
acccgcaggatctcatttgagcctc

SEQ ID NO: 36597 - DNA, 25 bp, Canis familiaris
acccagagtgattccatgttccagt

SEQ ID NO: 36598 - DNA, 25 bp, Canis familiaris
accctgagatgttcccttatctctg

SEQ ID NO: 36599 - DNA, 25 bp, Canis familiaris
accctagcacgaaactaattcgagg

SEQ ID NO: 36600 - DNA, 25 bp, Canis familiaris
acccataccagaggacttacggaag

SEQ ID NO: 36601 - DNA, 25 bp, Canis familiaris
acgccatcaacaccgagttcaagaa

SEQ ID NO: 36602 - DNA, 25 bp, Canis familiaris
acgcctggcatcacgattctataaa

SEQ ID NO: 36603 - DNA, 25 bp, Canis familiaris
acgcttgccatagctatttgtggac

SEQ ID NO: 36604 - DNA, 25 bp, Canis familiaris
acggtgcgacaggtattagtggact

SEQ ID NO: 36605 - DNA, 25 bp, Canis familiaris
cacggtccaacgtctaacggagtct

SEQ ID NO: 36606 - DNA, 25 bp, Canis familiaris
acgcgtccaacatctcaaacttgat

SEQ ID NO: 36607 - DNA, 25 bp, Canis familiaris
acccccatacttacacaacgtgata

SEQ ID NO: 36608 - DNA, 25 bp, Canis familiaris
acccttctaataacccatctggctt

SEQ ID NO: 36609 - DNA, 25 bp, Canis familiaris
acccgggaatatacctatctgttct

SEQ ID NO: 36610 - DNA, 25 bp, Canis familiaris
acccagggcaacatcccatcatgat

SEQ ID NO: 36611 - DNA, 25 bp, Canis familiaris
acgggaagcccatcaccatcttcca

SEQ ID NO: 36612 - DNA, 25 bp, Canis familiaris
acgggaaaccaatcctattctccat

SEQ ID NO: 36613 - DNA, 25 bp, Canis familiaris
gacgggagtcagcaaaccttttttg

SEQ ID NO: 36614 - DNA, 25 bp, Canis familiaris
acggtgcaggcagagtacagttttc

SEQ ID NO: 36615 - DNA, 25 bp, Canis familiaris
aaggtgcccttacaaggctttgctg

SEQ ID NO: 36616 - DNA, 25 bp, Canis familiaris
acgagtccttaacaagcctgaactt

SEQ ID NO: 36617 - DNA, 25 bp, Canis familiaris
acgcttccttgctggaagaaccctt

SEQ ID NO: 36618 - DNA, 25 bp, Canis familiaris
acgctcgccacactacagaagaacg

SEQ ID NO: 36619 - DNA, 25 bp, Canis familiaris
acgctccgcatccatcggaagaacg

SEQ ID NO: 36620 - DNA, 25 bp, Canis familiaris
acgctgccacggatgtatagaagac

SEQ ID NO: 36621 - DNA, 25 bp, Canis familiaris
acgtcacagacggtgttatgaacat

SEQ ID NO: 36622 - DNA, 25 bp, Canis familiaris
acgtatacacctattatgggaaaat

SEQ ID NO: 36623 - DNA, 25 bp, Canis familiaris
acgccgtccgctatttggaaagaag

SEQ ID NO: 36624 - DNA, 25 bp, Canis familiaris
acggttccccacaggggagagagag

SEQ ID NO: 36625 - DNA, 25 bp, Canis familiaris
acgtttaacgccacgctgtcaagtg

SEQ ID NO: 36626 - DNA, 25 bp, Canis familiaris
actgtttagaccgtctcccattaag

SEQ ID NO: 36627 - DNA, 25 bp, Canis familiaris
actgtattaacgttcagcttactaa

SEQ ID NO: 36628 - DNA, 25 bp, Canis familiaris
acgagatctcaacaatcagtcccaa

SEQ ID NO: 36629 - DNA, 25 bp, Canis familiaris
acgagattaatgccgtcagcaccgc

SEQ ID NO: 36630 - DNA, 25 bp, Canis familiaris
acgaccttaatggtcatgctgccgc

SEQ ID NO: 36631 - DNA, 25 bp, Canis familiaris
acgacggtagctactactgtcgctc

SEQ ID NO: 36632 - DNA, 25 bp, Canis familiaris
acgcctgctggtgttatagctgcgc

SEQ ID NO: 36633 - DNA, 25 bp, Canis familiaris
acccactcgacttgtaactgcatga

SEQ ID NO: 36634 - DNA, 25 bp, Canis familiaris
acccagccagcagaattacaatata

SEQ ID NO: 36635 - DNA, 25 bp, Canis familiaris
accctgcatcctgacttgaaattgt

SEQ ID NO: 36636 - DNA, 25 bp, Canis familiaris
accctgatctctacctggagaagtt

SEQ ID NO: 36637 - DNA, 25 bp, Canis familiaris
acccttgcctgagcttgatgagcag

SEQ ID NO: 36638 - DNA, 25 bp, Canis familiaris
accctgtgcgctgagcttgtatgag

SEQ ID NO: 36639 - DNA, 25 bp, Canis familiaris
acccatgatggtgaagctgacagag

SEQ ID NO: 36640 - DNA, 25 bp, Canis familiaris
acccagcggtgtcacagcacaagtt

SEQ ID NO: 36641 - DNA, 25 bp, Canis familiaris
acccagcagattctaagccaggcac

SEQ ID NO: 36642 - DNA, 25 bp, Canis familiaris
acccatcgacatctacctgagagag

SEQ ID NO: 36643 - DNA, 25 bp, Canis familiaris
acccccagccaatgcacgaagaggt

SEQ ID NO: 36644 - DNA, 25 bp, Canis familiaris
acgcctgaagccttacacgtaagtt

SEQ ID NO: 36645 - DNA, 25 bp, Canis familiaris
accctgaagtgcttgacatcaccag

SEQ ID NO: 36646 - DNA, 25 bp, Canis familiaris
acccaaagtcagtcactcaaccgac

SEQ ID NO: 36647 - DNA, 25 bp, Canis familiaris
acccagaatgacatcatcagcaccc

SEQ ID NO: 36648 - DNA, 25 bp, Canis familiaris
acccatgagaggatcaagcccctga

SEQ ID NO: 36649 - DNA, 25 bp, Canis familiaris
accctaaggtgcatatcctctcagc

SEQ ID NO: 36650 - DNA, 25 bp, Canis familiaris
acgcctctgaggctgtagtctgtca

SEQ ID NO: 36651 - DNA, 25 bp, Canis familiaris
acgccgatgaggggatcctctggca

SEQ ID NO: 36652 - DNA, 25 bp, Canis familiaris
acccttgctggatgcaacacttgca

SEQ ID NO: 36653 - DNA, 25 bp, Canis familiaris
acccatgcatcgtgaaaccttcaga

SEQ ID NO: 36654 - DNA, 25 bp, Canis familiaris
accctcatctgcaacaaacacggga

SEQ ID NO: 36655 - DNA, 25 bp, Canis familiaris
acccattctatgtcacatacactgc

SEQ ID NO: 36656 - DNA, 25 bp, Canis familiaris
accctctcacagtcacaaagctgct

SEQ ID NO: 36657 - DNA, 25 bp, Canis familiaris
accctcctcacatcagacattaaac

SEQ ID NO: 36658 - DNA, 25 bp, Canis familiaris
accctatcccgaggactatcgagac

SEQ ID NO: 36659 - DNA, 25 bp, Canis familiaris
acccttcttccaggactgttggaca

SEQ ID NO: 36660 - DNA, 25 bp, Canis familiaris
acccatcttcccagtgtttgtgaaa

SEQ ID NO: 36661 - DNA, 25 bp, Canis familiaris
acccttctcttcatgtatttgcaac

SEQ ID NO: 36662 - DNA, 25 bp, Canis familiaris
accctcttcttattgtcattgtcat

SEQ ID NO: 36663 - DNA, 25 bp, Canis familiaris
acccatccatggtatggtcttgcct

SEQ ID NO: 36664 - DNA, 25 bp, Canis familiaris
acccacctgcgcaagatgggggctc

SEQ ID NO: 36665 - DNA, 25 bp, Canis familiaris
acccacctgcgcaagatgggggctc

SEQ ID NO: 36666 - DNA, 25 bp, Canis familiaris
acgccacaagaacatgtgggtgcac

SEQ ID NO: 36667 - DNA, 25 bp, Canis familiaris
acccatgcgggactttgtgtgtgcc

SEQ ID NO: 36668 - DNA, 25 bp, Canis familiaris
accctggaaagaatgctggtctcca

SEQ ID NO: 36669 - DNA, 25 bp, Canis familiaris
acccgtgacaaaatggtgctgccat

SEQ ID NO: 36670 - DNA, 25 bp, Canis familiaris
acccggaagagtttgtggccatcgc

SEQ ID NO: 36671 - DNA, 25 bp, Canis familiaris
acccgcgagagatacggaccctgct

SEQ ID NO: 36672 - DNA, 25 bp, Canis familiaris
acgcaacaagggtgggagaccgctt

SEQ ID NO: 36673 - DNA, 25 bp, Canis familiaris
acgccatggcagaagacggggaccc

SEQ ID NO: 36674 - DNA, 25 bp, Canis familiaris
accctgtgctgctcaccgaggcccc

SEQ ID NO: 36675 - DNA, 25 bp, Canis familiaris
acccttggtcctccgaggaatctca

SEQ ID NO: 36676 - DNA, 25 bp, Canis familiaris
acccacaggaccacggagagaccat

SEQ ID NO: 36677 - DNA, 25 bp, Canis familiaris
acccacaggaccacggagagaccat

SEQ ID NO: 36678 - DNA, 25 bp, Canis familiaris
acccacaggaccacggagagaccat

SEQ ID NO: 36679 - DNA, 25 bp, Canis familiaris
acccagggtccttggggacagctat

SEQ ID NO: 36680 - DNA, 25 bp, Canis familiaris
acccagccgccctggggaatgaagg

SEQ ID NO: 36681 - DNA, 25 bp, Canis familiaris
acccatgggccgtggaggctatgga

SEQ ID NO: 36682 - DNA, 25 bp, Canis familiaris
acccgcgtctcctggagatcttggt

SEQ ID NO: 36683 - DNA, 25 bp, Canis familiaris
acccaggcccacttggtgatttggc

SEQ ID NO: 36684 - DNA, 25 bp, Canis familiaris
acccaatcccactgttgatttggtt

SEQ ID NO: 36685 - DNA, 25 bp, Canis familiaris
acccatacctcatggttgtcctttt

SEQ ID NO: 36686 - DNA, 25 bp, Canis familiaris
acgccaactctctggaattcacggt

SEQ ID NO: 36687 - DNA, 25 bp, Canis familiaris
acggaaccacattcgagttcggcct

SEQ ID NO: 36688 - DNA, 25 bp, Canis familiaris
acgaacacaacaacgacaccgtctc

SEQ ID NO: 36689 - DNA, 25 bp, Canis familiaris
acgaacagttacattcgccgcatct

SEQ ID NO: 36690 - DNA, 25 bp, Canis familiaris
acgcaacagtaaatccttacacctt

SEQ ID NO: 36691 - DNA, 25 bp, Canis familiaris
acgcacacttaatcctgaaatgccg

SEQ ID NO: 36692 - DNA, 25 bp, Canis familiaris
tagagggacaagtggcgttcagcca

SEQ ID NO: 36693 - DNA, 25 bp, Canis familiaris
accctccgagtattccgatatccgg

SEQ ID NO: 36694 - DNA, 25 bp, Canis familiaris
acgcctccaagttctgcaaaaacgg

SEQ ID NO: 36695 - DNA, 25 bp, Canis familiaris
acccaccattcttctcgggagaagg

SEQ ID NO: 36696 - DNA, 25 bp, Canis familiaris
acgccacctatttcccaagagaggg

SEQ ID NO: 36697 - DNA, 25 bp, Canis familiaris
acgctaattatgtacccaaggacat

SEQ ID NO: 36698 - DNA, 25 bp, Canis familiaris
acgctgttttgacctccatagaaga

SEQ ID NO: 36699 - DNA, 25 bp, Canis familiaris
acgctgttttgacctccatagaaga

SEQ ID NO: 36700 - DNA, 25 bp, Canis familiaris
acgctgttttgacctccatagaaga

SEQ ID NO: 36701 - DNA, 25 bp, Canis familiaris
acgctgttttgacctccatagaaga

SEQ ID NO: 36702 - DNA, 25 bp, Canis familiaris
acgctgttttgacctccatagaaga

SEQ ID NO: 36703 - DNA, 25 bp, Canis familiaris
acgctgttttgacctccatagaaga

SEQ ID NO: 36704 - DNA, 25 bp, Canis familiaris
acgctgttttgacctccatagaaga

SEQ ID NO: 36705 - DNA, 25 bp, Canis familiaris
acgctgttttgacctccatagaaga

SEQ ID NO: 36706 - DNA, 25 bp, Canis familiaris
acgctgttttgacctccatagaaga

SEQ ID NO: 36707 - DNA, 25 bp, Canis familiaris
acgctgttttgacctccatagaaga

SEQ ID NO: 36708 - DNA, 25 bp, Canis familiaris
acgctgttttgacctccatagaaga

SEQ ID NO: 36709 - DNA, 25 bp, Canis familiaris
acgctgttttgacctccatagaaga

SEQ ID NO: 36710 - DNA, 25 bp, Canis familiaris
acgctgttttgacctccatagaaga

SEQ ID NO: 36711 - DNA, 25 bp, Canis familiaris
acgctgttttgacctccatagaaga

SEQ ID NO: 36712 - DNA, 25 bp, Canis familiaris
acgctgttttgacctccatagaaga

SEQ ID NO: 36713 - DNA, 25 bp, Canis familiaris
acgctgttttgacctccatagaaga

SEQ ID NO: 36714 - DNA, 25 bp, Canis familiaris
acgctgttttgacctccatagaaga

SEQ ID NO: 36715 - DNA, 25 bp, Canis familiaris
acgctgttttgacctccatagaaga

SEQ ID NO: 36716 - DNA, 25 bp, Canis familiaris
acgtcattgtttctccatacacaga

SEQ ID NO: 36717 - DNA, 25 bp, Canis familiaris
accctttttcacacatcacacaaat

SEQ ID NO: 36718 - DNA, 25 bp, Canis familiaris
acccatttttctccaatccatgaaa

SEQ ID NO: 36719 - DNA, 25 bp, Canis familiaris
accctttggctctgcatgaccaaga

SEQ ID NO: 36720 - DNA, 25 bp, Canis familiaris
acgtcttcggccatcatgggtatca

SEQ ID NO: 36721 - DNA, 25 bp, Canis familiaris
acgttcatcggtctgtgtgtataca

SEQ ID NO: 36722 - DNA, 25 bp, Canis familiaris
gaaggacatcggagatagttaacgg

SEQ ID NO: 36723 - DNA, 25 bp, Canis familiaris
acaggagctcggagaacctgaccca

SEQ ID NO: 36724 - DNA, 25 bp, Canis familiaris
acgcaacgtggatgtacctaccaag

SEQ ID NO: 36725 - DNA, 25 bp, Canis familiaris
acgccacagtcctggacctgaagaa

SEQ ID NO: 36726 - DNA, 25 bp, Canis familiaris
acgcccaatggaggccacttgaggg

SEQ ID NO: 36727 - DNA, 25 bp, Canis familiaris
acccaaaggcagccagctcgtgggg

SEQ ID NO: 36728 - DNA, 25 bp, Canis familiaris
acccaacaggggatcagtgccctcg

SEQ ID NO: 36729 - DNA, 25 bp, Canis familiaris
actgccgaaggaggttaggccccat

SEQ ID NO: 36730 - DNA, 25 bp, Canis familiaris
actacgtgaggcagggggccctgag

SEQ ID NO: 36731 - DNA, 25 bp, Canis familiaris
acgagcttgaggaggtggcccagaa

SEQ ID NO: 36732 - DNA, 25 bp, Canis familiaris
acggttctgtgggttgtccatcaaa

SEQ ID NO: 36733 - DNA, 25 bp, Canis familiaris
acggagttcgagtttgtcaccaaca

SEQ ID NO: 36734 - DNA, 25 bp, Canis familiaris
cacggagtccaatgagttaccggat

SEQ ID NO: 36735 - DNA, 25 bp, Canis familiaris
acgtgatttacaaggtataccgaca

SEQ ID NO: 36736 - DNA, 25 bp, Canis familiaris
acgattttaaatagttccatgggag

SEQ ID NO: 36737 - DNA, 25 bp, Canis familiaris
acgtttcttgacttagcccatggtc

SEQ ID NO: 36738 - DNA, 25 bp, Canis familiaris
acgatatacctagaacccatagccc

SEQ ID NO: 36739 - DNA, 25 bp, Canis familiaris
acgaaacagatacaccctcaaacct

SEQ ID NO: 36740 - DNA, 25 bp, Canis familiaris
acgaccaagaagcagccgatcaaag

SEQ ID NO: 36741 - DNA, 25 bp, Canis familiaris
acgacgatgaagaggacgacgacga

SEQ ID NO: 36742 - DNA, 25 bp, Canis familiaris
acgacagagaagacagacggccagg

SEQ ID NO: 36743 - DNA, 25 bp, Canis familiaris
acccagagacaggaagaagccagga

SEQ ID NO: 36744 - DNA, 25 bp, Canis familiaris
acccaagaagagagactgctataca

SEQ ID NO: 36745 - DNA, 25 bp, Canis familiaris
acccaaggatgagatactgcccacc

SEQ ID NO: 36746 - DNA, 25 bp, Canis familiaris
acccaaggatgagatactgcccacc

SEQ ID NO: 36747 - DNA, 25 bp, Canis familiaris
acccagagtaatgctatccctgcgc

SEQ ID NO: 36748 - DNA, 25 bp, Canis familiaris
acccaggtaatcctagctactgttc

SEQ ID NO: 36749 - DNA, 25 bp, Canis familiaris
acccaggtaactccaagccatggtg

SEQ ID NO: 36750 - DNA, 25 bp, Canis familiaris
acccatgtttacacacacacatcct

SEQ ID NO: 36751 - DNA, 25 bp, Canis familiaris
acccatgtttctttgaacactccag

SEQ ID NO: 36752 - DNA, 25 bp, Canis familiaris
acccaggcatgtacctgagaacgct

SEQ ID NO: 36753 - DNA, 25 bp, Canis familiaris
actccaagaatacaagaacgctagc

SEQ ID NO: 36754 - DNA, 25 bp, Canis familiaris
acgccggccattcaaagccgcaagc

SEQ ID NO: 36755 - DNA, 25 bp, Canis familiaris
acggtggcgattcacgacgaggaga

SEQ ID NO: 36756 - DNA, 25 bp, Canis familiaris
acgcgctggcgttacagcgcaacag

SEQ ID NO: 36757 - DNA, 25 bp, Canis familiaris
acgctgtactgcctacactgaacag

SEQ ID NO: 36758 - DNA, 25 bp, Canis familiaris
acgactattgcgaacatcagacccg

SEQ ID NO: 36759 - DNA, 25 bp, Canis familiaris
acgaccctgagctcaagacctgagc

SEQ ID NO: 36760 - DNA, 25 bp, Canis familiaris
acgacgtctacggaatgtggtgaga

SEQ ID NO: 36761 - DNA, 25 bp, Canis familiaris
acccatgctcatgaggaagagggga

SEQ ID NO: 36762 - DNA, 25 bp, Canis familiaris
acccacgcagtgagaagagaaggca

SEQ ID NO: 36763 - DNA, 25 bp, Canis familiaris
actcgtacaagcccaagcgcaaggc

SEQ ID NO: 36764 - DNA, 25 bp, Canis familiaris
accctcaaggcaccaaccaagtggg

SEQ ID NO: 36765 - DNA, 25 bp, Canis familiaris
accctgccaacacagaccaaatggg

SEQ ID NO: 36766 - DNA, 25 bp, Canis familiaris
acgactgcctaactggatccattgt

SEQ ID NO: 36767 - DNA, 25 bp, Canis familiaris
acgaagccgacatgctgttctctgt

SEQ ID NO: 36768 - DNA, 25 bp, Canis familiaris
acgaagccgacatgctgttctctgt

SEQ ID NO: 36769 - DNA, 25 bp, Canis familiaris
acgttctgccagctttttcattaaa

SEQ ID NO: 36770 - DNA, 25 bp, Canis familiaris
acgttctgctcacatttcgttatga

SEQ ID NO: 36771 - DNA, 25 bp, Canis familiaris
acgtcctatcgtttgatcaatcttt

SEQ ID NO: 36772 - DNA, 25 bp, Canis familiaris
acgctccctggtttccagtatttat

SEQ ID NO: 36773 - DNA, 25 bp, Canis familiaris
acgctccgtgggctctagtaaggta

SEQ ID NO: 36774 - DNA, 25 bp, Canis familiaris
accctaatgtgtttttgaagagcgt

SEQ ID NO: 36775 - DNA, 25 bp, Canis familiaris
accctaatgtttgtagcagcaattt

SEQ ID NO: 36776 - DNA, 25 bp, Canis familiaris
actttttgcgttgtccagagcttct

SEQ ID NO: 36777 - DNA, 25 bp, Canis familiaris
acgactttttgtttacatacttcat

SEQ ID NO: 36778 - DNA, 25 bp, Canis familiaris
acgactctttgcataaaaccctatt

SEQ ID NO: 36779 - DNA, 25 bp, Canis familiaris
acgtgcttttgcaagtaaatccctt

SEQ ID NO: 36780 - DNA, 25 bp, Canis familiaris
acgagcgtttagttcaataccactg

SEQ ID NO: 36781 - DNA, 25 bp, Canis familiaris
acgtcggtttgttcaacttagctgg

SEQ ID NO: 36782 - DNA, 25 bp, Canis familiaris
actgatcggtttgttaattggtgta

SEQ ID NO: 36783 - DNA, 25 bp, Canis familiaris
acgtaggcttgtattagtgctttaa

SEQ ID NO: 36784 - DNA, 25 bp, Canis familiaris
acgtcagaatcttggtttgtgcttt

SEQ ID NO: 36785 - DNA, 25 bp, Canis familiaris
acgacaggactgggagcttgttttg

SEQ ID NO: 36786 - DNA, 25 bp, Canis familiaris
acgaagaactgtggcagctatgtcc

SEQ ID NO: 36787 - DNA, 25 bp, Canis familiaris
acgccaggcacactggactagaccc

SEQ ID NO: 36788 - DNA, 25 bp, Canis familiaris
acccatcaacactggtgagaaccga

SEQ ID NO: 36789 - DNA, 25 bp, Canis familiaris
accctgccccatgtggagagaacgc

SEQ ID NO: 36790 - DNA, 25 bp, Canis familiaris
acccaccacctcttacaagaacaat

SEQ ID NO: 36791 - DNA, 25 bp, Canis familiaris
acccacccacattataccaagtatt

SEQ ID NO: 36792 - DNA, 25 bp, Canis familiaris
acccacccacataataccaatgtat

SEQ ID NO: 36793 - DNA, 25 bp, Canis familiaris
acccacccatcatataccatgtatt

SEQ ID NO: 36794 - DNA, 25 bp, Canis familiaris
acccatcacccagaacatcagtgct

SEQ ID NO: 36795 - DNA, 25 bp, Canis familiaris
acccatacccatgtaaggtgttcaa

SEQ ID NO: 36796 - DNA, 25 bp, Canis familiaris
accctaacaatggtagatctattta

SEQ ID NO: 36797 - DNA, 25 bp, Canis familiaris
acccattagaagtgcctctactcta

SEQ ID NO: 36798 - DNA, 25 bp, Canis familiaris
acccttcatgtttagtccaattgct

SEQ ID NO: 36799 - DNA, 25 bp, Canis familiaris
acccttcagtctcagttgtgcaatt

SEQ ID NO: 36800 - DNA, 25 bp, Canis familiaris
acccttccctgaggtttgtgtatgt

SEQ ID NO: 36801 - DNA, 25 bp, Canis familiaris
acgaccccggagttgttgtctatgt

SEQ ID NO: 36802 - DNA, 25 bp, Canis familiaris
acgaggcctcaaaggtcttgaccag

SEQ ID NO: 36803 - DNA, 25 bp, Canis familiaris
acgagggctgcaatggtggcctgat

SEQ ID NO: 36804 - DNA, 25 bp, Canis familiaris
acgcaggttgccaggaggtgacatg

SEQ ID NO: 36805 - DNA, 25 bp, Canis familiaris
acgtggttccccaagattgtcatgc

SEQ ID NO: 36806 - DNA, 25 bp, Canis familiaris
acggtatttcctccagagtatacga

SEQ ID NO: 36807 - DNA, 25 bp, Canis familiaris
acgatgtttgttctcagcactgtac

SEQ ID NO: 36808 - DNA, 25 bp, Canis familiaris
acagctatattatttgtggctttac

SEQ ID NO: 36809 - DNA, 25 bp, Canis familiaris
acgctatctatttgcctgtgtctgt

SEQ ID NO: 36810 - DNA, 25 bp, Canis familiaris
acgcgctacatcagcacggagctgg

SEQ ID NO: 36811 - DNA, 25 bp, Canis familiaris
acgccaacacggtgctgtctggcgg

SEQ ID NO: 36812 - DNA, 25 bp, Canis familiaris
acccacaagggctctgtgtgcacag

SEQ ID NO: 36813 - DNA, 25 bp, Canis familiaris
acccacgcagggtcacttgactagt

SEQ ID NO: 36814 - DNA, 25 bp, Canis familiaris
acccattggggtgcatagactcctg

SEQ ID NO: 36815 - DNA, 25 bp, Canis familiaris
acccagggcaggtccaagacaagcg

SEQ ID NO: 36816 - DNA, 25 bp, Canis familiaris
acgcacggccggtacagtgaaactg

SEQ ID NO: 36817 - DNA, 25 bp, Canis familiaris
acgccaggccggcaagggctggcgc

SEQ ID NO: 36818 - DNA, 25 bp, Canis familiaris
acccatgcccggcagagcagagcgt

SEQ ID NO: 36819 - DNA, 25 bp, Canis familiaris
acccatcggcggcaagatcgactta

SEQ ID NO: 36820 - DNA, 25 bp, Canis familiaris
acgcccggtgagaaagggactatca

SEQ ID NO: 36821 - DNA, 25 bp, Canis familiaris
acgcaccggtgggcaagggactgcc

SEQ ID NO: 36822 - DNA, 25 bp, Canis familiaris
acgcacatccgcgccaagaggaaga

SEQ ID NO: 36823 - DNA, 25 bp, Canis familiaris
acgccagtagtgaccaagaacacag

SEQ ID NO: 36824 - DNA, 25 bp, Canis familiaris
acgtcagaacgtccgtcaacacgat

SEQ ID NO: 36825 - DNA, 25 bp, Canis familiaris
acgtggtcctggacgacgaaccatg

SEQ ID NO: 36826 - DNA, 25 bp, Canis familiaris
acgctgagcctggagacgacgcgtc

SEQ ID NO: 36827 - DNA, 25 bp, Canis familiaris
acgcgaccatgtcggaggtgctgcc

SEQ ID NO: 36828 - DNA, 25 bp, Canis familiaris
acgctgagttacaggtgccagccct

SEQ ID NO: 36829 - DNA, 25 bp, Canis familiaris
acggacttgagttttggcagaccct

SEQ ID NO: 36830 - DNA, 25 bp, Canis familiaris
acgtaggaagtaattgccaaccaag

SEQ ID NO: 36831 - DNA, 25 bp, Canis familiaris
acgttggtctgttattgccaagcac

SEQ ID NO: 36832 - DNA, 25 bp, Canis familiaris
acgctaagttttagtggatcagatt

SEQ ID NO: 36833 - DNA, 25 bp, Canis familiaris
acgccaagtttgccgtggagctaga

SEQ ID NO: 36834 - DNA, 25 bp, Canis familiaris
acggcaatatccgagccgtggctag

SEQ ID NO: 36835 - DNA, 25 bp, Canis familiaris
acgtctatgattgccccgtgtaaac

SEQ ID NO: 36836 - DNA, 25 bp, Canis familiaris
ctcgtgttaataaccctggcgaaag

SEQ ID NO: 36837 - DNA, 25 bp, Canis familiaris
ccgcttttgtaaccgtgggatagat

SEQ ID NO: 36838 - DNA, 25 bp, Canis familiaris
acgctcctttccacaggcggaaaag

SEQ ID NO: 36839 - DNA, 25 bp, Canis familiaris
acgaccgatgccaccaggggtgaaa

SEQ ID NO: 36840 - DNA, 25 bp, Canis familiaris
acccttctgccaagccaggggatga

SEQ ID NO: 36841 - DNA, 25 bp, Canis familiaris
acccatacagccatcaagtggtcgc

SEQ ID NO: 36842 - DNA, 25 bp, Canis familiaris
accctcagctccaaagcatgggccg

SEQ ID NO: 36843 - DNA, 25 bp, Canis familiaris
accctcagggccagggagcagcagt

SEQ ID NO: 36844 - DNA, 25 bp, Canis familiaris
acccagactgagccgggacagcagg

SEQ ID NO: 36845 - DNA, 25 bp, Canis familiaris
acccagactgtgccggagaaggaga

SEQ ID NO: 36846 - DNA, 25 bp, Canis familiaris
acgcaaccatctccgtggaaggaat

SEQ ID NO: 36847 - DNA, 25 bp, Canis familiaris
acgaggaattcccaggttggagatt

SEQ ID NO: 36848 - DNA, 25 bp, Canis familiaris
acgaggaattcccagtaagtgcggc

SEQ ID NO: 36849 - DNA, 25 bp, Canis familiaris
caccaggtggttgagtaggtttcca

SEQ ID NO: 36850 - DNA, 25 bp, Canis familiaris
tagtaggtagttgaataggatattt

SEQ ID NO: 36851 - DNA, 25 bp, Canis familiaris
acgaatgtagttaaaagggatgtgg

SEQ ID NO: 36852 - DNA, 25 bp, Canis familiaris
acgagtctacttaccacagagaggg

SEQ ID NO: 36853 - DNA, 25 bp, Canis familiaris
acgagtgcaaatttccaagaagagg

SEQ ID NO: 36854 - DNA, 25 bp, Canis familiaris
acggctaccacatccaaggaaggca

SEQ ID NO: 36855 - DNA, 25 bp, Canis familiaris
acggctaccacatccaaggaaggca

SEQ ID NO: 36856 - DNA, 25 bp, Canis familiaris
acggctaccacatccaaggaaggca

SEQ ID NO: 36857 - DNA, 25 bp, Canis familiaris
acgcctacgtcatcctgaagacggt

SEQ ID NO: 36858 - DNA, 25 bp, Canis familiaris
acgcctgacgtcaatccgtggaaga

SEQ ID NO: 36859 - DNA, 25 bp, Canis familiaris
acgtgctacggacccgtgtgaagac

SEQ ID NO: 36860 - DNA, 25 bp, Canis familiaris
accctacggagagcctgaggtacgg

SEQ ID NO: 36861 - DNA, 25 bp, Canis familiaris
acggtactgttagccagggtccagg

SEQ ID NO: 36862 - DNA, 25 bp, Canis familiaris
acggtagttgtctcaccgacatcgg

SEQ ID NO: 36863 - DNA, 25 bp, Canis familiaris
acggtggttattgtggaacacgatg

SEQ ID NO: 36864 - DNA, 25 bp, Canis familiaris
acgagggtgcatatggggccctggt

SEQ ID NO: 36865 - DNA, 25 bp, Canis familiaris
acgggttcctctctgagcgagcgga

SEQ ID NO: 36866 - DNA, 25 bp, Canis familiaris
acgggattgtctgttgaaactcaca

SEQ ID NO: 36867 - DNA, 25 bp, Canis familiaris
acgggtggtctgtaatgccactgcc

SEQ ID NO: 36868 - DNA, 25 bp, Canis familiaris
acgagggaaccaaatgcagcacatt

SEQ ID NO: 36869 - DNA, 25 bp, Canis familiaris
acgagggcacaccaatcacaatctc

SEQ ID NO: 36870 - DNA, 25 bp, Canis familiaris
acagcaaattcaccaatcacacttc

SEQ ID NO: 36871 - DNA, 25 bp, Canis familiaris
acgccatgattcttataaccgtgct

SEQ ID NO: 36872 - DNA, 25 bp, Canis familiaris
acgccatgcagggctacaaccaggc

SEQ ID NO: 36873 - DNA, 25 bp, Canis familiaris
acgacacatggcacacaatctagga

SEQ ID NO: 36874 - DNA, 25 bp, Canis familiaris
actggtctgttgacctccagaatcc

SEQ ID NO: 36875 - DNA, 25 bp, Canis familiaris
actgtattgaagcctgccaggaacc

SEQ ID NO: 36876 - DNA, 25 bp, Canis familiaris
acgcttcgagccctgacaggacaac

SEQ ID NO: 36877 - DNA, 25 bp, Canis familiaris
acgtttgtgcagtgacaggccagct

SEQ ID NO: 36878 - DNA, 25 bp, Canis familiaris
acgttttcgaggtggagcatatccc

SEQ ID NO: 36879 - DNA, 25 bp, Canis familiaris
acgcatttctgatgggatagactat

SEQ ID NO: 36880 - DNA, 25 bp, Canis familiaris
acgcagttatgcccagaatgtgact

SEQ ID NO: 36881 - DNA, 25 bp, Canis familiaris
acgagctttgctccagtcaatgtta

SEQ ID NO: 36882 - DNA, 25 bp, Canis familiaris
acgggtggctcgttcagatgttcag

SEQ ID NO: 36883 - DNA, 25 bp, Canis familiaris
acgccgttgtatgctcagcgaaact

SEQ ID NO: 36884 - DNA, 25 bp, Canis familiaris
acaggcgtttcagcctggacacctg

SEQ ID NO: 36885 - DNA, 25 bp, Canis familiaris
acgcggtctcatttccgtgaacagt

SEQ ID NO: 36886 - DNA, 25 bp, Canis familiaris
acccatgtctgtctcggataagcag

SEQ ID NO: 36887 - DNA, 25 bp, Canis familiaris
acccatgttttgtcagcaggaagaa

SEQ ID NO: 36888 - DNA, 25 bp, Canis familiaris
acccactctttgtagcacgagcaaa

SEQ ID NO: 36889 - DNA, 25 bp, Canis familiaris
acccacatgctatttggctctgatc

SEQ ID NO: 36890 - DNA, 25 bp, Canis familiaris
acccatcatcataattcctgcagct

SEQ ID NO: 36891 - DNA, 25 bp, Canis familiaris
acccaagcataacatgctgcagaat

SEQ ID NO: 36892 - DNA, 25 bp, Canis familiaris
actgtctaatagttactgaatcatg

SEQ ID NO: 36893 - DNA, 25 bp, Canis familiaris
aaatggaaggttatgactcaggaat

SEQ ID NO: 36894 - DNA, 25 bp, Canis familiaris
acacggtaccttatacatagacata

SEQ ID NO: 36895 - DNA, 25 bp, Canis familiaris
acgtgaggacctcttaactgcacag

SEQ ID NO: 36896 - DNA, 25 bp, Canis familiaris
actttggacacctttccctagatgt

SEQ ID NO: 36897 - DNA, 25 bp, Canis familiaris
acgaacgaatccatagccgtactat

SEQ ID NO: 36898 - DNA, 25 bp, Canis familiaris
gacgacggaacgtgcgggttcttgt

SEQ ID NO: 36899 - DNA, 25 bp, Canis familiaris
acgttgtgaacgtgccgtagttgtt

SEQ ID NO: 36900 - DNA, 25 bp, Canis familiaris
acgagggagaggtgccctcactcgc

SEQ ID NO: 36901 - DNA, 25 bp, Canis familiaris
acgagggagccgtggttgtgacgct

SEQ ID NO: 36902 - DNA, 25 bp, Canis familiaris
acgggacagccccagggcagtaagg

SEQ ID NO: 36903 - DNA, 25 bp, Canis familiaris
acgttaaggcactgccaggctgaag

SEQ ID NO: 36904 - DNA, 25 bp, Canis familiaris
acgtacgcggccatggtggtgaagg

SEQ ID NO: 36905 - DNA, 25 bp, Canis familiaris
acgcaatagcgacgcgctggcgtta

SEQ ID NO: 36906 - DNA, 25 bp, Canis familiaris
acgcccacctcaggcatgggcttaa

SEQ ID NO: 36907 - DNA, 25 bp, Canis familiaris
acccaggcccatggacgagatggaa

SEQ ID NO: 36908 - DNA, 25 bp, Canis familiaris
acccaggcgccagtggggcaggata

SEQ ID NO: 36909 - DNA, 25 bp, Canis familiaris
acccatgtggctgcctggggatgta

SEQ ID NO: 36910 - DNA, 25 bp, Canis familiaris
acccagatggctgacgagctgcgaa

SEQ ID NO: 36911 - DNA, 25 bp, Canis familiaris
acgaaatgagtacctgcaagcagat

SEQ ID NO: 36912 - DNA, 25 bp, Canis familiaris
acgatgtatagttgtccagtggatg

SEQ ID NO: 36913 - DNA, 25 bp, Canis familiaris
acgtggaagtctcagcattttgtaa

SEQ ID NO: 36914 - DNA, 25 bp, Canis familiaris
gacgacgacgtcataattttttaca

SEQ ID NO: 36915 - DNA, 25 bp, Canis familiaris
acgacaaccttattatttctgattt

SEQ ID NO: 36916 - DNA, 25 bp, Canis familiaris
acgtcaactgtcagatgatttgaat

SEQ ID NO: 36917 - DNA, 25 bp, Canis familiaris
acgatccttgccaacgttcattgag

SEQ ID NO: 36918 - DNA, 25 bp, Canis familiaris
acgacctctctgcccgttgtggtga

SEQ ID NO: 36919 - DNA, 25 bp, Canis familiaris
acgtctttctgggaatcggcgtggc

SEQ ID NO: 36920 - DNA, 25 bp, Canis familiaris
acgccactactgcgagggtgggtgc

SEQ ID NO: 36921 - DNA, 25 bp, Canis familiaris
acccagctccacctgatggtgagag

SEQ ID NO: 36922 - DNA, 25 bp, Canis familiaris
acccagctccacctgatggtgagag

SEQ ID NO: 36923 - DNA, 25 bp, Canis familiaris
acccagctccacctgatggtgagag

SEQ ID NO: 36924 - DNA, 25 bp, Canis familiaris
acccagctccacctgatggtgagag

SEQ ID NO: 36925 - DNA, 25 bp, Canis familiaris
acccagctccacctgatggtgagag

SEQ ID NO: 36926 - DNA, 25 bp, Canis familiaris
agctcgcaaggactatctcgcaaat

SEQ ID NO: 36927 - DNA, 25 bp, Canis familiaris
acccagctccacctgatggtgagag

SEQ ID NO: 36928 - DNA, 25 bp, Canis familiaris
acccagctccacctgatggtgagag

SEQ ID NO: 36929 - DNA, 25 bp, Canis familiaris
acccagctccacctgatggtgagag

SEQ ID NO: 36930 - DNA, 25 bp, Canis familiaris
acccagctccacctgatggtgagag

SEQ ID NO: 36931 - DNA, 25 bp, Canis familiaris
acccagctctcacctgagtggtgaa

SEQ ID NO: 36932 - DNA, 25 bp, Canis familiaris
acccacctccactgtgaatgaactc

SEQ ID NO: 36933 - DNA, 25 bp, Canis familiaris
acccacccagagacaggaagaagcc

SEQ ID NO: 36934 - DNA, 25 bp, Canis familiaris
acccacatccagagacacaagacac

SEQ ID NO: 36935 - DNA, 25 bp, Canis familiaris
acccagaccagcagacagacattct

SEQ ID NO: 36936 - DNA, 25 bp, Canis familiaris
acccaggccatgaaggagatgcact

SEQ ID NO: 36937 - DNA, 25 bp, Canis familiaris
acgccatgagccaaaggcagccgct

SEQ ID NO: 36938 - DNA, 25 bp, Canis familiaris
acagctaggcctaaagccctggacc

SEQ ID NO: 36939 - DNA, 25 bp, Canis familiaris
acgtaccttagaagccctgatggac

SEQ ID NO: 36940 - DNA, 25 bp, Canis familiaris
acgtaacttatgagcccctggaatg

SEQ ID NO: 36941 - DNA, 25 bp, Canis familiaris
acgtaagttatgatatcctctgcca

SEQ ID NO: 36942 - DNA, 25 bp, Canis familiaris
acgtcacgctgaatatatgaccacg

SEQ ID NO: 36943 - DNA, 25 bp, Canis familiaris
acgctcccgactatgacagaagcca

SEQ ID NO: 36944 - DNA, 25 bp, Canis familiaris
acgcttctgagatgattgacaaact

SEQ ID NO: 36945 - DNA, 25 bp, Canis familiaris
acccacagacatatatgagtaatct

SEQ ID NO: 36946 - DNA, 25 bp, Canis familiaris
acccaacactggctgagtagagtgc

SEQ ID NO: 36947 - DNA, 25 bp, Canis familiaris
acccaagccaggtctatggagagga

SEQ ID NO: 36948 - DNA, 25 bp, Canis familiaris
acccatgggcgttctctggatggag

SEQ ID NO: 36949 - DNA, 25 bp, Canis familiaris
acccaagggatgtgctggagtgtgg

SEQ ID NO: 36950 - DNA, 25 bp, Canis familiaris
actgatcaaaggattgggctgagta

SEQ ID NO: 36951 - DNA, 25 bp, Canis familiaris
acgaaggagcagatcgtggagatgc

SEQ ID NO: 36952 - DNA, 25 bp, Canis familiaris
acggggagcgtcggtgcaagatccc

SEQ ID NO: 36953 - DNA, 25 bp, Canis familiaris
acggggggttggatagcatcctctt

SEQ ID NO: 36954 - DNA, 25 bp, Canis familiaris
acaaggggagggcgtggacaccatt

SEQ ID NO: 36955 - DNA, 25 bp, Canis familiaris
acgcggacaaggtggtggacaagat

SEQ ID NO: 36956 - DNA, 25 bp, Canis familiaris
acgcggccactgggaggatggagcc

SEQ ID NO: 36957 - DNA, 25 bp, Canis familiaris
acgctggaacagctgaggcggtcag

SEQ ID NO: 36958 - DNA, 25 bp, Canis familiaris
acgggaatatggggagtgggagagg

SEQ ID NO: 36959 - DNA, 25 bp, Canis familiaris
acggctggaagtagttgggctggag

SEQ ID NO: 36960 - DNA, 25 bp, Canis familiaris
acgagtggaactggtggcccaggac

SEQ ID NO: 36961 - DNA, 25 bp, Canis familiaris
acgattgtcaatagagtccccacgg

SEQ ID NO: 36962 - DNA, 25 bp, Canis familiaris
acgatttcttgaagacccagcagga

SEQ ID NO: 36963 - DNA, 25 bp, Canis familiaris
acggtgactatgaggtcccacgatc

SEQ ID NO: 36964 - DNA, 25 bp, Canis familiaris
acgcgaactagtgcgaatcaccaga

SEQ ID NO: 36965 - DNA, 25 bp, Canis familiaris
acgcgctcagtaatccagaagagta

SEQ ID NO: 36966 - DNA, 25 bp, Canis familiaris
acgcatctgcagacgtgccgataga

SEQ ID NO: 36967 - DNA, 25 bp, Canis familiaris
acgctctgctctttccagatatata

SEQ ID NO: 36968 - DNA, 25 bp, Canis familiaris
actgacgcgtagtctcacctaagat

SEQ ID NO: 36969 - DNA, 25 bp, Canis familiaris
actgatgcgggatttcacccctaag

SEQ ID NO: 36970 - DNA, 25 bp, Canis familiaris
cactataggttttgactccccaggc

SEQ ID NO: 36971 - DNA, 25 bp, Canis familiaris
acgaagtattgtttctcttccaggc

SEQ ID NO: 36972 - DNA, 25 bp, Canis familiaris
acgtgagaattcagtcttcttcgga

SEQ ID NO: 36973 - DNA, 25 bp, Canis familiaris
acgtttttctggtcttttctatgag

SEQ ID NO: 36974 - DNA, 25 bp, Canis familiaris
acgaactttctgattttggcttgga

SEQ ID NO: 36975 - DNA, 25 bp, Canis familiaris
acgaacttggctgttaactttggat

SEQ ID NO: 36976 - DNA, 25 bp, Canis familiaris
actgctacttgggaattatacttaa

SEQ ID NO: 36977 - DNA, 25 bp, Canis familiaris
actcaatttgcaactatctgaagtt

SEQ ID NO: 36978 - DNA, 25 bp, Canis familiaris
acgcgatatgtcaccattgcggccc

SEQ ID NO: 36979 - DNA, 25 bp, Canis familiaris
acgcgaatgttaccaagcatcgatc

SEQ ID NO: 36980 - DNA, 25 bp, Canis familiaris
acgcaaatgttattcagccattaga

SEQ ID NO: 36981 - DNA, 25 bp, Canis familiaris
acgcacacttatctatcctataggt

SEQ ID NO: 36982 - DNA, 25 bp, Canis familiaris
acgcagccattaaaacgttttcatg

SEQ ID NO: 36983 - DNA, 25 bp, Canis familiaris
acgagaactcacgaaggctttttca

SEQ ID NO: 36984 - DNA, 25 bp, Canis familiaris
acggaaccacgcagactttggagac

SEQ ID NO: 36985 - DNA, 25 bp, Canis familiaris
acggaccagagcgaaagcatttgcc

SEQ ID NO: 36986 - DNA, 25 bp, Canis familiaris
actgtacccagcgaagtctttggaa

SEQ ID NO: 36987 - DNA, 25 bp, Canis familiaris
acgtccgcatccgacaggaagggaa

SEQ ID NO: 36988 - DNA, 25 bp, Canis familiaris
acggcacagtcaaggccgagaatgg

SEQ ID NO: 36989 - DNA, 25 bp, Canis familiaris
acggcacagtcaaggctgagaacgg

SEQ ID NO: 36990 - DNA, 25 bp, Canis familiaris
acgcgcctgtgcttggtgtgtaggc

SEQ ID NO: 36991 - DNA, 25 bp, Canis familiaris
acgcgcaggtgacggccttagatct

SEQ ID NO: 36992 - DNA, 25 bp, Canis familiaris
acgccaggagaagctgcttgtgact

SEQ ID NO: 36993 - DNA, 25 bp, Canis familiaris
acggagggcaaatcttggtctcggt

SEQ ID NO: 36994 - DNA, 25 bp, Canis familiaris
acggccgtatattactgtgcgaagg

SEQ ID NO: 36995 - DNA, 25 bp, Canis familiaris
acgggctgggaggactgtcatgaaa

SEQ ID NO: 36996 - DNA, 25 bp, Canis familiaris
acgagacgggggacgtgtgcatctc

SEQ ID NO: 36997 - DNA, 25 bp, Canis familiaris
acgagacggggcagtgtggccccca

SEQ ID NO: 36998 - DNA, 25 bp, Canis familiaris
acgggaatggactgagtgccccacc

SEQ ID NO: 36999 - DNA, 25 bp, Canis familiaris
acgaggagggccagagaggaaaccg

SEQ ID NO: 37000 - DNA, 25 bp, Canis familiaris
acgggtggcacgaggagcgaacaac

SEQ ID NO: 37001 - DNA, 25 bp, Canis familiaris
acaggggacagctcccggagaaagg

SEQ ID NO: 37002 - DNA, 25 bp, Canis familiaris
acgtgaggagactcgggggaggagg

SEQ ID NO: 37003 - DNA, 25 bp, Canis familiaris
acgctggagaactgcgtggcgcagg

SEQ ID NO: 37004 - DNA, 25 bp, Canis familiaris
acgcgagagacgtgcttccgaagga

SEQ ID NO: 37005 - DNA, 25 bp, Canis familiaris
actggctaacggtcactcaaaaggt

SEQ ID NO: 37006 - DNA, 25 bp, Canis familiaris
actcgcgacgaggacgtcacgaagt

SEQ ID NO: 37007 - DNA, 25 bp, Canis familiaris
acgcgcagcatggaggacttcgtca

SEQ ID NO: 37008 - DNA, 25 bp, Canis familiaris
acgcagcacagcagaacatcacgtg

SEQ ID NO: 37009 - DNA, 25 bp, Canis familiaris
acgagaagcgagaactcctgggccg

SEQ ID NO: 37010 - DNA, 25 bp, Canis familiaris
acgatgaagcaaatattttgcctgc

SEQ ID NO: 37011 - DNA, 25 bp, Canis familiaris
acggatcacacaacatggtcggcta

SEQ ID NO: 37012 - DNA, 25 bp, Canis familiaris
acggtgtcaccactgagatggcgtc

SEQ ID NO: 37013 - DNA, 25 bp, Canis familiaris
acgagtgaggcgctggatggtgtcc

SEQ ID NO: 37014 - DNA, 25 bp, Canis familiaris
acgcagcgaggcctcaagacagtgt

SEQ ID NO: 37015 - DNA, 25 bp, Canis familiaris
acgcagcgacagaatacgtctatct

SEQ ID NO: 37016 - DNA, 25 bp, Canis familiaris
acgctctgacagagagaggctttca

SEQ ID NO: 37017 - DNA, 25 bp, Canis familiaris
acgatcaaagatccagggcgtccat

SEQ ID NO: 37018 - DNA, 25 bp, Canis familiaris
acgcaccaactaaggtctgtggcag

SEQ ID NO: 37019 - DNA, 25 bp, Canis familiaris
acgcacacacacacgggtggacata

SEQ ID NO: 37020 - DNA, 25 bp, Canis familiaris
tgtcgacccaaactggtagccgtac

SEQ ID NO: 37021 - DNA, 25 bp, Canis familiaris
actgccccaaataggtaaccattcg

SEQ ID NO: 37022 - DNA, 25 bp, Canis familiaris
acgcccgcgaagcgtagacgatcca

SEQ ID NO: 37023 - DNA, 25 bp, Canis familiaris
acgccctgcagagaaggagtttcac

SEQ ID NO: 37024 - DNA, 25 bp, Canis familiaris
acgccacgctgtcaagtgaagacta

SEQ ID NO: 37025 - DNA, 25 bp, Canis familiaris
acggaggtgtcgggtgaagatggag

SEQ ID NO: 37026 - DNA, 25 bp, Canis familiaris
acgagatggtgatccgagaaaggca

SEQ ID NO: 37027 - DNA, 25 bp, Canis familiaris
actgatgaaggttgtaagagaagga

SEQ ID NO: 37028 - DNA, 25 bp, Canis familiaris
acgaggacgacgacagggacgtggc

SEQ ID NO: 37029 - DNA, 25 bp, Canis familiaris
acggattgaatcccagggagggcca

SEQ ID NO: 37030 - DNA, 25 bp, Canis familiaris
acggttcaattcaacgtctgggcct

SEQ ID NO: 37031 - DNA, 25 bp, Canis familiaris
acgtttcgattggtagtcgccgtgc

SEQ ID NO: 37032 - DNA, 25 bp, Canis familiaris
acgtattgatgtgttcagccccgtg

SEQ ID NO: 37033 - DNA, 25 bp, Canis familiaris
acgtaatatcggaggcaccactgcc

SEQ ID NO: 37034 - DNA, 25 bp, Canis familiaris
acgacgcttaggagtacgcgctgcc

SEQ ID NO: 37035 - DNA, 25 bp, Canis familiaris
acgtccattcaggatcgctacggtt

SEQ ID NO: 37036 - DNA, 25 bp, Canis familiaris
acgtgcgtacacgtgcgtacacgta

SEQ ID NO: 37037 - DNA, 25 bp, Canis familiaris
acgtggagaccatttgtatcaaaac

SEQ ID NO: 37038 - DNA, 25 bp, Canis familiaris
acgacagaaacacttttcgacacag

SEQ ID NO: 37039 - DNA, 25 bp, Canis familiaris
catcctaacaggctttttcccagta

SEQ ID NO: 37040 - DNA, 25 bp, Canis familiaris
acacatacccggattttccagggat

SEQ ID NO: 37041 - DNA, 25 bp, Canis familiaris
aactaccagaagcttttgacacgag

SEQ ID NO: 37042 - DNA, 25 bp, Canis familiaris
acggaatagattcttcttaatcggt

SEQ ID NO: 37043 - DNA, 25 bp, Canis familiaris
acgaggtggtcgaatctttcttcag

SEQ ID NO: 37044 - DNA, 25 bp, Canis familiaris
acgcaggtgtgtgatttcattccac

SEQ ID NO: 37045 - DNA, 25 bp, Canis familiaris
acgagtctgagtggcttttacatcc

SEQ ID NO: 37046 - DNA, 25 bp, Canis familiaris
acgagttcagatttggtttttccat

SEQ ID NO: 37047 - DNA, 25 bp, Canis familiaris
actagttcagtagagttctttacat

SEQ ID NO: 37048 - DNA, 25 bp, Canis familiaris
actggattcgtagactgttttttga

SEQ ID NO: 37049 - DNA, 25 bp, Canis familiaris
acgattacggaatagattcttctta

SEQ ID NO: 37050 - DNA, 25 bp, Canis familiaris
acccaacgtagatagacctcctgta

SEQ ID NO: 37051 - DNA, 25 bp, Canis familiaris
acccaaagtgaagagcacccaccac

SEQ ID NO: 37052 - DNA, 25 bp, Canis familiaris
gacccaatttaaccaattggaccag

SEQ ID NO: 37053 - DNA, 25 bp, Canis familiaris
acaccctttttgaagttggccacag

SEQ ID NO: 37054 - DNA, 25 bp, Canis familiaris
acgcacctcctcatggagtgcggcc

SEQ ID NO: 37055 - DNA, 25 bp, Canis familiaris
acgccatcctgcgtctggacttggc

SEQ ID NO: 37056 - DNA, 25 bp, Canis familiaris
acatgcatgcatgctggcatcggca

SEQ ID NO: 37057 - DNA, 25 bp, Canis familiaris
acgatgcagcctgcttctgcaaagt

SEQ ID NO: 37058 - DNA, 25 bp, Canis familiaris
acgaggggccatatgcagacagcct

SEQ ID NO: 37059 - DNA, 25 bp, Canis familiaris
acgcggtgggcttacgaatgacttt

SEQ ID NO: 37060 - DNA, 25 bp, Canis familiaris
tagctcggtcgacaagggaacttcc

SEQ ID NO: 37061 - DNA, 25 bp, Canis familiaris
acgggtccacaatgtggccaagtcc

SEQ ID NO: 37062 - DNA, 25 bp, Canis familiaris
acgaggccgaaatgaggaccagtgg

SEQ ID NO: 37063 - DNA, 25 bp, Canis familiaris
acggagtctgactcatgcaagacca

SEQ ID NO: 37064 - DNA, 25 bp, Canis familiaris
acgagattccaatgtgcagcgacac

SEQ ID NO: 37065 - DNA, 25 bp, Canis familiaris
actgacacctagtgtgcacagtccc

SEQ ID NO: 37066 - DNA, 25 bp, Canis familiaris
acggcctctaaagacagtgccaagg

SEQ ID NO: 37067 - DNA, 25 bp, Canis familiaris
acggctccggtatgtgcaaggcggg

SEQ ID NO: 37068 - DNA, 25 bp, Canis familiaris
acggcaagtggttcgacaagcgctg

SEQ ID NO: 37069 - DNA, 25 bp, Canis familiaris
acgtgctagtgacagggaatgccag

SEQ ID NO: 37070 - DNA, 25 bp, Canis familiaris
acgctgctgcagtttagggatgatg

SEQ ID NO: 37071 - DNA, 25 bp, Canis familiaris
acgccggtgttgttggtgtgacaat

SEQ ID NO: 37072 - DNA, 25 bp, Canis familiaris
acgcacgggttgtttatggactgaa

SEQ ID NO: 37073 - DNA, 25 bp, Canis familiaris
acgccgcttttactctgggagtgaa

SEQ ID NO: 37074 - DNA, 25 bp, Canis familiaris
acgccttttcatgcttttggaacaa

SEQ ID NO: 37075 - DNA, 25 bp, Canis familiaris
acagccttttttcttggctaaagag

SEQ ID NO: 37076 - DNA, 25 bp, Canis familiaris
acgctttttttcatgggtgtacaat

SEQ ID NO: 37077 - DNA, 25 bp, Canis familiaris
acgtctgttctcataagcaggtgta

SEQ ID NO: 37078 - DNA, 25 bp, Canis familiaris
acgtctttcccttaatgtgttatct

SEQ ID NO: 37079 - DNA, 25 bp, Canis familiaris
acgtgcgtgtctgtaactgtttttt

SEQ ID NO: 37080 - DNA, 25 bp, Canis familiaris
acggagttctaatccttttacactg

SEQ ID NO: 37081 - DNA, 25 bp, Canis familiaris
acgggtttgaagcttgttatccagt

SEQ ID NO: 37082 - DNA, 25 bp, Canis familiaris
acgggttaatgagtgtatgagtata

SEQ ID NO: 37083 - DNA, 25 bp, Canis familiaris
acggcgtaaagcgtgttcaagatac

SEQ ID NO: 37084 - DNA, 25 bp, Canis familiaris
acggtttatactcttacgatacttg

SEQ ID NO: 37085 - DNA, 25 bp, Canis familiaris
acgagtgtctaagtcgtgtacctga

SEQ ID NO: 37086 - DNA, 25 bp, Canis familiaris
acgagtttaaatgctgtggtttggt

SEQ ID NO: 37087 - DNA, 25 bp, Canis familiaris
acggtcttacttgtttgtgcttgga

SEQ ID NO: 37088 - DNA, 25 bp, Canis familiaris
acgcttttaattggtttgtgtcttg

SEQ ID NO: 37089 - DNA, 25 bp, Canis familiaris
acgttttttcatgtagattgtcctc

SEQ ID NO: 37090 - DNA, 25 bp, Canis familiaris
acgtttttctacttagtgatccgat

SEQ ID NO: 37091 - DNA, 25 bp, Canis familiaris
acgttcatattattaacctattcgt

SEQ ID NO: 37092 - DNA, 25 bp, Canis familiaris
acgaccactttgtcaagctcatttc

SEQ ID NO: 37093 - DNA, 25 bp, Canis familiaris
acgaaactcttctaacatattattg

SEQ ID NO: 37094 - DNA, 25 bp, Canis familiaris
acgaaactactatctacatctcatt

SEQ ID NO: 37095 - DNA, 25 bp, Canis familiaris
acgaaggctactaccaactggcagg

SEQ ID NO: 37096 - DNA, 25 bp, Canis familiaris
acgagggctatgctctccctcacgc

SEQ ID NO: 37097 - DNA, 25 bp, Canis familiaris
acgaggcgcatgagttctccaacac

SEQ ID NO: 37098 - DNA, 25 bp, Canis familiaris
acggtccagatcgagttccagagat

SEQ ID NO: 37099 - DNA, 25 bp, Canis familiaris
acggattatacttactccgctgtta

SEQ ID NO: 37100 - DNA, 25 bp, Canis familiaris
acgccattaatcagattcgggaaga

SEQ ID NO: 37101 - DNA, 25 bp, Canis familiaris
aagcctatacacagtttggaggaaa

SEQ ID NO: 37102 - DNA, 25 bp, Canis familiaris
gggagctagaacactttggggactg

SEQ ID NO: 37103 - DNA, 25 bp, Canis familiaris
acgtgccagaacactccagggaact

SEQ ID NO: 37104 - DNA, 25 bp, Canis familiaris
acgtatgccaacacccggtggacat

SEQ ID NO: 37105 - DNA, 25 bp, Canis familiaris
acgcggctcaacaaggccggtggga

SEQ ID NO: 37106 - DNA, 25 bp, Canis familiaris
acgagtgctaacaaggccaacagtc

SEQ ID NO: 37107 - DNA, 25 bp, Canis familiaris
actgaatgtaaaatgccctaaacct

SEQ ID NO: 37108 - DNA, 25 bp, Canis familiaris
acgatattattcatcctctaaacgt

SEQ ID NO: 37109 - DNA, 25 bp, Canis familiaris
acgaatcgagtcaatcctgttaatc

SEQ ID NO: 37110 - DNA, 25 bp, Canis familiaris
acgacttgagtaacaggtcagataa

SEQ ID NO: 37111 - DNA, 25 bp, Canis familiaris
acgcatcggatggacgggtcggaga

SEQ ID NO: 37112 - DNA, 25 bp, Canis familiaris
acgcgggaggagcaggtgcggcagt

SEQ ID NO: 37113 - DNA, 25 bp, Canis familiaris
acgtgggaaatgcaacatgtggtga

SEQ ID NO: 37114 - DNA, 25 bp, Canis familiaris
acgcggccaaatttacactgtatcc

SEQ ID NO: 37115 - DNA, 25 bp, Canis familiaris
acggaccaatattataagtcttcga

SEQ ID NO: 37116 - DNA, 25 bp, Canis familiaris
acgagaccacttttaactcatcatg

SEQ ID NO: 37117 - DNA, 25 bp, Canis familiaris
acggactacctcatgaagatcctga

SEQ ID NO: 37118 - DNA, 25 bp, Canis familiaris
actggaaacccacttaatttgcagg

SEQ ID NO: 37119 - DNA, 25 bp, Canis familiaris
acgtgaaagaaccttttagctgatg

SEQ ID NO: 37120 - DNA, 25 bp, Canis familiaris
cacgtaaaaaccacacgaggattat

SEQ ID NO: 37121 - DNA, 25 bp, Canis familiaris
acgtaaccaaccacgcgcaagagta

SEQ ID NO: 37122 - DNA, 25 bp, Canis familiaris
acgtaagtacatacacgcgcctgca

SEQ ID NO: 37123 - DNA, 25 bp, Canis familiaris
acgctaattattaccgcagatcata

SEQ ID NO: 37124 - DNA, 25 bp, Canis familiaris
acgctgagtcctggaacgggcagaa

SEQ ID NO: 37125 - DNA, 25 bp, Canis familiaris
acgggacactacatggggctgaatc

SEQ ID NO: 37126 - DNA, 25 bp, Canis familiaris
acggtcgcctacaggtgatgaaagc

SEQ ID NO: 37127 - DNA, 25 bp, Canis familiaris
acgagcccatctacctgggaggggt

SEQ ID NO: 37128 - DNA, 25 bp, Canis familiaris
acgatcacacccagcttgaggaggg

SEQ ID NO: 37129 - DNA, 25 bp, Canis familiaris
acgataccccctgtgaagaggttgg

SEQ ID NO: 37130 - DNA, 25 bp, Canis familiaris
acggagccccctttagggtgatcag

SEQ ID NO: 37131 - DNA, 25 bp, Canis familiaris
acgaggacccacagtacttgtccag

SEQ ID NO: 37132 - DNA, 25 bp, Canis familiaris
acggtagcctcagggctacttccgg

SEQ ID NO: 37133 - DNA, 25 bp, Canis familiaris
acgatgtcccacaggaagttctccg

SEQ ID NO: 37134 - DNA, 25 bp, Canis familiaris
acgatggctgccacggagagtcatc

SEQ ID NO: 37135 - DNA, 25 bp, Canis familiaris
acgctgggcacgttgagtgaatctc

SEQ ID NO: 37136 - DNA, 25 bp, Canis familiaris
acgtggccatcacggaaaatgtcct

SEQ ID NO: 37137 - DNA, 25 bp, Canis familiaris
acgtgtgccttggagcatagctttc

SEQ ID NO: 37138 - DNA, 25 bp, Canis familiaris
acgagtgctttggacacatgagtct

SEQ ID NO: 37139 - DNA, 25 bp, Canis familiaris
acgaactgcttaacaagtgtcccaa

SEQ ID NO: 37140 - DNA, 25 bp, Canis familiaris
acgacacagttactctttatcccaa

SEQ ID NO: 37141 - DNA, 25 bp, Canis familiaris
acgagcacgtttactgtgtgtccca

SEQ ID NO: 37142 - DNA, 25 bp, Canis familiaris
acgactgatgtgatacgggatgccg

SEQ ID NO: 37143 - DNA, 25 bp, Canis familiaris
acgactgttgtctgggtgtgtcttg

SEQ ID NO: 37144 - DNA, 25 bp, Canis familiaris
acgagattttaattgggaggcttgt

SEQ ID NO: 37145 - DNA, 25 bp, Canis familiaris
acgacaacgtacatgcggaggctcc

SEQ ID NO: 37146 - DNA, 25 bp, Canis familiaris
acgatgtcacgtattgccaagagct

SEQ ID NO: 37147 - DNA, 25 bp, Canis familiaris
acggtcacaagtatgccaaagacat

SEQ ID NO: 37148 - DNA, 25 bp, Canis familiaris
actgtgatccattgtggagccaaat

SEQ ID NO: 37149 - DNA, 25 bp, Canis familiaris
acgctgctcacagtggtaggacttt

SEQ ID NO: 37150 - DNA, 25 bp, Canis familiaris
acgctcccactggcaatcatgagtt

SEQ ID NO: 37151 - DNA, 25 bp, Canis familiaris
acgtcaacacatgcagttgtttagt

SEQ ID NO: 37152 - DNA, 25 bp, Canis familiaris
actgtgcccaagagtcgttttgtgc

SEQ ID NO: 37153 - DNA, 25 bp, Canis familiaris
acattggacggatgtgagggtttgg

SEQ ID NO: 37154 - DNA, 25 bp, Canis familiaris
actgggacgacatggagaagatctg

SEQ ID NO: 37155 - DNA, 25 bp, Canis familiaris
acggctgaggtttgagaaacattgt

SEQ ID NO: 37156 - DNA, 25 bp, Canis familiaris
acgagcttgggttggaaagtgtgaa

SEQ ID NO: 37157 - DNA, 25 bp, Canis familiaris
acgatgttggggctagccagcgtgc

SEQ ID NO: 37158 - DNA, 25 bp, Canis familiaris
acgtgcttgtagactgacagctagg

SEQ ID NO: 37159 - DNA, 25 bp, Canis familiaris
actggttgtgagcatacgtgaaggg

SEQ ID NO: 37160 - DNA, 25 bp, Canis familiaris
acgcgagatgtagattctgtaaatg

SEQ ID NO: 37161 - DNA, 25 bp, Canis familiaris
acgtacatgtattatttgtcacaca

SEQ ID NO: 37162 - DNA, 25 bp, Canis familiaris
acgtgacataaaatttatcggccta

SEQ ID NO: 37163 - DNA, 25 bp, Canis familiaris
acgtgattttaaaatagcagttgct

SEQ ID NO: 37164 - DNA, 25 bp, Canis familiaris
acgtctgttatactacattagcttc

SEQ ID NO: 37165 - DNA, 25 bp, Canis familiaris
acgtggttatcaactttagcttgtt

SEQ ID NO: 37166 - DNA, 25 bp, Canis familiaris
actggcaattagtatttctactttt

SEQ ID NO: 37167 - DNA, 25 bp, Canis familiaris
acgtcattttgattgtttcctttat

SEQ ID NO: 37168 - DNA, 25 bp, Canis familiaris
acgtattaatactgtgctctcttta

SEQ ID NO: 37169 - DNA, 25 bp, Canis familiaris
actgtcttaattacttccttttgat

SEQ ID NO: 37170 - DNA, 25 bp, Canis familiaris
acgtatcagaggactgcttcccttt

SEQ ID NO: 37171 - DNA, 25 bp, Canis familiaris
acgagatccagtctgtgtacctgag

SEQ ID NO: 37172 - DNA, 25 bp, Canis familiaris
acgagtctcagtggttgtagttggg

SEQ ID NO: 37173 - DNA, 25 bp, Canis familiaris
acgaatccggcagttgtcatggttg

SEQ ID NO: 37174 - DNA, 25 bp, Canis familiaris
acaggtccgggattccggtgcgttg

SEQ ID NO: 37175 - DNA, 25 bp, Canis familiaris
acggtgattgggtagccgttggcta

SEQ ID NO: 37176 - DNA, 25 bp, Canis familiaris
acgagaattggggcagtccctggtg

SEQ ID NO: 37177 - DNA, 25 bp, Canis familiaris
acgaaattgataacccctgctgtgt

SEQ ID NO: 37178 - DNA, 25 bp, Canis familiaris
acgggattgtaccatcctcatgggt

SEQ ID NO: 37179 - DNA, 25 bp, Canis familiaris
acgtgaattttgcaaacaggggagg

SEQ ID NO: 37180 - DNA, 25 bp, Canis familiaris
actgtaactgttcttcgtggtggca

SEQ ID NO: 37181 - DNA, 25 bp, Canis familiaris
acgtatactgaatattggtggctta

SEQ ID NO: 37182 - DNA, 25 bp, Canis familiaris
actggaatcggttaggtgtacaata

SEQ ID NO: 37183 - DNA, 25 bp, Canis familiaris
acggactcaactcggcagtggaagt

SEQ ID NO: 37184 - DNA, 25 bp, Canis familiaris
acgagcaccaaatggcggatgacgc

SEQ ID NO: 37185 - DNA, 25 bp, Canis familiaris
actaccaaaacatcggttctgggct

SEQ ID NO: 37186 - DNA, 25 bp, Canis familiaris
acggaaaatacagcgtttcttgtct

SEQ ID NO: 37187 - DNA, 25 bp, Canis familiaris
cacggaaaatacagcgtttcttgtc

SEQ ID NO: 37188 - DNA, 25 bp, Canis familiaris
acgagcaaaatagacatttctccaa

SEQ ID NO: 37189 - DNA, 25 bp, Canis familiaris
acgacgcaggcatgtacatctgcct

SEQ ID NO: 37190 - DNA, 25 bp, Canis familiaris
acgagccttaggtacactgtctacg

SEQ ID NO: 37191 - DNA, 25 bp, Canis familiaris
acgttgtaggtgtaactgtcactgg

SEQ ID NO: 37192 - DNA, 25 bp, Canis familiaris
acggttagtggtagtggtcaatggt

SEQ ID NO: 37193 - DNA, 25 bp, Canis familiaris
acgtttcgtggttgttgtggattgt

SEQ ID NO: 37194 - DNA, 25 bp, Canis familiaris
acggagtccgcgtttcgggattgtg

SEQ ID NO: 37195 - DNA, 25 bp, Canis familiaris
acggaaaccaagcctcgtggagatt

SEQ ID NO: 37196 - DNA, 25 bp, Canis familiaris
acaaggaaaaagtggctggtctgct

SEQ ID NO: 37197 - DNA, 25 bp, Canis familiaris
actcgcgaaaagcctaggtataatc

SEQ ID NO: 37198 - DNA, 25 bp, Canis familiaris
acgtctcaacaattctaggtcaaga

SEQ ID NO: 37199 - DNA, 25 bp, Canis familiaris
acgtgccaacattactctgtctggg

SEQ ID NO: 37200 - DNA, 25 bp, Canis familiaris
acgtcagcaagaccctctgtgtggg

SEQ ID NO: 37201 - DNA, 25 bp, Canis familiaris
acgcatcggggtgctggatgagggc

SEQ ID NO: 37202 - DNA, 25 bp, Canis familiaris
acgcgaggagttctgtgctgagggt

SEQ ID NO: 37203 - DNA, 25 bp, Canis familiaris
actggagggtgacttcgtgtgggag

SEQ ID NO: 37204 - DNA, 25 bp, Canis familiaris
acgtgagtggtggtgtgtggtgccg

SEQ ID NO: 37205 - DNA, 25 bp, Canis familiaris
acgagagtgtggctggggtggtgga

SEQ ID NO: 37206 - DNA, 25 bp, Canis familiaris
actgaattggggtgggtgggctgct

SEQ ID NO: 37207 - DNA, 25 bp, Canis familiaris
actggagtagggggtggggtgctgt

SEQ ID NO: 37208 - DNA, 25 bp, Canis familiaris
acggagcagtttagcctgggttgtt

SEQ ID NO: 37209 - DNA, 25 bp, Canis familiaris
acgagagtgtccatgactcaggttc

SEQ ID NO: 37210 - DNA, 25 bp, Canis familiaris
acgaacttgacttgcattagagtgt

SEQ ID NO: 37211 - DNA, 25 bp, Canis familiaris
acgtgacttatgttgctgaagaact

SEQ ID NO: 37212 - DNA, 25 bp, Canis familiaris
acgtcgcttatattgggatgacctg

SEQ ID NO: 37213 - DNA, 25 bp, Canis familiaris
acgttgcattgttctcgtatacctt

SEQ ID NO: 37214 - DNA, 25 bp, Canis familiaris
actgggcttctaaagtgggcattta

SEQ ID NO: 37215 - DNA, 25 bp, Canis familiaris
acgcttctgattaaaatgggaaacg

SEQ ID NO: 37216 - DNA, 25 bp, Canis familiaris
acgcttctgattaagacggttgaaa

SEQ ID NO: 37217 - DNA, 25 bp, Canis familiaris
acgcttctgataagacggttgtaac

SEQ ID NO: 37218 - DNA, 25 bp, Canis familiaris
acgctgtccataatcacctgatatt

SEQ ID NO: 37219 - DNA, 25 bp, Canis familiaris
acgatcacgtatacacctattatgg

SEQ ID NO: 37220 - DNA, 25 bp, Canis familiaris
acgtttgctatcttgccttgtatgg

SEQ ID NO: 37221 - DNA, 25 bp, Canis familiaris
acggtatttactgtgcttgtgggct

SEQ ID NO: 37222 - DNA, 25 bp, Canis familiaris
acggttttgaaagtcttcggcgctg

SEQ ID NO: 37223 - DNA, 25 bp, Canis familiaris
cacggttcttcataccaaggccttg

SEQ ID NO: 37224 - DNA, 25 bp, Canis familiaris
acgaggtcattttatctcactggct

SEQ ID NO: 37225 - DNA, 25 bp, Canis familiaris
acggagacttgctgattcttggctc

SEQ ID NO: 37226 - DNA, 25 bp, Canis familiaris
acgacaacattgctgtcttcgtccc

SEQ ID NO: 37227 - DNA, 25 bp, Canis familiaris
actgacgaataactgtccggtcccg

SEQ ID NO: 37228 - DNA, 25 bp, Canis familiaris
actgtccaatgatgttgccaagtct

SEQ ID NO: 37229 - DNA, 25 bp, Canis familiaris
actgtctcaacagtgttccttgtcc

SEQ ID NO: 37230 - DNA, 25 bp, Canis familiaris
acgtgcatagatttctgtcctttcc

SEQ ID NO: 37231 - DNA, 25 bp, Canis familiaris
acggataatttggctccatcttgta

SEQ ID NO: 37232 - DNA, 25 bp, Canis familiaris
acgtgcaaaacaggctctagcgttc

SEQ ID NO: 37233 - DNA, 25 bp, Canis familiaris
acgggagaacatagcctacctcacc

SEQ ID NO: 37234 - DNA, 25 bp, Canis familiaris
acgttagaagcagcctggcctcatc

SEQ ID NO: 37235 - DNA, 25 bp, Canis familiaris
acgttgagaggaccgtggctcgtgc

SEQ ID NO: 37236 - DNA, 25 bp, Canis familiaris
acgtctaatgtgaagcctggtactc

SEQ ID NO: 37237 - DNA, 25 bp, Canis familiaris
acgtctcaaggttccgttgtctaga

SEQ ID NO: 37238 - DNA, 25 bp, Canis familiaris
acgcttattagatcctgtagtaaga

SEQ ID NO: 37239 - DNA, 25 bp, Canis familiaris
acgcttacatagatccctgagaaag

SEQ ID NO: 37240 - DNA, 25 bp, Canis familiaris
acgttacatcccacttcagaagagt

SEQ ID NO: 37241 - DNA, 25 bp, Canis familiaris
tacggtttgcccattacaaagtttg

SEQ ID NO: 37242 - DNA, 25 bp, Canis familiaris
acgtgtttcccaatccacgagtcat

SEQ ID NO: 37243 - DNA, 25 bp, Canis familiaris
acggtaacccagtgcactgaggttt

SEQ ID NO: 37244 - DNA, 25 bp, Canis familiaris
acgtaacacccattaaaagcttgat

SEQ ID NO: 37245 - DNA, 25 bp, Canis familiaris
actgtcccacctttattaagcctgg

SEQ ID NO: 37246 - DNA, 25 bp, Canis familiaris
acgtcagccccttttcagaataaag

SEQ ID NO: 37247 - DNA, 25 bp, Canis familiaris
acgctccaccacaagttcaaatttt

SEQ ID NO: 37248 - DNA, 25 bp, Canis familiaris
acgctcaacatcaacttctcaaatt

SEQ ID NO: 37249 - DNA, 25 bp, Canis familiaris
acgttatataaccttcagacccaat

SEQ ID NO: 37250 - DNA, 25 bp, Canis familiaris
acgtttatgcgaccaacgactccac

SEQ ID NO: 37251 - DNA, 25 bp, Canis familiaris
acgagttctcggccaaggacatcga

SEQ ID NO: 37252 - DNA, 25 bp, Canis familiaris
ccggtcgtcggtgagaacttgtgca

SEQ ID NO: 37253 - DNA, 25 bp, Canis familiaris
acgggcgtagtgggagacctagcta

SEQ ID NO: 37254 - DNA, 25 bp, Canis familiaris
cacggaggtcgtgggaacgtaacag

SEQ ID NO: 37255 - DNA, 25 bp, Canis familiaris
acgtgggttttggataggatcccag

SEQ ID NO: 37256 - DNA, 25 bp, Canis familiaris
acggggtctacctaattgatgtcaa

SEQ ID NO: 37257 - DNA, 25 bp, Canis familiaris
acgtggagtctataaagcagagctc

SEQ ID NO: 37258 - DNA, 25 bp, Canis familiaris
acggttcctttctagagaagcttat

SEQ ID NO: 37259 - DNA, 25 bp, Canis familiaris
acggtgaacttgtgctgtgaacttg

SEQ ID NO: 37260 - DNA, 25 bp, Canis familiaris
acggcaaacttctatcttagaccat

SEQ ID NO: 37261 - DNA, 25 bp, Canis familiaris
acggccaattcggattgttgaacaa

SEQ ID NO: 37262 - DNA, 25 bp, Canis familiaris
actggaataagcgctttgaaaagaa

SEQ ID NO: 37263 - DNA, 25 bp, Canis familiaris
actggcgtaaccgtcacgtcaaagt

SEQ ID NO: 37264 - DNA, 25 bp, Canis familiaris
acgtggtcaacatcacctacaacta

SEQ ID NO: 37265 - DNA, 25 bp, Canis familiaris
acgtggtaaatattcccaccatatc

SEQ ID NO: 37266 - DNA, 25 bp, Canis familiaris
acgatatatagttttcccttcattt

SEQ ID NO: 37267 - DNA, 25 bp, Canis familiaris
acgagtcaatatttctcaccctctt

SEQ ID NO: 37268 - DNA, 25 bp, Canis familiaris
acgactactgattactaccacgcgt

SEQ ID NO: 37269 - DNA, 25 bp, Canis familiaris
acgacgaggagatctactgccggtc

SEQ ID NO: 37270 - DNA, 25 bp, Canis familiaris
acgtcgaggacgttgatcctgcggt

SEQ ID NO: 37271 - DNA, 25 bp, Canis familiaris
acgtcccagcacttgaacgtcgagt

SEQ ID NO: 37272 - DNA, 25 bp, Canis familiaris
acgtaccaccaaagaccatcttatt

SEQ ID NO: 37273 - DNA, 25 bp, Canis familiaris
acgacatccccgagggcatggttgt

SEQ ID NO: 37274 - DNA, 25 bp, Canis familiaris
acgacaactcacgcggtgcggattt

SEQ ID NO: 37275 - DNA, 25 bp, Canis familiaris
acgacctctgcagcgtggtcgtgca

SEQ ID NO: 37276 - DNA, 25 bp, Canis familiaris
acgcacgtgtctgcagaagtggctc

SEQ ID NO: 37277 - DNA, 25 bp, Canis familiaris
acgcagctgctttccagaaggtcag

SEQ ID NO: 37278 - DNA, 25 bp, Canis familiaris
acgcagctgcctgaagaagcacaag

SEQ ID NO: 37279 - DNA, 25 bp, Canis familiaris
acgcagctgtctgaagaagccacaa

SEQ ID NO: 37280 - DNA, 25 bp, Canis familiaris
acgcacttatcaggaacgcctcgat

SEQ ID NO: 37281 - DNA, 25 bp, Canis familiaris
acgcaccaagcggaactgcgcttaa

SEQ ID NO: 37282 - DNA, 25 bp, Canis familiaris
acatagccaagctggtccgctaaac

SEQ ID NO: 37283 - DNA, 25 bp, Canis familiaris
actcagcaggagtggacacagtaca

SEQ ID NO: 37284 - DNA, 25 bp, Canis familiaris
actacagtagtggaagccgtgcatc

SEQ ID NO: 37285 - DNA, 25 bp, Canis familiaris
acgagggagtctaacacgtgcgcga

SEQ ID NO: 37286 - DNA, 25 bp, Canis familiaris
acggagagagtcttactccgcgccg

SEQ ID NO: 37287 - DNA, 25 bp, Canis familiaris
acgtcagaatggttacttccacgcg

SEQ ID NO: 37288 - DNA, 25 bp, Canis familiaris
acgacgtagggtatctcacccgtgg

SEQ ID NO: 37289 - DNA, 25 bp, Canis familiaris
acgggagggaagagctcaccacgtt

SEQ ID NO: 37290 - DNA, 25 bp, Canis familiaris
acgggagggaagagctcaccacgtt

SEQ ID NO: 37291 - DNA, 25 bp, Canis familiaris
acgaatgcacgtgcagttgtcccac

SEQ ID NO: 37292 - DNA, 25 bp, Canis familiaris
acgcacacacgtgcgtgtgacagtt

SEQ ID NO: 37293 - DNA, 25 bp, Canis familiaris
acgaccaagtgacagcaatgctgtt

SEQ ID NO: 37294 - DNA, 25 bp, Canis familiaris
acgaacaacgacggcaagctgtccc

SEQ ID NO: 37295 - DNA, 25 bp, Canis familiaris
actaaaaccattcacagctttccca

SEQ ID NO: 37296 - DNA, 25 bp, Canis familiaris
acgaaacaagcccaaagctcttctt

SEQ ID NO: 37297 - DNA, 25 bp, Canis familiaris
acagaaacacaaccggatgtcttga

SEQ ID NO: 37298 - DNA, 25 bp, Canis familiaris
actaaatcccagtggcatggcctgt

SEQ ID NO: 37299 - DNA, 25 bp, Canis familiaris
acgaaactccatctatgtcaccgtg

SEQ ID NO: 37300 - DNA, 25 bp, Canis familiaris
acggatactccttgatgtgactctc

SEQ ID NO: 37301 - DNA, 25 bp, Canis familiaris
acgatgacctcgtagattctctcta

SEQ ID NO: 37302 - DNA, 25 bp, Canis familiaris
acgatgagtcatcagggttcactca

SEQ ID NO: 37303 - DNA, 25 bp, Canis familiaris
acgtagccatccaggctgtgctgtc

SEQ ID NO: 37304 - DNA, 25 bp, Canis familiaris
acgaacagactcaggcgatgtgctt

SEQ ID NO: 37305 - DNA, 25 bp, Canis familiaris
acgagagcatgagtgcatctgggtg

SEQ ID NO: 37306 - DNA, 25 bp, Canis familiaris
acgagagcatgagtggctgctgggt

SEQ ID NO: 37307 - DNA, 25 bp, Canis familiaris
acgattgcatgatgactgctgagcg

SEQ ID NO: 37308 - DNA, 25 bp, Canis familiaris
actggtgctgatcgacatagatatg

SEQ ID NO: 37309 - DNA, 25 bp, Canis familiaris
acgggtgtggacacaatgccctact

SEQ ID NO: 37310 - DNA, 25 bp, Canis familiaris
acgtggtgggaaggactgccccagt

SEQ ID NO: 37311 - DNA, 25 bp, Canis familiaris
acggagggggaggagcaggcccagt

SEQ ID NO: 37312 - DNA, 25 bp, Canis familiaris
actatgaggctgcgaaggcagatgc

SEQ ID NO: 37313 - DNA, 25 bp, Canis familiaris
actggggctggccaagaagggctta

SEQ ID NO: 37314 - DNA, 25 bp, Canis familiaris
acgagcggtggcacagtagcgactt

SEQ ID NO: 37315 - DNA, 25 bp, Canis familiaris
acgaggactggcagactagcttttt

SEQ ID NO: 37316 - DNA, 25 bp, Canis familiaris
acgaggcactacatgtgtagattaa

SEQ ID NO: 37317 - DNA, 25 bp, Canis familiaris
acgaggagcgagcttgtgcacaagg

SEQ ID NO: 37318 - DNA, 25 bp, Canis familiaris
acgaggggagcaccgtggagaagaa

SEQ ID NO: 37319 - DNA, 25 bp, Canis familiaris
acgatcacataagcacgtgggaaat

SEQ ID NO: 37320 - DNA, 25 bp, Canis familiaris
acgactcgctcactatggtgggaaa

SEQ ID NO: 37321 - DNA, 25 bp, Canis familiaris
acgacgtctccatatgcgtgataaa

SEQ ID NO: 37322 - DNA, 25 bp, Canis familiaris
acgaagtcacttaccgagaacaata

SEQ ID NO: 37323 - DNA, 25 bp, Canis familiaris
acgaaggtgttacgaacaccaaatg

SEQ ID NO: 37324 - DNA, 25 bp, Canis familiaris
acggatggtttaggtgacaccacag

SEQ ID NO: 37325 - DNA, 25 bp, Canis familiaris
acacgtgcgtacacgtacgtacacg

SEQ ID NO: 37326 - DNA, 25 bp, Canis familiaris
acacgacagtggatcgtaccgaccc

SEQ ID NO: 37327 - DNA, 25 bp, Canis familiaris
acgcaacgtggagtactaccagagc

SEQ ID NO: 37328 - DNA, 25 bp, Canis familiaris
acgagagaatggtggctactagcca

SEQ ID NO: 37329 - DNA, 25 bp, Canis familiaris
acgagagaattcttggtcaccagag

SEQ ID NO: 37330 - DNA, 25 bp, Canis familiaris
acgaataggctgcaggcccacaagc

SEQ ID NO: 37331 - DNA, 25 bp, Canis familiaris
actgagtggccagagtgccacccac

SEQ ID NO: 37332 - DNA, 25 bp, Canis familiaris
actggctgagtagagtgcaaccact

SEQ ID NO: 37333 - DNA, 25 bp, Canis familiaris
actggctcagcgtgtgcctacccta

SEQ ID NO: 37334 - DNA, 25 bp, Canis familiaris
actggctcagcgtgtgcctaccctg

SEQ ID NO: 37335 - DNA, 25 bp, Canis familiaris
acgtctcaggatgatcctagccgcc

SEQ ID NO: 37336 - DNA, 25 bp, Canis familiaris
acaatcctcggagtcctagggtcga

SEQ ID NO: 37337 - DNA, 25 bp, Canis familiaris
acactccaaggagctccagaggggg

SEQ ID NO: 37338 - DNA, 25 bp, Canis familiaris
acgtcccagaaccatctcaaggggg

SEQ ID NO: 37339 - DNA, 25 bp, Canis familiaris
acgatcccagaatgcagtgaactgg

SEQ ID NO: 37340 - DNA, 25 bp, Canis familiaris
acgagcaccgagcagcggaatcggc

SEQ ID NO: 37341 - DNA, 25 bp, Canis familiaris
acgagcccgtgcgatctgaagaggg

SEQ ID NO: 37342 - DNA, 25 bp, Canis familiaris
acgaccatctttgcagagagtgggt

SEQ ID NO: 37343 - DNA, 25 bp, Canis familiaris
acgaggccatttaccagcttgggtt

SEQ ID NO: 37344 - DNA, 25 bp, Canis familiaris
acgagaggccttgacagcatgtgct

SEQ ID NO: 37345 - DNA, 25 bp, Canis familiaris
acgaagacctgtagaggctggccgc

SEQ ID NO: 37346 - DNA, 25 bp, Canis familiaris
acgtaacctatgaatgtgtcccctc

SEQ ID NO: 37347 - DNA, 25 bp, Canis familiaris
aagttaggccagatggataccccct

SEQ ID NO: 37348 - DNA, 25 bp, Canis familiaris
aagttctggaagaggcttcccaaga

SEQ ID NO: 37349 - DNA, 25 bp, Canis familiaris
actcttctttaagggccccacaatg

SEQ ID NO: 37350 - DNA, 25 bp, Canis familiaris
acgtcatcatttgactggaccgtca

SEQ ID NO: 37351 - DNA, 25 bp, Canis familiaris
acgatcagtttatctggggtgtccc

SEQ ID NO: 37352 - DNA, 25 bp, Canis familiaris
acgagcagtttatctgggtggtccc

SEQ ID NO: 37353 - DNA, 25 bp, Canis familiaris
acgagccactttagctggggtgtcc

SEQ ID NO: 37354 - DNA, 25 bp, Canis familiaris
actgagccttttatctaggggcctg

SEQ ID NO: 37355 - DNA, 25 bp, Canis familiaris
acggccgtttatttatgtgcgaagg

SEQ ID NO: 37356 - DNA, 25 bp, Canis familiaris
acgacctatttttgttctcagaaga

SEQ ID NO: 37357 - DNA, 25 bp, Canis familiaris
acgaccttgtctctgagtatcagca

SEQ ID NO: 37358 - DNA, 25 bp, Canis familiaris
acgacctggtgtccgagtaccagca

SEQ ID NO: 37359 - DNA, 25 bp, Canis familiaris
acgacacgggatccgctgtaactct

SEQ ID NO: 37360 - DNA, 25 bp, Canis familiaris
acgatcctggaatttgctgttgcct

SEQ ID NO: 37361 - DNA, 25 bp, Canis familiaris
acgacgcgggcatgtacatctgcct

SEQ ID NO: 37362 - DNA, 25 bp, Canis familiaris
acagggctttgggaacctgcctatc

SEQ ID NO: 37363 - DNA, 25 bp, Canis familiaris
actgtccatctctggaacctacgat

SEQ ID NO: 37364 - DNA, 25 bp, Canis familiaris
actgtccatctctggaacctacgat

SEQ ID NO: 37365 - DNA, 25 bp, Canis familiaris
actggcccagtacgaacctgaagat

SEQ ID NO: 37366 - DNA, 25 bp, Canis familiaris
actgtacaaggagcctccgaggtcc

SEQ ID NO: 37367 - DNA, 25 bp, Canis familiaris
actggagaaggacccaactgggtct

SEQ ID NO: 37368 - DNA, 25 bp, Canis familiaris
actggagagagaagtcgcaaatctg

SEQ ID NO: 37369 - DNA, 25 bp, Canis familiaris
actggatggagtgccggagtcttct

SEQ ID NO: 37370 - DNA, 25 bp, Canis familiaris
acggagtggcagggggactccctgg

SEQ ID NO: 37371 - DNA, 25 bp, Canis familiaris
acggatgttgcaggtggtcgtcggt

SEQ ID NO: 37372 - DNA, 25 bp, Canis familiaris
acggctgttgcagcaggctttccgg

SEQ ID NO: 37373 - DNA, 25 bp, Canis familiaris
acgagagctgtggccagtgtactcc

SEQ ID NO: 37374 - DNA, 25 bp, Canis familiaris
acgaggcgggcagtgtgtacgcagg

SEQ ID NO: 37375 - DNA, 25 bp, Canis familiaris
acgagggccagaatggaggccagtg

SEQ ID NO: 37376 - DNA, 25 bp, Canis familiaris
acgaggaggagtccgaggctcaggg

SEQ ID NO: 37377 - DNA, 25 bp, Canis familiaris
acgaggaaagcctggagcctgacga

SEQ ID NO: 37378 - DNA, 25 bp, Canis familiaris
actggctgaaacggaggagacagac

SEQ ID NO: 37379 - DNA, 25 bp, Canis familiaris
acgaggatccattggagggcaagtc

SEQ ID NO: 37380 - DNA, 25 bp, Canis familiaris
acgtgatggcgatggaggagcaggg

SEQ ID NO: 37381 - DNA, 25 bp, Canis familiaris
acgagatcacaacgtgggaccctgt

SEQ ID NO: 37382 - DNA, 25 bp, Canis familiaris
acgagaaccaggtgcggacgctgtg

SEQ ID NO: 37383 - DNA, 25 bp, Canis familiaris
acgaccccagtgtgggactcgatcc

SEQ ID NO: 37384 - DNA, 25 bp, Canis familiaris
acaccccgctaagtggggccatgac

SEQ ID NO: 37385 - DNA, 25 bp, Canis familiaris
aatctctacgatgagtatggacgaa

SEQ ID NO: 37386 - DNA, 25 bp, Canis familiaris
acatctagtttgagtagcaagcgaa

SEQ ID NO: 37387 - DNA, 25 bp, Canis familiaris
acacaaggctttagtactactggtt

SEQ ID NO: 37388 - DNA, 25 bp, Canis familiaris
acacgggctttttacaaaccatcat

SEQ ID NO: 37389 - DNA, 25 bp, Canis familiaris
acgaccgcttctataacaaccatgc

SEQ ID NO: 37390 - DNA, 25 bp, Canis familiaris
acgaccaatgtctacgaacaactag

SEQ ID NO: 37391 - DNA, 25 bp, Canis familiaris
acaaccaggatccagaaaccccatg

SEQ ID NO: 37392 - DNA, 25 bp, Canis familiaris
acgtgccgcctggagaaacctgcca

SEQ ID NO: 37393 - DNA, 25 bp, Canis familiaris
acgtggtcctggacacaaccatgcg

SEQ ID NO: 37394 - DNA, 25 bp, Canis familiaris
acgtggtcctggacacaaccatgcg

SEQ ID NO: 37395 - DNA, 25 bp, Canis familiaris
acgtggtcctggacacaaccatgcg

SEQ ID NO: 37396 - DNA, 25 bp, Canis familiaris
acgtggtcctggacacaaccatgcg

SEQ ID NO: 37397 - DNA, 25 bp, Canis familiaris
acgtggtcctggacacaaccatgcg

SEQ ID NO: 37398 - DNA, 25 bp, Canis familiaris
actctgggccaggtacagtactgag

SEQ ID NO: 37399 - DNA, 25 bp, Canis familiaris
actgaggcccgagaggctaatggga

SEQ ID NO: 37400 - DNA, 25 bp, Canis familiaris
acgagcgctgccgtaaggaaaggag

SEQ ID NO: 37401 - DNA, 25 bp, Canis familiaris
actgacctccacagggatacaggtt

SEQ ID NO: 37402 - DNA, 25 bp, Canis familiaris
actggtcccccagaaaaggtgctgc

SEQ ID NO: 37403 - DNA, 25 bp, Canis familiaris
acggagcccaccatcggaaggggca

SEQ ID NO: 37404 - DNA, 25 bp, Canis familiaris
acgggccccagcatcaagatctggg

SEQ ID NO: 37405 - DNA, 25 bp, Canis familiaris
acgtggacaccagtcacagatgatg

SEQ ID NO: 37406 - DNA, 25 bp, Canis familiaris
acgagcgcctacaacacgagattgt

SEQ ID NO: 37407 - DNA, 25 bp, Canis familiaris
acgagcccattgatgacggttctga

SEQ ID NO: 37408 - DNA, 25 bp, Canis familiaris
acgtcttcattgaattttgtgttga

SEQ ID NO: 37409 - DNA, 25 bp, Canis familiaris
acgtagctcttgatttgtgactcat

SEQ ID NO: 37410 - DNA, 25 bp, Canis familiaris
actttcttttcgtgtaatatttgca

SEQ ID NO: 37411 - DNA, 25 bp, Canis familiaris
acttacttggggtgcttatgggaca

SEQ ID NO: 37412 - DNA, 25 bp, Canis familiaris
actgttggggggacccatgatggga

SEQ ID NO: 37413 - DNA, 25 bp, Canis familiaris
actggctgggtgagacaaattttat

SEQ ID NO: 37414 - DNA, 25 bp, Canis familiaris
actagaggggctttaaatgacttgt

SEQ ID NO: 37415 - DNA, 25 bp, Canis familiaris
actggctggggctttgatagaactt

SEQ ID NO: 37416 - DNA, 25 bp, Canis familiaris
acggcaggtgtgtttataagagcaa

SEQ ID NO: 37417 - DNA, 25 bp, Canis familiaris
acggccagttaatttgaaggcactt

SEQ ID NO: 37418 - DNA, 25 bp, Canis familiaris
acggcaaattcaacggcacagtcaa

SEQ ID NO: 37419 - DNA, 25 bp, Canis familiaris
acgtcgtgaatcacagccactgtga

SEQ ID NO: 37420 - DNA, 25 bp, Canis familiaris
acgtgcgatatttccagtacctact

SEQ ID NO: 37421 - DNA, 25 bp, Canis familiaris
acgtcggttgcagcagctgaccatc

SEQ ID NO: 37422 - DNA, 25 bp, Canis familiaris
acgtctttgtcagcactgagacttg

SEQ ID NO: 37423 - DNA, 25 bp, Canis familiaris
acgtcttgaacaggcgctgatgacc

SEQ ID NO: 37424 - DNA, 25 bp, Canis familiaris
acgttatcaccaggcagttcacact

SEQ ID NO: 37425 - DNA, 25 bp, Canis familiaris
acgtattgccaagagcttgaagctc

SEQ ID NO: 37426 - DNA, 25 bp, Canis familiaris
acggacgcaaacgcgagaagctcct

SEQ ID NO: 37427 - DNA, 25 bp, Canis familiaris
acggcctaaacttggaggcatccct

SEQ ID NO: 37428 - DNA, 25 bp, Canis familiaris
acggccgacaaattcaaacaacact

SEQ ID NO: 37429 - DNA, 25 bp, Canis familiaris
actccgtactggttgacaaaacact

SEQ ID NO: 37430 - DNA, 25 bp, Canis familiaris
acgtcttcactgctccaaagaacac

SEQ ID NO: 37431 - DNA, 25 bp, Canis familiaris
actgtttcctcaccaagaagttccg

SEQ ID NO: 37432 - DNA, 25 bp, Canis familiaris
tggggttactctctaaaggtaggtg

SEQ ID NO: 37433 - DNA, 25 bp, Canis familiaris
acaggtaaccatgtaaaggtagtag

SEQ ID NO: 37434 - DNA, 25 bp, Canis familiaris
actggtcacccagaagtcgttgtgt

SEQ ID NO: 37435 - DNA, 25 bp, Canis familiaris
actggtacaacagagccttgtccct

SEQ ID NO: 37436 - DNA, 25 bp, Canis familiaris
acgggacatgaggaaggcgcggccc

SEQ ID NO: 37437 - DNA, 25 bp, Canis familiaris
acgtcccggcatgagggaggcactc

SEQ ID NO: 37438 - DNA, 25 bp, Canis familiaris
acgggctctactgcgagtgaggacg

SEQ ID NO: 37439 - DNA, 25 bp, Canis familiaris
acgagcccaagtgcggcgaggaggc

SEQ ID NO: 37440 - DNA, 25 bp, Canis familiaris
acgagggaagatggcggcggccgtg

SEQ ID NO: 37441 - DNA, 25 bp, Canis familiaris
acgaggagatgatcgcggaccgcgt

SEQ ID NO: 37442 - DNA, 25 bp, Canis familiaris
acggtgagtccaactcgactcggtc

SEQ ID NO: 37443 - DNA, 25 bp, Canis familiaris
acgagatggtggagctctttctgcg

SEQ ID NO: 37444 - DNA, 25 bp, Canis familiaris
acgagttgattttgttttcatattt

SEQ ID NO: 37445 - DNA, 25 bp, Canis familiaris
acgtgttatatttctaatcctactt

SEQ ID NO: 37446 - DNA, 25 bp, Canis familiaris
acgtaattattggctctacattcct

SEQ ID NO: 37447 - DNA, 25 bp, Canis familiaris
acagtacatcagggctcctttttcc

SEQ ID NO: 37448 - DNA, 25 bp, Canis familiaris
acgaggcacagatgatcttttcttc

SEQ ID NO: 37449 - DNA, 25 bp, Canis familiaris
acgaggctagatgaccagtgctttt

SEQ ID NO: 37450 - DNA, 25 bp, Canis familiaris
acgaggctctgggagcgctgtttta

SEQ ID NO: 37451 - DNA, 25 bp, Canis familiaris
acgagacctgcaggaggcgttctgc

SEQ ID NO: 37452 - DNA, 25 bp, Canis familiaris
acgagacactgtgtgcctgtgtgcc

SEQ ID NO: 37453 - DNA, 25 bp, Canis familiaris
acgagacacaggagccaggcatgcc

SEQ ID NO: 37454 - DNA, 25 bp, Canis familiaris
acgaggcctggaaacggcagctgca

SEQ ID NO: 37455 - DNA, 25 bp, Canis familiaris
acgagagcgccgagagcgatgggca

SEQ ID NO: 37456 - DNA, 25 bp, Canis familiaris
acgagcaagcacgcgaaggtggcag

SEQ ID NO: 37457 - DNA, 25 bp, Canis familiaris
acggatagaccactgatagttaaca

SEQ ID NO: 37458 - DNA, 25 bp, Canis familiaris
acgtgaagtcagcaattgtgttaca

SEQ ID NO: 37459 - DNA, 25 bp, Canis familiaris
acgtgaagctctgaactgggcctga

SEQ ID NO: 37460 - DNA, 25 bp, Canis familiaris
acaggaatggcttccctcaggaatg

SEQ ID NO: 37461 - DNA, 25 bp, Canis familiaris
acggcaatatcatcaccacacgcac

SEQ ID NO: 37462 - DNA, 25 bp, Canis familiaris
acggaacatcgtgcagaactacagg

SEQ ID NO: 37463 - DNA, 25 bp, Canis familiaris
acggaaatcgggcaactcctgagct

SEQ ID NO: 37464 - DNA, 25 bp, Canis familiaris
acgtgaaaggggcagcgccctacct

SEQ ID NO: 37465 - DNA, 25 bp, Canis familiaris
acgtggaagtgggtcaggctctccc

SEQ ID NO: 37466 - DNA, 25 bp, Canis familiaris
acggaggtgttggctgcagccatcg

SEQ ID NO: 37467 - DNA, 25 bp, Canis familiaris
acgtatcgtgttactgcggcaagaa

SEQ ID NO: 37468 - DNA, 25 bp, Canis familiaris
acgttcgatcttgcatggagcaatc

SEQ ID NO: 37469 - DNA, 25 bp, Canis familiaris
acgttcgatcttgcatggagcaatc

SEQ ID NO: 37470 - DNA, 25 bp, Canis familiaris
acgtctagcttggctcgacagacaa

SEQ ID NO: 37471 - DNA, 25 bp, Canis familiaris
acgtcacatcttcgtcggtgacaag

SEQ ID NO: 37472 - DNA, 25 bp, Canis familiaris
acgtccattcatcacggtgtgttgg

SEQ ID NO: 37473 - DNA, 25 bp, Canis familiaris
acgtctgatcgatactactgtgttg

SEQ ID NO: 37474 - DNA, 25 bp, Canis familiaris
actgcatttcaatcccattatggtg

SEQ ID NO: 37475 - DNA, 25 bp, Canis familiaris
actcttcttgaatccctcagggaat

SEQ ID NO: 37476 - DNA, 25 bp, Canis familiaris
acatttttgtaacactcaggaaaat

SEQ ID NO: 37477 - DNA, 25 bp, Canis familiaris
actgtggacaccaccaccgtaaaat

SEQ ID NO: 37478 - DNA, 25 bp, Canis familiaris
actggcgtcttcaccaccatggaga

SEQ ID NO: 37479 - DNA, 25 bp, Canis familiaris
actggcttacaggtcaaatcggaga

SEQ ID NO: 37480 - DNA, 25 bp, Canis familiaris
actggtcatcttcaaaatggggact

SEQ ID NO: 37481 - DNA, 25 bp, Canis familiaris
acgtgtcatcgtgccagtaggagag

SEQ ID NO: 37482 - DNA, 25 bp, Canis familiaris
acgtttctgcaagcgtagcgggtcc

SEQ ID NO: 37483 - DNA, 25 bp, Canis familiaris
acggatcggaatgccaacgggtcca

SEQ ID NO: 37484 - DNA, 25 bp, Canis familiaris
acggacgtgatcgggcacacggttc

SEQ ID NO: 37485 - DNA, 25 bp, Canis familiaris
acggaccatcacggaggagggtgtt

SEQ ID NO: 37486 - DNA, 25 bp, Canis familiaris
acgaggactacctggaggggcttcg

SEQ ID NO: 37487 - DNA, 25 bp, Canis familiaris
acgagggctgagacgggagggtcct

SEQ ID NO: 37488 - DNA, 25 bp, Canis familiaris
acgagggtgggccatgcagggagtg

SEQ ID NO: 37489 - DNA, 25 bp, Canis familiaris
acgagggctggaagaagtggctggc

SEQ ID NO: 37490 - DNA, 25 bp, Canis familiaris
acgaggccagatctgcagacggctg

SEQ ID NO: 37491 - DNA, 25 bp, Canis familiaris
acgaggccctggcagacgagtgatc

SEQ ID NO: 37492 - DNA, 25 bp, Canis familiaris
actggcacccggagctaggtgccag

SEQ ID NO: 37493 - DNA, 25 bp, Canis familiaris
actgaggcccgagagctagtggaac

SEQ ID NO: 37494 - DNA, 25 bp, Canis familiaris
acgaggcccagagcaagagaggtat

SEQ ID NO: 37495 - DNA, 25 bp, Canis familiaris
acgagtgcgacaaatcagtagaggt

SEQ ID NO: 37496 - DNA, 25 bp, Canis familiaris
acgagtcatgtgagtcagccagctg

SEQ ID NO: 37497 - DNA, 25 bp, Canis familiaris
acgagtagatggacagcagcggctg

SEQ ID NO: 37498 - DNA, 25 bp, Canis familiaris
acgagtctgacaccaacactctggt

SEQ ID NO: 37499 - DNA, 25 bp, Canis familiaris
acgagtgatggacaccacagggctc

SEQ ID NO: 37500 - DNA, 25 bp, Canis familiaris
acggatggagatgacccggaccgca

SEQ ID NO: 37501 - DNA, 25 bp, Canis familiaris
acggtgggatttttctgaatacgca

SEQ ID NO: 37502 - DNA, 25 bp, Canis familiaris
acggggagcatgattcctgcattcc

SEQ ID NO: 37503 - DNA, 25 bp, Canis familiaris
acgaggagatcgtcttcgagacccg

SEQ ID NO: 37504 - DNA, 25 bp, Canis familiaris
actggtatcatttcctagtgacccg

SEQ ID NO: 37505 - DNA, 25 bp, Canis familiaris
acggttgcagtgtctctgagtgaca

SEQ ID NO: 37506 - DNA, 25 bp, Canis familiaris
acggcttatgtgattatgctgaacc

SEQ ID NO: 37507 - DNA, 25 bp, Canis familiaris
acgaggttggcttcaatgctgatga

SEQ ID NO: 37508 - DNA, 25 bp, Canis familiaris
acgatgggtggctatcagacctctc

SEQ ID NO: 37509 - DNA, 25 bp, Canis familiaris
actgaggagttctgcagtccagctc

SEQ ID NO: 37510 - DNA, 25 bp, Canis familiaris
acgagtagaacagtcacccgtcgaa

SEQ ID NO: 37511 - DNA, 25 bp, Canis familiaris
actgaacagagatccctccgtgaga

SEQ ID NO: 37512 - DNA, 25 bp, Canis familiaris
actgcagtggggatgcttcagacac

SEQ ID NO: 37513 - DNA, 25 bp, Canis familiaris
acgattgggagaatgggctgaatgc

SEQ ID NO: 37514 - DNA, 25 bp, Canis familiaris
acgattcgcacgatgagtgtaaaga

SEQ ID NO: 37515 - DNA, 25 bp, Canis familiaris
actatactgaagaagaggatcgttt

SEQ ID NO: 37516 - DNA, 25 bp, Canis familiaris
actgtgacttacacaggagcgactc

SEQ ID NO: 37517 - DNA, 25 bp, Canis familiaris
acgtgttctgacgcgtagcaagctc

SEQ ID NO: 37518 - DNA, 25 bp, Canis familiaris
acgtgctgcctgtcaacttggaggc

SEQ ID NO: 37519 - DNA, 25 bp, Canis familiaris
acgatgtgcgtgtcttttgctgtgt

SEQ ID NO: 37520 - DNA, 25 bp, Canis familiaris
actgtggggactatgagctcttcgt

SEQ ID NO: 37521 - DNA, 25 bp, Canis familiaris
acgtgaggcgtgtactgagctgctt

SEQ ID NO: 37522 - DNA, 25 bp, Canis familiaris
acgtgatggcttatgcggcctgcat

SEQ ID NO: 37523 - DNA, 25 bp, Canis familiaris
acggcgtgcattatcaacatcatat

SEQ ID NO: 37524 - DNA, 25 bp, Canis familiaris
acggctgctctgaaccagacaaagc

SEQ ID NO: 37525 - DNA, 25 bp, Canis familiaris
acggcctctgttgctgttaatgcct

SEQ ID NO: 37526 - DNA, 25 bp, Canis familiaris
actgtggcttgctggctgctaaaat

SEQ ID NO: 37527 - DNA, 25 bp, Canis familiaris
actgtgacgagctggctgaccacat

SEQ ID NO: 37528 - DNA, 25 bp, Canis familiaris
actgtcatcagaatctgtcggccaa

SEQ ID NO: 37529 - DNA, 25 bp, Canis familiaris
actgtccagtatagctctgcgacct

SEQ ID NO: 37530 - DNA, 25 bp, Canis familiaris
acgattatgcttagtctctgaccag

SEQ ID NO: 37531 - DNA, 25 bp, Canis familiaris
acgatgtgccataatttgtaccatg

SEQ ID NO: 37532 - DNA, 25 bp, Canis familiaris
acgggccatgcagtttggatccaga

SEQ ID NO: 37533 - DNA, 25 bp, Canis familiaris
actgtgggttggaatggaccagaca

SEQ ID NO: 37534 - DNA, 25 bp, Canis familiaris
actgtgggtcctgtatgcccgaatt

SEQ ID NO: 37535 - DNA, 25 bp, Canis familiaris
actggggtgtcttgtcacccaactt

SEQ ID NO: 37536 - DNA, 25 bp, Canis familiaris
actgacaggtttttccaggaatctc

SEQ ID NO: 37537 - DNA, 25 bp, Canis familiaris
acgtgcgtgatcagaacggctaact

SEQ ID NO: 37538 - DNA, 25 bp, Canis familiaris
acgtggatggcaagggccgcgaact

SEQ ID NO: 37539 - DNA, 25 bp, Canis familiaris
acttcgggaatgagcccgcaggctc

SEQ ID NO: 37540 - DNA, 25 bp, Canis familiaris
acgtgggcgacgaggcccagagcaa

SEQ ID NO: 37541 - DNA, 25 bp, Canis familiaris
acgtcggagaaaagtgctgcggaaa

SEQ ID NO: 37542 - DNA, 25 bp, Canis familiaris
acgtgtggggaagttgggctaaatg

SEQ ID NO: 37543 - DNA, 25 bp, Canis familiaris
acgtctgactgaggacgggttaaat

SEQ ID NO: 37544 - DNA, 25 bp, Canis familiaris
acgtcccaatcttcaggtttacagt

SEQ ID NO: 37545 - DNA, 25 bp, Canis familiaris
acggcccaactccaggatttcaaat

SEQ ID NO: 37546 - DNA, 25 bp, Canis familiaris
acggcgccagccataggaattgaga

SEQ ID NO: 37547 - DNA, 25 bp, Canis familiaris
acgggctagcctacagtgaggtctg

SEQ ID NO: 37548 - DNA, 25 bp, Canis familiaris
acgggtggacatacaggcaggtgag

SEQ ID NO: 37549 - DNA, 25 bp, Canis familiaris
acggagaatggcagctggcggtggg

SEQ ID NO: 37550 - DNA, 25 bp, Canis familiaris
acggatgacagcgtctttctggatg

SEQ ID NO: 37551 - DNA, 25 bp, Canis familiaris
acgggcagccttttctgaggatggg

SEQ ID NO: 37552 - DNA, 25 bp, Canis familiaris
acgggcagcccttcaagaggaactt

SEQ ID NO: 37553 - DNA, 25 bp, Canis familiaris
acggtatcctttaagatggcaactc

SEQ ID NO: 37554 - DNA, 25 bp, Canis familiaris
acggtactttctacagtgtgcagtg

SEQ ID NO: 37555 - DNA, 25 bp, Canis familiaris
acgggactctctatgtttgatatgt

SEQ ID NO: 37556 - DNA, 25 bp, Canis familiaris
acgtcccttcacattttggatcatc

SEQ ID NO: 37557 - DNA, 25 bp, Canis familiaris
acgttctttacactactgggactgg

SEQ ID NO: 37558 - DNA, 25 bp, Canis familiaris
actagtttctgatggagggaagtgg

SEQ ID NO: 37559 - DNA, 25 bp, Canis familiaris
acgtgtgtgtggagggagggaggga

SEQ ID NO: 37560 - DNA, 25 bp, Canis familiaris
acgttgggcttcctggagggagcct

SEQ ID NO: 37561 - DNA, 25 bp, Canis familiaris
acgttgggctcctggtgcatggagc

SEQ ID NO: 37562 - DNA, 25 bp, Canis familiaris
acggtggagtacttaccaggagcaa

SEQ ID NO: 37563 - DNA, 25 bp, Canis familiaris
acggatggattctttactcacttgc

SEQ ID NO: 37564 - DNA, 25 bp, Canis familiaris
acggatggtatgtttacttctggtt

SEQ ID NO: 37565 - DNA, 25 bp, Canis familiaris
actgagttccagtttagaggcggat

SEQ ID NO: 37566 - DNA, 25 bp, Canis familiaris
actttttgagatgtatgggggatat

SEQ ID NO: 37567 - DNA, 25 bp, Canis familiaris
acgttctctgagatttggagctgga

SEQ ID NO: 37568 - DNA, 25 bp, Canis familiaris
acggcactcaggactttggattggt

SEQ ID NO: 37569 - DNA, 25 bp, Canis familiaris
acgtgcactgcactgttggggttac

SEQ ID NO: 37570 - DNA, 25 bp, Canis familiaris
acgtcattcagcttcacggtgatga

SEQ ID NO: 37571 - DNA, 25 bp, Canis familiaris
acgtcctgccgtacgagtagatgga

SEQ ID NO: 37572 - DNA, 25 bp, Canis familiaris
acgtcctgcacgtacgagctagatg

SEQ ID NO: 37573 - DNA, 25 bp, Canis familiaris
actggcactccgtcatgtacgagta

SEQ ID NO: 37574 - DNA, 25 bp, Canis familiaris
actgagcagtggcctcagtacccgt

SEQ ID NO: 37575 - DNA, 25 bp, Canis familiaris
actgctgaagtggacagggcccgag

SEQ ID NO: 37576 - DNA, 25 bp, Canis familiaris
actggaagcggtggggctccagcag

SEQ ID NO: 37577 - DNA, 25 bp, Canis familiaris
acgtgaagggtgaagctccgggtgc

SEQ ID NO: 37578 - DNA, 25 bp, Canis familiaris
actggtattggatagctcacgacgt

SEQ ID NO: 37579 - DNA, 25 bp, Canis familiaris
actggaattttgcagctatccccat

SEQ ID NO: 37580 - DNA, 25 bp, Canis familiaris
actgtgatagtttagaaatatcccc

SEQ ID NO: 37581 - DNA, 25 bp, Canis familiaris
actgtggttgtttagaagattctcc

SEQ ID NO: 37582 - DNA, 25 bp, Canis familiaris
actgtttggttttcagcagcatctt

SEQ ID NO: 37583 - DNA, 25 bp, Canis familiaris
acgtctctactttgatatatgcttt

SEQ ID NO: 37584 - DNA, 25 bp, Canis familiaris
acgatcctgactttgatagtcattg

SEQ ID NO: 37585 - DNA, 25 bp, Canis familiaris
acgatgccgactggcgatgcggcgg

SEQ ID NO: 37586 - DNA, 25 bp, Canis familiaris
actgtgctcggctgcaagggcagat

SEQ ID NO: 37587 - DNA, 25 bp, Canis familiaris
acgtcttggggcagggcagagagtg

SEQ ID NO: 37588 - DNA, 25 bp, Canis familiaris
acgttctcgcccagagacatgaggt

SEQ ID NO: 37589 - DNA, 25 bp, Canis familiaris
acgtggccctccaggaagaggtcct

SEQ ID NO: 37590 - DNA, 25 bp, Canis familiaris
actggggacaccagtgaccaggtcc

SEQ ID NO: 37591 - DNA, 25 bp, Canis familiaris
actggtcgaagggggacatcaagtc

SEQ ID NO: 37592 - DNA, 25 bp, Canis familiaris
acggcttgaaaggacaaagaatttg

SEQ ID NO: 37593 - DNA, 25 bp, Canis familiaris
acagagggaaacacatgccgaagtt

SEQ ID NO: 37594 - DNA, 25 bp, Canis familiaris
actactggaatgtgacccgaccttt

SEQ ID NO: 37595 - DNA, 25 bp, Canis familiaris
actgtgggaatgggagtcccctgcc

SEQ ID NO: 37596 - DNA, 25 bp, Canis familiaris
acgtgaggtaggtgtctgagccatg

SEQ ID NO: 37597 - DNA, 25 bp, Canis familiaris
actggggccaggtgactgcaggagt

SEQ ID NO: 37598 - DNA, 25 bp, Canis familiaris
actgggccaagcaagggtgggtggt

SEQ ID NO: 37599 - DNA, 25 bp, Canis familiaris
acgtcgcgccagtgggggcaaagtc

SEQ ID NO: 37600 - DNA, 25 bp, Canis familiaris
acgtcgccgagatgaagggcgcata

SEQ ID NO: 37601 - DNA, 25 bp, Canis familiaris
acgttgatgccggtgaacgtgcaaa

SEQ ID NO: 37602 - DNA, 25 bp, Canis familiaris
acggctgaggcggctaaaccacagc

SEQ ID NO: 37603 - DNA, 25 bp, Canis familiaris
actgagccactcactaaaccaacag

SEQ ID NO: 37604 - DNA, 25 bp, Canis familiaris
actgatcgcaacttctcaaattccc

SEQ ID NO: 37605 - DNA, 25 bp, Canis familiaris
actgtggcacaattcgtatatatac

SEQ ID NO: 37606 - DNA, 25 bp, Canis familiaris
actgtgcaatgaatcactgtgagta

SEQ ID NO: 37607 - DNA, 25 bp, Canis familiaris
actgatgatgaaatccttcacgcat

SEQ ID NO: 37608 - DNA, 25 bp, Canis familiaris
actgagaggtatggatatactggct

SEQ ID NO: 37609 - DNA, 25 bp, Canis familiaris
actgaagttttttaccagcattctt

SEQ ID NO: 37610 - DNA, 25 bp, Canis familiaris
actagaaatacttgtccctgcttgc

SEQ ID NO: 37611 - DNA, 25 bp, Canis familiaris
actggaagcccttgtacgctttgat

SEQ ID NO: 37612 - DNA, 25 bp, Canis familiaris
acgtgaaggccatgcggctgttcgt

SEQ ID NO: 37613 - DNA, 25 bp, Canis familiaris
actgttcagggctcaggctggttgt

SEQ ID NO: 37614 - DNA, 25 bp, Canis familiaris
actgttatgtagttcggatagctta

SEQ ID NO: 37615 - DNA, 25 bp, Canis familiaris
actgtcttttggtggaagttgatga

SEQ ID NO: 37616 - DNA, 25 bp, Canis familiaris
actgctggatttcagggacctggag

SEQ ID NO: 37617 - DNA, 25 bp, Canis familiaris
actgtgacatcatcaagcaccccat

SEQ ID NO: 37618 - DNA, 25 bp, Canis familiaris
actgctgaatcacaaaccactagga

SEQ ID NO: 37619 - DNA, 25 bp, Canis familiaris
acaatactcgactgataatctagga

SEQ ID NO: 37620 - DNA, 25 bp, Canis familiaris
acaaccttgaaagaagcctggtggg

SEQ ID NO: 37621 - DNA, 25 bp, Canis familiaris
acaaatcggacattaaaggtcgttg

SEQ ID NO: 37622 - DNA, 25 bp, Canis familiaris
aacaacgcgaccagaccgtcgattc

SEQ ID NO: 37623 - DNA, 25 bp, Canis familiaris
actcaaccaaccaaagcctggcttt

SEQ ID NO: 37624 - DNA, 25 bp, Canis familiaris
actgcacggccaccatgaagtctgg

SEQ ID NO: 37625 - DNA, 25 bp, Canis familiaris
actatccgcaccgaggactcggtat

SEQ ID NO: 37626 - DNA, 25 bp, Canis familiaris
acgttcagacccagcacgaggctgt

SEQ ID NO: 37627 - DNA, 25 bp, Canis familiaris
acgtgtctcacatcttgcagaaagc

SEQ ID NO: 37628 - DNA, 25 bp, Canis familiaris
acgtgcttccgctattgcgaggagc

SEQ ID NO: 37629 - DNA, 25 bp, Canis familiaris
acgtgcttccaatgttgaggtgcct

SEQ ID NO: 37630 - DNA, 25 bp, Canis familiaris
acgtgtgggaacgtgatgagggccc

SEQ ID NO: 37631 - DNA, 25 bp, Canis familiaris
acgtgtgggaacttgtttctgcccg

SEQ ID NO: 37632 - DNA, 25 bp, Canis familiaris
acgtggggcaccatctgtgatgatg

SEQ ID NO: 37633 - DNA, 25 bp, Canis familiaris
acgtggcagtagactccatgtctgg

SEQ ID NO: 37634 - DNA, 25 bp, Canis familiaris
acgtggcattaagccagtcctcttc

SEQ ID NO: 37635 - DNA, 25 bp, Canis familiaris
acggacaagaagcgggcactgcggc

SEQ ID NO: 37636 - DNA, 25 bp, Canis familiaris
acggaatgagaaccagggagctgct

SEQ ID NO: 37637 - DNA, 25 bp, Canis familiaris
actggacggattcaggaggccggca

SEQ ID NO: 37638 - DNA, 25 bp, Canis familiaris
acggcacgaactcagagggcaccag

SEQ ID NO: 37639 - DNA, 25 bp, Canis familiaris
actgagctcgataccaaaggagaca

SEQ ID NO: 37640 - DNA, 25 bp, Canis familiaris
actgcatgcatggaaccaatccagg

SEQ ID NO: 37641 - DNA, 25 bp, Canis familiaris
actggatggaactatgcccggaatg

SEQ ID NO: 37642 - DNA, 25 bp, Canis familiaris
actgtaggaagggcccttgaagctg

SEQ ID NO: 37643 - DNA, 25 bp, Canis familiaris
acgggcagaaggagctcttggagca

SEQ ID NO: 37644 - DNA, 25 bp, Canis familiaris
actgggagacggagatcacggcgca

SEQ ID NO: 37645 - DNA, 25 bp, Canis familiaris
actgggcagacactgacgccaaggc

SEQ ID NO: 37646 - DNA, 25 bp, Canis familiaris
actggacagcacagacttcaccagc

SEQ ID NO: 37647 - DNA, 25 bp, Canis familiaris
actggcagaacagatcttccacagc

SEQ ID NO: 37648 - DNA, 25 bp, Canis familiaris
actggacatcaccttttacagcatc

SEQ ID NO: 37649 - DNA, 25 bp, Canis familiaris
actggaccagcatactctacaaaga

SEQ ID NO: 37650 - DNA, 25 bp, Canis familiaris
actgctggtcagaaactgcccaaac

SEQ ID NO: 37651 - DNA, 25 bp, Canis familiaris
actgggggccaggccacagcaaagc

SEQ ID NO: 37652 - DNA, 25 bp, Canis familiaris
actggcctggccgcaacagcagggg

SEQ ID NO: 37653 - DNA, 25 bp, Canis familiaris
acggcccctctgggaagatgtggcg

SEQ ID NO: 37654 - DNA, 25 bp, Canis familiaris
actggcgcacttcggaggagaccgc

SEQ ID NO: 37655 - DNA, 25 bp, Canis familiaris
actgaccagcactgcggggattcag

SEQ ID NO: 37656 - DNA, 25 bp, Canis familiaris
actgccaaaatctgtgtgcgtgcca

SEQ ID NO: 37657 - DNA, 25 bp, Canis familiaris
actccacatgcatgcacgtggtggc

SEQ ID NO: 37658 - DNA, 25 bp, Canis familiaris
actggcgctgccaaggctgtgggca

SEQ ID NO: 37659 - DNA, 25 bp, Canis familiaris
acgtgcccagattgggggcccagaa

SEQ ID NO: 37660 - DNA, 25 bp, Canis familiaris
actggcccagagcggtggcctaaac

SEQ ID NO: 37661 - DNA, 25 bp, Canis familiaris
acgtctttgacgagtgaatctatac

SEQ ID NO: 37662 - DNA, 25 bp, Canis familiaris
acgtcttctgcagggagtgagctcc

SEQ ID NO: 37663 - DNA, 25 bp, Canis familiaris
actattcatctgagagaatggctga

SEQ ID NO: 37664 - DNA, 25 bp, Canis familiaris
actgagtgggctaagaaggcgggca

SEQ ID NO: 37665 - DNA, 25 bp, Canis familiaris
actggcttggttggaagaaaggagc

SEQ ID NO: 37666 - DNA, 25 bp, Canis familiaris
acggctggccctggaggagacgggc

SEQ ID NO: 37667 - DNA, 25 bp, Canis familiaris
actccaggccataacaggcccgggc

SEQ ID NO: 37668 - DNA, 25 bp, Canis familiaris
actggggccagttaggcccttgcct

SEQ ID NO: 37669 - DNA, 25 bp, Canis familiaris
acgtcttccagttaggacagcctcc

SEQ ID NO: 37670 - DNA, 25 bp, Canis familiaris
acgtcttctacttcaagtcctggag

SEQ ID NO: 37671 - DNA, 25 bp, Canis familiaris
acgtgcctcttcagaggctgccagg

SEQ ID NO: 37672 - DNA, 25 bp, Canis familiaris
acggcctccaccggaggccatggaa

SEQ ID NO: 37673 - DNA, 25 bp, Canis familiaris
actgctgaccacgccgaatccggaa

SEQ ID NO: 37674 - DNA, 25 bp, Canis familiaris
acggcactccgcgagctgtatcggg

SEQ ID NO: 37675 - DNA, 25 bp, Canis familiaris
acggcacgagccgaggttagaaggc

SEQ ID NO: 37676 - DNA, 25 bp, Canis familiaris
acaaccacaacgtgttcgtaggcta

SEQ ID NO: 37677 - DNA, 25 bp, Canis familiaris
caccagggaacgtgttctggcccta

SEQ ID NO: 37678 - DNA, 25 bp, Canis familiaris
actgaactcaacctagtttccaact

SEQ ID NO: 37679 - DNA, 25 bp, Canis familiaris
acattactaatcatttttcctccct

SEQ ID NO: 37680 - DNA, 25 bp, Canis familiaris
actgtattagttatttttagcccat

SEQ ID NO: 37681 - DNA, 25 bp, Canis familiaris
actctacagagtttctttcttggct

SEQ ID NO: 37682 - DNA, 25 bp, Canis familiaris
actggcagacagtttttcacttaat

SEQ ID NO: 37683 - DNA, 25 bp, Canis familiaris
actgagaaggctgtgttctcccgct

SEQ ID NO: 37684 - DNA, 25 bp, Canis familiaris
cactggaaagtcagtttccctttct

SEQ ID NO: 37685 - DNA, 25 bp, Canis familiaris
actgggcaggcaaagtgttcccttt

SEQ ID NO: 37686 - DNA, 25 bp, Canis familiaris
actgggtgggaaatgtgactctgca

SEQ ID NO: 37687 - DNA, 25 bp, Canis familiaris
actgggtgcgggaggatcctcgtga

SEQ ID NO: 37688 - DNA, 25 bp, Canis familiaris
actttggtcgtggaggacttcagtg

SEQ ID NO: 37689 - DNA, 25 bp, Canis familiaris
acttctcaaggggcaggcacttact

SEQ ID NO: 37690 - DNA, 25 bp, Canis familiaris
acaccgaaggtccaggacctggtag

SEQ ID NO: 37691 - DNA, 25 bp, Canis familiaris
gacaaaaaggttgagtcccgtcagc

SEQ ID NO: 37692 - DNA, 25 bp, Canis familiaris
acagaacaaggttgaagtacctggc

SEQ ID NO: 37693 - DNA, 25 bp, Canis familiaris
acagaatccccttggcagtctaggg

SEQ ID NO: 37694 - DNA, 25 bp, Canis familiaris
actaagccacctaggccctaggcat

SEQ ID NO: 37695 - DNA, 25 bp, Canis familiaris
actacagcaaagtgccctttggctt

SEQ ID NO: 37696 - DNA, 25 bp, Canis familiaris
actccagaggagtgccaacacgttt

SEQ ID NO: 37697 - DNA, 25 bp, Canis familiaris
actccagccgcatactcaaatgttt

SEQ ID NO: 37698 - DNA, 25 bp, Canis familiaris
actgccccaattcaaaaggttacag

SEQ ID NO: 37699 - DNA, 25 bp, Canis familiaris
actcactccaacaaaagaacactta

SEQ ID NO: 37700 - DNA, 25 bp, Canis familiaris
actgtatctctgtgaaaaacacaat

SEQ ID NO: 37701 - DNA, 25 bp, Canis familiaris
actgtatgccactccaaaaccatgg

SEQ ID NO: 37702 - DNA, 25 bp, Canis familiaris
acgtgaccactaaagaaggcctgag

SEQ ID NO: 37703 - DNA, 25 bp, Canis familiaris
acgtgaagcagaacgccaaggccgc

SEQ ID NO: 37704 - DNA, 25 bp, Canis familiaris
acgtgcctgcagaacccaagtggca

SEQ ID NO: 37705 - DNA, 25 bp, Canis familiaris
acggccaagtcatcactattggcaa

SEQ ID NO: 37706 - DNA, 25 bp, Canis familiaris
acggccaaggcaaccattatgtgtg

SEQ ID NO: 37707 - DNA, 25 bp, Canis familiaris
acggtatagtgctgccttcagctcg

SEQ ID NO: 37708 - DNA, 25 bp, Canis familiaris
actggagaaggctggttcatcccca

SEQ ID NO: 37709 - DNA, 25 bp, Canis familiaris
actgttgacaggctggttcgccttc

SEQ ID NO: 37710 - DNA, 25 bp, Canis familiaris
actgtctttgggggtgtgaactctt

SEQ ID NO: 37711 - DNA, 25 bp, Canis familiaris
acgtcctgtgtttggtggacttctt

SEQ ID NO: 37712 - DNA, 25 bp, Canis familiaris
actggtctgtgtaaggtttctatct

SEQ ID NO: 37713 - DNA, 25 bp, Canis familiaris
aatgttcttttataaatgtactaag

SEQ ID NO: 37714 - DNA, 25 bp, Canis familiaris
actgttttctttgttctggactaat

SEQ ID NO: 37715 - DNA, 25 bp, Canis familiaris
actgttgttattgagacctggtcta

SEQ ID NO: 37716 - DNA, 25 bp, Canis familiaris
acgtgtgtacaaatagactctaacc

SEQ ID NO: 37717 - DNA, 25 bp, Canis familiaris
actgtgtgtacatatataccgacat

SEQ ID NO: 37718 - DNA, 25 bp, Canis familiaris
acgtgtatactgtgatcccgatgat

SEQ ID NO: 37719 - DNA, 25 bp, Canis familiaris
actgctttactgtagttcttagaac

SEQ ID NO: 37720 - DNA, 25 bp, Canis familiaris
acgtgtgtccttgtctgttaaagtg

SEQ ID NO: 37721 - DNA, 25 bp, Canis familiaris
actggtgtacttgtctggtcaactg

SEQ ID NO: 37722 - DNA, 25 bp, Canis familiaris
actggcttattagactggcccacct

SEQ ID NO: 37723 - DNA, 25 bp, Canis familiaris
acggttgcaaactgctgaccacgcc

SEQ ID NO: 37724 - DNA, 25 bp, Canis familiaris
actggtcggacactggctgacacat

SEQ ID NO: 37725 - DNA, 25 bp, Canis familiaris
actcctctgtacctgggaaatctca

SEQ ID NO: 37726 - DNA, 25 bp, Canis familiaris
actcctggtcacaattgagaatttc

SEQ ID NO: 37727 - DNA, 25 bp, Canis familiaris
actgttggtccaaattacatgaatg

SEQ ID NO: 37728 - DNA, 25 bp, Canis familiaris
actgtcgcccccaaggagagaagga

SEQ ID NO: 37729 - DNA, 25 bp, Canis familiaris
acgtccctcccaaaggataatccag

SEQ ID NO: 37730 - DNA, 25 bp, Canis familiaris
acgtcctctctgctaacagtaatcc

SEQ ID NO: 37731 - DNA, 25 bp, Canis familiaris
acgtccattccacagttgtaaatgc

SEQ ID NO: 37732 - DNA, 25 bp, Canis familiaris
acgtccactgcccgagataataaat

SEQ ID NO: 37733 - DNA, 25 bp, Canis familiaris
acgtgcaagcgcagctgcaaaggga

SEQ ID NO: 37734 - DNA, 25 bp, Canis familiaris
acgtgcacacgcatgaacacagaga

SEQ ID NO: 37735 - DNA, 25 bp, Canis familiaris
actgatggccagagcacctcaagac

SEQ ID NO: 37736 - DNA, 25 bp, Canis familiaris
actgtggcgcagtgtcaccaagaat

SEQ ID NO: 37737 - DNA, 25 bp, Canis familiaris
actggtgcttatgataccaccactg

SEQ ID NO: 37738 - DNA, 25 bp, Canis familiaris
actggtttagttgctgtgccacttc

SEQ ID NO: 37739 - DNA, 25 bp, Canis familiaris
actggtattaccggctttcattgta

SEQ ID NO: 37740 - DNA, 25 bp, Canis familiaris
actggctcatgaaatccacgttttg

SEQ ID NO: 37741 - DNA, 25 bp, Canis familiaris
actggctcaaattcccactgttttt

SEQ ID NO: 37742 - DNA, 25 bp, Canis familiaris
actggttcatgtttcctttgtttgt

SEQ ID NO: 37743 - DNA, 25 bp, Canis familiaris
actggacttttgacccttgttcagt

SEQ ID NO: 37744 - DNA, 25 bp, Canis familiaris
acggatgttcatattcgagtcttca

SEQ ID NO: 37745 - DNA, 25 bp, Canis familiaris
actggatgtgtatttctgtgatgtt

SEQ ID NO: 37746 - DNA, 25 bp, Canis familiaris
actgagttgtcctacatgcaagtac

SEQ ID NO: 37747 - DNA, 25 bp, Canis familiaris
actgtggtattctagagctttacat

SEQ ID NO: 37748 - DNA, 25 bp, Canis familiaris
actggtttgtcatagctgtcaaatg

SEQ ID NO: 37749 - DNA, 25 bp, Canis familiaris
acagggctgttgtgaggatcaaatg

SEQ ID NO: 37750 - DNA, 25 bp, Canis familiaris
actggcggatagtggagtacctgga

SEQ ID NO: 37751 - DNA, 25 bp, Canis familiaris
actgtagtgtcaacggatgttccta

SEQ ID NO: 37752 - DNA, 25 bp, Canis familiaris
acggacatcgagaggcagttccaca

SEQ ID NO: 37753 - DNA, 25 bp, Canis familiaris
acggacacacagatggagacccatg

SEQ ID NO: 37754 - DNA, 25 bp, Canis familiaris
acggacagacagacatgcaaacacc

SEQ ID NO: 37755 - DNA, 25 bp, Canis familiaris
actggacatgactccagatagaagc

SEQ ID NO: 37756 - DNA, 25 bp, Canis familiaris
actggactgccacctatgatagaca

SEQ ID NO: 37757 - DNA, 25 bp, Canis familiaris
actggtgcagccactatgggaaagt

SEQ ID NO: 37758 - DNA, 25 bp, Canis familiaris
actgggcgccaacagaggcaaagag

SEQ ID NO: 37759 - DNA, 25 bp, Canis familiaris
aatgtagttcaaccgtggaaagatg

SEQ ID NO: 37760 - DNA, 25 bp, Canis familiaris
actgtatgttaactacgctggaatt

SEQ ID NO: 37761 - DNA, 25 bp, Canis familiaris
actgtagtgtagttacgtgaatcta

SEQ ID NO: 37762 - DNA, 25 bp, Canis familiaris
actcgaggtcctaactggctacaac

SEQ ID NO: 37763 - DNA, 25 bp, Canis familiaris
acggaagtcctcattgtgtgcaaga

SEQ ID NO: 37764 - DNA, 25 bp, Canis familiaris
acgtgaactccctgggagagaagct

SEQ ID NO: 37765 - DNA, 25 bp, Canis familiaris
acgtggacacaggcttggggacaag

SEQ ID NO: 37766 - DNA, 25 bp, Canis familiaris
acggtggcacctgtgagggagcaca

SEQ ID NO: 37767 - DNA, 25 bp, Canis familiaris
acgtggcgccctttggaggcgcagt

SEQ ID NO: 37768 - DNA, 25 bp, Canis familiaris
acgggccaccattgtgaagcaccag

SEQ ID NO: 37769 - DNA, 25 bp, Canis familiaris
actgctggacccaggagtcagccac

SEQ ID NO: 37770 - DNA, 25 bp, Canis familiaris
actgcggaaacccagagtacccagg

SEQ ID NO: 37771 - DNA, 25 bp, Canis familiaris
actaggagtcgcctcagaaacccag

SEQ ID NO: 37772 - DNA, 25 bp, Canis familiaris
actgtggagtcccatgaaactgccc

SEQ ID NO: 37773 - DNA, 25 bp, Canis familiaris
acttcgagatctgtgaaccgcttct

SEQ ID NO: 37774 - DNA, 25 bp, Canis familiaris
actgtaggatacttgcatacggttt

SEQ ID NO: 37775 - DNA, 25 bp, Canis familiaris
actggagttgaggatgcattttttc

SEQ ID NO: 37776 - DNA, 25 bp, Canis familiaris
actgtatgttacactttgccttgcc

SEQ ID NO: 37777 - DNA, 25 bp, Canis familiaris
actgtaatgcatttgccttgtcccc

SEQ ID NO: 37778 - DNA, 25 bp, Canis familiaris
actggcatggccttccgtgtcccca

SEQ ID NO: 37779 - DNA, 25 bp, Canis familiaris
actggcatggccttccgtgtcccca

SEQ ID NO: 37780 - DNA, 25 bp, Canis familiaris
actggcatggccttccgtgttccta

SEQ ID NO: 37781 - DNA, 25 bp, Canis familiaris
actgtagtgcttacactgccttgtc

SEQ ID NO: 37782 - DNA, 25 bp, Canis familiaris
actgtagattttagcagccctggcc

SEQ ID NO: 37783 - DNA, 25 bp, Canis familiaris
actgtgcagaggttagctggccggc

SEQ ID NO: 37784 - DNA, 25 bp, Canis familiaris
acgtgtcagtggtggacctgacctg

SEQ ID NO: 37785 - DNA, 25 bp, Canis familiaris
acgtgtcctgattttgccacgacct

SEQ ID NO: 37786 - DNA, 25 bp, Canis familiaris
actggacttcaatttgcgcacacac

SEQ ID NO: 37787 - DNA, 25 bp, Canis familiaris
actggcactccttaaggacagccat

SEQ ID NO: 37788 - DNA, 25 bp, Canis familiaris
actgtccatccgccagaagatatgc

SEQ ID NO: 37789 - DNA, 25 bp, Canis familiaris
actgtccacgtgtatactgtgatcc

SEQ ID NO: 37790 - DNA, 25 bp, Canis familiaris
actgtcgccagttgtgcacttttac

SEQ ID NO: 37791 - DNA, 25 bp, Canis familiaris
actgatggccagatgtttttgtact

SEQ ID NO: 37792 - DNA, 25 bp, Canis familiaris
acgtgtgcccacaggttgtgtgcac

SEQ ID NO: 37793 - DNA, 25 bp, Canis familiaris
acggctgctcccaaggacgatgggt

SEQ ID NO: 37794 - DNA, 25 bp, Canis familiaris
acggctctactcaagggatcagggt

SEQ ID NO: 37795 - DNA, 25 bp, Canis familiaris
acgtgtctacgttcttgtcaggagt

SEQ ID NO: 37796 - DNA, 25 bp, Canis familiaris
actgatgcttaacttttgctctgag

SEQ ID NO: 37797 - DNA, 25 bp, Canis familiaris
actggctctagtttttctggtgaaa

SEQ ID NO: 37798 - DNA, 25 bp, Canis familiaris
actggcgtgtggttctgtttgtaaa

SEQ ID NO: 37799 - DNA, 25 bp, Canis familiaris
actgctaagtggaatctttctacaa

SEQ ID NO: 37800 - DNA, 25 bp, Canis familiaris
actgtagcactggttgttcctaccc

SEQ ID NO: 37801 - DNA, 25 bp, Canis familiaris
acgtgtgcattgtgctgttttctcc

SEQ ID NO: 37802 - DNA, 25 bp, Canis familiaris
acgtgtgcatttttctcgtatacct

SEQ ID NO: 37803 - DNA, 25 bp, Canis familiaris
actgagtctcttggactttaacgct

SEQ ID NO: 37804 - DNA, 25 bp, Canis familiaris
acggtgtcaatagcatttcagccct

SEQ ID NO: 37805 - DNA, 25 bp, Canis familiaris
acgggtctgatcgttgtacatctcg

SEQ ID NO: 37806 - DNA, 25 bp, Canis familiaris
actggctagcagaacttgtacattt

SEQ ID NO: 37807 - DNA, 25 bp, Canis familiaris
actggtcccatgtctattactttgg

SEQ ID NO: 37808 - DNA, 25 bp, Canis familiaris
actgcttcttagttcattacgtggt

SEQ ID NO: 37809 - DNA, 25 bp, Canis familiaris
actgttgttctggttgatactgtag

SEQ ID NO: 37810 - DNA, 25 bp, Canis familiaris
actgttctccgttttcacattggaa

SEQ ID NO: 37811 - DNA, 25 bp, Canis familiaris
actgtttcggactattgcgctttgt

SEQ ID NO: 37812 - DNA, 25 bp, Canis familiaris
actgttgacggggagatcgtgcgtg

SEQ ID NO: 37813 - DNA, 25 bp, Canis familiaris
acgggagcgagggagcatcggagtc

SEQ ID NO: 37814 - DNA, 25 bp, Canis familiaris
acgggatggtgtcgaactggatgta

SEQ ID NO: 37815 - DNA, 25 bp, Canis familiaris
acggcagatggtgggagcactcctg

SEQ ID NO: 37816 - DNA, 25 bp, Canis familiaris
acggactagtgacaagctctgctga

SEQ ID NO: 37817 - DNA, 25 bp, Canis familiaris
actgtgaataaaccaagcatcgcga

SEQ ID NO: 37818 - DNA, 25 bp, Canis familiaris
actggaaatgtagcacttcgcgtga

SEQ ID NO: 37819 - DNA, 25 bp, Canis familiaris
actgtaaatgtttcactttcctata

SEQ ID NO: 37820 - DNA, 25 bp, Canis familiaris
acggaattgttttcattttcatatt

SEQ ID NO: 37821 - DNA, 25 bp, Canis familiaris
acggcagttgacttcacatcttgta

SEQ ID NO: 37822 - DNA, 25 bp, Canis familiaris
acggcaatgcggctgcactggtgga

SEQ ID NO: 37823 - DNA, 25 bp, Canis familiaris
actgtaagaggcctgcatcgagtgc

SEQ ID NO: 37824 - DNA, 25 bp, Canis familiaris
actgtaataggccaagtgcttcatt

SEQ ID NO: 37825 - DNA, 25 bp, Canis familiaris
actgtgatagaatgtgggctttttc

SEQ ID NO: 37826 - DNA, 25 bp, Canis familiaris
acggaagaatcaagaggcttctgca

SEQ ID NO: 37827 - DNA, 25 bp, Canis familiaris
acgggaggcacaaagagccccagca

SEQ ID NO: 37828 - DNA, 25 bp, Canis familiaris
acggccatgtgaaaaagcacccacg

SEQ ID NO: 37829 - DNA, 25 bp, Canis familiaris
actgtcctagaataatcccctggtt

SEQ ID NO: 37830 - DNA, 25 bp, Canis familiaris
acggcagggcaagagtcctttcgtt

SEQ ID NO: 37831 - DNA, 25 bp, Canis familiaris
acggcgtggcaacagtttgccggct

SEQ ID NO: 37832 - DNA, 25 bp, Canis familiaris
actgggtccaagctttgtgggccat

SEQ ID NO: 37833 - DNA, 25 bp, Canis familiaris
actagctaacaaagttcattgggca

SEQ ID NO: 37834 - DNA, 25 bp, Canis familiaris
actagctgaactaagaatcatctgc

SEQ ID NO: 37835 - DNA, 25 bp, Canis familiaris
actggccagcacagagagagtctct

SEQ ID NO: 37836 - DNA, 25 bp, Canis familiaris
actggccatccaagtatgactgcta

SEQ ID NO: 37837 - DNA, 25 bp, Canis familiaris
acggcccagatggccatgctgcagt

SEQ ID NO: 37838 - DNA, 25 bp, Canis familiaris
actggagagagaccctatgcatgtg

SEQ ID NO: 37839 - DNA, 25 bp, Canis familiaris
actggcgagagtcccgagtgggtgc

SEQ ID NO: 37840 - DNA, 25 bp, Canis familiaris
actcgatgagtctccggggtgagct

SEQ ID NO: 37841 - DNA, 25 bp, Canis familiaris
actctgtggggaggggggggcatct

SEQ ID NO: 37842 - DNA, 25 bp, Canis familiaris
actttggtgaaggtgggtgcccacg

SEQ ID NO: 37843 - DNA, 25 bp, Canis familiaris
actggtggtgacggttggggccgtg

SEQ ID NO: 37844 - DNA, 25 bp, Canis familiaris
actgtgggataccctgtggtgtgcc

SEQ ID NO: 37845 - DNA, 25 bp, Canis familiaris
actgtggtgtgtgggagtggggagc

SEQ ID NO: 37846 - DNA, 25 bp, Canis familiaris
actgaggtgcttttggttgtggtct

SEQ ID NO: 37847 - DNA, 25 bp, Canis familiaris
actgagttcctctagtttgcttact

SEQ ID NO: 37848 - DNA, 25 bp, Canis familiaris
actgatatacttaagccttgttgat

SEQ ID NO: 37849 - DNA, 25 bp, Canis familiaris
actgaaaatgtcacccttctgaccc

SEQ ID NO: 37850 - DNA, 25 bp, Canis familiaris
actgacaccatggcccaagtactgt

SEQ ID NO: 37851 - DNA, 25 bp, Canis familiaris
actgcattcagtgagccagaaactt

SEQ ID NO: 37852 - DNA, 25 bp, Canis familiaris
actcccgtctagcaggatactgtaa

SEQ ID NO: 37853 - DNA, 25 bp, Canis familiaris
actggcctgttcaggagattagtaa

SEQ ID NO: 37854 - DNA, 25 bp, Canis familiaris
acggtgctgttctgaagtcttcaaa

SEQ ID NO: 37855 - DNA, 25 bp, Canis familiaris
actggttgtacccatagttgctaac

SEQ ID NO: 37856 - DNA, 25 bp, Canis familiaris
actggtcctgacagtttctgaaacc

SEQ ID NO: 37857 - DNA, 25 bp, Canis familiaris
actgagccctgaaggctttcatgaa

SEQ ID NO: 37858 - DNA, 25 bp, Canis familiaris
acggctgcctatatgtctttgatcg

SEQ ID NO: 37859 - DNA, 25 bp, Canis familiaris
acggtgttttcaatttgtacagaat

SEQ ID NO: 37860 - DNA, 25 bp, Canis familiaris
actgagtttttaatcctgtccaatg

SEQ ID NO: 37861 - DNA, 25 bp, Canis familiaris
actgagattttaaacactttgcact

SEQ ID NO: 37862 - DNA, 25 bp, Canis familiaris
actgagaagtaaaatgcctaacccg

SEQ ID NO: 37863 - DNA, 25 bp, Canis familiaris
actgaatcactatcctgcttaggca

SEQ ID NO: 37864 - DNA, 25 bp, Canis familiaris
actgcaccactattgatgtcatcta

SEQ ID NO: 37865 - DNA, 25 bp, Canis familiaris
actgcaccccaatgttcatagctaa

SEQ ID NO: 37866 - DNA, 25 bp, Canis familiaris
actggctaccaggtttcttgaaaat

SEQ ID NO: 37867 - DNA, 25 bp, Canis familiaris
acggttccactccaatctgtgaaga

SEQ ID NO: 37868 - DNA, 25 bp, Canis familiaris
acggcttctactccaactagcaata

SEQ ID NO: 37869 - DNA, 25 bp, Canis familiaris
acggtccattctgcatggtcacaat

SEQ ID NO: 37870 - DNA, 25 bp, Canis familiaris
acggccctacatggggtcatcattg

SEQ ID NO: 37871 - DNA, 25 bp, Canis familiaris
acggcttaacatggggccatctggt

SEQ ID NO: 37872 - DNA, 25 bp, Canis familiaris
acggcatttgaaagctctcccggtt

SEQ ID NO: 37873 - DNA, 25 bp, Canis familiaris
acggattgtggaaccatcccaggat

SEQ ID NO: 37874 - DNA, 25 bp, Canis familiaris
acggtggaggaagctctcctgcaga

SEQ ID NO: 37875 - DNA, 25 bp, Canis familiaris
acggccagaagaacctgctcttcaa

SEQ ID NO: 37876 - DNA, 25 bp, Canis familiaris
actggatagataaaccttcgtaact

SEQ ID NO: 37877 - DNA, 25 bp, Canis familiaris
acggagcacaagaatctttcgttca

SEQ ID NO: 37878 - DNA, 25 bp, Canis familiaris
actggactcaggaactttcgttagg

SEQ ID NO: 37879 - DNA, 25 bp, Canis familiaris
actagtctctggatttaacgtagag

SEQ ID NO: 37880 - DNA, 25 bp, Canis familiaris
actgtctcttccactttgggtagag

SEQ ID NO: 37881 - DNA, 25 bp, Canis familiaris
actgttttccagcattctgcagggt

SEQ ID NO: 37882 - DNA, 25 bp, Canis familiaris
actgtaccacctcaatctgggagta

SEQ ID NO: 37883 - DNA, 25 bp, Canis familiaris
actggtccacctctgttttgagatt

SEQ ID NO: 37884 - DNA, 25 bp, Canis familiaris
actggactccgtcttgtttgacaaa

SEQ ID NO: 37885 - DNA, 25 bp, Canis familiaris
actgcaagcagcacttttttgtgac

SEQ ID NO: 37886 - DNA, 25 bp, Canis familiaris
actgcagaacagtccttttatttct

SEQ ID NO: 37887 - DNA, 25 bp, Canis familiaris
actgcaatatactctttccttatcc

SEQ ID NO: 37888 - DNA, 25 bp, Canis familiaris
actgcaagacccaggtccagttcct

SEQ ID NO: 37889 - DNA, 25 bp, Canis familiaris
actggattcccagggcttcagactg

SEQ ID NO: 37890 - DNA, 25 bp, Canis familiaris
actggttcccctgttgaacttgtag

SEQ ID NO: 37891 - DNA, 25 bp, Canis familiaris
actggttgccgtggttaggatcttg

SEQ ID NO: 37892 - DNA, 25 bp, Canis familiaris
actcgataccgtgacatacagatta

SEQ ID NO: 37893 - DNA, 25 bp, Canis familiaris
acatcgaaactgtgaaaggatccaa

SEQ ID NO: 37894 - DNA, 25 bp, Canis familiaris
actgggcacctgtgaagcaggatct

SEQ ID NO: 37895 - DNA, 25 bp, Canis familiaris
actgggctcctaaaagcatcaactt

SEQ ID NO: 37896 - DNA, 25 bp, Canis familiaris
acggagtcccatcaacagagaccat

SEQ ID NO: 37897 - DNA, 25 bp, Canis familiaris
actgggtccacagacctgtgaccag

SEQ ID NO: 37898 - DNA, 25 bp, Canis familiaris
actggctgtcctggaatacttacca

SEQ ID NO: 37899 - DNA, 25 bp, Canis familiaris
actggcagcgcctgaaacttgcaat

SEQ ID NO: 37900 - DNA, 25 bp, Canis familiaris
actggcaaacaccaaacttcatgga

SEQ ID NO: 37901 - DNA, 25 bp, Canis familiaris
catgtgaaaagcacccacgtttggg

SEQ ID NO: 37902 - DNA, 25 bp, Canis familiaris
caggcaggtaccaacccaatttggg

SEQ ID NO: 37903 - DNA, 25 bp, Canis familiaris
caccaggtacgaacagccgaaatgt

SEQ ID NO: 37904 - DNA, 25 bp, Canis familiaris
aacacgaagcgtagcagccgggctt

SEQ ID NO: 37905 - DNA, 25 bp, Canis familiaris
acaccaggaggaccaccgaacttat

SEQ ID NO: 37906 - DNA, 25 bp, Canis familiaris
actccggaggtgacctccgtcttct

SEQ ID NO: 37907 - DNA, 25 bp, Canis familiaris
actctaggagagtgccctctggaac

SEQ ID NO: 37908 - DNA, 25 bp, Canis familiaris
actgctctgggacacagcacttgag

SEQ ID NO: 37909 - DNA, 25 bp, Canis familiaris
acggtcgagacctacacagtgaact

SEQ ID NO: 37910 - DNA, 25 bp, Canis familiaris
actggtccccaatgcaaggtgactg

SEQ ID NO: 37911 - DNA, 25 bp, Canis familiaris
actcgtatactctctgaagcgtgat

SEQ ID NO: 37912 - DNA, 25 bp, Canis familiaris
actgggttctcagctggtgcagagt

SEQ ID NO: 37913 - DNA, 25 bp, Canis familiaris
actgggatcatatactggtcaggat

SEQ ID NO: 37914 - DNA, 25 bp, Canis familiaris
actcggattacatgtgcttggcgat

SEQ ID NO: 37915 - DNA, 25 bp, Canis familiaris
actcgtgcatatgattggctgggcc

SEQ ID NO: 37916 - DNA, 25 bp, Canis familiaris
actctgcagtgtgaattcggggctt

SEQ ID NO: 37917 - DNA, 25 bp, Canis familiaris
actctgcagctcccagatgggtagg

SEQ ID NO: 37918 - DNA, 25 bp, Canis familiaris
actctctgctcgtcaaggtcattgc

SEQ ID NO: 37919 - DNA, 25 bp, Canis familiaris
actctgcctgcactgaaggcacagc

SEQ ID NO: 37920 - DNA, 25 bp, Canis familiaris
actccaccctgagggccgaagacat

SEQ ID NO: 37921 - DNA, 25 bp, Canis familiaris
actccaccacggggactgagagcaa

SEQ ID NO: 37922 - DNA, 25 bp, Canis familiaris
actcctacgtgggcgacgaggccca

SEQ ID NO: 37923 - DNA, 25 bp, Canis familiaris
actgattacttcctctgacgagtcc

SEQ ID NO: 37924 - DNA, 25 bp, Canis familiaris
actgattgagccacctaggtgccct

SEQ ID NO: 37925 - DNA, 25 bp, Canis familiaris
actgtatggccggcattatttcctc

SEQ ID NO: 37926 - DNA, 25 bp, Canis familiaris
acggatggggagatcactcacctct

SEQ ID NO: 37927 - DNA, 25 bp, Canis familiaris
acggatgagttgcaatttccctcgg

SEQ ID NO: 37928 - DNA, 25 bp, Canis familiaris
acggatgcagggcagattggctcct

SEQ ID NO: 37929 - DNA, 25 bp, Canis familiaris
actcgatcacggcatagtgctgctc

SEQ ID NO: 37930 - DNA, 25 bp, Canis familiaris
actaacacgtcaatgagtccttttg

SEQ ID NO: 37931 - DNA, 25 bp, Canis familiaris
actgaaatcctacagtccttcgctg

SEQ ID NO: 37932 - DNA, 25 bp, Canis familiaris
actgaagaactgtaatgcccttttg

SEQ ID NO: 37933 - DNA, 25 bp, Canis familiaris
actaatagactgcaatcccttacca

SEQ ID NO: 37934 - DNA, 25 bp, Canis familiaris
acttatatcatacaaaccaaaccac

SEQ ID NO: 37935 - DNA, 25 bp, Canis familiaris
acttcccaaggaaagacaaggacag

SEQ ID NO: 37936 - DNA, 25 bp, Canis familiaris
actccccacggatgcaacagttgga

SEQ ID NO: 37937 - DNA, 25 bp, Canis familiaris
actccactcacggcaaattcaacgg

SEQ ID NO: 37938 - DNA, 25 bp, Canis familiaris
actccacactggacagaaaccctat

SEQ ID NO: 37939 - DNA, 25 bp, Canis familiaris
actgccaacggtccagatgaccttc

SEQ ID NO: 37940 - DNA, 25 bp, Canis familiaris
actgccaatgcggaggcagctcccc

SEQ ID NO: 37941 - DNA, 25 bp, Canis familiaris
actgcatggattgtgacgtccctct

SEQ ID NO: 37942 - DNA, 25 bp, Canis familiaris
actgatgagaacagtcagcccccat

SEQ ID NO: 37943 - DNA, 25 bp, Canis familiaris
actgctggaagaaggaccccgaggt

SEQ ID NO: 37944 - DNA, 25 bp, Canis familiaris
actgggccatgggaaaccctgggct

SEQ ID NO: 37945 - DNA, 25 bp, Canis familiaris
actgtgccttaggagctgatgccct

SEQ ID NO: 37946 - DNA, 25 bp, Canis familiaris
actggctctgtgtatagctgagcta

SEQ ID NO: 37947 - DNA, 25 bp, Canis familiaris
actgagctgctttgaatgccatttc

SEQ ID NO: 37948 - DNA, 25 bp, Canis familiaris
actggcatcatcaagatcagcctga

SEQ ID NO: 37949 - DNA, 25 bp, Canis familiaris
actggacatctgcatagccgaggct

SEQ ID NO: 37950 - DNA, 25 bp, Canis familiaris
actggagcacgctgggcgtgtgcgc

SEQ ID NO: 37951 - DNA, 25 bp, Canis familiaris
actggagactgattggggagctggc

SEQ ID NO: 37952 - DNA, 25 bp, Canis familiaris
actgcgaacatttgtgggtcgaggt

SEQ ID NO: 37953 - DNA, 25 bp, Canis familiaris
acggatacatggctcgtttagtaat

SEQ ID NO: 37954 - DNA, 25 bp, Canis familiaris
actgttactgagctgcgttttacac

SEQ ID NO: 37955 - DNA, 25 bp, Canis familiaris
actggcgatgcggcggcgttattcc

SEQ ID NO: 37956 - DNA, 25 bp, Canis familiaris
actgcagcggcggtgggtaattaga

SEQ ID NO: 37957 - DNA, 25 bp, Canis familiaris
actgacttgagaccagttgaataaa

SEQ ID NO: 37958 - DNA, 25 bp, Canis familiaris
actgacatggcacccgttggaaaac

SEQ ID NO: 37959 - DNA, 25 bp, Canis familiaris
actccggcaccaaactgttcaatat

SEQ ID NO: 37960 - DNA, 25 bp, Canis familiaris
actacgtcaccttttgagacctgat

SEQ ID NO: 37961 - DNA, 25 bp, Canis familiaris
actgaagtattctgttgaagccctt

SEQ ID NO: 37962 - DNA, 25 bp, Canis familiaris
actgtttttgtgttccaagccagct

SEQ ID NO: 37963 - DNA, 25 bp, Canis familiaris
acaaattgtttgtcattaatgaggt

SEQ ID NO: 37964 - DNA, 25 bp, Canis familiaris
actgaatggtgttctcatttacgag

SEQ ID NO: 37965 - DNA, 25 bp, Canis familiaris
actgaacgggccattgaacaagtat

SEQ ID NO: 37966 - DNA, 25 bp, Canis familiaris
actaaggggcacaatctcgtcaaat

SEQ ID NO: 37967 - DNA, 25 bp, Canis familiaris
actgaagattggtctgcagctccca

SEQ ID NO: 37968 - DNA, 25 bp, Canis familiaris
actgaagattggtctgcagctccca

SEQ ID NO: 37969 - DNA, 25 bp, Canis familiaris
actgaagcatctatgctctgcaccc

SEQ ID NO: 37970 - DNA, 25 bp, Canis familiaris
actgaagcagtcctgttgccttcat

SEQ ID NO: 37971 - DNA, 25 bp, Canis familiaris
actgatagcattcagtctcctgtcc

SEQ ID NO: 37972 - DNA, 25 bp, Canis familiaris
actggacattatggtctcctgctgc

SEQ ID NO: 37973 - DNA, 25 bp, Canis familiaris
actggacgagatggttctcctggcc

SEQ ID NO: 37974 - DNA, 25 bp, Canis familiaris
acttagcccatagtttacaggccaa

SEQ ID NO: 37975 - DNA, 25 bp, Canis familiaris
actgtcataccaactaaaataccca

SEQ ID NO: 37976 - DNA, 25 bp, Canis familiaris
actggcccactgatgaaaatgaccc

SEQ ID NO: 37977 - DNA, 25 bp, Canis familiaris
actgtcctaataaggaagggagcac

SEQ ID NO: 37978 - DNA, 25 bp, Canis familiaris
actggccatggagaggatcaaggag

SEQ ID NO: 37979 - DNA, 25 bp, Canis familiaris
actggcctgcaatattgtaagaatg

SEQ ID NO: 37980 - DNA, 25 bp, Canis familiaris
actggccctatttagatgataaaga

SEQ ID NO: 37981 - DNA, 25 bp, Canis familiaris
acggccactatgtcccagaaggacg

SEQ ID NO: 37982 - DNA, 25 bp, Canis familiaris
actgaggccatgattaagagggacg

SEQ ID NO: 37983 - DNA, 25 bp, Canis familiaris
actgtgcccatctacgaggggtacg

SEQ ID NO: 37984 - DNA, 25 bp, Canis familiaris
actgtgcccatctacgagggctatg

SEQ ID NO: 37985 - DNA, 25 bp, Canis familiaris
actggtcctcaaaggtgacttccca

SEQ ID NO: 37986 - DNA, 25 bp, Canis familiaris
actgttttccactgtgatttcacca

SEQ ID NO: 37987 - DNA, 25 bp, Canis familiaris
actgttctttactttgatcccacaa

SEQ ID NO: 37988 - DNA, 25 bp, Canis familiaris
actgggtttacatttcactccatct

SEQ ID NO: 37989 - DNA, 25 bp, Canis familiaris
actggcattctgtcaatttaattct

SEQ ID NO: 37990 - DNA, 25 bp, Canis familiaris
actggcattccactatattaatttt

SEQ ID NO: 37991 - DNA, 25 bp, Canis familiaris
actggatctccatttgatattttca

SEQ ID NO: 37992 - DNA, 25 bp, Canis familiaris
actgaggctccattttctctgatgt

SEQ ID NO: 37993 - DNA, 25 bp, Canis familiaris
actgaactgctcaaatgatcctatt

SEQ ID NO: 37994 - DNA, 25 bp, Canis familiaris
actgacctcagtttgtacttgattg

SEQ ID NO: 37995 - DNA, 25 bp, Canis familiaris
actccccagccatgtagtgtgacgt

SEQ ID NO: 37996 - DNA, 25 bp, Canis familiaris
acttccctggcattaggctttcggg

SEQ ID NO: 37997 - DNA, 25 bp, Canis familiaris
actaacttggatgcggtttctggga

SEQ ID NO: 37998 - DNA, 25 bp, Canis familiaris
actgaacttgaaattgtctcctcga

SEQ ID NO: 37999 - DNA, 25 bp, Canis familiaris
actgaccttggaaatccatcccatg

SEQ ID NO: 38000 - DNA, 25 bp, Canis familiaris
acggccttagatctctcgccgccaa

SEQ ID NO: 38001 - DNA, 25 bp, Canis familiaris
actgagctctatgagccttccactg

SEQ ID NO: 38002 - DNA, 25 bp, Canis familiaris
actggctctcatgcagtacacacac

SEQ ID NO: 38003 - DNA, 25 bp, Canis familiaris
actgagcctctgtctgtgaaaaaaa

SEQ ID NO: 38004 - DNA, 25 bp, Canis familiaris
actggcccgccattattgtaagaat

SEQ ID NO: 38005 - DNA, 25 bp, Canis familiaris
actggctccggctttatataaaatt

SEQ ID NO: 38006 - DNA, 25 bp, Canis familiaris
actggatgcccagattgattctaaa

SEQ ID NO: 38007 - DNA, 25 bp, Canis familiaris
actggatcgacagcattctggcctt

SEQ ID NO: 38008 - DNA, 25 bp, Canis familiaris
actggatcgacaacaggagccgcgc

SEQ ID NO: 38009 - DNA, 25 bp, Canis familiaris
actggtcaacagtggacgctggcag

SEQ ID NO: 38010 - DNA, 25 bp, Canis familiaris
actggctaagctcagtgaccttgcg

SEQ ID NO: 38011 - DNA, 25 bp, Canis familiaris
actggctgacctccagctggagtat

SEQ ID NO: 38012 - DNA, 25 bp, Canis familiaris
acggctactctcaagtgtactcatg

SEQ ID NO: 38013 - DNA, 25 bp, Canis familiaris
actggctggctttagatgtcttcat

SEQ ID NO: 38014 - DNA, 25 bp, Canis familiaris
actggagcgctttggcaatgccaag

SEQ ID NO: 38015 - DNA, 25 bp, Canis familiaris
actggagtcttccgagagtcgcagc

SEQ ID NO: 38016 - DNA, 25 bp, Canis familiaris
actggagccctccgaggaggagccc

SEQ ID NO: 38017 - DNA, 25 bp, Canis familiaris
actgggccactgcgaggagcagcag

SEQ ID NO: 38018 - DNA, 25 bp, Canis familiaris
actgtgtggccacggagggcagcag

SEQ ID NO: 38019 - DNA, 25 bp, Canis familiaris
actgtggcccatttgagtgacaacc

SEQ ID NO: 38020 - DNA, 25 bp, Canis familiaris
actggtctcctcttagtgaaagcac

SEQ ID NO: 38021 - DNA, 25 bp, Canis familiaris
actgttctccctgctgtgaaatcag

SEQ ID NO: 38022 - DNA, 25 bp, Canis familiaris
actgcccactccatgtggcaaacag

SEQ ID NO: 38023 - DNA, 25 bp, Canis familiaris
actgctaaccccagatgcagccaga

SEQ ID NO: 38024 - DNA, 25 bp, Canis familiaris
actgctaggcgtggcattagagtag

SEQ ID NO: 38025 - DNA, 25 bp, Canis familiaris
actgcaagcagcgggctgagcagca

SEQ ID NO: 38026 - DNA, 25 bp, Canis familiaris
actgcagacgctgatcgaggctcac

SEQ ID NO: 38027 - DNA, 25 bp, Canis familiaris
actgagatcagttccgagagatcat

SEQ ID NO: 38028 - DNA, 25 bp, Canis familiaris
actgcaccagtgttataggcaattt

SEQ ID NO: 38029 - DNA, 25 bp, Canis familiaris
actgccgcataatatatgagcacag

SEQ ID NO: 38030 - DNA, 25 bp, Canis familiaris
actgacccatgatgctcaaactgtg

SEQ ID NO: 38031 - DNA, 25 bp, Canis familiaris
actgttccagagggaagagtgtcct

SEQ ID NO: 38032 - DNA, 25 bp, Canis familiaris
actgtcccgcggcacagagggatat

SEQ ID NO: 38033 - DNA, 25 bp, Canis familiaris
actcccacctgaagacgaaggaagg

SEQ ID NO: 38034 - DNA, 25 bp, Canis familiaris
actccgccccattgacgcaaatggg

SEQ ID NO: 38035 - DNA, 25 bp, Canis familiaris
actccgccccattgacgcaaatggg

SEQ ID NO: 38036 - DNA, 25 bp, Canis familiaris
actccgccccattgacgcaaatggg

SEQ ID NO: 38037 - DNA, 25 bp, Canis familiaris
actccgccccattgacgcaaatggg

SEQ ID NO: 38038 - DNA, 25 bp, Canis familiaris
actccgccccattgacgcaaatggg

SEQ ID NO: 38039 - DNA, 25 bp, Canis familiaris
actccttcccagggtgacacaggga

SEQ ID NO: 38040 - DNA, 25 bp, Canis familiaris
actccttcccagggtgacacaggga

SEQ ID NO: 38041 - DNA, 25 bp, Canis familiaris
actcctgacccctgtccaggggtga

SEQ ID NO: 38042 - DNA, 25 bp, Canis familiaris
aataggaccgtctccaaagtggatg

SEQ ID NO: 38043 - DNA, 25 bp, Canis familiaris
actcggaccccaacgcataggttgg

SEQ ID NO: 38044 - DNA, 25 bp, Canis familiaris
acttggcatctcataacctaggctt

SEQ ID NO: 38045 - DNA, 25 bp, Canis familiaris
actgctgcccttttacatgtgggta

SEQ ID NO: 38046 - DNA, 25 bp, Canis familiaris
actgcttcctgatgtatcgttgtgg

SEQ ID NO: 38047 - DNA, 25 bp, Canis familiaris
actgtagcctgatttcatattgtat

SEQ ID NO: 38048 - DNA, 25 bp, Canis familiaris
actgttcttatctcatttgttacgt

SEQ ID NO: 38049 - DNA, 25 bp, Canis familiaris
actgtactgttttttctattcacgt

SEQ ID NO: 38050 - DNA, 25 bp, Canis familiaris
actccttggtggttcttcttgaagt

SEQ ID NO: 38051 - DNA, 25 bp, Canis familiaris
actctttgcgaggccctgtaatttg

SEQ ID NO: 38052 - DNA, 25 bp, Canis familiaris
actcacctggaggacctgtactgga

SEQ ID NO: 38053 - DNA, 25 bp, Canis familiaris
actcgccgagccggtgtagacagtg

SEQ ID NO: 38054 - DNA, 25 bp, Canis familiaris
actcccggcagcctgttaaagcttg

SEQ ID NO: 38055 - DNA, 25 bp, Canis familiaris
actcccgggcacgatggaatgggtg

SEQ ID NO: 38056 - DNA, 25 bp, Canis familiaris
actccccgagatacgagaaggcagg

SEQ ID NO: 38057 - DNA, 25 bp, Canis familiaris
actcctccaaatcccagcattgaga

SEQ ID NO: 38058 - DNA, 25 bp, Canis familiaris
actccttaaaggcacatctcatttc

SEQ ID NO: 38059 - DNA, 25 bp, Canis familiaris
actgccagtttgtggactcgttttt

SEQ ID NO: 38060 - DNA, 25 bp, Canis familiaris
actgccctctggtcggggtatttat

SEQ ID NO: 38061 - DNA, 25 bp, Canis familiaris
actgcttctcatttcaccggagatt

SEQ ID NO: 38062 - DNA, 25 bp, Canis familiaris
actcattccaattacagggcctcga

SEQ ID NO: 38063 - DNA, 25 bp, Canis familiaris
actttgtcgaagtcagggcctgcaa

SEQ ID NO: 38064 - DNA, 25 bp, Canis familiaris
actgtgagtcaaagccttacccata

SEQ ID NO: 38065 - DNA, 25 bp, Canis familiaris
actggactaatggcttttatctatg

SEQ ID NO: 38066 - DNA, 25 bp, Canis familiaris
acggcctatcgttctattaatatga

SEQ ID NO: 38067 - DNA, 25 bp, Canis familiaris
actggttacagcagatactaatatc

SEQ ID NO: 38068 - DNA, 25 bp, Canis familiaris
actgtttccaaccatatataattaa

SEQ ID NO: 38069 - DNA, 25 bp, Canis familiaris
acttcctacaaaataaacttcagca

SEQ ID NO: 38070 - DNA, 25 bp, Canis familiaris
acttctttgcctatccaacttagta

SEQ ID NO: 38071 - DNA, 25 bp, Canis familiaris
actcctacccttgagaaccatagat

SEQ ID NO: 38072 - DNA, 25 bp, Canis familiaris
actcctgacccacagaaactctgag

SEQ ID NO: 38073 - DNA, 25 bp, Canis familiaris
actcctaccccggactatgatgatg

SEQ ID NO: 38074 - DNA, 25 bp, Canis familiaris
actccagactccgcagagcagaaac

SEQ ID NO: 38075 - DNA, 25 bp, Canis familiaris
actccgcactcccaaggggagcact

SEQ ID NO: 38076 - DNA, 25 bp, Canis familiaris
actccgcactcccaaggggagcact

SEQ ID NO: 38077 - DNA, 25 bp, Canis familiaris
actgcaacaccccaagggctgagag

SEQ ID NO: 38078 - DNA, 25 bp, Canis familiaris
actgcagacacaactacggggtgat

SEQ ID NO: 38079 - DNA, 25 bp, Canis familiaris
actggaatagacaactggagttata

SEQ ID NO: 38080 - DNA, 25 bp, Canis familiaris
actgggaatacatctggaacctgca

SEQ ID NO: 38081 - DNA, 25 bp, Canis familiaris
actcggagatcgagctggtgtccga

SEQ ID NO: 38082 - DNA, 25 bp, Canis familiaris
actgggatgatgtttgcattttgca

SEQ ID NO: 38083 - DNA, 25 bp, Canis familiaris
actggtttgatttcataatatcaga

SEQ ID NO: 38084 - DNA, 25 bp, Canis familiaris
actgtgtttcatttgctgtaatcag

SEQ ID NO: 38085 - DNA, 25 bp, Canis familiaris
actgtgatatctgtgtggtgtctaa

SEQ ID NO: 38086 - DNA, 25 bp, Canis familiaris
actggacactgagtctgctggtgcc

SEQ ID NO: 38087 - DNA, 25 bp, Canis familiaris
actggaccgagttctgcagaggcct

SEQ ID NO: 38088 - DNA, 25 bp, Canis familiaris
actgtgaaccgttgccaatactgct

SEQ ID NO: 38089 - DNA, 25 bp, Canis familiaris
actgtaaccacttctcaatatcttt

SEQ ID NO: 38090 - DNA, 25 bp, Canis familiaris
actggaagccctacgttctatttat

SEQ ID NO: 38091 - DNA, 25 bp, Canis familiaris
actggaaggccttcggcctactatc

SEQ ID NO: 38092 - DNA, 25 bp, Canis familiaris
actggagaggggagcgccctctgcc

SEQ ID NO: 38093 - DNA, 25 bp, Canis familiaris
actgccaaggggatgttgcctgacc

SEQ ID NO: 38094 - DNA, 25 bp, Canis familiaris
actggcaagacgccgagattctcca

SEQ ID NO: 38095 - DNA, 25 bp, Canis familiaris
actggaagaccacacattatgcact

SEQ ID NO: 38096 - DNA, 25 bp, Canis familiaris
actggcaagtactaactattcccaa

SEQ ID NO: 38097 - DNA, 25 bp, Canis familiaris
actggaagatggtcgacgcttccca

SEQ ID NO: 38098 - DNA, 25 bp, Canis familiaris
acttatcaggaacgcctcgatacgc

SEQ ID NO: 38099 - DNA, 25 bp, Canis familiaris
actgggagaaaacctcgcatcacct

SEQ ID NO: 38100 - DNA, 25 bp, Canis familiaris
actggtaatgattagctcacgacgt

SEQ ID NO: 38101 - DNA, 25 bp, Canis familiaris
actggttagacatctgccttcagct

SEQ ID NO: 38102 - DNA, 25 bp, Canis familiaris
actgtatcagagcgactgcgtctcc

SEQ ID NO: 38103 - DNA, 25 bp, Canis familiaris
actgttaatcagtcacgaggctccc

SEQ ID NO: 38104 - DNA, 25 bp, Canis familiaris
actgtatagttgtcctgtggcaccc

SEQ ID NO: 38105 - DNA, 25 bp, Canis familiaris
actgtatcgtgctcactagacagca

SEQ ID NO: 38106 - DNA, 25 bp, Canis familiaris
actggcaagtgcacgctgaagaaag

SEQ ID NO: 38107 - DNA, 25 bp, Canis familiaris
actggcacagtgcacgaggagatac

SEQ ID NO: 38108 - DNA, 25 bp, Canis familiaris
actgatcacctgcattccggatagg

SEQ ID NO: 38109 - DNA, 25 bp, Canis familiaris
actgctcaaagtctccgatgaatgg

SEQ ID NO: 38110 - DNA, 25 bp, Canis familiaris
actgtcaacagtcacgcttgagaac

SEQ ID NO: 38111 - DNA, 25 bp, Canis familiaris
actgctgaacagatacgccgtggag

SEQ ID NO: 38112 - DNA, 25 bp, Canis familiaris
actgctggacaatagcagcggtggg

SEQ ID NO: 38113 - DNA, 25 bp, Canis familiaris
actcttacagaatgccagggtggac

SEQ ID NO: 38114 - DNA, 25 bp, Canis familiaris
acactttccaaagcgtgaggcaaac

SEQ ID NO: 38115 - DNA, 25 bp, Canis familiaris
actcggtccacatcgggggataatc

SEQ ID NO: 38116 - DNA, 25 bp, Canis familiaris
actgtgagacccttctggggacaag

SEQ ID NO: 38117 - DNA, 25 bp, Canis familiaris
actgtgcacacacccttggtgggaa

SEQ ID NO: 38118 - DNA, 25 bp, Canis familiaris
actgtcatcttcttctgggatggga

SEQ ID NO: 38119 - DNA, 25 bp, Canis familiaris
actgaattacatgctgtgaaggcga

SEQ ID NO: 38120 - DNA, 25 bp, Canis familiaris
actgacttccagttgtgtagttcac

SEQ ID NO: 38121 - DNA, 25 bp, Canis familiaris
actgttttcagctgtaagactccta

SEQ ID NO: 38122 - DNA, 25 bp, Canis familiaris
actgtatttagcagacataactgtc

SEQ ID NO: 38123 - DNA, 25 bp, Canis familiaris
actgtcgttacctataaaattgcgt

SEQ ID NO: 38124 - DNA, 25 bp, Canis familiaris
actgggttcacctaatagtgttcga

SEQ ID NO: 38125 - DNA, 25 bp, Canis familiaris
actgaggttacctgaggggtccaag

SEQ ID NO: 38126 - DNA, 25 bp, Canis familiaris
actcggttcctgcagaggtggtgaa

SEQ ID NO: 38127 - DNA, 25 bp, Canis familiaris
actcgttctgtaggagagattggtg

SEQ ID NO: 38128 - DNA, 25 bp, Canis familiaris
actggttgcatcgaggagcagcagg

SEQ ID NO: 38129 - DNA, 25 bp, Canis familiaris
actgagtgtgccgtgcgtgagcggc

SEQ ID NO: 38130 - DNA, 25 bp, Canis familiaris
actggtgctgccaaggctgtgggca

SEQ ID NO: 38131 - DNA, 25 bp, Canis familiaris
actggacctcaactctgatggcagc

SEQ ID NO: 38132 - DNA, 25 bp, Canis familiaris
actgcatacccagttctgatgccaa

SEQ ID NO: 38133 - DNA, 25 bp, Canis familiaris
actgaatgccacttatccataaagg

SEQ ID NO: 38134 - DNA, 25 bp, Canis familiaris
actgactgtgacttacacaggagcg

SEQ ID NO: 38135 - DNA, 25 bp, Canis familiaris
actgcacttgtggtaagcatagcat

SEQ ID NO: 38136 - DNA, 25 bp, Canis familiaris
actcctatgatcatgcacacaagca

SEQ ID NO: 38137 - DNA, 25 bp, Canis familiaris
actcactcaagattgtcagcaatgc

SEQ ID NO: 38138 - DNA, 25 bp, Canis familiaris
acattctctgagactgtgcaatcat

SEQ ID NO: 38139 - DNA, 25 bp, Canis familiaris
actgcttgctggtgtgaatcttgga

SEQ ID NO: 38140 - DNA, 25 bp, Canis familiaris
actggtgggctggtgatgtctcagg

SEQ ID NO: 38141 - DNA, 25 bp, Canis familiaris
actgctggggccggatggctgaagt

SEQ ID NO: 38142 - DNA, 25 bp, Canis familiaris
actggggaccggcatggttgtccgt

SEQ ID NO: 38143 - DNA, 25 bp, Canis familiaris
actggggagggtcctgggtgacctg

SEQ ID NO: 38144 - DNA, 25 bp, Canis familiaris
actggggaggcaatgtcctgggtcc

SEQ ID NO: 38145 - DNA, 25 bp, Canis familiaris
actgagggatggtttctatgagatt

SEQ ID NO: 38146 - DNA, 25 bp, Canis familiaris
actgggatgggccactcttgagatt

SEQ ID NO: 38147 - DNA, 25 bp, Canis familiaris
actgggatgtgcgcaggttggctgt

SEQ ID NO: 38148 - DNA, 25 bp, Canis familiaris
actggtatgcagagcaagtgctggt

SEQ ID NO: 38149 - DNA, 25 bp, Canis familiaris
actgcagaaagctgacatgttcgta

SEQ ID NO: 38150 - DNA, 25 bp, Canis familiaris
actgcacggtgcaggcagtcacgca

SEQ ID NO: 38151 - DNA, 25 bp, Canis familiaris
actgactggctcagcgtgtgcctac

SEQ ID NO: 38152 - DNA, 25 bp, Canis familiaris
actgttggcacatttgaggcttaaa

SEQ ID NO: 38153 - DNA, 25 bp, Canis familiaris
actgttgaaaggtggcattcataat

SEQ ID NO: 38154 - DNA, 25 bp, Canis familiaris
actggtgaagaggttgccatgcgca

SEQ ID NO: 38155 - DNA, 25 bp, Canis familiaris
actgcgtatatactgtcgcacacgc

SEQ ID NO: 38156 - DNA, 25 bp, Canis familiaris
actggtcatgaaagtctgagtcaga

SEQ ID NO: 38157 - DNA, 25 bp, Canis familiaris
actgcattataaattctgtgctaga

SEQ ID NO: 38158 - DNA, 25 bp, Canis familiaris
actgcatggatatcgatgtgtgtca

SEQ ID NO: 38159 - DNA, 25 bp, Canis familiaris
actatgatggaaaacagtgtcattc

SEQ ID NO: 38160 - DNA, 25 bp, Canis familiaris
actgcagaggacaccagatccctcg

SEQ ID NO: 38161 - DNA, 25 bp, Canis familiaris
actcggggataggcagtgctgtctg

SEQ ID NO: 38162 - DNA, 25 bp, Canis familiaris
actcgctgtttaacaggctacccga

SEQ ID NO: 38163 - DNA, 25 bp, Canis familiaris
actccgtctgtttaattacaccagc

SEQ ID NO: 38164 - DNA, 25 bp, Canis familiaris
actcaagttaaggacattcacagct

SEQ ID NO: 38165 - DNA, 25 bp, Canis familiaris
actgcaagtccaactacatgtccat

SEQ ID NO: 38166 - DNA, 25 bp, Canis familiaris
actgccagtacacctctattgcaat

SEQ ID NO: 38167 - DNA, 25 bp, Canis familiaris
actgccatctaacgtttgtcattcc

SEQ ID NO: 38168 - DNA, 25 bp, Canis familiaris
actgcacttgaccaattgcgtctcc

SEQ ID NO: 38169 - DNA, 25 bp, Canis familiaris
actgaatctaccgatcttgtctcga

SEQ ID NO: 38170 - DNA, 25 bp, Canis familiaris
actaatgaaccctatgctgtctatg

SEQ ID NO: 38171 - DNA, 25 bp, Canis familiaris
actgatatgagagtggttgtgttat

SEQ ID NO: 38172 - DNA, 25 bp, Canis familiaris
actaccgattggatggtttagtgag

SEQ ID NO: 38173 - DNA, 25 bp, Canis familiaris
actactcttctccgggttgaagtat

SEQ ID NO: 38174 - DNA, 25 bp, Canis familiaris
actacttttaaggccgtgacattca

SEQ ID NO: 38175 - DNA, 25 bp, Canis familiaris
actgacggggataggccctaaatct

SEQ ID NO: 38176 - DNA, 25 bp, Canis familiaris
actgggagggagggcatctcccctt

SEQ ID NO: 38177 - DNA, 25 bp, Canis familiaris
acatcgggctaagagcctacccttc

SEQ ID NO: 38178 - DNA, 25 bp, Canis familiaris
actctggcatgctaactagttacgc

SEQ ID NO: 38179 - DNA, 25 bp, Canis familiaris
actgttctgaaagtatggctgcacg

SEQ ID NO: 38180 - DNA, 25 bp, Canis familiaris
actgctgctggagagctgtgggctc

SEQ ID NO: 38181 - DNA, 25 bp, Canis familiaris
actgcctgacacactgcaggcattc

SEQ ID NO: 38182 - DNA, 25 bp, Canis familiaris
actccagcatcactacgcggatttt

SEQ ID NO: 38183 - DNA, 25 bp, Canis familiaris
actcccaattactggactaatggct

SEQ ID NO: 38184 - DNA, 25 bp, Canis familiaris
actcccctagactgcagcactaagt

SEQ ID NO: 38185 - DNA, 25 bp, Canis familiaris
actcccgtggaatctcaggaagtcc

SEQ ID NO: 38186 - DNA, 25 bp, Canis familiaris
actccaggtggtccagatcaggtag

SEQ ID NO: 38187 - DNA, 25 bp, Canis familiaris
actgccatcgaggctcctaagggag

SEQ ID NO: 38188 - DNA, 25 bp, Canis familiaris
actgaatgcagacgtcctttgtggt

SEQ ID NO: 38189 - DNA, 25 bp, Canis familiaris
actgagtaatagtcctctgtgtgtg

SEQ ID NO: 38190 - DNA, 25 bp, Canis familiaris
actgagtgaacttcttagtgtgggc

SEQ ID NO: 38191 - DNA, 25 bp, Canis familiaris
actggttgcatcaaattatttggtc

SEQ ID NO: 38192 - DNA, 25 bp, Canis familiaris
actggtatttatttatgttagctcc

SEQ ID NO: 38193 - DNA, 25 bp, Canis familiaris
actgggtttcttgatttcagtgctc

SEQ ID NO: 38194 - DNA, 25 bp, Canis familiaris
actgtcttctgtattatgtttggct

SEQ ID NO: 38195 - DNA, 25 bp, Canis familiaris
actgtttttcaggtattgttgtatt

SEQ ID NO: 38196 - DNA, 25 bp, Canis familiaris
actgttatgtttctattgcttttgt

SEQ ID NO: 38197 - DNA, 25 bp, Canis familiaris
actgttttatttgatttactgggca

SEQ ID NO: 38198 - DNA, 25 bp, Canis familiaris
cttatttggatgattacttactggc

SEQ ID NO: 38199 - DNA, 25 bp, Canis familiaris
ctttttggtgacacacgtgaaccct

SEQ ID NO: 38200 - DNA, 25 bp, Canis familiaris
tttttacttacttacttgaaccatg

SEQ ID NO: 38201 - DNA, 25 bp, Canis familiaris
actgttattttttccattaagccag

SEQ ID NO: 38202 - DNA, 25 bp, Canis familiaris
actgttggtttctatcctttatgat

SEQ ID NO: 38203 - DNA, 25 bp, Canis familiaris
actgttgggtctgtagaggttgcta

SEQ ID NO: 38204 - DNA, 25 bp, Canis familiaris
actgtcctggactgaagattttcta

SEQ ID NO: 38205 - DNA, 25 bp, Canis familiaris
acttccgggttgccagagtagtcaa

SEQ ID NO: 38206 - DNA, 25 bp, Canis familiaris
acttccgggttgccagagtagtcaa

SEQ ID NO: 38207 - DNA, 25 bp, Canis familiaris
acttccgggttgccagagtagtcaa

SEQ ID NO: 38208 - DNA, 25 bp, Canis familiaris
actgtgggggtcccagagctcaatc

SEQ ID NO: 38209 - DNA, 25 bp, Canis familiaris
actgtgggggtaccagagcactcat

SEQ ID NO: 38210 - DNA, 25 bp, Canis familiaris
actccggatggataaggcagcagca

SEQ ID NO: 38211 - DNA, 25 bp, Canis familiaris
actcctgcctggtcacaacatgaga

SEQ ID NO: 38212 - DNA, 25 bp, Canis familiaris
actccctgctggtcaaagtcattgc

SEQ ID NO: 38213 - DNA, 25 bp, Canis familiaris
actcatcccgtgcacaactatggat

SEQ ID NO: 38214 - DNA, 25 bp, Canis familiaris
actgctgcagaggggaaacttcaca

SEQ ID NO: 38215 - DNA, 25 bp, Canis familiaris
actgctgactgaggtgatcacccca

SEQ ID NO: 38216 - DNA, 25 bp, Canis familiaris
actgtgtgctgaaggaagccctcac

SEQ ID NO: 38217 - DNA, 25 bp, Canis familiaris
actggtgctagattattgctcgccc

SEQ ID NO: 38218 - DNA, 25 bp, Canis familiaris
actgtgctttgatatgtcggctgct

SEQ ID NO: 38219 - DNA, 25 bp, Canis familiaris
actgctattggatatggggtcttct

SEQ ID NO: 38220 - DNA, 25 bp, Canis familiaris
actgtgtatggctcgggaactctgt

SEQ ID NO: 38221 - DNA, 25 bp, Canis familiaris
actagcttgagctgcgagaagtttt

SEQ ID NO: 38222 - DNA, 25 bp, Canis familiaris
actgcctctggctgtagaagtgctt

SEQ ID NO: 38223 - DNA, 25 bp, Canis familiaris
actgctcctggtggggcaatgtggg

SEQ ID NO: 38224 - DNA, 25 bp, Canis familiaris
actgtctctgaggggtgtgtgtgtg

SEQ ID NO: 38225 - DNA, 25 bp, Canis familiaris
actgtctatcagtacgtcggcaatg

SEQ ID NO: 38226 - DNA, 25 bp, Canis familiaris
actctctataccctggtggcaagtt

SEQ ID NO: 38227 - DNA, 25 bp, Canis familiaris
actccttaggcactgggtcaggtct

SEQ ID NO: 38228 - DNA, 25 bp, Canis familiaris
actccttagcagtgggttgtgtcct

SEQ ID NO: 38229 - DNA, 25 bp, Canis familiaris
actcctctgacgaatgggtatattg

SEQ ID NO: 38230 - DNA, 25 bp, Canis familiaris
actcctgtgaagaagactttatcgt

SEQ ID NO: 38231 - DNA, 25 bp, Canis familiaris
actctgtaacagactaatttgggtt

SEQ ID NO: 38232 - DNA, 25 bp, Canis familiaris
acatagtccacaactactcggaggc

SEQ ID NO: 38233 - DNA, 25 bp, Canis familiaris
actggtgacctggtgactcgccagg

SEQ ID NO: 38234 - DNA, 25 bp, Canis familiaris
actgaggaccaggttgtctcctgcg

SEQ ID NO: 38235 - DNA, 25 bp, Canis familiaris
actgaggaccaggttgtctcctgcg

SEQ ID NO: 38236 - DNA, 25 bp, Canis familiaris
actgaggaccaggtggtctcctgtg

SEQ ID NO: 38237 - DNA, 25 bp, Canis familiaris
actgaggcccagtgaagccagctgt

SEQ ID NO: 38238 - DNA, 25 bp, Canis familiaris
actgacacctcagggacagcgggat

SEQ ID NO: 38239 - DNA, 25 bp, Canis familiaris
actgaatcccgacagcatcgggaaa

SEQ ID NO: 38240 - DNA, 25 bp, Canis familiaris
actgaggcaggcaaggagccgggct

SEQ ID NO: 38241 - DNA, 25 bp, Canis familiaris
actggggcttgaggaccagctccat

SEQ ID NO: 38242 - DNA, 25 bp, Canis familiaris
actgggcacttagtagagcctcaca

SEQ ID NO: 38243 - DNA, 25 bp, Canis familiaris
actgggctcacttctaataatcgca

SEQ ID NO: 38244 - DNA, 25 bp, Canis familiaris
actgtggctcactcttaaacatcat

SEQ ID NO: 38245 - DNA, 25 bp, Canis familiaris
actaggtcattccataaacatatta

SEQ ID NO: 38246 - DNA, 25 bp, Canis familiaris
actgaagctctaccaatgaactgtt

SEQ ID NO: 38247 - DNA, 25 bp, Canis familiaris
actgcaagccattggaatacccatc

SEQ ID NO: 38248 - DNA, 25 bp, Canis familiaris
actctatcaaagcaacacacctcgg

SEQ ID NO: 38249 - DNA, 25 bp, Canis familiaris
actgcacaataaaaccaagcctctg

SEQ ID NO: 38250 - DNA, 25 bp, Canis familiaris
actgcaggaagaccccaactacagc

SEQ ID NO: 38251 - DNA, 25 bp, Canis familiaris
actctggagagagcaaaacttctgt

SEQ ID NO: 38252 - DNA, 25 bp, Canis familiaris
actcggaagatgaaggagacttgag

SEQ ID NO: 38253 - DNA, 25 bp, Canis familiaris
actcgttttgtaggagaatatggtg

SEQ ID NO: 38254 - DNA, 25 bp, Canis familiaris
actcgagttttaggacaccgcagcg

SEQ ID NO: 38255 - DNA, 25 bp, Canis familiaris
actctagacctttgaaactctggcc

SEQ ID NO: 38256 - DNA, 25 bp, Canis familiaris
actctacaccgttgtcggtcggact

SEQ ID NO: 38257 - DNA, 25 bp, Canis familiaris
actcgacgcgagatgtagattctgt

SEQ ID NO: 38258 - DNA, 25 bp, Canis familiaris
actccacctagaaatagtgccttag

SEQ ID NO: 38259 - DNA, 25 bp, Canis familiaris
actcccccagtcataagccaaggag

SEQ ID NO: 38260 - DNA, 25 bp, Canis familiaris
actcctggctgccctaaagctaagg

SEQ ID NO: 38261 - DNA, 25 bp, Canis familiaris
actccagcctgggcgacagagcgag

SEQ ID NO: 38262 - DNA, 25 bp, Canis familiaris
actgcacccagagccacagagggtg

SEQ ID NO: 38263 - DNA, 25 bp, Canis familiaris
actgcacaacagagaatcacggtgt

SEQ ID NO: 38264 - DNA, 25 bp, Canis familiaris
actgaaagatccgaacacagcggtc

SEQ ID NO: 38265 - DNA, 25 bp, Canis familiaris
actgaacatgactccagaagaagct

SEQ ID NO: 38266 - DNA, 25 bp, Canis familiaris
actgcctctacagttccaagtagct

SEQ ID NO: 38267 - DNA, 25 bp, Canis familiaris
actgtcttgccagatcaccaatact

SEQ ID NO: 38268 - DNA, 25 bp, Canis familiaris
actgtttgccaatcaagactacttt

SEQ ID NO: 38269 - DNA, 25 bp, Canis familiaris
actgtataggattcaagtttacttt

SEQ ID NO: 38270 - DNA, 25 bp, Canis familiaris
actgtgtctggatatctgtttcatt

SEQ ID NO: 38271 - DNA, 25 bp, Canis familiaris
actgtgctattgtcacactctgatt

SEQ ID NO: 38272 - DNA, 25 bp, Canis familiaris
actgtgctctttaaacttcttcaac

SEQ ID NO: 38273 - DNA, 25 bp, Canis familiaris
actgtccataagaaactcgcttcta

SEQ ID NO: 38274 - DNA, 25 bp, Canis familiaris
acaccacataagatacggagtacat

SEQ ID NO: 38275 - DNA, 25 bp, Canis familiaris
acaccacaaacgtacggcgtattgc

SEQ ID NO: 38276 - DNA, 25 bp, Canis familiaris
actcccaaatcgtcatcagggccaa

SEQ ID NO: 38277 - DNA, 25 bp, Canis familiaris
actcacgcataaaatcaaggtgcta

SEQ ID NO: 38278 - DNA, 25 bp, Canis familiaris
actcatgccacgagtctcagtggtt

SEQ ID NO: 38279 - DNA, 25 bp, Canis familiaris
actgcagagtcccagctctgggttt

SEQ ID NO: 38280 - DNA, 25 bp, Canis familiaris
actgctgagtggcagctctgggctg

SEQ ID NO: 38281 - DNA, 25 bp, Canis familiaris
actctgggggcagctgagcctgaag

SEQ ID NO: 38282 - DNA, 25 bp, Canis familiaris
actcagggttgttccaccagagagc

SEQ ID NO: 38283 - DNA, 25 bp, Canis familiaris
actcagggggcctcttagtggatca

SEQ ID NO: 38284 - DNA, 25 bp, Canis familiaris
actacatgggggtttctagcctgaa

SEQ ID NO: 38285 - DNA, 25 bp, Canis familiaris
actcctgtgaggcatttggagcctg

SEQ ID NO: 38286 - DNA, 25 bp, Canis familiaris
actgctgttaggcttccatgagcat

SEQ ID NO: 38287 - DNA, 25 bp, Canis familiaris
actgtatctcaggtttgccaataag

SEQ ID NO: 38288 - DNA, 25 bp, Canis familiaris
actgtatctcaggttggccataaga

SEQ ID NO: 38289 - DNA, 25 bp, Canis familiaris
actgcttggctcctctagccaaagt

SEQ ID NO: 38290 - DNA, 25 bp, Canis familiaris
actgtcgcccttcaacacaaggttt

SEQ ID NO: 38291 - DNA, 25 bp, Canis familiaris
actcagtcccttcaacacaggatgg

SEQ ID NO: 38292 - DNA, 25 bp, Canis familiaris
actgcggcgacttgtaagcatcggg

SEQ ID NO: 38293 - DNA, 25 bp, Canis familiaris
actgcaggcgactttggagctgttg

SEQ ID NO: 38294 - DNA, 25 bp, Canis familiaris
actgcaggtgaattcttcatctgtc

SEQ ID NO: 38295 - DNA, 25 bp, Canis familiaris
actgcgggcacactgtgctattgtc

SEQ ID NO: 38296 - DNA, 25 bp, Canis familiaris
actgaggtgccaggtgttgatgtca

SEQ ID NO: 38297 - DNA, 25 bp, Canis familiaris
actgaagctcaagggcatctccatc

SEQ ID NO: 38298 - DNA, 25 bp, Canis familiaris
actgagcaccaggtggtctcctctg

SEQ ID NO: 38299 - DNA, 25 bp, Canis familiaris
actgatcagtaggttgtcctctcta

SEQ ID NO: 38300 - DNA, 25 bp, Canis familiaris
actgatgagtatctggatggccatt

SEQ ID NO: 38301 - DNA, 25 bp, Canis familiaris
actgtgtgattgttggcatatgctg

SEQ ID NO: 38302 - DNA, 25 bp, Canis familiaris
actgtgttagtgtgcgagtgcccaa

SEQ ID NO: 38303 - DNA, 25 bp, Canis familiaris
actgaagtgacgtgagaccctgcaa

SEQ ID NO: 38304 - DNA, 25 bp, Canis familiaris
actccagtggcctgaggacacgtat

SEQ ID NO: 38305 - DNA, 25 bp, Canis familiaris
actccacagacctcatggaagccat

SEQ ID NO: 38306 - DNA, 25 bp, Canis familiaris
actccaggcccaaaggaagccatcc

SEQ ID NO: 38307 - DNA, 25 bp, Canis familiaris
actcacgtccaaaagtacgcttctg

SEQ ID NO: 38308 - DNA, 25 bp, Canis familiaris
actccttgcaaaacgtcggttgcag

SEQ ID NO: 38309 - DNA, 25 bp, Canis familiaris
actgtgttcagtgtcgttggaatgg

SEQ ID NO: 38310 - DNA, 25 bp, Canis familiaris
actctgtccagtgccaggggaggaa

SEQ ID NO: 38311 - DNA, 25 bp, Canis familiaris
actgcttccaccaggggctgggaag

SEQ ID NO: 38312 - DNA, 25 bp, Canis familiaris
actgcgcacccctgggggaaatctt

SEQ ID NO: 38313 - DNA, 25 bp, Canis familiaris
actcgacccccagtgatgttaaagt

SEQ ID NO: 38314 - DNA, 25 bp, Canis familiaris
actcagcaccatgaagcttttcccg

SEQ ID NO: 38315 - DNA, 25 bp, Canis familiaris
actgcaatggtgggatcttttgtcc

SEQ ID NO: 38316 - DNA, 25 bp, Canis familiaris
actgaagtctggaagcattctctga

SEQ ID NO: 38317 - DNA, 25 bp, Canis familiaris
actgaactgtggagtcttgctgctt

SEQ ID NO: 38318 - DNA, 25 bp, Canis familiaris
actgtcacttagggtcttatgtagg

SEQ ID NO: 38319 - DNA, 25 bp, Canis familiaris
actgtccatgtgtcctatttattac

SEQ ID NO: 38320 - DNA, 25 bp, Canis familiaris
actgtcaatctgtttttaattaatt

SEQ ID NO: 38321 - DNA, 25 bp, Canis familiaris
actgtcaacatgttttctttgagag

SEQ ID NO: 38322 - DNA, 25 bp, Canis familiaris
actgaccacagttacattttgacat

SEQ ID NO: 38323 - DNA, 25 bp, Canis familiaris
actgcagtccagtgacattttcctt

SEQ ID NO: 38324 - DNA, 25 bp, Canis familiaris
actgacatacttgtcattgttcctt

SEQ ID NO: 38325 - DNA, 25 bp, Canis familiaris
actgaaatgttggcttttgtcctcg

SEQ ID NO: 38326 - DNA, 25 bp, Canis familiaris
actgcataagtccggtgtgtgtccc

SEQ ID NO: 38327 - DNA, 25 bp, Canis familiaris
actgctgccaactatggggagtccc

SEQ ID NO: 38328 - DNA, 25 bp, Canis familiaris
actgctcagcaacctggaggaagcc

SEQ ID NO: 38329 - DNA, 25 bp, Canis familiaris
actccagccagccaggaggataccc

SEQ ID NO: 38330 - DNA, 25 bp, Canis familiaris
actgccccagcggagagaaatgccc

SEQ ID NO: 38331 - DNA, 25 bp, Canis familiaris
actcacacacgcttgcagagctaat

SEQ ID NO: 38332 - DNA, 25 bp, Canis familiaris
actgcaccaccattaacctgatagg

SEQ ID NO: 38333 - DNA, 25 bp, Canis familiaris
actcacacacaacagacgtcttcga

SEQ ID NO: 38334 - DNA, 25 bp, Canis familiaris
actccaccatcagcatggctgggcc

SEQ ID NO: 38335 - DNA, 25 bp, Canis familiaris
actcccatcgcagcttctaagctgc

SEQ ID NO: 38336 - DNA, 25 bp, Canis familiaris
actccaatccctgtcaatgtgagcc

SEQ ID NO: 38337 - DNA, 25 bp, Canis familiaris
actccatcatacctttaacaacacc

SEQ ID NO: 38338 - DNA, 25 bp, Canis familiaris
aatttcacacgtatacaaaagtcca

SEQ ID NO: 38339 - DNA, 25 bp, Canis familiaris
aaatagtccgtagacaatcaaccta

SEQ ID NO: 38340 - DNA, 25 bp, Canis familiaris
actatactgccttaaactcaccatc

SEQ ID NO: 38341 - DNA, 25 bp, Canis familiaris
actgaacgtggatccaggcaccatc

SEQ ID NO: 38342 - DNA, 25 bp, Canis familiaris
actgacctgggctcacagtgagtac

SEQ ID NO: 38343 - DNA, 25 bp, Canis familiaris
actgagccaggtgcctcacaagtat

SEQ ID NO: 38344 - DNA, 25 bp, Canis familiaris
actgcttaagctggcccacaagtac

SEQ ID NO: 38345 - DNA, 25 bp, Canis familiaris
actgcttcaagcaatagcctagagt

SEQ ID NO: 38346 - DNA, 25 bp, Canis familiaris
actgccaccagccttggtaggttaa

SEQ ID NO: 38347 - DNA, 25 bp, Canis familiaris
actgtatccagtagggctatcgttc

SEQ ID NO: 38348 - DNA, 25 bp, Canis familiaris
actgtttcctagatgtatcgtgtca

SEQ ID NO: 38349 - DNA, 25 bp, Canis familiaris
actgctctttcattggtttcgtgta

SEQ ID NO: 38350 - DNA, 25 bp, Canis familiaris
actgttcttaatattttgtgtgcat

SEQ ID NO: 38351 - DNA, 25 bp, Canis familiaris
actgttttaataatctgtatttcag

SEQ ID NO: 38352 - DNA, 25 bp, Canis familiaris
actgtatttattgctgcgtttctca

SEQ ID NO: 38353 - DNA, 25 bp, Canis familiaris
actgtatttttgcatggttccttgt

SEQ ID NO: 38354 - DNA, 25 bp, Canis familiaris
actgtacctttcttagattcctttg

SEQ ID NO: 38355 - DNA, 25 bp, Canis familiaris
actgttccttggttagagtcctgtt

SEQ ID NO: 38356 - DNA, 25 bp, Canis familiaris
actgttccctggttaatgcacgtgt

SEQ ID NO: 38357 - DNA, 25 bp, Canis familiaris
actgattccctgtgattctcaggtt

SEQ ID NO: 38358 - DNA, 25 bp, Canis familiaris
actgttttctgctgagtgtagcttt

SEQ ID NO: 38359 - DNA, 25 bp, Canis familiaris
actgttatatattaagtgtcttgct

SEQ ID NO: 38360 - DNA, 25 bp, Canis familiaris
actgtttgactttaggatcccatcc

SEQ ID NO: 38361 - DNA, 25 bp, Canis familiaris
actgattttgtcaaccgtctcacat

SEQ ID NO: 38362 - DNA, 25 bp, Canis familiaris
actgtttgttcatgacacctcacat

SEQ ID NO: 38363 - DNA, 25 bp, Canis familiaris
actccttgtgtctggagcagctacc

SEQ ID NO: 38364 - DNA, 25 bp, Canis familiaris
actccttggccaatggcatcactcc

SEQ ID NO: 38365 - DNA, 25 bp, Canis familiaris
actgcatttgtcaattgtgtaaccc

SEQ ID NO: 38366 - DNA, 25 bp, Canis familiaris
actccttgctcactgctttaaatcc

SEQ ID NO: 38367 - DNA, 25 bp, Canis familiaris
actgtcttccagtatcttgaaatcc

SEQ ID NO: 38368 - DNA, 25 bp, Canis familiaris
actgatttctatggctttcaaagct

SEQ ID NO: 38369 - DNA, 25 bp, Canis familiaris
actgctcatcatgtgccatttaaag

SEQ ID NO: 38370 - DNA, 25 bp, Canis familiaris
actgcttctgtgcctgagtgataaa

SEQ ID NO: 38371 - DNA, 25 bp, Canis familiaris
actgctgtcagcgctgagtaggagg

SEQ ID NO: 38372 - DNA, 25 bp, Canis familiaris
actgctgacacttctgcaatccaga

SEQ ID NO: 38373 - DNA, 25 bp, Canis familiaris
actgatacatcattctaccacatag

SEQ ID NO: 38374 - DNA, 25 bp, Canis familiaris
actgctactcagtagtcccaagtga

SEQ ID NO: 38375 - DNA, 25 bp, Canis familiaris
actgctcatctaatacttgccatac

SEQ ID NO: 38376 - DNA, 25 bp, Canis familiaris
actatttgatatgttccgtcggtta

SEQ ID NO: 38377 - DNA, 25 bp, Canis familiaris
actaattgtatcataaagccgttta

SEQ ID NO: 38378 - DNA, 25 bp, Canis familiaris
actacctgattttaatacttgttat

SEQ ID NO: 38379 - DNA, 25 bp, Canis familiaris
actaccaactatccaaagcttttcg

SEQ ID NO: 38380 - DNA, 25 bp, Canis familiaris
actcccaatttggcagcttggattg

SEQ ID NO: 38381 - DNA, 25 bp, Canis familiaris
actccacctttgacactttactgag

SEQ ID NO: 38382 - DNA, 25 bp, Canis familiaris
actgcaacttttaacttgccctgtg

SEQ ID NO: 38383 - DNA, 25 bp, Canis familiaris
actgcaactttcttcatgtgttcag

SEQ ID NO: 38384 - DNA, 25 bp, Canis familiaris
actgcgacgttcgatcttgcatgga

SEQ ID NO: 38385 - DNA, 25 bp, Canis familiaris
actgatagagattcaagttgcatta

SEQ ID NO: 38386 - DNA, 25 bp, Canis familiaris
actcggtgatcatagttgataagaa

SEQ ID NO: 38387 - DNA, 25 bp, Canis familiaris
actcagggactgttctggtaacaga

SEQ ID NO: 38388 - DNA, 25 bp, Canis familiaris
actactgggctgggggtgcacaaaa

SEQ ID NO: 38389 - DNA, 25 bp, Canis familiaris
actcctggctctcggatgttacaaa

SEQ ID NO: 38390 - DNA, 25 bp, Canis familiaris
actcactctcttccaggtagaacaa

SEQ ID NO: 38391 - DNA, 25 bp, Canis familiaris
actagcattcttaccagaaacctac

SEQ ID NO: 38392 - DNA, 25 bp, Canis familiaris
actactacgatgactgacacggcac

SEQ ID NO: 38393 - DNA, 25 bp, Canis familiaris
actgaagacgagaacccgtgctccg

SEQ ID NO: 38394 - DNA, 25 bp, Canis familiaris
actgaaacggtcacacagggctcct

SEQ ID NO: 38395 - DNA, 25 bp, Canis familiaris
actgaataccagtggggggatccct

SEQ ID NO: 38396 - DNA, 25 bp, Canis familiaris
caagaaacccacagggcaggaccct

SEQ ID NO: 38397 - DNA, 25 bp, Canis familiaris
acagagaccccgagggcaaagctca

SEQ ID NO: 38398 - DNA, 25 bp, Canis familiaris
acagacctttcgtgcaggaaaccag

SEQ ID NO: 38399 - DNA, 25 bp, Canis familiaris
actgaagtctttccgaggaaatcca

SEQ ID NO: 38400 - DNA, 25 bp, Canis familiaris
actaagtgctttcagaggccatgcc

SEQ ID NO: 38401 - DNA, 25 bp, Canis familiaris
actgaaatgtctcgtggacgcctgg

SEQ ID NO: 38402 - DNA, 25 bp, Canis familiaris
cttaaattttgtgaccatagaggat

SEQ ID NO: 38403 - DNA, 25 bp, Canis familiaris
actaaaatgttgctgacctaaggtt

SEQ ID NO: 38404 - DNA, 25 bp, Canis familiaris
actacaccggtgtgatccgagacgt

SEQ ID NO: 38405 - DNA, 25 bp, Canis familiaris
actcgagggtagtctgtccgagccg

SEQ ID NO: 38406 - DNA, 25 bp, Canis familiaris
actgcgggagaacgtgtccgcgcgt

SEQ ID NO: 38407 - DNA, 25 bp, Canis familiaris
actgctgggagaagttgcggcgtgc

SEQ ID NO: 38408 - DNA, 25 bp, Canis familiaris
actgctgcaaggtgctatgagggcc

SEQ ID NO: 38409 - DNA, 25 bp, Canis familiaris
actgccctggggtagagggctgccc

SEQ ID NO: 38410 - DNA, 25 bp, Canis familiaris
actctttggacgtgatcggcttcct

SEQ ID NO: 38411 - DNA, 25 bp, Canis familiaris
actcttcagagatcggataccaatc

SEQ ID NO: 38412 - DNA, 25 bp, Canis familiaris
actctatgcgaccccagtcggatat

SEQ ID NO: 38413 - DNA, 25 bp, Canis familiaris
actctatgcccacaagtttgatact

SEQ ID NO: 38414 - DNA, 25 bp, Canis familiaris
actctttgccctcagtattgatagc

SEQ ID NO: 38415 - DNA, 25 bp, Canis familiaris
actcaattgccaggaagatctgtga

SEQ ID NO: 38416 - DNA, 25 bp, Canis familiaris
actgagctttcattagagtatgtga

SEQ ID NO: 38417 - DNA, 25 bp, Canis familiaris
actgcatgcattactctcgaaacta

SEQ ID NO: 38418 - DNA, 25 bp, Canis familiaris
actgagcatctccctcacaatttcc

SEQ ID NO: 38419 - DNA, 25 bp, Canis familiaris
actgaattctccaacagactctgct

SEQ ID NO: 38420 - DNA, 25 bp, Canis familiaris
actgcacaggtaatacaacacgccg

SEQ ID NO: 38421 - DNA, 25 bp, Canis familiaris
actgctcaagagaatcctaacggct

SEQ ID NO: 38422 - DNA, 25 bp, Canis familiaris
actctgcacagatatcctaagcccc

SEQ ID NO: 38423 - DNA, 25 bp, Canis familiaris
acttcataagtacttgagccctcca

SEQ ID NO: 38424 - DNA, 25 bp, Canis familiaris
acattctctacttttgagtagtcct

SEQ ID NO: 38425 - DNA, 25 bp, Canis familiaris
actgttcctctgtttggacagctcc

SEQ ID NO: 38426 - DNA, 25 bp, Canis familiaris
actgttcagcaggctgttggaagcc

SEQ ID NO: 38427 - DNA, 25 bp, Canis familiaris
gacgttgacgtggtcggagacttag

SEQ ID NO: 38428 - DNA, 25 bp, Canis familiaris
actgttgcaccagccttaggcttag

SEQ ID NO: 38429 - DNA, 25 bp, Canis familiaris
actgttcacttggctttaatctaag

SEQ ID NO: 38430 - DNA, 25 bp, Canis familiaris
actgcttcacctttgttattcttaa

SEQ ID NO: 38431 - DNA, 25 bp, Canis familiaris
actgttcatacctgttacttattct

SEQ ID NO: 38432 - DNA, 25 bp, Canis familiaris
actcccttccttgtaggatattctc

SEQ ID NO: 38433 - DNA, 25 bp, Canis familiaris
acttgcctaccgatataggataatt

SEQ ID NO: 38434 - DNA, 25 bp, Canis familiaris
actgttgtatacgcttattgagaaa

SEQ ID NO: 38435 - DNA, 25 bp, Canis familiaris
actgcattgttgtttctttccaaaa

SEQ ID NO: 38436 - DNA, 25 bp, Canis familiaris
actgcctggtgtgtctgtgtaagaa

SEQ ID NO: 38437 - DNA, 25 bp, Canis familiaris
actgcttaggtctatctggatgtaa

SEQ ID NO: 38438 - DNA, 25 bp, Canis familiaris
actgctgtagtcgttttcagtacat

SEQ ID NO: 38439 - DNA, 25 bp, Canis familiaris
actgcttgagctttgttttggcaac

SEQ ID NO: 38440 - DNA, 25 bp, Canis familiaris
actgttgtgttccttcaatccaact

SEQ ID NO: 38441 - DNA, 25 bp, Canis familiaris
actgttctttcgttcaaatccttat

SEQ ID NO: 38442 - DNA, 25 bp, Canis familiaris
actgctttattactaaggacctgct

SEQ ID NO: 38443 - DNA, 25 bp, Canis familiaris
actgcttgtatttttttcaactggc

SEQ ID NO: 38444 - DNA, 25 bp, Canis familiaris
actgttggctattttgcttcacctt

SEQ ID NO: 38445 - DNA, 25 bp, Canis familiaris
actgttccaattgatgattcttctg

SEQ ID NO: 38446 - DNA, 25 bp, Canis familiaris
actcctgtcataagccatttttctg

SEQ ID NO: 38447 - DNA, 25 bp, Canis familiaris
actcagtgtatcccctttttatgat

SEQ ID NO: 38448 - DNA, 25 bp, Canis familiaris
actgccatttcccactatatttatg

SEQ ID NO: 38449 - DNA, 25 bp, Canis familiaris
actcctcttgcccagtatttatttg

SEQ ID NO: 38450 - DNA, 25 bp, Canis familiaris
actcctatagcccattcttgtgaat

SEQ ID NO: 38451 - DNA, 25 bp, Canis familiaris
actcctagacaaactgctctggaaa

SEQ ID NO: 38452 - DNA, 25 bp, Canis familiaris
actcctgagcacattgttccgtatg

SEQ ID NO: 38453 - DNA, 25 bp, Canis familiaris
actgccatatggctgtgggcccaat

SEQ ID NO: 38454 - DNA, 25 bp, Canis familiaris
actgcactgatgttaagacccctga

SEQ ID NO: 38455 - DNA, 25 bp, Canis familiaris
actgcactgatctaaacaagcccga

SEQ ID NO: 38456 - DNA, 25 bp, Canis familiaris
actgcagttatatcacataccccat

SEQ ID NO: 38457 - DNA, 25 bp, Canis familiaris
actgcacatatttaccagcaccaca

SEQ ID NO: 38458 - DNA, 25 bp, Canis familiaris
actgccaatttcttacacatgtcac

SEQ ID NO: 38459 - DNA, 25 bp, Canis familiaris
actccaatctaccttcatgttcata

SEQ ID NO: 38460 - DNA, 25 bp, Canis familiaris
actcgccagcaagttatctgattcc

SEQ ID NO: 38461 - DNA, 25 bp, Canis familiaris
actctgcaaagacgttcgcatcgcc

SEQ ID NO: 38462 - DNA, 25 bp, Canis familiaris
actgctaaagagctcatcctatgct

SEQ ID NO: 38463 - DNA, 25 bp, Canis familiaris
actgaataaggagtccctaggtcaa

SEQ ID NO: 38464 - DNA, 25 bp, Canis familiaris
actgagcaagagaggccctatccca

SEQ ID NO: 38465 - DNA, 25 bp, Canis familiaris
actcagaaaaagtccattctcccca

SEQ ID NO: 38466 - DNA, 25 bp, Canis familiaris
actaatagagaaaaattcccagctg

SEQ ID NO: 38467 - DNA, 25 bp, Canis familiaris
actgccaaaaataaatctccggtgt

SEQ ID NO: 38468 - DNA, 25 bp, Canis familiaris
actcccagaagaaatacttttggtg

SEQ ID NO: 38469 - DNA, 25 bp, Canis familiaris
actcctagtgaacattatttagggt

SEQ ID NO: 38470 - DNA, 25 bp, Canis familiaris
actgccgttaaagggtgtatagaga

SEQ ID NO: 38471 - DNA, 25 bp, Canis familiaris
actccatgatggttttggtgttaga

SEQ ID NO: 38472 - DNA, 25 bp, Canis familiaris
actagcattggttttggtctgcctt

SEQ ID NO: 38473 - DNA, 25 bp, Canis familiaris
actacttcagtattgatgctcctcc

SEQ ID NO: 38474 - DNA, 25 bp, Canis familiaris
actccaccaatttatcatcctgact

SEQ ID NO: 38475 - DNA, 25 bp, Canis familiaris
actccccattgtgaatccgacggat

SEQ ID NO: 38476 - DNA, 25 bp, Canis familiaris
actgccaccttgatgacatccggca

SEQ ID NO: 38477 - DNA, 25 bp, Canis familiaris
aaccaactcataattgatgccagga

SEQ ID NO: 38478 - DNA, 25 bp, Canis familiaris
actccgccacgaacatggtggtccc

SEQ ID NO: 38479 - DNA, 25 bp, Canis familiaris
actgccaacgtgtcagtggtggacc

SEQ ID NO: 38480 - DNA, 25 bp, Canis familiaris
actgccaacgtgtcagtggtggacc

SEQ ID NO: 38481 - DNA, 25 bp, Canis familiaris
actcgagtcgatgatctggggtccc

SEQ ID NO: 38482 - DNA, 25 bp, Canis familiaris
acagccgaccacaactagggatacc

SEQ ID NO: 38483 - DNA, 25 bp, Canis familiaris
actgcccaggccatcaagggtatgc

SEQ ID NO: 38484 - DNA, 25 bp, Canis familiaris
actgcccaggccatcaagggtatgc

SEQ ID NO: 38485 - DNA, 25 bp, Canis familiaris
tacttcagttccacaagggtacgtt

SEQ ID NO: 38486 - DNA, 25 bp, Canis familiaris
actgactttgccactatgggctgtc

SEQ ID NO: 38487 - DNA, 25 bp, Canis familiaris
actgagaaactcactctggcatctg

SEQ ID NO: 38488 - DNA, 25 bp, Canis familiaris
actgaaatcttcagccttgcctagg

SEQ ID NO: 38489 - DNA, 25 bp, Canis familiaris
actaacactgtttgccaatcaagac

SEQ ID NO: 38490 - DNA, 25 bp, Canis familiaris
actgacacaccttggcatgaatcac

SEQ ID NO: 38491 - DNA, 25 bp, Canis familiaris
actgcagcagctgcttcagagaatg

SEQ ID NO: 38492 - DNA, 25 bp, Canis familiaris
actcgcgcatggtccagaattgtgt

SEQ ID NO: 38493 - DNA, 25 bp, Canis familiaris
actccctggatatctatctgtgcct

SEQ ID NO: 38494 - DNA, 25 bp, Canis familiaris
actgcacaccagaactctctctggc

SEQ ID NO: 38495 - DNA, 25 bp, Canis familiaris
actgcacatccatacccatgataca

SEQ ID NO: 38496 - DNA, 25 bp, Canis familiaris
actgacatccaaactgtgttcacta

SEQ ID NO: 38497 - DNA, 25 bp, Canis familiaris
actgccttgctaactgtgctgtaat

SEQ ID NO: 38498 - DNA, 25 bp, Canis familiaris
actgctcttcctactatttatcatt

SEQ ID NO: 38499 - DNA, 25 bp, Canis familiaris
actccattactattaactatcgcga

SEQ ID NO: 38500 - DNA, 25 bp, Canis familiaris
actgccattttattatttacccaca

SEQ ID NO: 38501 - DNA, 25 bp, Canis familiaris
actgaaacttgttatcttcacccct

SEQ ID NO: 38502 - DNA, 25 bp, Canis familiaris
actgaagacaggttcttgtccccac

SEQ ID NO: 38503 - DNA, 25 bp, Canis familiaris
actgacgcacaatactttcctacaa

SEQ ID NO: 38504 - DNA, 25 bp, Canis familiaris
actgctctaaatttctgttttctca

SEQ ID NO: 38505 - DNA, 25 bp, Canis familiaris
actgcattccacatattatttttgc

SEQ ID NO: 38506 - DNA, 25 bp, Canis familiaris
actgcagcatttatgatttctttgt

SEQ ID NO: 38507 - DNA, 25 bp, Canis familiaris
actagttacattttcctaatctctt

SEQ ID NO: 38508 - DNA, 25 bp, Canis familiaris
actcaccgactgagtctctattctc

SEQ ID NO: 38509 - DNA, 25 bp, Canis familiaris
actctcccactaggactgtcatttg

SEQ ID NO: 38510 - DNA, 25 bp, Canis familiaris
actgcctccctgttagttcaatgga

SEQ ID NO: 38511 - DNA, 25 bp, Canis familiaris
actgcgacgaggttggcttcaatgc

SEQ ID NO: 38512 - DNA, 25 bp, Canis familiaris
actgcgagtgaggacgcctccaagt

SEQ ID NO: 38513 - DNA, 25 bp, Canis familiaris
actgctggggagtccctgccacact

SEQ ID NO: 38514 - DNA, 25 bp, Canis familiaris
actgctgggacatggacagccactt

SEQ ID NO: 38515 - DNA, 25 bp, Canis familiaris
actgcagtgtgcttaaccagctcac

SEQ ID NO: 38516 - DNA, 25 bp, Canis familiaris
actcaggccttaaccagtagtttgg

SEQ ID NO: 38517 - DNA, 25 bp, Canis familiaris
actaagccctttgcaatggctttga

SEQ ID NO: 38518 - DNA, 25 bp, Canis familiaris
actccccgtttgccaatgttataga

SEQ ID NO: 38519 - DNA, 25 bp, Canis familiaris
actcccttgctttgaccaggtgaaa

SEQ ID NO: 38520 - DNA, 25 bp, Canis familiaris
actccactactctaaccaggttggc

SEQ ID NO: 38521 - DNA, 25 bp, Canis familiaris
actccatttctataagtgcgtttga

SEQ ID NO: 38522 - DNA, 25 bp, Canis familiaris
actccatctctcaccataggtttaa

SEQ ID NO: 38523 - DNA, 25 bp, Canis familiaris
actcgacttcctgcatgggttttga

SEQ ID NO: 38524 - DNA, 25 bp, Canis familiaris
actcagacttcctaggtagttttga

SEQ ID NO: 38525 - DNA, 25 bp, Canis familiaris
acatcaaaccaccacttcggatttg

SEQ ID NO: 38526 - DNA, 25 bp, Canis familiaris
acatcaaaccaccacttcggatttg

SEQ ID NO: 38527 - DNA, 25 bp, Canis familiaris
acatcaaaccaccacttcggatttg

SEQ ID NO: 38528 - DNA, 25 bp, Canis familiaris
acatcaaaccaccacttcggatttg

SEQ ID NO: 38529 - DNA, 25 bp, Canis familiaris
acatcaaaccaccacttcggatttg

SEQ ID NO: 38530 - DNA, 25 bp, Canis familiaris
acatcaaaccaccacttcggatttg

SEQ ID NO: 38531 - DNA, 25 bp, Canis familiaris
acatcaaaccaccacttcggatttg

SEQ ID NO: 38532 - DNA, 25 bp, Canis familiaris
actaaccctcctggtgcgggtatat

SEQ ID NO: 38533 - DNA, 25 bp, Canis familiaris
actccagccctcagtgcagggagtt

SEQ ID NO: 38534 - DNA, 25 bp, Canis familiaris
actccaggcttcaccagatgtgcag

SEQ ID NO: 38535 - DNA, 25 bp, Canis familiaris
actccggcttccacaggagcatatg

SEQ ID NO: 38536 - DNA, 25 bp, Canis familiaris
actccgtcacccacatatgacattt

SEQ ID NO: 38537 - DNA, 25 bp, Canis familiaris
actccaggaccaaatacatgacatg

SEQ ID NO: 38538 - DNA, 25 bp, Canis familiaris
actcgcaggcacacaaacagcacat

SEQ ID NO: 38539 - DNA, 25 bp, Canis familiaris
actccacggcgtctcaggacgtggc

SEQ ID NO: 38540 - DNA, 25 bp, Canis familiaris
actgccgagggtttccgaatctggc

SEQ ID NO: 38541 - DNA, 25 bp, Canis familiaris
actcacggggatttccaagtctcca

SEQ ID NO: 38542 - DNA, 25 bp, Canis familiaris
actcacggggatttccaagtctcca

SEQ ID NO: 38543 - DNA, 25 bp, Canis familiaris
actcacggggatttccaagtctcca

SEQ ID NO: 38544 - DNA, 25 bp, Canis familiaris
actcacggggatttccaagtctcca

SEQ ID NO: 38545 - DNA, 25 bp, Canis familiaris
actccagtagagatcccataccatc

SEQ ID NO: 38546 - DNA, 25 bp, Canis familiaris
actccatgtctgggatgacctcaca

SEQ ID NO: 38547 - DNA, 25 bp, Canis familiaris
actcgtgtgtgtgggcacccacaga

SEQ ID NO: 38548 - DNA, 25 bp, Canis familiaris
actctgcttgctgagggccaggaga

SEQ ID NO: 38549 - DNA, 25 bp, Canis familiaris
actcgatcctgggtcgccaggatgg

SEQ ID NO: 38550 - DNA, 25 bp, Canis familiaris
actcgtgatctccaacgacaagagg

SEQ ID NO: 38551 - DNA, 25 bp, Canis familiaris
actccctgctcacacttaagaggct

SEQ ID NO: 38552 - DNA, 25 bp, Canis familiaris
actgctcccccaaataaagtagctc

SEQ ID NO: 38553 - DNA, 25 bp, Canis familiaris
actgcttccctctgtgcaaagggct

SEQ ID NO: 38554 - DNA, 25 bp, Canis familiaris
actgccccacgatttcgaaggtgca

SEQ ID NO: 38555 - DNA, 25 bp, Canis familiaris
actgcactccagcctgggcgacaga

SEQ ID NO: 38556 - DNA, 25 bp, Canis familiaris
actgcatcatgctgtctggagagac

SEQ ID NO: 38557 - DNA, 25 bp, Canis familiaris
actgcacatgggaccatgacacacc

SEQ ID NO: 38558 - DNA, 25 bp, Canis familiaris
actgcacagcggtccggaagacgac

SEQ ID NO: 38559 - DNA, 25 bp, Canis familiaris
actgcacacggtgtggggaggcctc

SEQ ID NO: 38560 - DNA, 25 bp, Canis familiaris
actcagccctgtgcggaggggcaat

SEQ ID NO: 38561 - DNA, 25 bp, Canis familiaris
actacgccttttggtgtggtcagat

SEQ ID NO: 38562 - DNA, 25 bp, Canis familiaris
actaccctgatgaccacttggaagt

SEQ ID NO: 38563 - DNA, 25 bp, Canis familiaris
actacccgaagcaattgttacattt

SEQ ID NO: 38564 - DNA, 25 bp, Canis familiaris
actaaccgaagttctgtctactgat

SEQ ID NO: 38565 - DNA, 25 bp, Canis familiaris
actgaacccagatttattctcctta

SEQ ID NO: 38566 - DNA, 25 bp, Canis familiaris
actaggcctgagttatcatgtcccc

SEQ ID NO: 38567 - DNA, 25 bp, Canis familiaris
actactgggggattatgtctcaacc

SEQ ID NO: 38568 - DNA, 25 bp, Canis familiaris
actacaggggaacactgtcatccct

SEQ ID NO: 38569 - DNA, 25 bp, Canis familiaris
actagggggagctgttgcacccctc

SEQ ID NO: 38570 - DNA, 25 bp, Canis familiaris
actgaagaggtacagtccagccgcc

SEQ ID NO: 38571 - DNA, 25 bp, Canis familiaris
actattgcagggtgacccacccgca

SEQ ID NO: 38572 - DNA, 25 bp, Canis familiaris
actacatggggctgaatcccgcccc

SEQ ID NO: 38573 - DNA, 25 bp, Canis familiaris
actactggaactgcacaaactggcc

SEQ ID NO: 38574 - DNA, 25 bp, Canis familiaris
actacatcgacagccaggaagtcag

SEQ ID NO: 38575 - DNA, 25 bp, Canis familiaris
actcacacgtcacccagacataaag

SEQ ID NO: 38576 - DNA, 25 bp, Canis familiaris
actcacctgccatccaaaaagaaga

SEQ ID NO: 38577 - DNA, 25 bp, Canis familiaris
tataagccctttgcgaggcggggtc

SEQ ID NO: 38578 - DNA, 25 bp, Canis familiaris
actccacaccaaacaggcagtgagc

SEQ ID NO: 38579 - DNA, 25 bp, Canis familiaris
actacaacgactacggctgctactg

SEQ ID NO: 38580 - DNA, 25 bp, Canis familiaris
actacacactacgcagacgctatga

SEQ ID NO: 38581 - DNA, 25 bp, Canis familiaris
actaacaatgactaaacccagaggt

SEQ ID NO: 38582 - DNA, 25 bp, Canis familiaris
actacgcaatgagaaagccccgatc

SEQ ID NO: 38583 - DNA, 25 bp, Canis familiaris
actaggcaacagagtcagacccaac

SEQ ID NO: 38584 - DNA, 25 bp, Canis familiaris
actagaacttgatgctgaatcccaa

SEQ ID NO: 38585 - DNA, 25 bp, Canis familiaris
actatccacgctaattatacccagg

SEQ ID NO: 38586 - DNA, 25 bp, Canis familiaris
actatcccatcgacacttacagcga

SEQ ID NO: 38587 - DNA, 25 bp, Canis familiaris
actacctcatgaagatcctgaccga

SEQ ID NO: 38588 - DNA, 25 bp, Canis familiaris
actcaacctgcaagaaccacagcgc

SEQ ID NO: 38589 - DNA, 25 bp, Canis familiaris
actcagacctgcagctggaacgcat

SEQ ID NO: 38590 - DNA, 25 bp, Canis familiaris
actctctcctctaagggactgtggt

SEQ ID NO: 38591 - DNA, 25 bp, Canis familiaris
actcagtccatcgaagagtccttgg

SEQ ID NO: 38592 - DNA, 25 bp, Canis familiaris
actcagttggcaggggttcttggtc

SEQ ID NO: 38593 - DNA, 25 bp, Canis familiaris
actatggtggctggagctgtcctgt

SEQ ID NO: 38594 - DNA, 25 bp, Canis familiaris
actagcctggcttgagtgtttaaga

SEQ ID NO: 38595 - DNA, 25 bp, Canis familiaris
actcagctccgctgctgtgtttaaa

SEQ ID NO: 38596 - DNA, 25 bp, Canis familiaris
actagctccagctactttgctacaa

SEQ ID NO: 38597 - DNA, 25 bp, Canis familiaris
acttgacccaaaatctgtcacagaa

SEQ ID NO: 38598 - DNA, 25 bp, Canis familiaris
actatgtccaaaagtctggcccaga

SEQ ID NO: 38599 - DNA, 25 bp, Canis familiaris
actacattcagtctttgacccagat

SEQ ID NO: 38600 - DNA, 25 bp, Canis familiaris
actacttacttgatggcacgcacag

SEQ ID NO: 38601 - DNA, 25 bp, Canis familiaris
actaactagttgtgtgcaatggcga

SEQ ID NO: 38602 - DNA, 25 bp, Canis familiaris
actcgactagtcccacatggacgga

SEQ ID NO: 38603 - DNA, 25 bp, Canis familiaris
actacagccaggctcctggcacacg

SEQ ID NO: 38604 - DNA, 25 bp, Canis familiaris
actacaggaagcccttggcactgat

SEQ ID NO: 38605 - DNA, 25 bp, Canis familiaris
actaagaccttcgtttcacatgtat

SEQ ID NO: 38606 - DNA, 25 bp, Canis familiaris
actaattcactacctttgttgctta

SEQ ID NO: 38607 - DNA, 25 bp, Canis familiaris
actcaagtctcttttccgtttatag

SEQ ID NO: 38608 - DNA, 25 bp, Canis familiaris
actcggctgttacactctttttgaa

SEQ ID NO: 38609 - DNA, 25 bp, Canis familiaris
actccctgttcacaccatgggttat

SEQ ID NO: 38610 - DNA, 25 bp, Canis familiaris
actgcctctgttcagtctctgaggt

SEQ ID NO: 38611 - DNA, 25 bp, Canis familiaris
actcactctgaccagtttctggtgt

SEQ ID NO: 38612 - DNA, 25 bp, Canis familiaris
actaacaactgattttcataatgct

SEQ ID NO: 38613 - DNA, 25 bp, Canis familiaris
actaaccctttgtctgatatgtcat

SEQ ID NO: 38614 - DNA, 25 bp, Canis familiaris
actccatcccttcgaatgtagacag

SEQ ID NO: 38615 - DNA, 25 bp, Canis familiaris
actctcccctattgcagcagaagac

SEQ ID NO: 38616 - DNA, 25 bp, Canis familiaris
actgcccaccgttgcaggcaaagaa

SEQ ID NO: 38617 - DNA, 25 bp, Canis familiaris
actgcccctttccatggaagcaaga

SEQ ID NO: 38618 - DNA, 25 bp, Canis familiaris
actccctcttctggatggcaataat

SEQ ID NO: 38619 - DNA, 25 bp, Canis familiaris
actccgacgtgtatgagaatgagat

SEQ ID NO: 38620 - DNA, 25 bp, Canis familiaris
actgcgtacctgttatgagaagcgt

SEQ ID NO: 38621 - DNA, 25 bp, Canis familiaris
actaacagcctgttatggcaccgtc

SEQ ID NO: 38622 - DNA, 25 bp, Canis familiaris
actccacaactcttgaacaccagaa

SEQ ID NO: 38623 - DNA, 25 bp, Canis familiaris
actaactatctctgatagctctaga

SEQ ID NO: 38624 - DNA, 25 bp, Canis familiaris
actaagttccatgtagtcttcgccg

SEQ ID NO: 38625 - DNA, 25 bp, Canis familiaris
actcggtaccaattagatcatccca

SEQ ID NO: 38626 - DNA, 25 bp, Canis familiaris
actcaggtttagttactgccctcac

SEQ ID NO: 38627 - DNA, 25 bp, Canis familiaris
actccgcactatattacgtatccac

SEQ ID NO: 38628 - DNA, 25 bp, Canis familiaris
actctagctctagttaacgttcagc

SEQ ID NO: 38629 - DNA, 25 bp, Canis familiaris
actgctacagccattaatggttctc

SEQ ID NO: 38630 - DNA, 25 bp, Canis familiaris
actgctacagccatttaatgttctc

SEQ ID NO: 38631 - DNA, 25 bp, Canis familiaris
actgccaggccatgtattttttttt

SEQ ID NO: 38632 - DNA, 25 bp, Canis familiaris
actacaggcctagttattttggcat

SEQ ID NO: 38633 - DNA, 25 bp, Canis familiaris
actccaggacctggtttctgctggc

SEQ ID NO: 38634 - DNA, 25 bp, Canis familiaris
actccacagggcagggtcatgttgc

SEQ ID NO: 38635 - DNA, 25 bp, Canis familiaris
actccactggtgaagaggttgccat

SEQ ID NO: 38636 - DNA, 25 bp, Canis familiaris
actgcccgagtgagcaacttccaat

SEQ ID NO: 38637 - DNA, 25 bp, Canis familiaris
actcccacgtgataatctccagaat

SEQ ID NO: 38638 - DNA, 25 bp, Canis familiaris
actccgccaatatattcccagtaaa

SEQ ID NO: 38639 - DNA, 25 bp, Canis familiaris
actcccccaagtatgcggttgaaat

SEQ ID NO: 38640 - DNA, 25 bp, Canis familiaris
actaccccgcagaaatgcctttaag

SEQ ID NO: 38641 - DNA, 25 bp, Canis familiaris
actcacctctgggaaaccctgtgaa

SEQ ID NO: 38642 - DNA, 25 bp, Canis familiaris
gggcccctggccataattggtaaag

SEQ ID NO: 38643 - DNA, 25 bp, Canis familiaris
gttccccgtgccataattttttatg

SEQ ID NO: 38644 - DNA, 25 bp, Canis familiaris
gtcggtctttccagtttctaattat

SEQ ID NO: 38645 - DNA, 25 bp, Canis familiaris
actttttactgcattctttaattct

SEQ ID NO: 38646 - DNA, 25 bp, Canis familiaris
gacttaaataccagtccttacgact

SEQ ID NO: 38647 - DNA, 25 bp, Canis familiaris
actaaattattcagtctatggactt

SEQ ID NO: 38648 - DNA, 25 bp, Canis familiaris
acacctatactatcagtcttggact

SEQ ID NO: 38649 - DNA, 25 bp, Canis familiaris
actcctgattctgaagtctggtgtt

SEQ ID NO: 38650 - DNA, 25 bp, Canis familiaris
actgcctagctcagaagctctgctt

SEQ ID NO: 38651 - DNA, 25 bp, Canis familiaris
actgctatagcttataactgcttcc

SEQ ID NO: 38652 - DNA, 25 bp, Canis familiaris
actgctatagcttataactgcttcc

SEQ ID NO: 38653 - DNA, 25 bp, Canis familiaris
actcttgcgttgacaaggtccaccc

SEQ ID NO: 38654 - DNA, 25 bp, Canis familiaris
actctagagttccaagatatccgcc

SEQ ID NO: 38655 - DNA, 25 bp, Canis familiaris
actcttgatggtgagagtctccatc

SEQ ID NO: 38656 - DNA, 25 bp, Canis familiaris
actcttatgatgaggcatggccgtg

SEQ ID NO: 38657 - DNA, 25 bp, Canis familiaris
actgctctatgaatctggggcacag

SEQ ID NO: 38658 - DNA, 25 bp, Canis familiaris
actgctgctatgaacatgggtatac

SEQ ID NO: 38659 - DNA, 25 bp, Canis familiaris
actgctgcttgcactagcatcttag

SEQ ID NO: 38660 - DNA, 25 bp, Canis familiaris
actgctctggctcctagcaccatga

SEQ ID NO: 38661 - DNA, 25 bp, Canis familiaris
actcagtggccaccatggcatcaga

SEQ ID NO: 38662 - DNA, 25 bp, Canis familiaris
actcaaatgccaccttctcagtgag

SEQ ID NO: 38663 - DNA, 25 bp, Canis familiaris
actccagaccacttgtgccaaggaa

SEQ ID NO: 38664 - DNA, 25 bp, Canis familiaris
actccagagccagcagtggcacatg

SEQ ID NO: 38665 - DNA, 25 bp, Canis familiaris
actcagccagtagagcatgcgactc

SEQ ID NO: 38666 - DNA, 25 bp, Canis familiaris
actgctggcagtagttattgcacag

SEQ ID NO: 38667 - DNA, 25 bp, Canis familiaris
actgctgtgcagaatgtaatagaag

SEQ ID NO: 38668 - DNA, 25 bp, Canis familiaris
actgctgtcgttactaagagatgtg

SEQ ID NO: 38669 - DNA, 25 bp, Canis familiaris
actgctgctgctattgcttatggct

SEQ ID NO: 38670 - DNA, 25 bp, Canis familiaris
actactgctaagtctgtcagggggt

SEQ ID NO: 38671 - DNA, 25 bp, Canis familiaris
actcctagatagtcccgtgtgggga

SEQ ID NO: 38672 - DNA, 25 bp, Canis familiaris
actcctcaatagccccacgaggtag

SEQ ID NO: 38673 - DNA, 25 bp, Canis familiaris
actcctcgaatgaccaccaagaaag

SEQ ID NO: 38674 - DNA, 25 bp, Canis familiaris
actcctgtctagaccacctagagga

SEQ ID NO: 38675 - DNA, 25 bp, Canis familiaris
actcctacgagcacttcaatcagca

SEQ ID NO: 38676 - DNA, 25 bp, Canis familiaris
actcctacataatcccaacacaaga

SEQ ID NO: 38677 - DNA, 25 bp, Canis familiaris
actcttacaatatcccccatgatgt

SEQ ID NO: 38678 - DNA, 25 bp, Canis familiaris
actctgtacatttgggtcctctaga

SEQ ID NO: 38679 - DNA, 25 bp, Canis familiaris
actgcttacttcactgatttccgtt

SEQ ID NO: 38680 - DNA, 25 bp, Canis familiaris
aatgtaatcccggtcattaacaggg

SEQ ID NO: 38681 - DNA, 25 bp, Canis familiaris
actctgttaccctttctaactggag

SEQ ID NO: 38682 - DNA, 25 bp, Canis familiaris
actctggtcccatttcctagagtgg

SEQ ID NO: 38683 - DNA, 25 bp, Canis familiaris
actctggtcagagatacctggcctg

SEQ ID NO: 38684 - DNA, 25 bp, Canis familiaris
actctggcttgggcacacttaggag

SEQ ID NO: 38685 - DNA, 25 bp, Canis familiaris
actcggcctggagcagcttgggccg

SEQ ID NO: 38686 - DNA, 25 bp, Canis familiaris
actcggcgtcgggagttgaggctcc

SEQ ID NO: 38687 - DNA, 25 bp, Canis familiaris
actccagcgtcttcaattttgtcta

SEQ ID NO: 38688 - DNA, 25 bp, Canis familiaris
actgctctgcaggcttaacttttta

SEQ ID NO: 38689 - DNA, 25 bp, Canis familiaris
actactgcacaattaccttttcata

SEQ ID NO: 38690 - DNA, 25 bp, Canis familiaris
actacactgaattaccttcctttct

SEQ ID NO: 38691 - DNA, 25 bp, Canis familiaris
actccattaaacaatttccttctct

SEQ ID NO: 38692 - DNA, 25 bp, Canis familiaris
ctttaaaataaatctctctctttct

SEQ ID NO: 38693 - DNA, 25 bp, Canis familiaris
cttacaaaacccaaactcattcatt

SEQ ID NO: 38694 - DNA, 25 bp, Canis familiaris
cgtccataaagctctcaaattcgtt

SEQ ID NO: 38695 - DNA, 25 bp, Canis familiaris
cagtcctgaaaataaattgttgtgt

SEQ ID NO: 38696 - DNA, 25 bp, Canis familiaris
actcctaaactgatgaaggttgtaa

SEQ ID NO: 38697 - DNA, 25 bp, Canis familiaris
actcctgaactgatggaagtttgta

SEQ ID NO: 38698 - DNA, 25 bp, Canis familiaris
actcctcctctggctaaagttactt

SEQ ID NO: 38699 - DNA, 25 bp, Canis familiaris
actgcctctgttttattatgtgttc

SEQ ID NO: 38700 - DNA, 25 bp, Canis familiaris
actgcgctttatctaaatctctgcc

SEQ ID NO: 38701 - DNA, 25 bp, Canis familiaris
actcctgtatgacatcagagagcct

SEQ ID NO: 38702 - DNA, 25 bp, Canis familiaris
acttctgtcatggacccaacactat

SEQ ID NO: 38703 - DNA, 25 bp, Canis familiaris
acacttgagattgcccaacctacag

SEQ ID NO: 38704 - DNA, 25 bp, Canis familiaris
acagcgggattcaccttacaataga

SEQ ID NO: 38705 - DNA, 25 bp, Canis familiaris
acaggtagaccctctaactatcaca

SEQ ID NO: 38706 - DNA, 25 bp, Canis familiaris
aaagtttaccatcgtaactatacat

SEQ ID NO: 38707 - DNA, 25 bp, Canis familiaris
aaaatttcaaatcactactacccag

SEQ ID NO: 38708 - DNA, 25 bp, Canis familiaris
aaaatttcaaatcactactacccag

SEQ ID NO: 38709 - DNA, 25 bp, Canis familiaris
aaaatttcaaatcactactacccag

SEQ ID NO: 38710 - DNA, 25 bp, Canis familiaris
gcaacttttaaacaaacatggacct

SEQ ID NO: 38711 - DNA, 25 bp, Canis familiaris
ctccttttccaacacattattgccc

SEQ ID NO: 38712 - DNA, 25 bp, Canis familiaris
actccttttccaacacattattgcc

SEQ ID NO: 38713 - DNA, 25 bp, Canis familiaris
actcctacgtctaaccttattgtga

SEQ ID NO: 38714 - DNA, 25 bp, Canis familiaris
actcacaacttctttccctgaagga

SEQ ID NO: 38715 - DNA, 25 bp, Canis familiaris
actacaccttcactctgggatatag

SEQ ID NO: 38716 - DNA, 25 bp, Canis familiaris
actacagcaagtacgccggtatcac

SEQ ID NO: 38717 - DNA, 25 bp, Canis familiaris
actccacacagtgccttggcaacaa

SEQ ID NO: 38718 - DNA, 25 bp, Canis familiaris
acaggaacatttccttgggccgagg

SEQ ID NO: 38719 - DNA, 25 bp, Canis familiaris
actaaaatctttggtggctcactca

SEQ ID NO: 38720 - DNA, 25 bp, Canis familiaris
actatagatcctttaggggcaccat

SEQ ID NO: 38721 - DNA, 25 bp, Canis familiaris
acttagcatttctagagggcccgag

SEQ ID NO: 38722 - DNA, 25 bp, Canis familiaris
cacttgtgttagcctagggatcctg

SEQ ID NO: 38723 - DNA, 25 bp, Canis familiaris
acttgtttgtgcttggaggtacttt

SEQ ID NO: 38724 - DNA, 25 bp, Canis familiaris
actctgggtgtgcttgggagacctt

SEQ ID NO: 38725 - DNA, 25 bp, Canis familiaris
actgcgtcagtgtgtgtggggaggc

SEQ ID NO: 38726 - DNA, 25 bp, Canis familiaris
acatctgaacatgtgttagggagtc

SEQ ID NO: 38727 - DNA, 25 bp, Canis familiaris
acttgaacatcatgactaaaaggtc

SEQ ID NO: 38728 - DNA, 25 bp, Canis familiaris
acttgacgtctcccacagaaaatgt

SEQ ID NO: 38729 - DNA, 25 bp, Canis familiaris
actcccatgtccacgcaaaaatatt

SEQ ID NO: 38730 - DNA, 25 bp, Canis familiaris
actccagagtccatccaatactaga

SEQ ID NO: 38731 - DNA, 25 bp, Canis familiaris
actccaagttctactttgcctgggt

SEQ ID NO: 38732 - DNA, 25 bp, Canis familiaris
actccaaattccctttgatgctgtc

SEQ ID NO: 38733 - DNA, 25 bp, Canis familiaris
actccaaaacaacctatgtgcatgt

SEQ ID NO: 38734 - DNA, 25 bp, Canis familiaris
actctagaggatcagactttctctg

SEQ ID NO: 38735 - DNA, 25 bp, Canis familiaris
actgcgaggagtgagaccattctac

SEQ ID NO: 38736 - DNA, 25 bp, Canis familiaris
actgccatctatgaagcctctttag

SEQ ID NO: 38737 - DNA, 25 bp, Canis familiaris
actgcgagctgcaaaagtctctgct

SEQ ID NO: 38738 - DNA, 25 bp, Canis familiaris
actgcgtgtgtaaactgcttatcgg

SEQ ID NO: 38739 - DNA, 25 bp, Canis familiaris
actgccctgaagaagtgctttcgga

SEQ ID NO: 38740 - DNA, 25 bp, Canis familiaris
actcccgaggtgtcagtgttctggg

SEQ ID NO: 38741 - DNA, 25 bp, Canis familiaris
actcccagagtcatcgtgttaagct

SEQ ID NO: 38742 - DNA, 25 bp, Canis familiaris
actcctgagaacctctgttctacct

SEQ ID NO: 38743 - DNA, 25 bp, Canis familiaris
actcatccttgagctcttgaggacc

SEQ ID NO: 38744 - DNA, 25 bp, Canis familiaris
actacacctaccattgaagaagctg

SEQ ID NO: 38745 - DNA, 25 bp, Canis familiaris
actaccgggccgatgatgccaacgt

SEQ ID NO: 38746 - DNA, 25 bp, Canis familiaris
actacctcggccatgtcatggtaaa

SEQ ID NO: 38747 - DNA, 25 bp, Canis familiaris
actccttcgcgtccttaagtatgaa

SEQ ID NO: 38748 - DNA, 25 bp, Canis familiaris
acttgttcaattccctaagtaccag

SEQ ID NO: 38749 - DNA, 25 bp, Canis familiaris
acttgtctcacatccttgttttaag

SEQ ID NO: 38750 - DNA, 25 bp, Canis familiaris
actcttcatccccactaagtttaag

SEQ ID NO: 38751 - DNA, 25 bp, Canis familiaris
actctctcaccctgtaaaatcgaac

SEQ ID NO: 38752 - DNA, 25 bp, Canis familiaris
actacagcccactgctaaacgcaga

SEQ ID NO: 38753 - DNA, 25 bp, Canis familiaris
actacgtgcccatcttcaaggagat

SEQ ID NO: 38754 - DNA, 25 bp, Canis familiaris
actagcccactttcttcagggaatc

SEQ ID NO: 38755 - DNA, 25 bp, Canis familiaris
actatggcccagtgctttggaaatc

SEQ ID NO: 38756 - DNA, 25 bp, Canis familiaris
acttggccagccgatgtttacaaac

SEQ ID NO: 38757 - DNA, 25 bp, Canis familiaris
actatagaaccagttggtagcacaa

SEQ ID NO: 38758 - DNA, 25 bp, Canis familiaris
actttgcttccggtggcatggacat

SEQ ID NO: 38759 - DNA, 25 bp, Canis familiaris
acttttcttgtgtgtgataaaccca

SEQ ID NO: 38760 - DNA, 25 bp, Canis familiaris
ctctttttctttatcaagggccctg

SEQ ID NO: 38761 - DNA, 25 bp, Canis familiaris
ccgtttttgcccactatgggaggat

SEQ ID NO: 38762 - DNA, 25 bp, Canis familiaris
cacgtttttgccacttatgggagga

SEQ ID NO: 38763 - DNA, 25 bp, Canis familiaris
cactttttcccatctgaaggggaag

SEQ ID NO: 38764 - DNA, 25 bp, Canis familiaris
actttttcccactctattgtcaaag

SEQ ID NO: 38765 - DNA, 25 bp, Canis familiaris
actttctcctcatcggtatggtaaa

SEQ ID NO: 38766 - DNA, 25 bp, Canis familiaris
actctcctcccaaggctgtagaata

SEQ ID NO: 38767 - DNA, 25 bp, Canis familiaris
actccctggctggggcttggaatag

SEQ ID NO: 38768 - DNA, 25 bp, Canis familiaris
actccctgtgtgaggcctgtagagg

SEQ ID NO: 38769 - DNA, 25 bp, Canis familiaris
actcccttccatgcagcaggtagag

SEQ ID NO: 38770 - DNA, 25 bp, Canis familiaris
actcactcttccctctgaggatact

SEQ ID NO: 38771 - DNA, 25 bp, Canis familiaris
actacatgggcttagctgaagaact

SEQ ID NO: 38772 - DNA, 25 bp, Canis familiaris
actacatgggcttggccgaagagct

SEQ ID NO: 38773 - DNA, 25 bp, Canis familiaris
actacggggtgggcgagagcttcac

SEQ ID NO: 38774 - DNA, 25 bp, Canis familiaris
acttttgtggggatgacctggccgt

SEQ ID NO: 38775 - DNA, 25 bp, Canis familiaris
actttctgaggtggtgacatcccgc

SEQ ID NO: 38776 - DNA, 25 bp, Canis familiaris
actttctgagccggagactcgcaat

SEQ ID NO: 38777 - DNA, 25 bp, Canis familiaris
actcttctggcagtgctatatccct

SEQ ID NO: 38778 - DNA, 25 bp, Canis familiaris
actctgtcagactacaatatccaga

SEQ ID NO: 38779 - DNA, 25 bp, Canis familiaris
actcttcgcctgtcaaagccagatg

SEQ ID NO: 38780 - DNA, 25 bp, Canis familiaris
acttttgccgtccgcaaagtgccaa

SEQ ID NO: 38781 - DNA, 25 bp, Canis familiaris
acttctacctgggccaagtggccat

SEQ ID NO: 38782 - DNA, 25 bp, Canis familiaris
actacagaagcggagctcacgggcc

SEQ ID NO: 38783 - DNA, 25 bp, Canis familiaris
actacagaagcggagctcacgggcc

SEQ ID NO: 38784 - DNA, 25 bp, Canis familiaris
actagagcacgagtcatctccgatg

SEQ ID NO: 38785 - DNA, 25 bp, Canis familiaris
actcaggaccaattgcgtctgatgt

SEQ ID NO: 38786 - DNA, 25 bp, Canis familiaris
actcgatgcaggtactcagttggta

SEQ ID NO: 38787 - DNA, 25 bp, Canis familiaris
actctagagagcaagcacggatcgt

SEQ ID NO: 38788 - DNA, 25 bp, Canis familiaris
actcctaggtcctgtgtgatctgct

SEQ ID NO: 38789 - DNA, 25 bp, Canis familiaris
actcctctgtgtgctgatgggttct

SEQ ID NO: 38790 - DNA, 25 bp, Canis familiaris
actcatcctgtatctggtatgtcta

SEQ ID NO: 38791 - DNA, 25 bp, Canis familiaris
actctctgcgaatgtgacataacta

SEQ ID NO: 38792 - DNA, 25 bp, Canis familiaris
actcctgtggatttacatcagatgc

SEQ ID NO: 38793 - DNA, 25 bp, Canis familiaris
actccttgtagactcaactgtgctt

SEQ ID NO: 38794 - DNA, 25 bp, Canis familiaris
actctcagtgcattagaccttggct

SEQ ID NO: 38795 - DNA, 25 bp, Canis familiaris
actcaggatgcaaaggcctgctcct

SEQ ID NO: 38796 - DNA, 25 bp, Canis familiaris
actctggtgcagacacacttgcttc

SEQ ID NO: 38797 - DNA, 25 bp, Canis familiaris
actcgggaccaacatgttctgaact

SEQ ID NO: 38798 - DNA, 25 bp, Canis familiaris
actagggcctaaaatctctctgacc

SEQ ID NO: 38799 - DNA, 25 bp, Canis familiaris
actccaggagtactttctttgcaac

SEQ ID NO: 38800 - DNA, 25 bp, Canis familiaris
acttctgggtaatcacattctagag

SEQ ID NO: 38801 - DNA, 25 bp, Canis familiaris
acttcagagctttactccttaacag

SEQ ID NO: 38802 - DNA, 25 bp, Canis familiaris
acttcatggcagatagcctctcctc

SEQ ID NO: 38803 - DNA, 25 bp, Canis familiaris
actatgcccgagggcactacaccat

SEQ ID NO: 38804 - DNA, 25 bp, Canis familiaris
actcaccctgaggacatgaaactct

SEQ ID NO: 38805 - DNA, 25 bp, Canis familiaris
actcacccagtgaattggagcattt

SEQ ID NO: 38806 - DNA, 25 bp, Canis familiaris
actcccgattataatgccagcacag

SEQ ID NO: 38807 - DNA, 25 bp, Canis familiaris
actctcctggttccatgaacacggt

SEQ ID NO: 38808 - DNA, 25 bp, Canis familiaris
actcttctgaacactgaacttggcc

SEQ ID NO: 38809 - DNA, 25 bp, Canis familiaris
actcatttgcaactatcatgaagtt

SEQ ID NO: 38810 - DNA, 25 bp, Canis familiaris
actattccattctattgaggtgtac

SEQ ID NO: 38811 - DNA, 25 bp, Canis familiaris
actaattcacacattggcggatcac

SEQ ID NO: 38812 - DNA, 25 bp, Canis familiaris
actccattttcctggttatgcacca

SEQ ID NO: 38813 - DNA, 25 bp, Canis familiaris
actactttacactggttctaatcta

SEQ ID NO: 38814 - DNA, 25 bp, Canis familiaris
actccggaagactggatttatgtcc

SEQ ID NO: 38815 - DNA, 25 bp, Canis familiaris
actcccgaaagatgttttagctgcc

SEQ ID NO: 38816 - DNA, 25 bp, Canis familiaris
actctccacaaccttttattacatc

SEQ ID NO: 38817 - DNA, 25 bp, Canis familiaris
actcttgccatagatttctcggacc

SEQ ID NO: 38818 - DNA, 25 bp, Canis familiaris
actctgtgaacagctgtctgggaag

SEQ ID NO: 38819 - DNA, 25 bp, Canis familiaris
actctgcgcaagtccttgctggtgc

SEQ ID NO: 38820 - DNA, 25 bp, Canis familiaris
actcatagcaagtccatacagggcc

SEQ ID NO: 38821 - DNA, 25 bp, Canis familiaris
actccagcgagacctacagggaatg

SEQ ID NO: 38822 - DNA, 25 bp, Canis familiaris
actctcatccatcactagcgggaag

SEQ ID NO: 38823 - DNA, 25 bp, Canis familiaris
acttcaagattaccccaggaatgcc

SEQ ID NO: 38824 - DNA, 25 bp, Canis familiaris
acttcaaggcacgcctcaagttccc

SEQ ID NO: 38825 - DNA, 25 bp, Canis familiaris
acttcacaggccgggacctgatcgg

SEQ ID NO: 38826 - DNA, 25 bp, Canis familiaris
acttaattgcgcccaaccatgtggt

SEQ ID NO: 38827 - DNA, 25 bp, Canis familiaris
acttccaaggtccaatgggatggtc

SEQ ID NO: 38828 - DNA, 25 bp, Canis familiaris
actctggctacacctgcaatgggtg

SEQ ID NO: 38829 - DNA, 25 bp, Canis familiaris
actctggtcaggcatcatggggctg

SEQ ID NO: 38830 - DNA, 25 bp, Canis familiaris
actcgttatgtgatcattggacttg

SEQ ID NO: 38831 - DNA, 25 bp, Canis familiaris
actcagtgttgtattttgccgtgtc

SEQ ID NO: 38832 - DNA, 25 bp, Canis familiaris
actaaagcatgtattttattcattc

SEQ ID NO: 38833 - DNA, 25 bp, Canis familiaris
actagggcagccacttctatttaat

SEQ ID NO: 38834 - DNA, 25 bp, Canis familiaris
actacgtgaaagaaccttttagctg

SEQ ID NO: 38835 - DNA, 25 bp, Canis familiaris
gagtgattggttctacgttttactg

SEQ ID NO: 38836 - DNA, 25 bp, Canis familiaris
gagtgattggttctacgttttactg

SEQ ID NO: 38837 - DNA, 25 bp, Canis familiaris
gagtgattggttctacgttttactg

SEQ ID NO: 38838 - DNA, 25 bp, Canis familiaris
gagtgattggttctacgttttactg

SEQ ID NO: 38839 - DNA, 25 bp, Canis familiaris
gagtgattggttctacgttttactg

SEQ ID NO: 38840 - DNA, 25 bp, Canis familiaris
gagtgattggttctacgttttactg

SEQ ID NO: 38841 - DNA, 25 bp, Canis familiaris
gagtgattggttctacgttttactg

SEQ ID NO: 38842 - DNA, 25 bp, Canis familiaris
actctgtagctgtgtaagttttgac

SEQ ID NO: 38843 - DNA, 25 bp, Canis familiaris
actctggagttttctatgttgtctt

SEQ ID NO: 38844 - DNA, 25 bp, Canis familiaris
actctgtggttcaattatcaacttt

SEQ ID NO: 38845 - DNA, 25 bp, Canis familiaris
actctccgtctcatgtcatgaacag

SEQ ID NO: 38846 - DNA, 25 bp, Canis familiaris
actcatgaccacagtccatgccatc

SEQ ID NO: 38847 - DNA, 25 bp, Canis familiaris
actctgtccagggtgcacagtgtcc

SEQ ID NO: 38848 - DNA, 25 bp, Canis familiaris
actcgatccaggaccttggtcagcc

SEQ ID NO: 38849 - DNA, 25 bp, Canis familiaris
actcctccagcgacacattatgtag

SEQ ID NO: 38850 - DNA, 25 bp, Canis familiaris
actccctccgtatgatgatatatga

SEQ ID NO: 38851 - DNA, 25 bp, Canis familiaris
actcctcctctgtaaggtcactgaa

SEQ ID NO: 38852 - DNA, 25 bp, Canis familiaris
actcctccctggaaaggaagataca

SEQ ID NO: 38853 - DNA, 25 bp, Canis familiaris
actcccaaccagaacaggcaaggaa

SEQ ID NO: 38854 - DNA, 25 bp, Canis familiaris
actcccacatcgaaacaccaaagaa

SEQ ID NO: 38855 - DNA, 25 bp, Canis familiaris
actcgttcatgcataacttgaaaga

SEQ ID NO: 38856 - DNA, 25 bp, Canis familiaris
actctgttccatacccttgtataaa

SEQ ID NO: 38857 - DNA, 25 bp, Canis familiaris
actctttccccagctggattagtgt

SEQ ID NO: 38858 - DNA, 25 bp, Canis familiaris
actcgatatccctacttacattagg

SEQ ID NO: 38859 - DNA, 25 bp, Canis familiaris
acatttctgaagtacttaattaggc

SEQ ID NO: 38860 - DNA, 25 bp, Canis familiaris
acttttaaggccgtgacattcagga

SEQ ID NO: 38861 - DNA, 25 bp, Canis familiaris
actctttaagtaggatacaggcttg

SEQ ID NO: 38862 - DNA, 25 bp, Canis familiaris
acttttgacgctggtctacaggcct

SEQ ID NO: 38863 - DNA, 25 bp, Canis familiaris
acttcttcaagatggtggagggctt

SEQ ID NO: 38864 - DNA, 25 bp, Canis familiaris
actattctccagaagaaggtggggc

SEQ ID NO: 38865 - DNA, 25 bp, Canis familiaris
actatccagccaccggaggagggag

SEQ ID NO: 38866 - DNA, 25 bp, Canis familiaris
acttccagccaatgggatgggggaa

SEQ ID NO: 38867 - DNA, 25 bp, Canis familiaris
actcccagaatatgagaggtaggcc

SEQ ID NO: 38868 - DNA, 25 bp, Canis familiaris
actcccagaatatgaagttcattct

SEQ ID NO: 38869 - DNA, 25 bp, Canis familiaris
actcccagtatgtgcacttttgttt

SEQ ID NO: 38870 - DNA, 25 bp, Canis familiaris
actatctcgtagttcaccttaggta

SEQ ID NO: 38871 - DNA, 25 bp, Canis familiaris
actaggcacgggtcaccgtacagct

SEQ ID NO: 38872 - DNA, 25 bp, Canis familiaris
acatcaagaagggccaccccaagta

SEQ ID NO: 38873 - DNA, 25 bp, Canis familiaris
aataaaatcggcacccagccactat

SEQ ID NO: 38874 - DNA, 25 bp, Canis familiaris
gagtaaactcgtcacccacgaggtc

SEQ ID NO: 38875 - DNA, 25 bp, Canis familiaris
actaaaccatgtcacccaaggtgac

SEQ ID NO: 38876 - DNA, 25 bp, Canis familiaris
actcagatacactggaccccgtatc

SEQ ID NO: 38877 - DNA, 25 bp, Canis familiaris
actcaatccggggaccgtgggatca

SEQ ID NO: 38878 - DNA, 25 bp, Canis familiaris
actaactgtggggactcgagggcct

SEQ ID NO: 38879 - DNA, 25 bp, Canis familiaris
actacatcgtggaggctggggcctc

SEQ ID NO: 38880 - DNA, 25 bp, Canis familiaris
actacgagttgatctcggccagcca

SEQ ID NO: 38881 - DNA, 25 bp, Canis familiaris
actacgagtagactactgagcccac

SEQ ID NO: 38882 - DNA, 25 bp, Canis familiaris
acatccggcaagacttctaacagac

SEQ ID NO: 38883 - DNA, 25 bp, Canis familiaris
actacggcataaatgtctaccagtc

SEQ ID NO: 38884 - DNA, 25 bp, Canis familiaris
actacagtgttgatttaccattccc

SEQ ID NO: 38885 - DNA, 25 bp, Canis familiaris
actaacgtttttaagtcactcagtg

SEQ ID NO: 38886 - DNA, 25 bp, Canis familiaris
actaattttttcactgctgaccagt

SEQ ID NO: 38887 - DNA, 25 bp, Canis familiaris
acataaaatttactactgctggcaa

SEQ ID NO: 38888 - DNA, 25 bp, Canis familiaris
acataattattgaactaactacata

SEQ ID NO: 38889 - DNA, 25 bp, Canis familiaris
actctattgtgttcaccaagctcac

SEQ ID NO: 38890 - DNA, 25 bp, Canis familiaris
actcatttcagttcactcaaccaga

SEQ ID NO: 38891 - DNA, 25 bp, Canis familiaris
actcattttgtccctcaggtcagag

SEQ ID NO: 38892 - DNA, 25 bp, Canis familiaris
actctcttcttctaccatgtaagga

SEQ ID NO: 38893 - DNA, 25 bp, Canis familiaris
actcttgaacctcctctcataagga

SEQ ID NO: 38894 - DNA, 25 bp, Canis familiaris
actctgtagtttccttcctaggact

SEQ ID NO: 38895 - DNA, 25 bp, Canis familiaris
actctggaggtcccttagtctgtaa

SEQ ID NO: 38896 - DNA, 25 bp, Canis familiaris
actctggtggtactttggctgttac

SEQ ID NO: 38897 - DNA, 25 bp, Canis familiaris
actctggctggattttaaccacaac

SEQ ID NO: 38898 - DNA, 25 bp, Canis familiaris
actctggggcatgttcacaatacgt

SEQ ID NO: 38899 - DNA, 25 bp, Canis familiaris
actctagaggatcttcacatctatt

SEQ ID NO: 38900 - DNA, 25 bp, Canis familiaris
actagacaggtccttgacccagctg

SEQ ID NO: 38901 - DNA, 25 bp, Canis familiaris
actctgaagactgcaggagcccgct

SEQ ID NO: 38902 - DNA, 25 bp, Canis familiaris
actctgaagactgcaggagcccgct

SEQ ID NO: 38903 - DNA, 25 bp, Canis familiaris
actctgaacacagcgtggacatcct

SEQ ID NO: 38904 - DNA, 25 bp, Canis familiaris
actcttcaccaggcctgagattgag

SEQ ID NO: 38905 - DNA, 25 bp, Canis familiaris
actctctcccctggcaagaatgggg

SEQ ID NO: 38906 - DNA, 25 bp, Canis familiaris
actctctcccctcaggagtactgag

SEQ ID NO: 38907 - DNA, 25 bp, Canis familiaris
actttcccttcaacgattatctcag

SEQ ID NO: 38908 - DNA, 25 bp, Canis familiaris
actctttaattctgtgttctctatg

SEQ ID NO: 38909 - DNA, 25 bp, Canis familiaris
actctacttgacaatcgtgttggtt

SEQ ID NO: 38910 - DNA, 25 bp, Canis familiaris
actcccttgaagatgtttgttgaac

SEQ ID NO: 38911 - DNA, 25 bp, Canis familiaris
actacctccactattttatctaaca

SEQ ID NO: 38912 - DNA, 25 bp, Canis familiaris
actagacttcctatttcagttatgt

SEQ ID NO: 38913 - DNA, 25 bp, Canis familiaris
actctgcctgagcctttttatttat

SEQ ID NO: 38914 - DNA, 25 bp, Canis familiaris
actttctgacgcttattttccttag

SEQ ID NO: 38915 - DNA, 25 bp, Canis familiaris
actactgtaaaattttgtcactatt

SEQ ID NO: 38916 - DNA, 25 bp, Canis familiaris
actactcaggaggaacattggcttt

SEQ ID NO: 38917 - DNA, 25 bp, Canis familiaris
actttcgtggtatcagatggattct

SEQ ID NO: 38918 - DNA, 25 bp, Canis familiaris
acttttgcaggttacacagtacttg

SEQ ID NO: 38919 - DNA, 25 bp, Canis familiaris
acttggtggacttcatcacgggctt

SEQ ID NO: 38920 - DNA, 25 bp, Canis familiaris
actcggctgtattaatcacgcgatg

SEQ ID NO: 38921 - DNA, 25 bp, Canis familiaris
actcgagttcagtaacagcgcagat

SEQ ID NO: 38922 - DNA, 25 bp, Canis familiaris
actctgtggtctggaccaggcagtt

SEQ ID NO: 38923 - DNA, 25 bp, Canis familiaris
actctctgtgatcggagcctgggtt

SEQ ID NO: 38924 - DNA, 25 bp, Canis familiaris
actcttttctggcctgccaagtttt

SEQ ID NO: 38925 - DNA, 25 bp, Canis familiaris
actcttcactgttttccaagggata

SEQ ID NO: 38926 - DNA, 25 bp, Canis familiaris
actttcactgtttcctcaaggtagt

SEQ ID NO: 38927 - DNA, 25 bp, Canis familiaris
actcttagtctgatgcccaatctgt

SEQ ID NO: 38928 - DNA, 25 bp, Canis familiaris
actatcgatgactatctgaccaacc

SEQ ID NO: 38929 - DNA, 25 bp, Canis familiaris
actatatgaggctctgacccacgta

SEQ ID NO: 38930 - DNA, 25 bp, Canis familiaris
actattagttagaccgctccgtatt

SEQ ID NO: 38931 - DNA, 25 bp, Canis familiaris
actacaagacattgtccctgcctgg

SEQ ID NO: 38932 - DNA, 25 bp, Canis familiaris
actagaggacggacctcgtcgagga

SEQ ID NO: 38933 - DNA, 25 bp, Canis familiaris
actaggtcaagggcctgtgccgggt

SEQ ID NO: 38934 - DNA, 25 bp, Canis familiaris
actaggtaactttcagtgtcagtgg

SEQ ID NO: 38935 - DNA, 25 bp, Canis familiaris
actagcgtggccaagatcgtgtctg

SEQ ID NO: 38936 - DNA, 25 bp, Canis familiaris
actacgtgcccagtgatcaggatct

SEQ ID NO: 38937 - DNA, 25 bp, Canis familiaris
actactgtcatttatgaaggatctg

SEQ ID NO: 38938 - DNA, 25 bp, Canis familiaris
actagatgtctttaggcagcagctt

SEQ ID NO: 38939 - DNA, 25 bp, Canis familiaris
actagctatttatggcatgctgcca

SEQ ID NO: 38940 - DNA, 25 bp, Canis familiaris
actagtctatgtgggactgtacaca

SEQ ID NO: 38941 - DNA, 25 bp, Canis familiaris
actagattttgccaactgccaatca

SEQ ID NO: 38942 - DNA, 25 bp, Canis familiaris
actatgattcctcctagtgcacaac

SEQ ID NO: 38943 - DNA, 25 bp, Canis familiaris
actctgctttgcagctattgcacta

SEQ ID NO: 38944 - DNA, 25 bp, Canis familiaris
actctgctgtccagttctcaaggac

SEQ ID NO: 38945 - DNA, 25 bp, Canis familiaris
acttttcccttagccaggcacagaa

SEQ ID NO: 38946 - DNA, 25 bp, Canis familiaris
acttttcccacatccagggtcagaa

SEQ ID NO: 38947 - DNA, 25 bp, Canis familiaris
cacttttctccctgggggtgagtca

SEQ ID NO: 38948 - DNA, 25 bp, Canis familiaris
actctttcaccctggtgtgggtgta

SEQ ID NO: 38949 - DNA, 25 bp, Canis familiaris
actctctcgacctcggggtgaggta

SEQ ID NO: 38950 - DNA, 25 bp, Canis familiaris
actctcctactcacggggtgatggt

SEQ ID NO: 38951 - DNA, 25 bp, Canis familiaris
actctccaccgggcagggaatgggt

SEQ ID NO: 38952 - DNA, 25 bp, Canis familiaris
actctgaccccgacagtagacaggg

SEQ ID NO: 38953 - DNA, 25 bp, Canis familiaris
actcttcccaggagtatgagcgccc

SEQ ID NO: 38954 - DNA, 25 bp, Canis familiaris
actcttaccaggagctgctacaggc

SEQ ID NO: 38955 - DNA, 25 bp, Canis familiaris
actcattaccagtgtgtgccagatg

SEQ ID NO: 38956 - DNA, 25 bp, Canis familiaris
actactactatggggtgcctgggtg

SEQ ID NO: 38957 - DNA, 25 bp, Canis familiaris
acttctattacgagtgacattggta

SEQ ID NO: 38958 - DNA, 25 bp, Canis familiaris
actctctgataaagacctaatagag

SEQ ID NO: 38959 - DNA, 25 bp, Canis familiaris
actcttacacattcacctacttgaa

SEQ ID NO: 38960 - DNA, 25 bp, Canis familiaris
actcttctgacatcaattttctcac

SEQ ID NO: 38961 - DNA, 25 bp, Canis familiaris
actttcaaaggccattttccacagc

SEQ ID NO: 38962 - DNA, 25 bp, Canis familiaris
actttgattgagcccattttgccct

SEQ ID NO: 38963 - DNA, 25 bp, Canis familiaris
actattacttccattggtgcccttt

SEQ ID NO: 38964 - DNA, 25 bp, Canis familiaris
actaatgacttggtttatctccctt

SEQ ID NO: 38965 - DNA, 25 bp, Canis familiaris
actacgactctttgtgttataccca

SEQ ID NO: 38966 - DNA, 25 bp, Canis familiaris
actacacaggctgcggtatcaaccc

SEQ ID NO: 38967 - DNA, 25 bp, Canis familiaris
actaccgaatccatggtgatccctc

SEQ ID NO: 38968 - DNA, 25 bp, Canis familiaris
actcgccagagtcaggaggatccac

SEQ ID NO: 38969 - DNA, 25 bp, Canis familiaris
actcagcaaagtctggcgtgatcaa

SEQ ID NO: 38970 - DNA, 25 bp, Canis familiaris
actcaacaatttagacctgcaaaaa

SEQ ID NO: 38971 - DNA, 25 bp, Canis familiaris
actacaaaattaacccatacaagca

SEQ ID NO: 38972 - DNA, 25 bp, Canis familiaris
actaaagcaaccactctatccagaa

SEQ ID NO: 38973 - DNA, 25 bp, Canis familiaris
actaccgaacctatatgattgcaga

SEQ ID NO: 38974 - DNA, 25 bp, Canis familiaris
actatcctaacctctgatgggggct

SEQ ID NO: 38975 - DNA, 25 bp, Canis familiaris
actcacctaccgtggaggaggctgc

SEQ ID NO: 38976 - DNA, 25 bp, Canis familiaris
actatccccacgtgtcatgaacgtt

SEQ ID NO: 38977 - DNA, 25 bp, Canis familiaris
aaatccgccaaacaatataccttca

SEQ ID NO: 38978 - DNA, 25 bp, Canis familiaris
actttcccaaaatagcaatcagcct

SEQ ID NO: 38979 - DNA, 25 bp, Canis familiaris
actatatcctcccggcaagaaacct

SEQ ID NO: 38980 - DNA, 25 bp, Canis familiaris
actttctgtgccctacaaataccgt

SEQ ID NO: 38981 - DNA, 25 bp, Canis familiaris
actcttcaactctttcaaacacaca

SEQ ID NO: 38982 - DNA, 25 bp, Canis familiaris
actctaatcccattggccaaatcca

SEQ ID NO: 38983 - DNA, 25 bp, Canis familiaris
actcttacataattaccagattcta

SEQ ID NO: 38984 - DNA, 25 bp, Canis familiaris
actctccacagcgtataacaaattg

SEQ ID NO: 38985 - DNA, 25 bp, Canis familiaris
actctctccaccttatgacacaggt

SEQ ID NO: 38986 - DNA, 25 bp, Canis familiaris
actctccccacattgatcatatgct

SEQ ID NO: 38987 - DNA, 25 bp, Canis familiaris
actctacccgtagtgtatgttaagc

SEQ ID NO: 38988 - DNA, 25 bp, Canis familiaris
acttcaccctgattcttttcatagg

SEQ ID NO: 38989 - DNA, 25 bp, Canis familiaris
actctacttctgttgtctgttatgt

SEQ ID NO: 38990 - DNA, 25 bp, Canis familiaris
actctgagctacttgtcgattttgt

SEQ ID NO: 38991 - DNA, 25 bp, Canis familiaris
actctacttttcacattctctggtg

SEQ ID NO: 38992 - DNA, 25 bp, Canis familiaris
actctcatcttttataattccattt

SEQ ID NO: 38993 - DNA, 25 bp, Canis familiaris
acttatcttggtatcttttttatat

SEQ ID NO: 38994 - DNA, 25 bp, Canis familiaris
acttcctcgagtcattttatttttg

SEQ ID NO: 38995 - DNA, 25 bp, Canis familiaris
acttgcttctggtgttttgtttttg

SEQ ID NO: 38996 - DNA, 25 bp, Canis familiaris
actctccttatctggttttttccag

SEQ ID NO: 38997 - DNA, 25 bp, Canis familiaris
actcggtctatctaggttcctatac

SEQ ID NO: 38998 - DNA, 25 bp, Canis familiaris
acttggtcatgggacgtatccctcc

SEQ ID NO: 38999 - DNA, 25 bp, Canis familiaris
actatgtgtcattgagacccatgtc

SEQ ID NO: 39000 - DNA, 25 bp, Canis familiaris
acttgggcattgtagatccatatcc

SEQ ID NO: 39001 - DNA, 25 bp, Canis familiaris
actcggtgcatcaggtgcaatcatg

SEQ ID NO: 39002 - DNA, 25 bp, Canis familiaris
actcagtgtgccaggtcaccatggt

SEQ ID NO: 39003 - DNA, 25 bp, Canis familiaris
actcagattgcttgtttgtccaggt

SEQ ID NO: 39004 - DNA, 25 bp, Canis familiaris
actagtcagctagttctggcacacc

SEQ ID NO: 39005 - DNA, 25 bp, Canis familiaris
actagtgacaagctctgctgaccat

SEQ ID NO: 39006 - DNA, 25 bp, Canis familiaris
actagtgactaccttctaccacagt

SEQ ID NO: 39007 - DNA, 25 bp, Canis familiaris
actcgtgccttgcttagagccagaa

SEQ ID NO: 39008 - DNA, 25 bp, Canis familiaris
actcggctctggcctcaaagaagaa

SEQ ID NO: 39009 - DNA, 25 bp, Canis familiaris
actcggtgctggacgtggtgaggaa

SEQ ID NO: 39010 - DNA, 25 bp, Canis familiaris
actctgccctttactggctgaggag

SEQ ID NO: 39011 - DNA, 25 bp, Canis familiaris
actcatcctattcacgtgctagtga

SEQ ID NO: 39012 - DNA, 25 bp, Canis familiaris
actcacactttcacacagtagctga

SEQ ID NO: 39013 - DNA, 25 bp, Canis familiaris
actctcacttcagaccagctgacta

SEQ ID NO: 39014 - DNA, 25 bp, Canis familiaris
actcaatttcataattcactgatct

SEQ ID NO: 39015 - DNA, 25 bp, Canis familiaris
actactggtcatcatgtgagcttgc

SEQ ID NO: 39016 - DNA, 25 bp, Canis familiaris
actacttgtgcttagtcagactggc

SEQ ID NO: 39017 - DNA, 25 bp, Canis familiaris
actactttgctttattgactttctc

SEQ ID NO: 39018 - DNA, 25 bp, Canis familiaris
acttttttgtaacgactatttgcag

SEQ ID NO: 39019 - DNA, 25 bp, Canis familiaris
acttgttcttttaggacttccacag

SEQ ID NO: 39020 - DNA, 25 bp, Canis familiaris
actctgacttgttttctacattccc

SEQ ID NO: 39021 - DNA, 25 bp, Canis familiaris
acttaattgtattttgagcaaccta

SEQ ID NO: 39022 - DNA, 25 bp, Canis familiaris
acttagcgctgatacttggaaccca

SEQ ID NO: 39023 - DNA, 25 bp, Canis familiaris
acttcagccaaaagctggcatgaca

SEQ ID NO: 39024 - DNA, 25 bp, Canis familiaris
actctccatgactaactgtgtaagt

SEQ ID NO: 39025 - DNA, 25 bp, Canis familiaris
actctccaagcttgcctgttgaaga

SEQ ID NO: 39026 - DNA, 25 bp, Canis familiaris
actctgcctcctccgatgaggaaga

SEQ ID NO: 39027 - DNA, 25 bp, Canis familiaris
actctcagccctcagatgtggaaat

SEQ ID NO: 39028 - DNA, 25 bp, Canis familiaris
acttcgcctgtgtaagtgaaaatat

SEQ ID NO: 39029 - DNA, 25 bp, Canis familiaris
actactcatcgttccagagaacaaa

SEQ ID NO: 39030 - DNA, 25 bp, Canis familiaris
actttactggagttaaacaacatgt

SEQ ID NO: 39031 - DNA, 25 bp, Canis familiaris
actttcaggggctctaatcctcatt

SEQ ID NO: 39032 - DNA, 25 bp, Canis familiaris
actttagaggtcaacgcacccctat

SEQ ID NO: 39033 - DNA, 25 bp, Canis familiaris
cactccggaggtgacctccgtcttc

SEQ ID NO: 39034 - DNA, 25 bp, Canis familiaris
acaggtggagttctagctccgttcc

SEQ ID NO: 39035 - DNA, 25 bp, Canis familiaris
acagaaggacctcatagtttttaat

SEQ ID NO: 39036 - DNA, 25 bp, Canis familiaris
acagtaggggttcattttcctcact

SEQ ID NO: 39037 - DNA, 25 bp, Canis familiaris
actaacgggtgtctgaatccctgcc

SEQ ID NO: 39038 - DNA, 25 bp, Canis familiaris
actaactggtgtgagtcaacgcccc

SEQ ID NO: 39039 - DNA, 25 bp, Canis familiaris
actaactggtgtgagtcaacgcccc

SEQ ID NO: 39040 - DNA, 25 bp, Canis familiaris
actaactggtgtgagtccaacgccc

SEQ ID NO: 39041 - DNA, 25 bp, Canis familiaris
actaactggtgtgagtccaacgccc

SEQ ID NO: 39042 - DNA, 25 bp, Canis familiaris
actaactggtgtgagtccaacgccc

SEQ ID NO: 39043 - DNA, 25 bp, Canis familiaris
actaacttgcctgggtcacaaagct

SEQ ID NO: 39044 - DNA, 25 bp, Canis familiaris
actcagagtgatccaggtgtcccaa

SEQ ID NO: 39045 - DNA, 25 bp, Canis familiaris
actcaggcgatgtgctttatggcag

SEQ ID NO: 39046 - DNA, 25 bp, Canis familiaris
actctggacagatgggcttggacta

SEQ ID NO: 39047 - DNA, 25 bp, Canis familiaris
actctggtagggcatggtggactca

SEQ ID NO: 39048 - DNA, 25 bp, Canis familiaris
actcatggtgggcggtgttgtcata

SEQ ID NO: 39049 - DNA, 25 bp, Canis familiaris
actctgtgtggatcggtggctccat

SEQ ID NO: 39050 - DNA, 25 bp, Canis familiaris
acatttgctgggagcgggtcgtggt

SEQ ID NO: 39051 - DNA, 25 bp, Canis familiaris
actttcagcaggccggtttgcagtg

SEQ ID NO: 39052 - DNA, 25 bp, Canis familiaris
actttatgctgttccttttgcagga

SEQ ID NO: 39053 - DNA, 25 bp, Canis familiaris
actctcttgtttgtactctgaaaaa

SEQ ID NO: 39054 - DNA, 25 bp, Canis familiaris
actcactttccaaccatcttgaaaa

SEQ ID NO: 39055 - DNA, 25 bp, Canis familiaris
actcaatgttccccaacttacaagc

SEQ ID NO: 39056 - DNA, 25 bp, Canis familiaris
actaattctatcctacgttatcacc

SEQ ID NO: 39057 - DNA, 25 bp, Canis familiaris
actacttcttcacagacttcatgat

SEQ ID NO: 39058 - DNA, 25 bp, Canis familiaris
actcactatctaccagcagactttc

SEQ ID NO: 39059 - DNA, 25 bp, Canis familiaris
actcatccataaaagctgctttttt

SEQ ID NO: 39060 - DNA, 25 bp, Canis familiaris
actcatcacaaaaacgatacttata

SEQ ID NO: 39061 - DNA, 25 bp, Canis familiaris
actcatcacacaaaacgatagctta

SEQ ID NO: 39062 - DNA, 25 bp, Canis familiaris
actctacaaaattgtgatgcagtaa

SEQ ID NO: 39063 - DNA, 25 bp, Canis familiaris
actctaccaaattgtgatgccgtaa

SEQ ID NO: 39064 - DNA, 25 bp, Canis familiaris
acttaagcaactggtggccgtacac

SEQ ID NO: 39065 - DNA, 25 bp, Canis familiaris
acttgctgaggagctggggagaacc

SEQ ID NO: 39066 - DNA, 25 bp, Canis familiaris
actttgggcccaacttgaaatctct

SEQ ID NO: 39067 - DNA, 25 bp, Canis familiaris
acttgtaggccactttgttaattga

SEQ ID NO: 39068 - DNA, 25 bp, Canis familiaris
acttatccgtcactttgttgtacta

SEQ ID NO: 39069 - DNA, 25 bp, Canis familiaris
cagttcccgctcagtatgtttaaag

SEQ ID NO: 39070 - DNA, 25 bp, Canis familiaris
actcttcccttgctatgattcataa

SEQ ID NO: 39071 - DNA, 25 bp, Canis familiaris
actctccccatccttaggacataaa

SEQ ID NO: 39072 - DNA, 25 bp, Canis familiaris
actcttctcgactctaggacatgaa

SEQ ID NO: 39073 - DNA, 25 bp, Canis familiaris
actaattctactcctgaaactaagt

SEQ ID NO: 39074 - DNA, 25 bp, Canis familiaris
actaattctatattctgtgcaacta

SEQ ID NO: 39075 - DNA, 25 bp, Canis familiaris
actacttcgccattgcggagaatga

SEQ ID NO: 39076 - DNA, 25 bp, Canis familiaris
actcactcttcctgtggcagaaaca

SEQ ID NO: 39077 - DNA, 25 bp, Canis familiaris
actctctttcctggcacaatgacaa

SEQ ID NO: 39078 - DNA, 25 bp, Canis familiaris
acatgttttactcccaaccagaaca

SEQ ID NO: 39079 - DNA, 25 bp, Canis familiaris
acttgtttatcgatcacacctaata

SEQ ID NO: 39080 - DNA, 25 bp, Canis familiaris
actttgagaattatagacttcatct

SEQ ID NO: 39081 - DNA, 25 bp, Canis familiaris
actattatcaatatcttacttttta

SEQ ID NO: 39082 - DNA, 25 bp, Canis familiaris
actctttgcatcttttaacttgttt

SEQ ID NO: 39083 - DNA, 25 bp, Canis familiaris
acttttcctcttgacgttgtatgct

SEQ ID NO: 39084 - DNA, 25 bp, Canis familiaris
acatccccttctgtatttggtatct

SEQ ID NO: 39085 - DNA, 25 bp, Canis familiaris
actcttctgttggattttctggttt

SEQ ID NO: 39086 - DNA, 25 bp, Canis familiaris
actctctcatttactctggatctgt

SEQ ID NO: 39087 - DNA, 25 bp, Canis familiaris
actctgcttcttactctgtttaaaa

SEQ ID NO: 39088 - DNA, 25 bp, Canis familiaris
actctctgtgttccttgatgttgaa

SEQ ID NO: 39089 - DNA, 25 bp, Canis familiaris
actcatctggttcttctttaaataa

SEQ ID NO: 39090 - DNA, 25 bp, Canis familiaris
actcactggtgatgtttcctaattt

SEQ ID NO: 39091 - DNA, 25 bp, Canis familiaris
actctccagacaggtttgcctcaat

SEQ ID NO: 39092 - DNA, 25 bp, Canis familiaris
actcttagggctcttgcactgaatg

SEQ ID NO: 39093 - DNA, 25 bp, Canis familiaris
actcttagaaatcttccacctgacc

SEQ ID NO: 39094 - DNA, 25 bp, Canis familiaris
acttttattatattaccaactactg

SEQ ID NO: 39095 - DNA, 25 bp, Canis familiaris
acttgtgtcttattcaaccagttca

SEQ ID NO: 39096 - DNA, 25 bp, Canis familiaris
acttttattgagtcaccgatcccat

SEQ ID NO: 39097 - DNA, 25 bp, Canis familiaris
actttactccagaactctgttcctc

SEQ ID NO: 39098 - DNA, 25 bp, Canis familiaris
actcaagcactcaagtctcttttcc

SEQ ID NO: 39099 - DNA, 25 bp, Canis familiaris
actcaaggttgcactgtttctcagc

SEQ ID NO: 39100 - DNA, 25 bp, Canis familiaris
actcaaaagtgcactgctctgtccc

SEQ ID NO: 39101 - DNA, 25 bp, Canis familiaris
actaacatagacatcactttaccaa

SEQ ID NO: 39102 - DNA, 25 bp, Canis familiaris
actacaatggtcacacatgtctaca

SEQ ID NO: 39103 - DNA, 25 bp, Canis familiaris
actacgagttcattcctgatctcaa

SEQ ID NO: 39104 - DNA, 25 bp, Canis familiaris
actacaactacatccttcaaggccc

SEQ ID NO: 39105 - DNA, 25 bp, Canis familiaris
actactactccatcctatcatagga

SEQ ID NO: 39106 - DNA, 25 bp, Canis familiaris
aaacatgaatactctgaatttgggt

SEQ ID NO: 39107 - DNA, 25 bp, Canis familiaris
actactgagtaacctatttggatgg

SEQ ID NO: 39108 - DNA, 25 bp, Canis familiaris
actactgttaagtttctttgtatga

SEQ ID NO: 39109 - DNA, 25 bp, Canis familiaris
actactgttgaatgtctctgttttg

SEQ ID NO: 39110 - DNA, 25 bp, Canis familiaris
actatcatttggaggtgcatctttt

SEQ ID NO: 39111 - DNA, 25 bp, Canis familiaris
actttttgctgcagacctctttgat

SEQ ID NO: 39112 - DNA, 25 bp, Canis familiaris
actttcgtgctctgagtactggaga

SEQ ID NO: 39113 - DNA, 25 bp, Canis familiaris
actttttgctttcttctgagagact

SEQ ID NO: 39114 - DNA, 25 bp, Canis familiaris
actaagtctgtcttactttgtgaac

SEQ ID NO: 39115 - DNA, 25 bp, Canis familiaris
actaatgtgctatgtgactttgtgc

SEQ ID NO: 39116 - DNA, 25 bp, Canis familiaris
actctcagccactgtagctatttgc

SEQ ID NO: 39117 - DNA, 25 bp, Canis familiaris
actctatgccagtgatcctgagttt

SEQ ID NO: 39118 - DNA, 25 bp, Canis familiaris
actctaagcgtgcacctgtgtggct

SEQ ID NO: 39119 - DNA, 25 bp, Canis familiaris
actcagtagagtccactctgggggt

SEQ ID NO: 39120 - DNA, 25 bp, Canis familiaris
actcaccactctcactgtggggagc

SEQ ID NO: 39121 - DNA, 25 bp, Canis familiaris
actacctcattcccaggcagaggag

SEQ ID NO: 39122 - DNA, 25 bp, Canis familiaris
acttgctccagtgtcacggggaact

SEQ ID NO: 39123 - DNA, 25 bp, Canis familiaris
acttgggatccccacgtgggacaat

SEQ ID NO: 39124 - DNA, 25 bp, Canis familiaris
acttcggcatcctcaaggaggccag

SEQ ID NO: 39125 - DNA, 25 bp, Canis familiaris
actacgagacctgcaggaggcgttc

SEQ ID NO: 39126 - DNA, 25 bp, Canis familiaris
actacaacttcttcaggaatgtttg

SEQ ID NO: 39127 - DNA, 25 bp, Canis familiaris
actacaaactgttgccgtgcagtta

SEQ ID NO: 39128 - DNA, 25 bp, Canis familiaris
acatagcacaaggaattcagtcaat

SEQ ID NO: 39129 - DNA, 25 bp, Canis familiaris
acatgtgcacagactcctaggtcct

SEQ ID NO: 39130 - DNA, 25 bp, Canis familiaris
actatcctgatgtcctgcagtgtct

SEQ ID NO: 39131 - DNA, 25 bp, Canis familiaris
actaccatgtctgtcacttatgacg

SEQ ID NO: 39132 - DNA, 25 bp, Canis familiaris
actactgctatttctccttgcaagt

SEQ ID NO: 39133 - DNA, 25 bp, Canis familiaris
actagcagtttgtccactgtaagtt

SEQ ID NO: 39134 - DNA, 25 bp, Canis familiaris
actagcatacctgcctttattgtgt

SEQ ID NO: 39135 - DNA, 25 bp, Canis familiaris
actagctagtgtgccttggatcaat

SEQ ID NO: 39136 - DNA, 25 bp, Canis familiaris
actactttgattcctatgctcactt

SEQ ID NO: 39137 - DNA, 25 bp, Canis familiaris
actacatggtctacatgttccagta

SEQ ID NO: 39138 - DNA, 25 bp, Canis familiaris
actcattttctccagtctacattaa

SEQ ID NO: 39139 - DNA, 25 bp, Canis familiaris
acttccttcctgttctcaattaaat

SEQ ID NO: 39140 - DNA, 25 bp, Canis familiaris
acttccagggatttctttcattact

SEQ ID NO: 39141 - DNA, 25 bp, Canis familiaris
actacaacgaggcctcttctcataa

SEQ ID NO: 39142 - DNA, 25 bp, Canis familiaris
actacacgcggaacatttcttctag

SEQ ID NO: 39143 - DNA, 25 bp, Canis familiaris
actaatcccaaagtgatctttctat

SEQ ID NO: 39144 - DNA, 25 bp, Canis familiaris
actcagaatccatatgctactgttc

SEQ ID NO: 39145 - DNA, 25 bp, Canis familiaris
acatagacaccatagcgaaattgct

SEQ ID NO: 39146 - DNA, 25 bp, Canis familiaris
actacaccctccagcaaatttaact

SEQ ID NO: 39147 - DNA, 25 bp, Canis familiaris
acttcccgtcgccacgatatattaa

SEQ ID NO: 39148 - DNA, 25 bp, Canis familiaris
actcttccacggcagctatatatct

SEQ ID NO: 39149 - DNA, 25 bp, Canis familiaris
actactccacagcagttatctataa

SEQ ID NO: 39150 - DNA, 25 bp, Canis familiaris
acttattacagccagtttcagcatg

SEQ ID NO: 39151 - DNA, 25 bp, Canis familiaris
actactgtgtgacggtgtccgcatc

SEQ ID NO: 39152 - DNA, 25 bp, Canis familiaris
actaggggcagtgtgccccatctcc

SEQ ID NO: 39153 - DNA, 25 bp, Canis familiaris
actacgaggagtacgcgcttctcta

SEQ ID NO: 39154 - DNA, 25 bp, Canis familiaris
actagtggagcctcagcagcatttc

SEQ ID NO: 39155 - DNA, 25 bp, Canis familiaris
acttagaagtcacagccttgtccta

SEQ ID NO: 39156 - DNA, 25 bp, Canis familiaris
actagaatttctaagcctgtcttta

SEQ ID NO: 39157 - DNA, 25 bp, Canis familiaris
acttcctttcaaagccaacttctca

SEQ ID NO: 39158 - DNA, 25 bp, Canis familiaris
acttaatactaaaccatacctgcta

SEQ ID NO: 39159 - DNA, 25 bp, Canis familiaris
actttaactatgtaatatgtccttc

SEQ ID NO: 39160 - DNA, 25 bp, Canis familiaris
actcttttcagtgcaatacctctta

SEQ ID NO: 39161 - DNA, 25 bp, Canis familiaris
acttttgtcagtaccattccttagc

SEQ ID NO: 39162 - DNA, 25 bp, Canis familiaris
actttggtcaaagatggtctctgga

SEQ ID NO: 39163 - DNA, 25 bp, Canis familiaris
acttgaagctaatttgtactactgg

SEQ ID NO: 39164 - DNA, 25 bp, Canis familiaris
actttaccacattttgaattcttca

SEQ ID NO: 39165 - DNA, 25 bp, Canis familiaris
actcatttccttcgttcaaactata

SEQ ID NO: 39166 - DNA, 25 bp, Canis familiaris
actcttgtccttacacagcagaact

SEQ ID NO: 39167 - DNA, 25 bp, Canis familiaris
actcttgatctcaggacagtgagtt

SEQ ID NO: 39168 - DNA, 25 bp, Canis familiaris
actcttactcaggactcgtgtctac

SEQ ID NO: 39169 - DNA, 25 bp, Canis familiaris
actaataccaggcctcctggtctct

SEQ ID NO: 39170 - DNA, 25 bp, Canis familiaris
actaatacctcctttctgagatcct

SEQ ID NO: 39171 - DNA, 25 bp, Canis familiaris
actaatacaccttattctggaataa

SEQ ID NO: 39172 - DNA, 25 bp, Canis familiaris
actacatcatgcggtttttggagaa

SEQ ID NO: 39173 - DNA, 25 bp, Canis familiaris
actactagatgtctttaggcagcag

SEQ ID NO: 39174 - DNA, 25 bp, Canis familiaris
actcattcagtttctatatagccaa

SEQ ID NO: 39175 - DNA, 25 bp, Canis familiaris
actcagatatattactatgaatcca

SEQ ID NO: 39176 - DNA, 25 bp, Canis familiaris
actcagagaagctctcaacacacat

SEQ ID NO: 39177 - DNA, 25 bp, Canis familiaris
actagacatggctcttcagcacatc

SEQ ID NO: 39178 - DNA, 25 bp, Canis familiaris
actacagatggtggtgtcacacaca

SEQ ID NO: 39179 - DNA, 25 bp, Canis familiaris
actactcatactggctgtcaacacc

SEQ ID NO: 39180 - DNA, 25 bp, Canis familiaris
acaactattcatagaccaaccccga

SEQ ID NO: 39181 - DNA, 25 bp, Canis familiaris
actattattttagcaccaacctact

SEQ ID NO: 39182 - DNA, 25 bp, Canis familiaris
actttggtgtctttcctaagctcca

SEQ ID NO: 39183 - DNA, 25 bp, Canis familiaris
acttcaaattctttcctaggttctg

SEQ ID NO: 39184 - DNA, 25 bp, Canis familiaris
acttctgtttctttagtcagggtct

SEQ ID NO: 39185 - DNA, 25 bp, Canis familiaris
acttctttatttaactccaggagct

SEQ ID NO: 39186 - DNA, 25 bp, Canis familiaris
acttatttacgtatgcttcagagga

SEQ ID NO: 39187 - DNA, 25 bp, Canis familiaris
acttaagtacttttgctgctgatgg

SEQ ID NO: 39188 - DNA, 25 bp, Canis familiaris
actaatagtaacccatctcagtgtg

SEQ ID NO: 39189 - DNA, 25 bp, Canis familiaris
actcatctgagaaggccccaagggc

SEQ ID NO: 39190 - DNA, 25 bp, Canis familiaris
actcagtaaaatctcaagaggccat

SEQ ID NO: 39191 - DNA, 25 bp, Canis familiaris
actcaccaaaacagattatggccat

SEQ ID NO: 39192 - DNA, 25 bp, Canis familiaris
actcaccgccagattatccagggca

SEQ ID NO: 39193 - DNA, 25 bp, Canis familiaris
acatacccggattttccagggatca

SEQ ID NO: 39194 - DNA, 25 bp, Canis familiaris
actacaccggccaggccaaggtgca

SEQ ID NO: 39195 - DNA, 25 bp, Canis familiaris
acaataaagaccactccactgggcc

SEQ ID NO: 39196 - DNA, 25 bp, Canis familiaris
actataggggcagggcccactggcc

SEQ ID NO: 39197 - DNA, 25 bp, Canis familiaris
actattggtgtagggcagcctgggt

SEQ ID NO: 39198 - DNA, 25 bp, Canis familiaris
acttctggttgagccatagcgtaat

SEQ ID NO: 39199 - DNA, 25 bp, Canis familiaris
acttctgttcgagggccctgtaaat

SEQ ID NO: 39200 - DNA, 25 bp, Canis familiaris
actaatgtttgagagcacctgctac

SEQ ID NO: 39201 - DNA, 25 bp, Canis familiaris
actaaattccagaacaacctacaga

SEQ ID NO: 39202 - DNA, 25 bp, Canis familiaris
actagagctcctgtaaactctcctg

SEQ ID NO: 39203 - DNA, 25 bp, Canis familiaris
acatttgcccttagaaactcctgtt

SEQ ID NO: 39204 - DNA, 25 bp, Canis familiaris
actttgctctaaaaaccattgactg

SEQ ID NO: 39205 - DNA, 25 bp, Canis familiaris
actttgcctaaatacttcacccagt

SEQ ID NO: 39206 - DNA, 25 bp, Canis familiaris
acttttcggatacagttcaccacct

SEQ ID NO: 39207 - DNA, 25 bp, Canis familiaris
actttttggtcaccactacagctcc

SEQ ID NO: 39208 - DNA, 25 bp, Canis familiaris
acatttttgaacatttacctgccca

SEQ ID NO: 39209 - DNA, 25 bp, Canis familiaris
acagattaggaaagcgttaccgcgc

SEQ ID NO: 39210 - DNA, 25 bp, Canis familiaris
acagtgtaggacaggttccaggccc

SEQ ID NO: 39211 - DNA, 25 bp, Canis familiaris
actatgctaagcagggcatcccggc

SEQ ID NO: 39212 - DNA, 25 bp, Canis familiaris
actagctcaagagaccacctggagg

SEQ ID NO: 39213 - DNA, 25 bp, Canis familiaris
acttcatcgagacactccctgagaa

SEQ ID NO: 39214 - DNA, 25 bp, Canis familiaris
actatcctgagggtctgccctagag

SEQ ID NO: 39215 - DNA, 25 bp, Canis familiaris
actacctcctgctgtgacagctaag

SEQ ID NO: 39216 - DNA, 25 bp, Canis familiaris
acttcgcccatggagggcactatcc

SEQ ID NO: 39217 - DNA, 25 bp, Canis familiaris
acttgcccagagcggtggctaaagc

SEQ ID NO: 39218 - DNA, 25 bp, Canis familiaris
actaccgcgagggggagcaagcaat

SEQ ID NO: 39219 - DNA, 25 bp, Canis familiaris
actaccaggggagtcggagaggatt

SEQ ID NO: 39220 - DNA, 25 bp, Canis familiaris
actcaagccgagaaccggggctgtc

SEQ ID NO: 39221 - DNA, 25 bp, Canis familiaris
actacacccagaaccgaggctgtaa

SEQ ID NO: 39222 - DNA, 25 bp, Canis familiaris
actagaccctgaggcagccagttta

SEQ ID NO: 39223 - DNA, 25 bp, Canis familiaris
actcagaccccaggatgacagcggg

SEQ ID NO: 39224 - DNA, 25 bp, Canis familiaris
actatagctcccgtacaccggagcg

SEQ ID NO: 39225 - DNA, 25 bp, Canis familiaris
actatcatctccgaatcaatgcacg

SEQ ID NO: 39226 - DNA, 25 bp, Canis familiaris
actacattggcaacattgacaagac

SEQ ID NO: 39227 - DNA, 25 bp, Canis familiaris
actacatctctctctgagacaagca

SEQ ID NO: 39228 - DNA, 25 bp, Canis familiaris
actatgacgctattcgagtcactca

SEQ ID NO: 39229 - DNA, 25 bp, Canis familiaris
actcagaccttcatgagtcgtccac

SEQ ID NO: 39230 - DNA, 25 bp, Canis familiaris
actagactatacagctgttgcccgc

SEQ ID NO: 39231 - DNA, 25 bp, Canis familiaris
actagactgcaactttgtcatgcca

SEQ ID NO: 39232 - DNA, 25 bp, Canis familiaris
actagactgcacttgttttcataat

SEQ ID NO: 39233 - DNA, 25 bp, Canis familiaris
acttatctgcacaagtgtttcaacc

SEQ ID NO: 39234 - DNA, 25 bp, Canis familiaris
acttctggagaacatttgcaacact

SEQ ID NO: 39235 - DNA, 25 bp, Canis familiaris
acttcctggacaaattgtaggcagc

SEQ ID NO: 39236 - DNA, 25 bp, Canis familiaris
actttctgtgacactctggagagag

SEQ ID NO: 39237 - DNA, 25 bp, Canis familiaris
actaattgtggcacttggggcgagg

SEQ ID NO: 39238 - DNA, 25 bp, Canis familiaris
actattttatgcactggcagcggcg

SEQ ID NO: 39239 - DNA, 25 bp, Canis familiaris
actaagtattgtgctgggggctgaa

SEQ ID NO: 39240 - DNA, 25 bp, Canis familiaris
actaagttgtgggcgttgacgtgaa

SEQ ID NO: 39241 - DNA, 25 bp, Canis familiaris
actaaggtctgtggcaggctggctg

SEQ ID NO: 39242 - DNA, 25 bp, Canis familiaris
actaaagtggatgtgtgtgcgtgtg

SEQ ID NO: 39243 - DNA, 25 bp, Canis familiaris
actaaagggtctgcctggctgctgt

SEQ ID NO: 39244 - DNA, 25 bp, Canis familiaris
actaaaagtcctgctgtgtgtgtgt

SEQ ID NO: 39245 - DNA, 25 bp, Canis familiaris
actaaataatattcctctgtgtgtg

SEQ ID NO: 39246 - DNA, 25 bp, Canis familiaris
actttacgagattccatcttgtggg

SEQ ID NO: 39247 - DNA, 25 bp, Canis familiaris
acattttggtaacccttgtgggcag

SEQ ID NO: 39248 - DNA, 25 bp, Canis familiaris
actttgtgaggagccacctggggaa

SEQ ID NO: 39249 - DNA, 25 bp, Canis familiaris
gaatttgctgaagaaccccgggaat

SEQ ID NO: 39250 - DNA, 25 bp, Canis familiaris
aatttgaacaaatccacttggtaag

SEQ ID NO: 39251 - DNA, 25 bp, Canis familiaris
actttgcacaagtaacccatgtaaa

SEQ ID NO: 39252 - DNA, 25 bp, Canis familiaris
actttgctaaggaaatatcatggat

SEQ ID NO: 39253 - DNA, 25 bp, Canis familiaris
acttccataagtacagaaattctgg

SEQ ID NO: 39254 - DNA, 25 bp, Canis familiaris
acttccatcagcacagcagtcagct

SEQ ID NO: 39255 - DNA, 25 bp, Canis familiaris
acttcctcagcagaggggccaggga

SEQ ID NO: 39256 - DNA, 25 bp, Canis familiaris
acttcttccccaatggtggagagga

SEQ ID NO: 39257 - DNA, 25 bp, Canis familiaris
actactccacccagatcgatgagat

SEQ ID NO: 39258 - DNA, 25 bp, Canis familiaris
actatctacccaaagacagcgcaga

SEQ ID NO: 39259 - DNA, 25 bp, Canis familiaris
actatcatacccatcaggactcttg

SEQ ID NO: 39260 - DNA, 25 bp, Canis familiaris
acttaacctgcaatgtggatctgtt

SEQ ID NO: 39261 - DNA, 25 bp, Canis familiaris
acttgaaacatctagtattctggat

SEQ ID NO: 39262 - DNA, 25 bp, Canis familiaris
actagtttctcattattttgtgtgc

SEQ ID NO: 39263 - DNA, 25 bp, Canis familiaris
actatcagtttgctcattgttggga

SEQ ID NO: 39264 - DNA, 25 bp, Canis familiaris
actacgtcttggactcatctattgt

SEQ ID NO: 39265 - DNA, 25 bp, Canis familiaris
actacgccaatgcttacagcttctg

SEQ ID NO: 39266 - DNA, 25 bp, Canis familiaris
actaggcgcattgtgtagcagttga

SEQ ID NO: 39267 - DNA, 25 bp, Canis familiaris
actatgagacatcttgtacaatcgt

SEQ ID NO: 39268 - DNA, 25 bp, Canis familiaris
acttcagcagccatttgactcattg

SEQ ID NO: 39269 - DNA, 25 bp, Canis familiaris
acttaactgctaatagcctattgtt

SEQ ID NO: 39270 - DNA, 25 bp, Canis familiaris
acattatgacctttcctcttagttt

SEQ ID NO: 39271 - DNA, 25 bp, Canis familiaris
acttcagggcttcactttggtatgt

SEQ ID NO: 39272 - DNA, 25 bp, Canis familiaris
acttcaggaccatacttttctaact

SEQ ID NO: 39273 - DNA, 25 bp, Canis familiaris
acttctctagtatactttccaaact

SEQ ID NO: 39274 - DNA, 25 bp, Canis familiaris
acttgcagatattttaatttcccta

SEQ ID NO: 39275 - DNA, 25 bp, Canis familiaris
acttggttgcgataagttcatcagc

SEQ ID NO: 39276 - DNA, 25 bp, Canis familiaris
acttgggtctgagaacccagagtca

SEQ ID NO: 39277 - DNA, 25 bp, Canis familiaris
actttcccagatgaatcccaggtga

SEQ ID NO: 39278 - DNA, 25 bp, Canis familiaris
acttagtccttggtcaactcaaaga

SEQ ID NO: 39279 - DNA, 25 bp, Canis familiaris
acttaatccccaacaactgagagaa

SEQ ID NO: 39280 - DNA, 25 bp, Canis familiaris
acttcaactcccccaaatggatatt

SEQ ID NO: 39281 - DNA, 25 bp, Canis familiaris
acttaactggcctgcaatattgtaa

SEQ ID NO: 39282 - DNA, 25 bp, Canis familiaris
acttgatgacattcctggcaattta

SEQ ID NO: 39283 - DNA, 25 bp, Canis familiaris
actataggaaccaggtgtgtacaaa

SEQ ID NO: 39284 - DNA, 25 bp, Canis familiaris
actaaggaacccatgcctggagctg

SEQ ID NO: 39285 - DNA, 25 bp, Canis familiaris
acttcagtaaaccttgcttggacat

SEQ ID NO: 39286 - DNA, 25 bp, Canis familiaris
acttcgtttactgtgtgctggactc

SEQ ID NO: 39287 - DNA, 25 bp, Canis familiaris
acttggtaagccggtagcgtggtgg

SEQ ID NO: 39288 - DNA, 25 bp, Canis familiaris
acattggaaaacacctgcgtttggt

SEQ ID NO: 39289 - DNA, 25 bp, Canis familiaris
acatgggaagacaaaccctgctttg

SEQ ID NO: 39290 - DNA, 25 bp, Canis familiaris
acttggaaacgaactcatccctggc

SEQ ID NO: 39291 - DNA, 25 bp, Canis familiaris
actttgagaactcactaccacctcc

SEQ ID NO: 39292 - DNA, 25 bp, Canis familiaris
actttaaatcagcctgctacccact

SEQ ID NO: 39293 - DNA, 25 bp, Canis familiaris
acttcgaaggcacgttccaacgtgg

SEQ ID NO: 39294 - DNA, 25 bp, Canis familiaris
acttaattgcgtcatcccaatctcg

SEQ ID NO: 39295 - DNA, 25 bp, Canis familiaris
actatgaagtcacttatccaccgcc

SEQ ID NO: 39296 - DNA, 25 bp, Canis familiaris
acttgggtcaagttgcaatcctcct

SEQ ID NO: 39297 - DNA, 25 bp, Canis familiaris
acttgggcgaagactgcacaggctg

SEQ ID NO: 39298 - DNA, 25 bp, Canis familiaris
actttggaacaggcaccaggctcac

SEQ ID NO: 39299 - DNA, 25 bp, Canis familiaris
actattcggagcatgagccggtcta

SEQ ID NO: 39300 - DNA, 25 bp, Canis familiaris
actaaagggatggacacaggttatc

SEQ ID NO: 39301 - DNA, 25 bp, Canis familiaris
actacacgcgggtccagcgggatat

SEQ ID NO: 39302 - DNA, 25 bp, Canis familiaris
actacacggagggcgcagagctggt

SEQ ID NO: 39303 - DNA, 25 bp, Canis familiaris
actagccgtaggacagggttgactg

SEQ ID NO: 39304 - DNA, 25 bp, Canis familiaris
actatgtttaggccagggtctcact

SEQ ID NO: 39305 - DNA, 25 bp, Canis familiaris
actagtcttattcagattttctatt

SEQ ID NO: 39306 - DNA, 25 bp, Canis familiaris
actagtccttttagaatttcttgcg

SEQ ID NO: 39307 - DNA, 25 bp, Canis familiaris
actagctgctctgtttactgtatat

SEQ ID NO: 39308 - DNA, 25 bp, Canis familiaris
acttctctctcctttacgagacgaa

SEQ ID NO: 39309 - DNA, 25 bp, Canis familiaris
acttctttccagagccaagtggcac

SEQ ID NO: 39310 - DNA, 25 bp, Canis familiaris
acttcgtgttctagccacaagtggc

SEQ ID NO: 39311 - DNA, 25 bp, Canis familiaris
acatttgctttctccaaatatgggg

SEQ ID NO: 39312 - DNA, 25 bp, Canis familiaris
actttgctgaaggccccataatggg

SEQ ID NO: 39313 - DNA, 25 bp, Canis familiaris
actttgagaagcgccttgacagact

SEQ ID NO: 39314 - DNA, 25 bp, Canis familiaris
actttgagaaccactcccaactagt

SEQ ID NO: 39315 - DNA, 25 bp, Canis familiaris
actttgtgaattccctcccagaatt

SEQ ID NO: 39316 - DNA, 25 bp, Canis familiaris
actttagatttctgatcctcaaaat

SEQ ID NO: 39317 - DNA, 25 bp, Canis familiaris
actttacttctaatgacttcaacta

SEQ ID NO: 39318 - DNA, 25 bp, Canis familiaris
actttaccactagcagtcaacaatg

SEQ ID NO: 39319 - DNA, 25 bp, Canis familiaris
actttaccacacacatgttcacaca

SEQ ID NO: 39320 - DNA, 25 bp, Canis familiaris
acttttcgaccatctgaagccacag

SEQ ID NO: 39321 - DNA, 25 bp, Canis familiaris
acttttcacacgaacgagagactac

SEQ ID NO: 39322 - DNA, 25 bp, Canis familiaris
actttggagcaactggcaaggagaa

SEQ ID NO: 39323 - DNA, 25 bp, Canis familiaris
acttttacaagccgcaaaggcagca

SEQ ID NO: 39324 - DNA, 25 bp, Canis familiaris
acttgcttgaaggccgaggagacca

SEQ ID NO: 39325 - DNA, 25 bp, Canis familiaris
actatcggacccctggagattccgg

SEQ ID NO: 39326 - DNA, 25 bp, Canis familiaris
actattggacaagcatcgatgattt

SEQ ID NO: 39327 - DNA, 25 bp, Canis familiaris
actacggcaaagacctggcttctgt

SEQ ID NO: 39328 - DNA, 25 bp, Canis familiaris
acttcaggaaagcctcttccacgtt

SEQ ID NO: 39329 - DNA, 25 bp, Canis familiaris
actacagaaaagtttctctattctt

SEQ ID NO: 39330 - DNA, 25 bp, Canis familiaris
acttcaataaaacgtgcttttctct

SEQ ID NO: 39331 - DNA, 25 bp, Canis familiaris
tacttggataactgtggtaattcta

SEQ ID NO: 39332 - DNA, 25 bp, Canis familiaris
acttgctaaaactctgtaatctcta

SEQ ID NO: 39333 - DNA, 25 bp, Canis familiaris
acttgtaaataaactatctttgtag

SEQ ID NO: 39334 - DNA, 25 bp, Canis familiaris
acttctgaaatactattcattgtta

SEQ ID NO: 39335 - DNA, 25 bp, Canis familiaris
actactgaaatgtttctatctttat

SEQ ID NO: 39336 - DNA, 25 bp, Canis familiaris
actacttattgactgaaacttaatg

SEQ ID NO: 39337 - DNA, 25 bp, Canis familiaris
acatttgtcattactgaaaatttag

SEQ ID NO: 39338 - DNA, 25 bp, Canis familiaris
acattttctttctgcagaatcccga

SEQ ID NO: 39339 - DNA, 25 bp, Canis familiaris
acatttttacacagaactccctact

SEQ ID NO: 39340 - DNA, 25 bp, Canis familiaris
actttttagccacgaactttctgat

SEQ ID NO: 39341 - DNA, 25 bp, Canis familiaris
actttttagggcaaatactcacctg

SEQ ID NO: 39342 - DNA, 25 bp, Canis familiaris
actttttaatgggcttcctctgtct

SEQ ID NO: 39343 - DNA, 25 bp, Canis familiaris
acttttccaacggtatcgtctgtag

SEQ ID NO: 39344 - DNA, 25 bp, Canis familiaris
cactgatttcgaccaggttcgttca

SEQ ID NO: 39345 - DNA, 25 bp, Canis familiaris
actatttgctcgtggttctgtaccc

SEQ ID NO: 39346 - DNA, 25 bp, Canis familiaris
acttctttcgtttgtatcattcctt

SEQ ID NO: 39347 - DNA, 25 bp, Canis familiaris
acttataatttatgttactccttga

SEQ ID NO: 39348 - DNA, 25 bp, Canis familiaris
acttgtcgttatctgttactacctt

SEQ ID NO: 39349 - DNA, 25 bp, Canis familiaris
acttgaggtttgctgtttgcacccc

SEQ ID NO: 39350 - DNA, 25 bp, Canis familiaris
acattgaaattccgtttctctcctc

SEQ ID NO: 39351 - DNA, 25 bp, Canis familiaris
acatctcaaattccttttggtttca

SEQ ID NO: 39352 - DNA, 25 bp, Canis familiaris
acattaagttcctgtcctgttgtga

SEQ ID NO: 39353 - DNA, 25 bp, Canis familiaris
actttcctatagctgtcctttgtga

SEQ ID NO: 39354 - DNA, 25 bp, Canis familiaris
actagtcattttcttcttgattgga

SEQ ID NO: 39355 - DNA, 25 bp, Canis familiaris
actagtaagtccctccagattcgga

SEQ ID NO: 39356 - DNA, 25 bp, Canis familiaris
acatagtaattctcatataacccag

SEQ ID NO: 39357 - DNA, 25 bp, Canis familiaris
actttgactcctacataatcccaac

SEQ ID NO: 39358 - DNA, 25 bp, Canis familiaris
acttgtgaagtcatcaagtcccccc

SEQ ID NO: 39359 - DNA, 25 bp, Canis familiaris
acttgagtagtcatcagggaacgca

SEQ ID NO: 39360 - DNA, 25 bp, Canis familiaris
acttgagcacgtaataggtattcag

SEQ ID NO: 39361 - DNA, 25 bp, Canis familiaris
actatcgcacgtctaatgtattaac

SEQ ID NO: 39362 - DNA, 25 bp, Canis familiaris
acttccacgtgttctgaggattccc

SEQ ID NO: 39363 - DNA, 25 bp, Canis familiaris
actttagtgtgttaggctggctccc

SEQ ID NO: 39364 - DNA, 25 bp, Canis familiaris
actttagcgttatcgcgtgtgccgc

SEQ ID NO: 39365 - DNA, 25 bp, Canis familiaris
actttaacttgatgactggtggctg

SEQ ID NO: 39366 - DNA, 25 bp, Canis familiaris
actttccatattcccagcggatggg

SEQ ID NO: 39367 - DNA, 25 bp, Canis familiaris
acttcatttcttcctcacgggaatg

SEQ ID NO: 39368 - DNA, 25 bp, Canis familiaris
acttcagcttttactccaaaatttg

SEQ ID NO: 39369 - DNA, 25 bp, Canis familiaris
acttccttttcctgcaggagttgag

SEQ ID NO: 39370 - DNA, 25 bp, Canis familiaris
acttaaccttctttcagtgactgaa

SEQ ID NO: 39371 - DNA, 25 bp, Canis familiaris
acttaactttattctagatgtgctg

SEQ ID NO: 39372 - DNA, 25 bp, Canis familiaris
acttacagcatgtcctatccgagtt

SEQ ID NO: 39373 - DNA, 25 bp, Canis familiaris
acttgacaggtcctgatcccagctg

SEQ ID NO: 39374 - DNA, 25 bp, Canis familiaris
acttacttgccggatcatccagtca

SEQ ID NO: 39375 - DNA, 25 bp, Canis familiaris
actagagctcatcccctgctctagt

SEQ ID NO: 39376 - DNA, 25 bp, Canis familiaris
actagagttccattgtgcctactaa

SEQ ID NO: 39377 - DNA, 25 bp, Canis familiaris
acttgaattggatggctattgcgaa

SEQ ID NO: 39378 - DNA, 25 bp, Canis familiaris
acttctcctggaaggctattccaag

SEQ ID NO: 39379 - DNA, 25 bp, Canis familiaris
acatcttcgttcaggctttagccat

SEQ ID NO: 39380 - DNA, 25 bp, Canis familiaris
actttgcagaacacgtgtgtcccat

SEQ ID NO: 39381 - DNA, 25 bp, Canis familiaris
actatccagagccttctggtggccc

SEQ ID NO: 39382 - DNA, 25 bp, Canis familiaris
actatccagcaacatttgggccagc

SEQ ID NO: 39383 - DNA, 25 bp, Canis familiaris
acttcctggagccatttggctctgg

SEQ ID NO: 39384 - DNA, 25 bp, Canis familiaris
actatcctgctgggcattttctttc

SEQ ID NO: 39385 - DNA, 25 bp, Canis familiaris
acttaccgatggttattgccttcgt

SEQ ID NO: 39386 - DNA, 25 bp, Canis familiaris
actttcccatggttctaggtactct

SEQ ID NO: 39387 - DNA, 25 bp, Canis familiaris
actttcccatgagagtcttgtacca

SEQ ID NO: 39388 - DNA, 25 bp, Canis familiaris
acattcttccaggagctgttttact

SEQ ID NO: 39389 - DNA, 25 bp, Canis familiaris
acttcccactgccaggattttacat

SEQ ID NO: 39390 - DNA, 25 bp, Canis familiaris
acactcaccttcaggaccttaataa

SEQ ID NO: 39391 - DNA, 25 bp, Canis familiaris
acattgacccacaggacattgtaaa

SEQ ID NO: 39392 - DNA, 25 bp, Canis familiaris
acttgacccctataatgagtattag

SEQ ID NO: 39393 - DNA, 25 bp, Canis familiaris
acttccccactcgaaaggacatctc

SEQ ID NO: 39394 - DNA, 25 bp, Canis familiaris
aactacccatccacaagaagtcctt

SEQ ID NO: 39395 - DNA, 25 bp, Canis familiaris
aagtactacaccctggaagagatcc

SEQ ID NO: 39396 - DNA, 25 bp, Canis familiaris
acttctctaggctctggggagctcc

SEQ ID NO: 39397 - DNA, 25 bp, Canis familiaris
acatttaccgtgattaggcgtccct

SEQ ID NO: 39398 - DNA, 25 bp, Canis familiaris
actttacagcgtgttattaggtgcc

SEQ ID NO: 39399 - DNA, 25 bp, Canis familiaris
actttgagaggtaattacatagtgt

SEQ ID NO: 39400 - DNA, 25 bp, Canis familiaris
actttggggacttctgagcacacgt

SEQ ID NO: 39401 - DNA, 25 bp, Canis familiaris
actttgtgtctgactacgatcccac

SEQ ID NO: 39402 - DNA, 25 bp, Canis familiaris
actatgtggtctccatgtaagcccc

SEQ ID NO: 39403 - DNA, 25 bp, Canis familiaris
actagttgcctctatctcaatgtgc

SEQ ID NO: 39404 - DNA, 25 bp, Canis familiaris
actacattctctctgtcatcagtgg

SEQ ID NO: 39405 - DNA, 25 bp, Canis familiaris
actactgtgcctctgcatgcaagtt

SEQ ID NO: 39406 - DNA, 25 bp, Canis familiaris
actacgtagctgtcaacctgtgctc

SEQ ID NO: 39407 - DNA, 25 bp, Canis familiaris
actacctggctgtcaacacatgggg

SEQ ID NO: 39408 - DNA, 25 bp, Canis familiaris
actaccatactggccagcacagaga

SEQ ID NO: 39409 - DNA, 25 bp, Canis familiaris
acttcactagcttcacagcagaggc

SEQ ID NO: 39410 - DNA, 25 bp, Canis familiaris
actatcctccttggcagcagatgcc

SEQ ID NO: 39411 - DNA, 25 bp, Canis familiaris
actaccgctttggacaggtctacac

SEQ ID NO: 39412 - DNA, 25 bp, Canis familiaris
actacgggttggaagagctctacac

SEQ ID NO: 39413 - DNA, 25 bp, Canis familiaris
actacgtgagtgagaagatcctgaa

SEQ ID NO: 39414 - DNA, 25 bp, Canis familiaris
actacctgacgacgaaggcctggac

SEQ ID NO: 39415 - DNA, 25 bp, Canis familiaris
acttagtacgtggcaagtgcctgtg

SEQ ID NO: 39416 - DNA, 25 bp, Canis familiaris
actagagtgaaatgccagcttcttg

SEQ ID NO: 39417 - DNA, 25 bp, Canis familiaris
acttgagtaataaacagcttcattt

SEQ ID NO: 39418 - DNA, 25 bp, Canis familiaris
acttaccacagtacacagttgtttt

SEQ ID NO: 39419 - DNA, 25 bp, Canis familiaris
acttggcccgtaacaattataattg

SEQ ID NO: 39420 - DNA, 25 bp, Canis familiaris
acttaccaggctttcttctaaagtg

SEQ ID NO: 39421 - DNA, 25 bp, Canis familiaris
acttaccagtgctacctggctacca

SEQ ID NO: 39422 - DNA, 25 bp, Canis familiaris
actatatccgtaacctggatagtga

SEQ ID NO: 39423 - DNA, 25 bp, Canis familiaris
actagcaccctaatcttggacttcc

SEQ ID NO: 39424 - DNA, 25 bp, Canis familiaris
acatacatgcctagattattcagag

SEQ ID NO: 39425 - DNA, 25 bp, Canis familiaris
acttatcggtgaatcattgatgaga

SEQ ID NO: 39426 - DNA, 25 bp, Canis familiaris
acttaaatgatatattgcaggctgc

SEQ ID NO: 39427 - DNA, 25 bp, Canis familiaris
actttgttatctcattcgtctatct

SEQ ID NO: 39428 - DNA, 25 bp, Canis familiaris
actttgctgccaactttggtgccat

SEQ ID NO: 39429 - DNA, 25 bp, Canis familiaris
actttgtccatagtcaacagatctc

SEQ ID NO: 39430 - DNA, 25 bp, Canis familiaris
acttctgttcaggcatcatccaggt

SEQ ID NO: 39431 - DNA, 25 bp, Canis familiaris
acttcattccaggctgcagactggt

SEQ ID NO: 39432 - DNA, 25 bp, Canis familiaris
actttgtgccatgccagcatctgaa

SEQ ID NO: 39433 - DNA, 25 bp, Canis familiaris
actttgatgccttcagccatactaa

SEQ ID NO: 39434 - DNA, 25 bp, Canis familiaris
acttatgtgactgacctcagtttgt

SEQ ID NO: 39435 - DNA, 25 bp, Canis familiaris
acttatgtgaccgacctcaatttgt

SEQ ID NO: 39436 - DNA, 25 bp, Canis familiaris
acttcgagcaccaaactcacataac

SEQ ID NO: 39437 - DNA, 25 bp, Canis familiaris
acttcaagccttattcattaccatc

SEQ ID NO: 39438 - DNA, 25 bp, Canis familiaris
acttcaagccttattcattaccatc

SEQ ID NO: 39439 - DNA, 25 bp, Canis familiaris
acttcaagccttattcattaccatc

SEQ ID NO: 39440 - DNA, 25 bp, Canis familiaris
acttcacagaattactttccccatc

SEQ ID NO: 39441 - DNA, 25 bp, Canis familiaris
actttctaattgactcattcccgct

SEQ ID NO: 39442 - DNA, 25 bp, Canis familiaris
actttccaagttcaatgccctaatg

SEQ ID NO: 39443 - DNA, 25 bp, Canis familiaris
actttccaatgttcgtacaactccg

SEQ ID NO: 39444 - DNA, 25 bp, Canis familiaris
actttcgactgtaactagcaaccca

SEQ ID NO: 39445 - DNA, 25 bp, Canis familiaris
acttgtgctggcttaactcagaaat

SEQ ID NO: 39446 - DNA, 25 bp, Canis familiaris
acttcagggttttcatccacagcat

SEQ ID NO: 39447 - DNA, 25 bp, Canis familiaris
acttatgaatatgtatgcacctagc

SEQ ID NO: 39448 - DNA, 25 bp, Canis familiaris
actttgacaattttgccttcgcact

SEQ ID NO: 39449 - DNA, 25 bp, Canis familiaris
actttccagaatttgctcgctacac

SEQ ID NO: 39450 - DNA, 25 bp, Canis familiaris
actttgctaactgtgcacttatccc

SEQ ID NO: 39451 - DNA, 25 bp, Canis familiaris
actttgccaaatattttctccacca

SEQ ID NO: 39452 - DNA, 25 bp, Canis familiaris
actttgccaaatattttctccacca

SEQ ID NO: 39453 - DNA, 25 bp, Canis familiaris
actttgccacaatattgttctccac

SEQ ID NO: 39454 - DNA, 25 bp, Canis familiaris
actttggtagtcttgtctttgccac

SEQ ID NO: 39455 - DNA, 25 bp, Canis familiaris
acttgtggtgacatttcctggccat

SEQ ID NO: 39456 - DNA, 25 bp, Canis familiaris
acttgggaaattgctttgtgactca

SEQ ID NO: 39457 - DNA, 25 bp, Canis familiaris
acttgggagagaaggtccaggagca

SEQ ID NO: 39458 - DNA, 25 bp, Canis familiaris
actatggggaaagggctgagggcaa

SEQ ID NO: 39459 - DNA, 25 bp, Canis familiaris
acttgtggtagttggagctggtggc

SEQ ID NO: 39460 - DNA, 25 bp, Canis familiaris
acttcctgaggttgggctgggtggg

SEQ ID NO: 39461 - DNA, 25 bp, Canis familiaris
acttagaaggaatgcttagagtggg

SEQ ID NO: 39462 - DNA, 25 bp, Canis familiaris
acattagggaccctgcctaggtggc

SEQ ID NO: 39463 - DNA, 25 bp, Canis familiaris
acttagggatccaagactcgcgcag

SEQ ID NO: 39464 - DNA, 25 bp, Canis familiaris
acttaaggtgaccaacttgcctgag

SEQ ID NO: 39465 - DNA, 25 bp, Canis familiaris
acattcgacggacgaactcggcggc

SEQ ID NO: 39466 - DNA, 25 bp, Canis familiaris
acatgtggtttgtgaactgggcccc

SEQ ID NO: 39467 - DNA, 25 bp, Canis familiaris
acttgctctttgttaactcgtgcct

SEQ ID NO: 39468 - DNA, 25 bp, Canis familiaris
acttgtcatttgtttttcctcacag

SEQ ID NO: 39469 - DNA, 25 bp, Canis familiaris
actatggtgttgttttgtgtcttat

SEQ ID NO: 39470 - DNA, 25 bp, Canis familiaris
actatgaggttttattttcagaata

SEQ ID NO: 39471 - DNA, 25 bp, Canis familiaris
actagggggctgtctttatctgaat

SEQ ID NO: 39472 - DNA, 25 bp, Canis familiaris
acttggggtcttcttttcaaatgag

SEQ ID NO: 39473 - DNA, 25 bp, Canis familiaris
actttgggcttcaagagtttcaaga

SEQ ID NO: 39474 - DNA, 25 bp, Canis familiaris
acttttgcgcctgatgccttaaaat

SEQ ID NO: 39475 - DNA, 25 bp, Canis familiaris
acttttctcactctgtgcacacaaa

SEQ ID NO: 39476 - DNA, 25 bp, Canis familiaris
acttatacctcgcatgtgtcacaac

SEQ ID NO: 39477 - DNA, 25 bp, Canis familiaris
acttgtacctaccagtggcactgtg

SEQ ID NO: 39478 - DNA, 25 bp, Canis familiaris
acttgttccttgcactgaacctgaa

SEQ ID NO: 39479 - DNA, 25 bp, Canis familiaris
acttgtctgttttacggcacttact

SEQ ID NO: 39480 - DNA, 25 bp, Canis familiaris
acattttttctctcgaccttgaaat

SEQ ID NO: 39481 - DNA, 25 bp, Canis familiaris
acatttttttcaaccctttgatcat

SEQ ID NO: 39482 - DNA, 25 bp, Canis familiaris
actttttcttcagctctactgatat

SEQ ID NO: 39483 - DNA, 25 bp, Canis familiaris
acttattgtctttgcctaacgttgg

SEQ ID NO: 39484 - DNA, 25 bp, Canis familiaris
acttattattcagtctctaccgctt

SEQ ID NO: 39485 - DNA, 25 bp, Canis familiaris
acttataagcccgtctgtagcgtct

SEQ ID NO: 39486 - DNA, 25 bp, Canis familiaris
actattccatgggccttataagtta

SEQ ID NO: 39487 - DNA, 25 bp, Canis familiaris
acttgtccagttgcatctttatttg

SEQ ID NO: 39488 - DNA, 25 bp, Canis familiaris
actttcctgtgcttcagctttatca

SEQ ID NO: 39489 - DNA, 25 bp, Canis familiaris
acttctactgtgtgacttgccatga

SEQ ID NO: 39490 - DNA, 25 bp, Canis familiaris
acttcacacttgtcagaatggccaa

SEQ ID NO: 39491 - DNA, 25 bp, Canis familiaris
acttcggttgcatgaaggctgcccc

SEQ ID NO: 39492 - DNA, 25 bp, Canis familiaris
acttcggatttgaagccgctgacat

SEQ ID NO: 39493 - DNA, 25 bp, Canis familiaris
acttgggagtggaacctgtccatta

SEQ ID NO: 39494 - DNA, 25 bp, Canis familiaris
acttaaagatgaaccctgttaatct

SEQ ID NO: 39495 - DNA, 25 bp, Canis familiaris
acatctaaaagcacctgtttcaaat

SEQ ID NO: 39496 - DNA, 25 bp, Canis familiaris
acattattagctacccttcttagtt

SEQ ID NO: 39497 - DNA, 25 bp, Canis familiaris
acttttatcttggcgtttctggtct

SEQ ID NO: 39498 - DNA, 25 bp, Canis familiaris
actttgtcaagctcatttcctggta

SEQ ID NO: 39499 - DNA, 25 bp, Canis familiaris
actttgtcaagctcatttcctggta

SEQ ID NO: 39500 - DNA, 25 bp, Canis familiaris
actttggactgctgcttttctgagc

SEQ ID NO: 39501 - DNA, 25 bp, Canis familiaris
actttggagctgagtgtttcccgct

SEQ ID NO: 39502 - DNA, 25 bp, Canis familiaris
actttgtgagcgtcagtgttgatac

SEQ ID NO: 39503 - DNA, 25 bp, Canis familiaris
acttctggcacacatggggacacag

SEQ ID NO: 39504 - DNA, 25 bp, Canis familiaris
acatatctgactatagggtacctac

SEQ ID NO: 39505 - DNA, 25 bp, Canis familiaris
acattttttcattggccaaggcaac

SEQ ID NO: 39506 - DNA, 25 bp, Canis familiaris
actttctttcaaggcacttccaact

SEQ ID NO: 39507 - DNA, 25 bp, Canis familiaris
actttcttggaaaacttcagcttct

SEQ ID NO: 39508 - DNA, 25 bp, Canis familiaris
actttctttactatttcctgtcatg

SEQ ID NO: 39509 - DNA, 25 bp, Canis familiaris
aatggtcggtaggcgtgttacggtg

SEQ ID NO: 39510 - DNA, 25 bp, Canis familiaris
acatcgcccaggcacggagaacggt

SEQ ID NO: 39511 - DNA, 25 bp, Canis familiaris
aacacacctcgggtgggcaccgagt

SEQ ID NO: 39512 - DNA, 25 bp, Canis familiaris
gacgaccccagtgtgggactcgatc

SEQ ID NO: 39513 - DNA, 25 bp, Canis familiaris
acaacccctgggagaacacagtcca

SEQ ID NO: 39514 - DNA, 25 bp, Canis familiaris
acatacccctgggacaagacttctc

SEQ ID NO: 39515 - DNA, 25 bp, Canis familiaris
acttctcctggggctcggagtgttg

SEQ ID NO: 39516 - DNA, 25 bp, Canis familiaris
acttcccctgggatggagctgacgt

SEQ ID NO: 39517 - DNA, 25 bp, Canis familiaris
acttcctggcgggtggagtggccgc

SEQ ID NO: 39518 - DNA, 25 bp, Canis familiaris
ctctgtccggggtggaggccaccca

SEQ ID NO: 39519 - DNA, 25 bp, Canis familiaris
ctcttgagggtgcttggacccctcc

SEQ ID NO: 39520 - DNA, 25 bp, Canis familiaris
actagagtgttctaatggcccctgc

SEQ ID NO: 39521 - DNA, 25 bp, Canis familiaris
actagtgtatttttccacctctggt

SEQ ID NO: 39522 - DNA, 25 bp, Canis familiaris
acttgggttatttccatgtttggct

SEQ ID NO: 39523 - DNA, 25 bp, Canis familiaris
actttttgttcttcacagattttct

SEQ ID NO: 39524 - DNA, 25 bp, Canis familiaris
actattaacttcttctggtattact

SEQ ID NO: 39525 - DNA, 25 bp, Canis familiaris
acttcaaagcttttctgggtggcct

SEQ ID NO: 39526 - DNA, 25 bp, Canis familiaris
acttattatgtttcatctgggtgac

SEQ ID NO: 39527 - DNA, 25 bp, Canis familiaris
acttttcagatttttcatgggacgg

SEQ ID NO: 39528 - DNA, 25 bp, Canis familiaris
acttttcatgaacttagctgcagga

SEQ ID NO: 39529 - DNA, 25 bp, Canis familiaris
acattttgctgtattattaagactt

SEQ ID NO: 39530 - DNA, 25 bp, Canis familiaris
acatcttttctgattttaaaactag

SEQ ID NO: 39531 - DNA, 25 bp, Canis familiaris
acattctgttcttctttccaaaatt

SEQ ID NO: 39532 - DNA, 25 bp, Canis familiaris
acttcttgtctcttttgtctaacag

SEQ ID NO: 39533 - DNA, 25 bp, Canis familiaris
actatttgttcccttttgtcacagt

SEQ ID NO: 39534 - DNA, 25 bp, Canis familiaris
actatttttcaggtgtttggcattt

SEQ ID NO: 39535 - DNA, 25 bp, Canis familiaris
acatttcttctaggtatttggcaca

SEQ ID NO: 39536 - DNA, 25 bp, Canis familiaris
acattgccttttgtccattaatcag

SEQ ID NO: 39537 - DNA, 25 bp, Canis familiaris
acttcactctttttcatactattat

SEQ ID NO: 39538 - DNA, 25 bp, Canis familiaris
acttacagctttttccttactattg

SEQ ID NO: 39539 - DNA, 25 bp, Canis familiaris
acttagacattctgtcctgtccttt

SEQ ID NO: 39540 - DNA, 25 bp, Canis familiaris
acttgaaatcctgtatctgtcctgt

SEQ ID NO: 39541 - DNA, 25 bp, Canis familiaris
acttacacatcaagctgttctgccc

SEQ ID NO: 39542 - DNA, 25 bp, Canis familiaris
acttgcctatcaactgttctatcga

SEQ ID NO: 39543 - DNA, 25 bp, Canis familiaris
actatccttttcactgctgatcaag

SEQ ID NO: 39544 - DNA, 25 bp, Canis familiaris
actatctttctctgtctgcagtatg

SEQ ID NO: 39545 - DNA, 25 bp, Canis familiaris
acttcttttcctcctgagttttgag

SEQ ID NO: 39546 - DNA, 25 bp, Canis familiaris
acttctattttctctgttttctgtt

SEQ ID NO: 39547 - DNA, 25 bp, Canis familiaris
acttatgttttctggtctttctgtc

SEQ ID NO: 39548 - DNA, 25 bp, Canis familiaris
actatttttcacttgtgtcttcctg

SEQ ID NO: 39549 - DNA, 25 bp, Canis familiaris
actattgtcttttttgttagcctga

SEQ ID NO: 39550 - DNA, 25 bp, Canis familiaris
actatctctgtcatgtttttacttg

SEQ ID NO: 39551 - DNA, 25 bp, Canis familiaris
acttctttcagatttttggagctct

SEQ ID NO: 39552 - DNA, 25 bp, Canis familiaris
actttttcagtttatatgtatatta

SEQ ID NO: 39553 - DNA, 25 bp, Canis familiaris
acattgttaaatttttgtacatatt

SEQ ID NO: 39554 - DNA, 25 bp, Canis familiaris
actttctatagatgatgattaccaa

SEQ ID NO: 39555 - DNA, 25 bp, Canis familiaris
actatttgtagttgaattaccaagg

SEQ ID NO: 39556 - DNA, 25 bp, Canis familiaris
actttttggagaccattaaagagat

SEQ ID NO: 39557 - DNA, 25 bp, Canis familiaris
acttgctttggccactcagtgaata

SEQ ID NO: 39558 - DNA, 25 bp, Canis familiaris
acttgtggtgtgaccctgttcaatt

SEQ ID NO: 39559 - DNA, 25 bp, Canis familiaris
actttgtgtagatccattcatctgt

SEQ ID NO: 39560 - DNA, 25 bp, Canis familiaris
acttctgttcaatctggtcatggtt

SEQ ID NO: 39561 - DNA, 25 bp, Canis familiaris
acttctgtgatcttggggggtttct

SEQ ID NO: 39562 - DNA, 25 bp, Canis familiaris
acttctattcttggagggtcttttg

SEQ ID NO: 39563 - DNA, 25 bp, Canis familiaris
acattctattttcaagtttcatttc

SEQ ID NO: 39564 - DNA, 25 bp, Canis familiaris
actttcatcttttaatggttcaact

SEQ ID NO: 39565 - DNA, 25 bp, Canis familiaris
actttgattttatagcgtttgagct

SEQ ID NO: 39566 - DNA, 25 bp, Canis familiaris
acttatgcatatatttatcggtgga

SEQ ID NO: 39567 - DNA, 25 bp, Canis familiaris
acatatatgataatcttttccggct

SEQ ID NO: 39568 - DNA, 25 bp, Canis familiaris
actttgtgcatgtgtgttccggtgt

SEQ ID NO: 39569 - DNA, 25 bp, Canis familiaris
actttgtgatgagtcttctccgcgg

SEQ ID NO: 39570 - DNA, 25 bp, Canis familiaris
acttctgtagaacttctcctggagg

SEQ ID NO: 39571 - DNA, 25 bp, Canis familiaris
acttgagtagcttttctggttcgga

SEQ ID NO: 39572 - DNA, 25 bp, Canis familiaris
acttagttgtttcatgtcttggaga

SEQ ID NO: 39573 - DNA, 25 bp, Canis familiaris
actattgctctggcttgaattctct

SEQ ID NO: 39574 - DNA, 25 bp, Canis familiaris
actattctgctgcctctgaagatgt

SEQ ID NO: 39575 - DNA, 25 bp, Canis familiaris
actatctcattcttaatcatgattg

SEQ ID NO: 39576 - DNA, 25 bp, Canis familiaris
acttctatgatgttgcaaatgcctt

SEQ ID NO: 39577 - DNA, 25 bp, Canis familiaris
actatcttgatgtaaactgtctttg

SEQ ID NO: 39578 - DNA, 25 bp, Canis familiaris
actatcttggaagtcctctctctat

SEQ ID NO: 39579 - DNA, 25 bp, Canis familiaris
actatatgttgatcttgccttcttt

SEQ ID NO: 39580 - DNA, 25 bp, Canis familiaris
actatatttatgtttgccccaagat

SEQ ID NO: 39581 - DNA, 25 bp, Canis familiaris
acttgcacttaaatcattaccacag

SEQ ID NO: 39582 - DNA, 25 bp, Canis familiaris
acttggctttaatctaagcacatct

SEQ ID NO: 39583 - DNA, 25 bp, Canis familiaris
acttgtttctgcttccaataaatct

SEQ ID NO: 39584 - DNA, 25 bp, Canis familiaris
acttattttacttagcattatactc

SEQ ID NO: 39585 - DNA, 25 bp, Canis familiaris
actatttttccttatcagattgaca

SEQ ID NO: 39586 - DNA, 25 bp, Canis familiaris
actttttgtcctttgaagataagca

SEQ ID NO: 39587 - DNA, 25 bp, Canis familiaris
gacttttggcccaactgggatacca

SEQ ID NO: 39588 - DNA, 25 bp, Canis familiaris
actttgttcctgacacttggataca

SEQ ID NO: 39589 - DNA, 25 bp, Canis familiaris
acttatttccggaattgcagaagaa

SEQ ID NO: 39590 - DNA, 25 bp, Canis familiaris
acttcatctctctgggatggagaaa

SEQ ID NO: 39591 - DNA, 25 bp, Canis familiaris
acttctcctcttgctgagttacaag

SEQ ID NO: 39592 - DNA, 25 bp, Canis familiaris
acttctctacttgtctgtccaaggc

SEQ ID NO: 39593 - DNA, 25 bp, Canis familiaris
acttctcaagtggttttcaggggca

SEQ ID NO: 39594 - DNA, 25 bp, Canis familiaris
acttctcctgtgcttttcttggagc

SEQ ID NO: 39595 - DNA, 25 bp, Canis familiaris
acttctccttccagtgcaatgctgg

SEQ ID NO: 39596 - DNA, 25 bp, Canis familiaris
acattctgcccaggacctaatctgt

SEQ ID NO: 39597 - DNA, 25 bp, Canis familiaris
acttccagccaaacctcaaaatatt

SEQ ID NO: 39598 - DNA, 25 bp, Canis familiaris
acttctagcacaaccatctaacatt

SEQ ID NO: 39599 - DNA, 25 bp, Canis familiaris
acttaggatgctccgatctgacact

SEQ ID NO: 39600 - DNA, 25 bp, Canis familiaris
acttggagcctggctactgccagct

SEQ ID NO: 39601 - DNA, 25 bp, Canis familiaris
acatcaggatgcacattcacgacgt

SEQ ID NO: 39602 - DNA, 25 bp, Canis familiaris
acatatttcttcagactagcttctt

SEQ ID NO: 39603 - DNA, 25 bp, Canis familiaris
acatactttatgtgacttattatat

SEQ ID NO: 39604 - DNA, 25 bp, Canis familiaris
acatacctactctgagtttgtccac

SEQ ID NO: 39605 - DNA, 25 bp, Canis familiaris
acattttagctatagttattcctct

SEQ ID NO: 39606 - DNA, 25 bp, Canis familiaris
acttttgatcttttgttgtttctat

SEQ ID NO: 39607 - DNA, 25 bp, Canis familiaris
actttatagtgtttggtgctcattt

SEQ ID NO: 39608 - DNA, 25 bp, Canis familiaris
actttcatgcagttttttacacatt

SEQ ID NO: 39609 - DNA, 25 bp, Canis familiaris
acttttgcagattgggtaacacagg

SEQ ID NO: 39610 - DNA, 25 bp, Canis familiaris
acttctatgctcagtataaatccag

SEQ ID NO: 39611 - DNA, 25 bp, Canis familiaris
acttcttgttgcgttaagcccagtc

SEQ ID NO: 39612 - DNA, 25 bp, Canis familiaris
acttctttccatgaaaccatcagtc

SEQ ID NO: 39613 - DNA, 25 bp, Canis familiaris
acttctcgaccttagagaccagccc

SEQ ID NO: 39614 - DNA, 25 bp, Canis familiaris
acatacttggccaaaggagtgcagc

SEQ ID NO: 39615 - DNA, 25 bp, Canis familiaris
acatcccggaaagcgagtcaccgtt

SEQ ID NO: 39616 - DNA, 25 bp, Canis familiaris
acactgattaaaccctggtcaccgt

SEQ ID NO: 39617 - DNA, 25 bp, Canis familiaris
acacgattaaaccctgttagtcctg

SEQ ID NO: 39618 - DNA, 25 bp, Canis familiaris
acttttgagtactccttcattcctg

SEQ ID NO: 39619 - DNA, 25 bp, Canis familiaris
actttcttaacatcactgtcttgcc

SEQ ID NO: 39620 - DNA, 25 bp, Canis familiaris
acttacatccaaaccaatactagcc

SEQ ID NO: 39621 - DNA, 25 bp, Canis familiaris
acttaactacatgcacacaaccaca

SEQ ID NO: 39622 - DNA, 25 bp, Canis familiaris
acattttctgaaaacataaccagcc

SEQ ID NO: 39623 - DNA, 25 bp, Canis familiaris
acattccacgaacatgcataacccc

SEQ ID NO: 39624 - DNA, 25 bp, Canis familiaris
acttccaactcaaatgtatcatctc

SEQ ID NO: 39625 - DNA, 25 bp, Canis familiaris
acttcccaccagaattatatatcct

SEQ ID NO: 39626 - DNA, 25 bp, Canis familiaris
acttgcccactggtttaacatcctc

SEQ ID NO: 39627 - DNA, 25 bp, Canis familiaris
actttcctgctgcttttatcattta

SEQ ID NO: 39628 - DNA, 25 bp, Canis familiaris
acttgtgtcatccgtaattaatttc

SEQ ID NO: 39629 - DNA, 25 bp, Canis familiaris
acttgttcttttctcatgaatttgc

SEQ ID NO: 39630 - DNA, 25 bp, Canis familiaris
acttcgtctttaaattgcgattcac

SEQ ID NO: 39631 - DNA, 25 bp, Canis familiaris
acttcagttttacaatctgtatgcc

SEQ ID NO: 39632 - DNA, 25 bp, Canis familiaris
acttgcagttgagacgtattgtatc

SEQ ID NO: 39633 - DNA, 25 bp, Canis familiaris
actttgtctatcacagtttgttcct

SEQ ID NO: 39634 - DNA, 25 bp, Canis familiaris
acttctgttctaaggttctgttctc

SEQ ID NO: 39635 - DNA, 25 bp, Canis familiaris
actttatttatactgttcttatctc

SEQ ID NO: 39636 - DNA, 25 bp, Canis familiaris
actattcattgttaatttgttctca

SEQ ID NO: 39637 - DNA, 25 bp, Canis familiaris
acttgtcattgttcctttgtttgtt

SEQ ID NO: 39638 - DNA, 25 bp, Canis familiaris
actttgattttcttcctttgtgtgt

SEQ ID NO: 39639 - DNA, 25 bp, Canis familiaris
acaggtgtgttcttaccttgggatt

SEQ ID NO: 39640 - DNA, 25 bp, Canis familiaris
acagctggattatgaaggttgggga

SEQ ID NO: 39641 - DNA, 25 bp, Canis familiaris
acttgtttctggttgtgagctggtg

SEQ ID NO: 39642 - DNA, 25 bp, Canis familiaris
actttagattgttatggtcgggcca

SEQ ID NO: 39643 - DNA, 25 bp, Canis familiaris
acttacagattttacctcagcaggc

SEQ ID NO: 39644 - DNA, 25 bp, Canis familiaris
acttatcaatttattgtcagcacag

SEQ ID NO: 39645 - DNA, 25 bp, Canis familiaris
actttgcattgtaagttgcccaata

SEQ ID NO: 39646 - DNA, 25 bp, Canis familiaris
actttctgatggatgctcccaaata

SEQ ID NO: 39647 - DNA, 25 bp, Canis familiaris
acttttgatgtgtgtataccaatag

SEQ ID NO: 39648 - DNA, 25 bp, Canis familiaris
actttggcattgtggaagggctcat

SEQ ID NO: 39649 - DNA, 25 bp, Canis familiaris
acttcagtcaagtggcacggtgccg

SEQ ID NO: 39650 - DNA, 25 bp, Canis familiaris
acatcacagacatggtgtgccccgc

SEQ ID NO: 39651 - DNA, 25 bp, Canis familiaris
acatcctgaacatgtttgtccgcag

SEQ ID NO: 39652 - DNA, 25 bp, Canis familiaris
acttctgagtgattattcattccta

SEQ ID NO: 39653 - DNA, 25 bp, Canis familiaris
actttagtcatgtatctctctgcaa

SEQ ID NO: 39654 - DNA, 25 bp, Canis familiaris
actttcactcattaggctgcacagc

SEQ ID NO: 39655 - DNA, 25 bp, Canis familiaris
actttctctctgcagtctgggcagg

SEQ ID NO: 39656 - DNA, 25 bp, Canis familiaris
actttcctgtgccgtggtggcatat

SEQ ID NO: 39657 - DNA, 25 bp, Canis familiaris
acttctcctcctatgtgtggtatca

SEQ ID NO: 39658 - DNA, 25 bp, Canis familiaris
acttgccactcctttggtgatggat

SEQ ID NO: 39659 - DNA, 25 bp, Canis familiaris
acttcacacccattagggtggctgc

SEQ ID NO: 39660 - DNA, 25 bp, Canis familiaris
acttcacagcccagcatgggggccc

SEQ ID NO: 39661 - DNA, 25 bp, Canis familiaris
acttacggcctggcatggagacctc

SEQ ID NO: 39662 - DNA, 25 bp, Canis familiaris
acttactgggcacctgggtgcctca

SEQ ID NO: 39663 - DNA, 25 bp, Canis familiaris
acttaaggctggtctgtgttcgctt

SEQ ID NO: 39664 - DNA, 25 bp, Canis familiaris
acttgaacgcgtgctttttattcca

SEQ ID NO: 39665 - DNA, 25 bp, Canis familiaris
acttgaacgcgtgctgttttattgc

SEQ ID NO: 39666 - DNA, 25 bp, Canis familiaris
acttccccatcaacgttgttattca

SEQ ID NO: 39667 - DNA, 25 bp, Canis familiaris
acataccacttcacacttgtcagaa

SEQ ID NO: 39668 - DNA, 25 bp, Canis familiaris
acttcaactgttgatctcttcagag

SEQ ID NO: 39669 - DNA, 25 bp, Canis familiaris
acttcaagctggaacactattgggc

SEQ ID NO: 39670 - DNA, 25 bp, Canis familiaris
acttagcagtgagtacaccatacag

SEQ ID NO: 39671 - DNA, 25 bp, Canis familiaris
acttagaggcgttcagtcataatcc

SEQ ID NO: 39672 - DNA, 25 bp, Canis familiaris
acagtagagggtggaaccagtcctt

SEQ ID NO: 39673 - DNA, 25 bp, Canis familiaris
acataaagccgtaatatgccgttta

SEQ ID NO: 39674 - DNA, 25 bp, Canis familiaris
catcaaaagccgggaaacttacctg

SEQ ID NO: 39675 - DNA, 25 bp, Canis familiaris
acagaaatggtggggaacccgagtg

SEQ ID NO: 39676 - DNA, 25 bp, Canis familiaris
acagttgagtgggagtataaccgaa

SEQ ID NO: 39677 - DNA, 25 bp, Canis familiaris
acttgcatggccgctgtaaacgcta

SEQ ID NO: 39678 - DNA, 25 bp, Canis familiaris
acttctctgccgtctgcaggaacag

SEQ ID NO: 39679 - DNA, 25 bp, Canis familiaris
acattcacctcgtccaacaaagact

SEQ ID NO: 39680 - DNA, 25 bp, Canis familiaris
acattcacggtgtacgaataccaca

SEQ ID NO: 39681 - DNA, 25 bp, Canis familiaris
aagtacagttgctggcattaaaaaa

SEQ ID NO: 39682 - DNA, 25 bp, Canis familiaris
acaggaggtgtgctaactaaaaaag

SEQ ID NO: 39683 - DNA, 25 bp, Canis familiaris
acaggggttggctcaatcaagtaag

SEQ ID NO: 39684 - DNA, 25 bp, Canis familiaris
acttgggtggtgcacatacgactac

SEQ ID NO: 39685 - DNA, 25 bp, Canis familiaris
acttcgtagggactctagcgactaa

SEQ ID NO: 39686 - DNA, 25 bp, Canis familiaris
acttcagtgacatcagtgctttgac

SEQ ID NO: 39687 - DNA, 25 bp, Canis familiaris
acttcatgtagctcaggttgtgcca

SEQ ID NO: 39688 - DNA, 25 bp, Canis familiaris
aactattagcagtggtttctctggg

SEQ ID NO: 39689 - DNA, 25 bp, Canis familiaris
acatttgcaaagtgtttctccttgg

SEQ ID NO: 39690 - DNA, 25 bp, Canis familiaris
acttttatagtcgtttctgcttcag

SEQ ID NO: 39691 - DNA, 25 bp, Canis familiaris
acttttgtcattggttctctttcgt

SEQ ID NO: 39692 - DNA, 25 bp, Canis familiaris
actttattcaattgtcatctcttca

SEQ ID NO: 39693 - DNA, 25 bp, Canis familiaris
actttttccatgtatactttcactt

SEQ ID NO: 39694 - DNA, 25 bp, Canis familiaris
actttatttcttcacatgtaatctt

SEQ ID NO: 39695 - DNA, 25 bp, Canis familiaris
actttattgcctgaacatgcaaatt

SEQ ID NO: 39696 - DNA, 25 bp, Canis familiaris
actttacttgcctaacatgcaatta

SEQ ID NO: 39697 - DNA, 25 bp, Canis familiaris
actttatgatctccgcaatcagaga

SEQ ID NO: 39698 - DNA, 25 bp, Canis familiaris
acttatctgcatgccgctcagtatg

SEQ ID NO: 39699 - DNA, 25 bp, Canis familiaris
acatcagactcagaccaagttgcca

SEQ ID NO: 39700 - DNA, 25 bp, Canis familiaris
acatcatagccccagtcaaatagga

SEQ ID NO: 39701 - DNA, 25 bp, Canis familiaris
acaggaagtccacaacaagcgaacc

SEQ ID NO: 39702 - DNA, 25 bp, Canis familiaris
acagtaagtcctggaagcccgaact

SEQ ID NO: 39703 - DNA, 25 bp, Canis familiaris
aagtcagaggttttagtcggaagct

SEQ ID NO: 39704 - DNA, 25 bp, Canis familiaris
aaaagggtctttcagcgagcaaggc

SEQ ID NO: 39705 - DNA, 25 bp, Canis familiaris
acaccattggtcattaaggaaatac

SEQ ID NO: 39706 - DNA, 25 bp, Canis familiaris
aaatgctggactctacaaggtaatg

SEQ ID NO: 39707 - DNA, 25 bp, Canis familiaris
aaatcgggacttgcagggtgaagag

SEQ ID NO: 39708 - DNA, 25 bp, Canis familiaris
acactcggaacttgcgggtgaaagt

SEQ ID NO: 39709 - DNA, 25 bp, Canis familiaris
acttctgtcaccacggtgatgaaag

SEQ ID NO: 39710 - DNA, 25 bp, Canis familiaris
acttctctctccacagtttgataaa

SEQ ID NO: 39711 - DNA, 25 bp, Canis familiaris
acttcatctttcctgcctatagaaa

SEQ ID NO: 39712 - DNA, 25 bp, Canis familiaris
acattcttccatcatcactgtaaag

SEQ ID NO: 39713 - DNA, 25 bp, Canis familiaris
acatatcattctacaatgctctgat

SEQ ID NO: 39714 - DNA, 25 bp, Canis familiaris
acataatatctggacagtgcacaag

SEQ ID NO: 39715 - DNA, 25 bp, Canis familiaris
acttggatcccactggacatagcct

SEQ ID NO: 39716 - DNA, 25 bp, Canis familiaris
acttggtcctcacagaatctacact

SEQ ID NO: 39717 - DNA, 25 bp, Canis familiaris
actttctcctcgcataagcttatat

SEQ ID NO: 39718 - DNA, 25 bp, Canis familiaris
acttttcctcctctgagctagattt

SEQ ID NO: 39719 - DNA, 25 bp, Canis familiaris
acttttcctccacctaggacatgta

SEQ ID NO: 39720 - DNA, 25 bp, Canis familiaris
acttgtctccttgcttcagggatgt

SEQ ID NO: 39721 - DNA, 25 bp, Canis familiaris
acttgtaaattctttgcagtggttt

SEQ ID NO: 39722 - DNA, 25 bp, Canis familiaris
acatttactatatatttcaggtttc

SEQ ID NO: 39723 - DNA, 25 bp, Canis familiaris
acatttttttatatttgagttagct

SEQ ID NO: 39724 - DNA, 25 bp, Canis familiaris
acaattcttttgtgttccgattggt

SEQ ID NO: 39725 - DNA, 25 bp, Canis familiaris
actttttgttgttgttcacttgtgg

SEQ ID NO: 39726 - DNA, 25 bp, Canis familiaris
actttctagttcttgttgatttggg

SEQ ID NO: 39727 - DNA, 25 bp, Canis familiaris
acattagccagtgtttagtttcagg

SEQ ID NO: 39728 - DNA, 25 bp, Canis familiaris
acatgtcaaggtattacgtttcgtt

SEQ ID NO: 39729 - DNA, 25 bp, Canis familiaris
acattccatgttgttacggttaata

SEQ ID NO: 39730 - DNA, 25 bp, Canis familiaris
acattccagtgagacgtgccgtaaa

SEQ ID NO: 39731 - DNA, 25 bp, Canis familiaris
actttagtgacagctgtgcccagaa

SEQ ID NO: 39732 - DNA, 25 bp, Canis familiaris
acttttgtatgatgggcccgtcagc

SEQ ID NO: 39733 - DNA, 25 bp, Canis familiaris
acttttttatcttgcatgtcctgta

SEQ ID NO: 39734 - DNA, 25 bp, Canis familiaris
acttttgttatgactgcatttctgc

SEQ ID NO: 39735 - DNA, 25 bp, Canis familiaris
acttgtttcttcaagctcttctggc

SEQ ID NO: 39736 - DNA, 25 bp, Canis familiaris
acttacttcctggagccatttggct

SEQ ID NO: 39737 - DNA, 25 bp, Canis familiaris
acttacgtccgccactatattatcg

SEQ ID NO: 39738 - DNA, 25 bp, Canis familiaris
acttagtgtcctccagctagattat

SEQ ID NO: 39739 - DNA, 25 bp, Canis familiaris
acatctagctcaacccaatggtaaa

SEQ ID NO: 39740 - DNA, 25 bp, Canis familiaris
acatcttgcagcttcccaatgagag

SEQ ID NO: 39741 - DNA, 25 bp, Canis familiaris
acatcactcagttcaaccgaagaca

SEQ ID NO: 39742 - DNA, 25 bp, Canis familiaris
acatagccattagtgacactataga

SEQ ID NO: 39743 - DNA, 25 bp, Canis familiaris
acatacgcaactacacacatacata

SEQ ID NO: 39744 - DNA, 25 bp, Canis familiaris
aatgcaccaaatccaacccgaatgg

SEQ ID NO: 39745 - DNA, 25 bp, Canis familiaris
acatatccaaacgagtccctgtgtg

SEQ ID NO: 39746 - DNA, 25 bp, Canis familiaris
acatcttaaacctttcttctgggag

SEQ ID NO: 39747 - DNA, 25 bp, Canis familiaris
acaggtaaactggtcacttctaaag

SEQ ID NO: 39748 - DNA, 25 bp, Canis familiaris
acttttacactgggccttctacata

SEQ ID NO: 39749 - DNA, 25 bp, Canis familiaris
acttgctcaacacgggctttttaca

SEQ ID NO: 39750 - DNA, 25 bp, Canis familiaris
actttaaccggcgttatggagatca

SEQ ID NO: 39751 - DNA, 25 bp, Canis familiaris
acttgtaccggctgttatgagatca

SEQ ID NO: 39752 - DNA, 25 bp, Canis familiaris
acttgtacgcatcggggtgctggat

SEQ ID NO: 39753 - DNA, 25 bp, Canis familiaris
acttccttgcactgggtgctgtgaa

SEQ ID NO: 39754 - DNA, 25 bp, Canis familiaris
acttcgccatgattgggctgggctg

SEQ ID NO: 39755 - DNA, 25 bp, Canis familiaris
acttctgacatgtctcctggagtct

SEQ ID NO: 39756 - DNA, 25 bp, Canis familiaris
acatcccctgatacctggtatgctg

SEQ ID NO: 39757 - DNA, 25 bp, Canis familiaris
acatcaccgtgaacacattggggag

SEQ ID NO: 39758 - DNA, 25 bp, Canis familiaris
acatcagggctctccaaggggagca

SEQ ID NO: 39759 - DNA, 25 bp, Canis familiaris
acatcagattttgctcagaccagga

SEQ ID NO: 39760 - DNA, 25 bp, Canis familiaris
acatagattcttcatgtaagctgga

SEQ ID NO: 39761 - DNA, 25 bp, Canis familiaris
acttgatggctttgaagaatctgtg

SEQ ID NO: 39762 - DNA, 25 bp, Canis familiaris
acttcgcgctcttcaagcgcgtggt

SEQ ID NO: 39763 - DNA, 25 bp, Canis familiaris
acttgccaagcaacaacggggtaga

SEQ ID NO: 39764 - DNA, 25 bp, Canis familiaris
acttctccacagcacagggggtatt

SEQ ID NO: 39765 - DNA, 25 bp, Canis familiaris
cactgactcgttcccaggggtaatt

SEQ ID NO: 39766 - DNA, 25 bp, Canis familiaris
acatagccgtgctcacagttgttta

SEQ ID NO: 39767 - DNA, 25 bp, Canis familiaris
acatgagacttttgcactggtgctt

SEQ ID NO: 39768 - DNA, 25 bp, Canis familiaris
acttcatcattttcatgtgtcgtgt

SEQ ID NO: 39769 - DNA, 25 bp, Canis familiaris
acttaataatcagtgctctcatatt

SEQ ID NO: 39770 - DNA, 25 bp, Canis familiaris
acttagcattatatcctctagatcc

SEQ ID NO: 39771 - DNA, 25 bp, Canis familiaris
acatccagtgttacccaaagttcta

SEQ ID NO: 39772 - DNA, 25 bp, Canis familiaris
acagacactttccccaagaatctta

SEQ ID NO: 39773 - DNA, 25 bp, Canis familiaris
acacagaaggtctctcaggaacttt

SEQ ID NO: 39774 - DNA, 25 bp, Canis familiaris
acaaactggatctctcgtaccttac

SEQ ID NO: 39775 - DNA, 25 bp, Canis familiaris
cagctaaagtaccgcttaatccttc

SEQ ID NO: 39776 - DNA, 25 bp, Canis familiaris
acataccgtatcctgcttcagattt

SEQ ID NO: 39777 - DNA, 25 bp, Canis familiaris
acttctcttccacttctagatttag

SEQ ID NO: 39778 - DNA, 25 bp, Canis familiaris
acttgtctggtggtcttagttctga

SEQ ID NO: 39779 - DNA, 25 bp, Canis familiaris
acttcatttgggtcttgatttcaga

SEQ ID NO: 39780 - DNA, 25 bp, Canis familiaris
acttcaccatcgatctggacttcaa

SEQ ID NO: 39781 - DNA, 25 bp, Canis familiaris
acttcaccatcgccctgaaggagaa

SEQ ID NO: 39782 - DNA, 25 bp, Canis familiaris
acttgcgctccatgctgggagtgga

SEQ ID NO: 39783 - DNA, 25 bp, Canis familiaris
acattgcctgcagatgaggaggatt

SEQ ID NO: 39784 - DNA, 25 bp, Canis familiaris
acatacccagtcctggaggaatggt

SEQ ID NO: 39785 - DNA, 25 bp, Canis familiaris
aaatgcccaggctattgaggatatg

SEQ ID NO: 39786 - DNA, 25 bp, Canis familiaris
aactaccaggcctgcagaatttccc

SEQ ID NO: 39787 - DNA, 25 bp, Canis familiaris
acactatccacgctaattattaccc

SEQ ID NO: 39788 - DNA, 25 bp, Canis familiaris
acactatccacgctaattattaccc

SEQ ID NO: 39789 - DNA, 25 bp, Canis familiaris
acatcacaacaccgaaatcttctca

SEQ ID NO: 39790 - DNA, 25 bp, Canis familiaris
acataagatacggagtacatcctct

SEQ ID NO: 39791 - DNA, 25 bp, Canis familiaris
acatttgaggcagggcccatccttg

SEQ ID NO: 39792 - DNA, 25 bp, Canis familiaris
acatatctggccaggcgaatcccgt

SEQ ID NO: 39793 - DNA, 25 bp, Canis familiaris
acattggccagcaagtctgcgtacc

SEQ ID NO: 39794 - DNA, 25 bp, Canis familiaris
acatgtgtgcaagtgtgctcgcact

SEQ ID NO: 39795 - DNA, 25 bp, Canis familiaris
acattgacaacgtcacgacccggat

SEQ ID NO: 39796 - DNA, 25 bp, Canis familiaris
acttgaacagcataatccaccgcct

SEQ ID NO: 39797 - DNA, 25 bp, Canis familiaris
acttgtcaactaaatccttctgcta

SEQ ID NO: 39798 - DNA, 25 bp, Canis familiaris
acatttagtccaaagtttcctcaat

SEQ ID NO: 39799 - DNA, 25 bp, Canis familiaris
acttctttccaatgtcaactgtaat

SEQ ID NO: 39800 - DNA, 25 bp, Canis familiaris
acatttttccaaagaagccatatag

SEQ ID NO: 39801 - DNA, 25 bp, Canis familiaris
acttttctacacttgacatccagct

SEQ ID NO: 39802 - DNA, 25 bp, Canis familiaris
acttgttccaaattactcctcagtc

SEQ ID NO: 39803 - DNA, 25 bp, Canis familiaris
acatttcccaaattgaccaaccatt

SEQ ID NO: 39804 - DNA, 25 bp, Canis familiaris
acatctctaccatatataaaaccct

SEQ ID NO: 39805 - DNA, 25 bp, Canis familiaris
acatgctgtgaaggcgaacaaaatc

SEQ ID NO: 39806 - DNA, 25 bp, Canis familiaris
acatctttgaaggcacaaatcacca

SEQ ID NO: 39807 - DNA, 25 bp, Canis familiaris
aactgattgggggaaacatggcaca

SEQ ID NO: 39808 - DNA, 25 bp, Canis familiaris
aagggtgggggtgcacaggacccat

SEQ ID NO: 39809 - DNA, 25 bp, Canis familiaris
acatggctggcaaggagtccaagga

SEQ ID NO: 39810 - DNA, 25 bp, Canis familiaris
acatatgtgtgcggggtccttggac

SEQ ID NO: 39811 - DNA, 25 bp, Canis familiaris
acatccaggcggtgtccctgaagat

SEQ ID NO: 39812 - DNA, 25 bp, Canis familiaris
acatcacagggacctgacgacggaa

SEQ ID NO: 39813 - DNA, 25 bp, Canis familiaris
acatccaaggaaggcagcaggcgcg

SEQ ID NO: 39814 - DNA, 25 bp, Canis familiaris
acatccaaggaaggcagcaggcgcg

SEQ ID NO: 39815 - DNA, 25 bp, Canis familiaris
acttacagaaggcagcacatccact

SEQ ID NO: 39816 - DNA, 25 bp, Canis familiaris
acttacgtcaagccatctacgcact

SEQ ID NO: 39817 - DNA, 25 bp, Canis familiaris
acttgagctgtctgagctgacccag

SEQ ID NO: 39818 - DNA, 25 bp, Canis familiaris
acttcatgctgtatggctcactggc

SEQ ID NO: 39819 - DNA, 25 bp, Canis familiaris
acttcatcattttgaccagggcctc

SEQ ID NO: 39820 - DNA, 25 bp, Canis familiaris
acatacacatgtgaactccggctct

SEQ ID NO: 39821 - DNA, 25 bp, Canis familiaris
acttatagttatagtccaggcttct

SEQ ID NO: 39822 - DNA, 25 bp, Canis familiaris
acttaatttgtttctcagagcttat

SEQ ID NO: 39823 - DNA, 25 bp, Canis familiaris
acttattctagtgttgctggcttac

SEQ ID NO: 39824 - DNA, 25 bp, Canis familiaris
acttattcatagtctgtctctctct

SEQ ID NO: 39825 - DNA, 25 bp, Canis familiaris
acttcatcgtagtcatcagtccttc

SEQ ID NO: 39826 - DNA, 25 bp, Canis familiaris
acttcatcactatctatcatccgtc

SEQ ID NO: 39827 - DNA, 25 bp, Canis familiaris
acatcttcctaagccagcacagtgt

SEQ ID NO: 39828 - DNA, 25 bp, Canis familiaris
acttgccgtgaagaccactgggctc

SEQ ID NO: 39829 - DNA, 25 bp, Canis familiaris
acttccaggaagtgctctcagggca

SEQ ID NO: 39830 - DNA, 25 bp, Canis familiaris
acttcacaggagggagaccaggagc

SEQ ID NO: 39831 - DNA, 25 bp, Canis familiaris
acatccccagaagggtcctggagcc

SEQ ID NO: 39832 - DNA, 25 bp, Canis familiaris
acttgaccacggcgagtctggagcc

SEQ ID NO: 39833 - DNA, 25 bp, Canis familiaris
acagtgaaaccccagagtcgaagcc

SEQ ID NO: 39834 - DNA, 25 bp, Canis familiaris
acaagaaattcctccatcagggcct

SEQ ID NO: 39835 - DNA, 25 bp, Canis familiaris
acacaggagtttgtctctcggcgtt

SEQ ID NO: 39836 - DNA, 25 bp, Canis familiaris
acataggagtggattcctgccccaa

SEQ ID NO: 39837 - DNA, 25 bp, Canis familiaris
acatatagctgtccagttttcccac

SEQ ID NO: 39838 - DNA, 25 bp, Canis familiaris
acataacagtcttctttcactctac

SEQ ID NO: 39839 - DNA, 25 bp, Canis familiaris
acatattttccatcattcactctaa

SEQ ID NO: 39840 - DNA, 25 bp, Canis familiaris
acatactgttcatacaatcctcaca

SEQ ID NO: 39841 - DNA, 25 bp, Canis familiaris
acatcattaccaatttatcctccgt

SEQ ID NO: 39842 - DNA, 25 bp, Canis familiaris
acatgctcatccgtgaggtcatcct

SEQ ID NO: 39843 - DNA, 25 bp, Canis familiaris
aaattccctaggatccttgacagtt

SEQ ID NO: 39844 - DNA, 25 bp, Canis familiaris
aaattcccaaagccatatttaactg

SEQ ID NO: 39845 - DNA, 25 bp, Canis familiaris
aagatttctaacccatggtacccag

SEQ ID NO: 39846 - DNA, 25 bp, Canis familiaris
aagattcctatacacaggaacccta

SEQ ID NO: 39847 - DNA, 25 bp, Canis familiaris
aagtacaccagacacggaaacgccg

SEQ ID NO: 39848 - DNA, 25 bp, Canis familiaris
acagttagcccacacggatagaccg

SEQ ID NO: 39849 - DNA, 25 bp, Canis familiaris
acttctagcctccagactgtgagag

SEQ ID NO: 39850 - DNA, 25 bp, Canis familiaris
gactttgagtcccaatcgtcttttt

SEQ ID NO: 39851 - DNA, 25 bp, Canis familiaris
acttcatactaccagtttcttttag

SEQ ID NO: 39852 - DNA, 25 bp, Canis familiaris
acttcaactgaggttccttttgctc

SEQ ID NO: 39853 - DNA, 25 bp, Canis familiaris
acttcgatctggattcgcactgggc

SEQ ID NO: 39854 - DNA, 25 bp, Canis familiaris
acttcgtggtgtggatgcgcacggc

SEQ ID NO: 39855 - DNA, 25 bp, Canis familiaris
acattcgggagttgggcagctgtgc

SEQ ID NO: 39856 - DNA, 25 bp, Canis familiaris
acattcgcagggttcggatgaggcc

SEQ ID NO: 39857 - DNA, 25 bp, Canis familiaris
acttccaggcccatagcatggggct

SEQ ID NO: 39858 - DNA, 25 bp, Canis familiaris
acttccaggcccacagcatggggct

SEQ ID NO: 39859 - DNA, 25 bp, Canis familiaris
acttcacgcgctcaggcgatgaggg

SEQ ID NO: 39860 - DNA, 25 bp, Canis familiaris
acttcatccgtggagcacacagggg

SEQ ID NO: 39861 - DNA, 25 bp, Canis familiaris
acatacatgcacatgcacgcacaca

SEQ ID NO: 39862 - DNA, 25 bp, Canis familiaris
acatacacatgcacacaaaaccaac

SEQ ID NO: 39863 - DNA, 25 bp, Canis familiaris
acatatcctccggcaaaacgccgtg

SEQ ID NO: 39864 - DNA, 25 bp, Canis familiaris
acttccttcccttagaagcctgagt

SEQ ID NO: 39865 - DNA, 25 bp, Canis familiaris
acatcccttcccggaaacagcatga

SEQ ID NO: 39866 - DNA, 25 bp, Canis familiaris
cagttcacttacaggcaaaagatgc

SEQ ID NO: 39867 - DNA, 25 bp, Canis familiaris
acttcacaagacatggacaatagac

SEQ ID NO: 39868 - DNA, 25 bp, Canis familiaris
acttcctagacgagatacacgcatc

SEQ ID NO: 39869 - DNA, 25 bp, Canis familiaris
acttcgtggcgcgtatgatacccaa

SEQ ID NO: 39870 - DNA, 25 bp, Canis familiaris
acattcctggctgttactccaagaa

SEQ ID NO: 39871 - DNA, 25 bp, Canis familiaris
acattgccgactgatgaagacagca

SEQ ID NO: 39872 - DNA, 25 bp, Canis familiaris
acttgccagaagtgacaaagataag

SEQ ID NO: 39873 - DNA, 25 bp, Canis familiaris
acttccagaggacacaacatataaa

SEQ ID NO: 39874 - DNA, 25 bp, Canis familiaris
acttctctgaggtcgaacagctctc

SEQ ID NO: 39875 - DNA, 25 bp, Canis familiaris
acttctcggtgctgatatagctcac

SEQ ID NO: 39876 - DNA, 25 bp, Canis familiaris
acttctttgtgaggctattgctctc

SEQ ID NO: 39877 - DNA, 25 bp, Canis familiaris
acttctttcatatgcttgagtctcc

SEQ ID NO: 39878 - DNA, 25 bp, Canis familiaris
acatatacttcaagccttattcatt

SEQ ID NO: 39879 - DNA, 25 bp, Canis familiaris
acatccttatcaacctgtatggcat

SEQ ID NO: 39880 - DNA, 25 bp, Canis familiaris
acattcttctagaccgttacacgtt

SEQ ID NO: 39881 - DNA, 25 bp, Canis familiaris
acattccactaccactggggactgt

SEQ ID NO: 39882 - DNA, 25 bp, Canis familiaris
acattccagatgtccttggggggtg

SEQ ID NO: 39883 - DNA, 25 bp, Canis familiaris
acatcgacgacgacctggaggggga

SEQ ID NO: 39884 - DNA, 25 bp, Canis familiaris
acacgaccaagtgctttcacgggct

SEQ ID NO: 39885 - DNA, 25 bp, Canis familiaris
aaaatgtacaggctttccagggcag

SEQ ID NO: 39886 - DNA, 25 bp, Canis familiaris
acattgtggccacagttgaccggga

SEQ ID NO: 39887 - DNA, 25 bp, Canis familiaris
acatgtaagtccgggtgcaccgtgg

SEQ ID NO: 39888 - DNA, 25 bp, Canis familiaris
acattaggattcacaccacctgtaa

SEQ ID NO: 39889 - DNA, 25 bp, Canis familiaris
acttgaggaaggggccctctgatat

SEQ ID NO: 39890 - DNA, 25 bp, Canis familiaris
cagttggctaagtgtcagcccgtgt

SEQ ID NO: 39891 - DNA, 25 bp, Canis familiaris
acttggataagctctagacacggtg

SEQ ID NO: 39892 - DNA, 25 bp, Canis familiaris
acattggatatgccactctactccg

SEQ ID NO: 39893 - DNA, 25 bp, Canis familiaris
acatctagtgtatcatatggcccag

SEQ ID NO: 39894 - DNA, 25 bp, Canis familiaris
acatttttgttaatggccaaggcca

SEQ ID NO: 39895 - DNA, 25 bp, Canis familiaris
acttcatttgttttgcccaagactg

SEQ ID NO: 39896 - DNA, 25 bp, Canis familiaris
acttcttcccatttgccaagagggg

SEQ ID NO: 39897 - DNA, 25 bp, Canis familiaris
acattccccaatttcaaccagaggg

SEQ ID NO: 39898 - DNA, 25 bp, Canis familiaris
acttccccaatctgcagcagcagag

SEQ ID NO: 39899 - DNA, 25 bp, Canis familiaris
acattgcacaaactcttcagccagg

SEQ ID NO: 39900 - DNA, 25 bp, Canis familiaris
acattggcaatccatgctttaaggc

SEQ ID NO: 39901 - DNA, 25 bp, Canis familiaris
acttgtgacatattctcttaagggg

SEQ ID NO: 39902 - DNA, 25 bp, Canis familiaris
acttgtgactttggttttgtggatc

SEQ ID NO: 39903 - DNA, 25 bp, Canis familiaris
acttctgcagcatttggtacgggga

SEQ ID NO: 39904 - DNA, 25 bp, Canis familiaris
acttgggcatcattggtacctggtg

SEQ ID NO: 39905 - DNA, 25 bp, Canis familiaris
acattggagcaatggtccctggacc

SEQ ID NO: 39906 - DNA, 25 bp, Canis familiaris
acattggagccattggtcccttgga

SEQ ID NO: 39907 - DNA, 25 bp, Canis familiaris
acatcgagaaggtgcgcttcctgga

SEQ ID NO: 39908 - DNA, 25 bp, Canis familiaris
acatccagaagttcacgtttgtgtg

SEQ ID NO: 39909 - DNA, 25 bp, Canis familiaris
acattgcagatactaacccttggtg

SEQ ID NO: 39910 - DNA, 25 bp, Canis familiaris
acattcacaaattaccacttgtaaa

SEQ ID NO: 39911 - DNA, 25 bp, Canis familiaris
acttgccaaaatagccatttctaag

SEQ ID NO: 39912 - DNA, 25 bp, Canis familiaris
acttgctcaaaatacattgatgtca

SEQ ID NO: 39913 - DNA, 25 bp, Canis familiaris
acatactccaattaaagagatgact

SEQ ID NO: 39914 - DNA, 25 bp, Canis familiaris
acattccacattttaatctgagcct

SEQ ID NO: 39915 - DNA, 25 bp, Canis familiaris
acttccagcaaccaaatccaactgt

SEQ ID NO: 39916 - DNA, 25 bp, Canis familiaris
acttccatgacatgtttcagccctt

SEQ ID NO: 39917 - DNA, 25 bp, Canis familiaris
acatgtccgtcatattaacctttat

SEQ ID NO: 39918 - DNA, 25 bp, Canis familiaris
acaggcctccaacaacctgttgttt

SEQ ID NO: 39919 - DNA, 25 bp, Canis familiaris
acattggacatctgtaaatctttgt

SEQ ID NO: 39920 - DNA, 25 bp, Canis familiaris
acttgtacagtttaaatcttttgag

SEQ ID NO: 39921 - DNA, 25 bp, Canis familiaris
acttggaggctttcagtttttctga

SEQ ID NO: 39922 - DNA, 25 bp, Canis familiaris
acttgaggcttatctatgtgtttta

SEQ ID NO: 39923 - DNA, 25 bp, Canis familiaris
acttgagtttacatattttcctaat

SEQ ID NO: 39924 - DNA, 25 bp, Canis familiaris
acttggctttagaatgttttacaca

SEQ ID NO: 39925 - DNA, 25 bp, Canis familiaris
acttggctgtttccataatttggct

SEQ ID NO: 39926 - DNA, 25 bp, Canis familiaris
acttgggccctgccaattaatgtta

SEQ ID NO: 39927 - DNA, 25 bp, Canis familiaris
acttgggagcctggtcttagatgtg

SEQ ID NO: 39928 - DNA, 25 bp, Canis familiaris
acttggaggccaagatccatcagac

SEQ ID NO: 39929 - DNA, 25 bp, Canis familiaris
acttggaagtttagcaccagcatcc

SEQ ID NO: 39930 - DNA, 25 bp, Canis familiaris
acttgaaaacggccaactgcacttt

SEQ ID NO: 39931 - DNA, 25 bp, Canis familiaris
acttgaaaacgccttgcaaacttgg

SEQ ID NO: 39932 - DNA, 25 bp, Canis familiaris
acatgttttacgcttgataatccag

SEQ ID NO: 39933 - DNA, 25 bp, Canis familiaris
acttgctttcgttttgaactgcgct

SEQ ID NO: 39934 - DNA, 25 bp, Canis familiaris
acttgtttgctgatctgtgaacctt

SEQ ID NO: 39935 - DNA, 25 bp, Canis familiaris
acttgctgattgcttatggaggtta

SEQ ID NO: 39936 - DNA, 25 bp, Canis familiaris
acttctgtcctcatgcattaggctt

SEQ ID NO: 39937 - DNA, 25 bp, Canis familiaris
acttgtggccatgatgttcagatgt

SEQ ID NO: 39938 - DNA, 25 bp, Canis familiaris
acttgtgggttatccagtgtctttt

SEQ ID NO: 39939 - DNA, 25 bp, Canis familiaris
acattggtgtgtcatccgaggggtt

SEQ ID NO: 39940 - DNA, 25 bp, Canis familiaris
acataaggagggcccgaggcaggaa

SEQ ID NO: 39941 - DNA, 25 bp, Canis familiaris
acatcagaggagctgccgggtcgat

SEQ ID NO: 39942 - DNA, 25 bp, Canis familiaris
acatcatcagtacggtccggttgat

SEQ ID NO: 39943 - DNA, 25 bp, Canis familiaris
acatcaagataaatggtcagttgtc

SEQ ID NO: 39944 - DNA, 25 bp, Canis familiaris
acatcagtgttaattctgagttggc

SEQ ID NO: 39945 - DNA, 25 bp, Canis familiaris
acatgactagtattttattctggca

SEQ ID NO: 39946 - DNA, 25 bp, Canis familiaris
acattatagttctgtactgtatcaa

SEQ ID NO: 39947 - DNA, 25 bp, Canis familiaris
acatctataaccagtacgtacgctt

SEQ ID NO: 39948 - DNA, 25 bp, Canis familiaris
cagaagcggtccattccgtacgttt

SEQ ID NO: 39949 - DNA, 25 bp, Canis familiaris
ccaaggttccggagctgtccagaat

SEQ ID NO: 39950 - DNA, 25 bp, Canis familiaris
acagaggttcctaaccgttcatgga

SEQ ID NO: 39951 - DNA, 25 bp, Canis familiaris
acttcatgtctcccaaccttaagag

SEQ ID NO: 39952 - DNA, 25 bp, Canis familiaris
acttgagactcacttacctgtgacg

SEQ ID NO: 39953 - DNA, 25 bp, Canis familiaris
acttgagtattttaccatggatcat

SEQ ID NO: 39954 - DNA, 25 bp, Canis familiaris
acttggtatttctacatatatcaat

SEQ ID NO: 39955 - DNA, 25 bp, Canis familiaris
acttcgtcattttcatcatcttcgg

SEQ ID NO: 39956 - DNA, 25 bp, Canis familiaris
acttcctcagttgcttctattctga

SEQ ID NO: 39957 - DNA, 25 bp, Canis familiaris
acttccatcgtgaatctttataatg

SEQ ID NO: 39958 - DNA, 25 bp, Canis familiaris
acttctatcagagatcctgttagag

SEQ ID NO: 39959 - DNA, 25 bp, Canis familiaris
acttcttcaagcaactcggtacttt

SEQ ID NO: 39960 - DNA, 25 bp, Canis familiaris
acatttctaagaactcactgtcagt

SEQ ID NO: 39961 - DNA, 25 bp, Canis familiaris
acatcttctaactccaggcagagga

SEQ ID NO: 39962 - DNA, 25 bp, Canis familiaris
acttgtggaaccccaggatgagata

SEQ ID NO: 39963 - DNA, 25 bp, Canis familiaris
acttcttactccgcactatattacg

SEQ ID NO: 39964 - DNA, 25 bp, Canis familiaris
acatattgcgacagcccactatatt

SEQ ID NO: 39965 - DNA, 25 bp, Canis familiaris
acatactggatcagccacttttctg

SEQ ID NO: 39966 - DNA, 25 bp, Canis familiaris
acttctagacatgtctctggtcacg

SEQ ID NO: 39967 - DNA, 25 bp, Canis familiaris
acttctgcagaaatcctatgtctca

SEQ ID NO: 39968 - DNA, 25 bp, Canis familiaris
acttctcatgaatgcacaggatctc

SEQ ID NO: 39969 - DNA, 25 bp, Canis familiaris
acttcgataaggcatggctgctccc

SEQ ID NO: 39970 - DNA, 25 bp, Canis familiaris
acagcccaaaggcagctggcatgcc

SEQ ID NO: 39971 - DNA, 25 bp, Canis familiaris
acttccgaaggatgctgccatcttg

SEQ ID NO: 39972 - DNA, 25 bp, Canis familiaris
acattccacaagcattgccttctta

SEQ ID NO: 39973 - DNA, 25 bp, Canis familiaris
acagtcccaagttcgtgagttaatt

SEQ ID NO: 39974 - DNA, 25 bp, Canis familiaris
acatgtcctagggaagtttccaatt

SEQ ID NO: 39975 - DNA, 25 bp, Canis familiaris
acatgtcctagggaaagtttcaaat

SEQ ID NO: 39976 - DNA, 25 bp, Canis familiaris
acattttgggtggactgttctaaat

SEQ ID NO: 39977 - DNA, 25 bp, Canis familiaris
acattttgtcttcagtgtactccaa

SEQ ID NO: 39978 - DNA, 25 bp, Canis familiaris
acatgtttctcccaagaaaaccaat

SEQ ID NO: 39979 - DNA, 25 bp, Canis familiaris
acttctctctaaggagaatggccca

SEQ ID NO: 39980 - DNA, 25 bp, Canis familiaris
acatttgtcatatccaaaggtccca

SEQ ID NO: 39981 - DNA, 25 bp, Canis familiaris
acattttaaaccatttcatcccatc

SEQ ID NO: 39982 - DNA, 25 bp, Canis familiaris
acataattcggaacgtatctctccc

SEQ ID NO: 39983 - DNA, 25 bp, Canis familiaris
acatattcctcagaccatatcttcc

SEQ ID NO: 39984 - DNA, 25 bp, Canis familiaris
acttctcgtcaaatgtctatcttcc

SEQ ID NO: 39985 - DNA, 25 bp, Canis familiaris
acttgtcagatcttagtaacatttc

SEQ ID NO: 39986 - DNA, 25 bp, Canis familiaris
acttgtgcgtattcatgtaaatgtt

SEQ ID NO: 39987 - DNA, 25 bp, Canis familiaris
acatttggatggtagtgagttttaa

SEQ ID NO: 39988 - DNA, 25 bp, Canis familiaris
acatcttggacgcagcgggtacttc

SEQ ID NO: 39989 - DNA, 25 bp, Canis familiaris
acatgcatatgaacacacacgtgtg

SEQ ID NO: 39990 - DNA, 25 bp, Canis familiaris
acatgctacatatctggcgtggggc

SEQ ID NO: 39991 - DNA, 25 bp, Canis familiaris
acatgcttcatcgtcggtccgggct

SEQ ID NO: 39992 - DNA, 25 bp, Canis familiaris
acatcttatttttctcactcatggc

SEQ ID NO: 39993 - DNA, 25 bp, Canis familiaris
acaggtaagtcaatgccccagagcg

SEQ ID NO: 39994 - DNA, 25 bp, Canis familiaris
acataggggtcaacaactcgggcgt

SEQ ID NO: 39995 - DNA, 25 bp, Canis familiaris
acaggctggttctcaaccggagcct

SEQ ID NO: 39996 - DNA, 25 bp, Canis familiaris
acaggcgaggcctcaacctagaaat

SEQ ID NO: 39997 - DNA, 25 bp, Canis familiaris
acttggacaggctttgcccataaaa

SEQ ID NO: 39998 - DNA, 25 bp, Canis familiaris
acttcgaagcacgttgcacgtgaac

SEQ ID NO: 39999 - DNA, 25 bp, Canis familiaris
acttcgacaccctacaagtgcaaag

SEQ ID NO: 40000 - DNA, 25 bp, Canis familiaris
acttccacgccattgacgagtacaa

SEQ ID NO: 40001 - DNA, 25 bp, Canis familiaris
acttccaagccttattcagtgacaa

SEQ ID NO: 40002 - DNA, 25 bp, Canis familiaris
acttcccagcctcgagaactgtaag

SEQ ID NO: 40003 - DNA, 25 bp, Canis familiaris
acttctccacctcggaggaggacga

SEQ ID NO: 40004 - DNA, 25 bp, Canis familiaris
acttcccatgcctaaaggataactg

SEQ ID NO: 40005 - DNA, 25 bp, Canis familiaris
acttccctgccatcaactgggatga

SEQ ID NO: 40006 - DNA, 25 bp, Canis familiaris
acttgccctgtatcatccaggcaca

SEQ ID NO: 40007 - DNA, 25 bp, Canis familiaris
acttgccttgattaactcaacaggg

SEQ ID NO: 40008 - DNA, 25 bp, Canis familiaris
acttgctcatttactactcagcaaa

SEQ ID NO: 40009 - DNA, 25 bp, Canis familiaris
acttgctcatccgtcgacgagaatt

SEQ ID NO: 40010 - DNA, 25 bp, Canis familiaris
acttgcctcctgctggcattgaatt

SEQ ID NO: 40011 - DNA, 25 bp, Canis familiaris
acttgcccagatgttctcagatatg

SEQ ID NO: 40012 - DNA, 25 bp, Canis familiaris
acttgttccatgtgtctccatgatg

SEQ ID NO: 40013 - DNA, 25 bp, Canis familiaris
acttggtaatgtttctcatctgagc

SEQ ID NO: 40014 - DNA, 25 bp, Canis familiaris
acattggttaagttctgctgggaga

SEQ ID NO: 40015 - DNA, 25 bp, Canis familiaris
acttccttcggtcctgtgggagaat

SEQ ID NO: 40016 - DNA, 25 bp, Canis familiaris
acttgcctcctggtagcttttggaa

SEQ ID NO: 40017 - DNA, 25 bp, Canis familiaris
acattcccgctcttggttgttggga

SEQ ID NO: 40018 - DNA, 25 bp, Canis familiaris
acttccagacttgggtttcttgtgt

SEQ ID NO: 40019 - DNA, 25 bp, Canis familiaris
acttccaacttcttgttggttcttg

SEQ ID NO: 40020 - DNA, 25 bp, Canis familiaris
acttcccaggacaatttgccttctt

SEQ ID NO: 40021 - DNA, 25 bp, Canis familiaris
acttcccatgtaatattgacccttt

SEQ ID NO: 40022 - DNA, 25 bp, Canis familiaris
acttcctctggaataaacctgcttt

SEQ ID NO: 40023 - DNA, 25 bp, Canis familiaris
acttcctctactcagaactctgtaa

SEQ ID NO: 40024 - DNA, 25 bp, Canis familiaris
acattcctctattaacacacctgat

SEQ ID NO: 40025 - DNA, 25 bp, Canis familiaris
acatagtacctgtcaagccgttatt

SEQ ID NO: 40026 - DNA, 25 bp, Canis familiaris
acatttatcccattaccttaagtag

SEQ ID NO: 40027 - DNA, 25 bp, Canis familiaris
acttccactcacctgatatttaagt

SEQ ID NO: 40028 - DNA, 25 bp, Canis familiaris
acttccgcacacagttcttgtatat

SEQ ID NO: 40029 - DNA, 25 bp, Canis familiaris
acttcccaacatttttcttaggctg

SEQ ID NO: 40030 - DNA, 25 bp, Canis familiaris
acttgcccaagtattctcagatatg

SEQ ID NO: 40031 - DNA, 25 bp, Canis familiaris
acttcccgcgtcattagcagagtga

SEQ ID NO: 40032 - DNA, 25 bp, Canis familiaris
acaccacccgtcattgaaggtccgg

SEQ ID NO: 40033 - DNA, 25 bp, Canis familiaris
acaatcctacttcggaacgagtccg

SEQ ID NO: 40034 - DNA, 25 bp, Canis familiaris
acattctctactgcgagggcgagct

SEQ ID NO: 40035 - DNA, 25 bp, Canis familiaris
acattgttgccaaagaggtggtctc

SEQ ID NO: 40036 - DNA, 25 bp, Canis familiaris
acttgttgcctctgggatttgtctt

SEQ ID NO: 40037 - DNA, 25 bp, Canis familiaris
acttggccctgtatggtctattttc

SEQ ID NO: 40038 - DNA, 25 bp, Canis familiaris
acttgtccctgaccagataccattt

SEQ ID NO: 40039 - DNA, 25 bp, Canis familiaris
acatcgtaacgtcaaacacattcta

SEQ ID NO: 40040 - DNA, 25 bp, Canis familiaris
acatagtaggtgctgaataaatatt

SEQ ID NO: 40041 - DNA, 25 bp, Canis familiaris
acataggatgggcccgatgcaggaa

SEQ ID NO: 40042 - DNA, 25 bp, Canis familiaris
acatcagcgatggggtggtcaaaga

SEQ ID NO: 40043 - DNA, 25 bp, Canis familiaris
acatctgctgtgcctggttgaagta

SEQ ID NO: 40044 - DNA, 25 bp, Canis familiaris
acatcttatagttctgtcacgatat

SEQ ID NO: 40045 - DNA, 25 bp, Canis familiaris
acatcacctgaaacggcaagaaagc

SEQ ID NO: 40046 - DNA, 25 bp, Canis familiaris
acatgtgccaaaatcctaagtcaac

SEQ ID NO: 40047 - DNA, 25 bp, Canis familiaris
acttccgatttctgatgaccatgac

SEQ ID NO: 40048 - DNA, 25 bp, Canis familiaris
acttcctgatattgttgatacatgc

SEQ ID NO: 40049 - DNA, 25 bp, Canis familiaris
acttgctctcaatttcttaatccat

SEQ ID NO: 40050 - DNA, 25 bp, Canis familiaris
acttgctctcttggtctcaaatcaa

SEQ ID NO: 40051 - DNA, 25 bp, Canis familiaris
acttgttctcagtatgtgctaccaa

SEQ ID NO: 40052 - DNA, 25 bp, Canis familiaris
acttgtctacagtgctatacctaat

SEQ ID NO: 40053 - DNA, 25 bp, Canis familiaris
acatttgtactttgaaacgctaata

SEQ ID NO: 40054 - DNA, 25 bp, Canis familiaris
acataattattattccaacactaat

SEQ ID NO: 40055 - DNA, 25 bp, Canis familiaris
acataaatatttgccaattccagtt

SEQ ID NO: 40056 - DNA, 25 bp, Canis familiaris
acattgggtgtttcccttagcagtt

SEQ ID NO: 40057 - DNA, 25 bp, Canis familiaris
acatttggtgtttccagttaccagt

SEQ ID NO: 40058 - DNA, 25 bp, Canis familiaris
acattgtggtgtggcatctagtctg

SEQ ID NO: 40059 - DNA, 25 bp, Canis familiaris
acttgtgactgtagaccattcctta

SEQ ID NO: 40060 - DNA, 25 bp, Canis familiaris
acttgagttgtatccatatatcttg

SEQ ID NO: 40061 - DNA, 25 bp, Canis familiaris
acttgcacttgttacttgagacccc

SEQ ID NO: 40062 - DNA, 25 bp, Canis familiaris
acattgacgagtgcctctcaagtcc

SEQ ID NO: 40063 - DNA, 25 bp, Canis familiaris
acttgagcaggtgcctctgcagagg

SEQ ID NO: 40064 - DNA, 25 bp, Canis familiaris
acattactattcattctggcactcc

SEQ ID NO: 40065 - DNA, 25 bp, Canis familiaris
acttggtcttgcagttgctgttcca

SEQ ID NO: 40066 - DNA, 25 bp, Canis familiaris
acttggcctgcttagttggtacact

SEQ ID NO: 40067 - DNA, 25 bp, Canis familiaris
acattgtttgcttaaatggcagact

SEQ ID NO: 40068 - DNA, 25 bp, Canis familiaris
acttgttggcgctgcagtggcaggc

SEQ ID NO: 40069 - DNA, 25 bp, Canis familiaris
acttgttctgcctggctgggagttg

SEQ ID NO: 40070 - DNA, 25 bp, Canis familiaris
acatgttttcttggcctggatagtg

SEQ ID NO: 40071 - DNA, 25 bp, Canis familiaris
acattatttcttagccatagcatgc

SEQ ID NO: 40072 - DNA, 25 bp, Canis familiaris
acattgctttgcctatgactactgc

SEQ ID NO: 40073 - DNA, 25 bp, Canis familiaris
acatttgtggcacacccagtgccct

SEQ ID NO: 40074 - DNA, 25 bp, Canis familiaris
acatattccacacacccaatgaact

SEQ ID NO: 40075 - DNA, 25 bp, Canis familiaris
acatcttccaagtcattccaataaa

SEQ ID NO: 40076 - DNA, 25 bp, Canis familiaris
acatctactagattttctccaaatt

SEQ ID NO: 40077 - DNA, 25 bp, Canis familiaris
acatttccagtgtttgatcccaaat

SEQ ID NO: 40078 - DNA, 25 bp, Canis familiaris
acattttaaattcactgcaccacaa

SEQ ID NO: 40079 - DNA, 25 bp, Canis familiaris
acattcaataaacttctctcacctc

SEQ ID NO: 40080 - DNA, 25 bp, Canis familiaris
acatccaaaaattatgcctcgggta

SEQ ID NO: 40081 - DNA, 25 bp, Canis familiaris
acatcccaattcaaatgcccatagc

SEQ ID NO: 40082 - DNA, 25 bp, Canis familiaris
acatatatcaattaagcagccacaa

SEQ ID NO: 40083 - DNA, 25 bp, Canis familiaris
acattgcatccctaagactctaaag

SEQ ID NO: 40084 - DNA, 25 bp, Canis familiaris
acattcaaacaaacacactcaacag

SEQ ID NO: 40085 - DNA, 25 bp, Canis familiaris
acattaataagaaatcagccgtagc

SEQ ID NO: 40086 - DNA, 25 bp, Canis familiaris
acattttaggatttcagcttctcac

SEQ ID NO: 40087 - DNA, 25 bp, Canis familiaris
acattgcttagaacttcactttcaa

SEQ ID NO: 40088 - DNA, 25 bp, Canis familiaris
acatttaaactctcagtcagtgcta

SEQ ID NO: 40089 - DNA, 25 bp, Canis familiaris
acatttacacatctagcagtcagtt

SEQ ID NO: 40090 - DNA, 25 bp, Canis familiaris
acattttcaatacagccacatgctt

SEQ ID NO: 40091 - DNA, 25 bp, Canis familiaris
acttgttcaaaccattcatcgtcct

SEQ ID NO: 40092 - DNA, 25 bp, Canis familiaris
acattgttcaaagtttctggttctc

SEQ ID NO: 40093 - DNA, 25 bp, Canis familiaris
acttgttagcagtcttcttgcgtgt

SEQ ID NO: 40094 - DNA, 25 bp, Canis familiaris
acttggcttgaatcacttcgttccg

SEQ ID NO: 40095 - DNA, 25 bp, Canis familiaris
acattggctacattaccttcgtgct

SEQ ID NO: 40096 - DNA, 25 bp, Canis familiaris
acttggtcaccatcaaagcagctgc

SEQ ID NO: 40097 - DNA, 25 bp, Canis familiaris
acattgagtttcccaagctgactga

SEQ ID NO: 40098 - DNA, 25 bp, Canis familiaris
aagctggtctcataaaggacggggt

SEQ ID NO: 40099 - DNA, 25 bp, Canis familiaris
acaccagacacggaaacgccgggag

SEQ ID NO: 40100 - DNA, 25 bp, Canis familiaris
acatccggaacagaccgccgaggag

SEQ ID NO: 40101 - DNA, 25 bp, Canis familiaris
cactccggaccagagcgggacaggc

SEQ ID NO: 40102 - DNA, 25 bp, Canis familiaris
acaccagaacttgcgcaacgccaac

SEQ ID NO: 40103 - DNA, 25 bp, Canis familiaris
acaccaaacggcccagtacaggact

SEQ ID NO: 40104 - DNA, 25 bp, Canis familiaris
acattcgaacgggcaagtgttggac

SEQ ID NO: 40105 - DNA, 25 bp, Canis familiaris
acatgggaaggtgcatccgtggccc

SEQ ID NO: 40106 - DNA, 25 bp, Canis familiaris
acagggcatgagggcccctaagccg

SEQ ID NO: 40107 - DNA, 25 bp, Canis familiaris
acagggcagggaggaccagaagtca

SEQ ID NO: 40108 - DNA, 25 bp, Canis familiaris
acagtggcggagacccgacaatcaa

SEQ ID NO: 40109 - DNA, 25 bp, Canis familiaris
acagctacgggagccagtactacaa

SEQ ID NO: 40110 - DNA, 25 bp, Canis familiaris
acacatggggctcctaagtttacaa

SEQ ID NO: 40111 - DNA, 25 bp, Canis familiaris
acatgggggctcctaggtttacaag

SEQ ID NO: 40112 - DNA, 25 bp, Canis familiaris
acatggggctcctaagtttacaaag

SEQ ID NO: 40113 - DNA, 25 bp, Canis familiaris
acattgggccagcaagtctgctgac

SEQ ID NO: 40114 - DNA, 25 bp, Canis familiaris
acatccaggcctgaaggtggcaccc

SEQ ID NO: 40115 - DNA, 25 bp, Canis familiaris
acatccatgaacttcagggtccaac

SEQ ID NO: 40116 - DNA, 25 bp, Canis familiaris
acatccgcatcctgagggacatcga

SEQ ID NO: 40117 - DNA, 25 bp, Canis familiaris
acatcgtgcaacttagctggccagc

SEQ ID NO: 40118 - DNA, 25 bp, Canis familiaris
acttgtgatcacttgactgggctgc

SEQ ID NO: 40119 - DNA, 25 bp, Canis familiaris
acttgtgctgacttcattgagactc

SEQ ID NO: 40120 - DNA, 25 bp, Canis familiaris
acttgtgtgacttcattgagactca

SEQ ID NO: 40121 - DNA, 25 bp, Canis familiaris
acattgtatgtcaactaaactcagt

SEQ ID NO: 40122 - DNA, 25 bp, Canis familiaris
acattgtgatttattcagtcctgta

SEQ ID NO: 40123 - DNA, 25 bp, Canis familiaris
acattgtattcatctccagtcactt

SEQ ID NO: 40124 - DNA, 25 bp, Canis familiaris
acattgatcttgtccccaacaatct

SEQ ID NO: 40125 - DNA, 25 bp, Canis familiaris
acatttgggccagctaaacatgctt

SEQ ID NO: 40126 - DNA, 25 bp, Canis familiaris
acatttgggctgtctctatactatg

SEQ ID NO: 40127 - DNA, 25 bp, Canis familiaris
acattgctggggagctcatcacttc

SEQ ID NO: 40128 - DNA, 25 bp, Canis familiaris
acatatcttctggggctctggctct

SEQ ID NO: 40129 - DNA, 25 bp, Canis familiaris
acatcatcgtgttcgtggtggctct

SEQ ID NO: 40130 - DNA, 25 bp, Canis familiaris
acatcagctgggagggtgcgctcca

SEQ ID NO: 40131 - DNA, 25 bp, Canis familiaris
acatacgggggctatactgctatat

SEQ ID NO: 40132 - DNA, 25 bp, Canis familiaris
acatcaagttgtggaatcatctggt

SEQ ID NO: 40133 - DNA, 25 bp, Canis familiaris
acatcaatgcttagcagaactgttc

SEQ ID NO: 40134 - DNA, 25 bp, Canis familiaris
acttgcattttcttcattttccaat

SEQ ID NO: 40135 - DNA, 25 bp, Canis familiaris
acattgctttgttgtacttttgaat

SEQ ID NO: 40136 - DNA, 25 bp, Canis familiaris
acattctgctggagaccctggagaa

SEQ ID NO: 40137 - DNA, 25 bp, Canis familiaris
acattcgtgccacaacctgggatac

SEQ ID NO: 40138 - DNA, 25 bp, Canis familiaris
acatcatcgtgaccagggccgaggt

SEQ ID NO: 40139 - DNA, 25 bp, Canis familiaris
acattgcggcagccacaggcttggt

SEQ ID NO: 40140 - DNA, 25 bp, Canis familiaris
acattctggctcccatggcatatat

SEQ ID NO: 40141 - DNA, 25 bp, Canis familiaris
acatactagccgacagcagctcaaa

SEQ ID NO: 40142 - DNA, 25 bp, Canis familiaris
acatggtgaccgaacgtgccaccta

SEQ ID NO: 40143 - DNA, 25 bp, Canis familiaris
acatgggaccatgacacaccaaaca

SEQ ID NO: 40144 - DNA, 25 bp, Canis familiaris
acattgtgttatgacaacagttaaa

SEQ ID NO: 40145 - DNA, 25 bp, Canis familiaris
acattttttggatatcagttgactc

SEQ ID NO: 40146 - DNA, 25 bp, Canis familiaris
acattttcttactattcatttacca

SEQ ID NO: 40147 - DNA, 25 bp, Canis familiaris
acagtttgcattcccttcttaagga

SEQ ID NO: 40148 - DNA, 25 bp, Canis familiaris
acatggtctcattctaggttttggg

SEQ ID NO: 40149 - DNA, 25 bp, Canis familiaris
acatgtgttactttggttcctatgg

SEQ ID NO: 40150 - DNA, 25 bp, Canis familiaris
acattgctccagattggctttctta

SEQ ID NO: 40151 - DNA, 25 bp, Canis familiaris
acatcttcacagagtgggttgcggt

SEQ ID NO: 40152 - DNA, 25 bp, Canis familiaris
acatccccaagggacgttgcgtctt

SEQ ID NO: 40153 - DNA, 25 bp, Canis familiaris
acatctaccggagactgttgggtta

SEQ ID NO: 40154 - DNA, 25 bp, Canis familiaris
acatctaccctgagactgtttggtt

SEQ ID NO: 40155 - DNA, 25 bp, Canis familiaris
acaatacctgggctggtttgggtct

SEQ ID NO: 40156 - DNA, 25 bp, Canis familiaris
cacttacctgggtggtcttccagat

SEQ ID NO: 40157 - DNA, 25 bp, Canis familiaris
acttgagcggggtggattgccctca

SEQ ID NO: 40158 - DNA, 25 bp, Canis familiaris
acttgggggagaaggaccgcacact

SEQ ID NO: 40159 - DNA, 25 bp, Canis familiaris
acttgggtgaatggggaccgctcct

SEQ ID NO: 40160 - DNA, 25 bp, Canis familiaris
acttgggagtcggggatgccctgtt

SEQ ID NO: 40161 - DNA, 25 bp, Canis familiaris
acatgggggtcggtcacagacctgc

SEQ ID NO: 40162 - DNA, 25 bp, Canis familiaris
acatcgggtcttatcatatgatttc

SEQ ID NO: 40163 - DNA, 25 bp, Canis familiaris
acatgctatgcgatattttagtctt

SEQ ID NO: 40164 - DNA, 25 bp, Canis familiaris
acattatgcttatgatgtcatcgtt

SEQ ID NO: 40165 - DNA, 25 bp, Canis familiaris
acattatattatccactcatcagct

SEQ ID NO: 40166 - DNA, 25 bp, Canis familiaris
acattattatccattcatcagctga

SEQ ID NO: 40167 - DNA, 25 bp, Canis familiaris
acatgtatcatagcctgtacctgaa

SEQ ID NO: 40168 - DNA, 25 bp, Canis familiaris
acatgtatcatagcctgtacctgaa

SEQ ID NO: 40169 - DNA, 25 bp, Canis familiaris
acatgtatcatagcctgtacctgaa

SEQ ID NO: 40170 - DNA, 25 bp, Canis familiaris
acatttgatatgtgctttcctgaaa

SEQ ID NO: 40171 - DNA, 25 bp, Canis familiaris
acatcattattgttgcccttctggt

SEQ ID NO: 40172 - DNA, 25 bp, Canis familiaris
acatatgatttcacttctttgggga

SEQ ID NO: 40173 - DNA, 25 bp, Canis familiaris
acatctactattccattctattgag

SEQ ID NO: 40174 - DNA, 25 bp, Canis familiaris
acattacatttctgactttgaatag

SEQ ID NO: 40175 - DNA, 25 bp, Canis familiaris
acatctacttctttcgtttgtatca

SEQ ID NO: 40176 - DNA, 25 bp, Canis familiaris
acatcacctccggtttctgtgaata

SEQ ID NO: 40177 - DNA, 25 bp, Canis familiaris
acatctgcacactgaaattcgtgta

SEQ ID NO: 40178 - DNA, 25 bp, Canis familiaris
acattgccagtccacagtttgtgct

SEQ ID NO: 40179 - DNA, 25 bp, Canis familiaris
acattccactcaccatatcattgtc

SEQ ID NO: 40180 - DNA, 25 bp, Canis familiaris
acatcctcaatgtttatgcatgaga

SEQ ID NO: 40181 - DNA, 25 bp, Canis familiaris
acatcccatgggttgttggattcag

SEQ ID NO: 40182 - DNA, 25 bp, Canis familiaris
acatcacagtgggcagcgaggtgtt

SEQ ID NO: 40183 - DNA, 25 bp, Canis familiaris
acatccgtgcccggaaatttcgcag

SEQ ID NO: 40184 - DNA, 25 bp, Canis familiaris
acattcatttcatgaaagccttcca

SEQ ID NO: 40185 - DNA, 25 bp, Canis familiaris
acatctcatatttccatgaagcttt

SEQ ID NO: 40186 - DNA, 25 bp, Canis familiaris
acatccaaatgtcaccagattctcc

SEQ ID NO: 40187 - DNA, 25 bp, Canis familiaris
acatacaaattgcattagtttcttt

SEQ ID NO: 40188 - DNA, 25 bp, Canis familiaris
acataacacttgcattctaattttt

SEQ ID NO: 40189 - DNA, 25 bp, Canis familiaris
acataccctggcaatattagtttta

SEQ ID NO: 40190 - DNA, 25 bp, Canis familiaris
acatccccttcttcatgttattttt

SEQ ID NO: 40191 - DNA, 25 bp, Canis familiaris
acatctgctcgcatttttttttttt

SEQ ID NO: 40192 - DNA, 25 bp, Canis familiaris
acatcctctgtatttggttagtttt

SEQ ID NO: 40193 - DNA, 25 bp, Canis familiaris
acatactggctagttggttgcagct

SEQ ID NO: 40194 - DNA, 25 bp, Canis familiaris
acaagcagtctaggaggtacggtac

SEQ ID NO: 40195 - DNA, 25 bp, Canis familiaris
acaggcatgttgtgagaataaatga

SEQ ID NO: 40196 - DNA, 25 bp, Canis familiaris
acatggtggcgtagagactaggcaa

SEQ ID NO: 40197 - DNA, 25 bp, Canis familiaris
acatgttggcagaccaactggacat

SEQ ID NO: 40198 - DNA, 25 bp, Canis familiaris
acatatatggctgccacagcctcgc

SEQ ID NO: 40199 - DNA, 25 bp, Canis familiaris
acatcatattcagcccatcacgctg

SEQ ID NO: 40200 - DNA, 25 bp, Canis familiaris
acatctttcctctgacacatgggaa

SEQ ID NO: 40201 - DNA, 25 bp, Canis familiaris
acatcgtcgtcattggacacgtaga

SEQ ID NO: 40202 - DNA, 25 bp, Canis familiaris
acatctgctttctggaacgagggcc

SEQ ID NO: 40203 - DNA, 25 bp, Canis familiaris
acatcggtggctttaattgggtgac

SEQ ID NO: 40204 - DNA, 25 bp, Canis familiaris
acagtagatagcattcacaggggta

SEQ ID NO: 40205 - DNA, 25 bp, Canis familiaris
acagtgtaactgacacgggggtagt

SEQ ID NO: 40206 - DNA, 25 bp, Canis familiaris
acatggaagactaccaccttggata

SEQ ID NO: 40207 - DNA, 25 bp, Canis familiaris
acagggaattacgctcatatcagga

SEQ ID NO: 40208 - DNA, 25 bp, Canis familiaris
acagtcctaaactcctatctggtta

SEQ ID NO: 40209 - DNA, 25 bp, Canis familiaris
acatggtaataagcttctacttgtt

SEQ ID NO: 40210 - DNA, 25 bp, Canis familiaris
acatggaactatttttctatcagta

SEQ ID NO: 40211 - DNA, 25 bp, Canis familiaris
acattggactgttatttcatttaga

SEQ ID NO: 40212 - DNA, 25 bp, Canis familiaris
acataaatgctgaacattccatgtt

SEQ ID NO: 40213 - DNA, 25 bp, Canis familiaris
acatatcaatctagtcttctccatt

SEQ ID NO: 40214 - DNA, 25 bp, Canis familiaris
acatacacaatatccacgctaatta

SEQ ID NO: 40215 - DNA, 25 bp, Canis familiaris
acaaccaaacaaccatcaaaacagt

SEQ ID NO: 40216 - DNA, 25 bp, Canis familiaris
acatacggacaggacctctctaccg

SEQ ID NO: 40217 - DNA, 25 bp, Canis familiaris
acatcaaattgacagctcttctaca

SEQ ID NO: 40218 - DNA, 25 bp, Canis familiaris
acatagaattgtaagcatccccaaa

SEQ ID NO: 40219 - DNA, 25 bp, Canis familiaris
acatataattggccacattccccca

SEQ ID NO: 40220 - DNA, 25 bp, Canis familiaris
acatttttgagccattctacatccc

SEQ ID NO: 40221 - DNA, 25 bp, Canis familiaris
acattgttgtacaaccatcaccacc

SEQ ID NO: 40222 - DNA, 25 bp, Canis familiaris
acatttttaaagactcttcatcctt

SEQ ID NO: 40223 - DNA, 25 bp, Canis familiaris
acatttgtggcattcgaatctttcc

SEQ ID NO: 40224 - DNA, 25 bp, Canis familiaris
acatgcttgggatttaatgctctat

SEQ ID NO: 40225 - DNA, 25 bp, Canis familiaris
acatttgtggagttcaggggagcga

SEQ ID NO: 40226 - DNA, 25 bp, Canis familiaris
acattcatgttctgtcaggaggtgg

SEQ ID NO: 40227 - DNA, 25 bp, Canis familiaris
acattacattcatccatggggattg

SEQ ID NO: 40228 - DNA, 25 bp, Canis familiaris
acatcttcactcaagccgggagagg

SEQ ID NO: 40229 - DNA, 25 bp, Canis familiaris
acacttcctcgtccggagtaattct

SEQ ID NO: 40230 - DNA, 25 bp, Canis familiaris
acataatctatcttccgtggttttt

SEQ ID NO: 40231 - DNA, 25 bp, Canis familiaris
acatcaaccatggtgcctgtgctgt

SEQ ID NO: 40232 - DNA, 25 bp, Canis familiaris
acattatccatggcagcgattctgt

SEQ ID NO: 40233 - DNA, 25 bp, Canis familiaris
acattcacacagacagctagtcatt

SEQ ID NO: 40234 - DNA, 25 bp, Canis familiaris
acattcacacctggactgttgttgg

SEQ ID NO: 40235 - DNA, 25 bp, Canis familiaris
cacttccagaccccgtaaatggcaa

SEQ ID NO: 40236 - DNA, 25 bp, Canis familiaris
acatgctccagaaaccctaaatgcc

SEQ ID NO: 40237 - DNA, 25 bp, Canis familiaris
acatatagcatatcacccttaacca

SEQ ID NO: 40238 - DNA, 25 bp, Canis familiaris
acatcatagatgtgcccccaaagca

SEQ ID NO: 40239 - DNA, 25 bp, Canis familiaris
acatcaagatgttcactcccaagta

SEQ ID NO: 40240 - DNA, 25 bp, Canis familiaris
acatacagctgttgccagaaccagt

SEQ ID NO: 40241 - DNA, 25 bp, Canis familiaris
acatcctcgttctgcacatacagtt

SEQ ID NO: 40242 - DNA, 25 bp, Canis familiaris
acatctccttttggcacattgggtg

SEQ ID NO: 40243 - DNA, 25 bp, Canis familiaris
acatcaccttttacagcatcggatc

SEQ ID NO: 40244 - DNA, 25 bp, Canis familiaris
acatcagccccttgaagctaggtcg

SEQ ID NO: 40245 - DNA, 25 bp, Canis familiaris
acatcatcccagtgaagtatccttt

SEQ ID NO: 40246 - DNA, 25 bp, Canis familiaris
acatatcccagactgggtccgctgt

SEQ ID NO: 40247 - DNA, 25 bp, Canis familiaris
acatcaccctgaaggggacgcactg

SEQ ID NO: 40248 - DNA, 25 bp, Canis familiaris
acatccctggaatggaaggcctggg

SEQ ID NO: 40249 - DNA, 25 bp, Canis familiaris
acattctctgttctggaaaccttgg

SEQ ID NO: 40250 - DNA, 25 bp, Canis familiaris
acattcattttatctctaaatcttg

SEQ ID NO: 40251 - DNA, 25 bp, Canis familiaris
acattctttcaatcccagactcatt

SEQ ID NO: 40252 - DNA, 25 bp, Canis familiaris
acatgtttatcacaagtcgtccaat

SEQ ID NO: 40253 - DNA, 25 bp, Canis familiaris
acatgcttgaatctgaacggctccc

SEQ ID NO: 40254 - DNA, 25 bp, Canis familiaris
acattctgacatcccaaaggtcccg

SEQ ID NO: 40255 - DNA, 25 bp, Canis familiaris
acatcgatgattcgacggggtcccc

SEQ ID NO: 40256 - DNA, 25 bp, Canis familiaris
aacgttgggaagatggctccctggg

SEQ ID NO: 40257 - DNA, 25 bp, Canis familiaris
acaagactgggaaactgcctcgggt

SEQ ID NO: 40258 - DNA, 25 bp, Canis familiaris
acagtactggggaacacaaagggct

SEQ ID NO: 40259 - DNA, 25 bp, Canis familiaris
acagtactttataacacaatcccac

SEQ ID NO: 40260 - DNA, 25 bp, Canis familiaris
acaaagcctttttgcataagcccct

SEQ ID NO: 40261 - DNA, 25 bp, Canis familiaris
acatgaaggctagtgtcagaaaacc

SEQ ID NO: 40262 - DNA, 25 bp, Canis familiaris
acattagatcaaatgaatgaaaccg

SEQ ID NO: 40263 - DNA, 25 bp, Canis familiaris
acatatatatccttaaaaactccat

SEQ ID NO: 40264 - DNA, 25 bp, Canis familiaris
acatagctcctctcaaaaacacctt

SEQ ID NO: 40265 - DNA, 25 bp, Canis familiaris
acatactcctttggggtatcacctt

SEQ ID NO: 40266 - DNA, 25 bp, Canis familiaris
acattccccttgtagcgtaaatctt

SEQ ID NO: 40267 - DNA, 25 bp, Canis familiaris
acattccttttgttggtgacatttg

SEQ ID NO: 40268 - DNA, 25 bp, Canis familiaris
acattcccttgttctagattcactt

SEQ ID NO: 40269 - DNA, 25 bp, Canis familiaris
acatactcctgtgattagctttaca

SEQ ID NO: 40270 - DNA, 25 bp, Canis familiaris
acatacctggtgcatcatagactta

SEQ ID NO: 40271 - DNA, 25 bp, Canis familiaris
acatccttgtggcacattttttttt

SEQ ID NO: 40272 - DNA, 25 bp, Canis familiaris
acattctatttgctctttgtatatt

SEQ ID NO: 40273 - DNA, 25 bp, Canis familiaris
acatatataaattgtcttgctgttt

SEQ ID NO: 40274 - DNA, 25 bp, Canis familiaris
acatgattctacattttgctttgaa

SEQ ID NO: 40275 - DNA, 25 bp, Canis familiaris
acatgggttaaggctttcttgaagt

SEQ ID NO: 40276 - DNA, 25 bp, Canis familiaris
acttggcttcacactttcttagctg

SEQ ID NO: 40277 - DNA, 25 bp, Canis familiaris
acttggcttcctggggttggatgtt

SEQ ID NO: 40278 - DNA, 25 bp, Canis familiaris
acagggcttcgaggggtgtggaggg

SEQ ID NO: 40279 - DNA, 25 bp, Canis familiaris
acaggtgtcccagactgacgaggaa

SEQ ID NO: 40280 - DNA, 25 bp, Canis familiaris
acaggggccatgaaactttaggaga

SEQ ID NO: 40281 - DNA, 25 bp, Canis familiaris
acaggagtacatggaagttcgggag

SEQ ID NO: 40282 - DNA, 25 bp, Canis familiaris
acaggaaatgctcacgttctccaag

SEQ ID NO: 40283 - DNA, 25 bp, Canis familiaris
acatggtatagtcagctgcctttta

SEQ ID NO: 40284 - DNA, 25 bp, Canis familiaris
acattttcaggctatcttctttatc

SEQ ID NO: 40285 - DNA, 25 bp, Canis familiaris
acatctttctgtgttttctgatatt

SEQ ID NO: 40286 - DNA, 25 bp, Canis familiaris
acattcccatggatgtcaatctgtt

SEQ ID NO: 40287 - DNA, 25 bp, Canis familiaris
acatgctccgggagccacagcatgc

SEQ ID NO: 40288 - DNA, 25 bp, Canis familiaris
acatctcaaaggttcccagcatcac

SEQ ID NO: 40289 - DNA, 25 bp, Canis familiaris
acatgctgcaaaccagcttgcccaa

SEQ ID NO: 40290 - DNA, 25 bp, Canis familiaris
acatgacgggcaagctgtgctcagc

SEQ ID NO: 40291 - DNA, 25 bp, Canis familiaris
acatcgtcgtgcaagcagctgacca

SEQ ID NO: 40292 - DNA, 25 bp, Canis familiaris
acatgcctgcgacatcagctatgca

SEQ ID NO: 40293 - DNA, 25 bp, Canis familiaris
acatcacagccctgcatttgcaagt

SEQ ID NO: 40294 - DNA, 25 bp, Canis familiaris
acatcactgccctcaaagatcagct

SEQ ID NO: 40295 - DNA, 25 bp, Canis familiaris
acatcacggcaataaatgaactaga

SEQ ID NO: 40296 - DNA, 25 bp, Canis familiaris
acatccccgacttaatgatacttca

SEQ ID NO: 40297 - DNA, 25 bp, Canis familiaris
acatcacccgacgatttgaccatta

SEQ ID NO: 40298 - DNA, 25 bp, Canis familiaris
acatcacagcggtccgtgttgtcca

SEQ ID NO: 40299 - DNA, 25 bp, Canis familiaris
acatcaagggcatcgtgaagggaca

SEQ ID NO: 40300 - DNA, 25 bp, Canis familiaris
cacgaaggtgagagtcagactggtc

SEQ ID NO: 40301 - DNA, 25 bp, Canis familiaris
acaggcagagtggcatgattcagac

SEQ ID NO: 40302 - DNA, 25 bp, Canis familiaris
acaggaagcagcagcctgcagaccc

SEQ ID NO: 40303 - DNA, 25 bp, Canis familiaris
acatcgaggacttcgcggacctcgg

SEQ ID NO: 40304 - DNA, 25 bp, Canis familiaris
acatagcccactttcgtgagctgta

SEQ ID NO: 40305 - DNA, 25 bp, Canis familiaris
acatacacacactttggtcagtgca

SEQ ID NO: 40306 - DNA, 25 bp, Canis familiaris
acatcacatcctgtctggaattcag

SEQ ID NO: 40307 - DNA, 25 bp, Canis familiaris
acatcgcctgctgtgtcaaactgcg

SEQ ID NO: 40308 - DNA, 25 bp, Canis familiaris
acatcgccttcctgcagaatgtgct

SEQ ID NO: 40309 - DNA, 25 bp, Canis familiaris
acattacctgccttgcagtgacttc

SEQ ID NO: 40310 - DNA, 25 bp, Canis familiaris
acattgacgtagtcgttgtcattcc

SEQ ID NO: 40311 - DNA, 25 bp, Canis familiaris
acattgcacgttttttgttctctct

SEQ ID NO: 40312 - DNA, 25 bp, Canis familiaris
acacgaagtcgttgcttttgtcctc

SEQ ID NO: 40313 - DNA, 25 bp, Canis familiaris
acaggataggctgtttcctacctca

SEQ ID NO: 40314 - DNA, 25 bp, Canis familiaris
acaggctggtgtgagatcaccgccc

SEQ ID NO: 40315 - DNA, 25 bp, Canis familiaris
acatggagtgttgtgacccaccact

SEQ ID NO: 40316 - DNA, 25 bp, Canis familiaris
acatgggcttagctgaagaactggt

SEQ ID NO: 40317 - DNA, 25 bp, Canis familiaris
acatcaccttatgtacacaacagga

SEQ ID NO: 40318 - DNA, 25 bp, Canis familiaris
acatacacttatggctcacaaagct

SEQ ID NO: 40319 - DNA, 25 bp, Canis familiaris
acatatgcccatgcccacaaatgta

SEQ ID NO: 40320 - DNA, 25 bp, Canis familiaris
acattgccctgtgcccacaaaaaaa

SEQ ID NO: 40321 - DNA, 25 bp, Canis familiaris
acagtgtgcgttgtccacatgagcc

SEQ ID NO: 40322 - DNA, 25 bp, Canis familiaris
acattctgcagggcatctccaagga

SEQ ID NO: 40323 - DNA, 25 bp, Canis familiaris
acattctgagcggttatctgaggat

SEQ ID NO: 40324 - DNA, 25 bp, Canis familiaris
acatcttggtgtgtgcagtgggcta

SEQ ID NO: 40325 - DNA, 25 bp, Canis familiaris
acatttggtgtatgtgcttggctga

SEQ ID NO: 40326 - DNA, 25 bp, Canis familiaris
acatcttggtactgtgtatggctcg

SEQ ID NO: 40327 - DNA, 25 bp, Canis familiaris
acatttggaagctctggcatctccc

SEQ ID NO: 40328 - DNA, 25 bp, Canis familiaris
acattttgtgactctggttgccatt

SEQ ID NO: 40329 - DNA, 25 bp, Canis familiaris
acatcttggttctctgtgtgggttt

SEQ ID NO: 40330 - DNA, 25 bp, Canis familiaris
acatcttggttctagctactaagga

SEQ ID NO: 40331 - DNA, 25 bp, Canis familiaris
acatcaaggtcctctacttatccgg

SEQ ID NO: 40332 - DNA, 25 bp, Canis familiaris
acatcaagatgcaccctatgccttc

SEQ ID NO: 40333 - DNA, 25 bp, Canis familiaris
acatctatatgaacatctctaccat

SEQ ID NO: 40334 - DNA, 25 bp, Canis familiaris
acatgctgaacttcactcgactgat

SEQ ID NO: 40335 - DNA, 25 bp, Canis familiaris
acatcgatgagtcccgagactgaac

SEQ ID NO: 40336 - DNA, 25 bp, Canis familiaris
acatccataaccgggaggagaacgt

SEQ ID NO: 40337 - DNA, 25 bp, Canis familiaris
acatccataaccgggaggagcctgt

SEQ ID NO: 40338 - DNA, 25 bp, Canis familiaris
acatctacacacgagggaacacaaa

SEQ ID NO: 40339 - DNA, 25 bp, Canis familiaris
acagtaatcacgtggcagagcataa

SEQ ID NO: 40340 - DNA, 25 bp, Canis familiaris
acagaagcagccgtgggcaaaatac

SEQ ID NO: 40341 - DNA, 25 bp, Canis familiaris
acagaatgacgttgaaagaagtggt

SEQ ID NO: 40342 - DNA, 25 bp, Canis familiaris
acaggcacaggtatttgaaatggta

SEQ ID NO: 40343 - DNA, 25 bp, Canis familiaris
acaggcctggtttattgaaaatgaa

SEQ ID NO: 40344 - DNA, 25 bp, Canis familiaris
acaggatctgtttggttgggtataa

SEQ ID NO: 40345 - DNA, 25 bp, Canis familiaris
acagagcaagttttgttgggcgaat

SEQ ID NO: 40346 - DNA, 25 bp, Canis familiaris
acatgtcaagtttgtgaccaggcca

SEQ ID NO: 40347 - DNA, 25 bp, Canis familiaris
acattcagcattatagcagccatcc

SEQ ID NO: 40348 - DNA, 25 bp, Canis familiaris
acattcgatctcattcagtattaaa

SEQ ID NO: 40349 - DNA, 25 bp, Canis familiaris
acacatctgtgtatcccaattcaaa

SEQ ID NO: 40350 - DNA, 25 bp, Canis familiaris
acaatcaggtttctcagtaaagaac

SEQ ID NO: 40351 - DNA, 25 bp, Canis familiaris
acatactgagcctctgtctgtgaaa

SEQ ID NO: 40352 - DNA, 25 bp, Canis familiaris
acatgaatgacctggtgtctgagta

SEQ ID NO: 40353 - DNA, 25 bp, Canis familiaris
acatcccagccaagcaggtctggtc

SEQ ID NO: 40354 - DNA, 25 bp, Canis familiaris
acatggcctccaaggagtaagaccc

SEQ ID NO: 40355 - DNA, 25 bp, Canis familiaris
acatccctccagagagagagtggcg

SEQ ID NO: 40356 - DNA, 25 bp, Canis familiaris
acacgccccgggagaggagcagggc

SEQ ID NO: 40357 - DNA, 25 bp, Canis familiaris
acaccccgtgggacttgagcacgta

SEQ ID NO: 40358 - DNA, 25 bp, Canis familiaris
acacgcttcgggcattggaggactt

SEQ ID NO: 40359 - DNA, 25 bp, Canis familiaris
acatagtctagaccagactggagga

SEQ ID NO: 40360 - DNA, 25 bp, Canis familiaris
acatcattttggcaactgtgaggct

SEQ ID NO: 40361 - DNA, 25 bp, Canis familiaris
acattctttgtggtatctttggtga

SEQ ID NO: 40362 - DNA, 25 bp, Canis familiaris
acaggcctcggcttatttttgatag

SEQ ID NO: 40363 - DNA, 25 bp, Canis familiaris
acaggcactttgctagttctttcaa

SEQ ID NO: 40364 - DNA, 25 bp, Canis familiaris
acaggccttcctgtttacttatagc

SEQ ID NO: 40365 - DNA, 25 bp, Canis familiaris
acaggttcgcctgtagcgagtttag

SEQ ID NO: 40366 - DNA, 25 bp, Canis familiaris
acagtggtactctagtaggtttgct

SEQ ID NO: 40367 - DNA, 25 bp, Canis familiaris
acaggcggttgtttcagttcggtat

SEQ ID NO: 40368 - DNA, 25 bp, Canis familiaris
acaggcggattgctggggatcggca

SEQ ID NO: 40369 - DNA, 25 bp, Canis familiaris
acaggtggttgacagtgcctatgag

SEQ ID NO: 40370 - DNA, 25 bp, Canis familiaris
acatgctgttgcctgaagggcctta

SEQ ID NO: 40371 - DNA, 25 bp, Canis familiaris
acattatctgtctagtgggcactat

SEQ ID NO: 40372 - DNA, 25 bp, Canis familiaris
acatctttgatttgagtgtcccaga

SEQ ID NO: 40373 - DNA, 25 bp, Canis familiaris
acatcttcattttcaggtgcgactg

SEQ ID NO: 40374 - DNA, 25 bp, Canis familiaris
acatgctatagtttccgaggctctg

SEQ ID NO: 40375 - DNA, 25 bp, Canis familiaris
acattaagctgaatatgccagttta

SEQ ID NO: 40376 - DNA, 25 bp, Canis familiaris
acattcagagtgctgggtttctacg

SEQ ID NO: 40377 - DNA, 25 bp, Canis familiaris
acattcagcacgcttgttgttgccc

SEQ ID NO: 40378 - DNA, 25 bp, Canis familiaris
acacttcactctactattggtgccc

SEQ ID NO: 40379 - DNA, 25 bp, Canis familiaris
acatcttcatcactgcctttggtgt

SEQ ID NO: 40380 - DNA, 25 bp, Canis familiaris
acatcagtttggcctgttatgctgc

SEQ ID NO: 40381 - DNA, 25 bp, Canis familiaris
acatcagggcactgctgtagacagc

SEQ ID NO: 40382 - DNA, 25 bp, Canis familiaris
acatcgcgacaatcgacatcaagac

SEQ ID NO: 40383 - DNA, 25 bp, Canis familiaris
acatcagcgctggatacgtctaacg

SEQ ID NO: 40384 - DNA, 25 bp, Canis familiaris
acatcagacagtttcatgcttagaa

SEQ ID NO: 40385 - DNA, 25 bp, Canis familiaris
acatagtgcagtttgtgccctaccg

SEQ ID NO: 40386 - DNA, 25 bp, Canis familiaris
acatatgtgcattcatcgtgccctg

SEQ ID NO: 40387 - DNA, 25 bp, Canis familiaris
acatagacagacctggctccagatg

SEQ ID NO: 40388 - DNA, 25 bp, Canis familiaris
acatcaacaaacttgccctctgtga

SEQ ID NO: 40389 - DNA, 25 bp, Canis familiaris
acacaaaggaccaggtctggacaaa

SEQ ID NO: 40390 - DNA, 25 bp, Canis familiaris
acactataggaaccaggtgtgtaca

SEQ ID NO: 40391 - DNA, 25 bp, Canis familiaris
acacgcgggcaatcagggaggacag

SEQ ID NO: 40392 - DNA, 25 bp, Canis familiaris
acatgccgtggttcaagggctggaa

SEQ ID NO: 40393 - DNA, 25 bp, Canis familiaris
acatgccttgatggacactgggcgc

SEQ ID NO: 40394 - DNA, 25 bp, Canis familiaris
acatcatctcgcttatattgggcag

SEQ ID NO: 40395 - DNA, 25 bp, Canis familiaris
acatcatcagcgcgcaagagggcag

SEQ ID NO: 40396 - DNA, 25 bp, Canis familiaris
acatcatggccgactcaatgtgcgc

SEQ ID NO: 40397 - DNA, 25 bp, Canis familiaris
acatcaatctgggccaatctgcgct

SEQ ID NO: 40398 - DNA, 25 bp, Canis familiaris
acatctgttctggtgcaatttgctt

SEQ ID NO: 40399 - DNA, 25 bp, Canis familiaris
acatctgttctggtgcaatttgctt

SEQ ID NO: 40400 - DNA, 25 bp, Canis familiaris
acatctgactgtcgatcctttcggt

SEQ ID NO: 40401 - DNA, 25 bp, Canis familiaris
acatggagatggcaccaggaggtgt

SEQ ID NO: 40402 - DNA, 25 bp, Canis familiaris
acatggccatgaccaacgggcgatc

SEQ ID NO: 40403 - DNA, 25 bp, Canis familiaris
acatgtctcagcagccacagggctg

SEQ ID NO: 40404 - DNA, 25 bp, Canis familiaris
acatcaaatgcaggccaagggctct

SEQ ID NO: 40405 - DNA, 25 bp, Canis familiaris
acatctcagatgggacaccggctgt

SEQ ID NO: 40406 - DNA, 25 bp, Canis familiaris
acatcatctgcgggatcacgtccgt

SEQ ID NO: 40407 - DNA, 25 bp, Canis familiaris
acatcagcatcagcaatcgcttctc

SEQ ID NO: 40408 - DNA, 25 bp, Canis familiaris
acataacatggcaacctgctctacc

SEQ ID NO: 40409 - DNA, 25 bp, Canis familiaris
acataagtgacttctctttagcaaa

SEQ ID NO: 40410 - DNA, 25 bp, Canis familiaris
acaaactgcattgttttgacaacta

SEQ ID NO: 40411 - DNA, 25 bp, Canis familiaris
acataattatcggtctttacactta

SEQ ID NO: 40412 - DNA, 25 bp, Canis familiaris
acataagtagctctctggtagcctt

SEQ ID NO: 40413 - DNA, 25 bp, Canis familiaris
acataactggcagccgaatcccttc

SEQ ID NO: 40414 - DNA, 25 bp, Canis familiaris
acataacagagatcctccactgcct

SEQ ID NO: 40415 - DNA, 25 bp, Canis familiaris
acataccaagaagttgcacaaccta

SEQ ID NO: 40416 - DNA, 25 bp, Canis familiaris
acagaccaaaggtcccaagctctca

SEQ ID NO: 40417 - DNA, 25 bp, Canis familiaris
acagagacacgggcatccttgactc

SEQ ID NO: 40418 - DNA, 25 bp, Canis familiaris
acagatcaaccagccgttggtcggt

SEQ ID NO: 40419 - DNA, 25 bp, Canis familiaris
acagtagacatagccattagtgaca

SEQ ID NO: 40420 - DNA, 25 bp, Canis familiaris
acatgtgatatctccgcaacaggag

SEQ ID NO: 40421 - DNA, 25 bp, Canis familiaris
acatgtttgtccgcaggggcatgaa

SEQ ID NO: 40422 - DNA, 25 bp, Canis familiaris
acatacttaccccagcagggagaga

SEQ ID NO: 40423 - DNA, 25 bp, Canis familiaris
acataccaaacaacagaaggccagg

SEQ ID NO: 40424 - DNA, 25 bp, Canis familiaris
acatcccaaaccctgaagccattgg

SEQ ID NO: 40425 - DNA, 25 bp, Canis familiaris
acatccagataaccggttgtctttg

SEQ ID NO: 40426 - DNA, 25 bp, Canis familiaris
acatccattccacctggttttataa

SEQ ID NO: 40427 - DNA, 25 bp, Canis familiaris
acatagcattcctctagtccattgt

SEQ ID NO: 40428 - DNA, 25 bp, Canis familiaris
acataattgccaaaaccctctctgc

SEQ ID NO: 40429 - DNA, 25 bp, Canis familiaris
acatcctggctaaaaatctcttctc

SEQ ID NO: 40430 - DNA, 25 bp, Canis familiaris
acatccagagccagagaacagccct

SEQ ID NO: 40431 - DNA, 25 bp, Canis familiaris
acatagacaccaggaggaccaccga

SEQ ID NO: 40432 - DNA, 25 bp, Canis familiaris
acataggcgatcagagaggccacgg

SEQ ID NO: 40433 - DNA, 25 bp, Canis familiaris
acaggactgtcgagagaccacggcc

SEQ ID NO: 40434 - DNA, 25 bp, Canis familiaris
acagaaccatggagcgacagccgtg

SEQ ID NO: 40435 - DNA, 25 bp, Canis familiaris
acatgtacctggacaacagctccgt

SEQ ID NO: 40436 - DNA, 25 bp, Canis familiaris
acatgaaactgctctaggtcacctc

SEQ ID NO: 40437 - DNA, 25 bp, Canis familiaris
acataggagtggaaaggatatcttt

SEQ ID NO: 40438 - DNA, 25 bp, Canis familiaris
acatttgatatgctaaaatcttgtt

SEQ ID NO: 40439 - DNA, 25 bp, Canis familiaris
acatttttgtcactcaacattctgt

SEQ ID NO: 40440 - DNA, 25 bp, Canis familiaris
acatctctcctgcaataaagtcttc

SEQ ID NO: 40441 - DNA, 25 bp, Canis familiaris
acatgcccagtccaataaagtcttt

SEQ ID NO: 40442 - DNA, 25 bp, Canis familiaris
acatgcccagtccaataaagtcttt

SEQ ID NO: 40443 - DNA, 25 bp, Canis familiaris
acatgcccagtccaataaagtcttt

SEQ ID NO: 40444 - DNA, 25 bp, Canis familiaris
acatgcccagtcccaataaagtctt

SEQ ID NO: 40445 - DNA, 25 bp, Canis familiaris
acagtgtatatccccaataaccttc

SEQ ID NO: 40446 - DNA, 25 bp, Canis familiaris
acagagttcccataatactcctccc

SEQ ID NO: 40447 - DNA, 25 bp, Canis familiaris
acatacttccacttgaatacgcccg

SEQ ID NO: 40448 - DNA, 25 bp, Canis familiaris
acatcagttctctggaatccgccag

SEQ ID NO: 40449 - DNA, 25 bp, Canis familiaris
acacgtttcagggcggcgccaattg

SEQ ID NO: 40450 - DNA, 25 bp, Canis familiaris
acagggtatgcgaggtgccctttgg

SEQ ID NO: 40451 - DNA, 25 bp, Canis familiaris
acatggcccgtgggggccactttgc

SEQ ID NO: 40452 - DNA, 25 bp, Canis familiaris
acatcgccgtggacggcgagccttt

SEQ ID NO: 40453 - DNA, 25 bp, Canis familiaris
acatcagcacggagctgggcatccg

SEQ ID NO: 40454 - DNA, 25 bp, Canis familiaris
acatcaaggtgcagttcctcgagct

SEQ ID NO: 40455 - DNA, 25 bp, Canis familiaris
acatcctggtgcacttgtgctcggt

SEQ ID NO: 40456 - DNA, 25 bp, Canis familiaris
acatctcaggctgactgtgctgtcc

SEQ ID NO: 40457 - DNA, 25 bp, Canis familiaris
acatgcataccaaagctgctcgtcc

SEQ ID NO: 40458 - DNA, 25 bp, Canis familiaris
acaatgtccacaacagccaaactgt

SEQ ID NO: 40459 - DNA, 25 bp, Canis familiaris
acagatgatgcttccatcccaactt

SEQ ID NO: 40460 - DNA, 25 bp, Canis familiaris
acatgaagtccctttacagcagtcc

SEQ ID NO: 40461 - DNA, 25 bp, Canis familiaris
acatgcacgtccgttatcacgaact

SEQ ID NO: 40462 - DNA, 25 bp, Canis familiaris
acatcagagtgaggcttatccccca

SEQ ID NO: 40463 - DNA, 25 bp, Canis familiaris
acatagctctgaccatgtatcccat

SEQ ID NO: 40464 - DNA, 25 bp, Canis familiaris
acatggcaccatccacatataccat

SEQ ID NO: 40465 - DNA, 25 bp, Canis familiaris
acatctgcattcagacacacacaca

SEQ ID NO: 40466 - DNA, 25 bp, Canis familiaris
acatgcctgtgtccacacaacacat

SEQ ID NO: 40467 - DNA, 25 bp, Canis familiaris
acatgccgatcaacagcgcggccat

SEQ ID NO: 40468 - DNA, 25 bp, Canis familiaris
acatccaggaacttcagcagccatt

SEQ ID NO: 40469 - DNA, 25 bp, Canis familiaris
acatccaacagctttgacccattgg

SEQ ID NO: 40470 - DNA, 25 bp, Canis familiaris
acatccatacccatgatacatcagg

SEQ ID NO: 40471 - DNA, 25 bp, Canis familiaris
acatgcccacccaggaactgggcct

SEQ ID NO: 40472 - DNA, 25 bp, Canis familiaris
acagcccaatttaggtccttggcct

SEQ ID NO: 40473 - DNA, 25 bp, Canis familiaris
acacgggatgttacttcccgtccag

SEQ ID NO: 40474 - DNA, 25 bp, Canis familiaris
acagggagtttaacccctgctgcca

SEQ ID NO: 40475 - DNA, 25 bp, Canis familiaris
acaggcagaagagattccccgtgtc

SEQ ID NO: 40476 - DNA, 25 bp, Canis familiaris
acaggcaggtaaaattccccctcag

SEQ ID NO: 40477 - DNA, 25 bp, Canis familiaris
acatccaggtgaataaagcccccaa

SEQ ID NO: 40478 - DNA, 25 bp, Canis familiaris
acatccaggtgaataaagcccccaa

SEQ ID NO: 40479 - DNA, 25 bp, Canis familiaris
acatcaaaataaaaagcttccgcag

SEQ ID NO: 40480 - DNA, 25 bp, Canis familiaris
acagaaaaagaatcctccctgcctt

SEQ ID NO: 40481 - DNA, 25 bp, Canis familiaris
aagtaacttgaagccccattcaata

SEQ ID NO: 40482 - DNA, 25 bp, Canis familiaris
aagtcaaccttagagcttcttttga

SEQ ID NO: 40483 - DNA, 25 bp, Canis familiaris
acagaaaccttgaaagcggatcttt

SEQ ID NO: 40484 - DNA, 25 bp, Canis familiaris
acagtattctcgttaagggacttca

SEQ ID NO: 40485 - DNA, 25 bp, Canis familiaris
acatctatgtgcaggagaaggatga

SEQ ID NO: 40486 - DNA, 25 bp, Canis familiaris
acatgcataggcagggtccgtgatg

SEQ ID NO: 40487 - DNA, 25 bp, Canis familiaris
acatctctggccgggcctgagtggt

SEQ ID NO: 40488 - DNA, 25 bp, Canis familiaris
aaatctggccttgtctggttttaga

SEQ ID NO: 40489 - DNA, 25 bp, Canis familiaris
acagaaacttgtgtgggtgctttag

SEQ ID NO: 40490 - DNA, 25 bp, Canis familiaris
acagtaggcttgtattacgtgcttt

SEQ ID NO: 40491 - DNA, 25 bp, Canis familiaris
acatgtattttttgtcaattcctta

SEQ ID NO: 40492 - DNA, 25 bp, Canis familiaris
acagtcaacgtttgtctcttcctgt

SEQ ID NO: 40493 - DNA, 25 bp, Canis familiaris
acaccaagggtcgcaaccagttgaa

SEQ ID NO: 40494 - DNA, 25 bp, Canis familiaris
acaccaaggcgtgcacacgccagcc

SEQ ID NO: 40495 - DNA, 25 bp, Canis familiaris
acagaggaggcattaccacccagcc

SEQ ID NO: 40496 - DNA, 25 bp, Canis familiaris
acagattcgggttcacaggggccct

SEQ ID NO: 40497 - DNA, 25 bp, Canis familiaris
acagcttgtgggagccagggtgggc

SEQ ID NO: 40498 - DNA, 25 bp, Canis familiaris
acagtgcccaagagacgggtgggct

SEQ ID NO: 40499 - DNA, 25 bp, Canis familiaris
acagagccaacgggtctgtggggcc

SEQ ID NO: 40500 - DNA, 25 bp, Canis familiaris
acaatccatcaggtcagtttagggc

SEQ ID NO: 40501 - DNA, 25 bp, Canis familiaris
acatgtagtccgtagcttttagctc

SEQ ID NO: 40502 - DNA, 25 bp, Canis familiaris
acaggaatccagctcttttaatttc

SEQ ID NO: 40503 - DNA, 25 bp, Canis familiaris
acaggattccaggattggttccaat

SEQ ID NO: 40504 - DNA, 25 bp, Canis familiaris
acagtttctcagggggatatccgtc

SEQ ID NO: 40505 - DNA, 25 bp, Canis familiaris
acatctccttaattgggcaaagcgt

SEQ ID NO: 40506 - DNA, 25 bp, Canis familiaris
acatcatgactaaaaggtccaacca

SEQ ID NO: 40507 - DNA, 25 bp, Canis familiaris
acatagcctcaacaatttcacagca

SEQ ID NO: 40508 - DNA, 25 bp, Canis familiaris
acatccctgatgagtatttcaagcg

SEQ ID NO: 40509 - DNA, 25 bp, Canis familiaris
acatctccttttttatatcaaggtc

SEQ ID NO: 40510 - DNA, 25 bp, Canis familiaris
acatctcttctttgctgtatgcacg

SEQ ID NO: 40511 - DNA, 25 bp, Canis familiaris
acatgccccttggtgtctgacatgt

SEQ ID NO: 40512 - DNA, 25 bp, Canis familiaris
acatgtatcatatggttctgcacag

SEQ ID NO: 40513 - DNA, 25 bp, Canis familiaris
acatgtgatctgtatttctagaaat

SEQ ID NO: 40514 - DNA, 25 bp, Canis familiaris
acatggtttcttctaagcattcctt

SEQ ID NO: 40515 - DNA, 25 bp, Canis familiaris
acatcctttcctagtaatttgctct

SEQ ID NO: 40516 - DNA, 25 bp, Canis familiaris
acatacttgtcattgttcctttgtt

SEQ ID NO: 40517 - DNA, 25 bp, Canis familiaris
acatcacatttatgggcctcttgca

SEQ ID NO: 40518 - DNA, 25 bp, Canis familiaris
acatgaatttaaccgtttctgcttt

SEQ ID NO: 40519 - DNA, 25 bp, Canis familiaris
acataatgagcgtcccttttctctt

SEQ ID NO: 40520 - DNA, 25 bp, Canis familiaris
acatgaaagtgtgctctgcctttct

SEQ ID NO: 40521 - DNA, 25 bp, Canis familiaris
acatgaaacatgggacgcctgggtg

SEQ ID NO: 40522 - DNA, 25 bp, Canis familiaris
acacaaacgggccgccaaagcgagg

SEQ ID NO: 40523 - DNA, 25 bp, Canis familiaris
acaaaaggggtcaccaagccgctgg

SEQ ID NO: 40524 - DNA, 25 bp, Canis familiaris
acacgggtggggtgacagcaccgtc

SEQ ID NO: 40525 - DNA, 25 bp, Canis familiaris
acatgaagggcgcggcgagcagcac

SEQ ID NO: 40526 - DNA, 25 bp, Canis familiaris
acatgaaggattcttgccagctccc

SEQ ID NO: 40527 - DNA, 25 bp, Canis familiaris
acagaaggaaggagccagcccctac

SEQ ID NO: 40528 - DNA, 25 bp, Canis familiaris
aaaggcaatgggagaacccctcgag

SEQ ID NO: 40529 - DNA, 25 bp, Canis familiaris
aaaggaagggtgcaggcagcccggt

SEQ ID NO: 40530 - DNA, 25 bp, Canis familiaris
acagggaagggctttgcctgaccgg

SEQ ID NO: 40531 - DNA, 25 bp, Canis familiaris
acaggaggaggagttcgcccaatcg

SEQ ID NO: 40532 - DNA, 25 bp, Canis familiaris
acagtttgatccttgggccaaagcg

SEQ ID NO: 40533 - DNA, 25 bp, Canis familiaris
acagtgctggatgccattgaccaaa

SEQ ID NO: 40534 - DNA, 25 bp, Canis familiaris
acagtgggaccatcagacaacattg

SEQ ID NO: 40535 - DNA, 25 bp, Canis familiaris
acactgggctcctaaaagcatcaac

SEQ ID NO: 40536 - DNA, 25 bp, Canis familiaris
acatggggctcccatatgtacatag

SEQ ID NO: 40537 - DNA, 25 bp, Canis familiaris
ctcggtgcgatactgatgatgaaat

SEQ ID NO: 40538 - DNA, 25 bp, Canis familiaris
ctcagggcagttcaagtagtttttt

SEQ ID NO: 40539 - DNA, 25 bp, Canis familiaris
ctcagtgggttttaatagtggtgga

SEQ ID NO: 40540 - DNA, 25 bp, Canis familiaris
acagtgggtttcttttgatggaaat

SEQ ID NO: 40541 - DNA, 25 bp, Canis familiaris
acaggccctttattattgctgggac

SEQ ID NO: 40542 - DNA, 25 bp, Canis familiaris
acatggctcgtttagtaatgttgga

SEQ ID NO: 40543 - DNA, 25 bp, Canis familiaris
acatgaccaccttggtcaagctcat

SEQ ID NO: 40544 - DNA, 25 bp, Canis familiaris
acagggaccatattttatgctcttt

SEQ ID NO: 40545 - DNA, 25 bp, Canis familiaris
acatggggactttggcattgcctgt

SEQ ID NO: 40546 - DNA, 25 bp, Canis familiaris
acaggcgtagtttggtgcatttcat

SEQ ID NO: 40547 - DNA, 25 bp, Canis familiaris
acaggcttttaggagtttgcatctt

SEQ ID NO: 40548 - DNA, 25 bp, Canis familiaris
acatctttgagtagcgagtcttctt

SEQ ID NO: 40549 - DNA, 25 bp, Canis familiaris
acatcttcatgggggcaactctttt

SEQ ID NO: 40550 - DNA, 25 bp, Canis familiaris
acatcttcacgtatcacagttttta

SEQ ID NO: 40551 - DNA, 25 bp, Canis familiaris
acaccattcagtataagcttttgtt

SEQ ID NO: 40552 - DNA, 25 bp, Canis familiaris
acatccatccagtggaagctactgt

SEQ ID NO: 40553 - DNA, 25 bp, Canis familiaris
acatccacgcagatggaactggagg

SEQ ID NO: 40554 - DNA, 25 bp, Canis familiaris
acaggcagccagaagtgggccgggg

SEQ ID NO: 40555 - DNA, 25 bp, Canis familiaris
acaggaccagtaagggaccttcaat

SEQ ID NO: 40556 - DNA, 25 bp, Canis familiaris
acaggcctcaaaggggacgcttgtt

SEQ ID NO: 40557 - DNA, 25 bp, Canis familiaris
acaggctatatcttggggtccaggt

SEQ ID NO: 40558 - DNA, 25 bp, Canis familiaris
acaggtgaaatttggtacgatggtg

SEQ ID NO: 40559 - DNA, 25 bp, Canis familiaris
acatgttgaaattaggtcgtgaagt

SEQ ID NO: 40560 - DNA, 25 bp, Canis familiaris
acatgtgtggcatttcagaagagat

SEQ ID NO: 40561 - DNA, 25 bp, Canis familiaris
acatgatgggaatcggatggcttat

SEQ ID NO: 40562 - DNA, 25 bp, Canis familiaris
acagctggctaatttgaaacttaca

SEQ ID NO: 40563 - DNA, 25 bp, Canis familiaris
acagtggctggaccgaaatccgccg

SEQ ID NO: 40564 - DNA, 25 bp, Canis familiaris
acagggctgggtgtgtttctggaga

SEQ ID NO: 40565 - DNA, 25 bp, Canis familiaris
acaggttgaggtggcttattttata

SEQ ID NO: 40566 - DNA, 25 bp, Canis familiaris
acaggttggcgtaggtgttggcgtc

SEQ ID NO: 40567 - DNA, 25 bp, Canis familiaris
acaggttggtggtggacagagcccc

SEQ ID NO: 40568 - DNA, 25 bp, Canis familiaris
acaggaggacggcaggtcgagccct

SEQ ID NO: 40569 - DNA, 25 bp, Canis familiaris
acactgagactcctggacgtaaccc

SEQ ID NO: 40570 - DNA, 25 bp, Canis familiaris
acatgcgtgtattcggtcagtagac

SEQ ID NO: 40571 - DNA, 25 bp, Canis familiaris
acagggtgtgctgggcatcaaagtc

SEQ ID NO: 40572 - DNA, 25 bp, Canis familiaris
acagcatggggcttggctccaagtt

SEQ ID NO: 40573 - DNA, 25 bp, Canis familiaris
acagtgccactggtgttccaactgt

SEQ ID NO: 40574 - DNA, 25 bp, Canis familiaris
acagtctggcagttcctcaaaatgt

SEQ ID NO: 40575 - DNA, 25 bp, Canis familiaris
acagcattggcaaatggtataattt

SEQ ID NO: 40576 - DNA, 25 bp, Canis familiaris
acatctgtggtatgtttacatgact

SEQ ID NO: 40577 - DNA, 25 bp, Canis familiaris
acatctttgtgttgtaccaagcctg

SEQ ID NO: 40578 - DNA, 25 bp, Canis familiaris
acatcaactggtttacaagcagcct

SEQ ID NO: 40579 - DNA, 25 bp, Canis familiaris
acatcaaagccgttcctgagcatgc

SEQ ID NO: 40580 - DNA, 25 bp, Canis familiaris
acatcagagatggtttccaggactt

SEQ ID NO: 40581 - DNA, 25 bp, Canis familiaris
acatcagatgagttagtccgtcaag

SEQ ID NO: 40582 - DNA, 25 bp, Canis familiaris
acatcagccatgtatgcgtctcttt

SEQ ID NO: 40583 - DNA, 25 bp, Canis familiaris
acagactcaggcgatgtgctttatg

SEQ ID NO: 40584 - DNA, 25 bp, Canis familiaris
acaggcacatctcaggctgactgtg

SEQ ID NO: 40585 - DNA, 25 bp, Canis familiaris
acatgtacattcatctgctcacgtg

SEQ ID NO: 40586 - DNA, 25 bp, Canis familiaris
acatgtaggctcaatcttctcagta

SEQ ID NO: 40587 - DNA, 25 bp, Canis familiaris
acatgagcggcacagtcttgcgtct

SEQ ID NO: 40588 - DNA, 25 bp, Canis familiaris
acagatggagtccgtcttctttcgt

SEQ ID NO: 40589 - DNA, 25 bp, Canis familiaris
acagacgagtgcagccactcttcac

SEQ ID NO: 40590 - DNA, 25 bp, Canis familiaris
acatgagtcatctactgccaccatg

SEQ ID NO: 40591 - DNA, 25 bp, Canis familiaris
acaggatcatctaccagcaactagc

SEQ ID NO: 40592 - DNA, 25 bp, Canis familiaris
acatgattcatgagccagaaccaca

SEQ ID NO: 40593 - DNA, 25 bp, Canis familiaris
acatgtccatcatctatgttctccc

SEQ ID NO: 40594 - DNA, 25 bp, Canis familiaris
acatgtctacatttagcttctatcc

SEQ ID NO: 40595 - DNA, 25 bp, Canis familiaris
acatgattagctttcatctttgatg

SEQ ID NO: 40596 - DNA, 25 bp, Canis familiaris
acatcatctactattctctaaagga

SEQ ID NO: 40597 - DNA, 25 bp, Canis familiaris
acatcatcaacatgctttctgtaca

SEQ ID NO: 40598 - DNA, 25 bp, Canis familiaris
acatgtttgcatggcttgactctaa

SEQ ID NO: 40599 - DNA, 25 bp, Canis familiaris
acatctgttacgctcatcttgaaat

SEQ ID NO: 40600 - DNA, 25 bp, Canis familiaris
acacagttagcccacacggatagac

SEQ ID NO: 40601 - DNA, 25 bp, Canis familiaris
acatcagtttcctaaagttacacat

SEQ ID NO: 40602 - DNA, 25 bp, Canis familiaris
acacgttgaccataagtttatccca

SEQ ID NO: 40603 - DNA, 25 bp, Canis familiaris
acaggggactagcaactttctccac

SEQ ID NO: 40604 - DNA, 25 bp, Canis familiaris
acaggaaacttatggttgctctcca

SEQ ID NO: 40605 - DNA, 25 bp, Canis familiaris
acatgggaacatatccgtctctctc

SEQ ID NO: 40606 - DNA, 25 bp, Canis familiaris
acatctgggcagttgtgccgtgcat

SEQ ID NO: 40607 - DNA, 25 bp, Canis familiaris
acatctctgagagtgttgccagtgt

SEQ ID NO: 40608 - DNA, 25 bp, Canis familiaris
acatgctctcaagaggccagtgcca

SEQ ID NO: 40609 - DNA, 25 bp, Canis familiaris
acatccgcacgaaggagcagatcgt

SEQ ID NO: 40610 - DNA, 25 bp, Canis familiaris
acatgcccactgagaggagtcttct

SEQ ID NO: 40611 - DNA, 25 bp, Canis familiaris
acatgaccaagcagagggatttttt

SEQ ID NO: 40612 - DNA, 25 bp, Canis familiaris
acagtcgggctgtgaagttcttgtt

SEQ ID NO: 40613 - DNA, 25 bp, Canis familiaris
acagtctgggaaaaattcctggctt

SEQ ID NO: 40614 - DNA, 25 bp, Canis familiaris
acatgtgctgtgtaggccaatacct

SEQ ID NO: 40615 - DNA, 25 bp, Canis familiaris
acagttgtattgggcaatcctcctc

SEQ ID NO: 40616 - DNA, 25 bp, Canis familiaris
acagattgtatcggggaacctccgt

SEQ ID NO: 40617 - DNA, 25 bp, Canis familiaris
acatcattgttggaggctgaatacc

SEQ ID NO: 40618 - DNA, 25 bp, Canis familiaris
acatcttgtaaaagcatagtcccag

SEQ ID NO: 40619 - DNA, 25 bp, Canis familiaris
acagatagtaaacctacctccagcc

SEQ ID NO: 40620 - DNA, 25 bp, Canis familiaris
acagaaacaaacaaaagcaccacca

SEQ ID NO: 40621 - DNA, 25 bp, Canis familiaris
acagaacaacaagagtggcccagca

SEQ ID NO: 40622 - DNA, 25 bp, Canis familiaris
acagataaataccttggtgccacca

SEQ ID NO: 40623 - DNA, 25 bp, Canis familiaris
acagttaataacttgatcttagcta

SEQ ID NO: 40624 - DNA, 25 bp, Canis familiaris
acagtctgagacacttgccaattct

SEQ ID NO: 40625 - DNA, 25 bp, Canis familiaris
acagttggctgttttcgtgattcaa

SEQ ID NO: 40626 - DNA, 25 bp, Canis familiaris
acagttggggatattgtgcttctca

SEQ ID NO: 40627 - DNA, 25 bp, Canis familiaris
acatgtctgaggttggctggtggtc

SEQ ID NO: 40628 - DNA, 25 bp, Canis familiaris
acagatctatagttttggggcaaaa

SEQ ID NO: 40629 - DNA, 25 bp, Canis familiaris
acagtgtcacagaggaggggaataa

SEQ ID NO: 40630 - DNA, 25 bp, Canis familiaris
acagtttagttggagcgctgctggc

SEQ ID NO: 40631 - DNA, 25 bp, Canis familiaris
acaggaatcacactcgggtgctggc

SEQ ID NO: 40632 - DNA, 25 bp, Canis familiaris
aaggaacggtgctgattgtacccct

SEQ ID NO: 40633 - DNA, 25 bp, Canis familiaris
acaggaagggcctgactttcgtgtc

SEQ ID NO: 40634 - DNA, 25 bp, Canis familiaris
acagggtgggcagaacatttaggtt

SEQ ID NO: 40635 - DNA, 25 bp, Canis familiaris
acaggtgggcgagaaggtccgagta

SEQ ID NO: 40636 - DNA, 25 bp, Canis familiaris
acacgtgtaaggattgttcccaata

SEQ ID NO: 40637 - DNA, 25 bp, Canis familiaris
acatccgtaaggacctgtatgccaa

SEQ ID NO: 40638 - DNA, 25 bp, Canis familiaris
acatccgtaaagacctctatgccaa

SEQ ID NO: 40639 - DNA, 25 bp, Canis familiaris
acatcctcaaagactcttcttccaa

SEQ ID NO: 40640 - DNA, 25 bp, Canis familiaris
acacccaaagaggtaaattgcacaa

SEQ ID NO: 40641 - DNA, 25 bp, Canis familiaris
acatccctaaggttctccagtgaaa

SEQ ID NO: 40642 - DNA, 25 bp, Canis familiaris
acatctcccacacataaccagaagt

SEQ ID NO: 40643 - DNA, 25 bp, Canis familiaris
acatccaccctgtagaaccacagtg

SEQ ID NO: 40644 - DNA, 25 bp, Canis familiaris
acatcgccgcgatagacaaacaggg

SEQ ID NO: 40645 - DNA, 25 bp, Canis familiaris
acatgccaccgaaaacggagctggg

SEQ ID NO: 40646 - DNA, 25 bp, Canis familiaris
acatgatcacttttacacaggcgta

SEQ ID NO: 40647 - DNA, 25 bp, Canis familiaris
acatctgcactcatctaacagctga

SEQ ID NO: 40648 - DNA, 25 bp, Canis familiaris
acatccctttgattgcagcagctga

SEQ ID NO: 40649 - DNA, 25 bp, Canis familiaris
acatccacattgacagtgacctgac

SEQ ID NO: 40650 - DNA, 25 bp, Canis familiaris
acatccatctgagtagtacattgat

SEQ ID NO: 40651 - DNA, 25 bp, Canis familiaris
acatctcctgaatatctcattgcta

SEQ ID NO: 40652 - DNA, 25 bp, Canis familiaris
acatctcttgtacattgctgtctgt

SEQ ID NO: 40653 - DNA, 25 bp, Canis familiaris
acatgccctgtggagaaggtctgtg

SEQ ID NO: 40654 - DNA, 25 bp, Canis familiaris
acacatcacatagcgcaagttcagg

SEQ ID NO: 40655 - DNA, 25 bp, Canis familiaris
acaccacaaccacagtcgcgggtgt

SEQ ID NO: 40656 - DNA, 25 bp, Canis familiaris
acaccaataaccagatgcccgagag

SEQ ID NO: 40657 - DNA, 25 bp, Canis familiaris
acagcctttacctgggccagtaatg

SEQ ID NO: 40658 - DNA, 25 bp, Canis familiaris
acaccgttagaaactgtccaggaga

SEQ ID NO: 40659 - DNA, 25 bp, Canis familiaris
acaccaggtagatgaccaccgctaa

SEQ ID NO: 40660 - DNA, 25 bp, Canis familiaris
acacttgagtaataaacagcttcat

SEQ ID NO: 40661 - DNA, 25 bp, Canis familiaris
acacgttgtaggtgtaactgtcact

SEQ ID NO: 40662 - DNA, 25 bp, Canis familiaris
acatctgtttagcaagaacctgtgg

SEQ ID NO: 40663 - DNA, 25 bp, Canis familiaris
acatctgtacttgaagacactttag

SEQ ID NO: 40664 - DNA, 25 bp, Canis familiaris
acacagtactgtcaaacctcaaatg

SEQ ID NO: 40665 - DNA, 25 bp, Canis familiaris
acaggtatttcttacatcccaattg

SEQ ID NO: 40666 - DNA, 25 bp, Canis familiaris
acatggtttacatgttccaatatga

SEQ ID NO: 40667 - DNA, 25 bp, Canis familiaris
acacctttccagtttcaccttggtg

SEQ ID NO: 40668 - DNA, 25 bp, Canis familiaris
acatcccccgagttgtcaactgagc

SEQ ID NO: 40669 - DNA, 25 bp, Canis familiaris
acatgcccagcctgattgggactgg

SEQ ID NO: 40670 - DNA, 25 bp, Canis familiaris
acaccccgcttgagggagggggctg

SEQ ID NO: 40671 - DNA, 25 bp, Canis familiaris
acagccaccttatcggcaagggggc

SEQ ID NO: 40672 - DNA, 25 bp, Canis familiaris
acagccacaccatccgggagggctg

SEQ ID NO: 40673 - DNA, 25 bp, Canis familiaris
acatggtccccagtcgggactgtct

SEQ ID NO: 40674 - DNA, 25 bp, Canis familiaris
acagttctgcctatggtggcctttt

SEQ ID NO: 40675 - DNA, 25 bp, Canis familiaris
acacttggccagatctttccatttt

SEQ ID NO: 40676 - DNA, 25 bp, Canis familiaris
acatcctcaccaacactttttgttt

SEQ ID NO: 40677 - DNA, 25 bp, Canis familiaris
acatctctcaccaacaaattctatt

SEQ ID NO: 40678 - DNA, 25 bp, Canis familiaris
acatctgcatccatgagtaataaat

SEQ ID NO: 40679 - DNA, 25 bp, Canis familiaris
acatctgagccaaagcctatgacaa

SEQ ID NO: 40680 - DNA, 25 bp, Canis familiaris
acatctgcccaggacctgtgcaatc

SEQ ID NO: 40681 - DNA, 25 bp, Canis familiaris
acatctcccagctccatgaatataa

SEQ ID NO: 40682 - DNA, 25 bp, Canis familiaris
acagctacagtgtacttacatataa

SEQ ID NO: 40683 - DNA, 25 bp, Canis familiaris
acatgcacacaaaaccaaccaaaaa

SEQ ID NO: 40684 - DNA, 25 bp, Canis familiaris
acagcctatgaatccgacacaaaac

SEQ ID NO: 40685 - DNA, 25 bp, Canis familiaris
acatgtgtatattctccgcaacaga

SEQ ID NO: 40686 - DNA, 25 bp, Canis familiaris
acagttattacttggcatgacagca

SEQ ID NO: 40687 - DNA, 25 bp, Canis familiaris
acatgttagttttctatacagcaaa

SEQ ID NO: 40688 - DNA, 25 bp, Canis familiaris
acatgttcagagtgtgcttatacaa

SEQ ID NO: 40689 - DNA, 25 bp, Canis familiaris
acatgtggatgaccctgttaactac

SEQ ID NO: 40690 - DNA, 25 bp, Canis familiaris
acaggcagtgcctactgttacctac

SEQ ID NO: 40691 - DNA, 25 bp, Canis familiaris
acaggcttgccataggtagcaccct

SEQ ID NO: 40692 - DNA, 25 bp, Canis familiaris
acatgactctggaaggcgacgacct

SEQ ID NO: 40693 - DNA, 25 bp, Canis familiaris
acagaatcgaactctgcacttctct

SEQ ID NO: 40694 - DNA, 25 bp, Canis familiaris
acagtaggattagctgcctccctat

SEQ ID NO: 40695 - DNA, 25 bp, Canis familiaris
acatgtaagaatttttgctcctcaa

SEQ ID NO: 40696 - DNA, 25 bp, Canis familiaris
acatgctcacgctgtttagtcatct

SEQ ID NO: 40697 - DNA, 25 bp, Canis familiaris
acatgcatacacttttcacttttta

SEQ ID NO: 40698 - DNA, 25 bp, Canis familiaris
acatgtactcttttgccttttatat

SEQ ID NO: 40699 - DNA, 25 bp, Canis familiaris
acatgtagcttttacttcacctttc

SEQ ID NO: 40700 - DNA, 25 bp, Canis familiaris
acagtcaactcttgcactatacctt

SEQ ID NO: 40701 - DNA, 25 bp, Canis familiaris
acagtaaggctgtcagcttccacgc

SEQ ID NO: 40702 - DNA, 25 bp, Canis familiaris
acatgtatcgtgttcagttgacagc

SEQ ID NO: 40703 - DNA, 25 bp, Canis familiaris
acaggtgcagtttagtctttaacga

SEQ ID NO: 40704 - DNA, 25 bp, Canis familiaris
acaggtgccttgacagttttgatga

SEQ ID NO: 40705 - DNA, 25 bp, Canis familiaris
acaggtgtcggtcttgctgtggaag

SEQ ID NO: 40706 - DNA, 25 bp, Canis familiaris
acaggttgcggctttctgtgggaag

SEQ ID NO: 40707 - DNA, 25 bp, Canis familiaris
acaggtcttccctttgggcagggat

SEQ ID NO: 40708 - DNA, 25 bp, Canis familiaris
acaggtgctggctgctttggtagga

SEQ ID NO: 40709 - DNA, 25 bp, Canis familiaris
acatgggcttcttgtttgattatgc

SEQ ID NO: 40710 - DNA, 25 bp, Canis familiaris
acatgtgtcattctgttgatattgt

SEQ ID NO: 40711 - DNA, 25 bp, Canis familiaris
acatgtcatcatacgtgtcctgtgc

SEQ ID NO: 40712 - DNA, 25 bp, Canis familiaris
acatgctcatctaggaactggtgat

SEQ ID NO: 40713 - DNA, 25 bp, Canis familiaris
acatgccagctaggtgacacctcat

SEQ ID NO: 40714 - DNA, 25 bp, Canis familiaris
acaggaccagttacactccatacac

SEQ ID NO: 40715 - DNA, 25 bp, Canis familiaris
acatgttccagtatgactccactca

SEQ ID NO: 40716 - DNA, 25 bp, Canis familiaris
acatgttccaatatgattccaccca

SEQ ID NO: 40717 - DNA, 25 bp, Canis familiaris
acatgtcattaaaccattctccctc

SEQ ID NO: 40718 - DNA, 25 bp, Canis familiaris
acatgtcagtcatgatccacccggt

SEQ ID NO: 40719 - DNA, 25 bp, Canis familiaris
acatggcaccattgtaattcacggt

SEQ ID NO: 40720 - DNA, 25 bp, Canis familiaris
acatgaacgcgacgaaccacgccat

SEQ ID NO: 40721 - DNA, 25 bp, Canis familiaris
acagaaccgccagatcgacaggatc

SEQ ID NO: 40722 - DNA, 25 bp, Canis familiaris
acaggaccctcagcagaatctggaa

SEQ ID NO: 40723 - DNA, 25 bp, Canis familiaris
acaaagatgccctggagcgcttgaa

SEQ ID NO: 40724 - DNA, 25 bp, Canis familiaris
acagattagccctgcagacgattcc

SEQ ID NO: 40725 - DNA, 25 bp, Canis familiaris
acaggtatggcagcgtgccgttcac

SEQ ID NO: 40726 - DNA, 25 bp, Canis familiaris
acagggagaggctggtgccttccgt

SEQ ID NO: 40727 - DNA, 25 bp, Canis familiaris
acaggcggagagtggaggctgcccg

SEQ ID NO: 40728 - DNA, 25 bp, Canis familiaris
acaggtaagatggggcaggctttcc

SEQ ID NO: 40729 - DNA, 25 bp, Canis familiaris
acagggaagggcccacaggttgctc

SEQ ID NO: 40730 - DNA, 25 bp, Canis familiaris
acagggtgaagcctgtcctggttcc

SEQ ID NO: 40731 - DNA, 25 bp, Canis familiaris
acaggagggcagcctgacttcctgt

SEQ ID NO: 40732 - DNA, 25 bp, Canis familiaris
acaagacctatgggacttccctact

SEQ ID NO: 40733 - DNA, 25 bp, Canis familiaris
acatgagctgcctggagagcttcgc

SEQ ID NO: 40734 - DNA, 25 bp, Canis familiaris
acatggcagtcacgggactggcctc

SEQ ID NO: 40735 - DNA, 25 bp, Canis familiaris
acatggcgtcgcctggacagcgacg

SEQ ID NO: 40736 - DNA, 25 bp, Canis familiaris
acatggtgtccccagggcatgaaga

SEQ ID NO: 40737 - DNA, 25 bp, Canis familiaris
acatgggcctccaaggagtaagagc

SEQ ID NO: 40738 - DNA, 25 bp, Canis familiaris
acatgccccccattagggaagacac

SEQ ID NO: 40739 - DNA, 25 bp, Canis familiaris
acatcctggccacctatgtgggaaa

SEQ ID NO: 40740 - DNA, 25 bp, Canis familiaris
acatccttacccttctgaagaacag

SEQ ID NO: 40741 - DNA, 25 bp, Canis familiaris
acaccattccctcgggaacgacagg

SEQ ID NO: 40742 - DNA, 25 bp, Canis familiaris
acaccattccttcaaggtgggaagg

SEQ ID NO: 40743 - DNA, 25 bp, Canis familiaris
acatcctctctttccacgaggagag

SEQ ID NO: 40744 - DNA, 25 bp, Canis familiaris
acatggcattgttaccaactgggac

SEQ ID NO: 40745 - DNA, 25 bp, Canis familiaris
acaggtctgaaaccaggcgggatct

SEQ ID NO: 40746 - DNA, 25 bp, Canis familiaris
acagaatcataaagccaccagggac

SEQ ID NO: 40747 - DNA, 25 bp, Canis familiaris
acagcaactgggccagcaaagttga

SEQ ID NO: 40748 - DNA, 25 bp, Canis familiaris
acagcaatgggtactccaagtccaa

SEQ ID NO: 40749 - DNA, 25 bp, Canis familiaris
acagcagagtggtcctttggtcctt

SEQ ID NO: 40750 - DNA, 25 bp, Canis familiaris
acaggggatcccagtggtcctgtca

SEQ ID NO: 40751 - DNA, 25 bp, Canis familiaris
acagggacaaccaagtggtccatta

SEQ ID NO: 40752 - DNA, 25 bp, Canis familiaris
acaggggagaccagtttctctcagc

SEQ ID NO: 40753 - DNA, 25 bp, Canis familiaris
acacacggacacgtgggtctcgggc

SEQ ID NO: 40754 - DNA, 25 bp, Canis familiaris
acacagcggcccaggggagcgggcc

SEQ ID NO: 40755 - DNA, 25 bp, Canis familiaris
acaggggccctgaggccagggctct

SEQ ID NO: 40756 - DNA, 25 bp, Canis familiaris
acaggaaaacagggtgccagtggtc

SEQ ID NO: 40757 - DNA, 25 bp, Canis familiaris
acatggacccaaagatgtgccatat

SEQ ID NO: 40758 - DNA, 25 bp, Canis familiaris
acatgggctcctggaaggcagctac

SEQ ID NO: 40759 - DNA, 25 bp, Canis familiaris
acaggacttccgtagatggctccat

SEQ ID NO: 40760 - DNA, 25 bp, Canis familiaris
acagtgacctaatagagacctcctt

SEQ ID NO: 40761 - DNA, 25 bp, Canis familiaris
acagtgctaaaatcgagtctcctct

SEQ ID NO: 40762 - DNA, 25 bp, Canis familiaris
acaggctttatatctattgccccat

SEQ ID NO: 40763 - DNA, 25 bp, Canis familiaris
acatcctttgattccatatacccgt

SEQ ID NO: 40764 - DNA, 25 bp, Canis familiaris
acatcctttatatttaccagtcttg

SEQ ID NO: 40765 - DNA, 25 bp, Canis familiaris
acatccttcaaattgctgacacgtc

SEQ ID NO: 40766 - DNA, 25 bp, Canis familiaris
acatcctgtgcattaaggacatggc

SEQ ID NO: 40767 - DNA, 25 bp, Canis familiaris
acatcctgtgcatcaaggacatggc

SEQ ID NO: 40768 - DNA, 25 bp, Canis familiaris
acatgactatgaccagagggctgcc

SEQ ID NO: 40769 - DNA, 25 bp, Canis familiaris
acatccttctgcgagaagggccaga

SEQ ID NO: 40770 - DNA, 25 bp, Canis familiaris
acatggatatctcagaaatgttctg

SEQ ID NO: 40771 - DNA, 25 bp, Canis familiaris
acatccatgcttacagaactgttca

SEQ ID NO: 40772 - DNA, 25 bp, Canis familiaris
acatccactgtgaagaatttccggg

SEQ ID NO: 40773 - DNA, 25 bp, Canis familiaris
acatcctctatgtagcattcttctg

SEQ ID NO: 40774 - DNA, 25 bp, Canis familiaris
acactttgggacacttgtgggcctg

SEQ ID NO: 40775 - DNA, 25 bp, Canis familiaris
acagtcttgggaaacctgtgccgcc

SEQ ID NO: 40776 - DNA, 25 bp, Canis familiaris
acagcttagtgtacaaccggcttag

SEQ ID NO: 40777 - DNA, 25 bp, Canis familiaris
acagtgtggcttaaacattttttgt

SEQ ID NO: 40778 - DNA, 25 bp, Canis familiaris
acatggctggccagccgcagtttgt

SEQ ID NO: 40779 - DNA, 25 bp, Canis familiaris
acaactggcctggcaccatgtgttt

SEQ ID NO: 40780 - DNA, 25 bp, Canis familiaris
acatcctacacttgggcatctgttt

SEQ ID NO: 40781 - DNA, 25 bp, Canis familiaris
acaggatacactggacctcgttctc

SEQ ID NO: 40782 - DNA, 25 bp, Canis familiaris
acaggttgtgtgcacaccgttgtgc

SEQ ID NO: 40783 - DNA, 25 bp, Canis familiaris
ttcagaatggaccaggcttttttta

SEQ ID NO: 40784 - DNA, 25 bp, Canis familiaris
acatggtctacatgttccagtatga

SEQ ID NO: 40785 - DNA, 25 bp, Canis familiaris
acagtggcataatcttccgtatata

SEQ ID NO: 40786 - DNA, 25 bp, Canis familiaris
acatgatggttttcggtcttataca

SEQ ID NO: 40787 - DNA, 25 bp, Canis familiaris
acagatttactatcgacttcataac

SEQ ID NO: 40788 - DNA, 25 bp, Canis familiaris
acagcttaacttttcagcttaaaat

SEQ ID NO: 40789 - DNA, 25 bp, Canis familiaris
acagtctaactttaacgtctcacag

SEQ ID NO: 40790 - DNA, 25 bp, Canis familiaris
acagtgccatttaaacctctatcca

SEQ ID NO: 40791 - DNA, 25 bp, Canis familiaris
acagttctttgtgagcttcaaggac

SEQ ID NO: 40792 - DNA, 25 bp, Canis familiaris
acagttcaccgcggactttagagac

SEQ ID NO: 40793 - DNA, 25 bp, Canis familiaris
acaggaaccagcagactttggagac

SEQ ID NO: 40794 - DNA, 25 bp, Canis familiaris
acaaaaccagatatgcgttagcagt

SEQ ID NO: 40795 - DNA, 25 bp, Canis familiaris
acaagagattaaaggagttctgtta

SEQ ID NO: 40796 - DNA, 25 bp, Canis familiaris
acagggcctaccgggtactatagca

SEQ ID NO: 40797 - DNA, 25 bp, Canis familiaris
acatggggtgacctgggtgactcag

SEQ ID NO: 40798 - DNA, 25 bp, Canis familiaris
acatgattatggtccggaggaccag

SEQ ID NO: 40799 - DNA, 25 bp, Canis familiaris
acatgcacgtggtcctggacgacga

SEQ ID NO: 40800 - DNA, 25 bp, Canis familiaris
acatgcaggaggtcatcggcacggc

SEQ ID NO: 40801 - DNA, 25 bp, Canis familiaris
acatgatgagggttctggcccctcc

SEQ ID NO: 40802 - DNA, 25 bp, Canis familiaris
acatgttgatggggtggtctcctcc

SEQ ID NO: 40803 - DNA, 25 bp, Canis familiaris
acagttgaagggcttgtcccaccac

SEQ ID NO: 40804 - DNA, 25 bp, Canis familiaris
acagtggcagaggtttcttcaccct

SEQ ID NO: 40805 - DNA, 25 bp, Canis familiaris
acagtgatgaaccattgtacccgcc

SEQ ID NO: 40806 - DNA, 25 bp, Canis familiaris
acatggatgaaccccttactggagc

SEQ ID NO: 40807 - DNA, 25 bp, Canis familiaris
acatggagtgactacctgatccgtg

SEQ ID NO: 40808 - DNA, 25 bp, Canis familiaris
acatgtggctgagatcttgtcctgc

SEQ ID NO: 40809 - DNA, 25 bp, Canis familiaris
acagatctatgtgaccatgccctgc

SEQ ID NO: 40810 - DNA, 25 bp, Canis familiaris
acatgacaacatgaccagcattctg

SEQ ID NO: 40811 - DNA, 25 bp, Canis familiaris
acatgtcgaatggtcagcgctgatt

SEQ ID NO: 40812 - DNA, 25 bp, Canis familiaris
acatgtcgatcttccatgcgtgtca

SEQ ID NO: 40813 - DNA, 25 bp, Canis familiaris
acatgtgccatgtctctgtggtgtg

SEQ ID NO: 40814 - DNA, 25 bp, Canis familiaris
acatgaggcagagcggttgctgtgg

SEQ ID NO: 40815 - DNA, 25 bp, Canis familiaris
acatggatcatgtttggatcttggg

SEQ ID NO: 40816 - DNA, 25 bp, Canis familiaris
acatgtgttctttgttcttgagtga

SEQ ID NO: 40817 - DNA, 25 bp, Canis familiaris
acatgtgcccttgcattttgactga

SEQ ID NO: 40818 - DNA, 25 bp, Canis familiaris
acatgcccacatttatccttacatg

SEQ ID NO: 40819 - DNA, 25 bp, Canis familiaris
acatgcccatctgatcttttgattc

SEQ ID NO: 40820 - DNA, 25 bp, Canis familiaris
acatgccaatctgatcttttaattc

SEQ ID NO: 40821 - DNA, 25 bp, Canis familiaris
acatgccaacccctgaatgattttc

SEQ ID NO: 40822 - DNA, 25 bp, Canis familiaris
acatccaaaccaatactagccattc

SEQ ID NO: 40823 - DNA, 25 bp, Canis familiaris
acatccactgaaccatactatactt

SEQ ID NO: 40824 - DNA, 25 bp, Canis familiaris
acatccacgtagactcagttcttct

SEQ ID NO: 40825 - DNA, 25 bp, Canis familiaris
acatccaagttctctgtctgtgtgc

SEQ ID NO: 40826 - DNA, 25 bp, Canis familiaris
acatgctgcaaaattcacccgattc

SEQ ID NO: 40827 - DNA, 25 bp, Canis familiaris
acatgcagccacagatatcaccggt

SEQ ID NO: 40828 - DNA, 25 bp, Canis familiaris
acatggtcatcatgaaccctcagct

SEQ ID NO: 40829 - DNA, 25 bp, Canis familiaris
acatgcgtacaaacgtcaccatcat

SEQ ID NO: 40830 - DNA, 25 bp, Canis familiaris
acatgcgtatatctgtgtcaccacc

SEQ ID NO: 40831 - DNA, 25 bp, Canis familiaris
acagaatgagtgcatgtgcccatcc

SEQ ID NO: 40832 - DNA, 25 bp, Canis familiaris
acagacgatgtcattacggccggag

SEQ ID NO: 40833 - DNA, 25 bp, Canis familiaris
acagggttgttcaaaggcacaaggc

SEQ ID NO: 40834 - DNA, 25 bp, Canis familiaris
acagggtttgtcaatgaggcagatc

SEQ ID NO: 40835 - DNA, 25 bp, Canis familiaris
acagggctgactgaaggcgagcatg

SEQ ID NO: 40836 - DNA, 25 bp, Canis familiaris
acaggcaggatcatcacggtggcga

SEQ ID NO: 40837 - DNA, 25 bp, Canis familiaris
acatgctgaagaactcatctgaggg

SEQ ID NO: 40838 - DNA, 25 bp, Canis familiaris
acatgctgcaatctgctgcaactgg

SEQ ID NO: 40839 - DNA, 25 bp, Canis familiaris
acatgcgcaatgagctggaggagat

SEQ ID NO: 40840 - DNA, 25 bp, Canis familiaris
acatgctgccaccagcgggcagaga

SEQ ID NO: 40841 - DNA, 25 bp, Canis familiaris
acatgctggctccatccatgaagtg

SEQ ID NO: 40842 - DNA, 25 bp, Canis familiaris
acatggtgccactctgcatagggat

SEQ ID NO: 40843 - DNA, 25 bp, Canis familiaris
acaggtacatgctgctgctggtggt

SEQ ID NO: 40844 - DNA, 25 bp, Canis familiaris
acaggacactgctctttgttgattt

SEQ ID NO: 40845 - DNA, 25 bp, Canis familiaris
acaggcctatgctccttaattttgg

SEQ ID NO: 40846 - DNA, 25 bp, Canis familiaris
acaggcctaccctgttatctattgt

SEQ ID NO: 40847 - DNA, 25 bp, Canis familiaris
acaggcgttcaccagaattactttt

SEQ ID NO: 40848 - DNA, 25 bp, Canis familiaris
acatggaaatgagcagtcttacttt

SEQ ID NO: 40849 - DNA, 25 bp, Canis familiaris
acatgtcagaagtctcgtttcattc

SEQ ID NO: 40850 - DNA, 25 bp, Canis familiaris
acatgaaaagtgtgcttgctctctg

SEQ ID NO: 40851 - DNA, 25 bp, Canis familiaris
acatgacaagcagttccttccattt

SEQ ID NO: 40852 - DNA, 25 bp, Canis familiaris
acaggcacagcatacactttcttta

SEQ ID NO: 40853 - DNA, 25 bp, Canis familiaris
aaagcagcagcaaaagccttaaagg

SEQ ID NO: 40854 - DNA, 25 bp, Canis familiaris
aaagccggcaaactttctacgtgcg

SEQ ID NO: 40855 - DNA, 25 bp, Canis familiaris
acaaccgagcaatctttatatcagg

SEQ ID NO: 40856 - DNA, 25 bp, Canis familiaris
acaatctcgaaatctagtcaaaccc

SEQ ID NO: 40857 - DNA, 25 bp, Canis familiaris
acagatccagacaaactagcccata

SEQ ID NO: 40858 - DNA, 25 bp, Canis familiaris
acagtacgaatgcagctacaccacc

SEQ ID NO: 40859 - DNA, 25 bp, Canis familiaris
acagtgacggagcagtgccaaccgc

SEQ ID NO: 40860 - DNA, 25 bp, Canis familiaris
acatgctactaaggagtgcccctca

SEQ ID NO: 40861 - DNA, 25 bp, Canis familiaris
acagtatctaataagcacccgctat

SEQ ID NO: 40862 - DNA, 25 bp, Canis familiaris
acagtttagaactaacctgctttag

SEQ ID NO: 40863 - DNA, 25 bp, Canis familiaris
acatgtttataattatccaccctta

SEQ ID NO: 40864 - DNA, 25 bp, Canis familiaris
acatgttttatatttacagcctttt

SEQ ID NO: 40865 - DNA, 25 bp, Canis familiaris
acatgttacctaagatacccactat

SEQ ID NO: 40866 - DNA, 25 bp, Canis familiaris
acagcattacctacaataaccaagt

SEQ ID NO: 40867 - DNA, 25 bp, Canis familiaris
acagcttacatcacctcaaaactat

SEQ ID NO: 40868 - DNA, 25 bp, Canis familiaris
acagcataataaatttgcaaacctt

SEQ ID NO: 40869 - DNA, 25 bp, Canis familiaris
acagcaaaataaaaatactgccttt

SEQ ID NO: 40870 - DNA, 25 bp, Canis familiaris
acagataacagaaataaaccacctt

SEQ ID NO: 40871 - DNA, 25 bp, Canis familiaris
acatgtacacaacatagagcattat

SEQ ID NO: 40872 - DNA, 25 bp, Canis familiaris
acatgtccacaaggacccattttta

SEQ ID NO: 40873 - DNA, 25 bp, Canis familiaris
acatgtcaaaacacgctatttctgt

SEQ ID NO: 40874 - DNA, 25 bp, Canis familiaris
acagtccaattgcaggttttcttgc

SEQ ID NO: 40875 - DNA, 25 bp, Canis familiaris
acagttcaagtcagccttttcctgc

SEQ ID NO: 40876 - DNA, 25 bp, Canis familiaris
acagggtaacaccatcttcttcttc

SEQ ID NO: 40877 - DNA, 25 bp, Canis familiaris
acaggggcacaacatttcatgaacc

SEQ ID NO: 40878 - DNA, 25 bp, Canis familiaris
acaggcagcgaatcagactctcagc

SEQ ID NO: 40879 - DNA, 25 bp, Canis familiaris
acatgtcgccagaaagactccaggg

SEQ ID NO: 40880 - DNA, 25 bp, Canis familiaris
acagagccacagaaggaccgtgagg

SEQ ID NO: 40881 - DNA, 25 bp, Canis familiaris
acatgagctagattggggtcgggtg

SEQ ID NO: 40882 - DNA, 25 bp, Canis familiaris
acaggccagcagtagggtcagagtc

SEQ ID NO: 40883 - DNA, 25 bp, Canis familiaris
acagtgggcatgtcgaggtcacgga

SEQ ID NO: 40884 - DNA, 25 bp, Canis familiaris
acagggtgcaagttggtcccgagcc

SEQ ID NO: 40885 - DNA, 25 bp, Canis familiaris
acatggcccaagtgctggaccagaa

SEQ ID NO: 40886 - DNA, 25 bp, Canis familiaris
acatggctccaaagtcaaatccaca

SEQ ID NO: 40887 - DNA, 25 bp, Canis familiaris
acaggctgcgtagttgtaaaccact

SEQ ID NO: 40888 - DNA, 25 bp, Canis familiaris
acaagtcctaaacacagaccactgg

SEQ ID NO: 40889 - DNA, 25 bp, Canis familiaris
acagttcttaaatagcagcaccagt

SEQ ID NO: 40890 - DNA, 25 bp, Canis familiaris
acagtttgtagctatttcccctgtc

SEQ ID NO: 40891 - DNA, 25 bp, Canis familiaris
acagtgtttacctgttcatccatcc

SEQ ID NO: 40892 - DNA, 25 bp, Canis familiaris
acatgtgtcagtgccatttcttttc

SEQ ID NO: 40893 - DNA, 25 bp, Canis familiaris
acatgtttctagactttctgttccc

SEQ ID NO: 40894 - DNA, 25 bp, Canis familiaris
acaggtgtctatacagttgcagttc

SEQ ID NO: 40895 - DNA, 25 bp, Canis familiaris
acaggttggacaagatctgacagtg

SEQ ID NO: 40896 - DNA, 25 bp, Canis familiaris
acagtgtgaggacgctgaccacggg

SEQ ID NO: 40897 - DNA, 25 bp, Canis familiaris
acactggctatccgtgatccacggt

SEQ ID NO: 40898 - DNA, 25 bp, Canis familiaris
acactggcatcatctgtaccattgg

SEQ ID NO: 40899 - DNA, 25 bp, Canis familiaris
acagagcagcactctggacacctgc

SEQ ID NO: 40900 - DNA, 25 bp, Canis familiaris
acagaagacccttgactacatccag

SEQ ID NO: 40901 - DNA, 25 bp, Canis familiaris
acaggagaccagtagtccagcagcc

SEQ ID NO: 40902 - DNA, 25 bp, Canis familiaris
acagaaggccaggttgagaaccctg

SEQ ID NO: 40903 - DNA, 25 bp, Canis familiaris
acagaggagctccgtcagaagaccc

SEQ ID NO: 40904 - DNA, 25 bp, Canis familiaris
acagcggtccggaagacgaccttcg

SEQ ID NO: 40905 - DNA, 25 bp, Canis familiaris
acaggggcctgggagccagggttgg

SEQ ID NO: 40906 - DNA, 25 bp, Canis familiaris
acaggagcgcaggaaccgaggactt

SEQ ID NO: 40907 - DNA, 25 bp, Canis familiaris
acaggagcggtatcacagcctggcc

SEQ ID NO: 40908 - DNA, 25 bp, Canis familiaris
acagacttggtaccacaggctggcc

SEQ ID NO: 40909 - DNA, 25 bp, Canis familiaris
acagtccttggaacgaggctctgct

SEQ ID NO: 40910 - DNA, 25 bp, Canis familiaris
acagtcctttgtcacatgtgtctcc

SEQ ID NO: 40911 - DNA, 25 bp, Canis familiaris
acagtccattttaatgtgggattgg

SEQ ID NO: 40912 - DNA, 25 bp, Canis familiaris
acagtcgctccttttagttgttgag

SEQ ID NO: 40913 - DNA, 25 bp, Canis familiaris
acagcccccacgctaatttagatgc

SEQ ID NO: 40914 - DNA, 25 bp, Canis familiaris
acatgtcctccctgtagatgtacag

SEQ ID NO: 40915 - DNA, 25 bp, Canis familiaris
acatggcccaatccggaggtgaagg

SEQ ID NO: 40916 - DNA, 25 bp, Canis familiaris
acaggctccctgacaggagcgggag

SEQ ID NO: 40917 - DNA, 25 bp, Canis familiaris
acagcttccatcccaaatctggggt

SEQ ID NO: 40918 - DNA, 25 bp, Canis familiaris
acagttccactaggacttgttggca

SEQ ID NO: 40919 - DNA, 25 bp, Canis familiaris
acagtggcccggtaagtgttctgcc

SEQ ID NO: 40920 - DNA, 25 bp, Canis familiaris
acaggaacacgtgcaagctgtccag

SEQ ID NO: 40921 - DNA, 25 bp, Canis familiaris
acatggacccagaacacctgtttga

SEQ ID NO: 40922 - DNA, 25 bp, Canis familiaris
acaggttcacaaacaggtggttgac

SEQ ID NO: 40923 - DNA, 25 bp, Canis familiaris
acaggttcccaacagtggtatcacc

SEQ ID NO: 40924 - DNA, 25 bp, Canis familiaris
acaggcccaatctggagggcttccc

SEQ ID NO: 40925 - DNA, 25 bp, Canis familiaris
acagggccagccggaggaggagccc

SEQ ID NO: 40926 - DNA, 25 bp, Canis familiaris
acaggaagagccgagcggagacccc

SEQ ID NO: 40927 - DNA, 25 bp, Canis familiaris
acagaataatgaccgcctacacacc

SEQ ID NO: 40928 - DNA, 25 bp, Canis familiaris
acagaagacagatcgtctcgccagc

SEQ ID NO: 40929 - DNA, 25 bp, Canis familiaris
acaggacaagaagctctctctcaga

SEQ ID NO: 40930 - DNA, 25 bp, Canis familiaris
acagtgtcaatgtcaccttcaccag

SEQ ID NO: 40931 - DNA, 25 bp, Canis familiaris
acatgggcaggggtctgtagccgca

SEQ ID NO: 40932 - DNA, 25 bp, Canis familiaris
acatggccgggctgctgaagcccac

SEQ ID NO: 40933 - DNA, 25 bp, Canis familiaris
acatggcgggcctgctgaagcctgc

SEQ ID NO: 40934 - DNA, 25 bp, Canis familiaris
acaggcagcccccagatgaagcctg

SEQ ID NO: 40935 - DNA, 25 bp, Canis familiaris
acaggcaccaaccatcatataccat

SEQ ID NO: 40936 - DNA, 25 bp, Canis familiaris
acaggagctaaccacatttgcaccg

SEQ ID NO: 40937 - DNA, 25 bp, Canis familiaris
acagacgtgaacactgaggcactgg

SEQ ID NO: 40938 - DNA, 25 bp, Canis familiaris
acaggaggaaccggaggcagagccc

SEQ ID NO: 40939 - DNA, 25 bp, Canis familiaris
acaggaggaagagttagtgcagtca

SEQ ID NO: 40940 - DNA, 25 bp, Canis familiaris
cacggcaggaaagttcagtcacccc

SEQ ID NO: 40941 - DNA, 25 bp, Canis familiaris
acaggaggagaacccagtccctgct

SEQ ID NO: 40942 - DNA, 25 bp, Canis familiaris
acagagaagaggtctccgactccga

SEQ ID NO: 40943 - DNA, 25 bp, Canis familiaris
acagagagagagagccgggccaaga

SEQ ID NO: 40944 - DNA, 25 bp, Canis familiaris
acagagatgggccccgggtaaggtg

SEQ ID NO: 40945 - DNA, 25 bp, Canis familiaris
acagaggggcgtcgcgacaacagag

SEQ ID NO: 40946 - DNA, 25 bp, Canis familiaris
acaggcgatgccgttgcaaagtgca

SEQ ID NO: 40947 - DNA, 25 bp, Canis familiaris
acaggcatggcagcttaggcagtca

SEQ ID NO: 40948 - DNA, 25 bp, Canis familiaris
acaggattgatcgattccgcgtcac

SEQ ID NO: 40949 - DNA, 25 bp, Canis familiaris
acagtgtcattgggtctcaggtcct

SEQ ID NO: 40950 - DNA, 25 bp, Canis familiaris
acagttattggatgcagcggttttc

SEQ ID NO: 40951 - DNA, 25 bp, Canis familiaris
acaggaagggcttctggcgcttttc

SEQ ID NO: 40952 - DNA, 25 bp, Canis familiaris
acaggagagggttcacggatcttcc

SEQ ID NO: 40953 - DNA, 25 bp, Canis familiaris
acagaaggggctgcccgtgctactt

SEQ ID NO: 40954 - DNA, 25 bp, Canis familiaris
acaggagggagtgccctgtgctact

SEQ ID NO: 40955 - DNA, 25 bp, Canis familiaris
acaaggcggacggaccatttgactc

SEQ ID NO: 40956 - DNA, 25 bp, Canis familiaris
acaccaaggaccgcttattagatcc

SEQ ID NO: 40957 - DNA, 25 bp, Canis familiaris
acacctaatccacgccttaattatt

SEQ ID NO: 40958 - DNA, 25 bp, Canis familiaris
acaccccatctacttctaaataaat

SEQ ID NO: 40959 - DNA, 25 bp, Canis familiaris
acagggctttgcttcctaagaaaat

SEQ ID NO: 40960 - DNA, 25 bp, Canis familiaris
acaggactatctgtgcccacaaata

SEQ ID NO: 40961 - DNA, 25 bp, Canis familiaris
acagtaattctgtattccgaacata

SEQ ID NO: 40962 - DNA, 25 bp, Canis familiaris
acagttgattcccttttatactccg

SEQ ID NO: 40963 - DNA, 25 bp, Canis familiaris
acagttttcgctctggtgaatgcat

SEQ ID NO: 40964 - DNA, 25 bp, Canis familiaris
acagttttcgctcggtgaatacatg

SEQ ID NO: 40965 - DNA, 25 bp, Canis familiaris
acagttgtccagttaatgattaaga

SEQ ID NO: 40966 - DNA, 25 bp, Canis familiaris
acagttgtccagaagcaggctgtac

SEQ ID NO: 40967 - DNA, 25 bp, Canis familiaris
acagtggtccaaacagtcttcctgt

SEQ ID NO: 40968 - DNA, 25 bp, Canis familiaris
acagtgggctacatcagagttcggt

SEQ ID NO: 40969 - DNA, 25 bp, Canis familiaris
acagtgggtgcaactcaaggtcttc

SEQ ID NO: 40970 - DNA, 25 bp, Canis familiaris
acagatgggtcaccttgacttcttc

SEQ ID NO: 40971 - DNA, 25 bp, Canis familiaris
acagctggtgactagtctgaccctt

SEQ ID NO: 40972 - DNA, 25 bp, Canis familiaris
acagtgaggagccagccagacatct

SEQ ID NO: 40973 - DNA, 25 bp, Canis familiaris
acaggaggaatgcccatacatgtgt

SEQ ID NO: 40974 - DNA, 25 bp, Canis familiaris
acaggcaggaaacaaagctctaatt

SEQ ID NO: 40975 - DNA, 25 bp, Canis familiaris
tactggggaacacaaagggctttag

SEQ ID NO: 40976 - DNA, 25 bp, Canis familiaris
acagggaaccaacacagggctctat

SEQ ID NO: 40977 - DNA, 25 bp, Canis familiaris
acaggcgaacgcaagcgacgaccgc

SEQ ID NO: 40978 - DNA, 25 bp, Canis familiaris
acaggtgacaccaggaccagcaagc

SEQ ID NO: 40979 - DNA, 25 bp, Canis familiaris
acaggtcacagggaagaagcgcgtc

SEQ ID NO: 40980 - DNA, 25 bp, Canis familiaris
acaggcccagggataagtgacaaga

SEQ ID NO: 40981 - DNA, 25 bp, Canis familiaris
acaggacggtgtattagttagagta

SEQ ID NO: 40982 - DNA, 25 bp, Canis familiaris
acagtgttgtgtccatttgagtata

SEQ ID NO: 40983 - DNA, 25 bp, Canis familiaris
acaggttcttcctatttggactcat

SEQ ID NO: 40984 - DNA, 25 bp, Canis familiaris
acagagggtttctctgggcactctc

SEQ ID NO: 40985 - DNA, 25 bp, Canis familiaris
acagggatttttgtgattcctctga

SEQ ID NO: 40986 - DNA, 25 bp, Canis familiaris
acaggatttatttcttattcacatt

SEQ ID NO: 40987 - DNA, 25 bp, Canis familiaris
acagttgcttttggattttacattc

SEQ ID NO: 40988 - DNA, 25 bp, Canis familiaris
acagtccttattgttgtcttcaaac

SEQ ID NO: 40989 - DNA, 25 bp, Canis familiaris
acagatccagtcactttgtttccaa

SEQ ID NO: 40990 - DNA, 25 bp, Canis familiaris
acagtcgagctcatcttgtttctta

SEQ ID NO: 40991 - DNA, 25 bp, Canis familiaris
acagtcttctcttgcattttttttt

SEQ ID NO: 40992 - DNA, 25 bp, Canis familiaris
acagtccctcatcgtgtcgagaagt

SEQ ID NO: 40993 - DNA, 25 bp, Canis familiaris
acacgctcttacagtcgatggactt

SEQ ID NO: 40994 - DNA, 25 bp, Canis familiaris
acacgctcttacagtcgatggactt

SEQ ID NO: 40995 - DNA, 25 bp, Canis familiaris
acacctgctgtttcgtagataccta

SEQ ID NO: 40996 - DNA, 25 bp, Canis familiaris
acacctcctgtgttgaagggcctaa

SEQ ID NO: 40997 - DNA, 25 bp, Canis familiaris
acaactccatggctaactacaccac

SEQ ID NO: 40998 - DNA, 25 bp, Canis familiaris
acaggtcgtggcctagaggacccac

SEQ ID NO: 40999 - DNA, 25 bp, Canis familiaris
acaggctctgtaggtagatgtgtgc

SEQ ID NO: 41000 - DNA, 25 bp, Canis familiaris
acagttcattactcaattctgtttc

SEQ ID NO: 41001 - DNA, 25 bp, Canis familiaris
acagattatttctcagcagttttaa

SEQ ID NO: 41002 - DNA, 25 bp, Canis familiaris
acagagtacctttccattatttaat

SEQ ID NO: 41003 - DNA, 25 bp, Canis familiaris
acaggtaagctacaatggtttaatt

SEQ ID NO: 41004 - DNA, 25 bp, Canis familiaris
acagtgaaactgcgaatggctcatt

SEQ ID NO: 41005 - DNA, 25 bp, Canis familiaris
acaggaagcaatcaatgacctcgtg

SEQ ID NO: 41006 - DNA, 25 bp, Canis familiaris
acaggaagatgatggggcgctcggg

SEQ ID NO: 41007 - DNA, 25 bp, Canis familiaris
acagcccagcatgaagatggccccg

SEQ ID NO: 41008 - DNA, 25 bp, Canis familiaris
acagtctctgtgtcaaggcagctcc

SEQ ID NO: 41009 - DNA, 25 bp, Canis familiaris
acagtatctgatacaggagccatgt

SEQ ID NO: 41010 - DNA, 25 bp, Canis familiaris
acagtggctgtattccgctcgtgga

SEQ ID NO: 41011 - DNA, 25 bp, Canis familiaris
acagtggctgtctactcggagcagg

SEQ ID NO: 41012 - DNA, 25 bp, Canis familiaris
acaggatctgtacgcagcgggcgag

SEQ ID NO: 41013 - DNA, 25 bp, Canis familiaris
acaagacatgtccatcagcatgcag

SEQ ID NO: 41014 - DNA, 25 bp, Canis familiaris
acagagattggccatggcatccctc

SEQ ID NO: 41015 - DNA, 25 bp, Canis familiaris
acaggatgcaggcctggatgccctg

SEQ ID NO: 41016 - DNA, 25 bp, Canis familiaris
acaggtcaggagcgaggcctgccta

SEQ ID NO: 41017 - DNA, 25 bp, Canis familiaris
acaggtgcaaagcgcttgctctgct

SEQ ID NO: 41018 - DNA, 25 bp, Canis familiaris
acagtgtgctcatgagcggcttctc

SEQ ID NO: 41019 - DNA, 25 bp, Canis familiaris
acaggtggcatatgcgagcaaagca

SEQ ID NO: 41020 - DNA, 25 bp, Canis familiaris
acagggagattgagcatcacacagc

SEQ ID NO: 41021 - DNA, 25 bp, Canis familiaris
acagcaggaaataggatcatcagcc

SEQ ID NO: 41022 - DNA, 25 bp, Canis familiaris
acagcagcaaacagagataatgaaa

SEQ ID NO: 41023 - DNA, 25 bp, Canis familiaris
acagagcacagagtcggcgggagaa

SEQ ID NO: 41024 - DNA, 25 bp, Canis familiaris
acagactcatgacctgatgccagga

SEQ ID NO: 41025 - DNA, 25 bp, Canis familiaris
acagaatgccatcctggcctgtgag

SEQ ID NO: 41026 - DNA, 25 bp, Canis familiaris
acagattctctgtcaacctggatgt

SEQ ID NO: 41027 - DNA, 25 bp, Canis familiaris
acagactcaggaccaattgcgtctg

SEQ ID NO: 41028 - DNA, 25 bp, Canis familiaris
acagagtcaggatggcaatgcagtg

SEQ ID NO: 41029 - DNA, 25 bp, Canis familiaris
acagatgtagaggagtaggcatgca

SEQ ID NO: 41030 - DNA, 25 bp, Canis familiaris
acagaggtgaggctgcactgctcga

SEQ ID NO: 41031 - DNA, 25 bp, Canis familiaris
acagcactgtgatcagagcttccag

SEQ ID NO: 41032 - DNA, 25 bp, Canis familiaris
acagatgctgcgcaaggctcagagc

SEQ ID NO: 41033 - DNA, 25 bp, Canis familiaris
acaggcctggatctgatcagtgctt

SEQ ID NO: 41034 - DNA, 25 bp, Canis familiaris
acagatgcactgtttctggctgggt

SEQ ID NO: 41035 - DNA, 25 bp, Canis familiaris
acagacctggctccagatgcttggt

SEQ ID NO: 41036 - DNA, 25 bp, Canis familiaris
acaggcactgcgacgaggttggctt

SEQ ID NO: 41037 - DNA, 25 bp, Canis familiaris
acaggcctgcgggcaggtgtgcaca

SEQ ID NO: 41038 - DNA, 25 bp, Canis familiaris
acagtcctggggtcattgtcagctg

SEQ ID NO: 41039 - DNA, 25 bp, Canis familiaris
acaggttggtggctgtgacatctgt

SEQ ID NO: 41040 - DNA, 25 bp, Canis familiaris
acaggtgacgtggacagtggcatag

SEQ ID NO: 41041 - DNA, 25 bp, Canis familiaris
acagggagcagggatcatggatgac

SEQ ID NO: 41042 - DNA, 25 bp, Canis familiaris
acaggaggaatgcatcagcgcgcac

SEQ ID NO: 41043 - DNA, 25 bp, Canis familiaris
acagggctgcactctgcagcagccg

SEQ ID NO: 41044 - DNA, 25 bp, Canis familiaris
acagacaggcattactcagggtgat

SEQ ID NO: 41045 - DNA, 25 bp, Canis familiaris
acagagcaggctcttgcagggctag

SEQ ID NO: 41046 - DNA, 25 bp, Canis familiaris
acaggcagtgtgctctgtgggatcc

SEQ ID NO: 41047 - DNA, 25 bp, Canis familiaris
acaggctgttgcttatcgtcagatg

SEQ ID NO: 41048 - DNA, 25 bp, Canis familiaris
acaggcctccgaatatctatgagac

SEQ ID NO: 41049 - DNA, 25 bp, Canis familiaris
acaggccccagaatgaggatgagct

SEQ ID NO: 41050 - DNA, 25 bp, Canis familiaris
acaggagcccagctggggactgagg

SEQ ID NO: 41051 - DNA, 25 bp, Canis familiaris
acagaagactcacctggaggacctg

SEQ ID NO: 41052 - DNA, 25 bp, Canis familiaris
acagacacccctcagaggagtgctg

SEQ ID NO: 41053 - DNA, 25 bp, Canis familiaris
acagaagtcggtcaactggctgctc

SEQ ID NO: 41054 - DNA, 25 bp, Canis familiaris
acaggagtggggaccccagctgctg

SEQ ID NO: 41055 - DNA, 25 bp, Canis familiaris
acaggaggaggtagccagcgcctct

SEQ ID NO: 41056 - DNA, 25 bp, Canis familiaris
acaggagagacaccgcctgcggtgg

SEQ ID NO: 41057 - DNA, 25 bp, Canis familiaris
acagggagcagcagctctctggggt

SEQ ID NO: 41058 - DNA, 25 bp, Canis familiaris
acagtggtgcagcccacatcagagg

SEQ ID NO: 41059 - DNA, 25 bp, Canis familiaris
acagggtgcgcagcctgagaggcag

SEQ ID NO: 41060 - DNA, 25 bp, Canis familiaris
acagggattcccgtgagacagcagg

SEQ ID NO: 41061 - DNA, 25 bp, Canis familiaris
acaacagcaacgtcttgaacaggcg

SEQ ID NO: 41062 - DNA, 25 bp, Canis familiaris
acaacagcaacgtcttgaacaggcg

SEQ ID NO: 41063 - DNA, 25 bp, Canis familiaris
acaccacaggtgtcactaacgacga

SEQ ID NO: 41064 - DNA, 25 bp, Canis familiaris
acaccacatggaccaaggtcaaaat

SEQ ID NO: 41065 - DNA, 25 bp, Canis familiaris
acacgcctgggggaggtcactgaat

SEQ ID NO: 41066 - DNA, 25 bp, Canis familiaris
acacgcaaggctgtgagactaccta

SEQ ID NO: 41067 - DNA, 25 bp, Canis familiaris
acacgcgcacgtttgaacataccat

SEQ ID NO: 41068 - DNA, 25 bp, Canis familiaris
acaatcgtcgtgcagcaagctgacc

SEQ ID NO: 41069 - DNA, 25 bp, Canis familiaris
acagatcaggacggcaaagcgacgc

SEQ ID NO: 41070 - DNA, 25 bp, Canis familiaris
acagacggacagacagacatgcaaa

SEQ ID NO: 41071 - DNA, 25 bp, Canis familiaris
acagggcagatgcacaggcagaaag

SEQ ID NO: 41072 - DNA, 25 bp, Canis familiaris
acaggatggcagcagtggggcaagc

SEQ ID NO: 41073 - DNA, 25 bp, Canis familiaris
acagcaatgccaggacaaggtcaaa

SEQ ID NO: 41074 - DNA, 25 bp, Canis familiaris
acagatgaccagcatctcgtgctca

SEQ ID NO: 41075 - DNA, 25 bp, Canis familiaris
acagatgagccgacatactggcacg

SEQ ID NO: 41076 - DNA, 25 bp, Canis familiaris
acagtgatgccagaacccacatggt

SEQ ID NO: 41077 - DNA, 25 bp, Canis familiaris
acagttgccatgtagaccccttgaa

SEQ ID NO: 41078 - DNA, 25 bp, Canis familiaris
acagttggctgtaatcactccttgc

SEQ ID NO: 41079 - DNA, 25 bp, Canis familiaris
acagttttatttagcccactgccct

SEQ ID NO: 41080 - DNA, 25 bp, Canis familiaris
acaggctctaataatgtgcccactg

SEQ ID NO: 41081 - DNA, 25 bp, Canis familiaris
acaggtatgtgtgcatgtgtccagc

SEQ ID NO: 41082 - DNA, 25 bp, Canis familiaris
acacgttggggcatgatccagcctt

SEQ ID NO: 41083 - DNA, 25 bp, Canis familiaris
acaccctttatgatgtcacaccttt

SEQ ID NO: 41084 - DNA, 25 bp, Canis familiaris
acagacccttctgttaatctccttt

SEQ ID NO: 41085 - DNA, 25 bp, Canis familiaris
acagaaccttccaattcaacgtcgt

SEQ ID NO: 41086 - DNA, 25 bp, Canis familiaris
acagagacatctacctgtctcccga

SEQ ID NO: 41087 - DNA, 25 bp, Canis familiaris
acaggatcttagtctttgccaaaat

SEQ ID NO: 41088 - DNA, 25 bp, Canis familiaris
acagccttcaggtgttgccatataa

SEQ ID NO: 41089 - DNA, 25 bp, Canis familiaris
acagagtccgtgtgtgggtgtggtc

SEQ ID NO: 41090 - DNA, 25 bp, Canis familiaris
acaggacttggctgtgtgcgttctt

SEQ ID NO: 41091 - DNA, 25 bp, Canis familiaris
aaatgacttggggggcaggactcgt

SEQ ID NO: 41092 - DNA, 25 bp, Canis familiaris
acacatgattatggtccggaggacc

SEQ ID NO: 41093 - DNA, 25 bp, Canis familiaris
acagcaacgtggtcctggacaccac

SEQ ID NO: 41094 - DNA, 25 bp, Canis familiaris
acagaacttcagtctctgggctcga

SEQ ID NO: 41095 - DNA, 25 bp, Canis familiaris
acagtacatatttgctcatggtctc

SEQ ID NO: 41096 - DNA, 25 bp, Canis familiaris
acagttgatacaatgccatttactg

SEQ ID NO: 41097 - DNA, 25 bp, Canis familiaris
acagtgtaaactgctcagtcagtgc

SEQ ID NO: 41098 - DNA, 25 bp, Canis familiaris
acaggtccagccagtattcacatgc

SEQ ID NO: 41099 - DNA, 25 bp, Canis familiaris
acagcgtgtgcgcatatatattaca

SEQ ID NO: 41100 - DNA, 25 bp, Canis familiaris
acagttgtgactttatcattgactt

SEQ ID NO: 41101 - DNA, 25 bp, Canis familiaris
acaggtgtttgttctatatgcactt

SEQ ID NO: 41102 - DNA, 25 bp, Canis familiaris
acaggttttcacttaatgatgcttt

SEQ ID NO: 41103 - DNA, 25 bp, Canis familiaris
acagtgtttctaggtatactcttgt

SEQ ID NO: 41104 - DNA, 25 bp, Canis familiaris
acagtgcttctggccggaagtttgt

SEQ ID NO: 41105 - DNA, 25 bp, Canis familiaris
acagggatgcccacgcagagatttt

SEQ ID NO: 41106 - DNA, 25 bp, Canis familiaris
acagagctgtgccacttctagacat

SEQ ID NO: 41107 - DNA, 25 bp, Canis familiaris
acagagctgggtatccgcacagtgg

SEQ ID NO: 41108 - DNA, 25 bp, Canis familiaris
acagcctagggctggccaaggtgtc

SEQ ID NO: 41109 - DNA, 25 bp, Canis familiaris
acagcccagggatacctcaggagta

SEQ ID NO: 41110 - DNA, 25 bp, Canis familiaris
aactcgaacggttccggtgagccat

SEQ ID NO: 41111 - DNA, 25 bp, Canis familiaris
aaccagaactacatccgaaatccat

SEQ ID NO: 41112 - DNA, 25 bp, Canis familiaris
acaccagaatcatttccacgaaaaa

SEQ ID NO: 41113 - DNA, 25 bp, Canis familiaris
acaccagaagactttccggacagaa

SEQ ID NO: 41114 - DNA, 25 bp, Canis familiaris
acaccagtggacttcctactaagac

SEQ ID NO: 41115 - DNA, 25 bp, Canis familiaris
acaccactggcactttcataaccag

SEQ ID NO: 41116 - DNA, 25 bp, Canis familiaris
acaccaccgatgtatctatttccaa

SEQ ID NO: 41117 - DNA, 25 bp, Canis familiaris
acaccaggcatggttttcttccgag

SEQ ID NO: 41118 - DNA, 25 bp, Canis familiaris
acaccagagacctcaatttcctttg

SEQ ID NO: 41119 - DNA, 25 bp, Canis familiaris
acaccgagtctctccaaacattttg

SEQ ID NO: 41120 - DNA, 25 bp, Canis familiaris
acagcaagacctctccagatttttt

SEQ ID NO: 41121 - DNA, 25 bp, Canis familiaris
acagtatttctgctctaatcttctt

SEQ ID NO: 41122 - DNA, 25 bp, Canis familiaris
acagttttctgttgatcaccttttg

SEQ ID NO: 41123 - DNA, 25 bp, Canis familiaris
acagtctgttcaatagaaggcttct

SEQ ID NO: 41124 - DNA, 25 bp, Canis familiaris
acagctgccttagtagtgcgcgttt

SEQ ID NO: 41125 - DNA, 25 bp, Canis familiaris
acagctctccaggtacctggtcttc

SEQ ID NO: 41126 - DNA, 25 bp, Canis familiaris
acaccttactaacctacatgctgct

SEQ ID NO: 41127 - DNA, 25 bp, Canis familiaris
acagacctcatggaagccattcggt

SEQ ID NO: 41128 - DNA, 25 bp, Canis familiaris
acagaagctcatcaaggccctgttc

SEQ ID NO: 41129 - DNA, 25 bp, Canis familiaris
acagccagtatcttggagcgcctgt

SEQ ID NO: 41130 - DNA, 25 bp, Canis familiaris
acagtcacactctgagagctcttca

SEQ ID NO: 41131 - DNA, 25 bp, Canis familiaris
acagtccagctgtgcttgcattaca

SEQ ID NO: 41132 - DNA, 25 bp, Canis familiaris
acagtgcgcaaggccttgatcttcc

SEQ ID NO: 41133 - DNA, 25 bp, Canis familiaris
acactggaccaaatagatttcacac

SEQ ID NO: 41134 - DNA, 25 bp, Canis familiaris
acactggctcggcatggtaaacact

SEQ ID NO: 41135 - DNA, 25 bp, Canis familiaris
aacaggctctagcgttcgaacgcac

SEQ ID NO: 41136 - DNA, 25 bp, Canis familiaris
aactgcgcctggcgcgttaacggcc

SEQ ID NO: 41137 - DNA, 25 bp, Canis familiaris
acagcatgcgcctagtgtgtttaga

SEQ ID NO: 41138 - DNA, 25 bp, Canis familiaris
acagatcgccaactgcagcatttat

SEQ ID NO: 41139 - DNA, 25 bp, Canis familiaris
acagcagtccccaagcatgtgagac

SEQ ID NO: 41140 - DNA, 25 bp, Canis familiaris
acaggtcccaggtttgaactctggc

SEQ ID NO: 41141 - DNA, 25 bp, Canis familiaris
acaggtgccaaattttctactcgct

SEQ ID NO: 41142 - DNA, 25 bp, Canis familiaris
acagagttcagaccttgttacccat

SEQ ID NO: 41143 - DNA, 25 bp, Canis familiaris
acaggttatgaccactttaggccta

SEQ ID NO: 41144 - DNA, 25 bp, Canis familiaris
acagtattataacgtctcgggcctc

SEQ ID NO: 41145 - DNA, 25 bp, Canis familiaris
acagtatctaacattttgcctcctc

SEQ ID NO: 41146 - DNA, 25 bp, Canis familiaris
acagttctgtctgttgttgcatccc

SEQ ID NO: 41147 - DNA, 25 bp, Canis familiaris
acacttttctgtttattgaacctgc

SEQ ID NO: 41148 - DNA, 25 bp, Canis familiaris
aactcttgctggatttaaaccacca

SEQ ID NO: 41149 - DNA, 25 bp, Canis familiaris
acacctttgggtctgagtacccaga

SEQ ID NO: 41150 - DNA, 25 bp, Canis familiaris
aactttcgggctctgagtgactgga

SEQ ID NO: 41151 - DNA, 25 bp, Canis familiaris
acactttagagtttatgaggacgag

SEQ ID NO: 41152 - DNA, 25 bp, Canis familiaris
acagtcttaccttttgtggtcaggt

SEQ ID NO: 41153 - DNA, 25 bp, Canis familiaris
acagtcttacacgcatttggtctcg

SEQ ID NO: 41154 - DNA, 25 bp, Canis familiaris
acagatcttaaagcccctgtgtctg

SEQ ID NO: 41155 - DNA, 25 bp, Canis familiaris
acagccaaaaagtccctttggctgg

SEQ ID NO: 41156 - DNA, 25 bp, Canis familiaris
acacacaaaacaacctttagtcagt

SEQ ID NO: 41157 - DNA, 25 bp, Canis familiaris
acagctcaagaggcgtttttcgtca

SEQ ID NO: 41158 - DNA, 25 bp, Canis familiaris
acagtaagtcagcttgtctatcgtt

SEQ ID NO: 41159 - DNA, 25 bp, Canis familiaris
acagaacagctccaggttctacgtg

SEQ ID NO: 41160 - DNA, 25 bp, Canis familiaris
acaaacagggagcttggcacccggc

SEQ ID NO: 41161 - DNA, 25 bp, Canis familiaris
acaaacagggagcttggcacccggc

SEQ ID NO: 41162 - DNA, 25 bp, Canis familiaris
acaaacagggagcttggcacccggc

SEQ ID NO: 41163 - DNA, 25 bp, Canis familiaris
acaaacagggagcttggcacccggc

SEQ ID NO: 41164 - DNA, 25 bp, Canis familiaris
acaaacagggagcttggcacccggc

SEQ ID NO: 41165 - DNA, 25 bp, Canis familiaris
acaaacagggagcttggcacccggc

SEQ ID NO: 41166 - DNA, 25 bp, Canis familiaris
acaaacagggagcttggcacccggc

SEQ ID NO: 41167 - DNA, 25 bp, Canis familiaris
acaaacagggagcttggcacccggc

SEQ ID NO: 41168 - DNA, 25 bp, Canis familiaris
acaaacagggagcttggcacccggc

SEQ ID NO: 41169 - DNA, 25 bp, Canis familiaris
acagaacgggggtctgtgccccgtg

SEQ ID NO: 41170 - DNA, 25 bp, Canis familiaris
acagaatccgcgtgatgctgtaccc

SEQ ID NO: 41171 - DNA, 25 bp, Canis familiaris
acagtgcagtcgctggatgtgtccc

SEQ ID NO: 41172 - DNA, 25 bp, Canis familiaris
acagtggcccagaagtgtgcaccgt

SEQ ID NO: 41173 - DNA, 25 bp, Canis familiaris
acacggacatcatcaggaagcaggt

SEQ ID NO: 41174 - DNA, 25 bp, Canis familiaris
acagtggagataacagcagtgagca

SEQ ID NO: 41175 - DNA, 25 bp, Canis familiaris
acagtggcatccttgagcagtgaga

SEQ ID NO: 41176 - DNA, 25 bp, Canis familiaris
acagcgctcatcactctggatagat

SEQ ID NO: 41177 - DNA, 25 bp, Canis familiaris
acaggtatcagcttctagatcacca

SEQ ID NO: 41178 - DNA, 25 bp, Canis familiaris
acaggtagacttacatgttctcaag

SEQ ID NO: 41179 - DNA, 25 bp, Canis familiaris
acaggtccacttacatgtttgttgt

SEQ ID NO: 41180 - DNA, 25 bp, Canis familiaris
acagggctcttcaaacttgtttgat

SEQ ID NO: 41181 - DNA, 25 bp, Canis familiaris
acagggctcctaaccatatgctgtc

SEQ ID NO: 41182 - DNA, 25 bp, Canis familiaris
acagggctcctaaccatatgctgtc

SEQ ID NO: 41183 - DNA, 25 bp, Canis familiaris
acaggtgtcctttggcaaatgctct

SEQ ID NO: 41184 - DNA, 25 bp, Canis familiaris
acaggtgtagtttgcctcacctctt

SEQ ID NO: 41185 - DNA, 25 bp, Canis familiaris
acagtgtttgtgagcaccatcctct

SEQ ID NO: 41186 - DNA, 25 bp, Canis familiaris
acagttgggtgagaccatcctcttc

SEQ ID NO: 41187 - DNA, 25 bp, Canis familiaris
acagtaggagggtcctcaccatctg

SEQ ID NO: 41188 - DNA, 25 bp, Canis familiaris
acaccgaaaggacctagttctgtag

SEQ ID NO: 41189 - DNA, 25 bp, Canis familiaris
acacctgtaaggtcagacgctttta

SEQ ID NO: 41190 - DNA, 25 bp, Canis familiaris
acaccctgacatctagagcgtattt

SEQ ID NO: 41191 - DNA, 25 bp, Canis familiaris
acagctccatgcctgttaacgtggt

SEQ ID NO: 41192 - DNA, 25 bp, Canis familiaris
acagcccaggtactgatccgggttc

SEQ ID NO: 41193 - DNA, 25 bp, Canis familiaris
acagtccaggtaatgtctgccgtta

SEQ ID NO: 41194 - DNA, 25 bp, Canis familiaris
acagtgtctggcactgtccactgtg

SEQ ID NO: 41195 - DNA, 25 bp, Canis familiaris
acaggtgcgtcttctgtggaatgga

SEQ ID NO: 41196 - DNA, 25 bp, Canis familiaris
acagattgacttaggtgtgaataga

SEQ ID NO: 41197 - DNA, 25 bp, Canis familiaris
acagttgcgaatatggctccatgaa

SEQ ID NO: 41198 - DNA, 25 bp, Canis familiaris
acagctcttgacactgagatccatg

SEQ ID NO: 41199 - DNA, 25 bp, Canis familiaris
acagcagcggcacacggtgccagtt

SEQ ID NO: 41200 - DNA, 25 bp, Canis familiaris
acagttctgcagtactttgaccttg

SEQ ID NO: 41201 - DNA, 25 bp, Canis familiaris
acagttctgactgcgtaacctggaa

SEQ ID NO: 41202 - DNA, 25 bp, Canis familiaris
acagttgtcagtgcgaactcttggg

SEQ ID NO: 41203 - DNA, 25 bp, Canis familiaris
acagtgtggctgtgcctacatcttc

SEQ ID NO: 41204 - DNA, 25 bp, Canis familiaris
acaggtgagctggctccacatgtct

SEQ ID NO: 41205 - DNA, 25 bp, Canis familiaris
acaggtgatgccgtgatcctattcc

SEQ ID NO: 41206 - DNA, 25 bp, Canis familiaris
acagtggtgtcagggcctatgctgc

SEQ ID NO: 41207 - DNA, 25 bp, Canis familiaris
acagtggcctcaggccagctgtcac

SEQ ID NO: 41208 - DNA, 25 bp, Canis familiaris
acactgcctccaggccatagatcag

SEQ ID NO: 41209 - DNA, 25 bp, Canis familiaris
acagtgccctttcaagccagaataa

SEQ ID NO: 41210 - DNA, 25 bp, Canis familiaris
acagtggaccttcaagccacaaccg

SEQ ID NO: 41211 - DNA, 25 bp, Canis familiaris
acagttactgttcttccaggagcct

SEQ ID NO: 41212 - DNA, 25 bp, Canis familiaris
acagttttgttcatgagccaggagt

SEQ ID NO: 41213 - DNA, 25 bp, Canis familiaris
acagatgtttttatatccatgtgct

SEQ ID NO: 41214 - DNA, 25 bp, Canis familiaris
acagagtttcctgtgctccatgatc

SEQ ID NO: 41215 - DNA, 25 bp, Canis familiaris
acagaggttctgactgttgcctgct

SEQ ID NO: 41216 - DNA, 25 bp, Canis familiaris
acagcaacttctactgcctgaagcc

SEQ ID NO: 41217 - DNA, 25 bp, Canis familiaris
acagaaatacacatgcctgcgcctt

SEQ ID NO: 41218 - DNA, 25 bp, Canis familiaris
acagcagatgataaatggcctggca

SEQ ID NO: 41219 - DNA, 25 bp, Canis familiaris
acagcaagatcaccagtcctgaggc

SEQ ID NO: 41220 - DNA, 25 bp, Canis familiaris
acagcacgtgcacggtggcaggtgc

SEQ ID NO: 41221 - DNA, 25 bp, Canis familiaris
acagtgcgagtgcgtgtgtgagtgc

SEQ ID NO: 41222 - DNA, 25 bp, Canis familiaris
acagtgctggctgtctgtccagtgt

SEQ ID NO: 41223 - DNA, 25 bp, Canis familiaris
acagggcctatgtatgtccaggtgt

SEQ ID NO: 41224 - DNA, 25 bp, Canis familiaris
acagtcgctcgttttccagagacta

SEQ ID NO: 41225 - DNA, 25 bp, Canis familiaris
acagtcgggtgtttctcactgttca

SEQ ID NO: 41226 - DNA, 25 bp, Canis familiaris
acagtcatggtcttagtctcctgtc

SEQ ID NO: 41227 - DNA, 25 bp, Canis familiaris
acagactggatctgtgactccacca

SEQ ID NO: 41228 - DNA, 25 bp, Canis familiaris
acagcactgttagtctgacctactt

SEQ ID NO: 41229 - DNA, 25 bp, Canis familiaris
acagcaagttttggagaacctctct

SEQ ID NO: 41230 - DNA, 25 bp, Canis familiaris
acagttcattgtaggaaagccattc

SEQ ID NO: 41231 - DNA, 25 bp, Canis familiaris
acagttatatcccgataaccttctt

SEQ ID NO: 41232 - DNA, 25 bp, Canis familiaris
acagcttaacaacaaacatcttctt

SEQ ID NO: 41233 - DNA, 25 bp, Canis familiaris
acagttcaccagtgtttagttttat

SEQ ID NO: 41234 - DNA, 25 bp, Canis familiaris
acagtggccctgtgcttatagttat

SEQ ID NO: 41235 - DNA, 25 bp, Canis familiaris
acacgacggctgtgtgcttcagttt

SEQ ID NO: 41236 - DNA, 25 bp, Canis familiaris
acagaacgcgttccacattcatttt

SEQ ID NO: 41237 - DNA, 25 bp, Canis familiaris
acagatactgcctttagcttttttt

SEQ ID NO: 41238 - DNA, 25 bp, Canis familiaris
acagaatttccagtagtgtgttgtg

SEQ ID NO: 41239 - DNA, 25 bp, Canis familiaris
acagatgttgtagcgagtggttttt

SEQ ID NO: 41240 - DNA, 25 bp, Canis familiaris
acagatgtttcagggaattattctt

SEQ ID NO: 41241 - DNA, 25 bp, Canis familiaris
acagattgtttgctgaatatgaggt

SEQ ID NO: 41242 - DNA, 25 bp, Canis familiaris
acagttgaactgagatgcctgggtg

SEQ ID NO: 41243 - DNA, 25 bp, Canis familiaris
acagtcatgaaccccaggtttgctg

SEQ ID NO: 41244 - DNA, 25 bp, Canis familiaris
acagggaagttcgggtattgctttg

SEQ ID NO: 41245 - DNA, 25 bp, Canis familiaris
acagtggaagtttgggcattctctt

SEQ ID NO: 41246 - DNA, 25 bp, Canis familiaris
acagtggcaacaatggtggttcttt

SEQ ID NO: 41247 - DNA, 25 bp, Canis familiaris
acagtgtcacaatcaatggtctttt

SEQ ID NO: 41248 - DNA, 25 bp, Canis familiaris
acagctcccaataccaggtctgtgt

SEQ ID NO: 41249 - DNA, 25 bp, Canis familiaris
acagcccaagcaccttggcttgtgt

SEQ ID NO: 41250 - DNA, 25 bp, Canis familiaris
acagaccatcctgatctgtctctgt

SEQ ID NO: 41251 - DNA, 25 bp, Canis familiaris
acagagctaggtctgtgtgtctgtg

SEQ ID NO: 41252 - DNA, 25 bp, Canis familiaris
acagatctctgaagtggtggtcgtg

SEQ ID NO: 41253 - DNA, 25 bp, Canis familiaris
acagagtctgctttgggggcagctg

SEQ ID NO: 41254 - DNA, 25 bp, Canis familiaris
acagagatccatgggggtgccagcg

SEQ ID NO: 41255 - DNA, 25 bp, Canis familiaris
acagagctgctctggaggtcgaggc

SEQ ID NO: 41256 - DNA, 25 bp, Canis familiaris
acagtgctgtctggaggtaccacca

SEQ ID NO: 41257 - DNA, 25 bp, Canis familiaris
acagtgctgtctggtggaaccacca

SEQ ID NO: 41258 - DNA, 25 bp, Canis familiaris
acagatttgctgtttgaaccacaat

SEQ ID NO: 41259 - DNA, 25 bp, Canis familiaris
acagcaatcaaattatggacccatg

SEQ ID NO: 41260 - DNA, 25 bp, Canis familiaris
acagcaaaatattaagttccacgac

SEQ ID NO: 41261 - DNA, 25 bp, Canis familiaris
acagcaacaatatcaggactcaact

SEQ ID NO: 41262 - DNA, 25 bp, Canis familiaris
acagagagaaagacgagacacaggc

SEQ ID NO: 41263 - DNA, 25 bp, Canis familiaris
acagaggacgatgctggaactgatc

SEQ ID NO: 41264 - DNA, 25 bp, Canis familiaris
acagatgggcaggccttgaacctcc

SEQ ID NO: 41265 - DNA, 25 bp, Canis familiaris
acagttggcaggccgagcaatcctc

SEQ ID NO: 41266 - DNA, 25 bp, Canis familiaris
acagtctgggcccgagaaggcctct

SEQ ID NO: 41267 - DNA, 25 bp, Canis familiaris
acagtgctccggggagagagcgcct

SEQ ID NO: 41268 - DNA, 25 bp, Canis familiaris
acagtgcccgtgtcggagccgcgcg

SEQ ID NO: 41269 - DNA, 25 bp, Canis familiaris
acagtgaaggtgtcagtggcggcgg

SEQ ID NO: 41270 - DNA, 25 bp, Canis familiaris
acagtgagcgggaccgggtgcaggc

SEQ ID NO: 41271 - DNA, 25 bp, Canis familiaris
acagctgggatgtacctggggaggt

SEQ ID NO: 41272 - DNA, 25 bp, Canis familiaris
acagagtgggcttcctcaaggaggt

SEQ ID NO: 41273 - DNA, 25 bp, Canis familiaris
acagaggggccaccacaagggttgt

SEQ ID NO: 41274 - DNA, 25 bp, Canis familiaris
acagcggttccgttgcaaaggactt

SEQ ID NO: 41275 - DNA, 25 bp, Canis familiaris
acacgcgattgcgcaatgccataaa

SEQ ID NO: 41276 - DNA, 25 bp, Canis familiaris
acaccaatttccatctacatcaaaa

SEQ ID NO: 41277 - DNA, 25 bp, Canis familiaris
acaccgctttccattgtacagaagc

SEQ ID NO: 41278 - DNA, 25 bp, Canis familiaris
acactccaacacgctttacagcaga

SEQ ID NO: 41279 - DNA, 25 bp, Canis familiaris
acactccaacacgctttacagcaga

SEQ ID NO: 41280 - DNA, 25 bp, Canis familiaris
acactccaacacgctttacagcaga

SEQ ID NO: 41281 - DNA, 25 bp, Canis familiaris
acactccaacacgctttacagcaga

SEQ ID NO: 41282 - DNA, 25 bp, Canis familiaris
acagctcccccaaaatgtacatgga

SEQ ID NO: 41283 - DNA, 25 bp, Canis familiaris
acaccaccgacaacaggctactgtg

SEQ ID NO: 41284 - DNA, 25 bp, Canis familiaris
acagacaccgagaacatccgctttg

SEQ ID NO: 41285 - DNA, 25 bp, Canis familiaris
acagatcctacactatatcctgctc

SEQ ID NO: 41286 - DNA, 25 bp, Canis familiaris
acagccctgaatttcacaatgctcc

SEQ ID NO: 41287 - DNA, 25 bp, Canis familiaris
acagcagcagctaatttcacgcgcc

SEQ ID NO: 41288 - DNA, 25 bp, Canis familiaris
acagcaacgagagctcactgggggc

SEQ ID NO: 41289 - DNA, 25 bp, Canis familiaris
acagccccagagctacttgggtgcc

SEQ ID NO: 41290 - DNA, 25 bp, Canis familiaris
aaccctcaaggtttgcctggggctg

SEQ ID NO: 41291 - DNA, 25 bp, Canis familiaris
acaccctgccggagagactgtgggg

SEQ ID NO: 41292 - DNA, 25 bp, Canis familiaris
acacccataccagaggacttacgga

SEQ ID NO: 41293 - DNA, 25 bp, Canis familiaris
aaggccatcctagagagttataaaa

SEQ ID NO: 41294 - DNA, 25 bp, Canis familiaris
acaccctcactccaagagcttaaaa

SEQ ID NO: 41295 - DNA, 25 bp, Canis familiaris
acagccctgtcccaagggcatcaga

SEQ ID NO: 41296 - DNA, 25 bp, Canis familiaris
acagccctgtatcaagttctcagag

SEQ ID NO: 41297 - DNA, 25 bp, Canis familiaris
acagccacataaaaacattctcagt

SEQ ID NO: 41298 - DNA, 25 bp, Canis familiaris
acagcacaaagaaaaagtccttcaa

SEQ ID NO: 41299 - DNA, 25 bp, Canis familiaris
acaaaagcagaatcgtcccattccc

SEQ ID NO: 41300 - DNA, 25 bp, Canis familiaris
acagcaatagcgcaaagctcccttc

SEQ ID NO: 41301 - DNA, 25 bp, Canis familiaris
acagcgagcagtttacagcaccctt

SEQ ID NO: 41302 - DNA, 25 bp, Canis familiaris
acagcgatgatttttgatcactcat

SEQ ID NO: 41303 - DNA, 25 bp, Canis familiaris
acagtcacattgtttgatcccaaat

SEQ ID NO: 41304 - DNA, 25 bp, Canis familiaris
acagctaactgtatcattccaatat

SEQ ID NO: 41305 - DNA, 25 bp, Canis familiaris
acacggcactgtacaattacacttg

SEQ ID NO: 41306 - DNA, 25 bp, Canis familiaris
acagcccatcttcagtttacttgta

SEQ ID NO: 41307 - DNA, 25 bp, Canis familiaris
acagtcctcgagtagttatatcttg

SEQ ID NO: 41308 - DNA, 25 bp, Canis familiaris
acagactctctgttttgaaattagt

SEQ ID NO: 41309 - DNA, 25 bp, Canis familiaris
acagactgcctgccttgtgaatctg

SEQ ID NO: 41310 - DNA, 25 bp, Canis familiaris
acagacctcgccctggaatatgagg

SEQ ID NO: 41311 - DNA, 25 bp, Canis familiaris
acagcccgtgtgcctgggagatggt

SEQ ID NO: 41312 - DNA, 25 bp, Canis familiaris
acagcacaggtgtctgcgagtggat

SEQ ID NO: 41313 - DNA, 25 bp, Canis familiaris
acagcatcatgggagctctgggccc

SEQ ID NO: 41314 - DNA, 25 bp, Canis familiaris
acagctatgacccttaggcctattt

SEQ ID NO: 41315 - DNA, 25 bp, Canis familiaris
acagctatgaccattaggcctattt

SEQ ID NO: 41316 - DNA, 25 bp, Canis familiaris
acagctatgaccattaggcctattt

SEQ ID NO: 41317 - DNA, 25 bp, Canis familiaris
acagctatgaccattaggcctattt

SEQ ID NO: 41318 - DNA, 25 bp, Canis familiaris
acactgctactcagtagtcccaagt

SEQ ID NO: 41319 - DNA, 25 bp, Canis familiaris
acacccctcgaggattcctcaatct

SEQ ID NO: 41320 - DNA, 25 bp, Canis familiaris
acacccagtcgcctaatcaataatc

SEQ ID NO: 41321 - DNA, 25 bp, Canis familiaris
acacccagtcgcctaatcaataatc

SEQ ID NO: 41322 - DNA, 25 bp, Canis familiaris
acacccagtcgcctaatcaataatc

SEQ ID NO: 41323 - DNA, 25 bp, Canis familiaris
acacttcagtcattgtacacactta

SEQ ID NO: 41324 - DNA, 25 bp, Canis familiaris
acagtgctctttttcctcactgtat

SEQ ID NO: 41325 - DNA, 25 bp, Canis familiaris
acagtctttcattcattctgccagc

SEQ ID NO: 41326 - DNA, 25 bp, Canis familiaris
acagattcttcactttctgatccct

SEQ ID NO: 41327 - DNA, 25 bp, Canis familiaris
acagttttcacttttattctcaatt

SEQ ID NO: 41328 - DNA, 25 bp, Canis familiaris
acagtcttacgttttacctcacaag

SEQ ID NO: 41329 - DNA, 25 bp, Canis familiaris
acagtcttactaagtctgagccccc

SEQ ID NO: 41330 - DNA, 25 bp, Canis familiaris
acagacttcagattggccaaggccc

SEQ ID NO: 41331 - DNA, 25 bp, Canis familiaris
acagatttgaatacagccacggccc

SEQ ID NO: 41332 - DNA, 25 bp, Canis familiaris
acagatgtgatatatcgcgaccccc

SEQ ID NO: 41333 - DNA, 25 bp, Canis familiaris
acagctgggaagaggcatccctcac

SEQ ID NO: 41334 - DNA, 25 bp, Canis familiaris
acagtcaagcaacacacagtcacca

SEQ ID NO: 41335 - DNA, 25 bp, Canis familiaris
acagctcagagctaaagcccttcca

SEQ ID NO: 41336 - DNA, 25 bp, Canis familiaris
acaccatatgcacacacactttcat

SEQ ID NO: 41337 - DNA, 25 bp, Canis familiaris
acagtcaggagtcccagcatctgtt

SEQ ID NO: 41338 - DNA, 25 bp, Canis familiaris
acagtcaggtgcccctgtatctgtt

SEQ ID NO: 41339 - DNA, 25 bp, Canis familiaris
acagctgagagtagacacttgtggt

SEQ ID NO: 41340 - DNA, 25 bp, Canis familiaris
acagatgaggagactctccgccggc

SEQ ID NO: 41341 - DNA, 25 bp, Canis familiaris
acagtatgtggctttctctgcctga

SEQ ID NO: 41342 - DNA, 25 bp, Canis familiaris
acagaatgcatttcttcactccgac

SEQ ID NO: 41343 - DNA, 25 bp, Canis familiaris
acagaatcattttagcctcaggact

SEQ ID NO: 41344 - DNA, 25 bp, Canis familiaris
acagataagtgtctgccctgggctc

SEQ ID NO: 41345 - DNA, 25 bp, Canis familiaris
acagacaacttgcctgactttgagc

SEQ ID NO: 41346 - DNA, 25 bp, Canis familiaris
acagagcttctgtgcttctttgtcc

SEQ ID NO: 41347 - DNA, 25 bp, Canis familiaris
acacagttcatgtaatttttggtac

SEQ ID NO: 41348 - DNA, 25 bp, Canis familiaris
acagctgttatgcttttttggccag

SEQ ID NO: 41349 - DNA, 25 bp, Canis familiaris
acagctgctttgtttctttgcaacc

SEQ ID NO: 41350 - DNA, 25 bp, Canis familiaris
acaccatttggcacatttgatttca

SEQ ID NO: 41351 - DNA, 25 bp, Canis familiaris
acaccagagtggtctcaccgatttc

SEQ ID NO: 41352 - DNA, 25 bp, Canis familiaris
acagccacagggtacaccctttctt

SEQ ID NO: 41353 - DNA, 25 bp, Canis familiaris
acacacaggggaagactgagttctt

SEQ ID NO: 41354 - DNA, 25 bp, Canis familiaris
acagcccagagatggttgacattcc

SEQ ID NO: 41355 - DNA, 25 bp, Canis familiaris
acagcccagagatgtttatacagcc

SEQ ID NO: 41356 - DNA, 25 bp, Canis familiaris
acagctccacagttgtcgtcaagag

SEQ ID NO: 41357 - DNA, 25 bp, Canis familiaris
acaccccaatgtccgtcaatggatg

SEQ ID NO: 41358 - DNA, 25 bp, Canis familiaris
acagcacaccgtaccgacagtggta

SEQ ID NO: 41359 - DNA, 25 bp, Canis familiaris
acagcacaccgtaccgacagtggta

SEQ ID NO: 41360 - DNA, 25 bp, Canis familiaris
acagcacaccgtaccgacagtggta

SEQ ID NO: 41361 - DNA, 25 bp, Canis familiaris
acagcacaccgtaccgacagtggta

SEQ ID NO: 41362 - DNA, 25 bp, Canis familiaris
acagccccagacactacagctggat

SEQ ID NO: 41363 - DNA, 25 bp, Canis familiaris
acacctgacgacctgtcacagggac

SEQ ID NO: 41364 - DNA, 25 bp, Canis familiaris
acaccaaggaggttcgcagctcgat

SEQ ID NO: 41365 - DNA, 25 bp, Canis familiaris
acaccaaggggctaacctggatcaa

SEQ ID NO: 41366 - DNA, 25 bp, Canis familiaris
aactgctgggcacagaacctgccta

SEQ ID NO: 41367 - DNA, 25 bp, Canis familiaris
acagagctggggtgcagatcctggc

SEQ ID NO: 41368 - DNA, 25 bp, Canis familiaris
acagacagtggcgggactccgtatc

SEQ ID NO: 41369 - DNA, 25 bp, Canis familiaris
acagagagcggcagaggctcgccta

SEQ ID NO: 41370 - DNA, 25 bp, Canis familiaris
acagagattccagaggcttcctcgt

SEQ ID NO: 41371 - DNA, 25 bp, Canis familiaris
acagagagtcactggaaccctcgtg

SEQ ID NO: 41372 - DNA, 25 bp, Canis familiaris
acagaagctgagctggaagccccgg

SEQ ID NO: 41373 - DNA, 25 bp, Canis familiaris
acagaagggcaccaggagccccttg

SEQ ID NO: 41374 - DNA, 25 bp, Canis familiaris
acagaaggccagcaggactccagat

SEQ ID NO: 41375 - DNA, 25 bp, Canis familiaris
acagcgaggccgtgtgcacacgaat

SEQ ID NO: 41376 - DNA, 25 bp, Canis familiaris
acagcgcaccaacagtggcggagac

SEQ ID NO: 41377 - DNA, 25 bp, Canis familiaris
acacgtgacttatgttgctgaagaa

SEQ ID NO: 41378 - DNA, 25 bp, Canis familiaris
catgccactgaatacgttgaaaaaa

SEQ ID NO: 41379 - DNA, 25 bp, Canis familiaris
acacctagatagacgttaaatgata

SEQ ID NO: 41380 - DNA, 25 bp, Canis familiaris
acaccaggcacaatgttaggaagta

SEQ ID NO: 41381 - DNA, 25 bp, Canis familiaris
acagccctgcactgctacaggaagg

SEQ ID NO: 41382 - DNA, 25 bp, Canis familiaris
acagctgagcccattccaggataga

SEQ ID NO: 41383 - DNA, 25 bp, Canis familiaris
acagcatgaccacttacttgggagt

SEQ ID NO: 41384 - DNA, 25 bp, Canis familiaris
acagaacccttgtacattgctggtg

SEQ ID NO: 41385 - DNA, 25 bp, Canis familiaris
acagcaacgtcttgaacaggcgctg

SEQ ID NO: 41386 - DNA, 25 bp, Canis familiaris
acagcgagtgctctgccaagacgct

SEQ ID NO: 41387 - DNA, 25 bp, Canis familiaris
acagagagcctggagtcagagaccc

SEQ ID NO: 41388 - DNA, 25 bp, Canis familiaris
acagagaactcaagctaagcctccc

SEQ ID NO: 41389 - DNA, 25 bp, Canis familiaris
acactgagcaccaggtggtctcctc

SEQ ID NO: 41390 - DNA, 25 bp, Canis familiaris
acagctgaagggagtggttttgcgc

SEQ ID NO: 41391 - DNA, 25 bp, Canis familiaris
acacggctgggctggacatatttgc

SEQ ID NO: 41392 - DNA, 25 bp, Canis familiaris
acaccagctaccgggacatacgctg

SEQ ID NO: 41393 - DNA, 25 bp, Canis familiaris
aacggaaccagggtgcaaggcattc

SEQ ID NO: 41394 - DNA, 25 bp, Canis familiaris
acagcccagaccaaggtccaggttc

SEQ ID NO: 41395 - DNA, 25 bp, Canis familiaris
acagaccacaggaagagatgccagt

SEQ ID NO: 41396 - DNA, 25 bp, Canis familiaris
acagaagacgaggcagcggctgcga

SEQ ID NO: 41397 - DNA, 25 bp, Canis familiaris
acagcaaggcctggacggtgctgga

SEQ ID NO: 41398 - DNA, 25 bp, Canis familiaris
acagcaacacctggaagcgtgaccc

SEQ ID NO: 41399 - DNA, 25 bp, Canis familiaris
acaagatccctgtctcgatgtgacc

SEQ ID NO: 41400 - DNA, 25 bp, Canis familiaris
acacgacctctgttcaaggaccttg

SEQ ID NO: 41401 - DNA, 25 bp, Canis familiaris
acactcagtccatcgaagagtcctt

SEQ ID NO: 41402 - DNA, 25 bp, Canis familiaris
acactgcagacagacgaggggttgc

SEQ ID NO: 41403 - DNA, 25 bp, Canis familiaris
acacgcgcaccaacgagaaggtgga

SEQ ID NO: 41404 - DNA, 25 bp, Canis familiaris
acaaccaccaacccaatcagttaat

SEQ ID NO: 41405 - DNA, 25 bp, Canis familiaris
acaaaacacaccagaatcatttcca

SEQ ID NO: 41406 - DNA, 25 bp, Canis familiaris
acaaatacccagaggtcctccagac

SEQ ID NO: 41407 - DNA, 25 bp, Canis familiaris
acaccatacccgaggactacgagac

SEQ ID NO: 41408 - DNA, 25 bp, Canis familiaris
acagccaagcccacaggattcgggg

SEQ ID NO: 41409 - DNA, 25 bp, Canis familiaris
acaccttccctggtctatgtcaggg

SEQ ID NO: 41410 - DNA, 25 bp, Canis familiaris
acagccttctgaaggttatgccagc

SEQ ID NO: 41411 - DNA, 25 bp, Canis familiaris
acagactttgctacttctgagctcc

SEQ ID NO: 41412 - DNA, 25 bp, Canis familiaris
acagactattggacatgcattgatt

SEQ ID NO: 41413 - DNA, 25 bp, Canis familiaris
acagactattggacaagcatcgatg

SEQ ID NO: 41414 - DNA, 25 bp, Canis familiaris
acagatcgcagttgccaatccagag

SEQ ID NO: 41415 - DNA, 25 bp, Canis familiaris
acagatgggtgtgcaaacagtgata

SEQ ID NO: 41416 - DNA, 25 bp, Canis familiaris
acagcggtgcttgacacatagtaga

SEQ ID NO: 41417 - DNA, 25 bp, Canis familiaris
acacggcttgcagacacggtaattg

SEQ ID NO: 41418 - DNA, 25 bp, Canis familiaris
acacggcagacgggcccagtaaaat

SEQ ID NO: 41419 - DNA, 25 bp, Canis familiaris
acacggaacctgtccagcaggcagt

SEQ ID NO: 41420 - DNA, 25 bp, Canis familiaris
acacgtggacagttccagcagctgc

SEQ ID NO: 41421 - DNA, 25 bp, Canis familiaris
aagcctagacatgacgcacgtgggg

SEQ ID NO: 41422 - DNA, 25 bp, Canis familiaris
acagagaagacagacggccagggag

SEQ ID NO: 41423 - DNA, 25 bp, Canis familiaris
acagaggagacagcttggctaaaat

SEQ ID NO: 41424 - DNA, 25 bp, Canis familiaris
acagaggacatgtcgccagttcaaa

SEQ ID NO: 41425 - DNA, 25 bp, Canis familiaris
acagacagacatttctcagctctta

SEQ ID NO: 41426 - DNA, 25 bp, Canis familiaris
acagccagacaagtagctcttctaa

SEQ ID NO: 41427 - DNA, 25 bp, Canis familiaris
acagcactaagagtaaccctacagc

SEQ ID NO: 41428 - DNA, 25 bp, Canis familiaris
acacctcaacagcaaccttaatcgc

SEQ ID NO: 41429 - DNA, 25 bp, Canis familiaris
acaccatggacagacaccataatgg

SEQ ID NO: 41430 - DNA, 25 bp, Canis familiaris
acagccatggctgggaacctgactg

SEQ ID NO: 41431 - DNA, 25 bp, Canis familiaris
acagacaggtcgtggcctagaggac

SEQ ID NO: 41432 - DNA, 25 bp, Canis familiaris
acagcaaaacgggctccttgagaga

SEQ ID NO: 41433 - DNA, 25 bp, Canis familiaris
acagaagaacgggctgagctctcag

SEQ ID NO: 41434 - DNA, 25 bp, Canis familiaris
acacaacacggcgcgagttcagagt

SEQ ID NO: 41435 - DNA, 25 bp, Canis familiaris
acagcaaccggtggtggactcatgg

SEQ ID NO: 41436 - DNA, 25 bp, Canis familiaris
acacgtacgcgtatggacttggctt

SEQ ID NO: 41437 - DNA, 25 bp, Canis familiaris
aacgtaggcattcagatccggccgt

SEQ ID NO: 41438 - DNA, 25 bp, Canis familiaris
aacagaagagctcaagtcggaccgg

SEQ ID NO: 41439 - DNA, 25 bp, Canis familiaris
aacaaacagggagcttggcacccgg

SEQ ID NO: 41440 - DNA, 25 bp, Canis familiaris
aaataacggaagactcggctctggc

SEQ ID NO: 41441 - DNA, 25 bp, Canis familiaris
aaattaaggacacctgggtagctca

SEQ ID NO: 41442 - DNA, 25 bp, Canis familiaris
acacgtgaaggttgcctgggtcaca

SEQ ID NO: 41443 - DNA, 25 bp, Canis familiaris
acactgaaaagttctaggcaatgca

SEQ ID NO: 41444 - DNA, 25 bp, Canis familiaris
acaccaacaagtgttctctgtgaca

SEQ ID NO: 41445 - DNA, 25 bp, Canis familiaris
acacgagagaggttttccggagact

SEQ ID NO: 41446 - DNA, 25 bp, Canis familiaris
aacagagggcactggtccagggcct

SEQ ID NO: 41447 - DNA, 25 bp, Canis familiaris
acacaggggcctgggagccagggtt

SEQ ID NO: 41448 - DNA, 25 bp, Canis familiaris
acacgataccccctgtgaagaggtt

SEQ ID NO: 41449 - DNA, 25 bp, Canis familiaris
acagctgacaccgtcactggacgga

SEQ ID NO: 41450 - DNA, 25 bp, Canis familiaris
acagctctgagcagccagtggactg

SEQ ID NO: 41451 - DNA, 25 bp, Canis familiaris
acagattgatgaactatgcgggctt

SEQ ID NO: 41452 - DNA, 25 bp, Canis familiaris
acagatgggtcccatgcctgtgtgt

SEQ ID NO: 41453 - DNA, 25 bp, Canis familiaris
acagaggagcacaagcagccatagt

SEQ ID NO: 41454 - DNA, 25 bp, Canis familiaris
acagagctgtccactgtgctagaca

SEQ ID NO: 41455 - DNA, 25 bp, Canis familiaris
acagagctgcctactttggagtcta

SEQ ID NO: 41456 - DNA, 25 bp, Canis familiaris
acacccctacttctgagtcataata

SEQ ID NO: 41457 - DNA, 25 bp, Canis familiaris
acaccctccacctctggaatataaa

SEQ ID NO: 41458 - DNA, 25 bp, Canis familiaris
acaccactcatcaccagggaaatac

SEQ ID NO: 41459 - DNA, 25 bp, Canis familiaris
acaccactccccagagaggattagc

SEQ ID NO: 41460 - DNA, 25 bp, Canis familiaris
acacccttccacaactagtattact

SEQ ID NO: 41461 - DNA, 25 bp, Canis familiaris
acaccctgctacttcccagggtgag

SEQ ID NO: 41462 - DNA, 25 bp, Canis familiaris
acaccactgaagttcccaagttcct

SEQ ID NO: 41463 - DNA, 25 bp, Canis familiaris
acaccaagagtaatctcctgaggat

SEQ ID NO: 41464 - DNA, 25 bp, Canis familiaris
acacgcagaaggaactcttggagca

SEQ ID NO: 41465 - DNA, 25 bp, Canis familiaris
acacctgacaggaactcggacataa

SEQ ID NO: 41466 - DNA, 25 bp, Canis familiaris
acacctaatggccaactgtaatggg

SEQ ID NO: 41467 - DNA, 25 bp, Canis familiaris
acagcattaattctatctgcaacat

SEQ ID NO: 41468 - DNA, 25 bp, Canis familiaris
acagagtcagatgttttgcacacct

SEQ ID NO: 41469 - DNA, 25 bp, Canis familiaris
acagatgtctgtgtgttcgcagcac

SEQ ID NO: 41470 - DNA, 25 bp, Canis familiaris
acagatctctgagtctgttctccac

SEQ ID NO: 41471 - DNA, 25 bp, Canis familiaris
acagcatgttaagtgtttgtacagg

SEQ ID NO: 41472 - DNA, 25 bp, Canis familiaris
acactgtcattatctcctgtacatg

SEQ ID NO: 41473 - DNA, 25 bp, Canis familiaris
acactttatgatctccgcaatcaga

SEQ ID NO: 41474 - DNA, 25 bp, Canis familiaris
acacgattatgtgcgcgtcaacagg

SEQ ID NO: 41475 - DNA, 25 bp, Canis familiaris
acacgttcatggacctgatcgagca

SEQ ID NO: 41476 - DNA, 25 bp, Canis familiaris
acagcgttgtgtcctagagcatagc

SEQ ID NO: 41477 - DNA, 25 bp, Canis familiaris
acagctgacctgacctagggcaatg

SEQ ID NO: 41478 - DNA, 25 bp, Canis familiaris
acagcctcctgaggaaggctcagag

SEQ ID NO: 41479 - DNA, 25 bp, Canis familiaris
acagcctcacgtgtgcaggctcaaa

SEQ ID NO: 41480 - DNA, 25 bp, Canis familiaris
acacacatacctgtctagtcacagg

SEQ ID NO: 41481 - DNA, 25 bp, Canis familiaris
acagatgctagcagcctctattgcc

SEQ ID NO: 41482 - DNA, 25 bp, Canis familiaris
acagacaaagcgcctcttggcactg

SEQ ID NO: 41483 - DNA, 25 bp, Canis familiaris
acagaaacatcagatcatttctctg

SEQ ID NO: 41484 - DNA, 25 bp, Canis familiaris
acagaatcactcggtttatatattt

SEQ ID NO: 41485 - DNA, 25 bp, Canis familiaris
acacggcttcacgttttatcatttc

SEQ ID NO: 41486 - DNA, 25 bp, Canis familiaris
acacaggagtcctccttgtcatttc

SEQ ID NO: 41487 - DNA, 25 bp, Canis familiaris
acagcagagagcagctggccctttc

SEQ ID NO: 41488 - DNA, 25 bp, Canis familiaris
acagaggagcattgaggccgcttcc

SEQ ID NO: 41489 - DNA, 25 bp, Canis familiaris
acagcagcgagaaggctccggatat

SEQ ID NO: 41490 - DNA, 25 bp, Canis familiaris
acagcgctcaaaactcggtgatcat

SEQ ID NO: 41491 - DNA, 25 bp, Canis familiaris
acagaacacataaccgcagcggcat

SEQ ID NO: 41492 - DNA, 25 bp, Canis familiaris
acagaagcctctattgcctggctgt

SEQ ID NO: 41493 - DNA, 25 bp, Canis familiaris
acagaatcacactaattcgttcgta

SEQ ID NO: 41494 - DNA, 25 bp, Canis familiaris
acagcaccatcctttctatttagat

SEQ ID NO: 41495 - DNA, 25 bp, Canis familiaris
acagaccaccttcttgtgaatttta

SEQ ID NO: 41496 - DNA, 25 bp, Canis familiaris
acagaccttcttcttgtatctgctc

SEQ ID NO: 41497 - DNA, 25 bp, Canis familiaris
gacgtactacgtgtcctatgctgtc

SEQ ID NO: 41498 - DNA, 25 bp, Canis familiaris
aagccaaactgtgtccacacttctg

SEQ ID NO: 41499 - DNA, 25 bp, Canis familiaris
acaccacgatttctaccacttagaa

SEQ ID NO: 41500 - DNA, 25 bp, Canis familiaris
acactccttttccaacacattattg

SEQ ID NO: 41501 - DNA, 25 bp, Canis familiaris
acagccttatgatcccaatttttat

SEQ ID NO: 41502 - DNA, 25 bp, Canis familiaris
acaccgttgcacacaaacttttttg

SEQ ID NO: 41503 - DNA, 25 bp, Canis familiaris
acagccagttgtactaatccttttt

SEQ ID NO: 41504 - DNA, 25 bp, Canis familiaris
acactactagtttatcaccctattt

SEQ ID NO: 41505 - DNA, 25 bp, Canis familiaris
acactgtaagggttaccgtctgttg

SEQ ID NO: 41506 - DNA, 25 bp, Canis familiaris
aactaaagggatggacacaggttat

SEQ ID NO: 41507 - DNA, 25 bp, Canis familiaris
cactaaaaggtgagaactgtgttta

SEQ ID NO: 41508 - DNA, 25 bp, Canis familiaris
aaagaaaagtgacaacatgttttga

SEQ ID NO: 41509 - DNA, 25 bp, Canis familiaris
caagtaatcaagtgttattttttca

SEQ ID NO: 41510 - DNA, 25 bp, Canis familiaris
aactactcactgtggtttgttttag

SEQ ID NO: 41511 - DNA, 25 bp, Canis familiaris
acagctaatttatggctctggttta

SEQ ID NO: 41512 - DNA, 25 bp, Canis familiaris
acactaatgttatttattgcctact

SEQ ID NO: 41513 - DNA, 25 bp, Canis familiaris
acactacatatttggttgggtcctg

SEQ ID NO: 41514 - DNA, 25 bp, Canis familiaris
acagctgttattaggttgcctccgg

SEQ ID NO: 41515 - DNA, 25 bp, Canis familiaris
acactggtaatcggtactgcatagc

SEQ ID NO: 41516 - DNA, 25 bp, Canis familiaris
acagctgggaattcagttcattcat

SEQ ID NO: 41517 - DNA, 25 bp, Canis familiaris
acagcgtgaacatcagtaatacttt

SEQ ID NO: 41518 - DNA, 25 bp, Canis familiaris
acagcgagaaaacataccatcattg

SEQ ID NO: 41519 - DNA, 25 bp, Canis familiaris
acagctgaaagatgggcccactctg

SEQ ID NO: 41520 - DNA, 25 bp, Canis familiaris
acacgtaattattggctctacattc

SEQ ID NO: 41521 - DNA, 25 bp, Canis familiaris
acacttatcatggtgggccctgagt

SEQ ID NO: 41522 - DNA, 25 bp, Canis familiaris
acactttcatggctgtggttcagtc

SEQ ID NO: 41523 - DNA, 25 bp, Canis familiaris
acactccactagcacagttatcagt

SEQ ID NO: 41524 - DNA, 25 bp, Canis familiaris
acagccccagacgacaatttcaaag

SEQ ID NO: 41525 - DNA, 25 bp, Canis familiaris
acaccatccatactccaaactaaga

SEQ ID NO: 41526 - DNA, 25 bp, Canis familiaris
acaccacctgtatggaactagagag

SEQ ID NO: 41527 - DNA, 25 bp, Canis familiaris
acaccaccttatcaatatctgaatg

SEQ ID NO: 41528 - DNA, 25 bp, Canis familiaris
acagctcttgctaataaaatcgtgg

SEQ ID NO: 41529 - DNA, 25 bp, Canis familiaris
acactttgctataaaaatcttggcc

SEQ ID NO: 41530 - DNA, 25 bp, Canis familiaris
acactgtgctctttaaacttcttca

SEQ ID NO: 41531 - DNA, 25 bp, Canis familiaris
acagctctcctattggaacttgccc

SEQ ID NO: 41532 - DNA, 25 bp, Canis familiaris
acagcagctcctttgagctctttcc

SEQ ID NO: 41533 - DNA, 25 bp, Canis familiaris
acagcttcatctgtactgcttgaat

SEQ ID NO: 41534 - DNA, 25 bp, Canis familiaris
acagcttatgaggctacggaaacag

SEQ ID NO: 41535 - DNA, 25 bp, Canis familiaris
acacttgtgacccttgagaatccag

SEQ ID NO: 41536 - DNA, 25 bp, Canis familiaris
acagctggtcatctttacacacctg

SEQ ID NO: 41537 - DNA, 25 bp, Canis familiaris
acagcaggacttattcactcccatg

SEQ ID NO: 41538 - DNA, 25 bp, Canis familiaris
acacgtacatgtgatacccacctgt

SEQ ID NO: 41539 - DNA, 25 bp, Canis familiaris
acacgaactcgcaaaccagcgtcgt

SEQ ID NO: 41540 - DNA, 25 bp, Canis familiaris
acacagattcgggttcacaggggcc

SEQ ID NO: 41541 - DNA, 25 bp, Canis familiaris
acactggtccccaatgcaaggtgac

SEQ ID NO: 41542 - DNA, 25 bp, Canis familiaris
acactggaccccggcagaggatatt

SEQ ID NO: 41543 - DNA, 25 bp, Canis familiaris
acagctgggcacggggagaggaggt

SEQ ID NO: 41544 - DNA, 25 bp, Canis familiaris
acagcggccacggagtagaggactc

SEQ ID NO: 41545 - DNA, 25 bp, Canis familiaris
acagcgttgccaaagaaacagcccg

SEQ ID NO: 41546 - DNA, 25 bp, Canis familiaris
acagcctgtggatcaagctactccc

SEQ ID NO: 41547 - DNA, 25 bp, Canis familiaris
acagccgcttgacaatgcagatctt

SEQ ID NO: 41548 - DNA, 25 bp, Canis familiaris
acactccactggaagatgctgagct

SEQ ID NO: 41549 - DNA, 25 bp, Canis familiaris
acacacgcacgatttatgggcttta

SEQ ID NO: 41550 - DNA, 25 bp, Canis familiaris
acacgtatccaaagtggtgccattg

SEQ ID NO: 41551 - DNA, 25 bp, Canis familiaris
acaccatcaggaatcgtgttggtag

SEQ ID NO: 41552 - DNA, 25 bp, Canis familiaris
acacctcggcctggtgactggagaa

SEQ ID NO: 41553 - DNA, 25 bp, Canis familiaris
acaccagcggctggggcaggaggac

SEQ ID NO: 41554 - DNA, 25 bp, Canis familiaris
acacctctggctggggaggagcctc

SEQ ID NO: 41555 - DNA, 25 bp, Canis familiaris
acaccatccagtgcatggagggctc

SEQ ID NO: 41556 - DNA, 25 bp, Canis familiaris
acagcgtccagttcaagttgcctga

SEQ ID NO: 41557 - DNA, 25 bp, Canis familiaris
acagctgtccagtgttggtgattcc

SEQ ID NO: 41558 - DNA, 25 bp, Canis familiaris
acagcattcacaggttgcggctttc

SEQ ID NO: 41559 - DNA, 25 bp, Canis familiaris
acagctctgcacggatgacagcctt

SEQ ID NO: 41560 - DNA, 25 bp, Canis familiaris
acagctccagcagggagcatgtgtg

SEQ ID NO: 41561 - DNA, 25 bp, Canis familiaris
acagcaatgcctggagagtgtgtgg

SEQ ID NO: 41562 - DNA, 25 bp, Canis familiaris
acagcctcctactaggctgctggct

SEQ ID NO: 41563 - DNA, 25 bp, Canis familiaris
acagctccttgtcagtgtgctgcgt

SEQ ID NO: 41564 - DNA, 25 bp, Canis familiaris
acagaatctaggcagggccgtcgcc

SEQ ID NO: 41565 - DNA, 25 bp, Canis familiaris
acagaatttggctggaccctcaact

SEQ ID NO: 41566 - DNA, 25 bp, Canis familiaris
acagacttactgtgtgtcacctgca

SEQ ID NO: 41567 - DNA, 25 bp, Canis familiaris
acagacttcaccagcaccatcaagc

SEQ ID NO: 41568 - DNA, 25 bp, Canis familiaris
acagactaaagcactcacacacatg

SEQ ID NO: 41569 - DNA, 25 bp, Canis familiaris
acagctctaataacttgcccactgg

SEQ ID NO: 41570 - DNA, 25 bp, Canis familiaris
acagctctacattatgctgctgcct

SEQ ID NO: 41571 - DNA, 25 bp, Canis familiaris
acagcgcaacagcagcctgcagctg

SEQ ID NO: 41572 - DNA, 25 bp, Canis familiaris
acagctgacaggagccagctcatgc

SEQ ID NO: 41573 - DNA, 25 bp, Canis familiaris
acagcagcctgctaatgccaggcac

SEQ ID NO: 41574 - DNA, 25 bp, Canis familiaris
acagcagcttcagctgcctggtcac

SEQ ID NO: 41575 - DNA, 25 bp, Canis familiaris
acagctctattggatcctgggagcg

SEQ ID NO: 41576 - DNA, 25 bp, Canis familiaris
acagcaggaatgatcctgggctgga

SEQ ID NO: 41577 - DNA, 25 bp, Canis familiaris
acagcaggcagtaggcctgggcccg

SEQ ID NO: 41578 - DNA, 25 bp, Canis familiaris
cacgacggggatgtgtacccggcct

SEQ ID NO: 41579 - DNA, 25 bp, Canis familiaris
acagccagggaagccattcggcggc

SEQ ID NO: 41580 - DNA, 25 bp, Canis familiaris
acaacaggtgcaacccagttcggtc

SEQ ID NO: 41581 - DNA, 25 bp, Canis familiaris
acagaaggcagcacatccactgggg

SEQ ID NO: 41582 - DNA, 25 bp, Canis familiaris
acagaagcggtccattccgtacgtt

SEQ ID NO: 41583 - DNA, 25 bp, Canis familiaris
acaaccggtttctcagaagctgatt

SEQ ID NO: 41584 - DNA, 25 bp, Canis familiaris
acaccactggtttcctgagaagcca

SEQ ID NO: 41585 - DNA, 25 bp, Canis familiaris
acagcacttgagactttcaaaacct

SEQ ID NO: 41586 - DNA, 25 bp, Canis familiaris
acagccttacatatctacagtcatc

SEQ ID NO: 41587 - DNA, 25 bp, Canis familiaris
acagcctcttgcatcattagtgtcc

SEQ ID NO: 41588 - DNA, 25 bp, Canis familiaris
acagccctacggacaaggtcctgtt

SEQ ID NO: 41589 - DNA, 25 bp, Canis familiaris
acactccccagtacacaggtttgtg

SEQ ID NO: 41590 - DNA, 25 bp, Canis familiaris
acaccctactgtccatgctgggtat

SEQ ID NO: 41591 - DNA, 25 bp, Canis familiaris
acaagcccctgccaagtgtggtatt

SEQ ID NO: 41592 - DNA, 25 bp, Canis familiaris
acacagtcggcccacgtgagtaaat

SEQ ID NO: 41593 - DNA, 25 bp, Canis familiaris
acagcagcctgggagcctctgctgt

SEQ ID NO: 41594 - DNA, 25 bp, Canis familiaris
acagcatcacttaagctcctttgtg

SEQ ID NO: 41595 - DNA, 25 bp, Canis familiaris
acagcatcaccaacaattattatct

SEQ ID NO: 41596 - DNA, 25 bp, Canis familiaris
acagcaacactctaagttaatctac

SEQ ID NO: 41597 - DNA, 25 bp, Canis familiaris
acagcaactcctccatgtaaagtga

SEQ ID NO: 41598 - DNA, 25 bp, Canis familiaris
acagaagctcctcatttcagtgtca

SEQ ID NO: 41599 - DNA, 25 bp, Canis familiaris
acaccacttctgctgtcacagtaaa

SEQ ID NO: 41600 - DNA, 25 bp, Canis familiaris
acacagttttcgctcggtgaataca

SEQ ID NO: 41601 - DNA, 25 bp, Canis familiaris
acacagttttcgctctggtgaatgc

SEQ ID NO: 41602 - DNA, 25 bp, Canis familiaris
acacattatttgaccgtgcctaagt

SEQ ID NO: 41603 - DNA, 25 bp, Canis familiaris
acacattatttgaccttgcctaatt

SEQ ID NO: 41604 - DNA, 25 bp, Canis familiaris
acagctttgttttcattgctttgtt

SEQ ID NO: 41605 - DNA, 25 bp, Canis familiaris
acagcacctgtcaccaggatcttct

SEQ ID NO: 41606 - DNA, 25 bp, Canis familiaris
acagcatggtgtacctgggcatctc

SEQ ID NO: 41607 - DNA, 25 bp, Canis familiaris
acactgagttatggtgctggcctcc

SEQ ID NO: 41608 - DNA, 25 bp, Canis familiaris
acagcaagtttgccatgttcttccg

SEQ ID NO: 41609 - DNA, 25 bp, Canis familiaris
acagctcagttaggcagtccagtcc

SEQ ID NO: 41610 - DNA, 25 bp, Canis familiaris
acagctgctggatgagttcctgtcc

SEQ ID NO: 41611 - DNA, 25 bp, Canis familiaris
acactgggaccagtgtacgtgccct

SEQ ID NO: 41612 - DNA, 25 bp, Canis familiaris
acacttggaacagaagagctccgac

SEQ ID NO: 41613 - DNA, 25 bp, Canis familiaris
aacttgctggacatttagccctgag

SEQ ID NO: 41614 - DNA, 25 bp, Canis familiaris
acacttctggatcttaaggcttcgt

SEQ ID NO: 41615 - DNA, 25 bp, Canis familiaris
acactttaatttcaatgcccatcgc

SEQ ID NO: 41616 - DNA, 25 bp, Canis familiaris
acactgtaacacggagaccacccgg

SEQ ID NO: 41617 - DNA, 25 bp, Canis familiaris
acagctagaactcaaacacaccgcc

SEQ ID NO: 41618 - DNA, 25 bp, Canis familiaris
acacggcaagctgcactacaaaccc

SEQ ID NO: 41619 - DNA, 25 bp, Canis familiaris
acacccaagtgttctacaaccacgt

SEQ ID NO: 41620 - DNA, 25 bp, Canis familiaris
acactccaggtttctccagtaaaga

SEQ ID NO: 41621 - DNA, 25 bp, Canis familiaris
acagctcccttttctcaaggtatag

SEQ ID NO: 41622 - DNA, 25 bp, Canis familiaris
acagctccagctttacgttggttat

SEQ ID NO: 41623 - DNA, 25 bp, Canis familiaris
acactgccagtattccggatttggt

SEQ ID NO: 41624 - DNA, 25 bp, Canis familiaris
acactgccctttgcttttattgtga

SEQ ID NO: 41625 - DNA, 25 bp, Canis familiaris
acagccccaatgtgtttcttttcaa

SEQ ID NO: 41626 - DNA, 25 bp, Canis familiaris
acagccctcacatagcatttttatt

SEQ ID NO: 41627 - DNA, 25 bp, Canis familiaris
acaccttagagcaatatcttttagt

SEQ ID NO: 41628 - DNA, 25 bp, Canis familiaris
acacctctcgacatttatatttctt

SEQ ID NO: 41629 - DNA, 25 bp, Canis familiaris
acacctctttagtggtctttctctc

SEQ ID NO: 41630 - DNA, 25 bp, Canis familiaris
acagctcttctctgtttgtctttaa

SEQ ID NO: 41631 - DNA, 25 bp, Canis familiaris
acagcagaactctgttgttcctttg

SEQ ID NO: 41632 - DNA, 25 bp, Canis familiaris
acaccatatctatgtgttccccttc

SEQ ID NO: 41633 - DNA, 25 bp, Canis familiaris
acagcattatttgtggctgccacct

SEQ ID NO: 41634 - DNA, 25 bp, Canis familiaris
acagcagtttacaaggtgtcagaat

SEQ ID NO: 41635 - DNA, 25 bp, Canis familiaris
acagcccttgccatagttcatgaat

SEQ ID NO: 41636 - DNA, 25 bp, Canis familiaris
acagcaggctgtgctgccagtctag

SEQ ID NO: 41637 - DNA, 25 bp, Canis familiaris
acagcagccatggtgtgctctttgg

SEQ ID NO: 41638 - DNA, 25 bp, Canis familiaris
acagctctcagggcatgtcttttgc

SEQ ID NO: 41639 - DNA, 25 bp, Canis familiaris
acagctctcagggcaatctttttgc

SEQ ID NO: 41640 - DNA, 25 bp, Canis familiaris
acagccaagtgcctatgctttgttc

SEQ ID NO: 41641 - DNA, 25 bp, Canis familiaris
acagcctcagacctgagtttctgtt

SEQ ID NO: 41642 - DNA, 25 bp, Canis familiaris
acagcgcaggacctgagtctggtgt

SEQ ID NO: 41643 - DNA, 25 bp, Canis familiaris
acagcatgcaacaggtgtcggtctt

SEQ ID NO: 41644 - DNA, 25 bp, Canis familiaris
acagcagacagtgggctgaccctca

SEQ ID NO: 41645 - DNA, 25 bp, Canis familiaris
acagcagactgccaggcagatcccc

SEQ ID NO: 41646 - DNA, 25 bp, Canis familiaris
acagcaagctgctgtatgtccccgt

SEQ ID NO: 41647 - DNA, 25 bp, Canis familiaris
acagcattgctgttgagtgcgccac

SEQ ID NO: 41648 - DNA, 25 bp, Canis familiaris
acacatgctgatctgtggccagcca

SEQ ID NO: 41649 - DNA, 25 bp, Canis familiaris
acacatgctgcatcctgggcagact

SEQ ID NO: 41650 - DNA, 25 bp, Canis familiaris
acagcatgccccagggcatggccgg

SEQ ID NO: 41651 - DNA, 25 bp, Canis familiaris
acagctgccaccaagatgagcagag

SEQ ID NO: 41652 - DNA, 25 bp, Canis familiaris
acactggctgaggagatgcactgca

SEQ ID NO: 41653 - DNA, 25 bp, Canis familiaris
acagcgagctgtgtgcatgctgagc

SEQ ID NO: 41654 - DNA, 25 bp, Canis familiaris
acagcgagctgtgtgcatgctgagc

SEQ ID NO: 41655 - DNA, 25 bp, Canis familiaris
acagctggccacatctgtgatgcat

SEQ ID NO: 41656 - DNA, 25 bp, Canis familiaris
acacgtgcgcacacgtgcgcagccg

SEQ ID NO: 41657 - DNA, 25 bp, Canis familiaris
acacgtgcgcacacgtgcgcagccg

SEQ ID NO: 41658 - DNA, 25 bp, Canis familiaris
acacgtgtgcaagtgcatgatcgat

SEQ ID NO: 41659 - DNA, 25 bp, Canis familiaris
acacctgtcacccagatcaatgagg

SEQ ID NO: 41660 - DNA, 25 bp, Canis familiaris
acagcacagacaccagcaaacaggg

SEQ ID NO: 41661 - DNA, 25 bp, Canis familiaris
acagcaaagcacgaccgacagacac

SEQ ID NO: 41662 - DNA, 25 bp, Canis familiaris
acagcaaatgtcgtccgtaatcatg

SEQ ID NO: 41663 - DNA, 25 bp, Canis familiaris
acagcaaattccatcgtgtgatcaa

SEQ ID NO: 41664 - DNA, 25 bp, Canis familiaris
acagcatttctgccttcatgaggaa

SEQ ID NO: 41665 - DNA, 25 bp, Canis familiaris
acacattccctgcagatgaggagat

SEQ ID NO: 41666 - DNA, 25 bp, Canis familiaris
acagcactctcagcaaaagacagat

SEQ ID NO: 41667 - DNA, 25 bp, Canis familiaris
acagcttctagcaaaatgtatcaaa

SEQ ID NO: 41668 - DNA, 25 bp, Canis familiaris
acagcatcgtcagcaccatgctatc

SEQ ID NO: 41669 - DNA, 25 bp, Canis familiaris
acagcatgctggactgcactctgtt

SEQ ID NO: 41670 - DNA, 25 bp, Canis familiaris
acagcagcagcggctcatctatagt

SEQ ID NO: 41671 - DNA, 25 bp, Canis familiaris
acagcagcagcggttctgacatcat

SEQ ID NO: 41672 - DNA, 25 bp, Canis familiaris
acagcagctcatgttgagactcagt

SEQ ID NO: 41673 - DNA, 25 bp, Canis familiaris
acagcagtcggttggagcgagcatc

SEQ ID NO: 41674 - DNA, 25 bp, Canis familiaris
acagcgctgcgattctggagtacct

SEQ ID NO: 41675 - DNA, 25 bp, Canis familiaris
acagcagcctgcagctggattacgc

SEQ ID NO: 41676 - DNA, 25 bp, Canis familiaris
acagcagcgcgctgcaacattaccc

SEQ ID NO: 41677 - DNA, 25 bp, Canis familiaris
acagctggcagcgaaagttactcta

SEQ ID NO: 41678 - DNA, 25 bp, Canis familiaris
acagctgacactgaaggtccatcac

SEQ ID NO: 41679 - DNA, 25 bp, Canis familiaris
acagctcagtcaggaattggcccaa

SEQ ID NO: 41680 - DNA, 25 bp, Canis familiaris
acagccagagcattgcaagggccca

SEQ ID NO: 41681 - DNA, 25 bp, Canis familiaris
acagcgagcagcagcagcactcgcc

SEQ ID NO: 41682 - DNA, 25 bp, Canis familiaris
acagcagagacaacagcagcagcag

SEQ ID NO: 41683 - DNA, 25 bp, Canis familiaris
acagcagcaggaacagcagcaggga

SEQ ID NO: 41684 - DNA, 25 bp, Canis familiaris
acactgcggatgctgatgcatggga

SEQ ID NO: 41685 - DNA, 25 bp, Canis familiaris
acacctgagagcctgacggagcagg

SEQ ID NO: 41686 - DNA, 25 bp, Canis familiaris
acacccacgcgtgcatagagcattt

SEQ ID NO: 41687 - DNA, 25 bp, Canis familiaris
acactgccacagaacaataggtctt

SEQ ID NO: 41688 - DNA, 25 bp, Canis familiaris
acaccgcaggcagcaaaggcctcgg

SEQ ID NO: 41689 - DNA, 25 bp, Canis familiaris
acaccgcagaagtcttaggctcaca

SEQ ID NO: 41690 - DNA, 25 bp, Canis familiaris
acaagccgcaaaggcagcaggctac

SEQ ID NO: 41691 - DNA, 25 bp, Canis familiaris
acaaggcgcaaggtggactggctca

SEQ ID NO: 41692 - DNA, 25 bp, Canis familiaris
acagcgggacactggtcatggatgc

SEQ ID NO: 41693 - DNA, 25 bp, Canis familiaris
acagcggagggctgggcgagcatgc

SEQ ID NO: 41694 - DNA, 25 bp, Canis familiaris
acacgggggagctgccggagctccc

SEQ ID NO: 41695 - DNA, 25 bp, Canis familiaris
acacggaggagatggctctgtggtc

SEQ ID NO: 41696 - DNA, 25 bp, Canis familiaris
acactgtgcagggcctgtgggtggg

SEQ ID NO: 41697 - DNA, 25 bp, Canis familiaris
acagctgtggctgcaggttggtggg

SEQ ID NO: 41698 - DNA, 25 bp, Canis familiaris
acaagggtgccacgttgggggcagg

SEQ ID NO: 41699 - DNA, 25 bp, Canis familiaris
acaagagttgggatccggcgtggga

SEQ ID NO: 41700 - DNA, 25 bp, Canis familiaris
acaaatgtggagcaggccgggtggc

SEQ ID NO: 41701 - DNA, 25 bp, Canis familiaris
acacttggtgggaccacgcgactga

SEQ ID NO: 41702 - DNA, 25 bp, Canis familiaris
acaccgggtggaccagggcagtaga

SEQ ID NO: 41703 - DNA, 25 bp, Canis familiaris
acacccggtggcttagttcagttgc

SEQ ID NO: 41704 - DNA, 25 bp, Canis familiaris
acaccccagattttcacttcagtga

SEQ ID NO: 41705 - DNA, 25 bp, Canis familiaris
acagccccagaattatccattagtt

SEQ ID NO: 41706 - DNA, 25 bp, Canis familiaris
acaccccaggaatcatattcagctt

SEQ ID NO: 41707 - DNA, 25 bp, Canis familiaris
acagccctaggaagtcagaaccatt

SEQ ID NO: 41708 - DNA, 25 bp, Canis familiaris
acacacagtagatagtagacacgat

SEQ ID NO: 41709 - DNA, 25 bp, Canis familiaris
acagcaggtcaagaggagtacagtg

SEQ ID NO: 41710 - DNA, 25 bp, Canis familiaris
acagcgggccaggaggagtacagcg

SEQ ID NO: 41711 - DNA, 25 bp, Canis familiaris
acacatatggcccgggagctacaac

SEQ ID NO: 41712 - DNA, 25 bp, Canis familiaris
acactggacgcgcgaggagagctac

SEQ ID NO: 41713 - DNA, 25 bp, Canis familiaris
acacggaccgtgacagagacagtaa

SEQ ID NO: 41714 - DNA, 25 bp, Canis familiaris
acactggaacagtctgcaacacaga

SEQ ID NO: 41715 - DNA, 25 bp, Canis familiaris
acagcattgagctgtctgacccgaa

SEQ ID NO: 41716 - DNA, 25 bp, Canis familiaris
acacatgtgcacgtgagtgacccgt

SEQ ID NO: 41717 - DNA, 25 bp, Canis familiaris
acaagttcgttgccagaccgatgcc

SEQ ID NO: 41718 - DNA, 25 bp, Canis familiaris
acaaccgagattggaaccagatgat

SEQ ID NO: 41719 - DNA, 25 bp, Canis familiaris
aaatctaaagtttcccagtgctcca

SEQ ID NO: 41720 - DNA, 25 bp, Canis familiaris
acaccttgaagtaagcccaacctgt

SEQ ID NO: 41721 - DNA, 25 bp, Canis familiaris
acaccttggagatacaccacctcct

SEQ ID NO: 41722 - DNA, 25 bp, Canis familiaris
acagccttctggaaaacacacacac

SEQ ID NO: 41723 - DNA, 25 bp, Canis familiaris
acagccccctgagaatacgcagagc

SEQ ID NO: 41724 - DNA, 25 bp, Canis familiaris
acaacaccaagagtgaacctgcggt

SEQ ID NO: 41725 - DNA, 25 bp, Canis familiaris
aaaagccaaggtgcccatatggaaa

SEQ ID NO: 41726 - DNA, 25 bp, Canis familiaris
acagccaccaagattctccaaagat

SEQ ID NO: 41727 - DNA, 25 bp, Canis familiaris
acaccccctgagataccatgtagat

SEQ ID NO: 41728 - DNA, 25 bp, Canis familiaris
acactaccaggacaacacattattt

SEQ ID NO: 41729 - DNA, 25 bp, Canis familiaris
acacacaggagcccaaaatctgtat

SEQ ID NO: 41730 - DNA, 25 bp, Canis familiaris
acacaaggaagttaggttgactgcc

SEQ ID NO: 41731 - DNA, 25 bp, Canis familiaris
acaccatggaatctcagtttagctc

SEQ ID NO: 41732 - DNA, 25 bp, Canis familiaris
acaccagagatatcttttatgatgt

SEQ ID NO: 41733 - DNA, 25 bp, Canis familiaris
acactcagctaatgtttggtatttt

SEQ ID NO: 41734 - DNA, 25 bp, Canis familiaris
acacatacaaattgcattagtttct

SEQ ID NO: 41735 - DNA, 25 bp, Canis familiaris
acacatgcacatattcattcgtcca

SEQ ID NO: 41736 - DNA, 25 bp, Canis familiaris
acaccacacatttgtatgcttctca

SEQ ID NO: 41737 - DNA, 25 bp, Canis familiaris
acacctgcatcaaacttgttccact

SEQ ID NO: 41738 - DNA, 25 bp, Canis familiaris
acactctggcacacttgttcacagt

SEQ ID NO: 41739 - DNA, 25 bp, Canis familiaris
acaccttcatcacttatgttacttt

SEQ ID NO: 41740 - DNA, 25 bp, Canis familiaris
acagctgtattccttattaacttat

SEQ ID NO: 41741 - DNA, 25 bp, Canis familiaris
acagctttttctctcaagatcttta

SEQ ID NO: 41742 - DNA, 25 bp, Canis familiaris
ctgcttcgttcctgtaagactttaa

SEQ ID NO: 41743 - DNA, 25 bp, Canis familiaris
cttggagccccatccaatagtttaa

SEQ ID NO: 41744 - DNA, 25 bp, Canis familiaris
ctctgtggtctacaaaaatgttgtt

SEQ ID NO: 41745 - DNA, 25 bp, Canis familiaris
ctcttggactttaacgctagtagta

SEQ ID NO: 41746 - DNA, 25 bp, Canis familiaris
gcatcgggacttttcgtctagtagt

SEQ ID NO: 41747 - DNA, 25 bp, Canis familiaris
acaaagggttaggtgctcagtagta

SEQ ID NO: 41748 - DNA, 25 bp, Canis familiaris
acacggtgccttgcgattcgtagta

SEQ ID NO: 41749 - DNA, 25 bp, Canis familiaris
acacctgttttcttgattttagtca

SEQ ID NO: 41750 - DNA, 25 bp, Canis familiaris
acactgctgtgtctcttattttttg

SEQ ID NO: 41751 - DNA, 25 bp, Canis familiaris
acacctgttgagattagcattaact

SEQ ID NO: 41752 - DNA, 25 bp, Canis familiaris
acacctgaggaggcccagtataact

SEQ ID NO: 41753 - DNA, 25 bp, Canis familiaris
acacctgtggggttcattgtcagcc

SEQ ID NO: 41754 - DNA, 25 bp, Canis familiaris
acacctgtgagaaggaacttgatcc

SEQ ID NO: 41755 - DNA, 25 bp, Canis familiaris
acaccctgcaggacttactgtatca

SEQ ID NO: 41756 - DNA, 25 bp, Canis familiaris
acacggccatgtattactgtgcacc

SEQ ID NO: 41757 - DNA, 25 bp, Canis familiaris
acacccactgacatgtacattcatc

SEQ ID NO: 41758 - DNA, 25 bp, Canis familiaris
acacaccactggattgcaaatactg

SEQ ID NO: 41759 - DNA, 25 bp, Canis familiaris
acacagccagcttagtttacatata

SEQ ID NO: 41760 - DNA, 25 bp, Canis familiaris
acacactcagtctcattacagcttt

SEQ ID NO: 41761 - DNA, 25 bp, Canis familiaris
acacacatttttaaagactcttcat

SEQ ID NO: 41762 - DNA, 25 bp, Canis familiaris
acactaattattactacagttcatt

SEQ ID NO: 41763 - DNA, 25 bp, Canis familiaris
acaccgaaatcttctcattgtcttc

SEQ ID NO: 41764 - DNA, 25 bp, Canis familiaris
acacctgaactgttttattgcagta

SEQ ID NO: 41765 - DNA, 25 bp, Canis familiaris
acaccgtcactggacggattcagga

SEQ ID NO: 41766 - DNA, 25 bp, Canis familiaris
acaccgtgcggcggcggatgatgat

SEQ ID NO: 41767 - DNA, 25 bp, Canis familiaris
acagccctgctgttggggttgattt

SEQ ID NO: 41768 - DNA, 25 bp, Canis familiaris
acacctgctggctagcgaggttcat

SEQ ID NO: 41769 - DNA, 25 bp, Canis familiaris
acaccatgcctgtgcgtgcatgcgt

SEQ ID NO: 41770 - DNA, 25 bp, Canis familiaris
acagcctgccagcagcagtgacttt

SEQ ID NO: 41771 - DNA, 25 bp, Canis familiaris
acagccagacacttgattatctttg

SEQ ID NO: 41772 - DNA, 25 bp, Canis familiaris
acactaacctgtatgctcttttgat

SEQ ID NO: 41773 - DNA, 25 bp, Canis familiaris
acacttgccaaggtttcgttggatc

SEQ ID NO: 41774 - DNA, 25 bp, Canis familiaris
acacacgcacgggttgtttatggac

SEQ ID NO: 41775 - DNA, 25 bp, Canis familiaris
aaagccactggatctttttgggcct

SEQ ID NO: 41776 - DNA, 25 bp, Canis familiaris
acaaggcacctgtcactttttacct

SEQ ID NO: 41777 - DNA, 25 bp, Canis familiaris
acacagtcacacacacgtagttgcc

SEQ ID NO: 41778 - DNA, 25 bp, Canis familiaris
acacatatacacacaatgaaatact

SEQ ID NO: 41779 - DNA, 25 bp, Canis familiaris
acacattcacctacttgaaccaatg

SEQ ID NO: 41780 - DNA, 25 bp, Canis familiaris
acagcctctggcatgttggaacaat

SEQ ID NO: 41781 - DNA, 25 bp, Canis familiaris
acagcctgctctctttttaaataca

SEQ ID NO: 41782 - DNA, 25 bp, Canis familiaris
acacctttatacttttagacacaca

SEQ ID NO: 41783 - DNA, 25 bp, Canis familiaris
acacctggatattttctttctccca

SEQ ID NO: 41784 - DNA, 25 bp, Canis familiaris
acaccatgataaaccttggcctgca

SEQ ID NO: 41785 - DNA, 25 bp, Canis familiaris
acagccagatagagcctgattgcct

SEQ ID NO: 41786 - DNA, 25 bp, Canis familiaris
acagctgcagcttggagttgtgggc

SEQ ID NO: 41787 - DNA, 25 bp, Canis familiaris
acactgagcagctggtctggtgggc

SEQ ID NO: 41788 - DNA, 25 bp, Canis familiaris
acactcaggcgtcttcagtgtggcc

SEQ ID NO: 41789 - DNA, 25 bp, Canis familiaris
acaccaggatgttctgtgaatgtgg

SEQ ID NO: 41790 - DNA, 25 bp, Canis familiaris
acacctggcaatccctgatagaggc

SEQ ID NO: 41791 - DNA, 25 bp, Canis familiaris
acacctgtgcagagctcttagtttt

SEQ ID NO: 41792 - DNA, 25 bp, Canis familiaris
acaaagccagcaagcctcaaggtct

SEQ ID NO: 41793 - DNA, 25 bp, Canis familiaris
acagccccaaggactgcagggctcg

SEQ ID NO: 41794 - DNA, 25 bp, Canis familiaris
acacccacaacgaccgtggatcgag

SEQ ID NO: 41795 - DNA, 25 bp, Canis familiaris
acacaaccccgatctgggacagact

SEQ ID NO: 41796 - DNA, 25 bp, Canis familiaris
acaacccacttgtgcattggaactc

SEQ ID NO: 41797 - DNA, 25 bp, Canis familiaris
acaacccccatgcagactggggtca

SEQ ID NO: 41798 - DNA, 25 bp, Canis familiaris
acacaccattccttcaaggtgggaa

SEQ ID NO: 41799 - DNA, 25 bp, Canis familiaris
acaccaattatcacacaatctggaa

SEQ ID NO: 41800 - DNA, 25 bp, Canis familiaris
acacctcttattcacctgccgaagc

SEQ ID NO: 41801 - DNA, 25 bp, Canis familiaris
acaccacctgtatacgctggcagat

SEQ ID NO: 41802 - DNA, 25 bp, Canis familiaris
acaccacctgtgctcatggttggaa

SEQ ID NO: 41803 - DNA, 25 bp, Canis familiaris
acacgacaatgtctcatggcctggg

SEQ ID NO: 41804 - DNA, 25 bp, Canis familiaris
acaccggattcagtgcaggtttgga

SEQ ID NO: 41805 - DNA, 25 bp, Canis familiaris
acaccggattcagtggcattgaatc

SEQ ID NO: 41806 - DNA, 25 bp, Canis familiaris
acaccgtattggagacatgtgtccg

SEQ ID NO: 41807 - DNA, 25 bp, Canis familiaris
acacgaatacggtgatctcgttcga

SEQ ID NO: 41808 - DNA, 25 bp, Canis familiaris
acacgtgttcagaaatgtctccttc

SEQ ID NO: 41809 - DNA, 25 bp, Canis familiaris
acacagcagcacagtaagttccttt

SEQ ID NO: 41810 - DNA, 25 bp, Canis familiaris
acactggcccaggcagagtatctcc

SEQ ID NO: 41811 - DNA, 25 bp, Canis familiaris
acacgagccacattgtggtctctcg

SEQ ID NO: 41812 - DNA, 25 bp, Canis familiaris
acaccacagccattgctgaggcctg

SEQ ID NO: 41813 - DNA, 25 bp, Canis familiaris
acaccacagccattgctgaggcctg

SEQ ID NO: 41814 - DNA, 25 bp, Canis familiaris
acaccgagtgcaattgagtaagctg

SEQ ID NO: 41815 - DNA, 25 bp, Canis familiaris
acaccaagatacagatcatcaactg

SEQ ID NO: 41816 - DNA, 25 bp, Canis familiaris
acaccaaaacagccattcagccgct

SEQ ID NO: 41817 - DNA, 25 bp, Canis familiaris
acaccatccagtggacttcgggctg

SEQ ID NO: 41818 - DNA, 25 bp, Canis familiaris
acacatcaccattaacttcgttcgc

SEQ ID NO: 41819 - DNA, 25 bp, Canis familiaris
acactcctcatctgagggagcttca

SEQ ID NO: 41820 - DNA, 25 bp, Canis familiaris
acactagtctcatgttggctctgaa

SEQ ID NO: 41821 - DNA, 25 bp, Canis familiaris
acacatagtccatatgtccctggca

SEQ ID NO: 41822 - DNA, 25 bp, Canis familiaris
aaataatgccatgattccttccttc

SEQ ID NO: 41823 - DNA, 25 bp, Canis familiaris
aaagaatcgacctggcaatgccttg

SEQ ID NO: 41824 - DNA, 25 bp, Canis familiaris
acaaaatgaagccaagacacccttg

SEQ ID NO: 41825 - DNA, 25 bp, Canis familiaris
acacaggatggaccatctcacccac

SEQ ID NO: 41826 - DNA, 25 bp, Canis familiaris
acaccgaggagcatcactgtcactc

SEQ ID NO: 41827 - DNA, 25 bp, Canis familiaris
acacctacacatctactgtgctctc

SEQ ID NO: 41828 - DNA, 25 bp, Canis familiaris
acacctaactccttgctggtatcat

SEQ ID NO: 41829 - DNA, 25 bp, Canis familiaris
acacgccagcccggattggtaataa

SEQ ID NO: 41830 - DNA, 25 bp, Canis familiaris
acacaacaggtcggtctttgcagta

SEQ ID NO: 41831 - DNA, 25 bp, Canis familiaris
acactcaatggtgtgttattttgca

SEQ ID NO: 41832 - DNA, 25 bp, Canis familiaris
acaccagggtgttttcatttgtgga

SEQ ID NO: 41833 - DNA, 25 bp, Canis familiaris
acacctgggttttctgatgggatgg

SEQ ID NO: 41834 - DNA, 25 bp, Canis familiaris
acacggaggtgtcgggtgaagatgg

SEQ ID NO: 41835 - DNA, 25 bp, Canis familiaris
acaccgggtgtgtgtgggactcgtg

SEQ ID NO: 41836 - DNA, 25 bp, Canis familiaris
acaccgggctctcagagatgcgtct

SEQ ID NO: 41837 - DNA, 25 bp, Canis familiaris
acagccggagcccgagagcaagtac

SEQ ID NO: 41838 - DNA, 25 bp, Canis familiaris
acagccccaccacgaagaagaaatg

SEQ ID NO: 41839 - DNA, 25 bp, Canis familiaris
acactcccccagcggagagcatgat

SEQ ID NO: 41840 - DNA, 25 bp, Canis familiaris
aactcgttccacgtatcgcgtgatg

SEQ ID NO: 41841 - DNA, 25 bp, Canis familiaris
acactcttctccagtatcacgtgga

SEQ ID NO: 41842 - DNA, 25 bp, Canis familiaris
acaactttccagcagtacatttgaa

SEQ ID NO: 41843 - DNA, 25 bp, Canis familiaris
taccaagtcccagcccaacttggac

SEQ ID NO: 41844 - DNA, 25 bp, Canis familiaris
taccaaacgaccgccagagtagggt

SEQ ID NO: 41845 - DNA, 25 bp, Canis familiaris
acaccaaaaccacccagatcgagga

SEQ ID NO: 41846 - DNA, 25 bp, Canis familiaris
acaccaaacccaacaacaggcaggc

SEQ ID NO: 41847 - DNA, 25 bp, Canis familiaris
acacccgccactaaactcaggaggc

SEQ ID NO: 41848 - DNA, 25 bp, Canis familiaris
acacctctcctctaagacaagcaag

SEQ ID NO: 41849 - DNA, 25 bp, Canis familiaris
acaccaccccaattgccaatgggtt

SEQ ID NO: 41850 - DNA, 25 bp, Canis familiaris
acaccaccatcctgtgtgcaggggt

SEQ ID NO: 41851 - DNA, 25 bp, Canis familiaris
acacagcacaatgccgggcactgag

SEQ ID NO: 41852 - DNA, 25 bp, Canis familiaris
acacagcatttcggtggggctatcc

SEQ ID NO: 41853 - DNA, 25 bp, Canis familiaris
acacagtgttgtctggtggtaccac

SEQ ID NO: 41854 - DNA, 25 bp, Canis familiaris
acacagattgtatcggggaacctcc

SEQ ID NO: 41855 - DNA, 25 bp, Canis familiaris
acacatgaagacaacgccggaacgt

SEQ ID NO: 41856 - DNA, 25 bp, Canis familiaris
acaagagagctcaaagtcgggaccg

SEQ ID NO: 41857 - DNA, 25 bp, Canis familiaris
acacaactggcgagcttgcaggccc

SEQ ID NO: 41858 - DNA, 25 bp, Canis familiaris
acaccagatgccaggtatgaggcct

SEQ ID NO: 41859 - DNA, 25 bp, Canis familiaris
acagccagcgtcaaggaagcggccg

SEQ ID NO: 41860 - DNA, 25 bp, Canis familiaris
acagcctgagccaaggggcagggcc

SEQ ID NO: 41861 - DNA, 25 bp, Canis familiaris
acagcctgtgtaacgagaagggcac

SEQ ID NO: 41862 - DNA, 25 bp, Canis familiaris
acagccgcctctacggaaggaatcc

SEQ ID NO: 41863 - DNA, 25 bp, Canis familiaris
acacggggctgcaggaacacaatca

SEQ ID NO: 41864 - DNA, 25 bp, Canis familiaris
acacgcgtgtgcgtagtggacccac

SEQ ID NO: 41865 - DNA, 25 bp, Canis familiaris
acactcggcgccaagagcgcaacac

SEQ ID NO: 41866 - DNA, 25 bp, Canis familiaris
acacctggagctcctaccagaacat

SEQ ID NO: 41867 - DNA, 25 bp, Canis familiaris
acacactgggctcctaaaagcatca

SEQ ID NO: 41868 - DNA, 25 bp, Canis familiaris
acacttgaagtaataaaacaggctt

SEQ ID NO: 41869 - DNA, 25 bp, Canis familiaris
acactccaattagtaaagacaaatt

SEQ ID NO: 41870 - DNA, 25 bp, Canis familiaris
acactcaaattagtaaagaccaatt

SEQ ID NO: 41871 - DNA, 25 bp, Canis familiaris
acaccaagcaaagtacacacacaca

SEQ ID NO: 41872 - DNA, 25 bp, Canis familiaris
acaccaccacgaggagcacagagag

SEQ ID NO: 41873 - DNA, 25 bp, Canis familiaris
acaccctcctgaagcagcaatcggg

SEQ ID NO: 41874 - DNA, 25 bp, Canis familiaris
acaccctcaaaacgcacacttgatt

SEQ ID NO: 41875 - DNA, 25 bp, Canis familiaris
acacacgctacatcaaggctttggt

SEQ ID NO: 41876 - DNA, 25 bp, Canis familiaris
acagccactactaccagactattga

SEQ ID NO: 41877 - DNA, 25 bp, Canis familiaris
acagccacgcacaccatagtagtga

SEQ ID NO: 41878 - DNA, 25 bp, Canis familiaris
acacgcagccacaccatatatatat

SEQ ID NO: 41879 - DNA, 25 bp, Canis familiaris
acaccccttctgtcacattgaatga

SEQ ID NO: 41880 - DNA, 25 bp, Canis familiaris
acactcatccttgagctcttgagga

SEQ ID NO: 41881 - DNA, 25 bp, Canis familiaris
acaccacctgcaggagcttgaggtc

SEQ ID NO: 41882 - DNA, 25 bp, Canis familiaris
acaagcacccacaacattagaggca

SEQ ID NO: 41883 - DNA, 25 bp, Canis familiaris
acacaaacccaaatttagatgctca

SEQ ID NO: 41884 - DNA, 25 bp, Canis familiaris
acaccaccactttttattatgccat

SEQ ID NO: 41885 - DNA, 25 bp, Canis familiaris
acacgtgacctttttacatcacctt

SEQ ID NO: 41886 - DNA, 25 bp, Canis familiaris
acacgtatcctacatgccatatgca

SEQ ID NO: 41887 - DNA, 25 bp, Canis familiaris
acacgaacactacctccaattgatg

SEQ ID NO: 41888 - DNA, 25 bp, Canis familiaris
acactgagcatctccctcacaattt

SEQ ID NO: 41889 - DNA, 25 bp, Canis familiaris
acactgatcatcttccttttttgtc

SEQ ID NO: 41890 - DNA, 25 bp, Canis familiaris
acactgtctgatacacctattatgt

SEQ ID NO: 41891 - DNA, 25 bp, Canis familiaris
acacatgtggctacagctctctgtt

SEQ ID NO: 41892 - DNA, 25 bp, Canis familiaris
acacatctgagctctgagccgttcc

SEQ ID NO: 41893 - DNA, 25 bp, Canis familiaris
acaagctgctgctctacagggtggt

SEQ ID NO: 41894 - DNA, 25 bp, Canis familiaris
acacctgccaccaacggggcagaag

SEQ ID NO: 41895 - DNA, 25 bp, Canis familiaris
acacgccccgcttggggcagaactg

SEQ ID NO: 41896 - DNA, 25 bp, Canis familiaris
acacatggcctccttgaggcccaat

SEQ ID NO: 41897 - DNA, 25 bp, Canis familiaris
acacattctctcagtggtacacaat

SEQ ID NO: 41898 - DNA, 25 bp, Canis familiaris
acacattctctgtggtttccaagaa

SEQ ID NO: 41899 - DNA, 25 bp, Canis familiaris
acactgatccgacgcctttgaaaag

SEQ ID NO: 41900 - DNA, 25 bp, Canis familiaris
acactgggctttccgttacaaagat

SEQ ID NO: 41901 - DNA, 25 bp, Canis familiaris
acactggttttgccggtagagcagc

SEQ ID NO: 41902 - DNA, 25 bp, Canis familiaris
acacggtcttgcaggaatggccact

SEQ ID NO: 41903 - DNA, 25 bp, Canis familiaris
acacggtgctgggggcgtgagcgtt

SEQ ID NO: 41904 - DNA, 25 bp, Canis familiaris
acactgaggcgtccgggagagcgct

SEQ ID NO: 41905 - DNA, 25 bp, Canis familiaris
acacgggccttcagagaggcctgcc

SEQ ID NO: 41906 - DNA, 25 bp, Canis familiaris
aaagcggccgccaagaaggactgac

SEQ ID NO: 41907 - DNA, 25 bp, Canis familiaris
aagaaggcggccaaggccggcggct

SEQ ID NO: 41908 - DNA, 25 bp, Canis familiaris
acaaagcgggcacaggcctggtgct

SEQ ID NO: 41909 - DNA, 25 bp, Canis familiaris
acacaggggacacagcatcacaggt

SEQ ID NO: 41910 - DNA, 25 bp, Canis familiaris
acacaggggacacagcatcacaggt

SEQ ID NO: 41911 - DNA, 25 bp, Canis familiaris
acacaggggacacagcatcacaggt

SEQ ID NO: 41912 - DNA, 25 bp, Canis familiaris
acacaggggacacagcatcacaggt

SEQ ID NO: 41913 - DNA, 25 bp, Canis familiaris
acacaggggacacagcatcacaggt

SEQ ID NO: 41914 - DNA, 25 bp, Canis familiaris
acacaggggacacagcatcacaggt

SEQ ID NO: 41915 - DNA, 25 bp, Canis familiaris
acacgctggggcccatgcagaagga

SEQ ID NO: 41916 - DNA, 25 bp, Canis familiaris
acacctgtctggctatgcgaggttc

SEQ ID NO: 41917 - DNA, 25 bp, Canis familiaris
acaactttggcattgtggaagggct

SEQ ID NO: 41918 - DNA, 25 bp, Canis familiaris
acactttttccccagcaaggtgata

SEQ ID NO: 41919 - DNA, 25 bp, Canis familiaris
acaccttcttcgatcaccaagatca

SEQ ID NO: 41920 - DNA, 25 bp, Canis familiaris
acacacatgatttaactaccaaata

SEQ ID NO: 41921 - DNA, 25 bp, Canis familiaris
acacacatggcgaaaaaccaaacgg

SEQ ID NO: 41922 - DNA, 25 bp, Canis familiaris
acaccagcacgaaaaaccagcagag

SEQ ID NO: 41923 - DNA, 25 bp, Canis familiaris
acacagcacctgaggatacccaagt

SEQ ID NO: 41924 - DNA, 25 bp, Canis familiaris
acaccactctggcagagacgcctgc

SEQ ID NO: 41925 - DNA, 25 bp, Canis familiaris
acacctgcatttcagcagtgcctcc

SEQ ID NO: 41926 - DNA, 25 bp, Canis familiaris
acacctttgcataagaggccagtgc

SEQ ID NO: 41927 - DNA, 25 bp, Canis familiaris
acaccttctacaatgagctgcgtgt

SEQ ID NO: 41928 - DNA, 25 bp, Canis familiaris
acaccttctacaatgagctgcgtgt

SEQ ID NO: 41929 - DNA, 25 bp, Canis familiaris
acaccttcttcagtgagacgggcgc

SEQ ID NO: 41930 - DNA, 25 bp, Canis familiaris
acacccaatctacagacgtgcgctg

SEQ ID NO: 41931 - DNA, 25 bp, Canis familiaris
acacccattttgggggctcaatgag

SEQ ID NO: 41932 - DNA, 25 bp, Canis familiaris
acacttcagtcttaatggtctacgg

SEQ ID NO: 41933 - DNA, 25 bp, Canis familiaris
acacctcaggcatacatggtcaccc

SEQ ID NO: 41934 - DNA, 25 bp, Canis familiaris
acaccctagcaatgtgtgactcccc

SEQ ID NO: 41935 - DNA, 25 bp, Canis familiaris
acacctctactgtagtgtttcctac

SEQ ID NO: 41936 - DNA, 25 bp, Canis familiaris
acacgttagctattgatattcttta

SEQ ID NO: 41937 - DNA, 25 bp, Canis familiaris
acacgtgggcgattggatgctcttt

SEQ ID NO: 41938 - DNA, 25 bp, Canis familiaris
acacagtatgggtgctgcctctgat

SEQ ID NO: 41939 - DNA, 25 bp, Canis familiaris
acacagggacgaagctgcccttctt

SEQ ID NO: 41940 - DNA, 25 bp, Canis familiaris
acactgaggaagggctgccacctgc

SEQ ID NO: 41941 - DNA, 25 bp, Canis familiaris
acactggatgggggcatcgggctgc

SEQ ID NO: 41942 - DNA, 25 bp, Canis familiaris
acacctgtttgctgatcggagctgt

SEQ ID NO: 41943 - DNA, 25 bp, Canis familiaris
acactgttcttgtagacggctgctc

SEQ ID NO: 41944 - DNA, 25 bp, Canis familiaris
acacgttttaaaatgcctgtgcatc

SEQ ID NO: 41945 - DNA, 25 bp, Canis familiaris
acaccctattggaattctgcttcat

SEQ ID NO: 41946 - DNA, 25 bp, Canis familiaris
acacactttttgatactgctaactt

SEQ ID NO: 41947 - DNA, 25 bp, Canis familiaris
acaactggtcctcttctataacatg

SEQ ID NO: 41948 - DNA, 25 bp, Canis familiaris
acacacttcttcagatgtttgaccg

SEQ ID NO: 41949 - DNA, 25 bp, Canis familiaris
acacctcacatactgctggtttgac

SEQ ID NO: 41950 - DNA, 25 bp, Canis familiaris
acacaggcaatgtctctggattcag

SEQ ID NO: 41951 - DNA, 25 bp, Canis familiaris
acaacagacagccatcaggaataca

SEQ ID NO: 41952 - DNA, 25 bp, Canis familiaris
acacaagccagaccaaaatataggg

SEQ ID NO: 41953 - DNA, 25 bp, Canis familiaris
acaacactcccctcagattgaggag

SEQ ID NO: 41954 - DNA, 25 bp, Canis familiaris
acaaatccccactttactgtgtctg

SEQ ID NO: 41955 - DNA, 25 bp, Canis familiaris
acacacaccctttttaagtgattgg

SEQ ID NO: 41956 - DNA, 25 bp, Canis familiaris
acaagcccctgtttcagcgggggag

SEQ ID NO: 41957 - DNA, 25 bp, Canis familiaris
acactgccccagacttcctggggtg

SEQ ID NO: 41958 - DNA, 25 bp, Canis familiaris
acactgtgcccatctacgaggggta

SEQ ID NO: 41959 - DNA, 25 bp, Canis familiaris
acactgtgcccatctacgagggcta

SEQ ID NO: 41960 - DNA, 25 bp, Canis familiaris
acacctgcctgctgtataacgagta

SEQ ID NO: 41961 - DNA, 25 bp, Canis familiaris
acaccagccgcaaggacaacatgtt

SEQ ID NO: 41962 - DNA, 25 bp, Canis familiaris
acactcccatgaagtaacactgatt

SEQ ID NO: 41963 - DNA, 25 bp, Canis familiaris
acacctacataactggacctgcatc

SEQ ID NO: 41964 - DNA, 25 bp, Canis familiaris
acacttgactaattaagtccatgga

SEQ ID NO: 41965 - DNA, 25 bp, Canis familiaris
acacgtgagaacttttgccctgaga

SEQ ID NO: 41966 - DNA, 25 bp, Canis familiaris
acacagtaaggcgaattgcccctga

SEQ ID NO: 41967 - DNA, 25 bp, Canis familiaris
acactggaaggtgacgacctcatcc

SEQ ID NO: 41968 - DNA, 25 bp, Canis familiaris
acactgagagaatctcctgacctcc

SEQ ID NO: 41969 - DNA, 25 bp, Canis familiaris
acactgagagaatctcctgacctcc

SEQ ID NO: 41970 - DNA, 25 bp, Canis familiaris
acacatgagaacactggtggcccaa

SEQ ID NO: 41971 - DNA, 25 bp, Canis familiaris
acactgggcatgagttgtccaccac

SEQ ID NO: 41972 - DNA, 25 bp, Canis familiaris
acacagggcaattggcccgagcctc

SEQ ID NO: 41973 - DNA, 25 bp, Canis familiaris
acacagaggctgatacccaacctgg

SEQ ID NO: 41974 - DNA, 25 bp, Canis familiaris
acactatagctgactcagcctctcc

SEQ ID NO: 41975 - DNA, 25 bp, Canis familiaris
acacgattgtgtagctcgtctctcc

SEQ ID NO: 41976 - DNA, 25 bp, Canis familiaris
acacgcatttggtctcgtagtctat

SEQ ID NO: 41977 - DNA, 25 bp, Canis familiaris
acacgaagtgtgtctcatttgagaa

SEQ ID NO: 41978 - DNA, 25 bp, Canis familiaris
acacgaggctgtacttttaagactg

SEQ ID NO: 41979 - DNA, 25 bp, Canis familiaris
acacggtgatgatccttttgagact

SEQ ID NO: 41980 - DNA, 25 bp, Canis familiaris
acaccctgataaacttttcactctt

SEQ ID NO: 41981 - DNA, 25 bp, Canis familiaris
acacacctataaactctttaactct

SEQ ID NO: 41982 - DNA, 25 bp, Canis familiaris
acacagatttagaacccttgaagct

SEQ ID NO: 41983 - DNA, 25 bp, Canis familiaris
acaccgatctttagccacgagaact

SEQ ID NO: 41984 - DNA, 25 bp, Canis familiaris
acacctgatcatttgtgaaaggcaa

SEQ ID NO: 41985 - DNA, 25 bp, Canis familiaris
acacaagacaaggtgacaagaagca

SEQ ID NO: 41986 - DNA, 25 bp, Canis familiaris
acaaaatgagactttcacatggaga

SEQ ID NO: 41987 - DNA, 25 bp, Canis familiaris
acacaaattgtctactcaagtatga

SEQ ID NO: 41988 - DNA, 25 bp, Canis familiaris
acacaaattgtttattggcctgttt

SEQ ID NO: 41989 - DNA, 25 bp, Canis familiaris
acaaaatggtcttttccttgtctgt

SEQ ID NO: 41990 - DNA, 25 bp, Canis familiaris
acaacaatggtctacgacgctttta

SEQ ID NO: 41991 - DNA, 25 bp, Canis familiaris
acaaagggttcatgccttcctttct

SEQ ID NO: 41992 - DNA, 25 bp, Canis familiaris
aaatccaggttatccgtactcttct

SEQ ID NO: 41993 - DNA, 25 bp, Canis familiaris
aagtacggccaatccggcagatttt

SEQ ID NO: 41994 - DNA, 25 bp, Canis familiaris
aagtaccggcaggacctgacggtgc

SEQ ID NO: 41995 - DNA, 25 bp, Canis familiaris
acacaaccggatgtcttgattgatt

SEQ ID NO: 41996 - DNA, 25 bp, Canis familiaris
acacagacgcaaaccgatgtgggtt

SEQ ID NO: 41997 - DNA, 25 bp, Canis familiaris
acaccctgcagcaccaagtgaagtc

SEQ ID NO: 41998 - DNA, 25 bp, Canis familiaris
acactcctgcttccagacaacaagt

SEQ ID NO: 41999 - DNA, 25 bp, Canis familiaris
acaccctgagtggctgacatcacaa

SEQ ID NO: 42000 - DNA, 25 bp, Canis familiaris
acaccctgacagggaccagcagaac

SEQ ID NO: 42001 - DNA, 25 bp, Canis familiaris
acacctcgagactgtccagtgacgc

SEQ ID NO: 42002 - DNA, 25 bp, Canis familiaris
acacccggacatattcctggcagaa

SEQ ID NO: 42003 - DNA, 25 bp, Canis familiaris
acacctcagggtattgctcagtagc

SEQ ID NO: 42004 - DNA, 25 bp, Canis familiaris
acacctgggtgtgtacacatgtctg

SEQ ID NO: 42005 - DNA, 25 bp, Canis familiaris
acacagccagggagaacacagccgg

SEQ ID NO: 42006 - DNA, 25 bp, Canis familiaris
acacactaggtgggtacagcaagcc

SEQ ID NO: 42007 - DNA, 25 bp, Canis familiaris
acacactgcggggagatcctcaaga

SEQ ID NO: 42008 - DNA, 25 bp, Canis familiaris
acacacttcgagacaacctgcaatg

SEQ ID NO: 42009 - DNA, 25 bp, Canis familiaris
acacacagatgaagccaatcctcct

SEQ ID NO: 42010 - DNA, 25 bp, Canis familiaris
acacacacatgacactaactcctta

SEQ ID NO: 42011 - DNA, 25 bp, Canis familiaris
acacacaggtaatacacggttatac

SEQ ID NO: 42012 - DNA, 25 bp, Canis familiaris
acacacatgacttgaaagagtggtc

SEQ ID NO: 42013 - DNA, 25 bp, Canis familiaris
acactaagcggatgtgcagcggccc

SEQ ID NO: 42014 - DNA, 25 bp, Canis familiaris
acactaccagcagaaacgaggcctc

SEQ ID NO: 42015 - DNA, 25 bp, Canis familiaris
acacccccaagatacggagacatcc

SEQ ID NO: 42016 - DNA, 25 bp, Canis familiaris
acaactgccacctgaacgagaacat

SEQ ID NO: 42017 - DNA, 25 bp, Canis familiaris
acaacctgcaactgtaaaacatgtc

SEQ ID NO: 42018 - DNA, 25 bp, Canis familiaris
acacacaccgcatcaataaaccatt

SEQ ID NO: 42019 - DNA, 25 bp, Canis familiaris
acacctccatcatcatactatgcaa

SEQ ID NO: 42020 - DNA, 25 bp, Canis familiaris
acacgctctatctgatgctcgatgt

SEQ ID NO: 42021 - DNA, 25 bp, Canis familiaris
acactgctcttctcatcttaggagt

SEQ ID NO: 42022 - DNA, 25 bp, Canis familiaris
acacctctactccatcttgtgggag

SEQ ID NO: 42023 - DNA, 25 bp, Canis familiaris
acaccctgcactgcactcagggagg

SEQ ID NO: 42024 - DNA, 25 bp, Canis familiaris
acaccctcactcacaagttgtgtgg

SEQ ID NO: 42025 - DNA, 25 bp, Canis familiaris
acacacctactcagcagagtctcct

SEQ ID NO: 42026 - DNA, 25 bp, Canis familiaris
acacaactctctatggaggcccttt

SEQ ID NO: 42027 - DNA, 25 bp, Canis familiaris
acacaaccatgcggggtgtccgcct

SEQ ID NO: 42028 - DNA, 25 bp, Canis familiaris
acactgaggaccaggtggtctcctg

SEQ ID NO: 42029 - DNA, 25 bp, Canis familiaris
acactgaggaccaggttgtctcctg

SEQ ID NO: 42030 - DNA, 25 bp, Canis familiaris
acactacatcagtctgggttgtcct

SEQ ID NO: 42031 - DNA, 25 bp, Canis familiaris
acaccccagccatgtatgtggccat

SEQ ID NO: 42032 - DNA, 25 bp, Canis familiaris
acacccaggccatgaaggagatgca

SEQ ID NO: 42033 - DNA, 25 bp, Canis familiaris
acacccaggccatgaaggagatgca

SEQ ID NO: 42034 - DNA, 25 bp, Canis familiaris
acacccgcgacagggatggagaccc

SEQ ID NO: 42035 - DNA, 25 bp, Canis familiaris
acacacagggccgggagagggccgc

SEQ ID NO: 42036 - DNA, 25 bp, Canis familiaris
acacataccaccgagggaggacttc

SEQ ID NO: 42037 - DNA, 25 bp, Canis familiaris
acacacaccactagtcggggtgtgc

SEQ ID NO: 42038 - DNA, 25 bp, Canis familiaris
acacccagcttgaggaggggctgct

SEQ ID NO: 42039 - DNA, 25 bp, Canis familiaris
acacccttgctgacaaagtagacct

SEQ ID NO: 42040 - DNA, 25 bp, Canis familiaris
acacacctgtgtccaagttagaact

SEQ ID NO: 42041 - DNA, 25 bp, Canis familiaris
acaagcactgttccagagggaagag

SEQ ID NO: 42042 - DNA, 25 bp, Canis familiaris
acaaagcacttgtcagaggaagagt

SEQ ID NO: 42043 - DNA, 25 bp, Canis familiaris
acaagctcccagtctgaggaagatt

SEQ ID NO: 42044 - DNA, 25 bp, Canis familiaris
acaactactcggaggccgagatcaa

SEQ ID NO: 42045 - DNA, 25 bp, Canis familiaris
acacactacctgcaatggcctgccc

SEQ ID NO: 42046 - DNA, 25 bp, Canis familiaris
acacacgcactctcaagtgcaatgc

SEQ ID NO: 42047 - DNA, 25 bp, Canis familiaris
acaactgtgctcccacagtcatcat

SEQ ID NO: 42048 - DNA, 25 bp, Canis familiaris
acaactgtcctcgactacataaagt

SEQ ID NO: 42049 - DNA, 25 bp, Canis familiaris
acaacgttatctccagacatgaatg

SEQ ID NO: 42050 - DNA, 25 bp, Canis familiaris
acaacgttactccagacatggagga

SEQ ID NO: 42051 - DNA, 25 bp, Canis familiaris
acaaggttcaccaacacggtggttg

SEQ ID NO: 42052 - DNA, 25 bp, Canis familiaris
acactttccccaacacatagtttat

SEQ ID NO: 42053 - DNA, 25 bp, Canis familiaris
acaacaggccccaactgctaatttt

SEQ ID NO: 42054 - DNA, 25 bp, Canis familiaris
acacaggagcccaaaatctgtatat

SEQ ID NO: 42055 - DNA, 25 bp, Canis familiaris
acaagagggcaggacctgcttaatg

SEQ ID NO: 42056 - DNA, 25 bp, Canis familiaris
acaacaggaccgtccagctctaaga

SEQ ID NO: 42057 - DNA, 25 bp, Canis familiaris
acaacaacaccgtggcacttcagaa

SEQ ID NO: 42058 - DNA, 25 bp, Canis familiaris
acacaggaaccagggcaccctatga

SEQ ID NO: 42059 - DNA, 25 bp, Canis familiaris
acacggaaccacgcagactttggag

SEQ ID NO: 42060 - DNA, 25 bp, Canis familiaris
acacgctaacccaggattatcgatg

SEQ ID NO: 42061 - DNA, 25 bp, Canis familiaris
acactggaacccttgaagaaggatg

SEQ ID NO: 42062 - DNA, 25 bp, Canis familiaris
acaatgggcatcagttatacaaggg

SEQ ID NO: 42063 - DNA, 25 bp, Canis familiaris
acaacgtgaattttgcaaacagggg

SEQ ID NO: 42064 - DNA, 25 bp, Canis familiaris
aacccagaactaatctagtaggctg

SEQ ID NO: 42065 - DNA, 25 bp, Canis familiaris
acaaccgaacataatccgttagtgt

SEQ ID NO: 42066 - DNA, 25 bp, Canis familiaris
acaaccctcaattgaccgttttgct

SEQ ID NO: 42067 - DNA, 25 bp, Canis familiaris
acaactctctaaagatcctatttgc

SEQ ID NO: 42068 - DNA, 25 bp, Canis familiaris
acacgctgctctcagagcatctttc

SEQ ID NO: 42069 - DNA, 25 bp, Canis familiaris
acacagctctctcgagattgcctag

SEQ ID NO: 42070 - DNA, 25 bp, Canis familiaris
acacagcatcacaggtgcggctgct

SEQ ID NO: 42071 - DNA, 25 bp, Canis familiaris
acacagcatcacaggtgcggctgct

SEQ ID NO: 42072 - DNA, 25 bp, Canis familiaris
acacagcatcacaggtgcggctgct

SEQ ID NO: 42073 - DNA, 25 bp, Canis familiaris
acacagcatcacaggtgcggctgct

SEQ ID NO: 42074 - DNA, 25 bp, Canis familiaris
acacaaactctgtatgcggatgttc

SEQ ID NO: 42075 - DNA, 25 bp, Canis familiaris
acacaacagtcttacacgcatttgg

SEQ ID NO: 42076 - DNA, 25 bp, Canis familiaris
acacaaacctctcaagagttggggt

SEQ ID NO: 42077 - DNA, 25 bp, Canis familiaris
acacgaactggtcaaggggccgaag

SEQ ID NO: 42078 - DNA, 25 bp, Canis familiaris
acaactatctggccgaacggtccga

SEQ ID NO: 42079 - DNA, 25 bp, Canis familiaris
acaactactgtgtgacggtgtccgc

SEQ ID NO: 42080 - DNA, 25 bp, Canis familiaris
acacaccactagtcggggtgtgccc

SEQ ID NO: 42081 - DNA, 25 bp, Canis familiaris
acacagaaatggtggggaacccgag

SEQ ID NO: 42082 - DNA, 25 bp, Canis familiaris
acacagaacgggcggggtggcctga

SEQ ID NO: 42083 - DNA, 25 bp, Canis familiaris
acaagaacatggaaggggcggcggc

SEQ ID NO: 42084 - DNA, 25 bp, Canis familiaris
acacaggactggaggttcaggccgc

SEQ ID NO: 42085 - DNA, 25 bp, Canis familiaris
acacaggcacgtcggtggtaggccc

SEQ ID NO: 42086 - DNA, 25 bp, Canis familiaris
acaagcacaccacagggttggtctt

SEQ ID NO: 42087 - DNA, 25 bp, Canis familiaris
acaagacaccggcgagtgtgcgggc

SEQ ID NO: 42088 - DNA, 25 bp, Canis familiaris
acactgagaccgagcggttgctgtg

SEQ ID NO: 42089 - DNA, 25 bp, Canis familiaris
acactgcagttccatctgggtttta

SEQ ID NO: 42090 - DNA, 25 bp, Canis familiaris
acactgagtgatgcctggcctttct

SEQ ID NO: 42091 - DNA, 25 bp, Canis familiaris
acactggtattaagccttttctcca

SEQ ID NO: 42092 - DNA, 25 bp, Canis familiaris
aacaggtagtagcacttttccaaag

SEQ ID NO: 42093 - DNA, 25 bp, Canis familiaris
aaatgcccagtacactttatatctc

SEQ ID NO: 42094 - DNA, 25 bp, Canis familiaris
aaattgccaactattatgaactcca

SEQ ID NO: 42095 - DNA, 25 bp, Canis familiaris
acaacttgaaatctctggaagccca

SEQ ID NO: 42096 - DNA, 25 bp, Canis familiaris
acaaactacctcttgctgagctagc

SEQ ID NO: 42097 - DNA, 25 bp, Canis familiaris
acaaacttccttcctaatacagcac

SEQ ID NO: 42098 - DNA, 25 bp, Canis familiaris
acaaccttccctgtacaacagtctt

SEQ ID NO: 42099 - DNA, 25 bp, Canis familiaris
aaacactgtgctctttaaacttctt

SEQ ID NO: 42100 - DNA, 25 bp, Canis familiaris
acaaactgccatctttatacttcct

SEQ ID NO: 42101 - DNA, 25 bp, Canis familiaris
acaactgctccaagttttacccagg

SEQ ID NO: 42102 - DNA, 25 bp, Canis familiaris
aaacagttcagttctggtagaaaga

SEQ ID NO: 42103 - DNA, 25 bp, Canis familiaris
aacctgtcggagtcggaagatgaag

SEQ ID NO: 42104 - DNA, 25 bp, Canis familiaris
aacttgatccggtccgggctggatg

SEQ ID NO: 42105 - DNA, 25 bp, Canis familiaris
aaattgtacttaccgtgagttcagt

SEQ ID NO: 42106 - DNA, 25 bp, Canis familiaris
aaatttcctacatccagaaccagtc

SEQ ID NO: 42107 - DNA, 25 bp, Canis familiaris
acaaatggccaagtaccgcaatccc

SEQ ID NO: 42108 - DNA, 25 bp, Canis familiaris
acaaagtgaacaggtcccctactcg

SEQ ID NO: 42109 - DNA, 25 bp, Canis familiaris
acaacctaagggacactcacgactc

SEQ ID NO: 42110 - DNA, 25 bp, Canis familiaris
acacccattcagtttactcctgaga

SEQ ID NO: 42111 - DNA, 25 bp, Canis familiaris
acacccatgtgagttctagcttctt

SEQ ID NO: 42112 - DNA, 25 bp, Canis familiaris
acacgtcttgtggtgaagcattctg

SEQ ID NO: 42113 - DNA, 25 bp, Canis familiaris
acacagcttctggtgtcacagcttc

SEQ ID NO: 42114 - DNA, 25 bp, Canis familiaris
acacagttcttgatactcttgccac

SEQ ID NO: 42115 - DNA, 25 bp, Canis familiaris
acactgtccttattactcctggagg

SEQ ID NO: 42116 - DNA, 25 bp, Canis familiaris
acacgtccttcatgttccagagggt

SEQ ID NO: 42117 - DNA, 25 bp, Canis familiaris
acaacctcctcagatctccagagga

SEQ ID NO: 42118 - DNA, 25 bp, Canis familiaris
acacattatccctctctcaagaaag

SEQ ID NO: 42119 - DNA, 25 bp, Canis familiaris
acacatgtgatctgtatttctagaa

SEQ ID NO: 42120 - DNA, 25 bp, Canis familiaris
acacacatatatagttttatagtta

SEQ ID NO: 42121 - DNA, 25 bp, Canis familiaris
acacacattcatacctatcagaagg

SEQ ID NO: 42122 - DNA, 25 bp, Canis familiaris
acacacattctcagatctccatttg

SEQ ID NO: 42123 - DNA, 25 bp, Canis familiaris
acacagattatctagattccatatc

SEQ ID NO: 42124 - DNA, 25 bp, Canis familiaris
acacaggctgactgacctatacaga

SEQ ID NO: 42125 - DNA, 25 bp, Canis familiaris
caaaggatgacagaccgacccaaac

SEQ ID NO: 42126 - DNA, 25 bp, Canis familiaris
acaaggaactggtccgcaaccaaga

SEQ ID NO: 42127 - DNA, 25 bp, Canis familiaris
acaaggaactaccggtacaccagat

SEQ ID NO: 42128 - DNA, 25 bp, Canis familiaris
acacatgcgaactcgatggtcaccc

SEQ ID NO: 42129 - DNA, 25 bp, Canis familiaris
acacatctccattgatcgtggtccc

SEQ ID NO: 42130 - DNA, 25 bp, Canis familiaris
aaattgccagcattctaagatcgta

SEQ ID NO: 42131 - DNA, 25 bp, Canis familiaris
aagaatcggaaccggatccgtcgcg

SEQ ID NO: 42132 - DNA, 25 bp, Canis familiaris
acaaacccaacctgtgccagggagc

SEQ ID NO: 42133 - DNA, 25 bp, Canis familiaris
acaaactccaacactggctattgta

SEQ ID NO: 42134 - DNA, 25 bp, Canis familiaris
acaagcacatcaaacccgtgatttt

SEQ ID NO: 42135 - DNA, 25 bp, Canis familiaris
acaacactataactcatgcctgaat

SEQ ID NO: 42136 - DNA, 25 bp, Canis familiaris
acacacaaaatactcatactcacat

SEQ ID NO: 42137 - DNA, 25 bp, Canis familiaris
acaatcacagcgttgtctaccatct

SEQ ID NO: 42138 - DNA, 25 bp, Canis familiaris
acactgctccgctgggaaatctaag

SEQ ID NO: 42139 - DNA, 25 bp, Canis familiaris
acacacatactggggagcaaagctg

SEQ ID NO: 42140 - DNA, 25 bp, Canis familiaris
acacacaattgcatgtaaaactgat

SEQ ID NO: 42141 - DNA, 25 bp, Canis familiaris
acactgcgagtgttgtacaacctgt

SEQ ID NO: 42142 - DNA, 25 bp, Canis familiaris
acactcaagttgcattcagactcta

SEQ ID NO: 42143 - DNA, 25 bp, Canis familiaris
acactcaagatgactactgcgcctt

SEQ ID NO: 42144 - DNA, 25 bp, Canis familiaris
acactgagcaagagaggccctatcc

SEQ ID NO: 42145 - DNA, 25 bp, Canis familiaris
acactgctgggtgaagccactgtcc

SEQ ID NO: 42146 - DNA, 25 bp, Canis familiaris
acacacaagagataagacacgtcct

SEQ ID NO: 42147 - DNA, 25 bp, Canis familiaris
acacagcattaatatttcactttct

SEQ ID NO: 42148 - DNA, 25 bp, Canis familiaris
acacaaacacatactttatttattt

SEQ ID NO: 42149 - DNA, 25 bp, Canis familiaris
acacacaacatctatcatccttttc

SEQ ID NO: 42150 - DNA, 25 bp, Canis familiaris
acacatctagcagtcagttcttgtt

SEQ ID NO: 42151 - DNA, 25 bp, Canis familiaris
acacttccagtactgtctggggctg

SEQ ID NO: 42152 - DNA, 25 bp, Canis familiaris
acacttagccgctgtctcgccgtgt

SEQ ID NO: 42153 - DNA, 25 bp, Canis familiaris
acactttcactgtttcctcaaggta

SEQ ID NO: 42154 - DNA, 25 bp, Canis familiaris
acactgttgacttctgttgccagct

SEQ ID NO: 42155 - DNA, 25 bp, Canis familiaris
acactggtatcttctgactgtactt

SEQ ID NO: 42156 - DNA, 25 bp, Canis familiaris
acactggattgcaactctattacct

SEQ ID NO: 42157 - DNA, 25 bp, Canis familiaris
acactggaagtatttgaggagctct

SEQ ID NO: 42158 - DNA, 25 bp, Canis familiaris
acacagtgaactttggggacttctg

SEQ ID NO: 42159 - DNA, 25 bp, Canis familiaris
acacagtgacacttttagatgttaa

SEQ ID NO: 42160 - DNA, 25 bp, Canis familiaris
acacatgtgtcattctgttgatatt

SEQ ID NO: 42161 - DNA, 25 bp, Canis familiaris
acactgttctgactgtagcattgca

SEQ ID NO: 42162 - DNA, 25 bp, Canis familiaris
acactgccttgtctacatctgaaaa

SEQ ID NO: 42163 - DNA, 25 bp, Canis familiaris
acactcacatgcacgtacacaggaa

SEQ ID NO: 42164 - DNA, 25 bp, Canis familiaris
acacgacacgcccgagatatggaga

SEQ ID NO: 42165 - DNA, 25 bp, Canis familiaris
acactatacccatgtgatatgagaa

SEQ ID NO: 42166 - DNA, 25 bp, Canis familiaris
acactatcactcctacttatacaag

SEQ ID NO: 42167 - DNA, 25 bp, Canis familiaris
acaaaatcacgctacattcttcacg

SEQ ID NO: 42168 - DNA, 25 bp, Canis familiaris
acaaacatatttagaccctcaagag

SEQ ID NO: 42169 - DNA, 25 bp, Canis familiaris
acacaacataaaagcgacttgccaa

SEQ ID NO: 42170 - DNA, 25 bp, Canis familiaris
aacagcaaatttactgaattccaag

SEQ ID NO: 42171 - DNA, 25 bp, Canis familiaris
acacaccaccttatcaatatctgaa

SEQ ID NO: 42172 - DNA, 25 bp, Canis familiaris
acacacaagcctcatggctaaatga

SEQ ID NO: 42173 - DNA, 25 bp, Canis familiaris
acacacaccgccgtgctgtaaataa

SEQ ID NO: 42174 - DNA, 25 bp, Canis familiaris
acacaccccacttgctaaagacaaa

SEQ ID NO: 42175 - DNA, 25 bp, Canis familiaris
acaacaacaccttcatcaaagccct

SEQ ID NO: 42176 - DNA, 25 bp, Canis familiaris
acaaaacagataacacagaaccatt

SEQ ID NO: 42177 - DNA, 25 bp, Canis familiaris
acaaacacttgcacacaaaatctgt

SEQ ID NO: 42178 - DNA, 25 bp, Canis familiaris
acaaaactggcataccgatgatgtg

SEQ ID NO: 42179 - DNA, 25 bp, Canis familiaris
acacacaagggcatcatccggcagt

SEQ ID NO: 42180 - DNA, 25 bp, Canis familiaris
acaagccagaggcctgcatcaagag

SEQ ID NO: 42181 - DNA, 25 bp, Canis familiaris
acacacacagaggcagagacacagg

SEQ ID NO: 42182 - DNA, 25 bp, Canis familiaris
acacaggcacagccgagaagcaggc

SEQ ID NO: 42183 - DNA, 25 bp, Canis familiaris
acacagggcgctgcatgacatgggc

SEQ ID NO: 42184 - DNA, 25 bp, Canis familiaris
acactcctgtgaggcatttggagcc

SEQ ID NO: 42185 - DNA, 25 bp, Canis familiaris
acactcgtgtgcacacttgagcgct

SEQ ID NO: 42186 - DNA, 25 bp, Canis familiaris
acacacaattcaatgacttgacaat

SEQ ID NO: 42187 - DNA, 25 bp, Canis familiaris
acacacacacagatagtcatactat

SEQ ID NO: 42188 - DNA, 25 bp, Canis familiaris
acacacatacacatgcaggcttcca

SEQ ID NO: 42189 - DNA, 25 bp, Canis familiaris
acactgctcaacatgctgacatctc

SEQ ID NO: 42190 - DNA, 25 bp, Canis familiaris
acacagcctacaatgctgcgtctcc

SEQ ID NO: 42191 - DNA, 25 bp, Canis familiaris
acacacctgtgcgagcgagtctcgc

SEQ ID NO: 42192 - DNA, 25 bp, Canis familiaris
acacatcagctgggagggtgcgctc

SEQ ID NO: 42193 - DNA, 25 bp, Canis familiaris
acactcctcgtgaggctggatctca

SEQ ID NO: 42194 - DNA, 25 bp, Canis familiaris
acacttccatgtaaggttgtccaac

SEQ ID NO: 42195 - DNA, 25 bp, Canis familiaris
acactttgagtatctttttccacat

SEQ ID NO: 42196 - DNA, 25 bp, Canis familiaris
acactgtatcagcatagccttttct

SEQ ID NO: 42197 - DNA, 25 bp, Canis familiaris
acacttgtcatcaattccatgcctt

SEQ ID NO: 42198 - DNA, 25 bp, Canis familiaris
acactcagtaccttctatgcttgtc

SEQ ID NO: 42199 - DNA, 25 bp, Canis familiaris
acacacatgttctgtctagcttgtt

SEQ ID NO: 42200 - DNA, 25 bp, Canis familiaris
acacttgattcatgttggcttctcc

SEQ ID NO: 42201 - DNA, 25 bp, Canis familiaris
acacttattcttgatggcatctgtc

SEQ ID NO: 42202 - DNA, 25 bp, Canis familiaris
acaagtttcttgtggatggtccgga

SEQ ID NO: 42203 - DNA, 25 bp, Canis familiaris
acaactttgcaaataggggctaagg

SEQ ID NO: 42204 - DNA, 25 bp, Canis familiaris
acaacgtagctcggcggcggctacg

SEQ ID NO: 42205 - DNA, 25 bp, Canis familiaris
acaactgaatccgggatccctgggt

SEQ ID NO: 42206 - DNA, 25 bp, Canis familiaris
acaactataagggggtgcctgggtg

SEQ ID NO: 42207 - DNA, 25 bp, Canis familiaris
acaaccaaaggcagtagagctggat

SEQ ID NO: 42208 - DNA, 25 bp, Canis familiaris
acaagctcaaggccaggaaaatcgt

SEQ ID NO: 42209 - DNA, 25 bp, Canis familiaris
acaactcaaggacagtgctaacgtg

SEQ ID NO: 42210 - DNA, 25 bp, Canis familiaris
aaatccaggcgacagacttactttc

SEQ ID NO: 42211 - DNA, 25 bp, Canis familiaris
aaaccatatggctcaagcctaccta

SEQ ID NO: 42212 - DNA, 25 bp, Canis familiaris
acaacaacggcgacaagctctgccc

SEQ ID NO: 42213 - DNA, 25 bp, Canis familiaris
acaactgaatgccaacaactcgccc

SEQ ID NO: 42214 - DNA, 25 bp, Canis familiaris
acaactgagacacagcacaggccca

SEQ ID NO: 42215 - DNA, 25 bp, Canis familiaris
acacagggtagaggcgtggcccagc

SEQ ID NO: 42216 - DNA, 25 bp, Canis familiaris
acaagggggacacggacacgagctg

SEQ ID NO: 42217 - DNA, 25 bp, Canis familiaris
caaaggggcaaaccttcggactgct

SEQ ID NO: 42218 - DNA, 25 bp, Canis familiaris
acaagagggccagccttcgggatgt

SEQ ID NO: 42219 - DNA, 25 bp, Canis familiaris
acaacagggtcagctgcctaggggt

SEQ ID NO: 42220 - DNA, 25 bp, Canis familiaris
acacacagtggtaacgccagtcgag

SEQ ID NO: 42221 - DNA, 25 bp, Canis familiaris
acacaatggagtacacctcaaacaa

SEQ ID NO: 42222 - DNA, 25 bp, Canis familiaris
acaaagtgggatgccatgcgaatcc

SEQ ID NO: 42223 - DNA, 25 bp, Canis familiaris
aaattggggatatagctaacctaga

SEQ ID NO: 42224 - DNA, 25 bp, Canis familiaris
aaattggggaacacactccctcagc

SEQ ID NO: 42225 - DNA, 25 bp, Canis familiaris
aaacttcggtttcatgtccttagca

SEQ ID NO: 42226 - DNA, 25 bp, Canis familiaris
acaaatttggggtgtgctccttaga

SEQ ID NO: 42227 - DNA, 25 bp, Canis familiaris
acaaccctcggttggttctttgatg

SEQ ID NO: 42228 - DNA, 25 bp, Canis familiaris
acacatccttctggttggcttattt

SEQ ID NO: 42229 - DNA, 25 bp, Canis familiaris
acaacctgtcggagtcggaagatga

SEQ ID NO: 42230 - DNA, 25 bp, Canis familiaris
acaaccggcgtctgtttgagcagaa

SEQ ID NO: 42231 - DNA, 25 bp, Canis familiaris
acaagtccggcggctgtttgagcag

SEQ ID NO: 42232 - DNA, 25 bp, Canis familiaris
acacagtgtctgtgcagtttcggca

SEQ ID NO: 42233 - DNA, 25 bp, Canis familiaris
acacaggtcttccctgtgtgtgtgt

SEQ ID NO: 42234 - DNA, 25 bp, Canis familiaris
acacagagactacgacttatgcttt

SEQ ID NO: 42235 - DNA, 25 bp, Canis familiaris
acaactgaccagaacattagctagt

SEQ ID NO: 42236 - DNA, 25 bp, Canis familiaris
acaaagcaccagtcaattgcttatt

SEQ ID NO: 42237 - DNA, 25 bp, Canis familiaris
acaaatcacctggcaatctcattca

SEQ ID NO: 42238 - DNA, 25 bp, Canis familiaris
acaaaccctggaagtgcttgacatc

SEQ ID NO: 42239 - DNA, 25 bp, Canis familiaris
acaaacccatatggtatgtgtacac

SEQ ID NO: 42240 - DNA, 25 bp, Canis familiaris
acaaatcagccatgtgctagatgct

SEQ ID NO: 42241 - DNA, 25 bp, Canis familiaris
acacagatagtcatactatttattt

SEQ ID NO: 42242 - DNA, 25 bp, Canis familiaris
acacattatgtatactgctttttgt

SEQ ID NO: 42243 - DNA, 25 bp, Canis familiaris
acacactagtgtacctgcttgtttc

SEQ ID NO: 42244 - DNA, 25 bp, Canis familiaris
acacacaagttgccccaggtgggca

SEQ ID NO: 42245 - DNA, 25 bp, Canis familiaris
acacacagaatcatcatgtgaggtg

SEQ ID NO: 42246 - DNA, 25 bp, Canis familiaris
acacacaatctccacattagtgtgg

SEQ ID NO: 42247 - DNA, 25 bp, Canis familiaris
acaaagcatgctacacatttagtgc

SEQ ID NO: 42248 - DNA, 25 bp, Canis familiaris
acaacagcatgcaacaggtgtcggt

SEQ ID NO: 42249 - DNA, 25 bp, Canis familiaris
acacacacatgttatcgtctcggtc

SEQ ID NO: 42250 - DNA, 25 bp, Canis familiaris
aacaaagttacactccgagtcgcct

SEQ ID NO: 42251 - DNA, 25 bp, Canis familiaris
aactactttcacttagggttcactg

SEQ ID NO: 42252 - DNA, 25 bp, Canis familiaris
acaaacatttactgatcctgcttcc

SEQ ID NO: 42253 - DNA, 25 bp, Canis familiaris
acaaatcttatttagactgtcgcat

SEQ ID NO: 42254 - DNA, 25 bp, Canis familiaris
acacagtataaatagcatctctcct

SEQ ID NO: 42255 - DNA, 25 bp, Canis familiaris
acacatgtaaacacacacgcactct

SEQ ID NO: 42256 - DNA, 25 bp, Canis familiaris
acacagaaaaggccaccagactcca

SEQ ID NO: 42257 - DNA, 25 bp, Canis familiaris
acaataaagactccaccaaatacga

SEQ ID NO: 42258 - DNA, 25 bp, Canis familiaris
acacataaccctcaccaatattaca

SEQ ID NO: 42259 - DNA, 25 bp, Canis familiaris
acactataccttcaagcccttaatt

SEQ ID NO: 42260 - DNA, 25 bp, Canis familiaris
cacacttacctgtgggggttacctg

SEQ ID NO: 42261 - DNA, 25 bp, Canis familiaris
ccacttcataccacggactttaact

SEQ ID NO: 42262 - DNA, 25 bp, Canis familiaris
acactgttatacacctgttttatga

SEQ ID NO: 42263 - DNA, 25 bp, Canis familiaris
acacttctcacaacaacttctttaa

SEQ ID NO: 42264 - DNA, 25 bp, Canis familiaris
acacatttaaaagctgccttgataa

SEQ ID NO: 42265 - DNA, 25 bp, Canis familiaris
acacaaaagagttccatgttctata

SEQ ID NO: 42266 - DNA, 25 bp, Canis familiaris
acaacatcaaggtcctctacttatc

SEQ ID NO: 42267 - DNA, 25 bp, Canis familiaris
acaacacgggggccgtgctgttcgt

SEQ ID NO: 42268 - DNA, 25 bp, Canis familiaris
acaactgggaggtggccatcttcgg

SEQ ID NO: 42269 - DNA, 25 bp, Canis familiaris
acaagtggggagtggctccttcacc

SEQ ID NO: 42270 - DNA, 25 bp, Canis familiaris
acactttgtaacttggtcctttcat

SEQ ID NO: 42271 - DNA, 25 bp, Canis familiaris
acacatttttgtttagtccttctct

SEQ ID NO: 42272 - DNA, 25 bp, Canis familiaris
acactttcttctaaattcgagtcct

SEQ ID NO: 42273 - DNA, 25 bp, Canis familiaris
acacacattttcatagtacatgagt

SEQ ID NO: 42274 - DNA, 25 bp, Canis familiaris
acacattcttctcaagtgcacatgg

SEQ ID NO: 42275 - DNA, 25 bp, Canis familiaris
acacatcctttgcttgtagcggagg

SEQ ID NO: 42276 - DNA, 25 bp, Canis familiaris
acacactacactcctgttagctgga

SEQ ID NO: 42277 - DNA, 25 bp, Canis familiaris
acacagctaagctctttgactccac

SEQ ID NO: 42278 - DNA, 25 bp, Canis familiaris
acacatctaagtttttgcatttcta

SEQ ID NO: 42279 - DNA, 25 bp, Canis familiaris
acaactgtgcggtgtctgttttgat

SEQ ID NO: 42280 - DNA, 25 bp, Canis familiaris
acaactgacgagtgttactgtaggg

SEQ ID NO: 42281 - DNA, 25 bp, Canis familiaris
acaactactggggctaggcatgcta

SEQ ID NO: 42282 - DNA, 25 bp, Canis familiaris
acaaacactgagaaggcaccagcta

SEQ ID NO: 42283 - DNA, 25 bp, Canis familiaris
acaaaccagagctgcacaccatggc

SEQ ID NO: 42284 - DNA, 25 bp, Canis familiaris
acacaaccagcagggctgccgtggt

SEQ ID NO: 42285 - DNA, 25 bp, Canis familiaris
acacaatgcccgtgaccagtggctg

SEQ ID NO: 42286 - DNA, 25 bp, Canis familiaris
acacagtgtaagagaccaggcagtc

SEQ ID NO: 42287 - DNA, 25 bp, Canis familiaris
acacagtcataaagtgaacacgcag

SEQ ID NO: 42288 - DNA, 25 bp, Canis familiaris
acacagtatctgcagatgaacagcc

SEQ ID NO: 42289 - DNA, 25 bp, Canis familiaris
acacattgcctgcagatgaggagga

SEQ ID NO: 42290 - DNA, 25 bp, Canis familiaris
acacattggcggatcacggagatga

SEQ ID NO: 42291 - DNA, 25 bp, Canis familiaris
acacaagggcatcatccggcagtgg

SEQ ID NO: 42292 - DNA, 25 bp, Canis familiaris
acacagaggtacccctggagcgtgt

SEQ ID NO: 42293 - DNA, 25 bp, Canis familiaris
acaagcagcaattttcctaccgagt

SEQ ID NO: 42294 - DNA, 25 bp, Canis familiaris
acaaagcaggctctggtatccggtc

SEQ ID NO: 42295 - DNA, 25 bp, Canis familiaris
acacaatgagaaactaggacctggt

SEQ ID NO: 42296 - DNA, 25 bp, Canis familiaris
acacactggtacttagagtttctgt

SEQ ID NO: 42297 - DNA, 25 bp, Canis familiaris
aaattggtagctgccagtggtcctc

SEQ ID NO: 42298 - DNA, 25 bp, Canis familiaris
acaagctgggacgcttgggtgcctc

SEQ ID NO: 42299 - DNA, 25 bp, Canis familiaris
acaagggagctcaatcaatgggtct

SEQ ID NO: 42300 - DNA, 25 bp, Canis familiaris
acacaggaagcccgacatgggactc

SEQ ID NO: 42301 - DNA, 25 bp, Canis familiaris
acacaggaacaactgccggtgatac

SEQ ID NO: 42302 - DNA, 25 bp, Canis familiaris
acacaggaatattacacaggtataa

SEQ ID NO: 42303 - DNA, 25 bp, Canis familiaris
acacaggaatattactcaggccatc

SEQ ID NO: 42304 - DNA, 25 bp, Canis familiaris
acaacagcaatttagatcgcacact

SEQ ID NO: 42305 - DNA, 25 bp, Canis familiaris
acaagcctttatagttccagcatat

SEQ ID NO: 42306 - DNA, 25 bp, Canis familiaris
acaactccctcaagattgtcagcaa

SEQ ID NO: 42307 - DNA, 25 bp, Canis familiaris
acaactccctcacggtaagatcaca

SEQ ID NO: 42308 - DNA, 25 bp, Canis familiaris
acaactacacggcgctgcagaacgc

SEQ ID NO: 42309 - DNA, 25 bp, Canis familiaris
acacagctgacaggagccagctcat

SEQ ID NO: 42310 - DNA, 25 bp, Canis familiaris
acacacatgcacgtacgcagagcat

SEQ ID NO: 42311 - DNA, 25 bp, Canis familiaris
acaactgcagcaaacagcaagatac

SEQ ID NO: 42312 - DNA, 25 bp, Canis familiaris
acaacagcagcaacagcaaattcac

SEQ ID NO: 42313 - DNA, 25 bp, Canis familiaris
acacatacacatactctaacataca

SEQ ID NO: 42314 - DNA, 25 bp, Canis familiaris
acacatacacatgcacacaaaacca

SEQ ID NO: 42315 - DNA, 25 bp, Canis familiaris
acacatgcacacaaaaccaaccaaa

SEQ ID NO: 42316 - DNA, 25 bp, Canis familiaris
acacatacacatacaaaatcctaaa

SEQ ID NO: 42317 - DNA, 25 bp, Canis familiaris
acacacaatcaccaaaccctgaaaa

SEQ ID NO: 42318 - DNA, 25 bp, Canis familiaris
acacaaaatccaatacccaaatcta

SEQ ID NO: 42319 - DNA, 25 bp, Canis familiaris
acacaaacacccacaaccaattgtt

SEQ ID NO: 42320 - DNA, 25 bp, Canis familiaris
acacatcagtccccttaacaaattg

SEQ ID NO: 42321 - DNA, 25 bp, Canis familiaris
aactcgtgaccccgcaatcaagagt

SEQ ID NO: 42322 - DNA, 25 bp, Canis familiaris
acactctggacttcagccaacagga

SEQ ID NO: 42323 - DNA, 25 bp, Canis familiaris
acactctggacttcagccaacagga

SEQ ID NO: 42324 - DNA, 25 bp, Canis familiaris
acactctggacttcagccaacagga

SEQ ID NO: 42325 - DNA, 25 bp, Canis familiaris
acacatgcccacacacaaacataga

SEQ ID NO: 42326 - DNA, 25 bp, Canis familiaris
acaatcgccacatcagaaagcaacg

SEQ ID NO: 42327 - DNA, 25 bp, Canis familiaris
acacatccacaagctgaaggcagac

SEQ ID NO: 42328 - DNA, 25 bp, Canis familiaris
acacaccaatccacaagctgaagcc

SEQ ID NO: 42329 - DNA, 25 bp, Canis familiaris
acaaccacgtgcagaagcgcaagcc

SEQ ID NO: 42330 - DNA, 25 bp, Canis familiaris
acaagccaggtaggacacatgccag

SEQ ID NO: 42331 - DNA, 25 bp, Canis familiaris
acaagcccgtgaagtgcagtgccgt

SEQ ID NO: 42332 - DNA, 25 bp, Canis familiaris
acaacgggagcaacagcttccgctc

SEQ ID NO: 42333 - DNA, 25 bp, Canis familiaris
acaagctgggagcatgactttggcc

SEQ ID NO: 42334 - DNA, 25 bp, Canis familiaris
acaatcatggccttgaccttcggct

SEQ ID NO: 42335 - DNA, 25 bp, Canis familiaris
cgcaaaggctttctattcggtaata

SEQ ID NO: 42336 - DNA, 25 bp, Canis familiaris
acaaaggccattctgttggcggagt

SEQ ID NO: 42337 - DNA, 25 bp, Canis familiaris
aaagcagaacgtctctcggggattc

SEQ ID NO: 42338 - DNA, 25 bp, Canis familiaris
aaagagaacagcagaccgggcgtgg

SEQ ID NO: 42339 - DNA, 25 bp, Canis familiaris
aaaggaatcagggcctcctgggtgg

SEQ ID NO: 42340 - DNA, 25 bp, Canis familiaris
acaagggaaggtgtgactaccaggg

SEQ ID NO: 42341 - DNA, 25 bp, Canis familiaris
acaagggacacacacagtcttccgc

SEQ ID NO: 42342 - DNA, 25 bp, Canis familiaris
acacaggtatcccagacaccttgtc

SEQ ID NO: 42343 - DNA, 25 bp, Canis familiaris
acacaggtcatgtcagaacagcaca

SEQ ID NO: 42344 - DNA, 25 bp, Canis familiaris
acacaggtcctgtacacatacacac

SEQ ID NO: 42345 - DNA, 25 bp, Canis familiaris
acacagggtcaaacacatacacaca

SEQ ID NO: 42346 - DNA, 25 bp, Canis familiaris
acacagaggtcctcaagacccatgg

SEQ ID NO: 42347 - DNA, 25 bp, Canis familiaris
acacagaggtcctcaagacccatgg

SEQ ID NO: 42348 - DNA, 25 bp, Canis familiaris
acacagaggtccttcagacccaggg

SEQ ID NO: 42349 - DNA, 25 bp, Canis familiaris
acacagagacctggatcagatccca

SEQ ID NO: 42350 - DNA, 25 bp, Canis familiaris
acaagaagctgtgtagacgccacca

SEQ ID NO: 42351 - DNA, 25 bp, Canis familiaris
acacaaactgcttaagctgcccaca

SEQ ID NO: 42352 - DNA, 25 bp, Canis familiaris
acacatgataagggcaactatccca

SEQ ID NO: 42353 - DNA, 25 bp, Canis familiaris
acacatggacagtgagagcctcttc

SEQ ID NO: 42354 - DNA, 25 bp, Canis familiaris
acaagctgcaagtaaggccctttat

SEQ ID NO: 42355 - DNA, 25 bp, Canis familiaris
acaagtgacatgtaccagccttttc

SEQ ID NO: 42356 - DNA, 25 bp, Canis familiaris
acaagtccagattccccttaattga

SEQ ID NO: 42357 - DNA, 25 bp, Canis familiaris
acaagtggaattttcctctccttga

SEQ ID NO: 42358 - DNA, 25 bp, Canis familiaris
acaagtttaccagccttctttgcta

SEQ ID NO: 42359 - DNA, 25 bp, Canis familiaris
aaaccttacacagaaccacttcaga

SEQ ID NO: 42360 - DNA, 25 bp, Canis familiaris
caagacctctggtgaaaccccaaga

SEQ ID NO: 42361 - DNA, 25 bp, Canis familiaris
caagacaccggacaaacactaaacg

SEQ ID NO: 42362 - DNA, 25 bp, Canis familiaris
aaaagggaaaagatcactacaatag

SEQ ID NO: 42363 - DNA, 25 bp, Canis familiaris
caaaagggaaaagatcactacaata

SEQ ID NO: 42364 - DNA, 25 bp, Canis familiaris
acaacggagaaatgcccagtacact

SEQ ID NO: 42365 - DNA, 25 bp, Canis familiaris
acaaccctaagatcaagagtcgcac

SEQ ID NO: 42366 - DNA, 25 bp, Canis familiaris
acaaccctagagcagcaaatctcag

SEQ ID NO: 42367 - DNA, 25 bp, Canis familiaris
acaagaccatcatgccagaacctac

SEQ ID NO: 42368 - DNA, 25 bp, Canis familiaris
acaaaactctcttcaagtcactcac

SEQ ID NO: 42369 - DNA, 25 bp, Canis familiaris
acaacagacgtcttcgacaactctc

SEQ ID NO: 42370 - DNA, 25 bp, Canis familiaris
acacacagactttctcaatgaattt

SEQ ID NO: 42371 - DNA, 25 bp, Canis familiaris
acacacagactttttctttctttgt

SEQ ID NO: 42372 - DNA, 25 bp, Canis familiaris
acaaatggcaaggtgtctttctttt

SEQ ID NO: 42373 - DNA, 25 bp, Canis familiaris
acaaatggctatggctgtttacaat

SEQ ID NO: 42374 - DNA, 25 bp, Canis familiaris
acaaatgtaatgtctttcatcaaac

SEQ ID NO: 42375 - DNA, 25 bp, Canis familiaris
acacaagtgaatatcattgcatcta

SEQ ID NO: 42376 - DNA, 25 bp, Canis familiaris
acacatacagcattggttcctctag

SEQ ID NO: 42377 - DNA, 25 bp, Canis familiaris
acacaccagaatcatttccacgaaa

SEQ ID NO: 42378 - DNA, 25 bp, Canis familiaris
aacttggactaattcctcactgaga

SEQ ID NO: 42379 - DNA, 25 bp, Canis familiaris
aagttgcggatatatagcgcccatt

SEQ ID NO: 42380 - DNA, 25 bp, Canis familiaris
aagtttctgaaacaccaccttgtca

SEQ ID NO: 42381 - DNA, 25 bp, Canis familiaris
aatctttaccaacaccgtttatcat

SEQ ID NO: 42382 - DNA, 25 bp, Canis familiaris
aatctttccactgcaaccaagtacc

SEQ ID NO: 42383 - DNA, 25 bp, Canis familiaris
aaattcttccttcaccaaattcagc

SEQ ID NO: 42384 - DNA, 25 bp, Canis familiaris
gacgtttttattctccagtaatcga

SEQ ID NO: 42385 - DNA, 25 bp, Canis familiaris
acacttgtttttcctccaatgtaca

SEQ ID NO: 42386 - DNA, 25 bp, Canis familiaris
acaagtgtttcaacctgtcctgtag

SEQ ID NO: 42387 - DNA, 25 bp, Canis familiaris
acaacggtgtgcaggcctgctttgg

SEQ ID NO: 42388 - DNA, 25 bp, Canis familiaris
acaatgtggccgaggactttgattg

SEQ ID NO: 42389 - DNA, 25 bp, Canis familiaris
acaagttcgtggcacacttggacat

SEQ ID NO: 42390 - DNA, 25 bp, Canis familiaris
acaagggcaaggcacagtctgggct

SEQ ID NO: 42391 - DNA, 25 bp, Canis familiaris
aaattccacggcacagtcaaggctg

SEQ ID NO: 42392 - DNA, 25 bp, Canis familiaris
acacatttgcagcgcaaaccgaggt

SEQ ID NO: 42393 - DNA, 25 bp, Canis familiaris
acacacgtgcgaatccataccggag

SEQ ID NO: 42394 - DNA, 25 bp, Canis familiaris
acacagtctgtaatcctaaaggcac

SEQ ID NO: 42395 - DNA, 25 bp, Canis familiaris
acacactgcagttttccacaatggt

SEQ ID NO: 42396 - DNA, 25 bp, Canis familiaris
acaactgtgtggtattccttcgtta

SEQ ID NO: 42397 - DNA, 25 bp, Canis familiaris
acaaccgatagaatttactcagtat

SEQ ID NO: 42398 - DNA, 25 bp, Canis familiaris
acaactagtgatctcttactgttat

SEQ ID NO: 42399 - DNA, 25 bp, Canis familiaris
acaacatttattttccctgtgtgaa

SEQ ID NO: 42400 - DNA, 25 bp, Canis familiaris
acaaaatatttgttcccttctgtat

SEQ ID NO: 42401 - DNA, 25 bp, Canis familiaris
acaaagaacttgatgccgtctgcct

SEQ ID NO: 42402 - DNA, 25 bp, Canis familiaris
acacaagacaggcttcctggctgcc

SEQ ID NO: 42403 - DNA, 25 bp, Canis familiaris
acaagatacacgctctcactgtagc

SEQ ID NO: 42404 - DNA, 25 bp, Canis familiaris
acaatgcaaagccccaacatttgca

SEQ ID NO: 42405 - DNA, 25 bp, Canis familiaris
acaaaatcatgccgtagcctttctt

SEQ ID NO: 42406 - DNA, 25 bp, Canis familiaris
acacagcctcagacctgagtttctg

SEQ ID NO: 42407 - DNA, 25 bp, Canis familiaris
acacatcctcagagtgcatgctcct

SEQ ID NO: 42408 - DNA, 25 bp, Canis familiaris
aaatcagtgctggacgtgcaccttg

SEQ ID NO: 42409 - DNA, 25 bp, Canis familiaris
acaaatgtctcttcgtgaccttgtc

SEQ ID NO: 42410 - DNA, 25 bp, Canis familiaris
acaaagtcctatatgctcttaggaa

SEQ ID NO: 42411 - DNA, 25 bp, Canis familiaris
acaagtgtgccaatgattgtcctgg

SEQ ID NO: 42412 - DNA, 25 bp, Canis familiaris
acacaggcttttctgtcctggtggc

SEQ ID NO: 42413 - DNA, 25 bp, Canis familiaris
acacaggtttttgtcaggtgggcct

SEQ ID NO: 42414 - DNA, 25 bp, Canis familiaris
acaaggtctttgaaatctgggggat

SEQ ID NO: 42415 - DNA, 25 bp, Canis familiaris
acaagttctgtaaaggcaatgggag

SEQ ID NO: 42416 - DNA, 25 bp, Canis familiaris
acacagtctctctctagctaaaaag

SEQ ID NO: 42417 - DNA, 25 bp, Canis familiaris
acaactcagctctctccaaaaagaa

SEQ ID NO: 42418 - DNA, 25 bp, Canis familiaris
acaacttgtctttctagccataaaa

SEQ ID NO: 42419 - DNA, 25 bp, Canis familiaris
acaacttttctgtatacctgaaact

SEQ ID NO: 42420 - DNA, 25 bp, Canis familiaris
acaacttttgaatatcccaacacga

SEQ ID NO: 42421 - DNA, 25 bp, Canis familiaris
acacacatttaagatttttcccaga

SEQ ID NO: 42422 - DNA, 25 bp, Canis familiaris
acaaaataaacgatggctcctccag

SEQ ID NO: 42423 - DNA, 25 bp, Canis familiaris
acaacaacaaacaagtgtgcccgcc

SEQ ID NO: 42424 - DNA, 25 bp, Canis familiaris
acaacattgcaaatcaagggcaaaa

SEQ ID NO: 42425 - DNA, 25 bp, Canis familiaris
acacatgcacacacatcacagggaa

SEQ ID NO: 42426 - DNA, 25 bp, Canis familiaris
acacacagacagactcacacagaga

SEQ ID NO: 42427 - DNA, 25 bp, Canis familiaris
acacacaaatattcacacaatggaa

SEQ ID NO: 42428 - DNA, 25 bp, Canis familiaris
acaagctaatctgccctaggacttt

SEQ ID NO: 42429 - DNA, 25 bp, Canis familiaris
aaacgatcctcgtcctaagacttga

SEQ ID NO: 42430 - DNA, 25 bp, Canis familiaris
aaacgatattcgtctccaagatcac

SEQ ID NO: 42431 - DNA, 25 bp, Canis familiaris
acaacgaatttggctacagcaacag

SEQ ID NO: 42432 - DNA, 25 bp, Canis familiaris
acaacgaatttggctacagcaacag

SEQ ID NO: 42433 - DNA, 25 bp, Canis familiaris
acaacggcaaagcatcctgaacaga

SEQ ID NO: 42434 - DNA, 25 bp, Canis familiaris
acaatctggcacaaggacctgggca

SEQ ID NO: 42435 - DNA, 25 bp, Canis familiaris
acaaaacacaagtatcttgagggtt

SEQ ID NO: 42436 - DNA, 25 bp, Canis familiaris
acaaaactcacacacgagtcgcgtt

SEQ ID NO: 42437 - DNA, 25 bp, Canis familiaris
acaaatattcaacacagcttgctga

SEQ ID NO: 42438 - DNA, 25 bp, Canis familiaris
acaaatcttgattaacctagctaaa

SEQ ID NO: 42439 - DNA, 25 bp, Canis familiaris
acacacatttgtggcacacccagtg

SEQ ID NO: 42440 - DNA, 25 bp, Canis familiaris
acacacatatatatacaactcaagg

SEQ ID NO: 42441 - DNA, 25 bp, Canis familiaris
acaaacactttgtcatatccaaggt

SEQ ID NO: 42442 - DNA, 25 bp, Canis familiaris
acaaaacttctattacgagtgacat

SEQ ID NO: 42443 - DNA, 25 bp, Canis familiaris
acaacggttcttttatgcagtatct

SEQ ID NO: 42444 - DNA, 25 bp, Canis familiaris
acacacctgttgcattttcttacgc

SEQ ID NO: 42445 - DNA, 25 bp, Canis familiaris
acacaaccactggatttctcttacc

SEQ ID NO: 42446 - DNA, 25 bp, Canis familiaris
acacacatacacctgatttctgcct

SEQ ID NO: 42447 - DNA, 25 bp, Canis familiaris
acacacacacacagatagtcatact

SEQ ID NO: 42448 - DNA, 25 bp, Canis familiaris
acacacacacacacagaggcagaga

SEQ ID NO: 42449 - DNA, 25 bp, Canis familiaris
acacacacacacacagatagtcata

SEQ ID NO: 42450 - DNA, 25 bp, Canis familiaris
acacacatacacagattgacctact

SEQ ID NO: 42451 - DNA, 25 bp, Canis familiaris
acacacataccaagaaccactgcac

SEQ ID NO: 42452 - DNA, 25 bp, Canis familiaris
acacacatacctaaacatgctcatg

SEQ ID NO: 42453 - DNA, 25 bp, Canis familiaris
acacacaagagtgagcacagccaga

SEQ ID NO: 42454 - DNA, 25 bp, Canis familiaris
acacacagaaaaggccaccagactc

SEQ ID NO: 42455 - DNA, 25 bp, Canis familiaris
acacagcttaaagtccaatgggcct

SEQ ID NO: 42456 - DNA, 25 bp, Canis familiaris
acaagcccaaaggccctgtgatgcc

SEQ ID NO: 42457 - DNA, 25 bp, Canis familiaris
acaactctccggatacatggtgcgc

SEQ ID NO: 42458 - DNA, 25 bp, Canis familiaris
acaacacgccggactgactctggcg

SEQ ID NO: 42459 - DNA, 25 bp, Canis familiaris
acaacacgccggactgactctggcg

SEQ ID NO: 42460 - DNA, 25 bp, Canis familiaris
acaacacccaccatgtcttttggga

SEQ ID NO: 42461 - DNA, 25 bp, Canis familiaris
acaaatccaaccatgcagttcctaa

SEQ ID NO: 42462 - DNA, 25 bp, Canis familiaris
aaattagaagccatgcctacctgac

SEQ ID NO: 42463 - DNA, 25 bp, Canis familiaris
acaattgaaggcccatgccatccct

SEQ ID NO: 42464 - DNA, 25 bp, Canis familiaris
aaataaatagctctgttcctcccat

SEQ ID NO: 42465 - DNA, 25 bp, Canis familiaris
acaataaacagcttgtaccgtccgg

SEQ ID NO: 42466 - DNA, 25 bp, Canis familiaris
acaacaagacctttgactcttcctg

SEQ ID NO: 42467 - DNA, 25 bp, Canis familiaris
acaaaagtcctcgatgggctcttct

SEQ ID NO: 42468 - DNA, 25 bp, Canis familiaris
acaagaagtttccatgagtgccagt

SEQ ID NO: 42469 - DNA, 25 bp, Canis familiaris
acaaaatctttttggcagctcagat

SEQ ID NO: 42470 - DNA, 25 bp, Canis familiaris
acacaattcattctttgcagctaat

SEQ ID NO: 42471 - DNA, 25 bp, Canis familiaris
acaacttgcgtgtgtggcagcagaa

SEQ ID NO: 42472 - DNA, 25 bp, Canis familiaris
aaatccggtgatcgctagataagca

SEQ ID NO: 42473 - DNA, 25 bp, Canis familiaris
aaaccagttgatcacagggagccgg

SEQ ID NO: 42474 - DNA, 25 bp, Canis familiaris
acaaccaacactcacagggagcttg

SEQ ID NO: 42475 - DNA, 25 bp, Canis familiaris
acacacccatacacacagagctgtg

SEQ ID NO: 42476 - DNA, 25 bp, Canis familiaris
acacaccacaccggcagagagtagg

SEQ ID NO: 42477 - DNA, 25 bp, Canis familiaris
acacacgccagcggagagggtcacc

SEQ ID NO: 42478 - DNA, 25 bp, Canis familiaris
acaacgtcactgcagagatggtcaa

SEQ ID NO: 42479 - DNA, 25 bp, Canis familiaris
acacacaatcctcagagtgacttaa

SEQ ID NO: 42480 - DNA, 25 bp, Canis familiaris
acaatctcccttaggggctatatat

SEQ ID NO: 42481 - DNA, 25 bp, Canis familiaris
acaagtcccttgcaacacaaattga

SEQ ID NO: 42482 - DNA, 25 bp, Canis familiaris
acaagtccgtctctacagttcagga

SEQ ID NO: 42483 - DNA, 25 bp, Canis familiaris
acaaacccatcttaaagctaaggat

SEQ ID NO: 42484 - DNA, 25 bp, Canis familiaris
acaaacccatcttaatactacgcct

SEQ ID NO: 42485 - DNA, 25 bp, Canis familiaris
acaaaaccacttcatcacaatccag

SEQ ID NO: 42486 - DNA, 25 bp, Canis familiaris
acacagtcccaaattaaaagccagc

SEQ ID NO: 42487 - DNA, 25 bp, Canis familiaris
acacagtgctctccatcttaaatga

SEQ ID NO: 42488 - DNA, 25 bp, Canis familiaris
acacagctgcccgacaggaaagagg

SEQ ID NO: 42489 - DNA, 25 bp, Canis familiaris
acaagctggtggaggacctgcggac

SEQ ID NO: 42490 - DNA, 25 bp, Canis familiaris
acaatagcgtggtggacgtctgccc

SEQ ID NO: 42491 - DNA, 25 bp, Canis familiaris
acaaagcaaggctggctctgtccac

SEQ ID NO: 42492 - DNA, 25 bp, Canis familiaris
acaagagtatcctggtcagtcccat

SEQ ID NO: 42493 - DNA, 25 bp, Canis familiaris
acaaatgtcatggacacctcgaccc

SEQ ID NO: 42494 - DNA, 25 bp, Canis familiaris
acaagagagctgcaacctcgggtca

SEQ ID NO: 42495 - DNA, 25 bp, Canis familiaris
acaaggggggcagcatgcagggcca

SEQ ID NO: 42496 - DNA, 25 bp, Canis familiaris
acaaggtggggcttggggctgcatt

SEQ ID NO: 42497 - DNA, 25 bp, Canis familiaris
aaatagggatgccagggtggctcag

SEQ ID NO: 42498 - DNA, 25 bp, Canis familiaris
aaataagtaactcttgggcagcccg

SEQ ID NO: 42499 - DNA, 25 bp, Canis familiaris
aactgggtatttctttggccactct

SEQ ID NO: 42500 - DNA, 25 bp, Canis familiaris
aagcgagagtttcttcgtggacctg

SEQ ID NO: 42501 - DNA, 25 bp, Canis familiaris
aacaggggtttatcgatctaccaga

SEQ ID NO: 42502 - DNA, 25 bp, Canis familiaris
acaaggggattttggtgacaccgag

SEQ ID NO: 42503 - DNA, 25 bp, Canis familiaris
acaacttgggtctgagaacccagag

SEQ ID NO: 42504 - DNA, 25 bp, Canis familiaris
acaagtttggtcctggacacacccg

SEQ ID NO: 42505 - DNA, 25 bp, Canis familiaris
acaaagggcctgcagaacacccacg

SEQ ID NO: 42506 - DNA, 25 bp, Canis familiaris
gaataaggatttcattcggcccaag

SEQ ID NO: 42507 - DNA, 25 bp, Canis familiaris
aaagtgcaattagatctcgttccaa

SEQ ID NO: 42508 - DNA, 25 bp, Canis familiaris
aaagacaaattttcaggctcccaat

SEQ ID NO: 42509 - DNA, 25 bp, Canis familiaris
acaaaaacagttccaatctcacctc

SEQ ID NO: 42510 - DNA, 25 bp, Canis familiaris
acaaccccagctaagcacatgtctc

SEQ ID NO: 42511 - DNA, 25 bp, Canis familiaris
acaaccccagcttccaaaatgaatc

SEQ ID NO: 42512 - DNA, 25 bp, Canis familiaris
acaactgccccggtcaaaagtgatt

SEQ ID NO: 42513 - DNA, 25 bp, Canis familiaris
acacacatgcacaccaactaaagta

SEQ ID NO: 42514 - DNA, 25 bp, Canis familiaris
acacacatatcatccaacacaatat

SEQ ID NO: 42515 - DNA, 25 bp, Canis familiaris
acacacattcactgccacttataaa

SEQ ID NO: 42516 - DNA, 25 bp, Canis familiaris
acacaatgctactaccctttatgag

SEQ ID NO: 42517 - DNA, 25 bp, Canis familiaris
acaaactcaggatccgctctatggt

SEQ ID NO: 42518 - DNA, 25 bp, Canis familiaris
acacaactctgtttccatgtcttga

SEQ ID NO: 42519 - DNA, 25 bp, Canis familiaris
acacaatctctcattacatttcttc

SEQ ID NO: 42520 - DNA, 25 bp, Canis familiaris
acaaatctctactattctttccagc

SEQ ID NO: 42521 - DNA, 25 bp, Canis familiaris
acaaatcagccctagagttattcaa

SEQ ID NO: 42522 - DNA, 25 bp, Canis familiaris
acacacatccctgtattttccaaat

SEQ ID NO: 42523 - DNA, 25 bp, Canis familiaris
acaagtgtctctgtttttacccata

SEQ ID NO: 42524 - DNA, 25 bp, Canis familiaris
acaagtgtctcagtgataatttcag

SEQ ID NO: 42525 - DNA, 25 bp, Canis familiaris
acacacattctctatgatgtcattt

SEQ ID NO: 42526 - DNA, 25 bp, Canis familiaris
acaacagcatctgggagctctcttc

SEQ ID NO: 42527 - DNA, 25 bp, Canis familiaris
acacacaactgatgagttcttgcca

SEQ ID NO: 42528 - DNA, 25 bp, Canis familiaris
acacacagactcttgttttatccat

SEQ ID NO: 42529 - DNA, 25 bp, Canis familiaris
acaagcagatcctatgatttctatc

SEQ ID NO: 42530 - DNA, 25 bp, Canis familiaris
acaacatgatcatcaatgtgctgga

SEQ ID NO: 42531 - DNA, 25 bp, Canis familiaris
acaatgatgctctctgcgtggtgaa

SEQ ID NO: 42532 - DNA, 25 bp, Canis familiaris
acaagtgtcccctgcagtagaaact

SEQ ID NO: 42533 - DNA, 25 bp, Canis familiaris
acaagttgccccaggtgggcaggcc

SEQ ID NO: 42534 - DNA, 25 bp, Canis familiaris
acacaagttgccccaggtgggcagg

SEQ ID NO: 42535 - DNA, 25 bp, Canis familiaris
acaacaattgccgttttggacagag

SEQ ID NO: 42536 - DNA, 25 bp, Canis familiaris
acaaacttgttcattgtcagaaatg

SEQ ID NO: 42537 - DNA, 25 bp, Canis familiaris
acaaacgtgagaatcctggcaaagg

SEQ ID NO: 42538 - DNA, 25 bp, Canis familiaris
acaagcagtgtaaatccccaacgga

SEQ ID NO: 42539 - DNA, 25 bp, Canis familiaris
acaaatgtgtttgccctgaacgtgt

SEQ ID NO: 42540 - DNA, 25 bp, Canis familiaris
acaaatggattctcccttcagagct

SEQ ID NO: 42541 - DNA, 25 bp, Canis familiaris
acacaactttgttgcccttggagct

SEQ ID NO: 42542 - DNA, 25 bp, Canis familiaris
acacaacgttgttgtctgtctctgc

SEQ ID NO: 42543 - DNA, 25 bp, Canis familiaris
acaaactgttgccgtgcagttacct

SEQ ID NO: 42544 - DNA, 25 bp, Canis familiaris
acaacacttcaggcggagagtacta

SEQ ID NO: 42545 - DNA, 25 bp, Canis familiaris
acaacgtgctatccggaggtaccac

SEQ ID NO: 42546 - DNA, 25 bp, Canis familiaris
acaacacggtcccgatggatacctc

SEQ ID NO: 42547 - DNA, 25 bp, Canis familiaris
acaaactggcccctgatagaaaatg

SEQ ID NO: 42548 - DNA, 25 bp, Canis familiaris
aaagcactgtgcacctactaaaata

SEQ ID NO: 42549 - DNA, 25 bp, Canis familiaris
aaacactgtgagcgtactaagaact

SEQ ID NO: 42550 - DNA, 25 bp, Canis familiaris
acaactgtatggggaacataaaagt

SEQ ID NO: 42551 - DNA, 25 bp, Canis familiaris
acaagggtgctggtgcagaaaaaat

SEQ ID NO: 42552 - DNA, 25 bp, Canis familiaris
acaagagggcgcggcgagcaagcac

SEQ ID NO: 42553 - DNA, 25 bp, Canis familiaris
acaagatggggagcagagagaactg

SEQ ID NO: 42554 - DNA, 25 bp, Canis familiaris
acaacggctgtgtctcacgagacgt

SEQ ID NO: 42555 - DNA, 25 bp, Canis familiaris
acaacgttgtacaaagaagcaggct

SEQ ID NO: 42556 - DNA, 25 bp, Canis familiaris
aaattttgtacacagagagccagct

SEQ ID NO: 42557 - DNA, 25 bp, Canis familiaris
acaacattttcagccaaactagcag

SEQ ID NO: 42558 - DNA, 25 bp, Canis familiaris
acacacattgtccaacccagaagaa

SEQ ID NO: 42559 - DNA, 25 bp, Canis familiaris
acaagatggcatcaaaccagaagat

SEQ ID NO: 42560 - DNA, 25 bp, Canis familiaris
acaacagccatacaccgggcagatt

SEQ ID NO: 42561 - DNA, 25 bp, Canis familiaris
acaaagctgctatttccgaaagatt

SEQ ID NO: 42562 - DNA, 25 bp, Canis familiaris
acaacagctgtattatcctcgaatg

SEQ ID NO: 42563 - DNA, 25 bp, Canis familiaris
acacacatgctttgttcttctacat

SEQ ID NO: 42564 - DNA, 25 bp, Canis familiaris
acacacattctgtctaattatcact

SEQ ID NO: 42565 - DNA, 25 bp, Canis familiaris
acaagctacagcctcaatattacta

SEQ ID NO: 42566 - DNA, 25 bp, Canis familiaris
acaagccgctgcaagcagtgtctca

SEQ ID NO: 42567 - DNA, 25 bp, Canis familiaris
acaagttcttcgtcatgtctcaggt

SEQ ID NO: 42568 - DNA, 25 bp, Canis familiaris
acaatcgtttcatcattcggcgtgc

SEQ ID NO: 42569 - DNA, 25 bp, Canis familiaris
acaacttgttcatcattggccaatg

SEQ ID NO: 42570 - DNA, 25 bp, Canis familiaris
acaactggattctctatggctcctc

SEQ ID NO: 42571 - DNA, 25 bp, Canis familiaris
acaactcgtacagcatatggaccaa

SEQ ID NO: 42572 - DNA, 25 bp, Canis familiaris
acaaataaacacaaacagacacaac

SEQ ID NO: 42573 - DNA, 25 bp, Canis familiaris
acaaccaaaaaagaatgcacacaac

SEQ ID NO: 42574 - DNA, 25 bp, Canis familiaris
acaagccagatgcaaaccaaaccat

SEQ ID NO: 42575 - DNA, 25 bp, Canis familiaris
aaagaaatcgcaagaacataataat

SEQ ID NO: 42576 - DNA, 25 bp, Canis familiaris
aaagaaatcccagcacttttgatgg

SEQ ID NO: 42577 - DNA, 25 bp, Canis familiaris
aaaggagatacccccatattccaag

SEQ ID NO: 42578 - DNA, 25 bp, Canis familiaris
acaacgagataggcgcccatagtcc

SEQ ID NO: 42579 - DNA, 25 bp, Canis familiaris
acaaggagttgacgtcttcctctct

SEQ ID NO: 42580 - DNA, 25 bp, Canis familiaris
acaagggttgggacactcatcttcc

SEQ ID NO: 42581 - DNA, 25 bp, Canis familiaris
acaagtgtattggagaagtgatttt

SEQ ID NO: 42582 - DNA, 25 bp, Canis familiaris
acaaggttcccgagtggtgcttaga

SEQ ID NO: 42583 - DNA, 25 bp, Canis familiaris
acaacctgtcgttttgtgttcttcg

SEQ ID NO: 42584 - DNA, 25 bp, Canis familiaris
acaaccttcctgatatctttctttt

SEQ ID NO: 42585 - DNA, 25 bp, Canis familiaris
acaacaagtttgcttcttttcctct

SEQ ID NO: 42586 - DNA, 25 bp, Canis familiaris
acaacaactttgcgtgctaggtggt

SEQ ID NO: 42587 - DNA, 25 bp, Canis familiaris
acaacaggctgactgggtgttagtg

SEQ ID NO: 42588 - DNA, 25 bp, Canis familiaris
acaaggcagacactgctggatttag

SEQ ID NO: 42589 - DNA, 25 bp, Canis familiaris
acaagatgatgactatctggcgtta

SEQ ID NO: 42590 - DNA, 25 bp, Canis familiaris
acaaagtgcatggcttgggctcagg

SEQ ID NO: 42591 - DNA, 25 bp, Canis familiaris
acaacaccatatctggagtgcagtg

SEQ ID NO: 42592 - DNA, 25 bp, Canis familiaris
acaacaagcaacatgtggtggtgat

SEQ ID NO: 42593 - DNA, 25 bp, Canis familiaris
acaaattccatcttgtggaggctat

SEQ ID NO: 42594 - DNA, 25 bp, Canis familiaris
acaaactggacaacttgatggcaat

SEQ ID NO: 42595 - DNA, 25 bp, Canis familiaris
acacaactgatacaactgtacagag

SEQ ID NO: 42596 - DNA, 25 bp, Canis familiaris
aaagttgagataccatttacagggc

SEQ ID NO: 42597 - DNA, 25 bp, Canis familiaris
acaagttgtacacaaaacagctggt

SEQ ID NO: 42598 - DNA, 25 bp, Canis familiaris
acaagttgtactataaaagcaggct

SEQ ID NO: 42599 - DNA, 25 bp, Canis familiaris
acaagtctgttttacaagcagtgca

SEQ ID NO: 42600 - DNA, 25 bp, Canis familiaris
acaaggctgatctggagacacagcg

SEQ ID NO: 42601 - DNA, 25 bp, Canis familiaris
acaagtgatcattctggctgaccct

SEQ ID NO: 42602 - DNA, 25 bp, Canis familiaris
acaatctgagctactgggatgcccc

SEQ ID NO: 42603 - DNA, 25 bp, Canis familiaris
acaattgcagccactggagacctcg

SEQ ID NO: 42604 - DNA, 25 bp, Canis familiaris
acaagtacatctacaggagcccctg

SEQ ID NO: 42605 - DNA, 25 bp, Canis familiaris
aaattacattgttgggccacctggc

SEQ ID NO: 42606 - DNA, 25 bp, Canis familiaris
aaattgacgttcctaccaagtgcac

SEQ ID NO: 42607 - DNA, 25 bp, Canis familiaris
aaattactgtttcttcttacacctg

SEQ ID NO: 42608 - DNA, 25 bp, Canis familiaris
aaatttattttgcttcccacagtat

SEQ ID NO: 42609 - DNA, 25 bp, Canis familiaris
aaataccattttctacctcaagtga

SEQ ID NO: 42610 - DNA, 25 bp, Canis familiaris
aaataacattttctcacctataaag

SEQ ID NO: 42611 - DNA, 25 bp, Canis familiaris
acaaagcacatcattaatccactat

SEQ ID NO: 42612 - DNA, 25 bp, Canis familiaris
acaagatcactgactgctttccact

SEQ ID NO: 42613 - DNA, 25 bp, Canis familiaris
acaatgtgccagacactttgcctcc

SEQ ID NO: 42614 - DNA, 25 bp, Canis familiaris
acaaatgttgtgcctttggctgccg

SEQ ID NO: 42615 - DNA, 25 bp, Canis familiaris
acaaagggcatacctggtctggcac

SEQ ID NO: 42616 - DNA, 25 bp, Canis familiaris
acaagaagctgttgattgactatca

SEQ ID NO: 42617 - DNA, 25 bp, Canis familiaris
acaagacatggtgaaagcttttgcc

SEQ ID NO: 42618 - DNA, 25 bp, Canis familiaris
acacaacatgtagctaggtcttctg

SEQ ID NO: 42619 - DNA, 25 bp, Canis familiaris
acaacacattgaagctccgtttccc

SEQ ID NO: 42620 - DNA, 25 bp, Canis familiaris
acaaactctgagcacctgtttcttc

SEQ ID NO: 42621 - DNA, 25 bp, Canis familiaris
acaagttcgacgtcacatggtgttt

SEQ ID NO: 42622 - DNA, 25 bp, Canis familiaris
acaagtatctagctgcctttgcatg

SEQ ID NO: 42623 - DNA, 25 bp, Canis familiaris
acaacgactatgttctctgaatgag

SEQ ID NO: 42624 - DNA, 25 bp, Canis familiaris
acaaccctgagatcacaagctgagc

SEQ ID NO: 42625 - DNA, 25 bp, Canis familiaris
acaaccctgtcatctatatcatgat

SEQ ID NO: 42626 - DNA, 25 bp, Canis familiaris
acaaatgctggtgcccattcagatc

SEQ ID NO: 42627 - DNA, 25 bp, Canis familiaris
aaattgtgatgtgccaaactggttg

SEQ ID NO: 42628 - DNA, 25 bp, Canis familiaris
acaactggttcacaagctctgttct

SEQ ID NO: 42629 - DNA, 25 bp, Canis familiaris
acaactttcatacttcagatgtttt

SEQ ID NO: 42630 - DNA, 25 bp, Canis familiaris
acaacttgttgtcctagatttttct

SEQ ID NO: 42631 - DNA, 25 bp, Canis familiaris
aaattcgagtccttagcttctttct

SEQ ID NO: 42632 - DNA, 25 bp, Canis familiaris
aaatttagagacccctgactttctg

SEQ ID NO: 42633 - DNA, 25 bp, Canis familiaris
aactttcgagcctccttatattgct

SEQ ID NO: 42634 - DNA, 25 bp, Canis familiaris
aacggtcaacacgggctaaagtatg

SEQ ID NO: 42635 - DNA, 25 bp, Canis familiaris
aacgttcaaaccaagctcacggctt

SEQ ID NO: 42636 - DNA, 25 bp, Canis familiaris
aaatgtctctaatacaatacggttg

SEQ ID NO: 42637 - DNA, 25 bp, Canis familiaris
aaattctgctaagacttccacttct

SEQ ID NO: 42638 - DNA, 25 bp, Canis familiaris
aaatccggacagcaaacagccacct

SEQ ID NO: 42639 - DNA, 25 bp, Canis familiaris
aaatccgtgagccgaatcagcttcc

SEQ ID NO: 42640 - DNA, 25 bp, Canis familiaris
acaaccctgagctgtatctgttctt

SEQ ID NO: 42641 - DNA, 25 bp, Canis familiaris
acaaccatggagtttctctcttcct

SEQ ID NO: 42642 - DNA, 25 bp, Canis familiaris
acaactcttagatctactcttgcct

SEQ ID NO: 42643 - DNA, 25 bp, Canis familiaris
acaaccgtggttgagccactatgtc

SEQ ID NO: 42644 - DNA, 25 bp, Canis familiaris
acaaccctggttggatgaatctgac

SEQ ID NO: 42645 - DNA, 25 bp, Canis familiaris
acaacagccgggtcgtatcacatga

SEQ ID NO: 42646 - DNA, 25 bp, Canis familiaris
acaaccctgaagtgcttgacatcac

SEQ ID NO: 42647 - DNA, 25 bp, Canis familiaris
acaacctggacgtgacgcagctgac

SEQ ID NO: 42648 - DNA, 25 bp, Canis familiaris
acaacgcggaagtcaagcgccgggc

SEQ ID NO: 42649 - DNA, 25 bp, Canis familiaris
acaaggtggacaaaagcggctggac

SEQ ID NO: 42650 - DNA, 25 bp, Canis familiaris
acaacggtgagaaagaggcctggca

SEQ ID NO: 42651 - DNA, 25 bp, Canis familiaris
acaacttggagaaagagcgtgaatc

SEQ ID NO: 42652 - DNA, 25 bp, Canis familiaris
acaagttgacaaaaagcagctggta

SEQ ID NO: 42653 - DNA, 25 bp, Canis familiaris
acaaggtgacaagaagcaggcgtac

SEQ ID NO: 42654 - DNA, 25 bp, Canis familiaris
acacaagtacacataactgagcctc

SEQ ID NO: 42655 - DNA, 25 bp, Canis familiaris
acaagctgctcatctttaagaactc

SEQ ID NO: 42656 - DNA, 25 bp, Canis familiaris
acaactcccaatactcagcaaactt

SEQ ID NO: 42657 - DNA, 25 bp, Canis familiaris
acaacagcctcaagatcatcagcaa

SEQ ID NO: 42658 - DNA, 25 bp, Canis familiaris
acaattgcactccagatgatccaca

SEQ ID NO: 42659 - DNA, 25 bp, Canis familiaris
acaactcactcaagattgtcagcaa

SEQ ID NO: 42660 - DNA, 25 bp, Canis familiaris
acaaccccacagatgataggccttc

SEQ ID NO: 42661 - DNA, 25 bp, Canis familiaris
acaactggacccagatcaggcctcg

SEQ ID NO: 42662 - DNA, 25 bp, Canis familiaris
acaaatgtacccatgcacacactgt

SEQ ID NO: 42663 - DNA, 25 bp, Canis familiaris
acaacaatcctcaagtgacacactt

SEQ ID NO: 42664 - DNA, 25 bp, Canis familiaris
acaaagtcctgctggcatccagcct

SEQ ID NO: 42665 - DNA, 25 bp, Canis familiaris
acaacaccactcggtgatgctcacc

SEQ ID NO: 42666 - DNA, 25 bp, Canis familiaris
acaagccaacatcctggctgtctcg

SEQ ID NO: 42667 - DNA, 25 bp, Canis familiaris
acaatccagagtccggttcttacga

SEQ ID NO: 42668 - DNA, 25 bp, Canis familiaris
aaatcaaagtctggtatcctaagct

SEQ ID NO: 42669 - DNA, 25 bp, Canis familiaris
aaatacatcggcgagaacctccagc

SEQ ID NO: 42670 - DNA, 25 bp, Canis familiaris
acaaattcgctgtaacaaccacaca

SEQ ID NO: 42671 - DNA, 25 bp, Canis familiaris
acaacacatctctaaaaatccacct

SEQ ID NO: 42672 - DNA, 25 bp, Canis familiaris
acaaccactatccaaaaacatcttt

SEQ ID NO: 42673 - DNA, 25 bp, Canis familiaris
acaaccacttccaagaggactccgc

SEQ ID NO: 42674 - DNA, 25 bp, Canis familiaris
aaataccctccagagggatcccctg

SEQ ID NO: 42675 - DNA, 25 bp, Canis familiaris
aaatatccctgcaggggtttcccag

SEQ ID NO: 42676 - DNA, 25 bp, Canis familiaris
acaaatgccaggtgggggtacacgg

SEQ ID NO: 42677 - DNA, 25 bp, Canis familiaris
acaaaggcagggcggcaggccagtc

SEQ ID NO: 42678 - DNA, 25 bp, Canis familiaris
acaaccagcagttcctggcaggcac

SEQ ID NO: 42679 - DNA, 25 bp, Canis familiaris
acaaccagcagttcctggcaggcac

SEQ ID NO: 42680 - DNA, 25 bp, Canis familiaris
acaacagccaaatcatggaagcagc

SEQ ID NO: 42681 - DNA, 25 bp, Canis familiaris
acaacgtacagaccaggagacccac

SEQ ID NO: 42682 - DNA, 25 bp, Canis familiaris
acaactgtacagagcggcatatgag

SEQ ID NO: 42683 - DNA, 25 bp, Canis familiaris
acaagctataggtacccatatggga

SEQ ID NO: 42684 - DNA, 25 bp, Canis familiaris
acaagtcataaggagttcaatcgaa

SEQ ID NO: 42685 - DNA, 25 bp, Canis familiaris
acaagtggaatggagtctgcagaaa

SEQ ID NO: 42686 - DNA, 25 bp, Canis familiaris
acaagtgacacagtagttctaaacc

SEQ ID NO: 42687 - DNA, 25 bp, Canis familiaris
caaggtaagaccagtcctacaccgt

SEQ ID NO: 42688 - DNA, 25 bp, Canis familiaris
aaatctgaaacctgttgctacccgt

SEQ ID NO: 42689 - DNA, 25 bp, Canis familiaris
aaaccaaacctatggtaagccatgg

SEQ ID NO: 42690 - DNA, 25 bp, Canis familiaris
aactctaacaccacaactgaagtaa

SEQ ID NO: 42691 - DNA, 25 bp, Canis familiaris
aaagcagaaccctcagaataagtaa

SEQ ID NO: 42692 - DNA, 25 bp, Canis familiaris
aaagagtacacgcaaattaataaga

SEQ ID NO: 42693 - DNA, 25 bp, Canis familiaris
acaagcaggacaacaaaaaaggaag

SEQ ID NO: 42694 - DNA, 25 bp, Canis familiaris
acaaagaactcctaaaacacaacag

SEQ ID NO: 42695 - DNA, 25 bp, Canis familiaris
acaaacaaccaagcaaacatcaaac

SEQ ID NO: 42696 - DNA, 25 bp, Canis familiaris
acaaacagacacaacaaacaatcaa

SEQ ID NO: 42697 - DNA, 25 bp, Canis familiaris
acaagtcaaagacaataccatatga

SEQ ID NO: 42698 - DNA, 25 bp, Canis familiaris
acaagtacagaacttcagaacctga

SEQ ID NO: 42699 - DNA, 25 bp, Canis familiaris
acaaagatacactttcaaaatctga

SEQ ID NO: 42700 - DNA, 25 bp, Canis familiaris
aaattgtgacctctataaacttgta

SEQ ID NO: 42701 - DNA, 25 bp, Canis familiaris
aaaggctgaggtctccaaattccca

SEQ ID NO: 42702 - DNA, 25 bp, Canis familiaris
aaatacggttcttgccataactcct

SEQ ID NO: 42703 - DNA, 25 bp, Canis familiaris
aaatacgtttcatcctcgagtacct

SEQ ID NO: 42704 - DNA, 25 bp, Canis familiaris
acaatgtcctgttaatcccggtgac

SEQ ID NO: 42705 - DNA, 25 bp, Canis familiaris
aaattcctgtctaatacctgctggt

SEQ ID NO: 42706 - DNA, 25 bp, Canis familiaris
acaactctcgatacaacatcctgga

SEQ ID NO: 42707 - DNA, 25 bp, Canis familiaris
acaactgctccaacagatatctcag

SEQ ID NO: 42708 - DNA, 25 bp, Canis familiaris
acaactgtcaaattctgcacatcag

SEQ ID NO: 42709 - DNA, 25 bp, Canis familiaris
acaaggacaaagtctgctgcatcca

SEQ ID NO: 42710 - DNA, 25 bp, Canis familiaris
acaaagcacaacaagccgctctact

SEQ ID NO: 42711 - DNA, 25 bp, Canis familiaris
acaaagtcaagtgccagcctcagtt

SEQ ID NO: 42712 - DNA, 25 bp, Canis familiaris
acaagaagcaagtttcagcctcctt

SEQ ID NO: 42713 - DNA, 25 bp, Canis familiaris
acaatgacaagcctttcagcaccgt

SEQ ID NO: 42714 - DNA, 25 bp, Canis familiaris
acaagacaaggtgacaagaagcagg

SEQ ID NO: 42715 - DNA, 25 bp, Canis familiaris
acaagagcaagggcccagtgcaagg

SEQ ID NO: 42716 - DNA, 25 bp, Canis familiaris
acaatgatgaccgccaagtgaagac

SEQ ID NO: 42717 - DNA, 25 bp, Canis familiaris
acaagatacccaccacaggaatagg

SEQ ID NO: 42718 - DNA, 25 bp, Canis familiaris
acaacacacgcccctgaggaatgaa

SEQ ID NO: 42719 - DNA, 25 bp, Canis familiaris
acaagaggcgcgcgggagagagagg

SEQ ID NO: 42720 - DNA, 25 bp, Canis familiaris
acaacaggtgcgcggtggggatgat

SEQ ID NO: 42721 - DNA, 25 bp, Canis familiaris
acaatactctggtggcggtgaaatc

SEQ ID NO: 42722 - DNA, 25 bp, Canis familiaris
acaattctcccgtgcggctgaagat

SEQ ID NO: 42723 - DNA, 25 bp, Canis familiaris
acaattgccgttttggacagagaat

SEQ ID NO: 42724 - DNA, 25 bp, Canis familiaris
aaattggcctgcagaggactagcct

SEQ ID NO: 42725 - DNA, 25 bp, Canis familiaris
aaattggccttccagcaatgtagga

SEQ ID NO: 42726 - DNA, 25 bp, Canis familiaris
aaattggccctggcaaatggctagc

SEQ ID NO: 42727 - DNA, 25 bp, Canis familiaris
aaataagcccctgtgtttcagtgtt

SEQ ID NO: 42728 - DNA, 25 bp, Canis familiaris
aaagactacccagctgtttgagata

SEQ ID NO: 42729 - DNA, 25 bp, Canis familiaris
aaaggcatatgaggccacgtttatt

SEQ ID NO: 42730 - DNA, 25 bp, Canis familiaris
acaagaaaatgtgcatcttcttcct

SEQ ID NO: 42731 - DNA, 25 bp, Canis familiaris
acaatgccagcatttggattttttt

SEQ ID NO: 42732 - DNA, 25 bp, Canis familiaris
acaatgggcacatgtgtttatctct

SEQ ID NO: 42733 - DNA, 25 bp, Canis familiaris
acaatgttgaagtgtttagattggt

SEQ ID NO: 42734 - DNA, 25 bp, Canis familiaris
aaattggaagggtggtgtgtgtgtg

SEQ ID NO: 42735 - DNA, 25 bp, Canis familiaris
aaattgctgactgtaggtttgggag

SEQ ID NO: 42736 - DNA, 25 bp, Canis familiaris
aaatttcaccagtgtagcttggggt

SEQ ID NO: 42737 - DNA, 25 bp, Canis familiaris
aaatttcacaatcttggttactttg

SEQ ID NO: 42738 - DNA, 25 bp, Canis familiaris
acaaaccaattctgggtctcctttg

SEQ ID NO: 42739 - DNA, 25 bp, Canis familiaris
acaagttccatttgtgggactcctt

SEQ ID NO: 42740 - DNA, 25 bp, Canis familiaris
aaatttcctgataggggatccctgg

SEQ ID NO: 42741 - DNA, 25 bp, Canis familiaris
aactttttatgctggggcagcccgc

SEQ ID NO: 42742 - DNA, 25 bp, Canis familiaris
aactgttgcctaattgggaagtgcc

SEQ ID NO: 42743 - DNA, 25 bp, Canis familiaris
aaatttatctcctgtggaaatccca

SEQ ID NO: 42744 - DNA, 25 bp, Canis familiaris
aaatattcacccagtggtcactcca

SEQ ID NO: 42745 - DNA, 25 bp, Canis familiaris
aaatataactttgcttgccctcgac

SEQ ID NO: 42746 - DNA, 25 bp, Canis familiaris
aaatattatttgatcctggggcgcc

SEQ ID NO: 42747 - DNA, 25 bp, Canis familiaris
acaagttaattgcctcctggtgtcg

SEQ ID NO: 42748 - DNA, 25 bp, Canis familiaris
acaatgttaatcatctccctggatc

SEQ ID NO: 42749 - DNA, 25 bp, Canis familiaris
acaagcctatacacagtttggagga

SEQ ID NO: 42750 - DNA, 25 bp, Canis familiaris
acaagcatcttgtcactggttctgt

SEQ ID NO: 42751 - DNA, 25 bp, Canis familiaris
acaagccatctgttggcgagtctgg

SEQ ID NO: 42752 - DNA, 25 bp, Canis familiaris
acaagccatctcctctgtaggtggc

SEQ ID NO: 42753 - DNA, 25 bp, Canis familiaris
acaagagcatcaatcccgacgaggc

SEQ ID NO: 42754 - DNA, 25 bp, Canis familiaris
acaagagacttgatggtccatggca

SEQ ID NO: 42755 - DNA, 25 bp, Canis familiaris
aaatagatcctgtgaacgggcaaat

SEQ ID NO: 42756 - DNA, 25 bp, Canis familiaris
aaatagatccgttcgtcggtcttct

SEQ ID NO: 42757 - DNA, 25 bp, Canis familiaris
aaatgactacgcactcgtggtttcg

SEQ ID NO: 42758 - DNA, 25 bp, Canis familiaris
aaatccttagctgaaagtgtttctg

SEQ ID NO: 42759 - DNA, 25 bp, Canis familiaris
acaacgttcccttaagtgactacat

SEQ ID NO: 42760 - DNA, 25 bp, Canis familiaris
acaactttcaccttctaggatctac

SEQ ID NO: 42761 - DNA, 25 bp, Canis familiaris
acaacacctcagccattctatggaa

SEQ ID NO: 42762 - DNA, 25 bp, Canis familiaris
acaagactacagcctttatgacatg

SEQ ID NO: 42763 - DNA, 25 bp, Canis familiaris
cacatcccatacacttctaactagt

SEQ ID NO: 42764 - DNA, 25 bp, Canis familiaris
acaagcctcaagacttccaccttgt

SEQ ID NO: 42765 - DNA, 25 bp, Canis familiaris
acaagttcattgatggccccatttc

SEQ ID NO: 42766 - DNA, 25 bp, Canis familiaris
acaattctatatacagtgactccta

SEQ ID NO: 42767 - DNA, 25 bp, Canis familiaris
aaattccatgatactgctgtcctct

SEQ ID NO: 42768 - DNA, 25 bp, Canis familiaris
aaattccagactccaagccagatct

SEQ ID NO: 42769 - DNA, 25 bp, Canis familiaris
aaattcggcaccgagagcttcatcc

SEQ ID NO: 42770 - DNA, 25 bp, Canis familiaris
aaatccggggcgcagtacatcgcct

SEQ ID NO: 42771 - DNA, 25 bp, Canis familiaris
acaacacggaggcggtcatcatggc

SEQ ID NO: 42772 - DNA, 25 bp, Canis familiaris
aaaaagcggcgctctagcattggcg

SEQ ID NO: 42773 - DNA, 25 bp, Canis familiaris
acaacaagggcaccccaacatggga

SEQ ID NO: 42774 - DNA, 25 bp, Canis familiaris
acaacaagcgaaccacacgacaagc

SEQ ID NO: 42775 - DNA, 25 bp, Canis familiaris
acaacaacagacacgacgacaccgc

SEQ ID NO: 42776 - DNA, 25 bp, Canis familiaris
acaagtctcaccaggacaatcaccc

SEQ ID NO: 42777 - DNA, 25 bp, Canis familiaris
acaagtcaccttggtagctagcacc

SEQ ID NO: 42778 - DNA, 25 bp, Canis familiaris
acaaggaccttgttgagatgaacat

SEQ ID NO: 42779 - DNA, 25 bp, Canis familiaris
acaaggagcatgttgattggaggcc

SEQ ID NO: 42780 - DNA, 25 bp, Canis familiaris
acaacatggatgaagctagagtgtg

SEQ ID NO: 42781 - DNA, 25 bp, Canis familiaris
acaactgcagcaggcgcacagagtt

SEQ ID NO: 42782 - DNA, 25 bp, Canis familiaris
acaatgatgacaacccagtgctctc

SEQ ID NO: 42783 - DNA, 25 bp, Canis familiaris
acaatgcatggaaactcagtcaagt

SEQ ID NO: 42784 - DNA, 25 bp, Canis familiaris
acaacagtgaatcctcttcacctcg

SEQ ID NO: 42785 - DNA, 25 bp, Canis familiaris
acaacagtgaaaatgcttttatctc

SEQ ID NO: 42786 - DNA, 25 bp, Canis familiaris
acaacattacaatttttgatcttgc

SEQ ID NO: 42787 - DNA, 25 bp, Canis familiaris
acaaccatacacatgctttcactgt

SEQ ID NO: 42788 - DNA, 25 bp, Canis familiaris
acaacaacacacatgcttccttgat

SEQ ID NO: 42789 - DNA, 25 bp, Canis familiaris
aaatccatcgcaagtttcgtggatg

SEQ ID NO: 42790 - DNA, 25 bp, Canis familiaris
aaattcaggctagcttccgtggaca

SEQ ID NO: 42791 - DNA, 25 bp, Canis familiaris
aaattcaagctaatccctggggatg

SEQ ID NO: 42792 - DNA, 25 bp, Canis familiaris
aaatttcctagatctctgaagagtg

SEQ ID NO: 42793 - DNA, 25 bp, Canis familiaris
aaatttgtcgaaggctctgaccggg

SEQ ID NO: 42794 - DNA, 25 bp, Canis familiaris
aaattgctttgatcgcgcatgacaa

SEQ ID NO: 42795 - DNA, 25 bp, Canis familiaris
acaattgaatcttatcgggagaact

SEQ ID NO: 42796 - DNA, 25 bp, Canis familiaris
acaagtctttaaggggctaactgct

SEQ ID NO: 42797 - DNA, 25 bp, Canis familiaris
acaagctcttttattgactacacat

SEQ ID NO: 42798 - DNA, 25 bp, Canis familiaris
acaactcatgtgatttctagtgaaa

SEQ ID NO: 42799 - DNA, 25 bp, Canis familiaris
aaattcgtcttttctggatgctcaa

SEQ ID NO: 42800 - DNA, 25 bp, Canis familiaris
acaatccttgaaatatatgggtaca

SEQ ID NO: 42801 - DNA, 25 bp, Canis familiaris
acaatgctctgatacatgaagggta

SEQ ID NO: 42802 - DNA, 25 bp, Canis familiaris
acaagcttgtgattatactggtatt

SEQ ID NO: 42803 - DNA, 25 bp, Canis familiaris
acaacttgtcttagcacgagataat

SEQ ID NO: 42804 - DNA, 25 bp, Canis familiaris
acaactcttctttgcctgcaaatat

SEQ ID NO: 42805 - DNA, 25 bp, Canis familiaris
acaacaaatctcacactctaacaaa

SEQ ID NO: 42806 - DNA, 25 bp, Canis familiaris
acaagaagtttgtgcctactcaaca

SEQ ID NO: 42807 - DNA, 25 bp, Canis familiaris
acaatgtagttcagccagtttcaga

SEQ ID NO: 42808 - DNA, 25 bp, Canis familiaris
acaagaattttcaacctgtgtcagg

SEQ ID NO: 42809 - DNA, 25 bp, Canis familiaris
acaagctttttggacatctattcaa

SEQ ID NO: 42810 - DNA, 25 bp, Canis familiaris
acaagtttcagatggcttactcaaa

SEQ ID NO: 42811 - DNA, 25 bp, Canis familiaris
acaaggttggacctctcaaccaata

SEQ ID NO: 42812 - DNA, 25 bp, Canis familiaris
aaaggacaagtggttcaactagaat

SEQ ID NO: 42813 - DNA, 25 bp, Canis familiaris
aaaggcaaccattttaagtgacaat

SEQ ID NO: 42814 - DNA, 25 bp, Canis familiaris
aaaggcaataaagcaaagtacaata

SEQ ID NO: 42815 - DNA, 25 bp, Canis familiaris
aaagaaataaagaccaagtgccaag

SEQ ID NO: 42816 - DNA, 25 bp, Canis familiaris
aaagaagaggaaccgccagctgctt

SEQ ID NO: 42817 - DNA, 25 bp, Canis familiaris
acaacgaggggaccctgcagctgaa

SEQ ID NO: 42818 - DNA, 25 bp, Canis familiaris
acaagtgcaggtggaggcccagctg

SEQ ID NO: 42819 - DNA, 25 bp, Canis familiaris
acaagggttgcaagcagcccagctc

SEQ ID NO: 42820 - DNA, 25 bp, Canis familiaris
acaagggtgtgtaggatcgctgccg

SEQ ID NO: 42821 - DNA, 25 bp, Canis familiaris
acaacaggtgctcgcatttggctct

SEQ ID NO: 42822 - DNA, 25 bp, Canis familiaris
acaacctgatgtcatttgtctccca

SEQ ID NO: 42823 - DNA, 25 bp, Canis familiaris
acaacggagttctttgatcctctct

SEQ ID NO: 42824 - DNA, 25 bp, Canis familiaris
acaaccggatgtcttgattgattta

SEQ ID NO: 42825 - DNA, 25 bp, Canis familiaris
acaaccggatgtcttgattgattta

SEQ ID NO: 42826 - DNA, 25 bp, Canis familiaris
acaactctgtttccatgtcttgact

SEQ ID NO: 42827 - DNA, 25 bp, Canis familiaris
acaactcttttgcccactgtgagtt

SEQ ID NO: 42828 - DNA, 25 bp, Canis familiaris
aaatcatttcttcacatcgggttcc

SEQ ID NO: 42829 - DNA, 25 bp, Canis familiaris
aaatcatatgacaatctcaatagat

SEQ ID NO: 42830 - DNA, 25 bp, Canis familiaris
acaatctgtgcaccactgaatatgt

SEQ ID NO: 42831 - DNA, 25 bp, Canis familiaris
aaatctgactggcctaatgtgttga

SEQ ID NO: 42832 - DNA, 25 bp, Canis familiaris
aaatagcacaggcacaaagtaaact

SEQ ID NO: 42833 - DNA, 25 bp, Canis familiaris
aaatatccaggaccaaacccaacat

SEQ ID NO: 42834 - DNA, 25 bp, Canis familiaris
aaatttcaggaacatcacacacttc

SEQ ID NO: 42835 - DNA, 25 bp, Canis familiaris
aaattgtgggaaccgcgcaatccat

SEQ ID NO: 42836 - DNA, 25 bp, Canis familiaris
acaatatgtagtgtcacccgtcgct

SEQ ID NO: 42837 - DNA, 25 bp, Canis familiaris
acaatttttcttccttcgattgctg

SEQ ID NO: 42838 - DNA, 25 bp, Canis familiaris
aaatatttttaccattcgtgctcct

SEQ ID NO: 42839 - DNA, 25 bp, Canis familiaris
aaattgttttgactgccctgattat

SEQ ID NO: 42840 - DNA, 25 bp, Canis familiaris
aaatttatgtagactgtataagatt

SEQ ID NO: 42841 - DNA, 25 bp, Canis familiaris
aaattgtatgctttcagaataaatt

SEQ ID NO: 42842 - DNA, 25 bp, Canis familiaris
aaatcttagtctccaaatgaaagct

SEQ ID NO: 42843 - DNA, 25 bp, Canis familiaris
aaatctaatcccgaagtaacatgca

SEQ ID NO: 42844 - DNA, 25 bp, Canis familiaris
aaatctatgacctcaacttttcaaa

SEQ ID NO: 42845 - DNA, 25 bp, Canis familiaris
aaatctcaaaaaacaatttgtctat

SEQ ID NO: 42846 - DNA, 25 bp, Canis familiaris
aaatctgaaacatccggtagctttg

SEQ ID NO: 42847 - DNA, 25 bp, Canis familiaris
acaattggaacagcggttccgttgc

SEQ ID NO: 42848 - DNA, 25 bp, Canis familiaris
aaattccaaatgaccagttccagtt

SEQ ID NO: 42849 - DNA, 25 bp, Canis familiaris
aaatcccaaaacaagatccaggtga

SEQ ID NO: 42850 - DNA, 25 bp, Canis familiaris
acaactgccccaactacattgggtg

SEQ ID NO: 42851 - DNA, 25 bp, Canis familiaris
acaacttcctggacaaattgtaggc

SEQ ID NO: 42852 - DNA, 25 bp, Canis familiaris
acaaggtcacgggcaagacgccggc

SEQ ID NO: 42853 - DNA, 25 bp, Canis familiaris
acaaggtggtgggcacagcccctgt

SEQ ID NO: 42854 - DNA, 25 bp, Canis familiaris
acaaggggctgcaacacagggccgt

SEQ ID NO: 42855 - DNA, 25 bp, Canis familiaris
acaagcggcacaatacctgggggct

SEQ ID NO: 42856 - DNA, 25 bp, Canis familiaris
acaactactagcaacctgtgtccgt

SEQ ID NO: 42857 - DNA, 25 bp, Canis familiaris
acaactacagtcagccttatgccct

SEQ ID NO: 42858 - DNA, 25 bp, Canis familiaris
acaactttgtcaagctcatttcctg

SEQ ID NO: 42859 - DNA, 25 bp, Canis familiaris
acaactagtattactctcttctctc

SEQ ID NO: 42860 - DNA, 25 bp, Canis familiaris
acaacggttgtattgcattttcctt

SEQ ID NO: 42861 - DNA, 25 bp, Canis familiaris
acaacttttgaatcatgtccacctg

SEQ ID NO: 42862 - DNA, 25 bp, Canis familiaris
aaattttaaatatgcatcccctggg

SEQ ID NO: 42863 - DNA, 25 bp, Canis familiaris
aaagacactaaatggggcacctggg

SEQ ID NO: 42864 - DNA, 25 bp, Canis familiaris
aaatctatctaagagggatccctgg

SEQ ID NO: 42865 - DNA, 25 bp, Canis familiaris
aaatcccacatcaggggatccctgg

SEQ ID NO: 42866 - DNA, 25 bp, Canis familiaris
aaatcctcattctggacttttctgc

SEQ ID NO: 42867 - DNA, 25 bp, Canis familiaris
aaatccttggttcactcatgttcat

SEQ ID NO: 42868 - DNA, 25 bp, Canis familiaris
acaaccattggtattcatctgtttt

SEQ ID NO: 42869 - DNA, 25 bp, Canis familiaris
acaagacttgggaactctcggcagc

SEQ ID NO: 42870 - DNA, 25 bp, Canis familiaris
acaactctctgagggcacttcaggc

SEQ ID NO: 42871 - DNA, 25 bp, Canis familiaris
acaacctctgaggggctgtaagcag

SEQ ID NO: 42872 - DNA, 25 bp, Canis familiaris
aaattactgcaggggcgtctggctg

SEQ ID NO: 42873 - DNA, 25 bp, Canis familiaris
aaattcaccaatgagcttcttgctt

SEQ ID NO: 42874 - DNA, 25 bp, Canis familiaris
acaatgcagcacgaatctagtctct

SEQ ID NO: 42875 - DNA, 25 bp, Canis familiaris
acaactcacaagtcaggtcatctcc

SEQ ID NO: 42876 - DNA, 25 bp, Canis familiaris
acaattccaagaggagacactggag

SEQ ID NO: 42877 - DNA, 25 bp, Canis familiaris
aaattctcccaggagcaagaggagc

SEQ ID NO: 42878 - DNA, 25 bp, Canis familiaris
aaatctcccaaggtgaatgcgagga

SEQ ID NO: 42879 - DNA, 25 bp, Canis familiaris
aaatccttattggtaggcctcaaag

SEQ ID NO: 42880 - DNA, 25 bp, Canis familiaris
aaatccatatttattggttatagaa

SEQ ID NO: 42881 - DNA, 25 bp, Canis familiaris
aaattgtattctactcttttatgta

SEQ ID NO: 42882 - DNA, 25 bp, Canis familiaris
aaattggtttgttcagtgtggagta

SEQ ID NO: 42883 - DNA, 25 bp, Canis familiaris
aaattagttgtttatgtttagtgat

SEQ ID NO: 42884 - DNA, 25 bp, Canis familiaris
aaatgttttgtacacatttgactac

SEQ ID NO: 42885 - DNA, 25 bp, Canis familiaris
aaattgtgattgaagaccatttagt

SEQ ID NO: 42886 - DNA, 25 bp, Canis familiaris
aaatagatatggaaacactagtcac

SEQ ID NO: 42887 - DNA, 25 bp, Canis familiaris
aaatctgcatatgtaaattacccat

SEQ ID NO: 42888 - DNA, 25 bp, Canis familiaris
aaatcaagtgccaaagcttcagccc

SEQ ID NO: 42889 - DNA, 25 bp, Canis familiaris
aaatactgttgaaaggtggcattca

SEQ ID NO: 42890 - DNA, 25 bp, Canis familiaris
acaatacttaaccactaacatctca

SEQ ID NO: 42891 - DNA, 25 bp, Canis familiaris
acaatagttttgcacaacctctcaa

SEQ ID NO: 42892 - DNA, 25 bp, Canis familiaris
acaatgactttttaaacatctctta

SEQ ID NO: 42893 - DNA, 25 bp, Canis familiaris
acaagaccttcttcaatctgtctcc

SEQ ID NO: 42894 - DNA, 25 bp, Canis familiaris
acaagactgtctaactgctgttccc

SEQ ID NO: 42895 - DNA, 25 bp, Canis familiaris
acaagcatcgatgattttggtcccc

SEQ ID NO: 42896 - DNA, 25 bp, Canis familiaris
aaatcacgctacacttggtgtccca

SEQ ID NO: 42897 - DNA, 25 bp, Canis familiaris
acaatcaagctccttttggggaaat

SEQ ID NO: 42898 - DNA, 25 bp, Canis familiaris
aattaccacctctagtgcgggtact

SEQ ID NO: 42899 - DNA, 25 bp, Canis familiaris
aaatcaccactctcggcagtgggaa

SEQ ID NO: 42900 - DNA, 25 bp, Canis familiaris
aaatttatctgccacgttgtgggca

SEQ ID NO: 42901 - DNA, 25 bp, Canis familiaris
aaatttcactgcaacattcctgggc

SEQ ID NO: 42902 - DNA, 25 bp, Canis familiaris
aaatttaactagttgccctgtcctg

SEQ ID NO: 42903 - DNA, 25 bp, Canis familiaris
aaaatcggagttctcctctgtccgt

SEQ ID NO: 42904 - DNA, 25 bp, Canis familiaris
aaattcaagggtctccacagtcaca

SEQ ID NO: 42905 - DNA, 25 bp, Canis familiaris
aaaccaccggtgattcatagctgcc

SEQ ID NO: 42906 - DNA, 25 bp, Canis familiaris
aaatcccagggtctgattactcacc

SEQ ID NO: 42907 - DNA, 25 bp, Canis familiaris
aaatgcacggggactgttccccaca

SEQ ID NO: 42908 - DNA, 25 bp, Canis familiaris
aaatattggttttgtgtcccacact

SEQ ID NO: 42909 - DNA, 25 bp, Canis familiaris
aaatttggtcaatggcccaactctc

SEQ ID NO: 42910 - DNA, 25 bp, Canis familiaris
aaattgtattcctgaccgaactctg

SEQ ID NO: 42911 - DNA, 25 bp, Canis familiaris
aaatctgttttctgaactctccttc

SEQ ID NO: 42912 - DNA, 25 bp, Canis familiaris
aaattttcccaggacactagctagt

SEQ ID NO: 42913 - DNA, 25 bp, Canis familiaris
aaatttttggctgacacaggaagaa

SEQ ID NO: 42914 - DNA, 25 bp, Canis familiaris
aaattttgagtcttggccagctaaa

SEQ ID NO: 42915 - DNA, 25 bp, Canis familiaris
acaagtacagcttttggctcaccac

SEQ ID NO: 42916 - DNA, 25 bp, Canis familiaris
acaatgtgatactatttttccttat

SEQ ID NO: 42917 - DNA, 25 bp, Canis familiaris
acaaggtcacttctcatatctattt

SEQ ID NO: 42918 - DNA, 25 bp, Canis familiaris
aaaggtcccaccaatacattactag

SEQ ID NO: 42919 - DNA, 25 bp, Canis familiaris
acaaggcaccagacccaacatatac

SEQ ID NO: 42920 - DNA, 25 bp, Canis familiaris
aaattggctagttccatacatctac

SEQ ID NO: 42921 - DNA, 25 bp, Canis familiaris
aaattgacttattccatcatgcttg

SEQ ID NO: 42922 - DNA, 25 bp, Canis familiaris
acaagatcaccaattccatcggtga

SEQ ID NO: 42923 - DNA, 25 bp, Canis familiaris
acaagtcagtcaacagtctcagggg

SEQ ID NO: 42924 - DNA, 25 bp, Canis familiaris
acaagtctggcaggactcacaggag

SEQ ID NO: 42925 - DNA, 25 bp, Canis familiaris
acaagtgcttccgcccagaagtatt

SEQ ID NO: 42926 - DNA, 25 bp, Canis familiaris
acaagatgcttgagacccagacttt

SEQ ID NO: 42927 - DNA, 25 bp, Canis familiaris
acaaggtctgcaatgtgctccaggc

SEQ ID NO: 42928 - DNA, 25 bp, Canis familiaris
acaaggaggctttgcccaaggctgc

SEQ ID NO: 42929 - DNA, 25 bp, Canis familiaris
acaagggagctctggctaagctggt

SEQ ID NO: 42930 - DNA, 25 bp, Canis familiaris
acaagggagctctggctaagctggt

SEQ ID NO: 42931 - DNA, 25 bp, Canis familiaris
acaagggagctctggctaagctggt

SEQ ID NO: 42932 - DNA, 25 bp, Canis familiaris
acaagggagctctgcttagcacctt

SEQ ID NO: 42933 - DNA, 25 bp, Canis familiaris
acaaggagactggcttttgcggctt

SEQ ID NO: 42934 - DNA, 25 bp, Canis familiaris
acaaggatgttcgtcggtcgtggtt

SEQ ID NO: 42935 - DNA, 25 bp, Canis familiaris
acaagcagattttcctgggtggtgt

SEQ ID NO: 42936 - DNA, 25 bp, Canis familiaris
acaatgcgggttctggctttgtgct

SEQ ID NO: 42937 - DNA, 25 bp, Canis familiaris
acaatggggttgtctggcatacctg

SEQ ID NO: 42938 - DNA, 25 bp, Canis familiaris
acaagtggctggcacctgatggcct

SEQ ID NO: 42939 - DNA, 25 bp, Canis familiaris
acaagcgacgataaccattggcccc

SEQ ID NO: 42940 - DNA, 25 bp, Canis familiaris
acaagcgagtcatgacgtgtgcccc

SEQ ID NO: 42941 - DNA, 25 bp, Canis familiaris
acaaggttcaaagcatggctcccct

SEQ ID NO: 42942 - DNA, 25 bp, Canis familiaris
acaaggactcaaagccatgccagcc

SEQ ID NO: 42943 - DNA, 25 bp, Canis familiaris
acaagacactcactgggactcagcc

SEQ ID NO: 42944 - DNA, 25 bp, Canis familiaris
acaatgagatctctgggatatccca

SEQ ID NO: 42945 - DNA, 25 bp, Canis familiaris
acaatggcattcttggtggacaccc

SEQ ID NO: 42946 - DNA, 25 bp, Canis familiaris
acaatcagctactgaggagccccct

SEQ ID NO: 42947 - DNA, 25 bp, Canis familiaris
acaagcagcttctgatacacctacc

SEQ ID NO: 42948 - DNA, 25 bp, Canis familiaris
acaatggctcatttaatccttactg

SEQ ID NO: 42949 - DNA, 25 bp, Canis familiaris
acaacgctcatcgtgcagaggctgt

SEQ ID NO: 42950 - DNA, 25 bp, Canis familiaris
acaatcctatctacaggctctgttc

SEQ ID NO: 42951 - DNA, 25 bp, Canis familiaris
acaatggccctcaatgacacgtggt

SEQ ID NO: 42952 - DNA, 25 bp, Canis familiaris
acaatggcacccagtgccacgcagt

SEQ ID NO: 42953 - DNA, 25 bp, Canis familiaris
acaatgagctgcgtgtggctcccga

SEQ ID NO: 42954 - DNA, 25 bp, Canis familiaris
acaatgagctgcgtgtggcccctga

SEQ ID NO: 42955 - DNA, 25 bp, Canis familiaris
acaatgagctgcgtgtggcccctga

SEQ ID NO: 42956 - DNA, 25 bp, Canis familiaris
aaatatctaatgagccccttttctt

SEQ ID NO: 42957 - DNA, 25 bp, Canis familiaris
aaatatcagaacagcctggctttgt

SEQ ID NO: 42958 - DNA, 25 bp, Canis familiaris
acaatacgtgaggttctggagggtc

SEQ ID NO: 42959 - DNA, 25 bp, Canis familiaris
acaatcaagaacgtgctctgaaggc

SEQ ID NO: 42960 - DNA, 25 bp, Canis familiaris
aaatcagttagcagcggcacagcgg

SEQ ID NO: 42961 - DNA, 25 bp, Canis familiaris
aaatcactgttcagcaggctgttgg

SEQ ID NO: 42962 - DNA, 25 bp, Canis familiaris
aaatcgatggctgtcgcaggaggcg

SEQ ID NO: 42963 - DNA, 25 bp, Canis familiaris
aaatccagacccaagtggaggggct

SEQ ID NO: 42964 - DNA, 25 bp, Canis familiaris
aaatctcccccatctgtgaaagagg

SEQ ID NO: 42965 - DNA, 25 bp, Canis familiaris
aaatcacccccatttacaaagtgtg

SEQ ID NO: 42966 - DNA, 25 bp, Canis familiaris
aactcaccccttagtaagtactcag

SEQ ID NO: 42967 - DNA, 25 bp, Canis familiaris
aaatcaccgccttatataaccctga

SEQ ID NO: 42968 - DNA, 25 bp, Canis familiaris
aaataccgatccctatataaccgtg

SEQ ID NO: 42969 - DNA, 25 bp, Canis familiaris
aaatagctcactgatgtgatataga

SEQ ID NO: 42970 - DNA, 25 bp, Canis familiaris
aaatgcatgtcttcaatgctcataa

SEQ ID NO: 42971 - DNA, 25 bp, Canis familiaris
aaatcagcctgagagtctataagtc

SEQ ID NO: 42972 - DNA, 25 bp, Canis familiaris
aaatcagccctggagcatttacacc

SEQ ID NO: 42973 - DNA, 25 bp, Canis familiaris
aaatatgccttgtgctttagagctt

SEQ ID NO: 42974 - DNA, 25 bp, Canis familiaris
aaattgccacatggtctttatggtg

SEQ ID NO: 42975 - DNA, 25 bp, Canis familiaris
aaattcccatgtgtcttgtggtatg

SEQ ID NO: 42976 - DNA, 25 bp, Canis familiaris
acaatttccagggcctttgccaagc

SEQ ID NO: 42977 - DNA, 25 bp, Canis familiaris
aaatataacatagccttttgcaagg

SEQ ID NO: 42978 - DNA, 25 bp, Canis familiaris
aaatctaactttctgtctccaatgg

SEQ ID NO: 42979 - DNA, 25 bp, Canis familiaris
aaatcaaatcattgtgaggttctca

SEQ ID NO: 42980 - DNA, 25 bp, Canis familiaris
aaatatgtacacttgggccactcac

SEQ ID NO: 42981 - DNA, 25 bp, Canis familiaris
aaatatgtagacgtaggtactcatt

SEQ ID NO: 42982 - DNA, 25 bp, Canis familiaris
acaatattcagtctatggtagcata

SEQ ID NO: 42983 - DNA, 25 bp, Canis familiaris
aaatcattatgtcattcgtccaact

SEQ ID NO: 42984 - DNA, 25 bp, Canis familiaris
aagctcccatgtgatttccaaaatt

SEQ ID NO: 42985 - DNA, 25 bp, Canis familiaris
aaatccgtgtattggtccaaaaatg

SEQ ID NO: 42986 - DNA, 25 bp, Canis familiaris
aactcagggacttaaccaaatgact

SEQ ID NO: 42987 - DNA, 25 bp, Canis familiaris
aatctagcggacgaagccgaccgac

SEQ ID NO: 42988 - DNA, 25 bp, Canis familiaris
acaagacaggcagaagcccaccaac

SEQ ID NO: 42989 - DNA, 25 bp, Canis familiaris
acaagacaggcagaagcccaccaac

SEQ ID NO: 42990 - DNA, 25 bp, Canis familiaris
acaagacaggcagaagcccaccaac

SEQ ID NO: 42991 - DNA, 25 bp, Canis familiaris
acaagagcgacaaataccaacacaa

SEQ ID NO: 42992 - DNA, 25 bp, Canis familiaris
acaaggggaaatacggaccatcacg

SEQ ID NO: 42993 - DNA, 25 bp, Canis familiaris
acaagggtgagattccaggaaagcc

SEQ ID NO: 42994 - DNA, 25 bp, Canis familiaris
acaagggtgagatgtccgtcgacgt

SEQ ID NO: 42995 - DNA, 25 bp, Canis familiaris
acaaggtgagaaggtccgtgccgcc

SEQ ID NO: 42996 - DNA, 25 bp, Canis familiaris
acaagaatgtgcccaaccttcacgt

SEQ ID NO: 42997 - DNA, 25 bp, Canis familiaris
aaatcactgctcagcaacctggagg

SEQ ID NO: 42998 - DNA, 25 bp, Canis familiaris
aaatcacccggctagattgggcttt

SEQ ID NO: 42999 - DNA, 25 bp, Canis familiaris
aaatcacccgactagattggtcttt

SEQ ID NO: 43000 - DNA, 25 bp, Canis familiaris
aaatacggcgattagctttgctcct

SEQ ID NO: 43001 - DNA, 25 bp, Canis familiaris
aaattcgaggaagtccacgctgcca

SEQ ID NO: 43002 - DNA, 25 bp, Canis familiaris
acaatttaatatttccctgctgcaa

SEQ ID NO: 43003 - DNA, 25 bp, Canis familiaris
acaagttcaatgtcatttccttcaa

SEQ ID NO: 43004 - DNA, 25 bp, Canis familiaris
aaattccaagagactttcttgccaa

SEQ ID NO: 43005 - DNA, 25 bp, Canis familiaris
aaattgcccaagcagttgcctgcca

SEQ ID NO: 43006 - DNA, 25 bp, Canis familiaris
aaatacctaatgaagtggcactcga

SEQ ID NO: 43007 - DNA, 25 bp, Canis familiaris
aaataccccatggatgttgcgtccc

SEQ ID NO: 43008 - DNA, 25 bp, Canis familiaris
aaataccccatccaggagcagcttt

SEQ ID NO: 43009 - DNA, 25 bp, Canis familiaris
aaataacctatctgcaaggctgttg

SEQ ID NO: 43010 - DNA, 25 bp, Canis familiaris
aaatagacgtggggcctggcagtct

SEQ ID NO: 43011 - DNA, 25 bp, Canis familiaris
aaatcagactggctacgttggtcaa

SEQ ID NO: 43012 - DNA, 25 bp, Canis familiaris
aaataccaggcaggactgttagaaa

SEQ ID NO: 43013 - DNA, 25 bp, Canis familiaris
aaataggaaatccatgtgcttcaga

SEQ ID NO: 43014 - DNA, 25 bp, Canis familiaris
acaattcaaatgtccattgcttgag

SEQ ID NO: 43015 - DNA, 25 bp, Canis familiaris
aaatcaagcctgtcacattgccgac

SEQ ID NO: 43016 - DNA, 25 bp, Canis familiaris
aaatagacactcaaatctccagata

SEQ ID NO: 43017 - DNA, 25 bp, Canis familiaris
acaatagaacattactcagccatca

SEQ ID NO: 43018 - DNA, 25 bp, Canis familiaris
aaaataagctaatcccatacgtgtt

SEQ ID NO: 43019 - DNA, 25 bp, Canis familiaris
aaatttgacttattcccatgttgtg

SEQ ID NO: 43020 - DNA, 25 bp, Canis familiaris
aaatttcttctattcccatgttgtt

SEQ ID NO: 43021 - DNA, 25 bp, Canis familiaris
aaattttctttctctagtgtataat

SEQ ID NO: 43022 - DNA, 25 bp, Canis familiaris
aaattttccattgtccacatgttta

SEQ ID NO: 43023 - DNA, 25 bp, Canis familiaris
aaatttccggctttacacatgttat

SEQ ID NO: 43024 - DNA, 25 bp, Canis familiaris
aaatttcctgtctctacctggatgt

SEQ ID NO: 43025 - DNA, 25 bp, Canis familiaris
aaatttgcgttcgtgtagtctgtga

SEQ ID NO: 43026 - DNA, 25 bp, Canis familiaris
aaattgatgcacgctggtttttgat

SEQ ID NO: 43027 - DNA, 25 bp, Canis familiaris
aaattatcactgagcagtttgttta

SEQ ID NO: 43028 - DNA, 25 bp, Canis familiaris
aaatttactggccatgctgtcatgt

SEQ ID NO: 43029 - DNA, 25 bp, Canis familiaris
aaatttcatatggcacatgtgtcag

SEQ ID NO: 43030 - DNA, 25 bp, Canis familiaris
aaatagctgcatagccacatgtggc

SEQ ID NO: 43031 - DNA, 25 bp, Canis familiaris
aaatagcaataccacgtgccaaagt

SEQ ID NO: 43032 - DNA, 25 bp, Canis familiaris
acaagtgcaaaccctgtgaatagac

SEQ ID NO: 43033 - DNA, 25 bp, Canis familiaris
aaatctagtatcccctaaggaggca

SEQ ID NO: 43034 - DNA, 25 bp, Canis familiaris
aaatcttttgcaaacccaggtggag

SEQ ID NO: 43035 - DNA, 25 bp, Canis familiaris
aaattttagccatctgacaggtgta

SEQ ID NO: 43036 - DNA, 25 bp, Canis familiaris
aaattttgtcactttatcatgggaa

SEQ ID NO: 43037 - DNA, 25 bp, Canis familiaris
aaatcatttgtcattatactttcta

SEQ ID NO: 43038 - DNA, 25 bp, Canis familiaris
aaatgcactggtatttactattaac

SEQ ID NO: 43039 - DNA, 25 bp, Canis familiaris
aaatttgtactgtttctatcattaa

SEQ ID NO: 43040 - DNA, 25 bp, Canis familiaris
aaattttgagctgtcagctacatgt

SEQ ID NO: 43041 - DNA, 25 bp, Canis familiaris
aaattcttgtgcgcacacttgatga

SEQ ID NO: 43042 - DNA, 25 bp, Canis familiaris
aaattcttgtgcgcacacttgatga

SEQ ID NO: 43043 - DNA, 25 bp, Canis familiaris
aaatatgcattgtgtaccttttgta

SEQ ID NO: 43044 - DNA, 25 bp, Canis familiaris
aaatagctagtgttcacatttggtg

SEQ ID NO: 43045 - DNA, 25 bp, Canis familiaris
aaattctagttttatgtctggtcca

SEQ ID NO: 43046 - DNA, 25 bp, Canis familiaris
aaattttaattgtatccatgggcca

SEQ ID NO: 43047 - DNA, 25 bp, Canis familiaris
aaattctgtcaacgtataacctcca

SEQ ID NO: 43048 - DNA, 25 bp, Canis familiaris
aaattctcccacttaaaatctatca

SEQ ID NO: 43049 - DNA, 25 bp, Canis familiaris
aaatttcctgtttcaaacagctaca

SEQ ID NO: 43050 - DNA, 25 bp, Canis familiaris
aaattttttttcctcatcagtcaca

SEQ ID NO: 43051 - DNA, 25 bp, Canis familiaris
aaataatttttcatccattggcaaa

SEQ ID NO: 43052 - DNA, 25 bp, Canis familiaris
aaattagcttttatgatctggagaa

SEQ ID NO: 43053 - DNA, 25 bp, Canis familiaris
acaatgggtttggagctgactggga

SEQ ID NO: 43054 - DNA, 25 bp, Canis familiaris
acaagtggcgttcagccacccgaga

SEQ ID NO: 43055 - DNA, 25 bp, Canis familiaris
acaagtggcgttcagccacccgaga

SEQ ID NO: 43056 - DNA, 25 bp, Canis familiaris
acaagttgctctagtaaccccaaga

SEQ ID NO: 43057 - DNA, 25 bp, Canis familiaris
aaatttgatttatacccaccagaag

SEQ ID NO: 43058 - DNA, 25 bp, Canis familiaris
aattttattgaatcactccccaggc

SEQ ID NO: 43059 - DNA, 25 bp, Canis familiaris
aatactttgtgataaacctaagcca

SEQ ID NO: 43060 - DNA, 25 bp, Canis familiaris
aaaggtttacaacatcctaatcaca

SEQ ID NO: 43061 - DNA, 25 bp, Canis familiaris
aaaaactgaacgcgtcccagatcaa

SEQ ID NO: 43062 - DNA, 25 bp, Canis familiaris
aaattactgcaccgcggtaaaatca

SEQ ID NO: 43063 - DNA, 25 bp, Canis familiaris
aaataatccatcccaggagcaaaaa

SEQ ID NO: 43064 - DNA, 25 bp, Canis familiaris
aaatacaagtcgtcactgccaaaaa

SEQ ID NO: 43065 - DNA, 25 bp, Canis familiaris
aaataaattgcctaccatagaaaat

SEQ ID NO: 43066 - DNA, 25 bp, Canis familiaris
aaatcatatatttcaggcttaggaa

SEQ ID NO: 43067 - DNA, 25 bp, Canis familiaris
aaatcactgatttcggtctatccaa

SEQ ID NO: 43068 - DNA, 25 bp, Canis familiaris
acaatcagagtgccggttcttacga

SEQ ID NO: 43069 - DNA, 25 bp, Canis familiaris
acaaggactgtccagttcacaactg

SEQ ID NO: 43070 - DNA, 25 bp, Canis familiaris
acaagtactctggcagtttcccaga

SEQ ID NO: 43071 - DNA, 25 bp, Canis familiaris
acaagtcacattgcgatccgcacca

SEQ ID NO: 43072 - DNA, 25 bp, Canis familiaris
acaagtccatggactacgggcgcac

SEQ ID NO: 43073 - DNA, 25 bp, Canis familiaris
acaaggctcaaataccggacacggt

SEQ ID NO: 43074 - DNA, 25 bp, Canis familiaris
acaaggcatcaactacatccagggc

SEQ ID NO: 43075 - DNA, 25 bp, Canis familiaris
acaaggcaatacactcacaaggagg

SEQ ID NO: 43076 - DNA, 25 bp, Canis familiaris
aaatatcagtatcatcacaccagga

SEQ ID NO: 43077 - DNA, 25 bp, Canis familiaris
aaattcgtctgtaagcctgcaggtc

SEQ ID NO: 43078 - DNA, 25 bp, Canis familiaris
aaatcatccctgcagagcctgcaaa

SEQ ID NO: 43079 - DNA, 25 bp, Canis familiaris
aaatctcccggaaatcagcaaactg

SEQ ID NO: 43080 - DNA, 25 bp, Canis familiaris
aaattcctctgccaagaagacccaa

SEQ ID NO: 43081 - DNA, 25 bp, Canis familiaris
aaatcggcttgcattaagacccaca

SEQ ID NO: 43082 - DNA, 25 bp, Canis familiaris
acaatcacctggtttctaatcccaa

SEQ ID NO: 43083 - DNA, 25 bp, Canis familiaris
aaatcatccttgatttctcaccgac

SEQ ID NO: 43084 - DNA, 25 bp, Canis familiaris
aaatcattggagctttccccagaaa

SEQ ID NO: 43085 - DNA, 25 bp, Canis familiaris
aaatcactgaagattcatcccaaat

SEQ ID NO: 43086 - DNA, 25 bp, Canis familiaris
aaatcacgaggtgaaatcacagttt

SEQ ID NO: 43087 - DNA, 25 bp, Canis familiaris
aaatcactggtttatacaaagcttt

SEQ ID NO: 43088 - DNA, 25 bp, Canis familiaris
aaatcattgaattgtaaatactctt

SEQ ID NO: 43089 - DNA, 25 bp, Canis familiaris
aaatcttagctcctagaaatctcta

SEQ ID NO: 43090 - DNA, 25 bp, Canis familiaris
aaatctatagctcaacctcattcaa

SEQ ID NO: 43091 - DNA, 25 bp, Canis familiaris
aaattaagccagaagccctcatctt

SEQ ID NO: 43092 - DNA, 25 bp, Canis familiaris
acaataaaactaggcctatctccat

SEQ ID NO: 43093 - DNA, 25 bp, Canis familiaris
acaattcaaattttccatgacttca

SEQ ID NO: 43094 - DNA, 25 bp, Canis familiaris
aaatccagaaatgcccagtgcctgc

SEQ ID NO: 43095 - DNA, 25 bp, Canis familiaris
aaatccagacgtgggctcagtggcc

SEQ ID NO: 43096 - DNA, 25 bp, Canis familiaris
aaatcgcgacgatcttagctggaga

SEQ ID NO: 43097 - DNA, 25 bp, Canis familiaris
aaatcagccacgtttttctggagga

SEQ ID NO: 43098 - DNA, 25 bp, Canis familiaris
ctaatcccaaatgttttcctgagac

SEQ ID NO: 43099 - DNA, 25 bp, Canis familiaris
aaatcctaatctggtgatattccta

SEQ ID NO: 43100 - DNA, 25 bp, Canis familiaris
aaattcatctagtagctgttccccc

SEQ ID NO: 43101 - DNA, 25 bp, Canis familiaris
aaattatctgtgtgcagctcccaac

SEQ ID NO: 43102 - DNA, 25 bp, Canis familiaris
aaattatcttgctctatccaaaaat

SEQ ID NO: 43103 - DNA, 25 bp, Canis familiaris
aaattatacatatcctaccacaata

SEQ ID NO: 43104 - DNA, 25 bp, Canis familiaris
aaattatacccacaactgcatcaaa

SEQ ID NO: 43105 - DNA, 25 bp, Canis familiaris
acaattacaaccctaagctcttctt

SEQ ID NO: 43106 - DNA, 25 bp, Canis familiaris
aaatcaacaagctccaacctattgg

SEQ ID NO: 43107 - DNA, 25 bp, Canis familiaris
aaatcgacgaggtccacacgaacgt

SEQ ID NO: 43108 - DNA, 25 bp, Canis familiaris
aaattgcatcattggacctactgaa

SEQ ID NO: 43109 - DNA, 25 bp, Canis familiaris
aaattgctcctatcgcaaatgaagt

SEQ ID NO: 43110 - DNA, 25 bp, Canis familiaris
aaatcagcccattacataaagaatt

SEQ ID NO: 43111 - DNA, 25 bp, Canis familiaris
acaatgtcccattttagcacgatgt

SEQ ID NO: 43112 - DNA, 25 bp, Canis familiaris
acaagtgacacaattaagaacagtt

SEQ ID NO: 43113 - DNA, 25 bp, Canis familiaris
acaaggagcaacttaagggcgagtg

SEQ ID NO: 43114 - DNA, 25 bp, Canis familiaris
acaagtaaatctaacaggggacatg

SEQ ID NO: 43115 - DNA, 25 bp, Canis familiaris
acaattaactcttatcggacgaact

SEQ ID NO: 43116 - DNA, 25 bp, Canis familiaris
aaatttatgacttccggtgctacct

SEQ ID NO: 43117 - DNA, 25 bp, Canis familiaris
aaatattgggaggcctgagttccct

SEQ ID NO: 43118 - DNA, 25 bp, Canis familiaris
aaattgggctatgagggcatttcct

SEQ ID NO: 43119 - DNA, 25 bp, Canis familiaris
aaattgaggcccagggagcttctcc

SEQ ID NO: 43120 - DNA, 25 bp, Canis familiaris
acaaggaggaccagtatgaccattt

SEQ ID NO: 43121 - DNA, 25 bp, Canis familiaris
acaagtcagagaccacgtacgcctg

SEQ ID NO: 43122 - DNA, 25 bp, Canis familiaris
acaatgtcgccacccagtaatgagg

SEQ ID NO: 43123 - DNA, 25 bp, Canis familiaris
aaatgaagcgcctgcctagctaggc

SEQ ID NO: 43124 - DNA, 25 bp, Canis familiaris
aaatgtaccagctgctttgaaggct

SEQ ID NO: 43125 - DNA, 25 bp, Canis familiaris
aaaggccctcttgatctaggagttt

SEQ ID NO: 43126 - DNA, 25 bp, Canis familiaris
acaatgcgccccatggagcataggg

SEQ ID NO: 43127 - DNA, 25 bp, Canis familiaris
acaatgtgaccctgggcaatgccca

SEQ ID NO: 43128 - DNA, 25 bp, Canis familiaris
acaagtacgcagggggcagctgccc

SEQ ID NO: 43129 - DNA, 25 bp, Canis familiaris
aaatgtgaccaagtgcgacaggccc

SEQ ID NO: 43130 - DNA, 25 bp, Canis familiaris
aaatgctatgcccagggcttgtccc

SEQ ID NO: 43131 - DNA, 25 bp, Canis familiaris
aaattggtgcggggtcagtctcaca

SEQ ID NO: 43132 - DNA, 25 bp, Canis familiaris
acaagtgttgggttgctcagtcaga

SEQ ID NO: 43133 - DNA, 25 bp, Canis familiaris
acaaggttgtgagcattagtgagaa

SEQ ID NO: 43134 - DNA, 25 bp, Canis familiaris
acaatgactggaagcctggggaata

SEQ ID NO: 43135 - DNA, 25 bp, Canis familiaris
aaatggggattgacgctgggaagag

SEQ ID NO: 43136 - DNA, 25 bp, Canis familiaris
aaagtggaatggtctcttgaacaga

SEQ ID NO: 43137 - DNA, 25 bp, Canis familiaris
aaagtgggacccatcgaagccaaca

SEQ ID NO: 43138 - DNA, 25 bp, Canis familiaris
aacaaggaactggtccgcaaccaag

SEQ ID NO: 43139 - DNA, 25 bp, Canis familiaris
aagaacgacctgttcacgaaccgtg

SEQ ID NO: 43140 - DNA, 25 bp, Canis familiaris
acaataaagccttctcggaacctcg

SEQ ID NO: 43141 - DNA, 25 bp, Canis familiaris
aaattaccctcagcagacaacctgc

SEQ ID NO: 43142 - DNA, 25 bp, Canis familiaris
aaatagtttctcgtcagaccacctc

SEQ ID NO: 43143 - DNA, 25 bp, Canis familiaris
aaatagtgacacctatgcagacccc

SEQ ID NO: 43144 - DNA, 25 bp, Canis familiaris
acaataagacaccatttcacaccca

SEQ ID NO: 43145 - DNA, 25 bp, Canis familiaris
aaataggaaacttccacacacacac

SEQ ID NO: 43146 - DNA, 25 bp, Canis familiaris
aaatacgatgaatactgacccacca

SEQ ID NO: 43147 - DNA, 25 bp, Canis familiaris
aaataaagataattccagcccccag

SEQ ID NO: 43148 - DNA, 25 bp, Canis familiaris
aaatcagcaggatgaagccgtcgcc

SEQ ID NO: 43149 - DNA, 25 bp, Canis familiaris
aaataagctcactcagacgtactcc

SEQ ID NO: 43150 - DNA, 25 bp, Canis familiaris
aaattgcccatcatagacagtacta

SEQ ID NO: 43151 - DNA, 25 bp, Canis familiaris
aaattgccccagcaacaggcacttt

SEQ ID NO: 43152 - DNA, 25 bp, Canis familiaris
acaattggccacttgccacgttttc

SEQ ID NO: 43153 - DNA, 25 bp, Canis familiaris
aaatcgtcatcagggccaagttcgt

SEQ ID NO: 43154 - DNA, 25 bp, Canis familiaris
aaatcgctatcatgtgccagttgta

SEQ ID NO: 43155 - DNA, 25 bp, Canis familiaris
aaatcactctccgccagattaacat

SEQ ID NO: 43156 - DNA, 25 bp, Canis familiaris
aaataattgcctaccgatgtaaaga

SEQ ID NO: 43157 - DNA, 25 bp, Canis familiaris
aaatattctcagtcttttgtaaaag

SEQ ID NO: 43158 - DNA, 25 bp, Canis familiaris
aaattacattgccttttgtccatta

SEQ ID NO: 43159 - DNA, 25 bp, Canis familiaris
aaattcaaacccatattctcacaac

SEQ ID NO: 43160 - DNA, 25 bp, Canis familiaris
aaatcttaaccttttgtaatcatct

SEQ ID NO: 43161 - DNA, 25 bp, Canis familiaris
aaatttccctttaatgctacagcat

SEQ ID NO: 43162 - DNA, 25 bp, Canis familiaris
aaatttggcagctataaatctaaat

SEQ ID NO: 43163 - DNA, 25 bp, Canis familiaris
aaatctgattgagtttaacatgaaa

SEQ ID NO: 43164 - DNA, 25 bp, Canis familiaris
aaatctgacagcgtattaaaaacaa

SEQ ID NO: 43165 - DNA, 25 bp, Canis familiaris
acaatcgagatcatttgcacaacac

SEQ ID NO: 43166 - DNA, 25 bp, Canis familiaris
acaatgcaagacttgttgccaatat

SEQ ID NO: 43167 - DNA, 25 bp, Canis familiaris
acaatgcatgtgcctttttaatgta

SEQ ID NO: 43168 - DNA, 25 bp, Canis familiaris
aaatcttgacgattgttaatcttgg

SEQ ID NO: 43169 - DNA, 25 bp, Canis familiaris
aaattgcttcgaggttagccttgca

SEQ ID NO: 43170 - DNA, 25 bp, Canis familiaris
aaattgttcgtaatgtaccatgtca

SEQ ID NO: 43171 - DNA, 25 bp, Canis familiaris
aaattgttctctcgagtttcagccc

SEQ ID NO: 43172 - DNA, 25 bp, Canis familiaris
aaataacatgcctgttgtgtgcccc

SEQ ID NO: 43173 - DNA, 25 bp, Canis familiaris
aaatatacgccttttatccattcca

SEQ ID NO: 43174 - DNA, 25 bp, Canis familiaris
aacttacctggatttatcaaactat

SEQ ID NO: 43175 - DNA, 25 bp, Canis familiaris
acaattactctgtattttcaaagtg

SEQ ID NO: 43176 - DNA, 25 bp, Canis familiaris
aaattacttatacccatcaacactg

SEQ ID NO: 43177 - DNA, 25 bp, Canis familiaris
aaatacctttacaactatccactgg

SEQ ID NO: 43178 - DNA, 25 bp, Canis familiaris
aaatactgttatttatctggccctg

SEQ ID NO: 43179 - DNA, 25 bp, Canis familiaris
aaatatgttttacttgttgccctgt

SEQ ID NO: 43180 - DNA, 25 bp, Canis familiaris
aaattcttgtagcttgttttcttga

SEQ ID NO: 43181 - DNA, 25 bp, Canis familiaris
aaattgtttgggctgcttcttctaa

SEQ ID NO: 43182 - DNA, 25 bp, Canis familiaris
aaatttgtttggctcgtcctcatat

SEQ ID NO: 43183 - DNA, 25 bp, Canis familiaris
aaagtatttaggcttgctaccatcc

SEQ ID NO: 43184 - DNA, 25 bp, Canis familiaris
aaatggcatttctcctttgaccatc

SEQ ID NO: 43185 - DNA, 25 bp, Canis familiaris
gaatttgactcctcctagggacttc

SEQ ID NO: 43186 - DNA, 25 bp, Canis familiaris
aaatgggcatccacccaaggtcttc

SEQ ID NO: 43187 - DNA, 25 bp, Canis familiaris
aaaggtatgcgaagcctgcaaaaat

SEQ ID NO: 43188 - DNA, 25 bp, Canis familiaris
aaatattagctgacgccgaaccgca

SEQ ID NO: 43189 - DNA, 25 bp, Canis familiaris
aaattctactgcagccggacacata

SEQ ID NO: 43190 - DNA, 25 bp, Canis familiaris
aaattttgcgctcggtgcgatactg

SEQ ID NO: 43191 - DNA, 25 bp, Canis familiaris
aaattttgcgctcggtgcgatactg

SEQ ID NO: 43192 - DNA, 25 bp, Canis familiaris
aaattattcgtcctatcagtcgctc

SEQ ID NO: 43193 - DNA, 25 bp, Canis familiaris
aaatctattttcacatcgtcgtcaa

SEQ ID NO: 43194 - DNA, 25 bp, Canis familiaris
aaatcttgtaaaactggatcatgtc

SEQ ID NO: 43195 - DNA, 25 bp, Canis familiaris
aaatatttatgcaacactggacccc

SEQ ID NO: 43196 - DNA, 25 bp, Canis familiaris
aaatattatttgtaccggcacctgc

SEQ ID NO: 43197 - DNA, 25 bp, Canis familiaris
aaatattatgtttacctgcacctgc

SEQ ID NO: 43198 - DNA, 25 bp, Canis familiaris
aaatttcaaggatcctgccgcatct

SEQ ID NO: 43199 - DNA, 25 bp, Canis familiaris
aaattggtttgatccatgggcatca

SEQ ID NO: 43200 - DNA, 25 bp, Canis familiaris
aaattgattttgttccatgttggct

SEQ ID NO: 43201 - DNA, 25 bp, Canis familiaris
aaattgtgtgtttctctctttgttc

SEQ ID NO: 43202 - DNA, 25 bp, Canis familiaris
aaatttgctgttctggtattaccca

SEQ ID NO: 43203 - DNA, 25 bp, Canis familiaris
aaataaggcgtgcttggactacccg

SEQ ID NO: 43204 - DNA, 25 bp, Canis familiaris
aaatcacgggagcttggcacccggc

SEQ ID NO: 43205 - DNA, 25 bp, Canis familiaris
aaatacctgtggatggacccgtggc

SEQ ID NO: 43206 - DNA, 25 bp, Canis familiaris
aaatgtccgtagatgcgtaccacgc

SEQ ID NO: 43207 - DNA, 25 bp, Canis familiaris
aaatgtatttagccttggacccagc

SEQ ID NO: 43208 - DNA, 25 bp, Canis familiaris
aaattacatcagcccttgaacccat

SEQ ID NO: 43209 - DNA, 25 bp, Canis familiaris
aaatctaatatcgcagcataacccc

SEQ ID NO: 43210 - DNA, 25 bp, Canis familiaris
aaatctaagaaccaggaagccaaag

SEQ ID NO: 43211 - DNA, 25 bp, Canis familiaris
aaatcccgacacaagtcaatacaga

SEQ ID NO: 43212 - DNA, 25 bp, Canis familiaris
aaatccaagaaagcacacatccaga

SEQ ID NO: 43213 - DNA, 25 bp, Canis familiaris
aaaccaatactagccattcataacc

SEQ ID NO: 43214 - DNA, 25 bp, Canis familiaris
aaattaatactaccagcatgtcaaa

SEQ ID NO: 43215 - DNA, 25 bp, Canis familiaris
aaattgataacccctgctgtgtgaa

SEQ ID NO: 43216 - DNA, 25 bp, Canis familiaris
aaagaagaagcccctagagctaatg

SEQ ID NO: 43217 - DNA, 25 bp, Canis familiaris
aaatatagtaggctctttgctcaat

SEQ ID NO: 43218 - DNA, 25 bp, Canis familiaris
aaatattgtagccttcttatctccc

SEQ ID NO: 43219 - DNA, 25 bp, Canis familiaris
aaattgtgatacctgttgataccta

SEQ ID NO: 43220 - DNA, 25 bp, Canis familiaris
aaattgattcacctgtttttgataa

SEQ ID NO: 43221 - DNA, 25 bp, Canis familiaris
aaatattctgaattgtttttataca

SEQ ID NO: 43222 - DNA, 25 bp, Canis familiaris
aaatcatctgcttcatgtgttttca

SEQ ID NO: 43223 - DNA, 25 bp, Canis familiaris
acaatccatctgcatgtttgtccat

SEQ ID NO: 43224 - DNA, 25 bp, Canis familiaris
acaatcgacttgtgttgcatcctga

SEQ ID NO: 43225 - DNA, 25 bp, Canis familiaris
aaatccagctggtgtgcatgatact

SEQ ID NO: 43226 - DNA, 25 bp, Canis familiaris
acaatgccatgtatctgtcatcata

SEQ ID NO: 43227 - DNA, 25 bp, Canis familiaris
acaattcagtgtgcttcctgtacct

SEQ ID NO: 43228 - DNA, 25 bp, Canis familiaris
aaattgactgtggtgatggctgtac

SEQ ID NO: 43229 - DNA, 25 bp, Canis familiaris
aaatctactgcgaggagtgagacca

SEQ ID NO: 43230 - DNA, 25 bp, Canis familiaris
aaatgccaccttctcagtgagacct

SEQ ID NO: 43231 - DNA, 25 bp, Canis familiaris
aaatcatcacctagctggcagtggt

SEQ ID NO: 43232 - DNA, 25 bp, Canis familiaris
aaatgatcctgaactctagatggta

SEQ ID NO: 43233 - DNA, 25 bp, Canis familiaris
aaatatccatatgctatctgaagaa

SEQ ID NO: 43234 - DNA, 25 bp, Canis familiaris
aaatatctgtgaagctcagctgaag

SEQ ID NO: 43235 - DNA, 25 bp, Canis familiaris
aaatacatgcttaatcctgaaaaaa

SEQ ID NO: 43236 - DNA, 25 bp, Canis familiaris
aaatcccttatattctgaaacggca

SEQ ID NO: 43237 - DNA, 25 bp, Canis familiaris
aaatccttattttctcctacagaca

SEQ ID NO: 43238 - DNA, 25 bp, Canis familiaris
aaatcctactaatctatatgacaga

SEQ ID NO: 43239 - DNA, 25 bp, Canis familiaris
acaatctctctcataaatacataca

SEQ ID NO: 43240 - DNA, 25 bp, Canis familiaris
aaattcatgctcccaactagtatat

SEQ ID NO: 43241 - DNA, 25 bp, Canis familiaris
aaattctgttttcctgatctatgta

SEQ ID NO: 43242 - DNA, 25 bp, Canis familiaris
aaatgattgattatggaaccagtaa

SEQ ID NO: 43243 - DNA, 25 bp, Canis familiaris
aaagttttcttgcataatactggaa

SEQ ID NO: 43244 - DNA, 25 bp, Canis familiaris
aaattgctcttatggtaacactgaa

SEQ ID NO: 43245 - DNA, 25 bp, Canis familiaris
aaatttttttggtcacacacagaca

SEQ ID NO: 43246 - DNA, 25 bp, Canis familiaris
aaatttttacatgtatccagcaaca

SEQ ID NO: 43247 - DNA, 25 bp, Canis familiaris
aaatgtttgtttgttgggcaactgt

SEQ ID NO: 43248 - DNA, 25 bp, Canis familiaris
aaatgggttactgtaggtgctacta

SEQ ID NO: 43249 - DNA, 25 bp, Canis familiaris
aaattgttatttctagcctctactt

SEQ ID NO: 43250 - DNA, 25 bp, Canis familiaris
aaatctttgattattcccaattcct

SEQ ID NO: 43251 - DNA, 25 bp, Canis familiaris
aaatttctgatggtttctcccactg

SEQ ID NO: 43252 - DNA, 25 bp, Canis familiaris
acaatctgttgtggtgtgtccgcca

SEQ ID NO: 43253 - DNA, 25 bp, Canis familiaris
aaatcagtattactctgcattccca

SEQ ID NO: 43254 - DNA, 25 bp, Canis familiaris
aaatatatctgctacattactagga

SEQ ID NO: 43255 - DNA, 25 bp, Canis familiaris
aaatttttaaaagtgcatgtgatgt

SEQ ID NO: 43256 - DNA, 25 bp, Canis familiaris
aaattcagttcctcagtgcattagc

SEQ ID NO: 43257 - DNA, 25 bp, Canis familiaris
aaattaattcactcaggattcagga

SEQ ID NO: 43258 - DNA, 25 bp, Canis familiaris
aaatacttgtactcaggttggtagt

SEQ ID NO: 43259 - DNA, 25 bp, Canis familiaris
aaattcctgtgagcctggtctgtga

SEQ ID NO: 43260 - DNA, 25 bp, Canis familiaris
aaatattttgcatccctttgtgacc

SEQ ID NO: 43261 - DNA, 25 bp, Canis familiaris
acaatctttctttcccagtatggat

SEQ ID NO: 43262 - DNA, 25 bp, Canis familiaris
aaattcttctgaactcaagctgagg

SEQ ID NO: 43263 - DNA, 25 bp, Canis familiaris
aaattgctggtcaacataatccttg

SEQ ID NO: 43264 - DNA, 25 bp, Canis familiaris
aaattgctggtcaacataatccttg

SEQ ID NO: 43265 - DNA, 25 bp, Canis familiaris
aaattgctttcctgaacatcttggt

SEQ ID NO: 43266 - DNA, 25 bp, Canis familiaris
aaattctgcttctgaacagcttttt

SEQ ID NO: 43267 - DNA, 25 bp, Canis familiaris
aaattggttgggcaagctcttcctt

SEQ ID NO: 43268 - DNA, 25 bp, Canis familiaris
aaattagtgtggcttcccatttgct

SEQ ID NO: 43269 - DNA, 25 bp, Canis familiaris
acaattcaagtagctcttccttctg

SEQ ID NO: 43270 - DNA, 25 bp, Canis familiaris
aaattagagacgccctgtacttctg

SEQ ID NO: 43271 - DNA, 25 bp, Canis familiaris
aaattttgaccctgaactttggatg

SEQ ID NO: 43272 - DNA, 25 bp, Canis familiaris
aaacttgggccctgccaattaatgt

SEQ ID NO: 43273 - DNA, 25 bp, Canis familiaris
aatttctgaccacatcccaaaaata

SEQ ID NO: 43274 - DNA, 25 bp, Canis familiaris
aaatcttatcaatctcccaaaacat

SEQ ID NO: 43275 - DNA, 25 bp, Canis familiaris
aaatatgtccaactacctccaaaat

SEQ ID NO: 43276 - DNA, 25 bp, Canis familiaris
aaatcattcgtcttcaacccaataa

SEQ ID NO: 43277 - DNA, 25 bp, Canis familiaris
aaatctctctgggtgcaatccgaat

SEQ ID NO: 43278 - DNA, 25 bp, Canis familiaris
aaatttgctgggagaccctcatccc

SEQ ID NO: 43279 - DNA, 25 bp, Canis familiaris
aaatttcagaggccgaccaatgccc

SEQ ID NO: 43280 - DNA, 25 bp, Canis familiaris
aaatctttcaaacagctcaatgcct

SEQ ID NO: 43281 - DNA, 25 bp, Canis familiaris
aaatttacacagtagaccatttgtc

SEQ ID NO: 43282 - DNA, 25 bp, Canis familiaris
aaatctatagacttgaaccttgttc

SEQ ID NO: 43283 - DNA, 25 bp, Canis familiaris
aaatctatcaggacggttcttttct

SEQ ID NO: 43284 - DNA, 25 bp, Canis familiaris
aaatttccgatactgtttcctacat

SEQ ID NO: 43285 - DNA, 25 bp, Canis familiaris
aaatttcaagaagtgtcgatcctat

SEQ ID NO: 43286 - DNA, 25 bp, Canis familiaris
aaatattccaagatgagcctccggc

SEQ ID NO: 43287 - DNA, 25 bp, Canis familiaris
acaattggccaaaaacctgccgagc

SEQ ID NO: 43288 - DNA, 25 bp, Canis familiaris
aaattggcagaagaacgcaggcaga

SEQ ID NO: 43289 - DNA, 25 bp, Canis familiaris
aaatgctggaaacatcactgcgtac

SEQ ID NO: 43290 - DNA, 25 bp, Canis familiaris
aaatctgtaaattatatctcagtaa

SEQ ID NO: 43291 - DNA, 25 bp, Canis familiaris
aaacttgaagaacacgaggccacga

SEQ ID NO: 43292 - DNA, 25 bp, Canis familiaris
aaatcaatgacacacaacggccaca

SEQ ID NO: 43293 - DNA, 25 bp, Canis familiaris
aaatgcatctatgcgaccagcagcc

SEQ ID NO: 43294 - DNA, 25 bp, Canis familiaris
aaagtgctgtcaggctggcatggtc

SEQ ID NO: 43295 - DNA, 25 bp, Canis familiaris
aaagtcggcctgcagagagtcgggt

SEQ ID NO: 43296 - DNA, 25 bp, Canis familiaris
aaattggagccgcatatcccagggt

SEQ ID NO: 43297 - DNA, 25 bp, Canis familiaris
aaatagtgcagcttgtgcttccaca

SEQ ID NO: 43298 - DNA, 25 bp, Canis familiaris
aaatatctgcaccttcttcagagcc

SEQ ID NO: 43299 - DNA, 25 bp, Canis familiaris
aaattgctgcagcttttcaactcct

SEQ ID NO: 43300 - DNA, 25 bp, Canis familiaris
aaatttgcgcttgattcaaccttta

SEQ ID NO: 43301 - DNA, 25 bp, Canis familiaris
aaatatcagggtgcatgtatccctt

SEQ ID NO: 43302 - DNA, 25 bp, Canis familiaris
acaatagggtccctgtgatcgctct

SEQ ID NO: 43303 - DNA, 25 bp, Canis familiaris
aaatcaatgtctcccttgattctcc

SEQ ID NO: 43304 - DNA, 25 bp, Canis familiaris
aaattcatatgtccctcgtgaggct

SEQ ID NO: 43305 - DNA, 25 bp, Canis familiaris
aaattcagagcactccggtcaagca

SEQ ID NO: 43306 - DNA, 25 bp, Canis familiaris
aaatgtcagagcccggattccagac

SEQ ID NO: 43307 - DNA, 25 bp, Canis familiaris
aaattcaacccagcattcaagacaa

SEQ ID NO: 43308 - DNA, 25 bp, Canis familiaris
aaagtctacaccgtaccaaagcagc

SEQ ID NO: 43309 - DNA, 25 bp, Canis familiaris
aaatatctacacggcaacacacaca

SEQ ID NO: 43310 - DNA, 25 bp, Canis familiaris
aaattctcattaaaacacacacaca

SEQ ID NO: 43311 - DNA, 25 bp, Canis familiaris
aaatctccatggataaacacccaag

SEQ ID NO: 43312 - DNA, 25 bp, Canis familiaris
aaataccatgtgattcagccatccc

SEQ ID NO: 43313 - DNA, 25 bp, Canis familiaris
aaatctccagtcaatgtcgttcttc

SEQ ID NO: 43314 - DNA, 25 bp, Canis familiaris
aaatatctcaggctttgtttacttg

SEQ ID NO: 43315 - DNA, 25 bp, Canis familiaris
aaataccatagtcttcatttcctcg

SEQ ID NO: 43316 - DNA, 25 bp, Canis familiaris
aaatgaccaaggattcttccactcc

SEQ ID NO: 43317 - DNA, 25 bp, Canis familiaris
aaattccaaggtcacatgccatccc

SEQ ID NO: 43318 - DNA, 25 bp, Canis familiaris
aaattccaagagccggagaccacca

SEQ ID NO: 43319 - DNA, 25 bp, Canis familiaris
aaatttgcacaaggccaggactccc

SEQ ID NO: 43320 - DNA, 25 bp, Canis familiaris
aaatgttcaaatccctgtgagtccc

SEQ ID NO: 43321 - DNA, 25 bp, Canis familiaris
aaattagcaatatactcagtgtcaa

SEQ ID NO: 43322 - DNA, 25 bp, Canis familiaris
aaatctgaaacaaatctgaatgtat

SEQ ID NO: 43323 - DNA, 25 bp, Canis familiaris
aaattgcggcgctagttgtagataa

SEQ ID NO: 43324 - DNA, 25 bp, Canis familiaris
aaattggctgagttgtttcataaaa

SEQ ID NO: 43325 - DNA, 25 bp, Canis familiaris
aaattcgctgagcttgttgtacaca

SEQ ID NO: 43326 - DNA, 25 bp, Canis familiaris
aaataagaaccatttgtgtgacacc

SEQ ID NO: 43327 - DNA, 25 bp, Canis familiaris
aaataccagacccacaggctgaacc

SEQ ID NO: 43328 - DNA, 25 bp, Canis familiaris
aaataacataccatcaagagactcc

SEQ ID NO: 43329 - DNA, 25 bp, Canis familiaris
aaatgcaaagcccccaaaattcact

SEQ ID NO: 43330 - DNA, 25 bp, Canis familiaris
aaagacgactgcccacttaattaat

SEQ ID NO: 43331 - DNA, 25 bp, Canis familiaris
aaatactgagctgccaaaacttttt

SEQ ID NO: 43332 - DNA, 25 bp, Canis familiaris
aaatcaccacggcataaattaattt

SEQ ID NO: 43333 - DNA, 25 bp, Canis familiaris
aaatcccaaggcctacagtaataat

SEQ ID NO: 43334 - DNA, 25 bp, Canis familiaris
aaatcgcaagaacataataattaaa

SEQ ID NO: 43335 - DNA, 25 bp, Canis familiaris
aaatccaaaggttgaagaattgaat

SEQ ID NO: 43336 - DNA, 25 bp, Canis familiaris
aaatgtgcacacagttggaacaaaa

SEQ ID NO: 43337 - DNA, 25 bp, Canis familiaris
aaattgattcaactgctggacaagt

SEQ ID NO: 43338 - DNA, 25 bp, Canis familiaris
aaattacatgccaagctatgaatag

SEQ ID NO: 43339 - DNA, 25 bp, Canis familiaris
aaattcaagcctgtcgacattctga

SEQ ID NO: 43340 - DNA, 25 bp, Canis familiaris
aaataggagcctgccagtcatccat

SEQ ID NO: 43341 - DNA, 25 bp, Canis familiaris
aaagacgtcctagaactccttggtg

SEQ ID NO: 43342 - DNA, 25 bp, Canis familiaris
aaataggtcgcaactttctgcctgt

SEQ ID NO: 43343 - DNA, 25 bp, Canis familiaris
aaattactcattcctattctggctg

SEQ ID NO: 43344 - DNA, 25 bp, Canis familiaris
aaattctcatttgtttctgtctgtg

SEQ ID NO: 43345 - DNA, 25 bp, Canis familiaris
aaattccaaattattcagccatgta

SEQ ID NO: 43346 - DNA, 25 bp, Canis familiaris
aaatccaaacttacattcagttgtc

SEQ ID NO: 43347 - DNA, 25 bp, Canis familiaris
aaattcaaatctgccttcacttatt

SEQ ID NO: 43348 - DNA, 25 bp, Canis familiaris
aaatctacaagtgctttatcctttc

SEQ ID NO: 43349 - DNA, 25 bp, Canis familiaris
aaatatacaagtcatccccactctt

SEQ ID NO: 43350 - DNA, 25 bp, Canis familiaris
aaatatccacagtgtccaccttttc

SEQ ID NO: 43351 - DNA, 25 bp, Canis familiaris
aaatatgtaaggtctctgccacttt

SEQ ID NO: 43352 - DNA, 25 bp, Canis familiaris
aaatagtgagagactcctcccacat

SEQ ID NO: 43353 - DNA, 25 bp, Canis familiaris
aaatcatgctgaagaaggccccctg

SEQ ID NO: 43354 - DNA, 25 bp, Canis familiaris
aaatgcaggtgccaaaggccccaga

SEQ ID NO: 43355 - DNA, 25 bp, Canis familiaris
aactgatacggaacgagaccgaggt

SEQ ID NO: 43356 - DNA, 25 bp, Canis familiaris
aaccaacggcatttaacttgaagtg

SEQ ID NO: 43357 - DNA, 25 bp, Canis familiaris
aaacaacggacactaggttctagat

SEQ ID NO: 43358 - DNA, 25 bp, Canis familiaris
aacaacagggtgccaaggggtaatg

SEQ ID NO: 43359 - DNA, 25 bp, Canis familiaris
aaaggcggggccaagagggtcatca

SEQ ID NO: 43360 - DNA, 25 bp, Canis familiaris
aaaggctgacggcagacggggatcc

SEQ ID NO: 43361 - DNA, 25 bp, Canis familiaris
aaaggctggcatcgaggtccaggaa

SEQ ID NO: 43362 - DNA, 25 bp, Canis familiaris
aaatgcctgcgtaagctgaaatgga

SEQ ID NO: 43363 - DNA, 25 bp, Canis familiaris
aaatcgtgcgtgacattaaggagaa

SEQ ID NO: 43364 - DNA, 25 bp, Canis familiaris
aaatcttgcctgtaataatggataa

SEQ ID NO: 43365 - DNA, 25 bp, Canis familiaris
aaatattgcctaaattgcatttgca

SEQ ID NO: 43366 - DNA, 25 bp, Canis familiaris
aaatttcccatttctgcttatcaaa

SEQ ID NO: 43367 - DNA, 25 bp, Canis familiaris
aaattatacctgcccatgtttctaa

SEQ ID NO: 43368 - DNA, 25 bp, Canis familiaris
aaataaagtgtggctagtttgaata

SEQ ID NO: 43369 - DNA, 25 bp, Canis familiaris
aaatcaaatatagctgtgtttttca

SEQ ID NO: 43370 - DNA, 25 bp, Canis familiaris
aaatacccacaacttctgttttcat

SEQ ID NO: 43371 - DNA, 25 bp, Canis familiaris
aaatattccaggacttatgatttct

SEQ ID NO: 43372 - DNA, 25 bp, Canis familiaris
aaattttcattggctggtgactttg

SEQ ID NO: 43373 - DNA, 25 bp, Canis familiaris
aaatatctatcctctgtgtacttct

SEQ ID NO: 43374 - DNA, 25 bp, Canis familiaris
aaattgctatccactggtcctttgg

SEQ ID NO: 43375 - DNA, 25 bp, Canis familiaris
aaattcaatctcactggactcaatg

SEQ ID NO: 43376 - DNA, 25 bp, Canis familiaris
aaatccatcacaataaaggctcaat

SEQ ID NO: 43377 - DNA, 25 bp, Canis familiaris
aaatcctggaattgtggggcaatct

SEQ ID NO: 43378 - DNA, 25 bp, Canis familiaris
aaatcttagacatggtggtgctgtt

SEQ ID NO: 43379 - DNA, 25 bp, Canis familiaris
aaatctttgatctgatcggctgccc

SEQ ID NO: 43380 - DNA, 25 bp, Canis familiaris
aaattttgcacttcatctttcctgc

SEQ ID NO: 43381 - DNA, 25 bp, Canis familiaris
aaattactacctgtgttctcttcta

SEQ ID NO: 43382 - DNA, 25 bp, Canis familiaris
aaatatctctatgtcgtttctcttc

SEQ ID NO: 43383 - DNA, 25 bp, Canis familiaris
aaatacccattgtgcatgtctgctg

SEQ ID NO: 43384 - DNA, 25 bp, Canis familiaris
aaatatacacatgcttctctctctg

SEQ ID NO: 43385 - DNA, 25 bp, Canis familiaris
aaattatctgatgtgatgcctgttg

SEQ ID NO: 43386 - DNA, 25 bp, Canis familiaris
aaatttctacacttgccatttgcat

SEQ ID NO: 43387 - DNA, 25 bp, Canis familiaris
aaatcctctacccagctatggtgat

SEQ ID NO: 43388 - DNA, 25 bp, Canis familiaris
aaatgtccttcctgctaggtgagat

SEQ ID NO: 43389 - DNA, 25 bp, Canis familiaris
aaatgggtgatgttgagaagggaaa

SEQ ID NO: 43390 - DNA, 25 bp, Canis familiaris
aaatggctggtgtttcaagtggaat

SEQ ID NO: 43391 - DNA, 25 bp, Canis familiaris
aaaggccgtcacagcaacgggtcac

SEQ ID NO: 43392 - DNA, 25 bp, Canis familiaris
aaaggacggccatgatcatcggaaa

SEQ ID NO: 43393 - DNA, 25 bp, Canis familiaris
aaaagagctcatcaaggacgggaag

SEQ ID NO: 43394 - DNA, 25 bp, Canis familiaris
aaatcaggctcctagcagctactgt

SEQ ID NO: 43395 - DNA, 25 bp, Canis familiaris
aaatcatattcctgacttctgttta

SEQ ID NO: 43396 - DNA, 25 bp, Canis familiaris
aaatcatattcctgacttctgttta

SEQ ID NO: 43397 - DNA, 25 bp, Canis familiaris
aaatctgttctctcatctgtgttaa

SEQ ID NO: 43398 - DNA, 25 bp, Canis familiaris
aaattttctgcttcatcgtcattgt

SEQ ID NO: 43399 - DNA, 25 bp, Canis familiaris
aaattttctgctttgtgtcaattct

SEQ ID NO: 43400 - DNA, 25 bp, Canis familiaris
aaatatttctggtctgggttgtctt

SEQ ID NO: 43401 - DNA, 25 bp, Canis familiaris
aaatatttctcctgtggttatgtct

SEQ ID NO: 43402 - DNA, 25 bp, Canis familiaris
aaatattttctctgcctgtgtatct

SEQ ID NO: 43403 - DNA, 25 bp, Canis familiaris
aaatattttgcctgccattttcaga

SEQ ID NO: 43404 - DNA, 25 bp, Canis familiaris
aaatatctatatgacgctctttaaa

SEQ ID NO: 43405 - DNA, 25 bp, Canis familiaris
aaattcagcatttatctgctttccc

SEQ ID NO: 43406 - DNA, 25 bp, Canis familiaris
aaatctcacaactatgcctataccc

SEQ ID NO: 43407 - DNA, 25 bp, Canis familiaris
aaatcacaacagtctcacttcatcc

SEQ ID NO: 43408 - DNA, 25 bp, Canis familiaris
aaatagcaagcacagagcgtctccc

SEQ ID NO: 43409 - DNA, 25 bp, Canis familiaris
aagaaggtggcgtggttcgaccagc

SEQ ID NO: 43410 - DNA, 25 bp, Canis familiaris
aagaagggggggctttgtgctgagc

SEQ ID NO: 43411 - DNA, 25 bp, Canis familiaris
aagtagggggggcataggaggagat

SEQ ID NO: 43412 - DNA, 25 bp, Canis familiaris
aacggggaggggatggggtgctcat

SEQ ID NO: 43413 - DNA, 25 bp, Canis familiaris
aacgagggatccacttggagggcaa

SEQ ID NO: 43414 - DNA, 25 bp, Canis familiaris
aaaggcagcaggctaccggacggca

SEQ ID NO: 43415 - DNA, 25 bp, Canis familiaris
aaatggccaggccaaggggccacca

SEQ ID NO: 43416 - DNA, 25 bp, Canis familiaris
aaatgggcccagaacggggcatcca

SEQ ID NO: 43417 - DNA, 25 bp, Canis familiaris
aaaggtctcaagagggtgcccctct

SEQ ID NO: 43418 - DNA, 25 bp, Canis familiaris
aaatagggctgagagggtccgctcc

SEQ ID NO: 43419 - DNA, 25 bp, Canis familiaris
aaactgggctggagggtttctgcct

SEQ ID NO: 43420 - DNA, 25 bp, Canis familiaris
aaatgtggggccagctggttggcgc

SEQ ID NO: 43421 - DNA, 25 bp, Canis familiaris
aaatatggggcctttgggctgccag

SEQ ID NO: 43422 - DNA, 25 bp, Canis familiaris
aaatatgccagagcttgtgggccgg

SEQ ID NO: 43423 - DNA, 25 bp, Canis familiaris
aaatcatctaaacttctgggccatc

SEQ ID NO: 43424 - DNA, 25 bp, Canis familiaris
aaatctgctaaaattgctggtcaac

SEQ ID NO: 43425 - DNA, 25 bp, Canis familiaris
aaatctgctaaaattgctggtcaac

SEQ ID NO: 43426 - DNA, 25 bp, Canis familiaris
aaatctgctcaaattgcgggtcaac

SEQ ID NO: 43427 - DNA, 25 bp, Canis familiaris
aaattcacgtattcctgcgtcacaa

SEQ ID NO: 43428 - DNA, 25 bp, Canis familiaris
aaattactgtattcactggtcctga

SEQ ID NO: 43429 - DNA, 25 bp, Canis familiaris
aaatctacgatttcctagctgaaga

SEQ ID NO: 43430 - DNA, 25 bp, Canis familiaris
aaatatactattacaccctgaagaa

SEQ ID NO: 43431 - DNA, 25 bp, Canis familiaris
aaataactttattgcctaacatgaa

SEQ ID NO: 43432 - DNA, 25 bp, Canis familiaris
aaatatatttcaagtccatgaccag

SEQ ID NO: 43433 - DNA, 25 bp, Canis familiaris
aaatgaatatttggcctatattcac

SEQ ID NO: 43434 - DNA, 25 bp, Canis familiaris
aaatcatgcttctccctgaatatac

SEQ ID NO: 43435 - DNA, 25 bp, Canis familiaris
aaatccttcttggcttcaatcatga

SEQ ID NO: 43436 - DNA, 25 bp, Canis familiaris
aaatttatcttcctatcgaatagca

SEQ ID NO: 43437 - DNA, 25 bp, Canis familiaris
aaatgtcgtctttgactctagtacc

SEQ ID NO: 43438 - DNA, 25 bp, Canis familiaris
aaatgcatcggcttggagctttcca

SEQ ID NO: 43439 - DNA, 25 bp, Canis familiaris
aaatgctccagggctgattttgcta

SEQ ID NO: 43440 - DNA, 25 bp, Canis familiaris
aaatccatacgagtatctcttgcaa

SEQ ID NO: 43441 - DNA, 25 bp, Canis familiaris
aaatccataatgttcactgttcaaa

SEQ ID NO: 43442 - DNA, 25 bp, Canis familiaris
aaatctctatattgacctgtctaaa

SEQ ID NO: 43443 - DNA, 25 bp, Canis familiaris
aaatcagcttattggacttctggca

SEQ ID NO: 43444 - DNA, 25 bp, Canis familiaris
aaatacatatgttgacaccattgtc

SEQ ID NO: 43445 - DNA, 25 bp, Canis familiaris
aaatatgcctgactgaccactttaa

SEQ ID NO: 43446 - DNA, 25 bp, Canis familiaris
aaatcaggggctgctccttgtagtg

SEQ ID NO: 43447 - DNA, 25 bp, Canis familiaris
aaaatggggctctacagtggtcagt

SEQ ID NO: 43448 - DNA, 25 bp, Canis familiaris
aacagtagggacttaatggccagta

SEQ ID NO: 43449 - DNA, 25 bp, Canis familiaris
aaaggatgggacacttggcctgctt

SEQ ID NO: 43450 - DNA, 25 bp, Canis familiaris
aaatggagcctgagttctggcccgt

SEQ ID NO: 43451 - DNA, 25 bp, Canis familiaris
aaatcgactcatatgatatctggca

SEQ ID NO: 43452 - DNA, 25 bp, Canis familiaris
aaatgagtcataatcagcatcacgg

SEQ ID NO: 43453 - DNA, 25 bp, Canis familiaris
aaagagcttcaagatcccgttctag

SEQ ID NO: 43454 - DNA, 25 bp, Canis familiaris
aaaaatccaaaaactggcatttgag

SEQ ID NO: 43455 - DNA, 25 bp, Canis familiaris
aaattaccacattaaccagatcagt

SEQ ID NO: 43456 - DNA, 25 bp, Canis familiaris
aaattttcatcttactgcacaatca

SEQ ID NO: 43457 - DNA, 25 bp, Canis familiaris
aaatttgccattttgcagctaatca

SEQ ID NO: 43458 - DNA, 25 bp, Canis familiaris
aaatttgtgctattgatgaccaaca

SEQ ID NO: 43459 - DNA, 25 bp, Canis familiaris
aaatatgtagcttctatgccccagc

SEQ ID NO: 43460 - DNA, 25 bp, Canis familiaris
aaatctgctggttccaagctgtgcg

SEQ ID NO: 43461 - DNA, 25 bp, Canis familiaris
aaatctggagttctaatctgttttt

SEQ ID NO: 43462 - DNA, 25 bp, Canis familiaris
aaatgagggcctttagtctgttgga

SEQ ID NO: 43463 - DNA, 25 bp, Canis familiaris
aaatagggataatacttcttgagat

SEQ ID NO: 43464 - DNA, 25 bp, Canis familiaris
aaatttgtattatagcttcaatatt

SEQ ID NO: 43465 - DNA, 25 bp, Canis familiaris
aaatttctttagtagccacacttct

SEQ ID NO: 43466 - DNA, 25 bp, Canis familiaris
aaattatgttctgatatcctccttc

SEQ ID NO: 43467 - DNA, 25 bp, Canis familiaris
aaatttccattttatcactctttct

SEQ ID NO: 43468 - DNA, 25 bp, Canis familiaris
aaatattcctgtcgattttccttct

SEQ ID NO: 43469 - DNA, 25 bp, Canis familiaris
aaataacggtgcctgctgtttcttt

SEQ ID NO: 43470 - DNA, 25 bp, Canis familiaris
aaataacggtgcttctttcttaatg

SEQ ID NO: 43471 - DNA, 25 bp, Canis familiaris
aaataacctttagttgcctaacatg

SEQ ID NO: 43472 - DNA, 25 bp, Canis familiaris
aaatagatcccaaacttgcttttct

SEQ ID NO: 43473 - DNA, 25 bp, Canis familiaris
aaataataccaatcccacattgtgt

SEQ ID NO: 43474 - DNA, 25 bp, Canis familiaris
aaataacctccatctcaacattggg

SEQ ID NO: 43475 - DNA, 25 bp, Canis familiaris
aaatagaggtcctactggccacgga

SEQ ID NO: 43476 - DNA, 25 bp, Canis familiaris
aaatagtggtaactgtgtcccgtgc

SEQ ID NO: 43477 - DNA, 25 bp, Canis familiaris
aaatcagttgtatctgtgcctttgg

SEQ ID NO: 43478 - DNA, 25 bp, Canis familiaris
aaatatgtgtttttgtcgcttctgt

SEQ ID NO: 43479 - DNA, 25 bp, Canis familiaris
aaatcatatttttctgcccatcatc

SEQ ID NO: 43480 - DNA, 25 bp, Canis familiaris
aaatctagattttcttcaacccatg

SEQ ID NO: 43481 - DNA, 25 bp, Canis familiaris
aaatcttgtttgactcttgaaccaa

SEQ ID NO: 43482 - DNA, 25 bp, Canis familiaris
aaatttggatggcctgtcagtaaca

SEQ ID NO: 43483 - DNA, 25 bp, Canis familiaris
aaatttgatatgacctattcttact

SEQ ID NO: 43484 - DNA, 25 bp, Canis familiaris
aaatgtcagaagacctcgacttggc

SEQ ID NO: 43485 - DNA, 25 bp, Canis familiaris
aaagaggaaaccaccttggcgtcag

SEQ ID NO: 43486 - DNA, 25 bp, Canis familiaris
aaagaccaaaccactgtggccagtg

SEQ ID NO: 43487 - DNA, 25 bp, Canis familiaris
aaatcccatgaagctttgtggaatg

SEQ ID NO: 43488 - DNA, 25 bp, Canis familiaris
aaatcacccacaccttctgggagag

SEQ ID NO: 43489 - DNA, 25 bp, Canis familiaris
aaatcacacccaacatttgctggaa

SEQ ID NO: 43490 - DNA, 25 bp, Canis familiaris
aaataatccctacgtgtgtgtgtgt

SEQ ID NO: 43491 - DNA, 25 bp, Canis familiaris
aaataaacgcggagcgcctgtgtcc

SEQ ID NO: 43492 - DNA, 25 bp, Canis familiaris
aaataaatctgagcaccacctttcc

SEQ ID NO: 43493 - DNA, 25 bp, Canis familiaris
aaataagatctctcctagcctgtgt

SEQ ID NO: 43494 - DNA, 25 bp, Canis familiaris
aaatgtagtcacttccctgattttt

SEQ ID NO: 43495 - DNA, 25 bp, Canis familiaris
aaatctacctctgccgcatatgtat

SEQ ID NO: 43496 - DNA, 25 bp, Canis familiaris
aaatatgagcgtaaccactatggtg

SEQ ID NO: 43497 - DNA, 25 bp, Canis familiaris
aaatcagagaatacaaccagtttgg

SEQ ID NO: 43498 - DNA, 25 bp, Canis familiaris
aaaggataagataaactgttggtgt

SEQ ID NO: 43499 - DNA, 25 bp, Canis familiaris
aaatgctttattaaacatctaggtg

SEQ ID NO: 43500 - DNA, 25 bp, Canis familiaris
aaatcttcagtgtaaaccttctggg

SEQ ID NO: 43501 - DNA, 25 bp, Canis familiaris
aaatcactgcataaaaacctgtttg

SEQ ID NO: 43502 - DNA, 25 bp, Canis familiaris
aaatccagttcaaaaccagctaggt

SEQ ID NO: 43503 - DNA, 25 bp, Canis familiaris
aaatgcctctactgagtactctggg

SEQ ID NO: 43504 - DNA, 25 bp, Canis familiaris
aaatgccctctctggtgacatttgg

SEQ ID NO: 43505 - DNA, 25 bp, Canis familiaris
aaatcacctcttaaggtctcttgag

SEQ ID NO: 43506 - DNA, 25 bp, Canis familiaris
aaatccctttattttcatttgtgat

SEQ ID NO: 43507 - DNA, 25 bp, Canis familiaris
aaatgaccattttactctttcggat

SEQ ID NO: 43508 - DNA, 25 bp, Canis familiaris
aaatatgcctctaatgacttttggg

SEQ ID NO: 43509 - DNA, 25 bp, Canis familiaris
aaatagccccacaacatgtttgaga

SEQ ID NO: 43510 - DNA, 25 bp, Canis familiaris
aaatatctcccttacttcttgagca

SEQ ID NO: 43511 - DNA, 25 bp, Canis familiaris
aaatatcccatctcatttctatcaa

SEQ ID NO: 43512 - DNA, 25 bp, Canis familiaris
aaatcatgcccaacagctttatcat

SEQ ID NO: 43513 - DNA, 25 bp, Canis familiaris
aaatcatccaaggagctatctcatc

SEQ ID NO: 43514 - DNA, 25 bp, Canis familiaris
aaatacatcatacttgtacacattt

SEQ ID NO: 43515 - DNA, 25 bp, Canis familiaris
aaatatgcattacctgtatgaagct

SEQ ID NO: 43516 - DNA, 25 bp, Canis familiaris
aaatataccaccttgagatagttga

SEQ ID NO: 43517 - DNA, 25 bp, Canis familiaris
aaatcaacatcaaattgggacggat

SEQ ID NO: 43518 - DNA, 25 bp, Canis familiaris
aaatcttcactttcaaggactagta

SEQ ID NO: 43519 - DNA, 25 bp, Canis familiaris
aaatatacattttaaatcctagatg

SEQ ID NO: 43520 - DNA, 25 bp, Canis familiaris
aaatatgtgcttccaaaattgccaa

SEQ ID NO: 43521 - DNA, 25 bp, Canis familiaris
aaatgggttggccagatcctctaga

SEQ ID NO: 43522 - DNA, 25 bp, Canis familiaris
aaatgacgtttgccaagccttgtcc

SEQ ID NO: 43523 - DNA, 25 bp, Canis familiaris
aaatatcctggtccattacattgat

SEQ ID NO: 43524 - DNA, 25 bp, Canis familiaris
aaatattgagccctcactcacttac

SEQ ID NO: 43525 - DNA, 25 bp, Canis familiaris
aaatatgatgaccttactcttcgcc

SEQ ID NO: 43526 - DNA, 25 bp, Canis familiaris
aaatcagagaccgaaccaggctgcc

SEQ ID NO: 43527 - DNA, 25 bp, Canis familiaris
aaatcacctgctgtacaagccatcc

SEQ ID NO: 43528 - DNA, 25 bp, Canis familiaris
aaatcacctgctgtacaagccatcc

SEQ ID NO: 43529 - DNA, 25 bp, Canis familiaris
aaatctcccatcaatgagaacctac

SEQ ID NO: 43530 - DNA, 25 bp, Canis familiaris
aaatcagccttaatgacaaactgtc

SEQ ID NO: 43531 - DNA, 25 bp, Canis familiaris
aaatagcctctagacattcatcatt

SEQ ID NO: 43532 - DNA, 25 bp, Canis familiaris
aaatccacctagatcttcagttctg

SEQ ID NO: 43533 - DNA, 25 bp, Canis familiaris
aaatccagcacaaattacttttata

SEQ ID NO: 43534 - DNA, 25 bp, Canis familiaris
aaatgcgcaccaaacttacttaaca

SEQ ID NO: 43535 - DNA, 25 bp, Canis familiaris
aaatgctcaccttttctacattaaa

SEQ ID NO: 43536 - DNA, 25 bp, Canis familiaris
aaagcaggccctgactgaatttaac

SEQ ID NO: 43537 - DNA, 25 bp, Canis familiaris
aaagcaggcccgagccgcctggata

SEQ ID NO: 43538 - DNA, 25 bp, Canis familiaris
aacataggcccgaggcctgggtgct

SEQ ID NO: 43539 - DNA, 25 bp, Canis familiaris
aactaccagcgctatggagtccggt

SEQ ID NO: 43540 - DNA, 25 bp, Canis familiaris
aaatatctaccttgtgtctctcggt

SEQ ID NO: 43541 - DNA, 25 bp, Canis familiaris
aaatatgtgtacggtgttccctgct

SEQ ID NO: 43542 - DNA, 25 bp, Canis familiaris
aaatcttggaggcactaccagctct

SEQ ID NO: 43543 - DNA, 25 bp, Canis familiaris
aaatctgcttgacgaggcattcccc

SEQ ID NO: 43544 - DNA, 25 bp, Canis familiaris
aaatgctgtcatctgagcttttagc

SEQ ID NO: 43545 - DNA, 25 bp, Canis familiaris
aaatctgtgcatgggcctgttcaag

SEQ ID NO: 43546 - DNA, 25 bp, Canis familiaris
aaatctgatcagagcctggggtggt

SEQ ID NO: 43547 - DNA, 25 bp, Canis familiaris
aaatctgtcatgtagttaagtaggc

SEQ ID NO: 43548 - DNA, 25 bp, Canis familiaris
aaatctgcctattttcaagctgaag

SEQ ID NO: 43549 - DNA, 25 bp, Canis familiaris
aaatctcacatcttaacacacgcta

SEQ ID NO: 43550 - DNA, 25 bp, Canis familiaris
aaatgacattcccaaagcaagctat

SEQ ID NO: 43551 - DNA, 25 bp, Canis familiaris
aaatgtttcgtgtacagcaagctca

SEQ ID NO: 43552 - DNA, 25 bp, Canis familiaris
aaatccttgagtgatggccagctga

SEQ ID NO: 43553 - DNA, 25 bp, Canis familiaris
aaatctgccgtttatggacaccatc

SEQ ID NO: 43554 - DNA, 25 bp, Canis familiaris
aaatatgctccttcttaaactcttc

SEQ ID NO: 43555 - DNA, 25 bp, Canis familiaris
aaatcagtcacttttatcagaatct

SEQ ID NO: 43556 - DNA, 25 bp, Canis familiaris
aaatcatgctcacaacttcgacaat

SEQ ID NO: 43557 - DNA, 25 bp, Canis familiaris
aaatgctgcaagttaccatggtaat

SEQ ID NO: 43558 - DNA, 25 bp, Canis familiaris
aaatggtagtctaagcatgggattc

SEQ ID NO: 43559 - DNA, 25 bp, Canis familiaris
aaatggttctgtgcacttggatgtg

SEQ ID NO: 43560 - DNA, 25 bp, Canis familiaris
aaatagttatgtcctcctgtctgat

SEQ ID NO: 43561 - DNA, 25 bp, Canis familiaris
aacaatttcaggctcgagtcattag

SEQ ID NO: 43562 - DNA, 25 bp, Canis familiaris
aaatagtgtcaccaatccagtaaag

SEQ ID NO: 43563 - DNA, 25 bp, Canis familiaris
aaacaggtcttagcctgctaaaggt

SEQ ID NO: 43564 - DNA, 25 bp, Canis familiaris
aaatgaatttttgccagtaactggt

SEQ ID NO: 43565 - DNA, 25 bp, Canis familiaris
aaataacattttgccagccttctgg

SEQ ID NO: 43566 - DNA, 25 bp, Canis familiaris
aaataaatgctaatgccggcctcgc

SEQ ID NO: 43567 - DNA, 25 bp, Canis familiaris
aaatacaagctattgtagcccctcc

SEQ ID NO: 43568 - DNA, 25 bp, Canis familiaris
aaatatatactataatgccctctag

SEQ ID NO: 43569 - DNA, 25 bp, Canis familiaris
aaatgataaccacaatgcattcgta

SEQ ID NO: 43570 - DNA, 25 bp, Canis familiaris
aaatgcaaaccacattcttccttct

SEQ ID NO: 43571 - DNA, 25 bp, Canis familiaris
aaatgaatacagccttgtttttatt

SEQ ID NO: 43572 - DNA, 25 bp, Canis familiaris
aaagttgaaggcttctcttagttct

SEQ ID NO: 43573 - DNA, 25 bp, Canis familiaris
aaagtggaaagctccgtggcttcct

SEQ ID NO: 43574 - DNA, 25 bp, Canis familiaris
aaatgttggttggcgccttgactac

SEQ ID NO: 43575 - DNA, 25 bp, Canis familiaris
aaatgtcttgtgtagggttagtgga

SEQ ID NO: 43576 - DNA, 25 bp, Canis familiaris
aaagtcatggtagagttgctaggaa

SEQ ID NO: 43577 - DNA, 25 bp, Canis familiaris
aaaggctggattgactgggcggcca

SEQ ID NO: 43578 - DNA, 25 bp, Canis familiaris
aaatggttttgatctgggcagcccc

SEQ ID NO: 43579 - DNA, 25 bp, Canis familiaris
aaatctttcctgccacgagagagct

SEQ ID NO: 43580 - DNA, 25 bp, Canis familiaris
aaatccttgagtacctgagagacca

SEQ ID NO: 43581 - DNA, 25 bp, Canis familiaris
aaagtcttaattctgagttcaagta

SEQ ID NO: 43582 - DNA, 25 bp, Canis familiaris
aaacttccaagtgattaaaatgtag

SEQ ID NO: 43583 - DNA, 25 bp, Canis familiaris
aaagtactcaggtcaattataaaat

SEQ ID NO: 43584 - DNA, 25 bp, Canis familiaris
cacccataccagaggacttacggaa

SEQ ID NO: 43585 - DNA, 25 bp, Canis familiaris
caataacccagaaggacttacgaga

SEQ ID NO: 43586 - DNA, 25 bp, Canis familiaris
aaatatccattaagtccttactgat

SEQ ID NO: 43587 - DNA, 25 bp, Canis familiaris
aaatctcgtctctaaacttactgta

SEQ ID NO: 43588 - DNA, 25 bp, Canis familiaris
aaatccgtctactgtattattgcta

SEQ ID NO: 43589 - DNA, 25 bp, Canis familiaris
aaatgtccttcctttatttttgcag

SEQ ID NO: 43590 - DNA, 25 bp, Canis familiaris
aaatgtccttcctttatttttgcag

SEQ ID NO: 43591 - DNA, 25 bp, Canis familiaris
aaagccttaaccaaattcattagag

SEQ ID NO: 43592 - DNA, 25 bp, Canis familiaris
aaagttctactctgagttacataga

SEQ ID NO: 43593 - DNA, 25 bp, Canis familiaris
aaaggtcgccgaccatgtctgacaa

SEQ ID NO: 43594 - DNA, 25 bp, Canis familiaris
aaatgcagtcccgaggctttgatat

SEQ ID NO: 43595 - DNA, 25 bp, Canis familiaris
aaatcatgccactgagcctttgttt

SEQ ID NO: 43596 - DNA, 25 bp, Canis familiaris
aaatcatcgcaaggacttatggctg

SEQ ID NO: 43597 - DNA, 25 bp, Canis familiaris
aaatcagcaaatgatctctatagat

SEQ ID NO: 43598 - DNA, 25 bp, Canis familiaris
aaatgcccttgctgctgacatagat

SEQ ID NO: 43599 - DNA, 25 bp, Canis familiaris
aaatcactttctggccactgagaga

SEQ ID NO: 43600 - DNA, 25 bp, Canis familiaris
aaataattccattccctgaggacaa

SEQ ID NO: 43601 - DNA, 25 bp, Canis familiaris
aaatgaaggcgcttctgctgctggt

SEQ ID NO: 43602 - DNA, 25 bp, Canis familiaris
aaatacagcgcctttctcaggatct

SEQ ID NO: 43603 - DNA, 25 bp, Canis familiaris
aaatccatcgcagtgttctagagac

SEQ ID NO: 43604 - DNA, 25 bp, Canis familiaris
aaatacacagaggtcctcaagaccc

SEQ ID NO: 43605 - DNA, 25 bp, Canis familiaris
aaatacccatttctacagtctcatc

SEQ ID NO: 43606 - DNA, 25 bp, Canis familiaris
aaaagcccatttcttaagcctgaag

SEQ ID NO: 43607 - DNA, 25 bp, Canis familiaris
aaaggcttctttattccaggtgtga

SEQ ID NO: 43608 - DNA, 25 bp, Canis familiaris
aaatggaattatctctatccgggat

SEQ ID NO: 43609 - DNA, 25 bp, Canis familiaris
aaatcagaaattatcggcgcgaggt

SEQ ID NO: 43610 - DNA, 25 bp, Canis familiaris
aaatgcagaaatgttccttccgcca

SEQ ID NO: 43611 - DNA, 25 bp, Canis familiaris
aaatctgaattccttgtgtttgccc

SEQ ID NO: 43612 - DNA, 25 bp, Canis familiaris
aaatctgggtgccttgtcttgtgaa

SEQ ID NO: 43613 - DNA, 25 bp, Canis familiaris
aaatgcgcgggtccagttctgaaag

SEQ ID NO: 43614 - DNA, 25 bp, Canis familiaris
aaaggcatgggcgcgtgttggaaga

SEQ ID NO: 43615 - DNA, 25 bp, Canis familiaris
aaaggcaagtgacagggtggccaga

SEQ ID NO: 43616 - DNA, 25 bp, Canis familiaris
aaataatagtgctgtgtggtggaaa

SEQ ID NO: 43617 - DNA, 25 bp, Canis familiaris
aaatgcgaatgtgtttggtgccaaa

SEQ ID NO: 43618 - DNA, 25 bp, Canis familiaris
aaatggaatcttcttgggtcgcaat

SEQ ID NO: 43619 - DNA, 25 bp, Canis familiaris
aaatcaatccttttgggaatccaat

SEQ ID NO: 43620 - DNA, 25 bp, Canis familiaris
aaatcctccatttatcgaaatcata

SEQ ID NO: 43621 - DNA, 25 bp, Canis familiaris
aaatcacttctgttaagtacatata

SEQ ID NO: 43622 - DNA, 25 bp, Canis familiaris
aaatgactcttttaatctataatat

SEQ ID NO: 43623 - DNA, 25 bp, Canis familiaris
aaatcaccatgtcagagaaaaagaa

SEQ ID NO: 43624 - DNA, 25 bp, Canis familiaris
aaatcctgcccgggacaaaagacat

SEQ ID NO: 43625 - DNA, 25 bp, Canis familiaris
aaatccattccccagtcatgaaaat

SEQ ID NO: 43626 - DNA, 25 bp, Canis familiaris
aaatctagtttccagtgctcaaaaa

SEQ ID NO: 43627 - DNA, 25 bp, Canis familiaris
aaatgtttttcaaactcagagacaa

SEQ ID NO: 43628 - DNA, 25 bp, Canis familiaris
aaatctttgttgtagtctaaacagt

SEQ ID NO: 43629 - DNA, 25 bp, Canis familiaris
aaatgtggtttatctctaacaagta

SEQ ID NO: 43630 - DNA, 25 bp, Canis familiaris
aaagatgggtcctctattctcaagg

SEQ ID NO: 43631 - DNA, 25 bp, Canis familiaris
aaaggggtgcttcagattccagggc

SEQ ID NO: 43632 - DNA, 25 bp, Canis familiaris
aaaggaggtgaccgaatcccggctg

SEQ ID NO: 43633 - DNA, 25 bp, Canis familiaris
aaagggaaaagtgacagccggctgt

SEQ ID NO: 43634 - DNA, 25 bp, Canis familiaris
aaaggtggcacaaaccacactccct

SEQ ID NO: 43635 - DNA, 25 bp, Canis familiaris
aaatgcactggaacaactcaacctg

SEQ ID NO: 43636 - DNA, 25 bp, Canis familiaris
aaatgccaaaacagtgaaatctccg

SEQ ID NO: 43637 - DNA, 25 bp, Canis familiaris
aaatcccacaacaagttctactctg

SEQ ID NO: 43638 - DNA, 25 bp, Canis familiaris
aaatccctaacaagtcattttcact

SEQ ID NO: 43639 - DNA, 25 bp, Canis familiaris
aaatctccttaaatctgcattccct

SEQ ID NO: 43640 - DNA, 25 bp, Canis familiaris
aaatgctcttaaaatatcttccctt

SEQ ID NO: 43641 - DNA, 25 bp, Canis familiaris
aaatggttaacatttctgaagccat

SEQ ID NO: 43642 - DNA, 25 bp, Canis familiaris
aaatgggctacattttctacccaag

SEQ ID NO: 43643 - DNA, 25 bp, Canis familiaris
aaatgaacaacattctgacctccca

SEQ ID NO: 43644 - DNA, 25 bp, Canis familiaris
aaatagcactaggtaggccttctac

SEQ ID NO: 43645 - DNA, 25 bp, Canis familiaris
aaataagctgtggccagtgcctggt

SEQ ID NO: 43646 - DNA, 25 bp, Canis familiaris
aaatcaacaatgtcagcgccatgct

SEQ ID NO: 43647 - DNA, 25 bp, Canis familiaris
aaatcatacgatccagcctcatggg

SEQ ID NO: 43648 - DNA, 25 bp, Canis familiaris
aaatagacaattcgcccatgggtcc

SEQ ID NO: 43649 - DNA, 25 bp, Canis familiaris
aaatgaagctgatctcccttctgac

SEQ ID NO: 43650 - DNA, 25 bp, Canis familiaris
aaatgatccgcgtcccgaatgctga

SEQ ID NO: 43651 - DNA, 25 bp, Canis familiaris
aaatgaagcagcaccatccaaggga

SEQ ID NO: 43652 - DNA, 25 bp, Canis familiaris
aaatgatggcacacctttatgatgg

SEQ ID NO: 43653 - DNA, 25 bp, Canis familiaris
aaatgcatgaagatcctggctaact

SEQ ID NO: 43654 - DNA, 25 bp, Canis familiaris
aaatgtcaaatgcactggccattca

SEQ ID NO: 43655 - DNA, 25 bp, Canis familiaris
aaatcttatcatcacggcacattca

SEQ ID NO: 43656 - DNA, 25 bp, Canis familiaris
aaagctaatgatcacggatatgaca

SEQ ID NO: 43657 - DNA, 25 bp, Canis familiaris
aaatgcgtagatggaaggaaaagtt

SEQ ID NO: 43658 - DNA, 25 bp, Canis familiaris
aaatgtgtagtgcacacctaacttt

SEQ ID NO: 43659 - DNA, 25 bp, Canis familiaris
aaatgttcaggtccaagttaattat

SEQ ID NO: 43660 - DNA, 25 bp, Canis familiaris
aaatgttgtgccagaacgtccttac

SEQ ID NO: 43661 - DNA, 25 bp, Canis familiaris
aaatgtttctcaattcacgtccttt

SEQ ID NO: 43662 - DNA, 25 bp, Canis familiaris
aaatgtatgtttatatttccttata

SEQ ID NO: 43663 - DNA, 25 bp, Canis familiaris
aaagttctgtacatagttcctaagt

SEQ ID NO: 43664 - DNA, 25 bp, Canis familiaris
aaaggcttctgaatacatttccaaa

SEQ ID NO: 43665 - DNA, 25 bp, Canis familiaris
aaatggtttattgttcttgccacaa

SEQ ID NO: 43666 - DNA, 25 bp, Canis familiaris
aaatgagagtgtatgcctcctatct

SEQ ID NO: 43667 - DNA, 25 bp, Canis familiaris
aaatgcacatttggctgttcctttt

SEQ ID NO: 43668 - DNA, 25 bp, Canis familiaris
aaatcagatcattccttttgttagt

SEQ ID NO: 43669 - DNA, 25 bp, Canis familiaris
aaatgacacaacgttttctgatact

SEQ ID NO: 43670 - DNA, 25 bp, Canis familiaris
aaagtgccaacgatgtattcaacag

SEQ ID NO: 43671 - DNA, 25 bp, Canis familiaris
aaatgctggctgagccctttcaaca

SEQ ID NO: 43672 - DNA, 25 bp, Canis familiaris
aaatccctgttgcactgttaaaaag

SEQ ID NO: 43673 - DNA, 25 bp, Canis familiaris
aaatccctctgctcactaaaataaa

SEQ ID NO: 43674 - DNA, 25 bp, Canis familiaris
aaatccagtctcccactgagaagat

SEQ ID NO: 43675 - DNA, 25 bp, Canis familiaris
aaatccacttcgcctgtgtaagtga

SEQ ID NO: 43676 - DNA, 25 bp, Canis familiaris
aaatccagccattctctgtttaaca

SEQ ID NO: 43677 - DNA, 25 bp, Canis familiaris
aaatccactcatgtgcatttctaga

SEQ ID NO: 43678 - DNA, 25 bp, Canis familiaris
aaatacatctatttctccatctaca

SEQ ID NO: 43679 - DNA, 25 bp, Canis familiaris
aaataatgtgatcgtctcctctagg

SEQ ID NO: 43680 - DNA, 25 bp, Canis familiaris
aaatcagtgtgatctacacctcagg

SEQ ID NO: 43681 - DNA, 25 bp, Canis familiaris
aaatcagtatcaaaacagcctaggg

SEQ ID NO: 43682 - DNA, 25 bp, Canis familiaris
aaatcgctaccatacaggacaggag

SEQ ID NO: 43683 - DNA, 25 bp, Canis familiaris
aaatctgtcccctcagaggagctct

SEQ ID NO: 43684 - DNA, 25 bp, Canis familiaris
aaatctgttacttggagaaagcgcc

SEQ ID NO: 43685 - DNA, 25 bp, Canis familiaris
aacacatttacttgaaaagcggtct

SEQ ID NO: 43686 - DNA, 25 bp, Canis familiaris
aaatccttacaataaaggctgtctc

SEQ ID NO: 43687 - DNA, 25 bp, Canis familiaris
aaatctttcaaagcaaaatggccta

SEQ ID NO: 43688 - DNA, 25 bp, Canis familiaris
aaatctattttctcaaacatgggtg

SEQ ID NO: 43689 - DNA, 25 bp, Canis familiaris
aaatcagttttcccacaaatagaga

SEQ ID NO: 43690 - DNA, 25 bp, Canis familiaris
aaatcagctttgtttccaaccaaga

SEQ ID NO: 43691 - DNA, 25 bp, Canis familiaris
aaatctgctgataggcttctgaagg

SEQ ID NO: 43692 - DNA, 25 bp, Canis familiaris
aaatcatctatttctttcataaggt

SEQ ID NO: 43693 - DNA, 25 bp, Canis familiaris
aaatcagaattagttgccatgttgg

SEQ ID NO: 43694 - DNA, 25 bp, Canis familiaris
aaatcatgagcattttctccgctgt

SEQ ID NO: 43695 - DNA, 25 bp, Canis familiaris
aaatcagaatttccatcctctttcc

SEQ ID NO: 43696 - DNA, 25 bp, Canis familiaris
aaatcaaaatgccctcttgtttcag

SEQ ID NO: 43697 - DNA, 25 bp, Canis familiaris
aaatctaaatgccagttttctacaa

SEQ ID NO: 43698 - DNA, 25 bp, Canis familiaris
aaatgagactatgcgtttttataaa

SEQ ID NO: 43699 - DNA, 25 bp, Canis familiaris
aaagcgttaccgcgctcttatggta

SEQ ID NO: 43700 - DNA, 25 bp, Canis familiaris
aaatctgtttcggggttgtcattgt

SEQ ID NO: 43701 - DNA, 25 bp, Canis familiaris
aaatcattttcttctggatcttcat

SEQ ID NO: 43702 - DNA, 25 bp, Canis familiaris
aaatctttgtaattgtgagcttcat

SEQ ID NO: 43703 - DNA, 25 bp, Canis familiaris
aaatctaggtaaccgatgccttaat

SEQ ID NO: 43704 - DNA, 25 bp, Canis familiaris
aaatctggattttttgtcctgtaat

SEQ ID NO: 43705 - DNA, 25 bp, Canis familiaris
aaatcaggattcatttctgcctaaa

SEQ ID NO: 43706 - DNA, 25 bp, Canis familiaris
aaatcaggtatattttcctatatta

SEQ ID NO: 43707 - DNA, 25 bp, Canis familiaris
aaatcagcattattctttccacagt

SEQ ID NO: 43708 - DNA, 25 bp, Canis familiaris
aaatcatcactctaatttcccagca

SEQ ID NO: 43709 - DNA, 25 bp, Canis familiaris
aaatctcctcaggacatcattccca

SEQ ID NO: 43710 - DNA, 25 bp, Canis familiaris
aaataactcattccacatgtccgac

SEQ ID NO: 43711 - DNA, 25 bp, Canis familiaris
aaagagagccaacacggcctgagct

SEQ ID NO: 43712 - DNA, 25 bp, Canis familiaris
aaaggagaaccccatgcgggagctt

SEQ ID NO: 43713 - DNA, 25 bp, Canis familiaris
aaaggagaaccccatgcgggagctt

SEQ ID NO: 43714 - DNA, 25 bp, Canis familiaris
aaaggagaaccccatgcgggagctt

SEQ ID NO: 43715 - DNA, 25 bp, Canis familiaris
aaatgggggtcgcagcgtgaggctc

SEQ ID NO: 43716 - DNA, 25 bp, Canis familiaris
aaatggcacttctggggcatgggtc

SEQ ID NO: 43717 - DNA, 25 bp, Canis familiaris
aaatgctgctctagatactgaggca

SEQ ID NO: 43718 - DNA, 25 bp, Canis familiaris
aaatgcctcttagctcaggccttgt

SEQ ID NO: 43719 - DNA, 25 bp, Canis familiaris
aaatctacttatctcattgcctttc

SEQ ID NO: 43720 - DNA, 25 bp, Canis familiaris
aaatcaatctcttttgctctgtctc

SEQ ID NO: 43721 - DNA, 25 bp, Canis familiaris
aaatctcattcttttttgttgctga

SEQ ID NO: 43722 - DNA, 25 bp, Canis familiaris
aaatctgcttagttcttagtatctg

SEQ ID NO: 43723 - DNA, 25 bp, Canis familiaris
aaatctgctgacatctttatctttg

SEQ ID NO: 43724 - DNA, 25 bp, Canis familiaris
aaatctcgactattttgactctgat

SEQ ID NO: 43725 - DNA, 25 bp, Canis familiaris
aaatcatcgttgtatttcaactata

SEQ ID NO: 43726 - DNA, 25 bp, Canis familiaris
aaatcattttgttgtatacctgaaa

SEQ ID NO: 43727 - DNA, 25 bp, Canis familiaris
aaatcttagccaagtcatcatcctg

SEQ ID NO: 43728 - DNA, 25 bp, Canis familiaris
aaatctgtggcccagacatctgcca

SEQ ID NO: 43729 - DNA, 25 bp, Canis familiaris
aaatgtgatacccatagcttccatg

SEQ ID NO: 43730 - DNA, 25 bp, Canis familiaris
aaatctataaccagagatcctgctt

SEQ ID NO: 43731 - DNA, 25 bp, Canis familiaris
aaatgtaacctcatggacagctatg

SEQ ID NO: 43732 - DNA, 25 bp, Canis familiaris
aaatcttactctgtgagcaaattgt

SEQ ID NO: 43733 - DNA, 25 bp, Canis familiaris
aaatctggccctcatgtcagacatg

SEQ ID NO: 43734 - DNA, 25 bp, Canis familiaris
aaatgcttgcccaggctcagaggga

SEQ ID NO: 43735 - DNA, 25 bp, Canis familiaris
aaatcctcccagaagcatcaaggag

SEQ ID NO: 43736 - DNA, 25 bp, Canis familiaris
aaatcccccctgcatagggatggat

SEQ ID NO: 43737 - DNA, 25 bp, Canis familiaris
aaatcgctccacctggaagtcgtga

SEQ ID NO: 43738 - DNA, 25 bp, Canis familiaris
aaaggctcaacgtgacactcggtta

SEQ ID NO: 43739 - DNA, 25 bp, Canis familiaris
aaaggccaaatccaaccgcattgtt

SEQ ID NO: 43740 - DNA, 25 bp, Canis familiaris
aaagtgcctgacacattccgttaca

SEQ ID NO: 43741 - DNA, 25 bp, Canis familiaris
aaatgtccaacaaaacgcacttaag

SEQ ID NO: 43742 - DNA, 25 bp, Canis familiaris
aaatgcagagcacccaaaccagtaa

SEQ ID NO: 43743 - DNA, 25 bp, Canis familiaris
aaatggagaggcctaccctggatct

SEQ ID NO: 43744 - DNA, 25 bp, Canis familiaris
aaatgagaaagcctactcctgtagt

SEQ ID NO: 43745 - DNA, 25 bp, Canis familiaris
aaatctgaagaggcttctcctgttt

SEQ ID NO: 43746 - DNA, 25 bp, Canis familiaris
aaatctcaagagactcaccacgagt

SEQ ID NO: 43747 - DNA, 25 bp, Canis familiaris
aaatcacaccagaccagcagaagag

SEQ ID NO: 43748 - DNA, 25 bp, Canis familiaris
aaatcacacctggcctcataagaga

SEQ ID NO: 43749 - DNA, 25 bp, Canis familiaris
aaatgcctcctgtccatgtgaaggt

SEQ ID NO: 43750 - DNA, 25 bp, Canis familiaris
aaatgctcatcactttacgaaggat

SEQ ID NO: 43751 - DNA, 25 bp, Canis familiaris
aaatgttgcctttacggtggtgttg

SEQ ID NO: 43752 - DNA, 25 bp, Canis familiaris
aaagtaagcttgttcgcctggagcc

SEQ ID NO: 43753 - DNA, 25 bp, Canis familiaris
aaatgtaagcttcagggtagccctg

SEQ ID NO: 43754 - DNA, 25 bp, Canis familiaris
aaagtgaggcttctgggtgcatacc

SEQ ID NO: 43755 - DNA, 25 bp, Canis familiaris
aaatgtgaggtcctggggatcccct

SEQ ID NO: 43756 - DNA, 25 bp, Canis familiaris
aaatggaggcccaggaagtcccttg

SEQ ID NO: 43757 - DNA, 25 bp, Canis familiaris
aaatggaggcccagggagatgaggt

SEQ ID NO: 43758 - DNA, 25 bp, Canis familiaris
aaaggggacaatgaggcaggggatc

SEQ ID NO: 43759 - DNA, 25 bp, Canis familiaris
aaatctggagcagcagctagagcag

SEQ ID NO: 43760 - DNA, 25 bp, Canis familiaris
aaatgtccacaccatctgagacggt

SEQ ID NO: 43761 - DNA, 25 bp, Canis familiaris
aaagctcaagcataccagacgggca

SEQ ID NO: 43762 - DNA, 25 bp, Canis familiaris
aaatgctaagcacagacactaaggc

SEQ ID NO: 43763 - DNA, 25 bp, Canis familiaris
aaatgccgacaataacatgaaggct

SEQ ID NO: 43764 - DNA, 25 bp, Canis familiaris
aaatcccataagcatgactgaaggc

SEQ ID NO: 43765 - DNA, 25 bp, Canis familiaris
aaatcccatgactttaagaaatctt

SEQ ID NO: 43766 - DNA, 25 bp, Canis familiaris
aaaggccatgactttagcatgatga

SEQ ID NO: 43767 - DNA, 25 bp, Canis familiaris
aaatgtagagccattgcaatgcatc

SEQ ID NO: 43768 - DNA, 25 bp, Canis familiaris
aaatgttgaccatatgcatctgtat

SEQ ID NO: 43769 - DNA, 25 bp, Canis familiaris
aaatgatgttgccaccatcctgtct

SEQ ID NO: 43770 - DNA, 25 bp, Canis familiaris
aaatcttgcagcaagctctcctgtt

SEQ ID NO: 43771 - DNA, 25 bp, Canis familiaris
aaatgctctgggactctctgttagc

SEQ ID NO: 43772 - DNA, 25 bp, Canis familiaris
aaatggcggatgacgccggtgctgc

SEQ ID NO: 43773 - DNA, 25 bp, Canis familiaris
aaatggggatcttcctggtctacta

SEQ ID NO: 43774 - DNA, 25 bp, Canis familiaris
aaatggggcacgacctatgattact

SEQ ID NO: 43775 - DNA, 25 bp, Canis familiaris
aaatgtgggtggccttcagtcttgt

SEQ ID NO: 43776 - DNA, 25 bp, Canis familiaris
aaatgaagcttgcacctggttgttt

SEQ ID NO: 43777 - DNA, 25 bp, Canis familiaris
aaagaagccctagctggttcatcct

SEQ ID NO: 43778 - DNA, 25 bp, Canis familiaris
aaagagggctctatctggaaccacc

SEQ ID NO: 43779 - DNA, 25 bp, Canis familiaris
aaagtagcgtttcccagaatccact

SEQ ID NO: 43780 - DNA, 25 bp, Canis familiaris
aaaggagttttcacacagagccacc

SEQ ID NO: 43781 - DNA, 25 bp, Canis familiaris
aaatggagtctcttgtgctaagccc

SEQ ID NO: 43782 - DNA, 25 bp, Canis familiaris
aaaggaccttggcataagccccagc

SEQ ID NO: 43783 - DNA, 25 bp, Canis familiaris
aaatggaagcttctagcaagccccc

SEQ ID NO: 43784 - DNA, 25 bp, Canis familiaris
aaatgtagagtgagggccagccccc

SEQ ID NO: 43785 - DNA, 25 bp, Canis familiaris
aaatgtgaagtgagacaccccagcc

SEQ ID NO: 43786 - DNA, 25 bp, Canis familiaris
aaatcgaaggcgaagccacccaggg

SEQ ID NO: 43787 - DNA, 25 bp, Canis familiaris
aacataacgccatagcataccatcg

SEQ ID NO: 43788 - DNA, 25 bp, Canis familiaris
aaatctcaccctgaatattcacgcc

SEQ ID NO: 43789 - DNA, 25 bp, Canis familiaris
aaatctcaaccggaacatggaccat

SEQ ID NO: 43790 - DNA, 25 bp, Canis familiaris
aaatctgaacagctgaacctactct

SEQ ID NO: 43791 - DNA, 25 bp, Canis familiaris
aaatctgtacagcaagagcaacttt

SEQ ID NO: 43792 - DNA, 25 bp, Canis familiaris
aaatctgtcacagcagggcctttca

SEQ ID NO: 43793 - DNA, 25 bp, Canis familiaris
aaaggcacacactgaggcactacca

SEQ ID NO: 43794 - DNA, 25 bp, Canis familiaris
aaatgacaactctgctaaatacaag

SEQ ID NO: 43795 - DNA, 25 bp, Canis familiaris
aaatgatgccccagctaggtagaat

SEQ ID NO: 43796 - DNA, 25 bp, Canis familiaris
aaatgtggccttttctgtgtcaaat

SEQ ID NO: 43797 - DNA, 25 bp, Canis familiaris
aaatgtctgaccacttttcatcaca

SEQ ID NO: 43798 - DNA, 25 bp, Canis familiaris
aaatgctgtaccagtttacactccc

SEQ ID NO: 43799 - DNA, 25 bp, Canis familiaris
aaatgcttaccttgtctagcatagt

SEQ ID NO: 43800 - DNA, 25 bp, Canis familiaris
aaatctttccatttgcaacaacatg

SEQ ID NO: 43801 - DNA, 25 bp, Canis familiaris
aaatgtggctcctctaagaactaga

SEQ ID NO: 43802 - DNA, 25 bp, Canis familiaris
aaagctggacctttaaaagccagat

SEQ ID NO: 43803 - DNA, 25 bp, Canis familiaris
aaatcaggtctttatccaaaacatt

SEQ ID NO: 43804 - DNA, 25 bp, Canis familiaris
aaagaggtgcctgatgccaaaaaaa

SEQ ID NO: 43805 - DNA, 25 bp, Canis familiaris
aaagagtgtccatctgttcctaaca

SEQ ID NO: 43806 - DNA, 25 bp, Canis familiaris
aagagtttcgagactttccggatct

SEQ ID NO: 43807 - DNA, 25 bp, Canis familiaris
aaagtattactgattcccatggaag

SEQ ID NO: 43808 - DNA, 25 bp, Canis familiaris
aaatgcttcttcaaattcccgtaat

SEQ ID NO: 43809 - DNA, 25 bp, Canis familiaris
aaatctctttcaaacatttcagttt

SEQ ID NO: 43810 - DNA, 25 bp, Canis familiaris
aaatccatcattataacttcctcct

SEQ ID NO: 43811 - DNA, 25 bp, Canis familiaris
aaatccactttaataatccacttca

SEQ ID NO: 43812 - DNA, 25 bp, Canis familiaris
aaatgctatctttatccaattactt

SEQ ID NO: 43813 - DNA, 25 bp, Canis familiaris
aaatgctttttattcctgtcaattg

SEQ ID NO: 43814 - DNA, 25 bp, Canis familiaris
aaatcttttctattctcattcacta

SEQ ID NO: 43815 - DNA, 25 bp, Canis familiaris
aaatctccttctatgtctgtatcaa

SEQ ID NO: 43816 - DNA, 25 bp, Canis familiaris
aaatctactcgtatgtgttggagag

SEQ ID NO: 43817 - DNA, 25 bp, Canis familiaris
aaatcttgctttatgtgtatgtgtg

SEQ ID NO: 43818 - DNA, 25 bp, Canis familiaris
aaatgttgtcctaatcgtgattggc

SEQ ID NO: 43819 - DNA, 25 bp, Canis familiaris
aaaccttgcctggctggctgatttc

SEQ ID NO: 43820 - DNA, 25 bp, Canis familiaris
aaatcctacctggagcggagtgtaa

SEQ ID NO: 43821 - DNA, 25 bp, Canis familiaris
aaacgtatccatggagtgggtttca

SEQ ID NO: 43822 - DNA, 25 bp, Canis familiaris
aaagcagtactcagggttgttccac

SEQ ID NO: 43823 - DNA, 25 bp, Canis familiaris
aaatggaatcctgggcttgggtccg

SEQ ID NO: 43824 - DNA, 25 bp, Canis familiaris
aaatgggcacctggctgcagttggt

SEQ ID NO: 43825 - DNA, 25 bp, Canis familiaris
aaaggccaaatgtctcagatgggta

SEQ ID NO: 43826 - DNA, 25 bp, Canis familiaris
aaaggccagccttccaggagtgaag

SEQ ID NO: 43827 - DNA, 25 bp, Canis familiaris
aaaggccagccttccaggagtgaag

SEQ ID NO: 43828 - DNA, 25 bp, Canis familiaris
aaagggctccagtccagggatgggt

SEQ ID NO: 43829 - DNA, 25 bp, Canis familiaris
aaagggctccaggctgggtagtgaa

SEQ ID NO: 43830 - DNA, 25 bp, Canis familiaris
aaaggaccagaggatagtgtgggaa

SEQ ID NO: 43831 - DNA, 25 bp, Canis familiaris
aaatgtgttagacagaattgttgaa

SEQ ID NO: 43832 - DNA, 25 bp, Canis familiaris
aaatctgtccagttactttgtctat

SEQ ID NO: 43833 - DNA, 25 bp, Canis familiaris
aaatcattccatttcagctttctca

SEQ ID NO: 43834 - DNA, 25 bp, Canis familiaris
aaatcttgcaaattcatcactccca

SEQ ID NO: 43835 - DNA, 25 bp, Canis familiaris
aaatgttacagttacctctctatgg

SEQ ID NO: 43836 - DNA, 25 bp, Canis familiaris
aaaggtcaattgcacctctctacag

SEQ ID NO: 43837 - DNA, 25 bp, Canis familiaris
aaaggttcatgttaccaaggacatg

SEQ ID NO: 43838 - DNA, 25 bp, Canis familiaris
aaatctttcttttccagcattaatg

SEQ ID NO: 43839 - DNA, 25 bp, Canis familiaris
aaatcattgtttccaccatgcactt

SEQ ID NO: 43840 - DNA, 25 bp, Canis familiaris
aaatgacttgcttgaagccgccgtg

SEQ ID NO: 43841 - DNA, 25 bp, Canis familiaris
aaatgaggagggtggcgcctgggtg

SEQ ID NO: 43842 - DNA, 25 bp, Canis familiaris
aaagagggagagcgcatgcccgggt

SEQ ID NO: 43843 - DNA, 25 bp, Canis familiaris
aaagcctagaggctctgagccctgg

SEQ ID NO: 43844 - DNA, 25 bp, Canis familiaris
aaatcccagcggaggagctcgcaga

SEQ ID NO: 43845 - DNA, 25 bp, Canis familiaris
aaatgtccatggagggcagcccagg

SEQ ID NO: 43846 - DNA, 25 bp, Canis familiaris
aaagctcaagaggagtggaccacag

SEQ ID NO: 43847 - DNA, 25 bp, Canis familiaris
aaagccaatattagcatgccaaagg

SEQ ID NO: 43848 - DNA, 25 bp, Canis familiaris
aaatgctccatgaatctggccaaca

SEQ ID NO: 43849 - DNA, 25 bp, Canis familiaris
aaatgctggcggacttgccaacaat

SEQ ID NO: 43850 - DNA, 25 bp, Canis familiaris
aaatgggatgagtttcccactatgt

SEQ ID NO: 43851 - DNA, 25 bp, Canis familiaris
aaatgtgctaactattcttagctgg

SEQ ID NO: 43852 - DNA, 25 bp, Canis familiaris
aaatggtagcagtttctgtatgcag

SEQ ID NO: 43853 - DNA, 25 bp, Canis familiaris
aaatgtgctaggctccttgacagct

SEQ ID NO: 43854 - DNA, 25 bp, Canis familiaris
aaatgcagaacgctgctctggctca

SEQ ID NO: 43855 - DNA, 25 bp, Canis familiaris
aaatgcataatctgccatctcctac

SEQ ID NO: 43856 - DNA, 25 bp, Canis familiaris
aaatgaatgatttgctcttccaccg

SEQ ID NO: 43857 - DNA, 25 bp, Canis familiaris
aaatgccatgaaagtgtttgctatc

SEQ ID NO: 43858 - DNA, 25 bp, Canis familiaris
aaatccatgtcaaggtttctgtttg

SEQ ID NO: 43859 - DNA, 25 bp, Canis familiaris
aaatctatgctgcaggcttttttgg

SEQ ID NO: 43860 - DNA, 25 bp, Canis familiaris
aaatctgactgtactgttttcctgg

SEQ ID NO: 43861 - DNA, 25 bp, Canis familiaris
aaatctatgctctactttttcagga

SEQ ID NO: 43862 - DNA, 25 bp, Canis familiaris
aaagttgtgcataatgttttcaggt

SEQ ID NO: 43863 - DNA, 25 bp, Canis familiaris
aaatgcctttgatatttcatgcaag

SEQ ID NO: 43864 - DNA, 25 bp, Canis familiaris
aaatgcttgtgtttttcatcatgat

SEQ ID NO: 43865 - DNA, 25 bp, Canis familiaris
aaatgctgcgctttttgtatttcca

SEQ ID NO: 43866 - DNA, 25 bp, Canis familiaris
aaatgtctgtgatcgtgttttcaag

SEQ ID NO: 43867 - DNA, 25 bp, Canis familiaris
aaatgctcagcgttagtatttctaa

SEQ ID NO: 43868 - DNA, 25 bp, Canis familiaris
aaatgccagagtgaccatctttaat

SEQ ID NO: 43869 - DNA, 25 bp, Canis familiaris
aaatccatgctttgatccacttata

SEQ ID NO: 43870 - DNA, 25 bp, Canis familiaris
aaatccatttattccacttcatcat

SEQ ID NO: 43871 - DNA, 25 bp, Canis familiaris
aaatcctttaacccagtgcatgtcc

SEQ ID NO: 43872 - DNA, 25 bp, Canis familiaris
aaatgtctttagtcctaggtttgtg

SEQ ID NO: 43873 - DNA, 25 bp, Canis familiaris
aaatgactgttaccccttggaatgg

SEQ ID NO: 43874 - DNA, 25 bp, Canis familiaris
aaatgcactcgtaaaccttcagaag

SEQ ID NO: 43875 - DNA, 25 bp, Canis familiaris
aaatgcaatttgtgacctgtaaaaa

SEQ ID NO: 43876 - DNA, 25 bp, Canis familiaris
aaatgacatttcatggcaaggaaaa

SEQ ID NO: 43877 - DNA, 25 bp, Canis familiaris
aaatgcatcattttcaggggtataa

SEQ ID NO: 43878 - DNA, 25 bp, Canis familiaris
aaagcatgcatgtgacagtctaggt

SEQ ID NO: 43879 - DNA, 25 bp, Canis familiaris
aaaggcagcaagacaggctctgttg

SEQ ID NO: 43880 - DNA, 25 bp, Canis familiaris
aaaggaaagtcatgcaagtgtgcgc

SEQ ID NO: 43881 - DNA, 25 bp, Canis familiaris
aaaggagccagctcgcaagtttggc

SEQ ID NO: 43882 - DNA, 25 bp, Canis familiaris
aaagagcaggctcccaaaggattgg

SEQ ID NO: 43883 - DNA, 25 bp, Canis familiaris
aaaggctgcagctaccaagaaacca

SEQ ID NO: 43884 - DNA, 25 bp, Canis familiaris
aaatggtgtgtacaaggagacgaca

SEQ ID NO: 43885 - DNA, 25 bp, Canis familiaris
aaatgaggtgttccaacgcgtcctc

SEQ ID NO: 43886 - DNA, 25 bp, Canis familiaris
aaagggtggtgatcatccagttccg

SEQ ID NO: 43887 - DNA, 25 bp, Canis familiaris
aaatgtgtgctgcttactaccttcc

SEQ ID NO: 43888 - DNA, 25 bp, Canis familiaris
aaatccagtgactttatctccttcc

SEQ ID NO: 43889 - DNA, 25 bp, Canis familiaris
aaatccaggaatcttcctgctctca

SEQ ID NO: 43890 - DNA, 25 bp, Canis familiaris
aaatcgcttgatacagtttcctctc

SEQ ID NO: 43891 - DNA, 25 bp, Canis familiaris
aaatcctgagatacattttccagac

SEQ ID NO: 43892 - DNA, 25 bp, Canis familiaris
aaatgaaatgattctcacttgtgat

SEQ ID NO: 43893 - DNA, 25 bp, Canis familiaris
aaatctaattgaacagctatgagct

SEQ ID NO: 43894 - DNA, 25 bp, Canis familiaris
aaatgttacttgagccagcagcttt

SEQ ID NO: 43895 - DNA, 25 bp, Canis familiaris
aaatgtccaggactccacagctttt

SEQ ID NO: 43896 - DNA, 25 bp, Canis familiaris
aaatccaaggaaccaccattttgat

SEQ ID NO: 43897 - DNA, 25 bp, Canis familiaris
aaatcccggagactcagttattact

SEQ ID NO: 43898 - DNA, 25 bp, Canis familiaris
aaacggcggcaagtcctatatctac

SEQ ID NO: 43899 - DNA, 25 bp, Canis familiaris
aaacgaggtcaaccacgccattgac

SEQ ID NO: 43900 - DNA, 25 bp, Canis familiaris
aaaggaggtgcaagccacggagcga

SEQ ID NO: 43901 - DNA, 25 bp, Canis familiaris
aaaggcggtgggccaggcagaggac

SEQ ID NO: 43902 - DNA, 25 bp, Canis familiaris
aaaggaggtcctgggtcagcagtga

SEQ ID NO: 43903 - DNA, 25 bp, Canis familiaris
aaaggtggtccagcaacagcaaacc

SEQ ID NO: 43904 - DNA, 25 bp, Canis familiaris
aaagtgctggtgagagcaacgataa

SEQ ID NO: 43905 - DNA, 25 bp, Canis familiaris
aagatgtaggggcgacacgttcacc

SEQ ID NO: 43906 - DNA, 25 bp, Canis familiaris
aaatgctgagggccaagacccttcc

SEQ ID NO: 43907 - DNA, 25 bp, Canis familiaris
aaatgtgagtgaatgccaggcccct

SEQ ID NO: 43908 - DNA, 25 bp, Canis familiaris
aaatggagtgttgaccttcctgtct

SEQ ID NO: 43909 - DNA, 25 bp, Canis familiaris
aaatggtgggctcagtcattccttc

SEQ ID NO: 43910 - DNA, 25 bp, Canis familiaris
aaagtgtgggatcgacgcaccatgc

SEQ ID NO: 43911 - DNA, 25 bp, Canis familiaris
aaatgttgcggaaatcgccgacgaa

SEQ ID NO: 43912 - DNA, 25 bp, Canis familiaris
aaatgtgctgaagattcgccggcga

SEQ ID NO: 43913 - DNA, 25 bp, Canis familiaris
aaatgtgtaaagttctcctatggat

SEQ ID NO: 43914 - DNA, 25 bp, Canis familiaris
aaatgagtttaattatcccatgtta

SEQ ID NO: 43915 - DNA, 25 bp, Canis familiaris
aaagatctgcttcacatataaatgt

SEQ ID NO: 43916 - DNA, 25 bp, Canis familiaris
aaagttgctcagttctaacagtttt

SEQ ID NO: 43917 - DNA, 25 bp, Canis familiaris
aaatgcttcaagttgctaacgctat

SEQ ID NO: 43918 - DNA, 25 bp, Canis familiaris
aaatgctttgaaggccagacagttc

SEQ ID NO: 43919 - DNA, 25 bp, Canis familiaris
aaatgtttacagaccaccttatgcc

SEQ ID NO: 43920 - DNA, 25 bp, Canis familiaris
aaagctttactaacccatgtatcgc

SEQ ID NO: 43921 - DNA, 25 bp, Canis familiaris
aaactataaatctcgttgtatccta

SEQ ID NO: 43922 - DNA, 25 bp, Canis familiaris
aaatgtaagaacttggtctgtttct

SEQ ID NO: 43923 - DNA, 25 bp, Canis familiaris
aaatgcttagatgcctgtgttgtat

SEQ ID NO: 43924 - DNA, 25 bp, Canis familiaris
aaatgttcagtgttcggcgtgtgca

SEQ ID NO: 43925 - DNA, 25 bp, Canis familiaris
aaatgttgggaattgtgggtcaaca

SEQ ID NO: 43926 - DNA, 25 bp, Canis familiaris
aaatgttgggattgtgggtcacaga

SEQ ID NO: 43927 - DNA, 25 bp, Canis familiaris
aacattctggcgagttcgacagaac

SEQ ID NO: 43928 - DNA, 25 bp, Canis familiaris
aaatgctgctacaatggttgcggga

SEQ ID NO: 43929 - DNA, 25 bp, Canis familiaris
aaatgttacacaaggactcggaagg

SEQ ID NO: 43930 - DNA, 25 bp, Canis familiaris
aaatgataacagagcaacccgatag

SEQ ID NO: 43931 - DNA, 25 bp, Canis familiaris
aaatgactacagaagctaaccatgt

SEQ ID NO: 43932 - DNA, 25 bp, Canis familiaris
aaatggtgacatatgaagatcctga

SEQ ID NO: 43933 - DNA, 25 bp, Canis familiaris
aaatgccggtggtcaacatccagac

SEQ ID NO: 43934 - DNA, 25 bp, Canis familiaris
aaagtgggtggactttgccagacgc

SEQ ID NO: 43935 - DNA, 25 bp, Canis familiaris
aaatgtccgtggatttcacaataat

SEQ ID NO: 43936 - DNA, 25 bp, Canis familiaris
aaatgtcacgatgggctgtgctcaa

SEQ ID NO: 43937 - DNA, 25 bp, Canis familiaris
aaatgtcacaattcagtactgcagt

SEQ ID NO: 43938 - DNA, 25 bp, Canis familiaris
aaatgtacacattccaatctggcct

SEQ ID NO: 43939 - DNA, 25 bp, Canis familiaris
aaatctggagcttcacagtcttccc

SEQ ID NO: 43940 - DNA, 25 bp, Canis familiaris
aaatcgggatatcctgctgttgcgc

SEQ ID NO: 43941 - DNA, 25 bp, Canis familiaris
aaatcgggagatccttcttctcctc

SEQ ID NO: 43942 - DNA, 25 bp, Canis familiaris
aaatcctcagaaaccctttgttcat

SEQ ID NO: 43943 - DNA, 25 bp, Canis familiaris
aaatccgcagcaaactgccgtgctg

SEQ ID NO: 43944 - DNA, 25 bp, Canis familiaris
aaatcccagcaaccacatggtggct

SEQ ID NO: 43945 - DNA, 25 bp, Canis familiaris
aaatccataccaccactgagatctc

SEQ ID NO: 43946 - DNA, 25 bp, Canis familiaris
aaacctaccccagcagatgtcaggg

SEQ ID NO: 43947 - DNA, 25 bp, Canis familiaris
aaatccaagcctgcacacagcattg

SEQ ID NO: 43948 - DNA, 25 bp, Canis familiaris
aaatcccgttctacagatgttgctg

SEQ ID NO: 43949 - DNA, 25 bp, Canis familiaris
aaatcccacttaataatcagtgctc

SEQ ID NO: 43950 - DNA, 25 bp, Canis familiaris
aaatcccacttaatatcacttgctc

SEQ ID NO: 43951 - DNA, 25 bp, Canis familiaris
aaatcccaatgtttcatgcagtggt

SEQ ID NO: 43952 - DNA, 25 bp, Canis familiaris
aaatcccaatacttcatcattctga

SEQ ID NO: 43953 - DNA, 25 bp, Canis familiaris
aaatcccataatatcatgctccaaa

SEQ ID NO: 43954 - DNA, 25 bp, Canis familiaris
aaatgcacgcttttgtcatgtccaa

SEQ ID NO: 43955 - DNA, 25 bp, Canis familiaris
aaatgtctcatttagctacatcaca

SEQ ID NO: 43956 - DNA, 25 bp, Canis familiaris
aaatgtaacgatagctagtccccca

SEQ ID NO: 43957 - DNA, 25 bp, Canis familiaris
aaatggaatctagccttgcttctcc

SEQ ID NO: 43958 - DNA, 25 bp, Canis familiaris
aaaggctacacaggccttggtcctg

SEQ ID NO: 43959 - DNA, 25 bp, Canis familiaris
aaatgggaacagcactggtgtctgg

SEQ ID NO: 43960 - DNA, 25 bp, Canis familiaris
aaatggaaaatctctgcctgcctcc

SEQ ID NO: 43961 - DNA, 25 bp, Canis familiaris
aaagggactatcagtggcgccactg

SEQ ID NO: 43962 - DNA, 25 bp, Canis familiaris
aaagtgcgggactgtacaccatcag

SEQ ID NO: 43963 - DNA, 25 bp, Canis familiaris
aaagtgcgcgatgccgggatcaaag

SEQ ID NO: 43964 - DNA, 25 bp, Canis familiaris
aaagcagtggatgtcatggtgatag

SEQ ID NO: 43965 - DNA, 25 bp, Canis familiaris
aaatgactcagtgctctggagctat

SEQ ID NO: 43966 - DNA, 25 bp, Canis familiaris
aaatgactctgaaccgtgaaatgtg

SEQ ID NO: 43967 - DNA, 25 bp, Canis familiaris
aaatgagctctgttgacctaacttg

SEQ ID NO: 43968 - DNA, 25 bp, Canis familiaris
aaagaccaatcgtcctaactacgtg

SEQ ID NO: 43969 - DNA, 25 bp, Canis familiaris
ctaaaatcctttataactactgagc

SEQ ID NO: 43970 - DNA, 25 bp, Canis familiaris
cataatcctcgtccagaaaaaactg

SEQ ID NO: 43971 - DNA, 25 bp, Canis familiaris
aaatcctcacccttgaagtatcact

SEQ ID NO: 43972 - DNA, 25 bp, Canis familiaris
aaatcctagcacttagacagcagac

SEQ ID NO: 43973 - DNA, 25 bp, Canis familiaris
aaatgccaacaggaaccagcagact

SEQ ID NO: 43974 - DNA, 25 bp, Canis familiaris
aaatggaatcctttgcagccacagc

SEQ ID NO: 43975 - DNA, 25 bp, Canis familiaris
aaatgtatttatttggacacaggga

SEQ ID NO: 43976 - DNA, 25 bp, Canis familiaris
aaatgcatcattttgattatgacaa

SEQ ID NO: 43977 - DNA, 25 bp, Canis familiaris
aaatggttgtttcagatcatattga

SEQ ID NO: 43978 - DNA, 25 bp, Canis familiaris
aaatgatgtgtgtctgtccagtcct

SEQ ID NO: 43979 - DNA, 25 bp, Canis familiaris
aaagatggttttcactatccgtagt

SEQ ID NO: 43980 - DNA, 25 bp, Canis familiaris
aaaggttttcgcaattctccagtgg

SEQ ID NO: 43981 - DNA, 25 bp, Canis familiaris
aaatgacctttgccattttcctgta

SEQ ID NO: 43982 - DNA, 25 bp, Canis familiaris
aaatggcactttattttgtggctga

SEQ ID NO: 43983 - DNA, 25 bp, Canis familiaris
aaatgagcagtcttacttttgtagt

SEQ ID NO: 43984 - DNA, 25 bp, Canis familiaris
aaatgactgtcttatctctcttttt

SEQ ID NO: 43985 - DNA, 25 bp, Canis familiaris
aaatgcatcttgccttatctttttt

SEQ ID NO: 43986 - DNA, 25 bp, Canis familiaris
aaatgcattccctcatgctttttct

SEQ ID NO: 43987 - DNA, 25 bp, Canis familiaris
aaatgatccaacatatgctcccttt

SEQ ID NO: 43988 - DNA, 25 bp, Canis familiaris
aacagtcacagaagtcctacctatt

SEQ ID NO: 43989 - DNA, 25 bp, Canis familiaris
aaagtgatgaagcccgtacattgat

SEQ ID NO: 43990 - DNA, 25 bp, Canis familiaris
aaaggtgatagaccccacttcttat

SEQ ID NO: 43991 - DNA, 25 bp, Canis familiaris
aaagtggatacaccccaatgtccgt

SEQ ID NO: 43992 - DNA, 25 bp, Canis familiaris
aaagaggttgcaaaccactggaagt

SEQ ID NO: 43993 - DNA, 25 bp, Canis familiaris
aaatgagtttgagcccctgtgtggt

SEQ ID NO: 43994 - DNA, 25 bp, Canis familiaris
aaatgtttatgcactcttctgagat

SEQ ID NO: 43995 - DNA, 25 bp, Canis familiaris
aaatgaactataccatctgtcttat

SEQ ID NO: 43996 - DNA, 25 bp, Canis familiaris
aaatgacaggaacctcttcatggta

SEQ ID NO: 43997 - DNA, 25 bp, Canis familiaris
aaatggctgagctacccatcttggg

SEQ ID NO: 43998 - DNA, 25 bp, Canis familiaris
aaagtgatgagctggatgaattatg

SEQ ID NO: 43999 - DNA, 25 bp, Canis familiaris
aaagtcaggcaggggcttcttggtt

SEQ ID NO: 44000 - DNA, 25 bp, Canis familiaris
aaagtgcaatggtggccttggggtc

SEQ ID NO: 44001 - DNA, 25 bp, Canis familiaris
aaagctcgtagttggatcttgggag

SEQ ID NO: 44002 - DNA, 25 bp, Canis familiaris
aaatgcttctagatcgactgcgagc

SEQ ID NO: 44003 - DNA, 25 bp, Canis familiaris
aaatgtttcagtggtgcctgggcct

SEQ ID NO: 44004 - DNA, 25 bp, Canis familiaris
aaatgtttcactttcctatagctgt

SEQ ID NO: 44005 - DNA, 25 bp, Canis familiaris
aaatgtttctcttcctgtgagactt

SEQ ID NO: 44006 - DNA, 25 bp, Canis familiaris
aaatgtatctgtgtcctgtaaaatg

SEQ ID NO: 44007 - DNA, 25 bp, Canis familiaris
aaatgtttattccgcctattaatga

SEQ ID NO: 44008 - DNA, 25 bp, Canis familiaris
aaatgtttaatgttgccttttatat

SEQ ID NO: 44009 - DNA, 25 bp, Canis familiaris
aaatgatttccgttcgtctttagtg

SEQ ID NO: 44010 - DNA, 25 bp, Canis familiaris
aaagtttcccagttatccttctgtg

SEQ ID NO: 44011 - DNA, 25 bp, Canis familiaris
aaatgtatttcggctgttaattctg

SEQ ID NO: 44012 - DNA, 25 bp, Canis familiaris
aaatgtctactctctgattcaatgt

SEQ ID NO: 44013 - DNA, 25 bp, Canis familiaris
aaatgatctcattattctgttaaat

SEQ ID NO: 44014 - DNA, 25 bp, Canis familiaris
aaatgtctcatatactgtgtacaat

SEQ ID NO: 44015 - DNA, 25 bp, Canis familiaris
aaatgtctttaaatggtgagctctt

SEQ ID NO: 44016 - DNA, 25 bp, Canis familiaris
aaatgtctatgtcttggcaactctt

SEQ ID NO: 44017 - DNA, 25 bp, Canis familiaris
aaatgccttgattctttgcacctct

SEQ ID NO: 44018 - DNA, 25 bp, Canis familiaris
aaatgctttgcaaattgataccctg

SEQ ID NO: 44019 - DNA, 25 bp, Canis familiaris
aaagtttccacttgataccctgatc

SEQ ID NO: 44020 - DNA, 25 bp, Canis familiaris
aaatgagttcatctcgtaccctagc

SEQ ID NO: 44021 - DNA, 25 bp, Canis familiaris
aaatgagcttctccacagatgtccc

SEQ ID NO: 44022 - DNA, 25 bp, Canis familiaris
aaatgcagcttctggtgtctcactt

SEQ ID NO: 44023 - DNA, 25 bp, Canis familiaris
aaatgcagtttcacagccacacttt

SEQ ID NO: 44024 - DNA, 25 bp, Canis familiaris
aaatggttctactgccaaaattgat

SEQ ID NO: 44025 - DNA, 25 bp, Canis familiaris
aaagttcttcagggctacaaatctc

SEQ ID NO: 44026 - DNA, 25 bp, Canis familiaris
aaagttcttcacagctaggatacac

SEQ ID NO: 44027 - DNA, 25 bp, Canis familiaris
aaagtcttgaaaagtcagaaacaca

SEQ ID NO: 44028 - DNA, 25 bp, Canis familiaris
aaagacttgtgaattgtagggacca

SEQ ID NO: 44029 - DNA, 25 bp, Canis familiaris
aaagagactgctctctagggggcca

SEQ ID NO: 44030 - DNA, 25 bp, Canis familiaris
aaaggagctgtcctagagcagccgc

SEQ ID NO: 44031 - DNA, 25 bp, Canis familiaris
aaaggactctcgaaggatgcttggg

SEQ ID NO: 44032 - DNA, 25 bp, Canis familiaris
aaatgagtctcccatcaagtctttt

SEQ ID NO: 44033 - DNA, 25 bp, Canis familiaris
aaatgagggccgtacaatcctgttt

SEQ ID NO: 44034 - DNA, 25 bp, Canis familiaris
aaatgagggccgtacattcctgttt

SEQ ID NO: 44035 - DNA, 25 bp, Canis familiaris
aaatggagggcagtgacattgcctg

SEQ ID NO: 44036 - DNA, 25 bp, Canis familiaris
aaatgcagatgccacaagtttgttg

SEQ ID NO: 44037 - DNA, 25 bp, Canis familiaris
aaatgagctgcttaagttccctgaa

SEQ ID NO: 44038 - DNA, 25 bp, Canis familiaris
aaatgcattctgtacagtccccatt

SEQ ID NO: 44039 - DNA, 25 bp, Canis familiaris
aaatgctcattgtgagcctcccagt

SEQ ID NO: 44040 - DNA, 25 bp, Canis familiaris
aaatgctcactatgagcagccccac

SEQ ID NO: 44041 - DNA, 25 bp, Canis familiaris
aaatgctgattctatacgccctact

SEQ ID NO: 44042 - DNA, 25 bp, Canis familiaris
aaatgcatctatttaccaccatata

SEQ ID NO: 44043 - DNA, 25 bp, Canis familiaris
aaatgatcgaactgcacaccttgaa

SEQ ID NO: 44044 - DNA, 25 bp, Canis familiaris
aaagacagaacgtcacaccactggc

SEQ ID NO: 44045 - DNA, 25 bp, Canis familiaris
aaatgaacagtcgtcaccacatctc

SEQ ID NO: 44046 - DNA, 25 bp, Canis familiaris
aaatggcaagctggtcaggatcccc

SEQ ID NO: 44047 - DNA, 25 bp, Canis familiaris
aacatggaaccagactgatccccca

SEQ ID NO: 44048 - DNA, 25 bp, Canis familiaris
aacttccttctggggatactgccca

SEQ ID NO: 44049 - DNA, 25 bp, Canis familiaris
aactaaggtctgtggcaggctggct

SEQ ID NO: 44050 - DNA, 25 bp, Canis familiaris
aactagggacagtttgggtggctca

SEQ ID NO: 44051 - DNA, 25 bp, Canis familiaris
aaaggggacagtctggagggccagg

SEQ ID NO: 44052 - DNA, 25 bp, Canis familiaris
aaaggggccagtcttcacatggcag

SEQ ID NO: 44053 - DNA, 25 bp, Canis familiaris
aaagaggggggatgtcacacgcagg

SEQ ID NO: 44054 - DNA, 25 bp, Canis familiaris
aaaggtgggaagtgttagcaaatgt

SEQ ID NO: 44055 - DNA, 25 bp, Canis familiaris
aaacggatcaaataggtcgcaactt

SEQ ID NO: 44056 - DNA, 25 bp, Canis familiaris
aaatgggaaaatctgtgtccacagc

SEQ ID NO: 44057 - DNA, 25 bp, Canis familiaris
aaatgctggggcaatttggtccata

SEQ ID NO: 44058 - DNA, 25 bp, Canis familiaris
aaagtgggtacgttggcctcatatt

SEQ ID NO: 44059 - DNA, 25 bp, Canis familiaris
aaagggcctgaggtcttcacttact

SEQ ID NO: 44060 - DNA, 25 bp, Canis familiaris
aaaggcgcagttgtgtagcagttga

SEQ ID NO: 44061 - DNA, 25 bp, Canis familiaris
aaaggccattctgttggcggagtct

SEQ ID NO: 44062 - DNA, 25 bp, Canis familiaris
aaagggcagcatggagttgggggtg

SEQ ID NO: 44063 - DNA, 25 bp, Canis familiaris
aaagagtgcatgagcggcggggagc

SEQ ID NO: 44064 - DNA, 25 bp, Canis familiaris
aaatgttatgattgccggggtgatg

SEQ ID NO: 44065 - DNA, 25 bp, Canis familiaris
aaagttattaccgtgtggagtgttg

SEQ ID NO: 44066 - DNA, 25 bp, Canis familiaris
aaatgttattccaggttattgttga

SEQ ID NO: 44067 - DNA, 25 bp, Canis familiaris
aaagtatttccccaactgatatgtt

SEQ ID NO: 44068 - DNA, 25 bp, Canis familiaris
aaaggattcctctctccagaaggtc

SEQ ID NO: 44069 - DNA, 25 bp, Canis familiaris
aaaggatccctttcctacagatggc

SEQ ID NO: 44070 - DNA, 25 bp, Canis familiaris
aaatggatggactctcctcaagcag

SEQ ID NO: 44071 - DNA, 25 bp, Canis familiaris
aaatgaatggacggccctatctcag

SEQ ID NO: 44072 - DNA, 25 bp, Canis familiaris
aaatgcagtggaagcctactttata

SEQ ID NO: 44073 - DNA, 25 bp, Canis familiaris
aaatgggtccacttatctattatac

SEQ ID NO: 44074 - DNA, 25 bp, Canis familiaris
aaatgttgtccaggttccattgcca

SEQ ID NO: 44075 - DNA, 25 bp, Canis familiaris
aaatgtttgctcttttctaatccaa

SEQ ID NO: 44076 - DNA, 25 bp, Canis familiaris
aaatgtctttttacctacacagtga

SEQ ID NO: 44077 - DNA, 25 bp, Canis familiaris
aaatgagccatcctattccttaagt

SEQ ID NO: 44078 - DNA, 25 bp, Canis familiaris
aaatgcccataaaatccatcgaaat

SEQ ID NO: 44079 - DNA, 25 bp, Canis familiaris
aaagcacaatcaataccccgataat

SEQ ID NO: 44080 - DNA, 25 bp, Canis familiaris
aaagggatattaccaactgagattg

SEQ ID NO: 44081 - DNA, 25 bp, Canis familiaris
aaatgggtgataggatatactgtct

SEQ ID NO: 44082 - DNA, 25 bp, Canis familiaris
aaatggtctgtagattcagtgcaat

SEQ ID NO: 44083 - DNA, 25 bp, Canis familiaris
aaatgtcctgtatcttatgtaaaaa

SEQ ID NO: 44084 - DNA, 25 bp, Canis familiaris
aaaggctcttattctaatttagtag

SEQ ID NO: 44085 - DNA, 25 bp, Canis familiaris
aaaggccttatgtcactgctggtac

SEQ ID NO: 44086 - DNA, 25 bp, Canis familiaris
aaaggttccatgtaccatgtgctgg

SEQ ID NO: 44087 - DNA, 25 bp, Canis familiaris
aaaggtggcctattcatatagtgga

SEQ ID NO: 44088 - DNA, 25 bp, Canis familiaris
aaaggtacctgcttatcatacccca

SEQ ID NO: 44089 - DNA, 25 bp, Canis familiaris
aaagagatccctcgtgactggactg

SEQ ID NO: 44090 - DNA, 25 bp, Canis familiaris
aaatgagatgccttgctgtttggac

SEQ ID NO: 44091 - DNA, 25 bp, Canis familiaris
aaagactgtcaacttcttggccttg

SEQ ID NO: 44092 - DNA, 25 bp, Canis familiaris
aaaggcctgaagatcctggcctgga

SEQ ID NO: 44093 - DNA, 25 bp, Canis familiaris
aaaggactatgacagcctggcgcag

SEQ ID NO: 44094 - DNA, 25 bp, Canis familiaris
aaaggcttcagtccagctctgagcc

SEQ ID NO: 44095 - DNA, 25 bp, Canis familiaris
aaatgtattatgccatccctgagcc

SEQ ID NO: 44096 - DNA, 25 bp, Canis familiaris
aaatgtctatagccatagcccagcc

SEQ ID NO: 44097 - DNA, 25 bp, Canis familiaris
aaatgtgctagcagcatcttgccca

SEQ ID NO: 44098 - DNA, 25 bp, Canis familiaris
aaatggtgcgctacattggccgcag

SEQ ID NO: 44099 - DNA, 25 bp, Canis familiaris
aaagctggcctatgtggctgctggt

SEQ ID NO: 44100 - DNA, 25 bp, Canis familiaris
aaagtggttttgaagctcttttgat

SEQ ID NO: 44101 - DNA, 25 bp, Canis familiaris
aaatggagatttaggcacttttact

SEQ ID NO: 44102 - DNA, 25 bp, Canis familiaris
aaatgaaatataaacaccttcttgt

SEQ ID NO: 44103 - DNA, 25 bp, Canis familiaris
aaatgtaatataaaagccttcacct

SEQ ID NO: 44104 - DNA, 25 bp, Canis familiaris
aaatgtagcattttatactttcaag

SEQ ID NO: 44105 - DNA, 25 bp, Canis familiaris
aaatgtatctttttagctcctctat

SEQ ID NO: 44106 - DNA, 25 bp, Canis familiaris
aaaggatcttattttgtgtactata

SEQ ID NO: 44107 - DNA, 25 bp, Canis familiaris
aaaggagccactttatttctctaga

SEQ ID NO: 44108 - DNA, 25 bp, Canis familiaris
aaagaagccttttcactatttgaca

SEQ ID NO: 44109 - DNA, 25 bp, Canis familiaris
aaaggcccttgaacgtgtcttaatg

SEQ ID NO: 44110 - DNA, 25 bp, Canis familiaris
aaatggtcttttccttgtctgtaat

SEQ ID NO: 44111 - DNA, 25 bp, Canis familiaris
aaatgtgtttctaacccacttgaat

SEQ ID NO: 44112 - DNA, 25 bp, Canis familiaris
aaatgatattcctttctccgttgaa

SEQ ID NO: 44113 - DNA, 25 bp, Canis familiaris
aaagacagttccatcttccttgaga

SEQ ID NO: 44114 - DNA, 25 bp, Canis familiaris
aaatgaaggtctctcttcctttcat

SEQ ID NO: 44115 - DNA, 25 bp, Canis familiaris
aaatgaaaatgtctgtgatcgtgtt

SEQ ID NO: 44116 - DNA, 25 bp, Canis familiaris
aaatgaacaagtctgctacctcttc

SEQ ID NO: 44117 - DNA, 25 bp, Canis familiaris
aaatgaacatttttctcagccaccc

SEQ ID NO: 44118 - DNA, 25 bp, Canis familiaris
aaatgcaaatttttccacactccac

SEQ ID NO: 44119 - DNA, 25 bp, Canis familiaris
aaatgttgtgttttgcagcaaacca

SEQ ID NO: 44120 - DNA, 25 bp, Canis familiaris
aaagttgtgtccctgtcatgaaaga

SEQ ID NO: 44121 - DNA, 25 bp, Canis familiaris
aaatgtacagttttatcatgcaaaa

SEQ ID NO: 44122 - DNA, 25 bp, Canis familiaris
aaatgtgacactgtctatcagtacg

SEQ ID NO: 44123 - DNA, 25 bp, Canis familiaris
aaatgtggcacagcataccactcct

SEQ ID NO: 44124 - DNA, 25 bp, Canis familiaris
aaaggccaattctaggcattccttc

SEQ ID NO: 44125 - DNA, 25 bp, Canis familiaris
aaaggccaaggccaaggctcgactc

SEQ ID NO: 44126 - DNA, 25 bp, Canis familiaris
aaaggccctggccaacgtgaacatt

SEQ ID NO: 44127 - DNA, 25 bp, Canis familiaris
aaagtcacgtggccatcacggaaaa

SEQ ID NO: 44128 - DNA, 25 bp, Canis familiaris
aaagtacgtctgtagcgggatggta

SEQ ID NO: 44129 - DNA, 25 bp, Canis familiaris
aaaggacattcttagctgtgggctg

SEQ ID NO: 44130 - DNA, 25 bp, Canis familiaris
aaaggccattcttaagtttgctcct

SEQ ID NO: 44131 - DNA, 25 bp, Canis familiaris
aaaggccttacacagtgcctgtgcc

SEQ ID NO: 44132 - DNA, 25 bp, Canis familiaris
aaaggcgtataggctcggccattcc

SEQ ID NO: 44133 - DNA, 25 bp, Canis familiaris
aaagtgacattagctcgaacattct

SEQ ID NO: 44134 - DNA, 25 bp, Canis familiaris
aaatgtgagctttcctagtgaattt

SEQ ID NO: 44135 - DNA, 25 bp, Canis familiaris
aaaggcagcacttcaaaggtcttct

SEQ ID NO: 44136 - DNA, 25 bp, Canis familiaris
aaaggctgccttggaaggttgtaga

SEQ ID NO: 44137 - DNA, 25 bp, Canis familiaris
aaaggctgtcattctgcaaggttcc

SEQ ID NO: 44138 - DNA, 25 bp, Canis familiaris
aaaggctgttgagtcttggtgtctg

SEQ ID NO: 44139 - DNA, 25 bp, Canis familiaris
aaagggtgctatgcttctggttgtt

SEQ ID NO: 44140 - DNA, 25 bp, Canis familiaris
aaaggaggctctttaccagcttgtt

SEQ ID NO: 44141 - DNA, 25 bp, Canis familiaris
aaatgtgtggcctgtagtgccttgt

SEQ ID NO: 44142 - DNA, 25 bp, Canis familiaris
aaatggtctcgatgtgggcacttgg

SEQ ID NO: 44143 - DNA, 25 bp, Canis familiaris
aaagagcccgatgggggactcgatc

SEQ ID NO: 44144 - DNA, 25 bp, Canis familiaris
aaaggccctgagtagaggaccaggt

SEQ ID NO: 44145 - DNA, 25 bp, Canis familiaris
aaagtcccatgtcaggttactcgtt

SEQ ID NO: 44146 - DNA, 25 bp, Canis familiaris
aaagatgcccatttacgttattagt

SEQ ID NO: 44147 - DNA, 25 bp, Canis familiaris
aaagagcccagagacagtttttgtg

SEQ ID NO: 44148 - DNA, 25 bp, Canis familiaris
aaagagcccaggatgctgtttctag

SEQ ID NO: 44149 - DNA, 25 bp, Canis familiaris
aaagtctccaagttatgtattcata

SEQ ID NO: 44150 - DNA, 25 bp, Canis familiaris
aaatgttccacgttcatgtgtaaga

SEQ ID NO: 44151 - DNA, 25 bp, Canis familiaris
aaatgttctcaccgaattatccagg

SEQ ID NO: 44152 - DNA, 25 bp, Canis familiaris
ggacatcatcaaggcatggttcctc

SEQ ID NO: 44153 - DNA, 25 bp, Canis familiaris
aaatgtcttcaatgcaatatactgg

SEQ ID NO: 44154 - DNA, 25 bp, Canis familiaris
aaatgtttcaaagcagtgactgtgt

SEQ ID NO: 44155 - DNA, 25 bp, Canis familiaris
aaagtccccacatgggagcgtgtcc

SEQ ID NO: 44156 - DNA, 25 bp, Canis familiaris
aaagtctcccactaaggaggcagta

SEQ ID NO: 44157 - DNA, 25 bp, Canis familiaris
aaatgtccttcatagaggcgcctgg

SEQ ID NO: 44158 - DNA, 25 bp, Canis familiaris
aaatgtccttgttgatactctgccg

SEQ ID NO: 44159 - DNA, 25 bp, Canis familiaris
aaatgatcctgtatgtgcccatgct

SEQ ID NO: 44160 - DNA, 25 bp, Canis familiaris
aaatgacttgtttcatgcatggctt

SEQ ID NO: 44161 - DNA, 25 bp, Canis familiaris
aaatgatctgtggttctgtgtctgt

SEQ ID NO: 44162 - DNA, 25 bp, Canis familiaris
aaatgttgtctgttgcctgatctaa

SEQ ID NO: 44163 - DNA, 25 bp, Canis familiaris
aaatgttgtctgttgcctgatctta

SEQ ID NO: 44164 - DNA, 25 bp, Canis familiaris
aaatgatgtgtcctcgacgacgtgt

SEQ ID NO: 44165 - DNA, 25 bp, Canis familiaris
aaatgtgtgctcaggacgacgtatt

SEQ ID NO: 44166 - DNA, 25 bp, Canis familiaris
aaacgtccgggacaactatcatcgg

SEQ ID NO: 44167 - DNA, 25 bp, Canis familiaris
aaacgtccggaacaactatcatacg

SEQ ID NO: 44168 - DNA, 25 bp, Canis familiaris
aaagcttccgatcaggtagtttacg

SEQ ID NO: 44169 - DNA, 25 bp, Canis familiaris
aaagtaccgatcgacttcactaaag

SEQ ID NO: 44170 - DNA, 25 bp, Canis familiaris
aaatgtgacctcatgcctttgtaag

SEQ ID NO: 44171 - DNA, 25 bp, Canis familiaris
aaatggagccatagatacttttaaa

SEQ ID NO: 44172 - DNA, 25 bp, Canis familiaris
aaatgttgccttttgctaattgaaa

SEQ ID NO: 44173 - DNA, 25 bp, Canis familiaris
aaatgtacttattctctaatctcta

SEQ ID NO: 44174 - DNA, 25 bp, Canis familiaris
aaatggaccctgtctctcaatgtta

SEQ ID NO: 44175 - DNA, 25 bp, Canis familiaris
aaatgggccagcagcccagtcttag

SEQ ID NO: 44176 - DNA, 25 bp, Canis familiaris
aaatggggcagcgtggcctttgtgg

SEQ ID NO: 44177 - DNA, 25 bp, Canis familiaris
aaatgtccgcaggtgggtgtttagt

SEQ ID NO: 44178 - DNA, 25 bp, Canis familiaris
aaatgtcccagttgttgcttctgtt

SEQ ID NO: 44179 - DNA, 25 bp, Canis familiaris
aaatgttgctgagcgttctcctgtt

SEQ ID NO: 44180 - DNA, 25 bp, Canis familiaris
aaatgtgtctgggaaacacctgtgt

SEQ ID NO: 44181 - DNA, 25 bp, Canis familiaris
aaatgtcttgtggggcaccatctgg

SEQ ID NO: 44182 - DNA, 25 bp, Canis familiaris
aaatgtctgggggctagcattctcc

SEQ ID NO: 44183 - DNA, 25 bp, Canis familiaris
aaatgtcatgctctactggaaccac

SEQ ID NO: 44184 - DNA, 25 bp, Canis familiaris
aaagtcatctgtagcctggaaaggc

SEQ ID NO: 44185 - DNA, 25 bp, Canis familiaris
aaaggattgtgaccgcagaccgagc

SEQ ID NO: 44186 - DNA, 25 bp, Canis familiaris
aaatggttagagttgcaggcttaca

SEQ ID NO: 44187 - DNA, 25 bp, Canis familiaris
aaatgacctcattttcaggcttgaa

SEQ ID NO: 44188 - DNA, 25 bp, Canis familiaris
aaatgacctcaagactggcagaaca

SEQ ID NO: 44189 - DNA, 25 bp, Canis familiaris
aaatgtcctcaacatctgctcagat

SEQ ID NO: 44190 - DNA, 25 bp, Canis familiaris
aaatgtcttagtgatggctcctgca

SEQ ID NO: 44191 - DNA, 25 bp, Canis familiaris
aaagtcttgcgagatgggcctgcac

SEQ ID NO: 44192 - DNA, 25 bp, Canis familiaris
aaagtctggcgagatgaacactatg

SEQ ID NO: 44193 - DNA, 25 bp, Canis familiaris
aaagatcttccatttgaaactctgg

SEQ ID NO: 44194 - DNA, 25 bp, Canis familiaris
aaagaccacccattccaactgatgg

SEQ ID NO: 44195 - DNA, 25 bp, Canis familiaris
aaagcacaagctctatccaggaatc

SEQ ID NO: 44196 - DNA, 25 bp, Canis familiaris
aaaggccgcttatcacatgaacatc

SEQ ID NO: 44197 - DNA, 25 bp, Canis familiaris
aaagccctgttccaaatgaacgttg

SEQ ID NO: 44198 - DNA, 25 bp, Canis familiaris
aaatgggctttgcacacaatgggtt

SEQ ID NO: 44199 - DNA, 25 bp, Canis familiaris
aaagtggtgcttggtgaaattggtt

SEQ ID NO: 44200 - DNA, 25 bp, Canis familiaris
aaagtatgtcggctgaaggtggttc

SEQ ID NO: 44201 - DNA, 25 bp, Canis familiaris
aaagggtcggcggccatggagttgg

SEQ ID NO: 44202 - DNA, 25 bp, Canis familiaris
aaaggaggagggtcctgaactgtgg

SEQ ID NO: 44203 - DNA, 25 bp, Canis familiaris
aaaggaacgtgacccgagagcctgg

SEQ ID NO: 44204 - DNA, 25 bp, Canis familiaris
aaatgaggccagagcacggacacca

SEQ ID NO: 44205 - DNA, 25 bp, Canis familiaris
aaatgaggccagagcacggacacca

SEQ ID NO: 44206 - DNA, 25 bp, Canis familiaris
aaatgaggccagagcacggacacca

SEQ ID NO: 44207 - DNA, 25 bp, Canis familiaris
aaatgaggccagagcacggacacca

SEQ ID NO: 44208 - DNA, 25 bp, Canis familiaris
aaaggagacagacccagtgacccta

SEQ ID NO: 44209 - DNA, 25 bp, Canis familiaris
aagaggagacccgcgtgatgtttga

SEQ ID NO: 44210 - DNA, 25 bp, Canis familiaris
aaaggagacatcccggcaagattct

SEQ ID NO: 44211 - DNA, 25 bp, Canis familiaris
aaagtgagaactcctccaggtctcc

SEQ ID NO: 44212 - DNA, 25 bp, Canis familiaris
aaaggagaattgaccgcgtgagccc

SEQ ID NO: 44213 - DNA, 25 bp, Canis familiaris
aaatgtggatttagcagcctggggc

SEQ ID NO: 44214 - DNA, 25 bp, Canis familiaris
aaatgtagctgtgcgagccggagcc

SEQ ID NO: 44215 - DNA, 25 bp, Canis familiaris
aaaggcctgctgagagcccaggctc

SEQ ID NO: 44216 - DNA, 25 bp, Canis familiaris
aaaggctcttgggaaggccgcatcc

SEQ ID NO: 44217 - DNA, 25 bp, Canis familiaris
aaatggctttctggactgagctcct

SEQ ID NO: 44218 - DNA, 25 bp, Canis familiaris
aaatgatgttcagttgtctaggcac

SEQ ID NO: 44219 - DNA, 25 bp, Canis familiaris
aaatgtttcacttggtagtcctata

SEQ ID NO: 44220 - DNA, 25 bp, Canis familiaris
aaatgttttctgtgattctcccact

SEQ ID NO: 44221 - DNA, 25 bp, Canis familiaris
aaatgtattcaagagatttccaata

SEQ ID NO: 44222 - DNA, 25 bp, Canis familiaris
aaatgtttcaactgagttagcttca

SEQ ID NO: 44223 - DNA, 25 bp, Canis familiaris
aaagtcccagaacaggtcagtgcaa

SEQ ID NO: 44224 - DNA, 25 bp, Canis familiaris
aaagtcccaaagtgcctcatgcaaa

SEQ ID NO: 44225 - DNA, 25 bp, Canis familiaris
aaagttcctagactacctgcaagta

SEQ ID NO: 44226 - DNA, 25 bp, Canis familiaris
aaagtccctgaacttactcatttca

SEQ ID NO: 44227 - DNA, 25 bp, Canis familiaris
aaatgtcccctactgcatagtttac

SEQ ID NO: 44228 - DNA, 25 bp, Canis familiaris
aaagtcttcctgttcatggttttgg

SEQ ID NO: 44229 - DNA, 25 bp, Canis familiaris
aaagtcttcctgctcggtgatgtaa

SEQ ID NO: 44230 - DNA, 25 bp, Canis familiaris
aaagttttctcatctggtgcgttag

SEQ ID NO: 44231 - DNA, 25 bp, Canis familiaris
aaaggtttccagcttggctcttatt

SEQ ID NO: 44232 - DNA, 25 bp, Canis familiaris
aaaggtttccagcttggctcttatt

SEQ ID NO: 44233 - DNA, 25 bp, Canis familiaris
aaaggtttccagcttggctcttatt

SEQ ID NO: 44234 - DNA, 25 bp, Canis familiaris
aaaggttacaacttgggctctatca

SEQ ID NO: 44235 - DNA, 25 bp, Canis familiaris
aaccgtaatcaaccatgggatccat

SEQ ID NO: 44236 - DNA, 25 bp, Canis familiaris
aaatggtaacaatcagcacagctaa

SEQ ID NO: 44237 - DNA, 25 bp, Canis familiaris
aaatggttagccacagcacccatga

SEQ ID NO: 44238 - DNA, 25 bp, Canis familiaris
aaaggattacacatacacccacaca

SEQ ID NO: 44239 - DNA, 25 bp, Canis familiaris
aaaggagtgaacggagctcccagcc

SEQ ID NO: 44240 - DNA, 25 bp, Canis familiaris
aaagcagcagtaacggctaccctac

SEQ ID NO: 44241 - DNA, 25 bp, Canis familiaris
aaaggcactgtgagagtacccgggt

SEQ ID NO: 44242 - DNA, 25 bp, Canis familiaris
cataatggacttcccgaacgaccgg

SEQ ID NO: 44243 - DNA, 25 bp, Canis familiaris
aaagaactttcggccaacacagctg

SEQ ID NO: 44244 - DNA, 25 bp, Canis familiaris
aaagatgatccttttgtaccacctg

SEQ ID NO: 44245 - DNA, 25 bp, Canis familiaris
aaaggctactttgaccagcagctca

SEQ ID NO: 44246 - DNA, 25 bp, Canis familiaris
aaatgttacgttgaccagcaggctg

SEQ ID NO: 44247 - DNA, 25 bp, Canis familiaris
aaatgtgaactgttccagccctgag

SEQ ID NO: 44248 - DNA, 25 bp, Canis familiaris
aaatggacagtgttccctactggcc

SEQ ID NO: 44249 - DNA, 25 bp, Canis familiaris
aaagtggagggtgcctctctggacc

SEQ ID NO: 44250 - DNA, 25 bp, Canis familiaris
aaagatgcgaggtctgctggtctgt

SEQ ID NO: 44251 - DNA, 25 bp, Canis familiaris
aaagtgctgctgtgttggactctga

SEQ ID NO: 44252 - DNA, 25 bp, Canis familiaris
aaaggtgctgcgctgaggacgagga

SEQ ID NO: 44253 - DNA, 25 bp, Canis familiaris
aaagacttgcctgggaggcggcgag

SEQ ID NO: 44254 - DNA, 25 bp, Canis familiaris
aaagaggggctgacgaggcaggctg

SEQ ID NO: 44255 - DNA, 25 bp, Canis familiaris
aaatgggaggctactgggttctgca

SEQ ID NO: 44256 - DNA, 25 bp, Canis familiaris
aaatggtcacgtttggtgcttctca

SEQ ID NO: 44257 - DNA, 25 bp, Canis familiaris
aaatggtcctttgggaagatctcaa

SEQ ID NO: 44258 - DNA, 25 bp, Canis familiaris
aaatgtgttctttatggaaaccata

SEQ ID NO: 44259 - DNA, 25 bp, Canis familiaris
aaagtctttgtgtctggtaaactat

SEQ ID NO: 44260 - DNA, 25 bp, Canis familiaris
aaagtctctctttacattaaactga

SEQ ID NO: 44261 - DNA, 25 bp, Canis familiaris
aaatgtctccattaaatataagcat

SEQ ID NO: 44262 - DNA, 25 bp, Canis familiaris
aaatgtgcaccccaaaacaaataca

SEQ ID NO: 44263 - DNA, 25 bp, Canis familiaris
aaatgtggctcccatggtcaaaaaa

SEQ ID NO: 44264 - DNA, 25 bp, Canis familiaris
aaagttgtgctcttgcctgaaaaaa

SEQ ID NO: 44265 - DNA, 25 bp, Canis familiaris
aaatgtttgctctgtcaagctcaaa

SEQ ID NO: 44266 - DNA, 25 bp, Canis familiaris
aaatgtctattgttcaaagccaaaa

SEQ ID NO: 44267 - DNA, 25 bp, Canis familiaris
aaatgtcttatctcaagtgcccaca

SEQ ID NO: 44268 - DNA, 25 bp, Canis familiaris
aaatgtgctttctactgtgagcccc

SEQ ID NO: 44269 - DNA, 25 bp, Canis familiaris
aaatgtctctgtcttgaagttcccc

SEQ ID NO: 44270 - DNA, 25 bp, Canis familiaris
aaagcatttttgcgtcagcttcctt

SEQ ID NO: 44271 - DNA, 25 bp, Canis familiaris
aaagagtagttctcccttcgttgtg

SEQ ID NO: 44272 - DNA, 25 bp, Canis familiaris
aaaggttgtgcctccaacatttttg

SEQ ID NO: 44273 - DNA, 25 bp, Canis familiaris
aaagggcgtccaaccagaaattctg

SEQ ID NO: 44274 - DNA, 25 bp, Canis familiaris
aaaggatcgaccagtccgagtttga

SEQ ID NO: 44275 - DNA, 25 bp, Canis familiaris
aacaggtcgaggagtctgcggttga

SEQ ID NO: 44276 - DNA, 25 bp, Canis familiaris
aaagaggcggacagtgctgtattta

SEQ ID NO: 44277 - DNA, 25 bp, Canis familiaris
aaaggtcaaaagatgctgatttaaa

SEQ ID NO: 44278 - DNA, 25 bp, Canis familiaris
aaagggaaacagatgtattctattt

SEQ ID NO: 44279 - DNA, 25 bp, Canis familiaris
aaaggaaggcaccatgttttcatga

SEQ ID NO: 44280 - DNA, 25 bp, Canis familiaris
aaagtgaagacccattctatctcca

SEQ ID NO: 44281 - DNA, 25 bp, Canis familiaris
aaagaaaatgccctggctctttcac

SEQ ID NO: 44282 - DNA, 25 bp, Canis familiaris
aaagaagctacccagttcatttcca

SEQ ID NO: 44283 - DNA, 25 bp, Canis familiaris
aaagaagtggccaactgccgttcct

SEQ ID NO: 44284 - DNA, 25 bp, Canis familiaris
aaagaaggtcccatgggtcttcctg

SEQ ID NO: 44285 - DNA, 25 bp, Canis familiaris
aaaaaccagtccacgtgttgtctct

SEQ ID NO: 44286 - DNA, 25 bp, Canis familiaris
aaaagcaaatgctccacgtggggcc

SEQ ID NO: 44287 - DNA, 25 bp, Canis familiaris
aaagagacagaagctgccggggccc

SEQ ID NO: 44288 - DNA, 25 bp, Canis familiaris
aaagagccgagagccgagagcgagc

SEQ ID NO: 44289 - DNA, 25 bp, Canis familiaris
aaagagaaattggcctgcagaggac

SEQ ID NO: 44290 - DNA, 25 bp, Canis familiaris
aaagagccatttgcctaagggagag

SEQ ID NO: 44291 - DNA, 25 bp, Canis familiaris
aaaaacattttctgaagagttagag

SEQ ID NO: 44292 - DNA, 25 bp, Canis familiaris
taaaaactttgagaggtaattacat

SEQ ID NO: 44293 - DNA, 25 bp, Canis familiaris
aaagcaactttgagggtagatttgt

SEQ ID NO: 44294 - DNA, 25 bp, Canis familiaris
aaagaccttgtcatggtggtaattg

SEQ ID NO: 44295 - DNA, 25 bp, Canis familiaris
aaaggtaagtttggtgtataatatg

SEQ ID NO: 44296 - DNA, 25 bp, Canis familiaris
aaaggccaggatgctcagttaaatt

SEQ ID NO: 44297 - DNA, 25 bp, Canis familiaris
aaaggccaggcttccatttcaaaag

SEQ ID NO: 44298 - DNA, 25 bp, Canis familiaris
aaagtccatgcagaccatttccaac

SEQ ID NO: 44299 - DNA, 25 bp, Canis familiaris
aaatgtgaagcacatctcctgctcc

SEQ ID NO: 44300 - DNA, 25 bp, Canis familiaris
aaatgtaagccattgttcattccta

SEQ ID NO: 44301 - DNA, 25 bp, Canis familiaris
aaagtctcgctaatgatgacatttt

SEQ ID NO: 44302 - DNA, 25 bp, Canis familiaris
aaaggcctgctgaagagactccatg

SEQ ID NO: 44303 - DNA, 25 bp, Canis familiaris
aaaggcctttatcactccaggctac

SEQ ID NO: 44304 - DNA, 25 bp, Canis familiaris
aaaggtttatgtcactcctttgccg

SEQ ID NO: 44305 - DNA, 25 bp, Canis familiaris
aaagtttgtagtctgtgcgtttccg

SEQ ID NO: 44306 - DNA, 25 bp, Canis familiaris
aaagatgtcgtctgcttctttttgc

SEQ ID NO: 44307 - DNA, 25 bp, Canis familiaris
aaagtacttcaccattctttactgt

SEQ ID NO: 44308 - DNA, 25 bp, Canis familiaris
aaaggaaatcactttctggccactg

SEQ ID NO: 44309 - DNA, 25 bp, Canis familiaris
aaaggccaatgccttgactgtgccc

SEQ ID NO: 44310 - DNA, 25 bp, Canis familiaris
aaaggctcattgggtttctgcaccc

SEQ ID NO: 44311 - DNA, 25 bp, Canis familiaris
aaaggcatctaatgtttctcctcct

SEQ ID NO: 44312 - DNA, 25 bp, Canis familiaris
aaaggcagatacggctttgccctcc

SEQ ID NO: 44313 - DNA, 25 bp, Canis familiaris
aaacgagatcctgttctgtcagctg

SEQ ID NO: 44314 - DNA, 25 bp, Canis familiaris
aaatggatgaactttatcttcagga

SEQ ID NO: 44315 - DNA, 25 bp, Canis familiaris
aaaggaggtctcatatgctctcgaa

SEQ ID NO: 44316 - DNA, 25 bp, Canis familiaris
aaaggattactcttatgctccagat

SEQ ID NO: 44317 - DNA, 25 bp, Canis familiaris
aaagagattatctgtccatggagaa

SEQ ID NO: 44318 - DNA, 25 bp, Canis familiaris
aaaggtgatgtctaggccacagtga

SEQ ID NO: 44319 - DNA, 25 bp, Canis familiaris
aaaggtgaatcaagccctcaggagc

SEQ ID NO: 44320 - DNA, 25 bp, Canis familiaris
aaaggtgactcaaaatagcacaggc

SEQ ID NO: 44321 - DNA, 25 bp, Canis familiaris
aaagggacatccaaaaccgcaagtg

SEQ ID NO: 44322 - DNA, 25 bp, Canis familiaris
aaacggacacacacccaatgagggt

SEQ ID NO: 44323 - DNA, 25 bp, Canis familiaris
aaagggtccactgacctgtgaggcg

SEQ ID NO: 44324 - DNA, 25 bp, Canis familiaris
aaagacaaccagcaacctgcagggc

SEQ ID NO: 44325 - DNA, 25 bp, Canis familiaris
aaagcacaacgaccaagaccacgac

SEQ ID NO: 44326 - DNA, 25 bp, Canis familiaris
aaagccatcagtatcgcaaacaaac

SEQ ID NO: 44327 - DNA, 25 bp, Canis familiaris
aaaggacacttctgagcaagaaagt

SEQ ID NO: 44328 - DNA, 25 bp, Canis familiaris
aaaggaatttcataaaccaagctca

SEQ ID NO: 44329 - DNA, 25 bp, Canis familiaris
aaaggaattctttctaacctagatg

SEQ ID NO: 44330 - DNA, 25 bp, Canis familiaris
aaagatgatttaatttaagcctgaa

SEQ ID NO: 44331 - DNA, 25 bp, Canis familiaris
aaagggatctactatctgaaggaga

SEQ ID NO: 44332 - DNA, 25 bp, Canis familiaris
aaatgggatttattctagggatgca

SEQ ID NO: 44333 - DNA, 25 bp, Canis familiaris
aaagggcattctttcgtagttcact

SEQ ID NO: 44334 - DNA, 25 bp, Canis familiaris
aaaggtgaactgtccctgcgttagt

SEQ ID NO: 44335 - DNA, 25 bp, Canis familiaris
aaaggtgaatctatacctgttcaat

SEQ ID NO: 44336 - DNA, 25 bp, Canis familiaris
aaaggagttcgaatatcctgtctaa

SEQ ID NO: 44337 - DNA, 25 bp, Canis familiaris
aaatggtttctaagagctttctcaa

SEQ ID NO: 44338 - DNA, 25 bp, Canis familiaris
aaatggtgtttcaatgggtgtgcta

SEQ ID NO: 44339 - DNA, 25 bp, Canis familiaris
aaagtgtgattttatgatatgtagt

SEQ ID NO: 44340 - DNA, 25 bp, Canis familiaris
aaaggtgatggtgatgatggtggtg

SEQ ID NO: 44341 - DNA, 25 bp, Canis familiaris
aaagctgtggcgaaagatgggtttt

SEQ ID NO: 44342 - DNA, 25 bp, Canis familiaris
aaagctgcacgaagactggggttaa

SEQ ID NO: 44343 - DNA, 25 bp, Canis familiaris
aaatgtgcacagatactttcaacaa

SEQ ID NO: 44344 - DNA, 25 bp, Canis familiaris
aaatggtcgatcaacttcccacaaa

SEQ ID NO: 44345 - DNA, 25 bp, Canis familiaris
aaatggtacatttctacatccaaaa

SEQ ID NO: 44346 - DNA, 25 bp, Canis familiaris
aaaggaacagaatatcaccacaatt

SEQ ID NO: 44347 - DNA, 25 bp, Canis familiaris
aaagggacgaacctgagctctcata

SEQ ID NO: 44348 - DNA, 25 bp, Canis familiaris
aaaggactcagaacactgctcctct

SEQ ID NO: 44349 - DNA, 25 bp, Canis familiaris
aaagagaccgaatcccatatcctcg

SEQ ID NO: 44350 - DNA, 25 bp, Canis familiaris
aaaggaccagttgcgccatataatg

SEQ ID NO: 44351 - DNA, 25 bp, Canis familiaris
aaaggaatcagttctggccatgaga

SEQ ID NO: 44352 - DNA, 25 bp, Canis familiaris
aaaggcagtcagtacagatggcaga

SEQ ID NO: 44353 - DNA, 25 bp, Canis familiaris
aaaggcgctgaggtcgatgcggaag

SEQ ID NO: 44354 - DNA, 25 bp, Canis familiaris
aaaggagttggtgtgctgttggaaa

SEQ ID NO: 44355 - DNA, 25 bp, Canis familiaris
aaaggatttgcagcttgcggcggaa

SEQ ID NO: 44356 - DNA, 25 bp, Canis familiaris
aaaggcgttgcagagctcggtgtga

SEQ ID NO: 44357 - DNA, 25 bp, Canis familiaris
aaaggccttagagtcatctctttgt

SEQ ID NO: 44358 - DNA, 25 bp, Canis familiaris
aaagtcctagaagcctgtattccag

SEQ ID NO: 44359 - DNA, 25 bp, Canis familiaris
aaagttttgtaagcatggattctaa

SEQ ID NO: 44360 - DNA, 25 bp, Canis familiaris
aaagtcatcttgctaccagtattta

SEQ ID NO: 44361 - DNA, 25 bp, Canis familiaris
aaagtattctggctccagtaggcta

SEQ ID NO: 44362 - DNA, 25 bp, Canis familiaris
aaagaatgttggccgctgagccgtt

SEQ ID NO: 44363 - DNA, 25 bp, Canis familiaris
aaagaattgtggtctctgcccatag

SEQ ID NO: 44364 - DNA, 25 bp, Canis familiaris
aaagatgaatttggctcctcctaga

SEQ ID NO: 44365 - DNA, 25 bp, Canis familiaris
aaagagcttcttacatcatctgcct

SEQ ID NO: 44366 - DNA, 25 bp, Canis familiaris
aaaggctgccgtgcagctcattctg

SEQ ID NO: 44367 - DNA, 25 bp, Canis familiaris
aaaggctgaggctcagccactgagc

SEQ ID NO: 44368 - DNA, 25 bp, Canis familiaris
aaaggctgaagcttggccatctagc

SEQ ID NO: 44369 - DNA, 25 bp, Canis familiaris
aaaggtgacagctattgtatttgga

SEQ ID NO: 44370 - DNA, 25 bp, Canis familiaris
aaagtgtacatctattacattttaa

SEQ ID NO: 44371 - DNA, 25 bp, Canis familiaris
aaaggtgactcatctcacatatgct

SEQ ID NO: 44372 - DNA, 25 bp, Canis familiaris
aaagttcccaactaacatgcatgga

SEQ ID NO: 44373 - DNA, 25 bp, Canis familiaris
aaaggtcccagaggtgaagctgccc

SEQ ID NO: 44374 - DNA, 25 bp, Canis familiaris
aaaggcccactgataaagctgcacc

SEQ ID NO: 44375 - DNA, 25 bp, Canis familiaris
aaatggatccatgttagagccgccc

SEQ ID NO: 44376 - DNA, 25 bp, Canis familiaris
aaagggacaagctgaagccagcctc

SEQ ID NO: 44377 - DNA, 25 bp, Canis familiaris
aaagtggcaataccaacaccagccc

SEQ ID NO: 44378 - DNA, 25 bp, Canis familiaris
aacagatcgcagttgccaatccaga

SEQ ID NO: 44379 - DNA, 25 bp, Canis familiaris
aaagtccagactgaacgcagcaccc

SEQ ID NO: 44380 - DNA, 25 bp, Canis familiaris
aaacccaaccgatcatactctgagc

SEQ ID NO: 44381 - DNA, 25 bp, Canis familiaris
aaagcaccagacggattcaacctaa

SEQ ID NO: 44382 - DNA, 25 bp, Canis familiaris
aaagcccgaggatctcacgttttat

SEQ ID NO: 44383 - DNA, 25 bp, Canis familiaris
aaaggtcgaggttgatcagcgtatt

SEQ ID NO: 44384 - DNA, 25 bp, Canis familiaris
aaaggtctgagtgctattggtttaa

SEQ ID NO: 44385 - DNA, 25 bp, Canis familiaris
aaaggctgccctggcatttggtttc

SEQ ID NO: 44386 - DNA, 25 bp, Canis familiaris
aaagtgcatcccacgtttatgagtc

SEQ ID NO: 44387 - DNA, 25 bp, Canis familiaris
aaagtccccaactcattgtgtgtta

SEQ ID NO: 44388 - DNA, 25 bp, Canis familiaris
aaagagccctaatggattggtggta

SEQ ID NO: 44389 - DNA, 25 bp, Canis familiaris
aaaggaccaaaataatagtgctgtg

SEQ ID NO: 44390 - DNA, 25 bp, Canis familiaris
aaaggacagaaaatcccacaattgt

SEQ ID NO: 44391 - DNA, 25 bp, Canis familiaris
aaaggaagggaatcatgccatttat

SEQ ID NO: 44392 - DNA, 25 bp, Canis familiaris
aaaggaagtcagttttgctattttg

SEQ ID NO: 44393 - DNA, 25 bp, Canis familiaris
aaagggttctgatgcttgtatttta

SEQ ID NO: 44394 - DNA, 25 bp, Canis familiaris
aaggcggtttttattatcattcgag

SEQ ID NO: 44395 - DNA, 25 bp, Canis familiaris
aaagggttttaaatgctatgcagtc

SEQ ID NO: 44396 - DNA, 25 bp, Canis familiaris
aaagtgggaatatactcaagctgtc

SEQ ID NO: 44397 - DNA, 25 bp, Canis familiaris
aaaggcggaccaggaataagtgatc

SEQ ID NO: 44398 - DNA, 25 bp, Canis familiaris
aaaggatgctacgcgaagaatttcg

SEQ ID NO: 44399 - DNA, 25 bp, Canis familiaris
aaaggcagctggtacgagcaagttt

SEQ ID NO: 44400 - DNA, 25 bp, Canis familiaris
aaaggagcagggaggccagtctctg

SEQ ID NO: 44401 - DNA, 25 bp, Canis familiaris
aaagggcactggagacacagccgcg

SEQ ID NO: 44402 - DNA, 25 bp, Canis familiaris
aaagggcaagcgggcagccccgctt

SEQ ID NO: 44403 - DNA, 25 bp, Canis familiaris
aaaggccaagggccaccaagctttg

SEQ ID NO: 44404 - DNA, 25 bp, Canis familiaris
aaagaccaggcgtccacgagacatt

SEQ ID NO: 44405 - DNA, 25 bp, Canis familiaris
aaagtggcatgggcatcgcacacag

SEQ ID NO: 44406 - DNA, 25 bp, Canis familiaris
aaagattgctgtccactgcacagtc

SEQ ID NO: 44407 - DNA, 25 bp, Canis familiaris
aaagattgctgtccactgcacagtc

SEQ ID NO: 44408 - DNA, 25 bp, Canis familiaris
aaagattgctgtccactgcacagtc

SEQ ID NO: 44409 - DNA, 25 bp, Canis familiaris
aaagatctgtgacttctggcttcta

SEQ ID NO: 44410 - DNA, 25 bp, Canis familiaris
aaagctctgtggaccggcttttgtt

SEQ ID NO: 44411 - DNA, 25 bp, Canis familiaris
aaagctcgtcagccgggagtatctg

SEQ ID NO: 44412 - DNA, 25 bp, Canis familiaris
aaagtatatgcacatgggtgttcat

SEQ ID NO: 44413 - DNA, 25 bp, Canis familiaris
aaagtgacagccggctgtggatttg

SEQ ID NO: 44414 - DNA, 25 bp, Canis familiaris
aaagtaccccgcctgtataattgca

SEQ ID NO: 44415 - DNA, 25 bp, Canis familiaris
aaagtacccatacatgtaactcata

SEQ ID NO: 44416 - DNA, 25 bp, Canis familiaris
aaaggaccctcatagttacagcaca

SEQ ID NO: 44417 - DNA, 25 bp, Canis familiaris
aaaggccctgaagagcctacgacct

SEQ ID NO: 44418 - DNA, 25 bp, Canis familiaris
aaaggcagcctgcactaactacaga

SEQ ID NO: 44419 - DNA, 25 bp, Canis familiaris
aaagaagtctggttgaccccatgag

SEQ ID NO: 44420 - DNA, 25 bp, Canis familiaris
aaaggcagaattctgaccctctggc

SEQ ID NO: 44421 - DNA, 25 bp, Canis familiaris
aaaggcggaagttcaaccactgagc

SEQ ID NO: 44422 - DNA, 25 bp, Canis familiaris
aaaggaggaagatgccccctcagat

SEQ ID NO: 44423 - DNA, 25 bp, Canis familiaris
aaaggaaggagcaacagcccctcct

SEQ ID NO: 44424 - DNA, 25 bp, Canis familiaris
aaaggaaggacttgacacctcgcgg

SEQ ID NO: 44425 - DNA, 25 bp, Canis familiaris
aaaggaggcccttcagacatctggc

SEQ ID NO: 44426 - DNA, 25 bp, Canis familiaris
aaagaacaccctgcagagctcagac

SEQ ID NO: 44427 - DNA, 25 bp, Canis familiaris
aaagagatacaagttcgtggcacac

SEQ ID NO: 44428 - DNA, 25 bp, Canis familiaris
aaagggccaaggaagctgcagaaca

SEQ ID NO: 44429 - DNA, 25 bp, Canis familiaris
aaagggccaaggaagctgcagaaca

SEQ ID NO: 44430 - DNA, 25 bp, Canis familiaris
aaagtggccaggcggcagcagcatt

SEQ ID NO: 44431 - DNA, 25 bp, Canis familiaris
aaatggctcagcagggtgcagcgct

SEQ ID NO: 44432 - DNA, 25 bp, Canis familiaris
aaatggccagcactggtcatcacca

SEQ ID NO: 44433 - DNA, 25 bp, Canis familiaris
aaagagcaagcgcgttgacacagcc

SEQ ID NO: 44434 - DNA, 25 bp, Canis familiaris
aaatggcaactgtgtctgagacgct

SEQ ID NO: 44435 - DNA, 25 bp, Canis familiaris
aaagagctactgtttctatgcaact

SEQ ID NO: 44436 - DNA, 25 bp, Canis familiaris
aaaggcatggtgttgtcttaatcaa

SEQ ID NO: 44437 - DNA, 25 bp, Canis familiaris
aaagtcttggggccatcatgaatat

SEQ ID NO: 44438 - DNA, 25 bp, Canis familiaris
aaagcttgtcggagatcatagagat

SEQ ID NO: 44439 - DNA, 25 bp, Canis familiaris
aaagttgacttgaaaatacagttgt

SEQ ID NO: 44440 - DNA, 25 bp, Canis familiaris
aaagttgctgcagttaaaaagctcg

SEQ ID NO: 44441 - DNA, 25 bp, Canis familiaris
aaagatgtgtgtcataaaaagcact

SEQ ID NO: 44442 - DNA, 25 bp, Canis familiaris
aaagatgctggtttgaaaagagtta

SEQ ID NO: 44443 - DNA, 25 bp, Canis familiaris
aaagcgcttgtttgcagataaaaaa

SEQ ID NO: 44444 - DNA, 25 bp, Canis familiaris
aaagtgttgctatgctattaaaata

SEQ ID NO: 44445 - DNA, 25 bp, Canis familiaris
aaagatgttcaatggatttggcgaa

SEQ ID NO: 44446 - DNA, 25 bp, Canis familiaris
aaagattctctttacgctcagggaa

SEQ ID NO: 44447 - DNA, 25 bp, Canis familiaris
aaagatcattctgtacaaagctgta

SEQ ID NO: 44448 - DNA, 25 bp, Canis familiaris
aaagagctcctgttacaacctgtga

SEQ ID NO: 44449 - DNA, 25 bp, Canis familiaris
aaagccatcttaaaacacctgtgca

SEQ ID NO: 44450 - DNA, 25 bp, Canis familiaris
aaaggatttcctccaatgcttgtca

SEQ ID NO: 44451 - DNA, 25 bp, Canis familiaris
aaaggctttcctcacattagctgaa

SEQ ID NO: 44452 - DNA, 25 bp, Canis familiaris
aaaggcttatggatgtatatagtca

SEQ ID NO: 44453 - DNA, 25 bp, Canis familiaris
aaagttcagatgtgtcttctagata

SEQ ID NO: 44454 - DNA, 25 bp, Canis familiaris
aaagtctcactctgtcaggtggaca

SEQ ID NO: 44455 - DNA, 25 bp, Canis familiaris
aaaggcttcttattcaggtgtgagc

SEQ ID NO: 44456 - DNA, 25 bp, Canis familiaris
aaaggctttcattgctcagtactac

SEQ ID NO: 44457 - DNA, 25 bp, Canis familiaris
aaagggattagctgagatatctcat

SEQ ID NO: 44458 - DNA, 25 bp, Canis familiaris
aaaggtcaaagctggattctcaaaa

SEQ ID NO: 44459 - DNA, 25 bp, Canis familiaris
aaaggtaaatcttcgtcctcacata

SEQ ID NO: 44460 - DNA, 25 bp, Canis familiaris
aaaggtcactttttgttcttcacag

SEQ ID NO: 44461 - DNA, 25 bp, Canis familiaris
aaagcctccatgttgtgttctttcc

SEQ ID NO: 44462 - DNA, 25 bp, Canis familiaris
aaagttcatctttgcatgtccattt

SEQ ID NO: 44463 - DNA, 25 bp, Canis familiaris
aaaggtccattgttgacacattgct

SEQ ID NO: 44464 - DNA, 25 bp, Canis familiaris
aaaggtgccctcattgagcattcta

SEQ ID NO: 44465 - DNA, 25 bp, Canis familiaris
aaagtgccttctgttgatgctgatt

SEQ ID NO: 44466 - DNA, 25 bp, Canis familiaris
aaagtcctgtgtggccctggacttg

SEQ ID NO: 44467 - DNA, 25 bp, Canis familiaris
aaagtcactgtagctgcctgggtat

SEQ ID NO: 44468 - DNA, 25 bp, Canis familiaris
aaagtatttgtgttgctctgtggta

SEQ ID NO: 44469 - DNA, 25 bp, Canis familiaris
aaagtgtgttggttgcattttcagc

SEQ ID NO: 44470 - DNA, 25 bp, Canis familiaris
aaagtgatggatcgttgattttcga

SEQ ID NO: 44471 - DNA, 25 bp, Canis familiaris
aaagctgtggatctcgcaaattcgt

SEQ ID NO: 44472 - DNA, 25 bp, Canis familiaris
aaagtgggatgccatgcgaatccca

SEQ ID NO: 44473 - DNA, 25 bp, Canis familiaris
aaaggtggcttggcagagctgctcc

SEQ ID NO: 44474 - DNA, 25 bp, Canis familiaris
aaagagatcctggggactgccccgt

SEQ ID NO: 44475 - DNA, 25 bp, Canis familiaris
aaaggattctttcgacgcagtcacg

SEQ ID NO: 44476 - DNA, 25 bp, Canis familiaris
aaagttttttattcggcatcagcag

SEQ ID NO: 44477 - DNA, 25 bp, Canis familiaris
aaagttgtatatgatccgcctgggc

SEQ ID NO: 44478 - DNA, 25 bp, Canis familiaris
aaagtattaatgaaggcgacgtgct

SEQ ID NO: 44479 - DNA, 25 bp, Canis familiaris
aaaggcaaactggcggcgacgcatg

SEQ ID NO: 44480 - DNA, 25 bp, Canis familiaris
aaagggaactgcggcgtggccagat

SEQ ID NO: 44481 - DNA, 25 bp, Canis familiaris
aaaggcgaagcacgacttgcccagt

SEQ ID NO: 44482 - DNA, 25 bp, Canis familiaris
aaagatcgcaaacgcagtggccatc

SEQ ID NO: 44483 - DNA, 25 bp, Canis familiaris
aaaggcgagaaccaggagccacaca

SEQ ID NO: 44484 - DNA, 25 bp, Canis familiaris
aaagacggaactggcaactcacatc

SEQ ID NO: 44485 - DNA, 25 bp, Canis familiaris
aaagaggccagcggtgcaaatccat

SEQ ID NO: 44486 - DNA, 25 bp, Canis familiaris
aaagtgggagcagggcacctcgatt

SEQ ID NO: 44487 - DNA, 25 bp, Canis familiaris
aaaggagaaatcctgccccagatgc

SEQ ID NO: 44488 - DNA, 25 bp, Canis familiaris
aaagggatacatgccccctgatgtt

SEQ ID NO: 44489 - DNA, 25 bp, Canis familiaris
aaaggaaaagtctgtctctgtgatg

SEQ ID NO: 44490 - DNA, 25 bp, Canis familiaris
aaaggaataagccctgtccagtatg

SEQ ID NO: 44491 - DNA, 25 bp, Canis familiaris
aaagtggcagggccctgtgctagtt

SEQ ID NO: 44492 - DNA, 25 bp, Canis familiaris
aaagtggcagggccctgtgctagtt

SEQ ID NO: 44493 - DNA, 25 bp, Canis familiaris
aaagggaaagaccatgctcatagct

SEQ ID NO: 44494 - DNA, 25 bp, Canis familiaris
aaagcaggaaagactatccactgga

SEQ ID NO: 44495 - DNA, 25 bp, Canis familiaris
aaactgaaaagcttatgcacagcaa

SEQ ID NO: 44496 - DNA, 25 bp, Canis familiaris
aaagttcaaagcaactgcccaaaga

SEQ ID NO: 44497 - DNA, 25 bp, Canis familiaris
aaagttaagtcatctccttagagat

SEQ ID NO: 44498 - DNA, 25 bp, Canis familiaris
aaactaatggtttctcatttacgag

SEQ ID NO: 44499 - DNA, 25 bp, Canis familiaris
aaagctgaatggttcctcttgataa

SEQ ID NO: 44500 - DNA, 25 bp, Canis familiaris
aaagtggtgcatttgtctctgtata

SEQ ID NO: 44501 - DNA, 25 bp, Canis familiaris
aaagtgcagtcttctgtattcatgc

SEQ ID NO: 44502 - DNA, 25 bp, Canis familiaris
aaaggatgctgctgcacttggctgt

SEQ ID NO: 44503 - DNA, 25 bp, Canis familiaris
aaaggctgatgaaggcatctcgttc

SEQ ID NO: 44504 - DNA, 25 bp, Canis familiaris
aaagagcgcgatccgcttgcatttc

SEQ ID NO: 44505 - DNA, 25 bp, Canis familiaris
aaaggcagagattgggtgatatgtc

SEQ ID NO: 44506 - DNA, 25 bp, Canis familiaris
aaagaagcagtcgggctttgccacc

SEQ ID NO: 44507 - DNA, 25 bp, Canis familiaris
aaagaacagctcgcgcttcatttcc

SEQ ID NO: 44508 - DNA, 25 bp, Canis familiaris
aaaggagccatcaggcaccatttcc

SEQ ID NO: 44509 - DNA, 25 bp, Canis familiaris
aaaccaggtcactgacactttccct

SEQ ID NO: 44510 - DNA, 25 bp, Canis familiaris
aaaccctgaagacacactttggcgc

SEQ ID NO: 44511 - DNA, 25 bp, Canis familiaris
aaacagccaaaacctcctagtagtg

SEQ ID NO: 44512 - DNA, 25 bp, Canis familiaris
aaagatccaactggtctcgtagggt

SEQ ID NO: 44513 - DNA, 25 bp, Canis familiaris
aaagcacccagtgagctcagctaag

SEQ ID NO: 44514 - DNA, 25 bp, Canis familiaris
aaagccccacctgtagtagagagca

SEQ ID NO: 44515 - DNA, 25 bp, Canis familiaris
aaaccttcacccaatggcgaataat

SEQ ID NO: 44516 - DNA, 25 bp, Canis familiaris
aaactctgccaccctgaatggaaga

SEQ ID NO: 44517 - DNA, 25 bp, Canis familiaris
aaacccgatatggctgagattgaga

SEQ ID NO: 44518 - DNA, 25 bp, Canis familiaris
aaacgactagtgccgctgatggagg

SEQ ID NO: 44519 - DNA, 25 bp, Canis familiaris
aaagatgcactaaacctgatcgaaa

SEQ ID NO: 44520 - DNA, 25 bp, Canis familiaris
aaaggcagtcaaccacataggaaag

SEQ ID NO: 44521 - DNA, 25 bp, Canis familiaris
aaaggaatcacccaaaggcagccag

SEQ ID NO: 44522 - DNA, 25 bp, Canis familiaris
aaagtgttcaaccacaaggcaccct

SEQ ID NO: 44523 - DNA, 25 bp, Canis familiaris
aaagtattgagcgcaggtggcccct

SEQ ID NO: 44524 - DNA, 25 bp, Canis familiaris
aaagtgagtgagtccacgtgcgcac

SEQ ID NO: 44525 - DNA, 25 bp, Canis familiaris
aaaggagttgtctctagctcacagc

SEQ ID NO: 44526 - DNA, 25 bp, Canis familiaris
aaaggagtatgatgttcaacacgtc

SEQ ID NO: 44527 - DNA, 25 bp, Canis familiaris
aaaccagaaaacctcacactcagtc

SEQ ID NO: 44528 - DNA, 25 bp, Canis familiaris
aaaccaaatactactccacaatcac

SEQ ID NO: 44529 - DNA, 25 bp, Canis familiaris
aaaccagttagcattagccaatact

SEQ ID NO: 44530 - DNA, 25 bp, Canis familiaris
aaaatgacattactgcatggcaaga

SEQ ID NO: 44531 - DNA, 25 bp, Canis familiaris
aaagattgttgattcagtgctgagt

SEQ ID NO: 44532 - DNA, 25 bp, Canis familiaris
aaagagtgaatcgtctgcctgagat

SEQ ID NO: 44533 - DNA, 25 bp, Canis familiaris
aaagatgaaattgtgccgtttggga

SEQ ID NO: 44534 - DNA, 25 bp, Canis familiaris
aaagtagaatgtgcctcctctttgg

SEQ ID NO: 44535 - DNA, 25 bp, Canis familiaris
aaagtcatggttctcacctcattct

SEQ ID NO: 44536 - DNA, 25 bp, Canis familiaris
aaagctgatgaagcctaccttattg

SEQ ID NO: 44537 - DNA, 25 bp, Canis familiaris
aaagagtggtccctagcttctattt

SEQ ID NO: 44538 - DNA, 25 bp, Canis familiaris
aaagaatggttcccacccagaacat

SEQ ID NO: 44539 - DNA, 25 bp, Canis familiaris
aaagcacagcagttagccaccaaaa

SEQ ID NO: 44540 - DNA, 25 bp, Canis familiaris
aaagtgcatagctttgctccactat

SEQ ID NO: 44541 - DNA, 25 bp, Canis familiaris
aaagatgcactggttcctcatacat

SEQ ID NO: 44542 - DNA, 25 bp, Canis familiaris
aaagtgcctcagcctcacaataatg

SEQ ID NO: 44543 - DNA, 25 bp, Canis familiaris
aaagtgcctctggatccacaacata

SEQ ID NO: 44544 - DNA, 25 bp, Canis familiaris
aaagtttctgaaccatccacatctc

SEQ ID NO: 44545 - DNA, 25 bp, Canis familiaris
aaagggactgtcttgtccctcatcc

SEQ ID NO: 44546 - DNA, 25 bp, Canis familiaris
aaaggtattcactgtttcacatcac

SEQ ID NO: 44547 - DNA, 25 bp, Canis familiaris
aaagagaatttgtgtttcctctgcc

SEQ ID NO: 44548 - DNA, 25 bp, Canis familiaris
aaagaactctttggtctctctttgc

SEQ ID NO: 44549 - DNA, 25 bp, Canis familiaris
aaagtatttttcttgcctgtcttgc

SEQ ID NO: 44550 - DNA, 25 bp, Canis familiaris
aaaggatggtttgtcctgtgctggg

SEQ ID NO: 44551 - DNA, 25 bp, Canis familiaris
aagagttacggtctcgtgcttgggt

SEQ ID NO: 44552 - DNA, 25 bp, Canis familiaris
aaagttaccctaatctggctgtgtt

SEQ ID NO: 44553 - DNA, 25 bp, Canis familiaris
aaagctacatcagcacaattggtgt

SEQ ID NO: 44554 - DNA, 25 bp, Canis familiaris
aaaggatcatatacagcgcagtttg

SEQ ID NO: 44555 - DNA, 25 bp, Canis familiaris
ctcactgtgacttttttctttttat

SEQ ID NO: 44556 - DNA, 25 bp, Canis familiaris
aaagtgatatatgcaccctatgttt

SEQ ID NO: 44557 - DNA, 25 bp, Canis familiaris
aaagcgttcatagactcttggttta

SEQ ID NO: 44558 - DNA, 25 bp, Canis familiaris
aaagttgttgatgcccttggactgg

SEQ ID NO: 44559 - DNA, 25 bp, Canis familiaris
aaagggtggatccctcggagacttg

SEQ ID NO: 44560 - DNA, 25 bp, Canis familiaris
aaagacgggatcccttgtggtcact

SEQ ID NO: 44561 - DNA, 25 bp, Canis familiaris
aaacctgggccaaggagtggacgct

SEQ ID NO: 44562 - DNA, 25 bp, Canis familiaris
aaagctgcttggttggggtggggag

SEQ ID NO: 44563 - DNA, 25 bp, Canis familiaris
aaactggggcatgggaggggggctg

SEQ ID NO: 44564 - DNA, 25 bp, Canis familiaris
aaactgtggtgtgtgggagtgggga

SEQ ID NO: 44565 - DNA, 25 bp, Canis familiaris
aaaatgggtgatgttgagaagggaa

SEQ ID NO: 44566 - DNA, 25 bp, Canis familiaris
aaacgagcctatgtagagatagagt

SEQ ID NO: 44567 - DNA, 25 bp, Canis familiaris
aaaggacgcatatcaagatgaagaa

SEQ ID NO: 44568 - DNA, 25 bp, Canis familiaris
aaagggcatctgtgcaatgtgtgga

SEQ ID NO: 44569 - DNA, 25 bp, Canis familiaris
aaagggcagctgtacagggctaggt

SEQ ID NO: 44570 - DNA, 25 bp, Canis familiaris
aaagaggcagtcttcagagtccgac

SEQ ID NO: 44571 - DNA, 25 bp, Canis familiaris
aaagcagtggctataacccgacggg

SEQ ID NO: 44572 - DNA, 25 bp, Canis familiaris
aaagcatgggttgattctgcctaaa

SEQ ID NO: 44573 - DNA, 25 bp, Canis familiaris
aaagtgtggactgctgttcctagta

SEQ ID NO: 44574 - DNA, 25 bp, Canis familiaris
aaagttggactgtgtgcttctgggg

SEQ ID NO: 44575 - DNA, 25 bp, Canis familiaris
aaagttaactgtgatccattgtgga

SEQ ID NO: 44576 - DNA, 25 bp, Canis familiaris
aagagaaaaattcactcatttggag

SEQ ID NO: 44577 - DNA, 25 bp, Canis familiaris
aaagctaaggaactcctctcttgga

SEQ ID NO: 44578 - DNA, 25 bp, Canis familiaris
aaagttggaagccgcttctccaggt

SEQ ID NO: 44579 - DNA, 25 bp, Canis familiaris
aaaggtggagaccagttcctctctc

SEQ ID NO: 44580 - DNA, 25 bp, Canis familiaris
aacaggtcaggagacctgccctcct

SEQ ID NO: 44581 - DNA, 25 bp, Canis familiaris
aacaggtagctgtacacggcgttgc

SEQ ID NO: 44582 - DNA, 25 bp, Canis familiaris
aaaggtaagtacaggctgctgctct

SEQ ID NO: 44583 - DNA, 25 bp, Canis familiaris
aaaggtaggcgctaaactgctgagc

SEQ ID NO: 44584 - DNA, 25 bp, Canis familiaris
aaaggtgtgcaggagaaagatggag

SEQ ID NO: 44585 - DNA, 25 bp, Canis familiaris
aaagctgttgggcaaagattggttt

SEQ ID NO: 44586 - DNA, 25 bp, Canis familiaris
aaagcgtagggtttagattggccat

SEQ ID NO: 44587 - DNA, 25 bp, Canis familiaris
aaacgctaagttttagtggatcaga

SEQ ID NO: 44588 - DNA, 25 bp, Canis familiaris
aaacgaacgcttgtgcactgttaag

SEQ ID NO: 44589 - DNA, 25 bp, Canis familiaris
aaagggaagtctgtgctcactttca

SEQ ID NO: 44590 - DNA, 25 bp, Canis familiaris
aaagggcaatatatatctccatttc

SEQ ID NO: 44591 - DNA, 25 bp, Canis familiaris
aaagcaggcgattactcgtccattt

SEQ ID NO: 44592 - DNA, 25 bp, Canis familiaris
aaagagccgtgaatccagtccactt

SEQ ID NO: 44593 - DNA, 25 bp, Canis familiaris
aaagtctcataagtccagtccatct

SEQ ID NO: 44594 - DNA, 25 bp, Canis familiaris
aaagtaacgatggctcagtcctcta

SEQ ID NO: 44595 - DNA, 25 bp, Canis familiaris
aaaggatctcgtggccaatcactct

SEQ ID NO: 44596 - DNA, 25 bp, Canis familiaris
aaagggccgatgccaattactccta

SEQ ID NO: 44597 - DNA, 25 bp, Canis familiaris
aaagggccgagtgccatatccaggt

SEQ ID NO: 44598 - DNA, 25 bp, Canis familiaris
aaagggatcggagccatcatcgcgc

SEQ ID NO: 44599 - DNA, 25 bp, Canis familiaris
aaaggtgatctggttgctgcacccc

SEQ ID NO: 44600 - DNA, 25 bp, Canis familiaris
aaaggtgcagatgctgttgaccctc

SEQ ID NO: 44601 - DNA, 25 bp, Canis familiaris
aaaggtcagaggcctgagtgcccac

SEQ ID NO: 44602 - DNA, 25 bp, Canis familiaris
aaaggtcatagctgctgctgtgcac

SEQ ID NO: 44603 - DNA, 25 bp, Canis familiaris
aaagatgccatggcacagctttgcc

SEQ ID NO: 44604 - DNA, 25 bp, Canis familiaris
aaaggtcatgctggtctttgctggt

SEQ ID NO: 44605 - DNA, 25 bp, Canis familiaris
aaagagcatcgtgtttgctgggcgc

SEQ ID NO: 44606 - DNA, 25 bp, Canis familiaris
aaagaacctgccacttgaggcctgg

SEQ ID NO: 44607 - DNA, 25 bp, Canis familiaris
aaaaacctcatcgctaacagcctgg

SEQ ID NO: 44608 - DNA, 25 bp, Canis familiaris
aaaccagcagctgacaagaaacctg

SEQ ID NO: 44609 - DNA, 25 bp, Canis familiaris
aaacctcactccacagttagctgtg

SEQ ID NO: 44610 - DNA, 25 bp, Canis familiaris
aaaccatagccactgcaagagtagt

SEQ ID NO: 44611 - DNA, 25 bp, Canis familiaris
aaagccaaagcccaagagagcagtg

SEQ ID NO: 44612 - DNA, 25 bp, Canis familiaris
aaagctgccaaatatgacgagcagt

SEQ ID NO: 44613 - DNA, 25 bp, Canis familiaris
aaagctgcagtattgaagtatgaga

SEQ ID NO: 44614 - DNA, 25 bp, Canis familiaris
aaagcacatatttcagtgatgagga

SEQ ID NO: 44615 - DNA, 25 bp, Canis familiaris
aaagctgttttcctgagagagagag

SEQ ID NO: 44616 - DNA, 25 bp, Canis familiaris
aaagcatgttactctcagtgagccc

SEQ ID NO: 44617 - DNA, 25 bp, Canis familiaris
aaagcatgttactctcagtgagccc

SEQ ID NO: 44618 - DNA, 25 bp, Canis familiaris
aaagcatttatgtccaggtgtcctg

SEQ ID NO: 44619 - DNA, 25 bp, Canis familiaris
aaagcacttgcttcgatctattctc

SEQ ID NO: 44620 - DNA, 25 bp, Canis familiaris
aaagatgctttcagatgctttgagc

SEQ ID NO: 44621 - DNA, 25 bp, Canis familiaris
aaagattgcctgtgctgctgttgac

SEQ ID NO: 44622 - DNA, 25 bp, Canis familiaris
aaagcatctgcacttcgctcagtgc

SEQ ID NO: 44623 - DNA, 25 bp, Canis familiaris
aaagtctcactaggcatgctgtcgt

SEQ ID NO: 44624 - DNA, 25 bp, Canis familiaris
aaagtcccacatgatgcttcggttt

SEQ ID NO: 44625 - DNA, 25 bp, Canis familiaris
aaagatccaactgtttagactgttc

SEQ ID NO: 44626 - DNA, 25 bp, Canis familiaris
aaagaggcaacttcctatccactgt

SEQ ID NO: 44627 - DNA, 25 bp, Canis familiaris
aaagtggagcacacctacgagcttc

SEQ ID NO: 44628 - DNA, 25 bp, Canis familiaris
aaagtggactgagcctctcaggccc

SEQ ID NO: 44629 - DNA, 25 bp, Canis familiaris
aacagtcgaaaggtctctcacctcc

SEQ ID NO: 44630 - DNA, 25 bp, Canis familiaris
aaagcattggaagacctccgagcca

SEQ ID NO: 44631 - DNA, 25 bp, Canis familiaris
aaagaagcgagacatcccggactac

SEQ ID NO: 44632 - DNA, 25 bp, Canis familiaris
aaagttgcacaatatccctcgatta

SEQ ID NO: 44633 - DNA, 25 bp, Canis familiaris
aaagatgtactatgactgcctggaa

SEQ ID NO: 44634 - DNA, 25 bp, Canis familiaris
aaagagtaataacagcacatggcta

SEQ ID NO: 44635 - DNA, 25 bp, Canis familiaris
aaaggtcagaacctagcctgagagt

SEQ ID NO: 44636 - DNA, 25 bp, Canis familiaris
aaacgtaaaggtatgcagcaggtcc

SEQ ID NO: 44637 - DNA, 25 bp, Canis familiaris
aaacctcagagatgttcgaaggcct

SEQ ID NO: 44638 - DNA, 25 bp, Canis familiaris
aaccctacgtgagatccaagggccg

SEQ ID NO: 44639 - DNA, 25 bp, Canis familiaris
aaccctacgtgagatccaagggccg

SEQ ID NO: 44640 - DNA, 25 bp, Canis familiaris
caaccctacgtgagatcccagggcc

SEQ ID NO: 44641 - DNA, 25 bp, Canis familiaris
aaacgtacagtcatgctgctcgggg

SEQ ID NO: 44642 - DNA, 25 bp, Canis familiaris
aaagctaccagtattggggcagccc

SEQ ID NO: 44643 - DNA, 25 bp, Canis familiaris
aaagctagcctgaagccggagagag

SEQ ID NO: 44644 - DNA, 25 bp, Canis familiaris
aaagaagccgtctctgtgagcacag

SEQ ID NO: 44645 - DNA, 25 bp, Canis familiaris
aaagaaccacttgctgggcatcact

SEQ ID NO: 44646 - DNA, 25 bp, Canis familiaris
aaagacccacgggctctgagaactc

SEQ ID NO: 44647 - DNA, 25 bp, Canis familiaris
aaagatatccaggtgccctcagtac

SEQ ID NO: 44648 - DNA, 25 bp, Canis familiaris
aaagtctccaggaaccacagtccat

SEQ ID NO: 44649 - DNA, 25 bp, Canis familiaris
aaagctatccaactatctaaactgt

SEQ ID NO: 44650 - DNA, 25 bp, Canis familiaris
aaagtactacattagcaacatattg

SEQ ID NO: 44651 - DNA, 25 bp, Canis familiaris
aaagtatctaagtaagtcatattta

SEQ ID NO: 44652 - DNA, 25 bp, Canis familiaris
aaagtttagtgagatgttatatgta

SEQ ID NO: 44653 - DNA, 25 bp, Canis familiaris
aaagtcttttatttgcttatattca

SEQ ID NO: 44654 - DNA, 25 bp, Canis familiaris
aaagtctagtttcatttcaaatcct

SEQ ID NO: 44655 - DNA, 25 bp, Canis familiaris
aaagccttatttcattactatctcc

SEQ ID NO: 44656 - DNA, 25 bp, Canis familiaris
aaagcatttttttcatatcactctg

SEQ ID NO: 44657 - DNA, 25 bp, Canis familiaris
aaagaagtcttgcaatacctctccc

SEQ ID NO: 44658 - DNA, 25 bp, Canis familiaris
aaagaggatttacatcccactgccc

SEQ ID NO: 44659 - DNA, 25 bp, Canis familiaris
aaagatggtttcaggtccctgcaaa

SEQ ID NO: 44660 - DNA, 25 bp, Canis familiaris
aacagtctttaggggctcccaggag

SEQ ID NO: 44661 - DNA, 25 bp, Canis familiaris
aaaggtgtgtctggggatccctggg

SEQ ID NO: 44662 - DNA, 25 bp, Canis familiaris
aaaggtggcataacctctcacctgg

SEQ ID NO: 44663 - DNA, 25 bp, Canis familiaris
aaagtgaagcttcctgttacctgag

SEQ ID NO: 44664 - DNA, 25 bp, Canis familiaris
aaagtctcagttctgtgtactcagt

SEQ ID NO: 44665 - DNA, 25 bp, Canis familiaris
aaagctcctattctgattgctacag

SEQ ID NO: 44666 - DNA, 25 bp, Canis familiaris
aaagcacacttatttcagttcagag

SEQ ID NO: 44667 - DNA, 25 bp, Canis familiaris
aaagcacaattggttcgagtgagta

SEQ ID NO: 44668 - DNA, 25 bp, Canis familiaris
aaaccaatggtcatgcaaatgcagt

SEQ ID NO: 44669 - DNA, 25 bp, Canis familiaris
aaagtaatgcttgatgcaggatctg

SEQ ID NO: 44670 - DNA, 25 bp, Canis familiaris
aaagctgagtccaacatgaatgatt

SEQ ID NO: 44671 - DNA, 25 bp, Canis familiaris
aaagtggtccagaacaacagtctat

SEQ ID NO: 44672 - DNA, 25 bp, Canis familiaris
aaagtggcctcggagcaggcagtgc

SEQ ID NO: 44673 - DNA, 25 bp, Canis familiaris
aaagtgggccttaagtgcgtgcctg

SEQ ID NO: 44674 - DNA, 25 bp, Canis familiaris
aaagggcggattgcagtgggctcag

SEQ ID NO: 44675 - DNA, 25 bp, Canis familiaris
aacagaccagcgtgtcctgggtgaa

SEQ ID NO: 44676 - DNA, 25 bp, Canis familiaris
aaagatccaggatgtaagcgtgaaa

SEQ ID NO: 44677 - DNA, 25 bp, Canis familiaris
aaagcaaagagatttacaggtgtaa

SEQ ID NO: 44678 - DNA, 25 bp, Canis familiaris
aaagctaagaataaccagtgggaga

SEQ ID NO: 44679 - DNA, 25 bp, Canis familiaris
aaagtgcataaaaaccaaacatcaa

SEQ ID NO: 44680 - DNA, 25 bp, Canis familiaris
aaagtgaaataatggcaacataatt

SEQ ID NO: 44681 - DNA, 25 bp, Canis familiaris
aaactgaaaccatcccagcatattt

SEQ ID NO: 44682 - DNA, 25 bp, Canis familiaris
aaagcaaagagcgtccccagctttt

SEQ ID NO: 44683 - DNA, 25 bp, Canis familiaris
aaagagaagcatttggcccacggct

SEQ ID NO: 44684 - DNA, 25 bp, Canis familiaris
aaagcgcaatgtgtggttcccagct

SEQ ID NO: 44685 - DNA, 25 bp, Canis familiaris
aaagcgatgagtgatactacccccc

SEQ ID NO: 44686 - DNA, 25 bp, Canis familiaris
aaacttgtctttgtatacccgcaga

SEQ ID NO: 44687 - DNA, 25 bp, Canis familiaris
aaactcggctgtattaatcacgcga

SEQ ID NO: 44688 - DNA, 25 bp, Canis familiaris
aaaccggaagtgatgaaccagcctc

SEQ ID NO: 44689 - DNA, 25 bp, Canis familiaris
aaagcaccaaggctggaagctcccc

SEQ ID NO: 44690 - DNA, 25 bp, Canis familiaris
aaagatcctgggtatgttcacttcc

SEQ ID NO: 44691 - DNA, 25 bp, Canis familiaris
aaagctggtgccaaaggtcacttcc

SEQ ID NO: 44692 - DNA, 25 bp, Canis familiaris
aaagggctggatagtggtacattat

SEQ ID NO: 44693 - DNA, 25 bp, Canis familiaris
aaagaggcagacatgggtaacacct

SEQ ID NO: 44694 - DNA, 25 bp, Canis familiaris
aaagctggaaaaggctgtttcagac

SEQ ID NO: 44695 - DNA, 25 bp, Canis familiaris
aaagcatggaaccaaatggaccaca

SEQ ID NO: 44696 - DNA, 25 bp, Canis familiaris
aaagaggcaaactttggggcagcaa

SEQ ID NO: 44697 - DNA, 25 bp, Canis familiaris
aaagggccattaatttggcctgcaa

SEQ ID NO: 44698 - DNA, 25 bp, Canis familiaris
aaagtctagcttttttggcgtgaga

SEQ ID NO: 44699 - DNA, 25 bp, Canis familiaris
aaagttatggcttcttgttggatga

SEQ ID NO: 44700 - DNA, 25 bp, Canis familiaris
aaagctgaatgtgtttggagggatt

SEQ ID NO: 44701 - DNA, 25 bp, Canis familiaris
aaagctggctttataggaggagtat

SEQ ID NO: 44702 - DNA, 25 bp, Canis familiaris
aaagctgtggttctcaaagggtcaa

SEQ ID NO: 44703 - DNA, 25 bp, Canis familiaris
aaagctgtttttgcaagggggcatg

SEQ ID NO: 44704 - DNA, 25 bp, Canis familiaris
aaagcagatttttgagaagcggttt

SEQ ID NO: 44705 - DNA, 25 bp, Canis familiaris
aaagcttctctctgtaacggttcat

SEQ ID NO: 44706 - DNA, 25 bp, Canis familiaris
aaactatatctgtgtatcccctttt

SEQ ID NO: 44707 - DNA, 25 bp, Canis familiaris
aaaccaacatcatacatccccttgg

SEQ ID NO: 44708 - DNA, 25 bp, Canis familiaris
aaagttgaactgcacagtctccttt

SEQ ID NO: 44709 - DNA, 25 bp, Canis familiaris
aaagatggaactccaccctttgctt

SEQ ID NO: 44710 - DNA, 25 bp, Canis familiaris
aaagatggaactccaccctttgctt

SEQ ID NO: 44711 - DNA, 25 bp, Canis familiaris
aaagtgtacctctgatttttctctc

SEQ ID NO: 44712 - DNA, 25 bp, Canis familiaris
aaagatgaaccctgttaatctaatc

SEQ ID NO: 44713 - DNA, 25 bp, Canis familiaris
aaagacctcacctctaaataccatc

SEQ ID NO: 44714 - DNA, 25 bp, Canis familiaris
aaagacttttgctctacacacacac

SEQ ID NO: 44715 - DNA, 25 bp, Canis familiaris
aaagaaatttcttttgacacaatgc

SEQ ID NO: 44716 - DNA, 25 bp, Canis familiaris
aaaaaattttttgggctcagcatgt

SEQ ID NO: 44717 - DNA, 25 bp, Canis familiaris
aaactaatttttctggtgagatatt

SEQ ID NO: 44718 - DNA, 25 bp, Canis familiaris
aaactacatttataatctaggattt

SEQ ID NO: 44719 - DNA, 25 bp, Canis familiaris
aaagatacactttcaaaatctgatg

SEQ ID NO: 44720 - DNA, 25 bp, Canis familiaris
aaagttcgtattatgctatgctgtt

SEQ ID NO: 44721 - DNA, 25 bp, Canis familiaris
aaagtctctgtagttatctgtgtga

SEQ ID NO: 44722 - DNA, 25 bp, Canis familiaris
aaacgtcttagacttctgattgaaa

SEQ ID NO: 44723 - DNA, 25 bp, Canis familiaris
aaactggaataagcgctttgaaaag

SEQ ID NO: 44724 - DNA, 25 bp, Canis familiaris
aaagtcctacaaggccatttgaaat

SEQ ID NO: 44725 - DNA, 25 bp, Canis familiaris
aaagtttgactaagccatactaaat

SEQ ID NO: 44726 - DNA, 25 bp, Canis familiaris
aaagtttcactcatttcactcaaaa

SEQ ID NO: 44727 - DNA, 25 bp, Canis familiaris
aaagatccagcactttttccataaa

SEQ ID NO: 44728 - DNA, 25 bp, Canis familiaris
aaagtcaccatgtctattctcaaga

SEQ ID NO: 44729 - DNA, 25 bp, Canis familiaris
aaagtgcatgtgatgtttccagtga

SEQ ID NO: 44730 - DNA, 25 bp, Canis familiaris
aaagtgcttagactcgcacctggca

SEQ ID NO: 44731 - DNA, 25 bp, Canis familiaris
aaagtcatttatacccagctagcaa

SEQ ID NO: 44732 - DNA, 25 bp, Canis familiaris
aaagactgtcattcataccattcac

SEQ ID NO: 44733 - DNA, 25 bp, Canis familiaris
aaagatctataaaatgccattcact

SEQ ID NO: 44734 - DNA, 25 bp, Canis familiaris
aaagattataactaccatacgctgg

SEQ ID NO: 44735 - DNA, 25 bp, Canis familiaris
aaagatgtagtagcctcaacttgag

SEQ ID NO: 44736 - DNA, 25 bp, Canis familiaris
aaagtcgcagtaacctcaggcagtg

SEQ ID NO: 44737 - DNA, 25 bp, Canis familiaris
aaagttggatgaagctgtaagctgt

SEQ ID NO: 44738 - DNA, 25 bp, Canis familiaris
aaagtactgagaagtggctctgtat

SEQ ID NO: 44739 - DNA, 25 bp, Canis familiaris
aaagtcctgagatggcagtttttca

SEQ ID NO: 44740 - DNA, 25 bp, Canis familiaris
aaagtccaaaggcattttctcttat

SEQ ID NO: 44741 - DNA, 25 bp, Canis familiaris
aaagtccaacttcaaattccatcta

SEQ ID NO: 44742 - DNA, 25 bp, Canis familiaris
aaagtcacaacttcaaattccactc

SEQ ID NO: 44743 - DNA, 25 bp, Canis familiaris
aaagatccaccatcaagactgactt

SEQ ID NO: 44744 - DNA, 25 bp, Canis familiaris
aaagacaatacaactgggcttcatt

SEQ ID NO: 44745 - DNA, 25 bp, Canis familiaris
aaagccaagcgtctggtggtgcatt

SEQ ID NO: 44746 - DNA, 25 bp, Canis familiaris
aaaccaggcttcagcagtcagtatg

SEQ ID NO: 44747 - DNA, 25 bp, Canis familiaris
aaacctggtcctttgtcattggagg

SEQ ID NO: 44748 - DNA, 25 bp, Canis familiaris
aaagcgggctttctgcatgttgtag

SEQ ID NO: 44749 - DNA, 25 bp, Canis familiaris
aaagcagggctaagactgacttgga

SEQ ID NO: 44750 - DNA, 25 bp, Canis familiaris
aaagcaggctggagaccctggctgc

SEQ ID NO: 44751 - DNA, 25 bp, Canis familiaris
aaagatcgtgggttccctgtgtgca

SEQ ID NO: 44752 - DNA, 25 bp, Canis familiaris
aaagaggaggcgtctctgggtgtcc

SEQ ID NO: 44753 - DNA, 25 bp, Canis familiaris
aaagaggaaggccgggctggaccag

SEQ ID NO: 44754 - DNA, 25 bp, Canis familiaris
aaagatggcaagcacggggtcctca

SEQ ID NO: 44755 - DNA, 25 bp, Canis familiaris
aaagagtgaatgtgcgggcctgccc

SEQ ID NO: 44756 - DNA, 25 bp, Canis familiaris
aaagacaaatgtcctggagcctccc

SEQ ID NO: 44757 - DNA, 25 bp, Canis familiaris
aaagaagaagctctgcaatgtcacc

SEQ ID NO: 44758 - DNA, 25 bp, Canis familiaris
aaagattaagccatgcatgtctaag

SEQ ID NO: 44759 - DNA, 25 bp, Canis familiaris
aaagttctaggcaatgcaaaaaggc

SEQ ID NO: 44760 - DNA, 25 bp, Canis familiaris
aaagcttctcatacttgaaataaga

SEQ ID NO: 44761 - DNA, 25 bp, Canis familiaris
aaagctgttcagtcatctaaaccta

SEQ ID NO: 44762 - DNA, 25 bp, Canis familiaris
aaagcagctttggcatatatttcct

SEQ ID NO: 44763 - DNA, 25 bp, Canis familiaris
aaagcagctctcctgaaagcttctc

SEQ ID NO: 44764 - DNA, 25 bp, Canis familiaris
aaagagccctgtggaatgcagcctc

SEQ ID NO: 44765 - DNA, 25 bp, Canis familiaris
aaagatccctgggatccagtcctgc

SEQ ID NO: 44766 - DNA, 25 bp, Canis familiaris
aaagctccctggatgatttcagtga

SEQ ID NO: 44767 - DNA, 25 bp, Canis familiaris
aaagtcattttattgcattcctgta

SEQ ID NO: 44768 - DNA, 25 bp, Canis familiaris
aaagtactgttctatattcacctca

SEQ ID NO: 44769 - DNA, 25 bp, Canis familiaris
aaagctactggttgatcagcgccct

SEQ ID NO: 44770 - DNA, 25 bp, Canis familiaris
aaagcaatgctgacggccagcaccc

SEQ ID NO: 44771 - DNA, 25 bp, Canis familiaris
aaagcaagtgacctccagaaaccag

SEQ ID NO: 44772 - DNA, 25 bp, Canis familiaris
aaagaagtctctacaaggcataaag

SEQ ID NO: 44773 - DNA, 25 bp, Canis familiaris
aaagaatgccttaacacagaaacca

SEQ ID NO: 44774 - DNA, 25 bp, Canis familiaris
aaagtatcctctctcgagagtaggc

SEQ ID NO: 44775 - DNA, 25 bp, Canis familiaris
aaagaaagcttcttcaggagtatcg

SEQ ID NO: 44776 - DNA, 25 bp, Canis familiaris
aacgaggacgactcggagctggcgc

SEQ ID NO: 44777 - DNA, 25 bp, Canis familiaris
aaagatggggatgtccaggctggag

SEQ ID NO: 44778 - DNA, 25 bp, Canis familiaris
aaagcgggcgcttctacatgagcgg

SEQ ID NO: 44779 - DNA, 25 bp, Canis familiaris
aaagctgggctgaactgcatgcaga

SEQ ID NO: 44780 - DNA, 25 bp, Canis familiaris
aaacgaatgctgaacttggattatg

SEQ ID NO: 44781 - DNA, 25 bp, Canis familiaris
aaagcagcaaggacatccggatgaa

SEQ ID NO: 44782 - DNA, 25 bp, Canis familiaris
aaagcaccaggaatagtagagaagt

SEQ ID NO: 44783 - DNA, 25 bp, Canis familiaris
aaagcacaaggaagggcagcccagg

SEQ ID NO: 44784 - DNA, 25 bp, Canis familiaris
aaagcacacaggagggagtgccctg

SEQ ID NO: 44785 - DNA, 25 bp, Canis familiaris
aaaatctcggtgcagggggcatctg

SEQ ID NO: 44786 - DNA, 25 bp, Canis familiaris
aaagtctgtgaggtcggtggtgtct

SEQ ID NO: 44787 - DNA, 25 bp, Canis familiaris
aaggtcgtgccaacgtggggacacg

SEQ ID NO: 44788 - DNA, 25 bp, Canis familiaris
aaactcatggcctcgtgggctgatg

SEQ ID NO: 44789 - DNA, 25 bp, Canis familiaris
aaactatcacccttgaggtcgagcc

SEQ ID NO: 44790 - DNA, 25 bp, Canis familiaris
aaactggccaagtatgagatttacc

SEQ ID NO: 44791 - DNA, 25 bp, Canis familiaris
aaactggccactgattataatgacc

SEQ ID NO: 44792 - DNA, 25 bp, Canis familiaris
aaagcttgccacgaatcttgcaata

SEQ ID NO: 44793 - DNA, 25 bp, Canis familiaris
aaagttgcccacatctgtcagtgac

SEQ ID NO: 44794 - DNA, 25 bp, Canis familiaris
aacaggtcgccgcgagtcagagagc

SEQ ID NO: 44795 - DNA, 25 bp, Canis familiaris
aaactgcctgtggctaggtagcaac

SEQ ID NO: 44796 - DNA, 25 bp, Canis familiaris
aaagctgtcttggaagggcagtcaa

SEQ ID NO: 44797 - DNA, 25 bp, Canis familiaris
aaagctacattttggggcacctagg

SEQ ID NO: 44798 - DNA, 25 bp, Canis familiaris
aaagcatccttttagaggcctatct

SEQ ID NO: 44799 - DNA, 25 bp, Canis familiaris
aaagatcccagtcgcgatggcactt

SEQ ID NO: 44800 - DNA, 25 bp, Canis familiaris
aaagcagccatctttgctggatcat

SEQ ID NO: 44801 - DNA, 25 bp, Canis familiaris
aaagagctcatctctggtgattgca

SEQ ID NO: 44802 - DNA, 25 bp, Canis familiaris
aaagcgtgtgcatctgcttcatcga

SEQ ID NO: 44803 - DNA, 25 bp, Canis familiaris
aaagagtgtcattgtctcccagtgg

SEQ ID NO: 44804 - DNA, 25 bp, Canis familiaris
aaagagtgctctttgccagcacgtg

SEQ ID NO: 44805 - DNA, 25 bp, Canis familiaris
aaacgtgcatcgtggccaatgctgc

SEQ ID NO: 44806 - DNA, 25 bp, Canis familiaris
aaacgtcaggtgaaggcactggccc

SEQ ID NO: 44807 - DNA, 25 bp, Canis familiaris
aaacttcggaccataagtgctccct

SEQ ID NO: 44808 - DNA, 25 bp, Canis familiaris
aaagtacaggacgctcttgtccctc

SEQ ID NO: 44809 - DNA, 25 bp, Canis familiaris
aaagtcaagtctcccttgtgtctaa

SEQ ID NO: 44810 - DNA, 25 bp, Canis familiaris
aaagctttgtctctcttgtgataaa

SEQ ID NO: 44811 - DNA, 25 bp, Canis familiaris
aaagctgttgttgatctgaatggga

SEQ ID NO: 44812 - DNA, 25 bp, Canis familiaris
aaagctgcttttgatgtgaatagcc

SEQ ID NO: 44813 - DNA, 25 bp, Canis familiaris
aaagcccttgtgaacgagcatagac

SEQ ID NO: 44814 - DNA, 25 bp, Canis familiaris
aaagccctgctgctggaggctaagc

SEQ ID NO: 44815 - DNA, 25 bp, Canis familiaris
aaacccgggctgcaggatttcggca

SEQ ID NO: 44816 - DNA, 25 bp, Canis familiaris
aaagcatccgggctaaaattctgat

SEQ ID NO: 44817 - DNA, 25 bp, Canis familiaris
aaagcctgaagtctaaactgtctat

SEQ ID NO: 44818 - DNA, 25 bp, Canis familiaris
aaagcttgaagacagccccatgttc

SEQ ID NO: 44819 - DNA, 25 bp, Canis familiaris
aaagagtgagagcggcccacttgac

SEQ ID NO: 44820 - DNA, 25 bp, Canis familiaris
aaagagctgaagcccgcagctcctc

SEQ ID NO: 44821 - DNA, 25 bp, Canis familiaris
aaagagctacttgctgagcttgccc

SEQ ID NO: 44822 - DNA, 25 bp, Canis familiaris
aaagatctactcgaccagctagacc

SEQ ID NO: 44823 - DNA, 25 bp, Canis familiaris
aaagtatactcctcacatacggcta

SEQ ID NO: 44824 - DNA, 25 bp, Canis familiaris
aaagtcatccatgaccacttcggca

SEQ ID NO: 44825 - DNA, 25 bp, Canis familiaris
aaagttctctagtcaatcatttgga

SEQ ID NO: 44826 - DNA, 25 bp, Canis familiaris
aaagcttccagaccagttcaattga

SEQ ID NO: 44827 - DNA, 25 bp, Canis familiaris
aaagttgccagagatgcttcgaaag

SEQ ID NO: 44828 - DNA, 25 bp, Canis familiaris
aaagcggcaggagttggtcaccaag

SEQ ID NO: 44829 - DNA, 25 bp, Canis familiaris
aaagcactgtggttatagtcctaag

SEQ ID NO: 44830 - DNA, 25 bp, Canis familiaris
aaagcctgggagttagtattgaagt

SEQ ID NO: 44831 - DNA, 25 bp, Canis familiaris
aaagccccaggattaaagtagatgc

SEQ ID NO: 44832 - DNA, 25 bp, Canis familiaris
aaagccccaatcttacaagtgcggt

SEQ ID NO: 44833 - DNA, 25 bp, Canis familiaris
aactcccacagatcgaacgttggtc

SEQ ID NO: 44834 - DNA, 25 bp, Canis familiaris
aaaccccaataccatccagactggg

SEQ ID NO: 44835 - DNA, 25 bp, Canis familiaris
aaagcccctgtgtctgaaagacgcg

SEQ ID NO: 44836 - DNA, 25 bp, Canis familiaris
aaacctcctggacagaagaggaaga

SEQ ID NO: 44837 - DNA, 25 bp, Canis familiaris
aaaccaagccggcagaaattgaaag

SEQ ID NO: 44838 - DNA, 25 bp, Canis familiaris
aaagcttaccgggagaagattgaga

SEQ ID NO: 44839 - DNA, 25 bp, Canis familiaris
aaagttgtacagaccagaaattaag

SEQ ID NO: 44840 - DNA, 25 bp, Canis familiaris
aaagctagtgaatgccctaacttag

SEQ ID NO: 44841 - DNA, 25 bp, Canis familiaris
aaagccaaaagagccgagagccgag

SEQ ID NO: 44842 - DNA, 25 bp, Canis familiaris
aaaccaacctgtgccaggagccagg

SEQ ID NO: 44843 - DNA, 25 bp, Canis familiaris
aaaccaacctgtgccaggagccagg

SEQ ID NO: 44844 - DNA, 25 bp, Canis familiaris
aaacgggcctctatagtgtgccagg

SEQ ID NO: 44845 - DNA, 25 bp, Canis familiaris
aaactacccttcacagaatctatgg

SEQ ID NO: 44846 - DNA, 25 bp, Canis familiaris
aaacccgctttctggagacattagt

SEQ ID NO: 44847 - DNA, 25 bp, Canis familiaris
aaacctactaactgttgccatagca

SEQ ID NO: 44848 - DNA, 25 bp, Canis familiaris
aaaccatgactacaggggcgattgc

SEQ ID NO: 44849 - DNA, 25 bp, Canis familiaris
aaacaagtggcgccacgttctttgc

SEQ ID NO: 44850 - DNA, 25 bp, Canis familiaris
aaaagggtgcgtacggtctggatgc

SEQ ID NO: 44851 - DNA, 25 bp, Canis familiaris
aaactgtagtggtacctcttgcgtc

SEQ ID NO: 44852 - DNA, 25 bp, Canis familiaris
aaagtatagcttcactcacttgcct

SEQ ID NO: 44853 - DNA, 25 bp, Canis familiaris
aaagttctgttggtcacactgtctc

SEQ ID NO: 44854 - DNA, 25 bp, Canis familiaris
aaagttcttctggtctcagcaggct

SEQ ID NO: 44855 - DNA, 25 bp, Canis familiaris
aaactgtcagatcctgaccagcgcc

SEQ ID NO: 44856 - DNA, 25 bp, Canis familiaris
aaacgtacattcataagcacccaaa

SEQ ID NO: 44857 - DNA, 25 bp, Canis familiaris
aaagcttacttcagcatttcccaga

SEQ ID NO: 44858 - DNA, 25 bp, Canis familiaris
aaacttggtatcagattttcctctt

SEQ ID NO: 44859 - DNA, 25 bp, Canis familiaris
aaacttgtcaactgtcctttcttgt

SEQ ID NO: 44860 - DNA, 25 bp, Canis familiaris
aaactttgaagctgtgcctcactta

SEQ ID NO: 44861 - DNA, 25 bp, Canis familiaris
aaactcgtagactgtacaacaccaa

SEQ ID NO: 44862 - DNA, 25 bp, Canis familiaris
aacacccggaagcacaaacacaaag

SEQ ID NO: 44863 - DNA, 25 bp, Canis familiaris
aacacccggattgaatccaaccaag

SEQ ID NO: 44864 - DNA, 25 bp, Canis familiaris
aaaccagtcggtgcaatcaaaacac

SEQ ID NO: 44865 - DNA, 25 bp, Canis familiaris
aaaccacagcgttgccaaagaaaca

SEQ ID NO: 44866 - DNA, 25 bp, Canis familiaris
aaagatctactttgccaaggaaaca

SEQ ID NO: 44867 - DNA, 25 bp, Canis familiaris
aaagatctcctttgtctggtgaaaa

SEQ ID NO: 44868 - DNA, 25 bp, Canis familiaris
aaagattcatcccacctgggaaaat

SEQ ID NO: 44869 - DNA, 25 bp, Canis familiaris
aaagattcatcccaactggaaaaat

SEQ ID NO: 44870 - DNA, 25 bp, Canis familiaris
aaaacaccatgccatactggggaaa

SEQ ID NO: 44871 - DNA, 25 bp, Canis familiaris
aaaccctatccaacatggaccaact

SEQ ID NO: 44872 - DNA, 25 bp, Canis familiaris
aaaccgttcagaccatggacacttc

SEQ ID NO: 44873 - DNA, 25 bp, Canis familiaris
aaacctggctgccaggctggtacct

SEQ ID NO: 44874 - DNA, 25 bp, Canis familiaris
aaacctcaaggctcaggatcccata

SEQ ID NO: 44875 - DNA, 25 bp, Canis familiaris
aaagaactaggtgcaccacccacct

SEQ ID NO: 44876 - DNA, 25 bp, Canis familiaris
aaaaaggaagttgccatcccactct

SEQ ID NO: 44877 - DNA, 25 bp, Canis familiaris
aaagaaggacgaatgtcccgcccag

SEQ ID NO: 44878 - DNA, 25 bp, Canis familiaris
aaagcaaggaccaattcgccacttc

SEQ ID NO: 44879 - DNA, 25 bp, Canis familiaris
aaagcacagtgaggccactcaccac

SEQ ID NO: 44880 - DNA, 25 bp, Canis familiaris
aaagaactgcaggacttagccaccg

SEQ ID NO: 44881 - DNA, 25 bp, Canis familiaris
aaagaactggacgttgacctcctgg

SEQ ID NO: 44882 - DNA, 25 bp, Canis familiaris
aaagaacacgactgttcctccgtgc

SEQ ID NO: 44883 - DNA, 25 bp, Canis familiaris
aagagtagggttctgtcccctgtgt

SEQ ID NO: 44884 - DNA, 25 bp, Canis familiaris
aaagccaaagttctctacacctgat

SEQ ID NO: 44885 - DNA, 25 bp, Canis familiaris
aaacacggcaggtgttgtccgcttg

SEQ ID NO: 44886 - DNA, 25 bp, Canis familiaris
aaacctggagaatcctatccgactg

SEQ ID NO: 44887 - DNA, 25 bp, Canis familiaris
aaaccggggtgagctcagttaatga

SEQ ID NO: 44888 - DNA, 25 bp, Canis familiaris
aaactcggtaatctctcggattaat

SEQ ID NO: 44889 - DNA, 25 bp, Canis familiaris
aaactatggggcttttcatgtatta

SEQ ID NO: 44890 - DNA, 25 bp, Canis familiaris
aaacaggggtgcttcaacgtattgg

SEQ ID NO: 44891 - DNA, 25 bp, Canis familiaris
aaacacttggtgatgcagtcggtta

SEQ ID NO: 44892 - DNA, 25 bp, Canis familiaris
aaacccagggctggcaatcgtctgt

SEQ ID NO: 44893 - DNA, 25 bp, Canis familiaris
aaagcccagcagtgctgaatcccgc

SEQ ID NO: 44894 - DNA, 25 bp, Canis familiaris
aaaccagcacagtggaggcctgctt

SEQ ID NO: 44895 - DNA, 25 bp, Canis familiaris
aaaccccagttgtggactttcgctg

SEQ ID NO: 44896 - DNA, 25 bp, Canis familiaris
aaaatcctcgggtgtaggcttcagg

SEQ ID NO: 44897 - DNA, 25 bp, Canis familiaris
aaacatcccatgggttgttggattc

SEQ ID NO: 44898 - DNA, 25 bp, Canis familiaris
aaaccccagcttgctttggtatgga

SEQ ID NO: 44899 - DNA, 25 bp, Canis familiaris
aaagcactccacatccgattagtat

SEQ ID NO: 44900 - DNA, 25 bp, Canis familiaris
aaaccgccaactgagactgcgttcc

SEQ ID NO: 44901 - DNA, 25 bp, Canis familiaris
aaactgggccttgaactcttccagc

SEQ ID NO: 44902 - DNA, 25 bp, Canis familiaris
aaacgggtcatttacactatccacg

SEQ ID NO: 44903 - DNA, 25 bp, Canis familiaris
aaacgggtcatttacactatccacg

SEQ ID NO: 44904 - DNA, 25 bp, Canis familiaris
aaacgggtcatttacactatccacg

SEQ ID NO: 44905 - DNA, 25 bp, Canis familiaris
aaacgttgcttataatccccagctg

SEQ ID NO: 44906 - DNA, 25 bp, Canis familiaris
aaacgtttgacaccaattccgctgt

SEQ ID NO: 44907 - DNA, 25 bp, Canis familiaris
aaaccttgtgtctcaatttggctac

SEQ ID NO: 44908 - DNA, 25 bp, Canis familiaris
aaagctgttggtctctatttgtcat

SEQ ID NO: 44909 - DNA, 25 bp, Canis familiaris
aaagatgtatttctctatgatttga

SEQ ID NO: 44910 - DNA, 25 bp, Canis familiaris
aaagaattattgtacatgtgatttt

SEQ ID NO: 44911 - DNA, 25 bp, Canis familiaris
aaagaagttctacctctgcttgttt

SEQ ID NO: 44912 - DNA, 25 bp, Canis familiaris
aaagaactgggacgtctgcgtggct

SEQ ID NO: 44913 - DNA, 25 bp, Canis familiaris
aaaaatcgaggtcttgcggtctcca

SEQ ID NO: 44914 - DNA, 25 bp, Canis familiaris
aaaaggctgagctgcttgccggttc

SEQ ID NO: 44915 - DNA, 25 bp, Canis familiaris
aaagaccagagctcgattcgatgtt

SEQ ID NO: 44916 - DNA, 25 bp, Canis familiaris
aaagcccagacctgatgaactttct

SEQ ID NO: 44917 - DNA, 25 bp, Canis familiaris
aaagcttcagccccagataactatg

SEQ ID NO: 44918 - DNA, 25 bp, Canis familiaris
aaagcttcagaacatgataaccaga

SEQ ID NO: 44919 - DNA, 25 bp, Canis familiaris
aaagcttcagactctagacattagt

SEQ ID NO: 44920 - DNA, 25 bp, Canis familiaris
aaagcactgcagccacactggattt

SEQ ID NO: 44921 - DNA, 25 bp, Canis familiaris
aaagcactgagacatgttcattttc

SEQ ID NO: 44922 - DNA, 25 bp, Canis familiaris
aaagattgaatggtttccctctctc

SEQ ID NO: 44923 - DNA, 25 bp, Canis familiaris
aaaaatagattgcgacccttgccat

SEQ ID NO: 44924 - DNA, 25 bp, Canis familiaris
aaagaaagattgagcccctctgtcc

SEQ ID NO: 44925 - DNA, 25 bp, Canis familiaris
aaagaaagataagcaaaccttcata

SEQ ID NO: 44926 - DNA, 25 bp, Canis familiaris
aaaccactgaaaccaaatccatgtc

SEQ ID NO: 44927 - DNA, 25 bp, Canis familiaris
aagaaaaaatcaccggcacctgtag

SEQ ID NO: 44928 - DNA, 25 bp, Canis familiaris
aaagacgaaccacctggagctctgt

SEQ ID NO: 44929 - DNA, 25 bp, Canis familiaris
aaacatcggacttcctcaaggtgct

SEQ ID NO: 44930 - DNA, 25 bp, Canis familiaris
aatactccagactatgccggggata

SEQ ID NO: 44931 - DNA, 25 bp, Canis familiaris
aaagcactaatcttccatggggata

SEQ ID NO: 44932 - DNA, 25 bp, Canis familiaris
aaagcccagatcttagctggaggaa

SEQ ID NO: 44933 - DNA, 25 bp, Canis familiaris
aaagcccaactgtatgggcaaataa

SEQ ID NO: 44934 - DNA, 25 bp, Canis familiaris
aaagcccagagcacagtagaactaa

SEQ ID NO: 44935 - DNA, 25 bp, Canis familiaris
aaaccacgactatgctatcaacacc

SEQ ID NO: 44936 - DNA, 25 bp, Canis familiaris
aaagcccaaatatgtgttccaatca

SEQ ID NO: 44937 - DNA, 25 bp, Canis familiaris
aacaaatcaaaatggttcacaccac

SEQ ID NO: 44938 - DNA, 25 bp, Canis familiaris
aaaaaatcaaatctttcctgccacg

SEQ ID NO: 44939 - DNA, 25 bp, Canis familiaris
aaagaaaaactgcacttgctctccc

SEQ ID NO: 44940 - DNA, 25 bp, Canis familiaris
aaagacaagagagcaacctccccag

SEQ ID NO: 44941 - DNA, 25 bp, Canis familiaris
aaaccaacagaaaaattgactccag

SEQ ID NO: 44942 - DNA, 25 bp, Canis familiaris
aaaccgagcaggagtatagcatttc

SEQ ID NO: 44943 - DNA, 25 bp, Canis familiaris
aaagcttgagggtggatggtttgca

SEQ ID NO: 44944 - DNA, 25 bp, Canis familiaris
aaagcttgagctcgttggctatttt

SEQ ID NO: 44945 - DNA, 25 bp, Canis familiaris
aaagcatatgttcgactggctcctg

SEQ ID NO: 44946 - DNA, 25 bp, Canis familiaris
aaagatgatactccaggtctgccag

SEQ ID NO: 44947 - DNA, 25 bp, Canis familiaris
aaagagatacgccaggtctgccagt

SEQ ID NO: 44948 - DNA, 25 bp, Canis familiaris
aaagagatacgccaggtctgccagt

SEQ ID NO: 44949 - DNA, 25 bp, Canis familiaris
aaagagatacgccaggtctgccagt

SEQ ID NO: 44950 - DNA, 25 bp, Canis familiaris
aaagaagatgcaccctgtgctgccg

SEQ ID NO: 44951 - DNA, 25 bp, Canis familiaris
aaagaagaggctgcttgctgctccc

SEQ ID NO: 44952 - DNA, 25 bp, Canis familiaris
aaagaaaacatctctgctctagcct

SEQ ID NO: 44953 - DNA, 25 bp, Canis familiaris
aaagaatgttcctgcctcattccat

SEQ ID NO: 44954 - DNA, 25 bp, Canis familiaris
aaagaacttctctgcatctcaatgc

SEQ ID NO: 44955 - DNA, 25 bp, Canis familiaris
aaagacacttctgagccataaaaat

SEQ ID NO: 44956 - DNA, 25 bp, Canis familiaris
aaagcacgcattccaagcactgagt

SEQ ID NO: 44957 - DNA, 25 bp, Canis familiaris
aaagcacgaggccgaaatgaggacc

SEQ ID NO: 44958 - DNA, 25 bp, Canis familiaris
aaagcaaacgcaaagaagcacccta

SEQ ID NO: 44959 - DNA, 25 bp, Canis familiaris
aaagaagacgctcgcagatacactc

SEQ ID NO: 44960 - DNA, 25 bp, Canis familiaris
aaagaagagcctcagacgcatctgc

SEQ ID NO: 44961 - DNA, 25 bp, Canis familiaris
aaagagacaccaccagagctctgta

SEQ ID NO: 44962 - DNA, 25 bp, Canis familiaris
aaagcagcagatggaccaagcagtc

SEQ ID NO: 44963 - DNA, 25 bp, Canis familiaris
aaagcatcaacaacagcaaactcta

SEQ ID NO: 44964 - DNA, 25 bp, Canis familiaris
aaagcacacacaatagcaactacaa

SEQ ID NO: 44965 - DNA, 25 bp, Canis familiaris
aaaccatctcacaagccatgctgaa

SEQ ID NO: 44966 - DNA, 25 bp, Canis familiaris
aaacgtctctgtaggtctgaccttc

SEQ ID NO: 44967 - DNA, 25 bp, Canis familiaris
aaacgtctcttgtgtagcaactttt

SEQ ID NO: 44968 - DNA, 25 bp, Canis familiaris
aaagctgtctttcaaaacctgattt

SEQ ID NO: 44969 - DNA, 25 bp, Canis familiaris
aacacggatttctaccagaccagtt

SEQ ID NO: 44970 - DNA, 25 bp, Canis familiaris
aaagcagtgttttaccaaggattag

SEQ ID NO: 44971 - DNA, 25 bp, Canis familiaris
aaacattttctctacttaggcactt

SEQ ID NO: 44972 - DNA, 25 bp, Canis familiaris
aaactggacctcaactctgatggca

SEQ ID NO: 44973 - DNA, 25 bp, Canis familiaris
aaagcagttcctaatgccttggcat

SEQ ID NO: 44974 - DNA, 25 bp, Canis familiaris
aaagagttcctgaatatccgcgtcc

SEQ ID NO: 44975 - DNA, 25 bp, Canis familiaris
aaagagctttcttgaactagtgttg

SEQ ID NO: 44976 - DNA, 25 bp, Canis familiaris
aaaccttttctcaacttgtgctgtt

SEQ ID NO: 44977 - DNA, 25 bp, Canis familiaris
aaagcctttcaagtgagcctggctg

SEQ ID NO: 44978 - DNA, 25 bp, Canis familiaris
aaagcatctttgccaggacctggtt

SEQ ID NO: 44979 - DNA, 25 bp, Canis familiaris
aaactgctggtgccaggaaagattc

SEQ ID NO: 44980 - DNA, 25 bp, Canis familiaris
aaagcagcagcgagaggccgagttc

SEQ ID NO: 44981 - DNA, 25 bp, Canis familiaris
aaagcacctaagagcccagaactca

SEQ ID NO: 44982 - DNA, 25 bp, Canis familiaris
aacgggctactaaggcctgcgacta

SEQ ID NO: 44983 - DNA, 25 bp, Canis familiaris
aaagaggcaattagtccccgactag

SEQ ID NO: 44984 - DNA, 25 bp, Canis familiaris
aaaaggaattagatcactacaatag

SEQ ID NO: 44985 - DNA, 25 bp, Canis familiaris
aaagcaggatacaaattatttcaaa

SEQ ID NO: 44986 - DNA, 25 bp, Canis familiaris
aaagccgataatgcagttttaaata

SEQ ID NO: 44987 - DNA, 25 bp, Canis familiaris
aaagccgctagaacagccttatttg

SEQ ID NO: 44988 - DNA, 25 bp, Canis familiaris
aaagcagccaggagacctaatttgg

SEQ ID NO: 44989 - DNA, 25 bp, Canis familiaris
aaagagacagtgatgttggaacttg

SEQ ID NO: 44990 - DNA, 25 bp, Canis familiaris
aaagcaagctgaacattctgaaact

SEQ ID NO: 44991 - DNA, 25 bp, Canis familiaris
aaaccagctgacttcagtgagcaga

SEQ ID NO: 44992 - DNA, 25 bp, Canis familiaris
aaagcaatctaggtcacgagcacag

SEQ ID NO: 44993 - DNA, 25 bp, Canis familiaris
aaagacattcagatgcccagacggc

SEQ ID NO: 44994 - DNA, 25 bp, Canis familiaris
aaagacgtgtgcaggctcacaggcc

SEQ ID NO: 44995 - DNA, 25 bp, Canis familiaris
aaagacctgtcaaagcatacaattc

SEQ ID NO: 44996 - DNA, 25 bp, Canis familiaris
aaagctcactaaacacatccaatat

SEQ ID NO: 44997 - DNA, 25 bp, Canis familiaris
aaagccatttggtcacaatcaatct

SEQ ID NO: 44998 - DNA, 25 bp, Canis familiaris
aaagctcaaggagcgcattgatact

SEQ ID NO: 44999 - DNA, 25 bp, Canis familiaris
aaagcaacacgagctctctgtactc

SEQ ID NO: 45000 - DNA, 25 bp, Canis familiaris
aaagaatccatgttcacctgttgcc

SEQ ID NO: 45001 - DNA, 25 bp, Canis familiaris
aaagagtcttgattttctgtgctac

SEQ ID NO: 45002 - DNA, 25 bp, Canis familiaris
aaagcatgtattttattcattctaa

SEQ ID NO: 45003 - DNA, 25 bp, Canis familiaris
aaagcagtcacttttcttgtgctaa

SEQ ID NO: 45004 - DNA, 25 bp, Canis familiaris
aaagcacgacattttgctgtttaca

SEQ ID NO: 45005 - DNA, 25 bp, Canis familiaris
aaagcctgagccctggcgttaataa

SEQ ID NO: 45006 - DNA, 25 bp, Canis familiaris
aaagctctgcaggacaagccttaaa

SEQ ID NO: 45007 - DNA, 25 bp, Canis familiaris
aaacttgaagccaccataaatgaat

SEQ ID NO: 45008 - DNA, 25 bp, Canis familiaris
aaagctgtagtcaaaccataaaatt

SEQ ID NO: 45009 - DNA, 25 bp, Canis familiaris
aaagcggatgataaaacagatattt

SEQ ID NO: 45010 - DNA, 25 bp, Canis familiaris
aaagcttagtatagagacaatttta

SEQ ID NO: 45011 - DNA, 25 bp, Canis familiaris
aaagctctactttgagcgcatattt

SEQ ID NO: 45012 - DNA, 25 bp, Canis familiaris
aaagctcacccttgggtatctcttc

SEQ ID NO: 45013 - DNA, 25 bp, Canis familiaris
aaagctcacctttgtggatttcctc

SEQ ID NO: 45014 - DNA, 25 bp, Canis familiaris
aaagacatcctggagttattcccca

SEQ ID NO: 45015 - DNA, 25 bp, Canis familiaris
aaagactgcctatgcatgtgcaccc

SEQ ID NO: 45016 - DNA, 25 bp, Canis familiaris
aaagacatgcagtactgtgccgcgc

SEQ ID NO: 45017 - DNA, 25 bp, Canis familiaris
aaagaatcatgatctatacgcaacc

SEQ ID NO: 45018 - DNA, 25 bp, Canis familiaris
aaagcctctatacatactaaccaat

SEQ ID NO: 45019 - DNA, 25 bp, Canis familiaris
aaagactcaaacatacaacaacaaa

SEQ ID NO: 45020 - DNA, 25 bp, Canis familiaris
aaaccaaagactcaaacatacaaca

SEQ ID NO: 45021 - DNA, 25 bp, Canis familiaris
aaagcttaagaaccattgacatact

SEQ ID NO: 45022 - DNA, 25 bp, Canis familiaris
aaagctgttaaattattcatctact

SEQ ID NO: 45023 - DNA, 25 bp, Canis familiaris
aaagctgcttactctgttcttattc

SEQ ID NO: 45024 - DNA, 25 bp, Canis familiaris
aaactgttcacttggctttaatcta

SEQ ID NO: 45025 - DNA, 25 bp, Canis familiaris
aaaccactactatgcattttgtaag

SEQ ID NO: 45026 - DNA, 25 bp, Canis familiaris
aaacggctgacaacgtattggtatt

SEQ ID NO: 45027 - DNA, 25 bp, Canis familiaris
aaactggctgaaacggaggagacag

SEQ ID NO: 45028 - DNA, 25 bp, Canis familiaris
aaacttgagccaactggtccaacag

SEQ ID NO: 45029 - DNA, 25 bp, Canis familiaris
aaacggaggaactatgtcaaacatc

SEQ ID NO: 45030 - DNA, 25 bp, Canis familiaris
aaaccaagagaacaggatatgaatc

SEQ ID NO: 45031 - DNA, 25 bp, Canis familiaris
aaagcccccaaccaggatatgtgtg

SEQ ID NO: 45032 - DNA, 25 bp, Canis familiaris
aaagctacccatttaatgtttgtca

SEQ ID NO: 45033 - DNA, 25 bp, Canis familiaris
aaactgtttatggtattttcgtgca

SEQ ID NO: 45034 - DNA, 25 bp, Canis familiaris
aaactgttgctatttcctaacctgc

SEQ ID NO: 45035 - DNA, 25 bp, Canis familiaris
aaactttgactcctacataatcccg

SEQ ID NO: 45036 - DNA, 25 bp, Canis familiaris
aaactttgactcctacataatccca

SEQ ID NO: 45037 - DNA, 25 bp, Canis familiaris
aaactatgtttcctaatcaaccaat

SEQ ID NO: 45038 - DNA, 25 bp, Canis familiaris
aaacctgttgtcttaagacctctat

SEQ ID NO: 45039 - DNA, 25 bp, Canis familiaris
aaacgtgtttctagattgaccttgt

SEQ ID NO: 45040 - DNA, 25 bp, Canis familiaris
aaactcccgtctagcaggatactgt

SEQ ID NO: 45041 - DNA, 25 bp, Canis familiaris
aaacaccgcgcgggcgcaatgacta

SEQ ID NO: 45042 - DNA, 25 bp, Canis familiaris
aaagcagccaggccaagcggaactg

SEQ ID NO: 45043 - DNA, 25 bp, Canis familiaris
aaagcagctgcatgagcaagcccat

SEQ ID NO: 45044 - DNA, 25 bp, Canis familiaris
aaagcatctgcatgtgaacaccatc

SEQ ID NO: 45045 - DNA, 25 bp, Canis familiaris
aaagcattccgatacacaatctccc

SEQ ID NO: 45046 - DNA, 25 bp, Canis familiaris
aaagaatcagcctcacagcagctct

SEQ ID NO: 45047 - DNA, 25 bp, Canis familiaris
aaagaatactcattgcagcagcctt

SEQ ID NO: 45048 - DNA, 25 bp, Canis familiaris
aaagcttcactgtgcagagcctttt

SEQ ID NO: 45049 - DNA, 25 bp, Canis familiaris
aaagcttccagcaagggctctgttg

SEQ ID NO: 45050 - DNA, 25 bp, Canis familiaris
aaagctatccaggcggaattgctga

SEQ ID NO: 45051 - DNA, 25 bp, Canis familiaris
aaagctaccatcgtgtggcagagga

SEQ ID NO: 45052 - DNA, 25 bp, Canis familiaris
aaagcatgaccattcttcctagaaa

SEQ ID NO: 45053 - DNA, 25 bp, Canis familiaris
aaagctatgcctattctctaaagaa

SEQ ID NO: 45054 - DNA, 25 bp, Canis familiaris
aaagcagtcccaaatgttaaaatca

SEQ ID NO: 45055 - DNA, 25 bp, Canis familiaris
aaagcagccaaccatctttcaaaat

SEQ ID NO: 45056 - DNA, 25 bp, Canis familiaris
aaagcagccatagacagtgtataaa

SEQ ID NO: 45057 - DNA, 25 bp, Canis familiaris
aaagcgcattatgacattgccaaca

SEQ ID NO: 45058 - DNA, 25 bp, Canis familiaris
aaagcaagtatttcatgggcactcc

SEQ ID NO: 45059 - DNA, 25 bp, Canis familiaris
aaaccaggttccaagacactgccag

SEQ ID NO: 45060 - DNA, 25 bp, Canis familiaris
aaaccactgttgataccactgcaaa

SEQ ID NO: 45061 - DNA, 25 bp, Canis familiaris
aaaccacatgagatatcccctcaca

SEQ ID NO: 45062 - DNA, 25 bp, Canis familiaris
aaaccagagcagatgagacacctaa

SEQ ID NO: 45063 - DNA, 25 bp, Canis familiaris
aaaccaggcatgtttgtccacataa

SEQ ID NO: 45064 - DNA, 25 bp, Canis familiaris
aaacttcctttcatggcaatagcac

SEQ ID NO: 45065 - DNA, 25 bp, Canis familiaris
aaacatggactttcttaggaccctg

SEQ ID NO: 45066 - DNA, 25 bp, Canis familiaris
aaagctggatcagtcgctgtcggag

SEQ ID NO: 45067 - DNA, 25 bp, Canis familiaris
aaagcgtgagcattgctgtgtgtgg

SEQ ID NO: 45068 - DNA, 25 bp, Canis familiaris
aaagcagcggccgtgattgtgcgct

SEQ ID NO: 45069 - DNA, 25 bp, Canis familiaris
aaagcggcgccgattgtgatgcatt

SEQ ID NO: 45070 - DNA, 25 bp, Canis familiaris
aaagcgacagctcgagattgcccaa

SEQ ID NO: 45071 - DNA, 25 bp, Canis familiaris
aaagcgccacatcgagttgttctac

SEQ ID NO: 45072 - DNA, 25 bp, Canis familiaris
aaagcagacacatgacattttttca

SEQ ID NO: 45073 - DNA, 25 bp, Canis familiaris
aaagctggctgcaagaatttcttct

SEQ ID NO: 45074 - DNA, 25 bp, Canis familiaris
aaagcagagccaaggtttaactagg

SEQ ID NO: 45075 - DNA, 25 bp, Canis familiaris
aaaatgatctaagggttgaaacaag

SEQ ID NO: 45076 - DNA, 25 bp, Canis familiaris
aaaaatctcaactcttgcaaattaa

SEQ ID NO: 45077 - DNA, 25 bp, Canis familiaris
aaacaactgcatttacttgaagtgc

SEQ ID NO: 45078 - DNA, 25 bp, Canis familiaris
aaaaattgcattagagcacggagtc

SEQ ID NO: 45079 - DNA, 25 bp, Canis familiaris
aaaagtctgttcatgcacggtcggt

SEQ ID NO: 45080 - DNA, 25 bp, Canis familiaris
aaaaggtgctacagacgctgggcgc

SEQ ID NO: 45081 - DNA, 25 bp, Canis familiaris
aaagcaagtctaaggttcgaacagc

SEQ ID NO: 45082 - DNA, 25 bp, Canis familiaris
aaagcatatttactgtttccaacca

SEQ ID NO: 45083 - DNA, 25 bp, Canis familiaris
aaagcagctctaaagtggtccgcca

SEQ ID NO: 45084 - DNA, 25 bp, Canis familiaris
aaacatgtcgatgagggtccggcgc

SEQ ID NO: 45085 - DNA, 25 bp, Canis familiaris
aaaacaagagggctgtccgccgtct

SEQ ID NO: 45086 - DNA, 25 bp, Canis familiaris
aaaagcaaagagatttacaggtgta

SEQ ID NO: 45087 - DNA, 25 bp, Canis familiaris
aaaccactaattattcacagttgtt

SEQ ID NO: 45088 - DNA, 25 bp, Canis familiaris
aaagccacttttacaatccaagagt

SEQ ID NO: 45089 - DNA, 25 bp, Canis familiaris
aaagcctcttcttcccacaagagga

SEQ ID NO: 45090 - DNA, 25 bp, Canis familiaris
aaagccctttgttataggagatgga

SEQ ID NO: 45091 - DNA, 25 bp, Canis familiaris
aaacccctgattttgacccatgagg

SEQ ID NO: 45092 - DNA, 25 bp, Canis familiaris
aaagccttctgaggagaacaccaag

SEQ ID NO: 45093 - DNA, 25 bp, Canis familiaris
aaaccttctggaaaacattcaccat

SEQ ID NO: 45094 - DNA, 25 bp, Canis familiaris
aaaccttgcttggacatcaggtacc

SEQ ID NO: 45095 - DNA, 25 bp, Canis familiaris
aaacctgtgtgctgtccagggagcc

SEQ ID NO: 45096 - DNA, 25 bp, Canis familiaris
aaacaggtggcaagctcgatttagc

SEQ ID NO: 45097 - DNA, 25 bp, Canis familiaris
aaaaggggacctagagcatccactc

SEQ ID NO: 45098 - DNA, 25 bp, Canis familiaris
aaacggcggtatagtgacctcactc

SEQ ID NO: 45099 - DNA, 25 bp, Canis familiaris
aaacggcgagatgactgaccgctac

SEQ ID NO: 45100 - DNA, 25 bp, Canis familiaris
aaagcctctagattgcaggaccctc

SEQ ID NO: 45101 - DNA, 25 bp, Canis familiaris
aaagccattatttcatggcactcct

SEQ ID NO: 45102 - DNA, 25 bp, Canis familiaris
aaagcctttcattatgtgcagctct

SEQ ID NO: 45103 - DNA, 25 bp, Canis familiaris
aaagcccttacatttgatgcatttt

SEQ ID NO: 45104 - DNA, 25 bp, Canis familiaris
aaagcctttttgttgagattctact

SEQ ID NO: 45105 - DNA, 25 bp, Canis familiaris
aaaccatttttatgtggtctgaata

SEQ ID NO: 45106 - DNA, 25 bp, Canis familiaris
aaactatctgttcatgggcgactat

SEQ ID NO: 45107 - DNA, 25 bp, Canis familiaris
aaacttgctggggtgaccgagctca

SEQ ID NO: 45108 - DNA, 25 bp, Canis familiaris
aaactatgggtggctactgcggcta

SEQ ID NO: 45109 - DNA, 25 bp, Canis familiaris
aaactggaggtgactgagcccctgt

SEQ ID NO: 45110 - DNA, 25 bp, Canis familiaris
aaactgcggaggaatggatcccatt

SEQ ID NO: 45111 - DNA, 25 bp, Canis familiaris
aaactggggctgacagcacatccca

SEQ ID NO: 45112 - DNA, 25 bp, Canis familiaris
aaagcaagtgctgtcagcaatatcc

SEQ ID NO: 45113 - DNA, 25 bp, Canis familiaris
aaagcacatactcctcaagttcaca

SEQ ID NO: 45114 - DNA, 25 bp, Canis familiaris
aaaatatttcctcagtccagcaaga

SEQ ID NO: 45115 - DNA, 25 bp, Canis familiaris
aaagcttttaccaaggccacagtga

SEQ ID NO: 45116 - DNA, 25 bp, Canis familiaris
aaagctttctgcatcaactggaggt

SEQ ID NO: 45117 - DNA, 25 bp, Canis familiaris
aaacatctattgctaagctaaagaa

SEQ ID NO: 45118 - DNA, 25 bp, Canis familiaris
aacacttaagcaccacgtggaaaat

SEQ ID NO: 45119 - DNA, 25 bp, Canis familiaris
aaacttcatgaagactgggagatgt

SEQ ID NO: 45120 - DNA, 25 bp, Canis familiaris
aaacctgcaaaggactgggcctgcc

SEQ ID NO: 45121 - DNA, 25 bp, Canis familiaris
aaagcctggagcctgacgaggccat

SEQ ID NO: 45122 - DNA, 25 bp, Canis familiaris
aaagcttgaagtcgacagtgcccat

SEQ ID NO: 45123 - DNA, 25 bp, Canis familiaris
aaagcatttcacaaggcattggcct

SEQ ID NO: 45124 - DNA, 25 bp, Canis familiaris
aaacatgattacaggcacatctcag

SEQ ID NO: 45125 - DNA, 25 bp, Canis familiaris
aaagctgcatgatgcttgggccctg

SEQ ID NO: 45126 - DNA, 25 bp, Canis familiaris
aaagccatgttgagtggcccaggtc

SEQ ID NO: 45127 - DNA, 25 bp, Canis familiaris
aaaccacccatggatggtccaggat

SEQ ID NO: 45128 - DNA, 25 bp, Canis familiaris
aaagcaaccaagatggtcatcggaa

SEQ ID NO: 45129 - DNA, 25 bp, Canis familiaris
aaagctatctcattgcagtgtcctc

SEQ ID NO: 45130 - DNA, 25 bp, Canis familiaris
aaagcgatctaggcagttgctgctt

SEQ ID NO: 45131 - DNA, 25 bp, Canis familiaris
aaagcgtatgaccatttcacttgat

SEQ ID NO: 45132 - DNA, 25 bp, Canis familiaris
aaagcagatcagtgcatcttccttg

SEQ ID NO: 45133 - DNA, 25 bp, Canis familiaris
aaacgctgagcaagatctacctgtc

SEQ ID NO: 45134 - DNA, 25 bp, Canis familiaris
aaagctgtactgtttcacactgagc

SEQ ID NO: 45135 - DNA, 25 bp, Canis familiaris
aaagctgaaatggtacatactgttg

SEQ ID NO: 45136 - DNA, 25 bp, Canis familiaris
aaagctgacatatttcaataatttg

SEQ ID NO: 45137 - DNA, 25 bp, Canis familiaris
aaagctataataatcaagacagtgt

SEQ ID NO: 45138 - DNA, 25 bp, Canis familiaris
aaagctatgtcaaatgaactcagtt

SEQ ID NO: 45139 - DNA, 25 bp, Canis familiaris
aaagctatctcaaggctactcagcc

SEQ ID NO: 45140 - DNA, 25 bp, Canis familiaris
aaagcaatctcaactctttctgcac

SEQ ID NO: 45141 - DNA, 25 bp, Canis familiaris
aaacctgcatcacgatgccttctgc

SEQ ID NO: 45142 - DNA, 25 bp, Canis familiaris
aaagcagagcatggggcagcctcgc

SEQ ID NO: 45143 - DNA, 25 bp, Canis familiaris
aaagcatgagctctggcgtcatctg

SEQ ID NO: 45144 - DNA, 25 bp, Canis familiaris
aaagctgagatcgtgggtcttgcct

SEQ ID NO: 45145 - DNA, 25 bp, Canis familiaris
aaactagacttgtctttccgctcga

SEQ ID NO: 45146 - DNA, 25 bp, Canis familiaris
aaagccaggttggattttctgccca

SEQ ID NO: 45147 - DNA, 25 bp, Canis familiaris
aaagccacagttaaatactgtccct

SEQ ID NO: 45148 - DNA, 25 bp, Canis familiaris
aaaccatctttaaatgactgctgcc

SEQ ID NO: 45149 - DNA, 25 bp, Canis familiaris
aaaccacatcatcaggaacagacct

SEQ ID NO: 45150 - DNA, 25 bp, Canis familiaris
aaagcagccagcctaggaagcagca

SEQ ID NO: 45151 - DNA, 25 bp, Canis familiaris
aaagcaccagcatcagtggagacat

SEQ ID NO: 45152 - DNA, 25 bp, Canis familiaris
aaagccatcacatctctcatgagat

SEQ ID NO: 45153 - DNA, 25 bp, Canis familiaris
aaacacatctagacttcatcaaacc

SEQ ID NO: 45154 - DNA, 25 bp, Canis familiaris
aaaccagctgaacctaatagacatc

SEQ ID NO: 45155 - DNA, 25 bp, Canis familiaris
aaactttgagaggtaattacatagt

SEQ ID NO: 45156 - DNA, 25 bp, Canis familiaris
aaactggtgcagtgtctatggacaa

SEQ ID NO: 45157 - DNA, 25 bp, Canis familiaris
aaagctggccctggactatggaatc

SEQ ID NO: 45158 - DNA, 25 bp, Canis familiaris
aaacgccacatgggacttgtcactc

SEQ ID NO: 45159 - DNA, 25 bp, Canis familiaris
aaacggatgagttgcaatttccctc

SEQ ID NO: 45160 - DNA, 25 bp, Canis familiaris
aaagctgggaggtaaactctcctct

SEQ ID NO: 45161 - DNA, 25 bp, Canis familiaris
aaagcagaggagctcaacgcctgcc

SEQ ID NO: 45162 - DNA, 25 bp, Canis familiaris
aaagcgatgtgaggacaccgtccta

SEQ ID NO: 45163 - DNA, 25 bp, Canis familiaris
aaagcacctgggaagctcagtcagt

SEQ ID NO: 45164 - DNA, 25 bp, Canis familiaris
aaagccgtggagaatgtgctaagtg

SEQ ID NO: 45165 - DNA, 25 bp, Canis familiaris
aaagccgtggcagcgtggagagcct

SEQ ID NO: 45166 - DNA, 25 bp, Canis familiaris
aaagctctgcttggcctgtgaagca

SEQ ID NO: 45167 - DNA, 25 bp, Canis familiaris
aaagcatctgtttcacttacactac

SEQ ID NO: 45168 - DNA, 25 bp, Canis familiaris
aaagcatcatttaatttccagtttt

SEQ ID NO: 45169 - DNA, 25 bp, Canis familiaris
aaagctctgcttaatttagagtttg

SEQ ID NO: 45170 - DNA, 25 bp, Canis familiaris
aaagcatctaaatcacttgagtatt

SEQ ID NO: 45171 - DNA, 25 bp, Canis familiaris
aaagctctgaaatactcattttttt

SEQ ID NO: 45172 - DNA, 25 bp, Canis familiaris
aaactgctagaatggccttcttttg

SEQ ID NO: 45173 - DNA, 25 bp, Canis familiaris
aaagctctgctatgggcagcttcat

SEQ ID NO: 45174 - DNA, 25 bp, Canis familiaris
aaagctggtacgcctgcaggtaccg

SEQ ID NO: 45175 - DNA, 25 bp, Canis familiaris
aaagcatgctgtaccgccagagttc

SEQ ID NO: 45176 - DNA, 25 bp, Canis familiaris
aaagcattgtaccggagagctcaag

SEQ ID NO: 45177 - DNA, 25 bp, Canis familiaris
aaagcatctctacagtatagcacaa

SEQ ID NO: 45178 - DNA, 25 bp, Canis familiaris
aaagcctaaatgacatgacagcaaa

SEQ ID NO: 45179 - DNA, 25 bp, Canis familiaris
aaaccatagcatttcagaacatgaa

SEQ ID NO: 45180 - DNA, 25 bp, Canis familiaris
aaagctccacatgtattcatctgaa

SEQ ID NO: 45181 - DNA, 25 bp, Canis familiaris
aaagctgcagccagtgattccagag

SEQ ID NO: 45182 - DNA, 25 bp, Canis familiaris
aaagctgcaccagagaatccacacc

SEQ ID NO: 45183 - DNA, 25 bp, Canis familiaris
aaagctaaagatccacatcccagcc

SEQ ID NO: 45184 - DNA, 25 bp, Canis familiaris
aaagctctaataccatcatcccagg

SEQ ID NO: 45185 - DNA, 25 bp, Canis familiaris
aaagcctagcattaaattccaggag

SEQ ID NO: 45186 - DNA, 25 bp, Canis familiaris
aaagcccaaaagtcatgtccattga

SEQ ID NO: 45187 - DNA, 25 bp, Canis familiaris
aaactgccagaaatactttttgaga

SEQ ID NO: 45188 - DNA, 25 bp, Canis familiaris
aaagccagagccatctttctatctg

SEQ ID NO: 45189 - DNA, 25 bp, Canis familiaris
aaagctcaagcaaatgttttttcat

SEQ ID NO: 45190 - DNA, 25 bp, Canis familiaris
aaagcattggcaaattttgtgttat

SEQ ID NO: 45191 - DNA, 25 bp, Canis familiaris
aaagctcatgagaactctatttgta

SEQ ID NO: 45192 - DNA, 25 bp, Canis familiaris
aaagcagcagttccgctttatctat

SEQ ID NO: 45193 - DNA, 25 bp, Canis familiaris
aaagctcatttggccttgttctgct

SEQ ID NO: 45194 - DNA, 25 bp, Canis familiaris
aaactatcatgtagactttgtcatt

SEQ ID NO: 45195 - DNA, 25 bp, Canis familiaris
aaagccattgaatcatttatgcatg

SEQ ID NO: 45196 - DNA, 25 bp, Canis familiaris
aaaccttgatgcttctttaatgaca

SEQ ID NO: 45197 - DNA, 25 bp, Canis familiaris
aaagcctggtacctgcattgcaatg

SEQ ID NO: 45198 - DNA, 25 bp, Canis familiaris
aaaccgagaatcccattggagggca

SEQ ID NO: 45199 - DNA, 25 bp, Canis familiaris
aaaccgagcttctcgggagctgcct

SEQ ID NO: 45200 - DNA, 25 bp, Canis familiaris
aaaactactactatggggtgcctgg

SEQ ID NO: 45201 - DNA, 25 bp, Canis familiaris
aaaaagattactataacattttgtg

SEQ ID NO: 45202 - DNA, 25 bp, Canis familiaris
aaaaaggtggctataactcaagatg

SEQ ID NO: 45203 - DNA, 25 bp, Canis familiaris
aaaaaagctgtgccctaacctgtgt

SEQ ID NO: 45204 - DNA, 25 bp, Canis familiaris
aacaacaagctccccacaaaagtgc

SEQ ID NO: 45205 - DNA, 25 bp, Canis familiaris
aacaacggtagagacaactagatgg

SEQ ID NO: 45206 - DNA, 25 bp, Canis familiaris
aaaagctgtaaagacgcttcgtcgc

SEQ ID NO: 45207 - DNA, 25 bp, Canis familiaris
aaaagcgggaagcaccgtgcgtgcc

SEQ ID NO: 45208 - DNA, 25 bp, Canis familiaris
caaaaagcaggctgtaccgtccgga

SEQ ID NO: 45209 - DNA, 25 bp, Canis familiaris
aaggcaatgggagaacccctcgagt

SEQ ID NO: 45210 - DNA, 25 bp, Canis familiaris
aaccaagttccatacccgattgata

SEQ ID NO: 45211 - DNA, 25 bp, Canis familiaris
aacacgggtacatcttcctgtggta

SEQ ID NO: 45212 - DNA, 25 bp, Canis familiaris
aaaccggccaatattactgcaggac

SEQ ID NO: 45213 - DNA, 25 bp, Canis familiaris
aaagcccccaaaattcactgtgtat

SEQ ID NO: 45214 - DNA, 25 bp, Canis familiaris
aaactacaccaacagtcactgggca

SEQ ID NO: 45215 - DNA, 25 bp, Canis familiaris
aaactaattaaacgatacttgagca

SEQ ID NO: 45216 - DNA, 25 bp, Canis familiaris
aaactaatccaccacttatccagga

SEQ ID NO: 45217 - DNA, 25 bp, Canis familiaris
aaaccattcgattgacttcctgagg

SEQ ID NO: 45218 - DNA, 25 bp, Canis familiaris
aaaccattggtttctgtccaattgt

SEQ ID NO: 45219 - DNA, 25 bp, Canis familiaris
aaagcctggtgtgagctgtctattt

SEQ ID NO: 45220 - DNA, 25 bp, Canis familiaris
aaagccttcagtaatggttcatttc

SEQ ID NO: 45221 - DNA, 25 bp, Canis familiaris
aaaccaatcaccaatttgtctcaat

SEQ ID NO: 45222 - DNA, 25 bp, Canis familiaris
aaagcctgataacatctctgtgccc

SEQ ID NO: 45223 - DNA, 25 bp, Canis familiaris
aaagccgtgaagatccagcattccc

SEQ ID NO: 45224 - DNA, 25 bp, Canis familiaris
aaagccgaccagattgagacccagc

SEQ ID NO: 45225 - DNA, 25 bp, Canis familiaris
aaaccagacacgtctctgagggcac

SEQ ID NO: 45226 - DNA, 25 bp, Canis familiaris
aaacgaacgtacttgcagatgtgac

SEQ ID NO: 45227 - DNA, 25 bp, Canis familiaris
aaagctcaaagtacttcttgtgtgc

SEQ ID NO: 45228 - DNA, 25 bp, Canis familiaris
aaagctcgcttgatcttgattttca

SEQ ID NO: 45229 - DNA, 25 bp, Canis familiaris
aaagctcatgtctgttttcattcaa

SEQ ID NO: 45230 - DNA, 25 bp, Canis familiaris
aaagcgctgtcttgtttgtctgttt

SEQ ID NO: 45231 - DNA, 25 bp, Canis familiaris
aaaccggtaggactgtctgcctgtt

SEQ ID NO: 45232 - DNA, 25 bp, Canis familiaris
aaacccaaaggccagttgcctgatt

SEQ ID NO: 45233 - DNA, 25 bp, Canis familiaris
aaacgccatagatccaattgactta

SEQ ID NO: 45234 - DNA, 25 bp, Canis familiaris
aaaccactaattgatttccctgaga

SEQ ID NO: 45235 - DNA, 25 bp, Canis familiaris
aaaccatcttaatatttggccatgc

SEQ ID NO: 45236 - DNA, 25 bp, Canis familiaris
aaactatgtccaaaagtctggccca

SEQ ID NO: 45237 - DNA, 25 bp, Canis familiaris
aaactatatccacagaatcggccgt

SEQ ID NO: 45238 - DNA, 25 bp, Canis familiaris
aaacagataacacagaaccattcag

SEQ ID NO: 45239 - DNA, 25 bp, Canis familiaris
aaacgatagcccaagaatcagtgtc

SEQ ID NO: 45240 - DNA, 25 bp, Canis familiaris
aaacgttgccaagggtaatgtctgc

SEQ ID NO: 45241 - DNA, 25 bp, Canis familiaris
aaagcatttccacgtttgaatttgt

SEQ ID NO: 45242 - DNA, 25 bp, Canis familiaris
aaagcatatctccttgtctgttttt

SEQ ID NO: 45243 - DNA, 25 bp, Canis familiaris
aaaaattccctattgttgagtatgg

SEQ ID NO: 45244 - DNA, 25 bp, Canis familiaris
aaacgagtccctgtgtgcacgtatt

SEQ ID NO: 45245 - DNA, 25 bp, Canis familiaris
aaaaaccacctgctgaacgtcatat

SEQ ID NO: 45246 - DNA, 25 bp, Canis familiaris
aaaccactactactacgacgtctgt

SEQ ID NO: 45247 - DNA, 25 bp, Canis familiaris
aaaccatcttcgtgattggcttcgt

SEQ ID NO: 45248 - DNA, 25 bp, Canis familiaris
aaccgcaccgcgtgcaaggttttcg

SEQ ID NO: 45249 - DNA, 25 bp, Canis familiaris
aaagccaacaggtgcaggggttttg

SEQ ID NO: 45250 - DNA, 25 bp, Canis familiaris
aaacacgacaggttgaggtggctta

SEQ ID NO: 45251 - DNA, 25 bp, Canis familiaris
aaaccgctatctgcgagggtcttca

SEQ ID NO: 45252 - DNA, 25 bp, Canis familiaris
aaaccattgttaggcctgggcttgc

SEQ ID NO: 45253 - DNA, 25 bp, Canis familiaris
aaaccttctgtagcctggaggtaag

SEQ ID NO: 45254 - DNA, 25 bp, Canis familiaris
aaagctttttgatcctcagaggtct

SEQ ID NO: 45255 - DNA, 25 bp, Canis familiaris
aaacatttaaactctcagtcagtgc

SEQ ID NO: 45256 - DNA, 25 bp, Canis familiaris
aaacatttaccattttgtccatgac

SEQ ID NO: 45257 - DNA, 25 bp, Canis familiaris
aaacaccagcccttttgtagctaat

SEQ ID NO: 45258 - DNA, 25 bp, Canis familiaris
aaactgctacgctgtcttgttgcgc

SEQ ID NO: 45259 - DNA, 25 bp, Canis familiaris
aaacgtgggtggtcttgtgcatccc

SEQ ID NO: 45260 - DNA, 25 bp, Canis familiaris
aaacgatggtgctactggtgctgct

SEQ ID NO: 45261 - DNA, 25 bp, Canis familiaris
aaacacatcactaagctggcctgta

SEQ ID NO: 45262 - DNA, 25 bp, Canis familiaris
aaacagctcctcagatggttctaga

SEQ ID NO: 45263 - DNA, 25 bp, Canis familiaris
aaaactccctggatgtgtgggccgc

SEQ ID NO: 45264 - DNA, 25 bp, Canis familiaris
aaaaccagcccgctggtggggcaga

SEQ ID NO: 45265 - DNA, 25 bp, Canis familiaris
aaaagaagcctcgctttggcgtggg

SEQ ID NO: 45266 - DNA, 25 bp, Canis familiaris
aaaaagaagcctcgctttggcgtgg

SEQ ID NO: 45267 - DNA, 25 bp, Canis familiaris
aaaccaaagctcctgttcagcactt

SEQ ID NO: 45268 - DNA, 25 bp, Canis familiaris
aaaccaaatgactgcttccgttact

SEQ ID NO: 45269 - DNA, 25 bp, Canis familiaris
aaactacaatgagatgttaccttac

SEQ ID NO: 45270 - DNA, 25 bp, Canis familiaris
aaaatataacagattccacctagaa

SEQ ID NO: 45271 - DNA, 25 bp, Canis familiaris
aaacatttgaagatccctcagccag

SEQ ID NO: 45272 - DNA, 25 bp, Canis familiaris
aaaactgtgggcaccactagccctg

SEQ ID NO: 45273 - DNA, 25 bp, Canis familiaris
aaacctatgggattcacctaagttg

SEQ ID NO: 45274 - DNA, 25 bp, Canis familiaris
aaacccacaatgttaggctaagtct

SEQ ID NO: 45275 - DNA, 25 bp, Canis familiaris
aaaccacatacgggatggcccagcc

SEQ ID NO: 45276 - DNA, 25 bp, Canis familiaris
aaacctgcagggagttgctcaccca

SEQ ID NO: 45277 - DNA, 25 bp, Canis familiaris
aaagccacagggagtcccttcagca

SEQ ID NO: 45278 - DNA, 25 bp, Canis familiaris
aaacgctcagggatgaccgctgtac

SEQ ID NO: 45279 - DNA, 25 bp, Canis familiaris
aaacctcaaggtcatccagctggtc

SEQ ID NO: 45280 - DNA, 25 bp, Canis familiaris
aaacctcaatggtgttgcggctgtc

SEQ ID NO: 45281 - DNA, 25 bp, Canis familiaris
aaaccaaattcaactgtcaggcgtc

SEQ ID NO: 45282 - DNA, 25 bp, Canis familiaris
aaacctaattgaacttgcccagttg

SEQ ID NO: 45283 - DNA, 25 bp, Canis familiaris
aaacagttatggagcttaatcagtt

SEQ ID NO: 45284 - DNA, 25 bp, Canis familiaris
aaaaccacacgaggattatatagac

SEQ ID NO: 45285 - DNA, 25 bp, Canis familiaris
aaaccccaataaactctgtagagcg

SEQ ID NO: 45286 - DNA, 25 bp, Canis familiaris
aaagcctccagattccagcttgtac

SEQ ID NO: 45287 - DNA, 25 bp, Canis familiaris
aaacttcaaattccatctagctctg

SEQ ID NO: 45288 - DNA, 25 bp, Canis familiaris
aaacttctattacgagtgacattgg

SEQ ID NO: 45289 - DNA, 25 bp, Canis familiaris
aaagccctatgaatgccgtgaacgt

SEQ ID NO: 45290 - DNA, 25 bp, Canis familiaris
aaagcccatataactctgtaacatt

SEQ ID NO: 45291 - DNA, 25 bp, Canis familiaris
aaaccattgtcttttgaaacatgta

SEQ ID NO: 45292 - DNA, 25 bp, Canis familiaris
aaacctggtttcctagaacagcaag

SEQ ID NO: 45293 - DNA, 25 bp, Canis familiaris
cgctgttctggttccccagagaagg

SEQ ID NO: 45294 - DNA, 25 bp, Canis familiaris
aaacctttctgagtcattgcatccc

SEQ ID NO: 45295 - DNA, 25 bp, Canis familiaris
aaaccaattcggagtctccctctgt

SEQ ID NO: 45296 - DNA, 25 bp, Canis familiaris
aaacggtttaaggtctccatctctg

SEQ ID NO: 45297 - DNA, 25 bp, Canis familiaris
aaacgttttaaggtgcctgctgcca

SEQ ID NO: 45298 - DNA, 25 bp, Canis familiaris
aaacactttatatggtgcctccgga

SEQ ID NO: 45299 - DNA, 25 bp, Canis familiaris
aaacgcatttacttggagcacctgg

SEQ ID NO: 45300 - DNA, 25 bp, Canis familiaris
aaagccaatttccaaggcacgatgg

SEQ ID NO: 45301 - DNA, 25 bp, Canis familiaris
aaaccaatttgtcgagccacactgt

SEQ ID NO: 45302 - DNA, 25 bp, Canis familiaris
aaagctcctttagtgtctaagctgt

SEQ ID NO: 45303 - DNA, 25 bp, Canis familiaris
aaaccctctgtgtatttcatcaagt

SEQ ID NO: 45304 - DNA, 25 bp, Canis familiaris
aaagccctgagttgggttctatgct

SEQ ID NO: 45305 - DNA, 25 bp, Canis familiaris
aaagcccatggtaacctctgcttgt

SEQ ID NO: 45306 - DNA, 25 bp, Canis familiaris
aaaccctgagttaatgctgcatgct

SEQ ID NO: 45307 - DNA, 25 bp, Canis familiaris
aaagccctctttgatggctctgtgg

SEQ ID NO: 45308 - DNA, 25 bp, Canis familiaris
aaacggctcattccaggagtcttgg

SEQ ID NO: 45309 - DNA, 25 bp, Canis familiaris
aaactggcatttgagtatgaatctg

SEQ ID NO: 45310 - DNA, 25 bp, Canis familiaris
aaacagccaccggagtagagatgct

SEQ ID NO: 45311 - DNA, 25 bp, Canis familiaris
aaacgtcacgctgaatatatgacca

SEQ ID NO: 45312 - DNA, 25 bp, Canis familiaris
aaagcgtcctgagcaaatgggcatc

SEQ ID NO: 45313 - DNA, 25 bp, Canis familiaris
aaagcgtgccaatcaacatgctggt

SEQ ID NO: 45314 - DNA, 25 bp, Canis familiaris
aaagcctgcacacagaagcctggat

SEQ ID NO: 45315 - DNA, 25 bp, Canis familiaris
aaacattgcatccctaagactctaa

SEQ ID NO: 45316 - DNA, 25 bp, Canis familiaris
aaactggaccgtcaactgctgatgg

SEQ ID NO: 45317 - DNA, 25 bp, Canis familiaris
aaacttaacttcagatcttgtgggt

SEQ ID NO: 45318 - DNA, 25 bp, Canis familiaris
aaactcaagacattcaggattctgg

SEQ ID NO: 45319 - DNA, 25 bp, Canis familiaris
aaactcagaacagcacggactgcat

SEQ ID NO: 45320 - DNA, 25 bp, Canis familiaris
aaactaagactgcctcaagccatca

SEQ ID NO: 45321 - DNA, 25 bp, Canis familiaris
aaacagaagaacctccagtgcacgc

SEQ ID NO: 45322 - DNA, 25 bp, Canis familiaris
aaaccaggggcactctggatccagc

SEQ ID NO: 45323 - DNA, 25 bp, Canis familiaris
aaagccagcggaaactggcccacac

SEQ ID NO: 45324 - DNA, 25 bp, Canis familiaris
aaagcctgctggagactcagtacca

SEQ ID NO: 45325 - DNA, 25 bp, Canis familiaris
aaacctgatggctatgattactacg

SEQ ID NO: 45326 - DNA, 25 bp, Canis familiaris
aaaccgaggtttgcacatgtgctgc

SEQ ID NO: 45327 - DNA, 25 bp, Canis familiaris
aaagcgaatggtggttccagctgcc

SEQ ID NO: 45328 - DNA, 25 bp, Canis familiaris
aaagcgaatggtggttccagctgcc

SEQ ID NO: 45329 - DNA, 25 bp, Canis familiaris
aaagcgaatggtggttccagctgcc

SEQ ID NO: 45330 - DNA, 25 bp, Canis familiaris
aaagctgtgtggtgttctactgtac

SEQ ID NO: 45331 - DNA, 25 bp, Canis familiaris
gacaatgttgggtgggctacgcccg

SEQ ID NO: 45332 - DNA, 25 bp, Canis familiaris
aaacttgaggtccgtgtacctgcac

SEQ ID NO: 45333 - DNA, 25 bp, Canis familiaris
aacatcatcaagcgggaggacctgc

SEQ ID NO: 45334 - DNA, 25 bp, Canis familiaris
aaacataggccgatggggagcgctc

SEQ ID NO: 45335 - DNA, 25 bp, Canis familiaris
aaacctgctccgaggtggacgagcc

SEQ ID NO: 45336 - DNA, 25 bp, Canis familiaris
aacacctctactatttttctggtcg

SEQ ID NO: 45337 - DNA, 25 bp, Canis familiaris
aaacttccacatatttttcaactgc

SEQ ID NO: 45338 - DNA, 25 bp, Canis familiaris
aaagctgtaatcacatttttctatt

SEQ ID NO: 45339 - DNA, 25 bp, Canis familiaris
aaactgcattccacatattattttt

SEQ ID NO: 45340 - DNA, 25 bp, Canis familiaris
aaacatctagccgccaatattttat

SEQ ID NO: 45341 - DNA, 25 bp, Canis familiaris
aaactctgatgtccccaaggtattt

SEQ ID NO: 45342 - DNA, 25 bp, Canis familiaris
aaagcctgttcccaaagcttctgtt

SEQ ID NO: 45343 - DNA, 25 bp, Canis familiaris
aaaccacttgcactgaaatctttgt

SEQ ID NO: 45344 - DNA, 25 bp, Canis familiaris
aaacctgattcattataatctgttt

SEQ ID NO: 45345 - DNA, 25 bp, Canis familiaris
aaaccaactctaatattgcttcttg

SEQ ID NO: 45346 - DNA, 25 bp, Canis familiaris
aaactaaccgaagttctgtctactg

SEQ ID NO: 45347 - DNA, 25 bp, Canis familiaris
aaactacaccagcagcttcttcatc

SEQ ID NO: 45348 - DNA, 25 bp, Canis familiaris
aaacaagaacagcagctactttgtc

SEQ ID NO: 45349 - DNA, 25 bp, Canis familiaris
aaacgacacccactgtactttgatt

SEQ ID NO: 45350 - DNA, 25 bp, Canis familiaris
aaacaaagccctctcttttgatctc

SEQ ID NO: 45351 - DNA, 25 bp, Canis familiaris
aaaccaaactgcacttatttcatat

SEQ ID NO: 45352 - DNA, 25 bp, Canis familiaris
aaagcgcaatttcccggctaaatat

SEQ ID NO: 45353 - DNA, 25 bp, Canis familiaris
caaaggaatttcccaagccagattt

SEQ ID NO: 45354 - DNA, 25 bp, Canis familiaris
aaaccaaatatcccagagctctgtc

SEQ ID NO: 45355 - DNA, 25 bp, Canis familiaris
aaaccctgcagtcctgaagcttgat

SEQ ID NO: 45356 - DNA, 25 bp, Canis familiaris
aaaccacctgtgactaacttaatgt

SEQ ID NO: 45357 - DNA, 25 bp, Canis familiaris
aaaccaccttatcagaaggatgtgt

SEQ ID NO: 45358 - DNA, 25 bp, Canis familiaris
aaaccacctttatgtagcagttctc

SEQ ID NO: 45359 - DNA, 25 bp, Canis familiaris
aaaccaccttgatggtggagaccat

SEQ ID NO: 45360 - DNA, 25 bp, Canis familiaris
aaaccacgttggtgtgacaagaatg

SEQ ID NO: 45361 - DNA, 25 bp, Canis familiaris
aatacagaagggccggtgaaaatgg

SEQ ID NO: 45362 - DNA, 25 bp, Canis familiaris
aaaagaaggtccccagtcaactgtg

SEQ ID NO: 45363 - DNA, 25 bp, Canis familiaris
aaaacacatgggcgacttgaaatta

SEQ ID NO: 45364 - DNA, 25 bp, Canis familiaris
aaacctctccttcatcattaaatac

SEQ ID NO: 45365 - DNA, 25 bp, Canis familiaris
aaacccatccttttctgtacagata

SEQ ID NO: 45366 - DNA, 25 bp, Canis familiaris
aacccaaccttttctcatgaactga

SEQ ID NO: 45367 - DNA, 25 bp, Canis familiaris
aacccatatcctgtcaccaaaataa

SEQ ID NO: 45368 - DNA, 25 bp, Canis familiaris
aaaaatatacgcttcacctagattg

SEQ ID NO: 45369 - DNA, 25 bp, Canis familiaris
aaaaaaaatgtaacgctagatatct

SEQ ID NO: 45370 - DNA, 25 bp, Canis familiaris
aaacccttcagtgtcctggagatct

SEQ ID NO: 45371 - DNA, 25 bp, Canis familiaris
aaaattttcagggctcctggtggct

SEQ ID NO: 45372 - DNA, 25 bp, Canis familiaris
aaacattagtttcctcactcgttga

SEQ ID NO: 45373 - DNA, 25 bp, Canis familiaris
aaacattcatttcactactagattg

SEQ ID NO: 45374 - DNA, 25 bp, Canis familiaris
aaacttctttggcctgacagacatg

SEQ ID NO: 45375 - DNA, 25 bp, Canis familiaris
aaacttcttgtgctgtgaacctcgt

SEQ ID NO: 45376 - DNA, 25 bp, Canis familiaris
aaactttgatgttgggaatccctgg

SEQ ID NO: 45377 - DNA, 25 bp, Canis familiaris
aaacttgtgatgaggggcgcctggg

SEQ ID NO: 45378 - DNA, 25 bp, Canis familiaris
aacacttggtgagaaggccccatgg

SEQ ID NO: 45379 - DNA, 25 bp, Canis familiaris
aaactctggagttaaggcccaatga

SEQ ID NO: 45380 - DNA, 25 bp, Canis familiaris
aaactcccagtaaaattgccatatt

SEQ ID NO: 45381 - DNA, 25 bp, Canis familiaris
aaacgccaggaacagattgccagag

SEQ ID NO: 45382 - DNA, 25 bp, Canis familiaris
aaagccacaggatctcaggctggag

SEQ ID NO: 45383 - DNA, 25 bp, Canis familiaris
aaaccagagctgagccaggcaggaa

SEQ ID NO: 45384 - DNA, 25 bp, Canis familiaris
aaaccagggcttgctgagccagata

SEQ ID NO: 45385 - DNA, 25 bp, Canis familiaris
aaaccatgtgggaagagaggcagga

SEQ ID NO: 45386 - DNA, 25 bp, Canis familiaris
aaagccagggagaaccttcggctat

SEQ ID NO: 45387 - DNA, 25 bp, Canis familiaris
aaagccagggggacagctcctgtgc

SEQ ID NO: 45388 - DNA, 25 bp, Canis familiaris
aaactctggtgacatgtccctggtg

SEQ ID NO: 45389 - DNA, 25 bp, Canis familiaris
aaaccttgtgaagttcctctgcgtt

SEQ ID NO: 45390 - DNA, 25 bp, Canis familiaris
aaacctttaacttcacatgtgttca

SEQ ID NO: 45391 - DNA, 25 bp, Canis familiaris
aaactcgtctttgatagcggtctgc

SEQ ID NO: 45392 - DNA, 25 bp, Canis familiaris
aaactgcagtcatttcgaggagggc

SEQ ID NO: 45393 - DNA, 25 bp, Canis familiaris
aaacctgctgatacgcaaggacggc

SEQ ID NO: 45394 - DNA, 25 bp, Canis familiaris
aaagccttagcacgcaagagcacgc

SEQ ID NO: 45395 - DNA, 25 bp, Canis familiaris
aaacctagagaccaaagacatgcct

SEQ ID NO: 45396 - DNA, 25 bp, Canis familiaris
aaacttagagctttatagacatgaa

SEQ ID NO: 45397 - DNA, 25 bp, Canis familiaris
aaacctcaagtgtctgctaacgaag

SEQ ID NO: 45398 - DNA, 25 bp, Canis familiaris
aaagcccacctgttgacaacgagat

SEQ ID NO: 45399 - DNA, 25 bp, Canis familiaris
aaagcccatcaggttggaacgtata

SEQ ID NO: 45400 - DNA, 25 bp, Canis familiaris
aaacacatcacaggtaagaacggga

SEQ ID NO: 45401 - DNA, 25 bp, Canis familiaris
aaggcaatttgggacaggaccgaat

SEQ ID NO: 45402 - DNA, 25 bp, Canis familiaris
aagaaacgtcggtaggatgcctaat

SEQ ID NO: 45403 - DNA, 25 bp, Canis familiaris
aaaaacctcggacatggcacataag

SEQ ID NO: 45404 - DNA, 25 bp, Canis familiaris
aaaccatcccagcatatttcacatg

SEQ ID NO: 45405 - DNA, 25 bp, Canis familiaris
aaaccatccccttatttgctataag

SEQ ID NO: 45406 - DNA, 25 bp, Canis familiaris
aaaccagatcccttatattgtgaaa

SEQ ID NO: 45407 - DNA, 25 bp, Canis familiaris
aaaccagctaccataagggtcaggt

SEQ ID NO: 45408 - DNA, 25 bp, Canis familiaris
aaaacattactcagaaggcttcaga

SEQ ID NO: 45409 - DNA, 25 bp, Canis familiaris
aaaactgtccctgaagaagtctaga

SEQ ID NO: 45410 - DNA, 25 bp, Canis familiaris
aaaacatgacccgagtggagagaaa

SEQ ID NO: 45411 - DNA, 25 bp, Canis familiaris
aaaaacatccccagagagaaagcag

SEQ ID NO: 45412 - DNA, 25 bp, Canis familiaris
aaaaatcaccatgtcagagaaaaag

SEQ ID NO: 45413 - DNA, 25 bp, Canis familiaris
aacacaaacctctcaagagttgggg

SEQ ID NO: 45414 - DNA, 25 bp, Canis familiaris
aaccagaaagtctccaagacccgcg

SEQ ID NO: 45415 - DNA, 25 bp, Canis familiaris
aagaagaagtccaccaagacctcgc

SEQ ID NO: 45416 - DNA, 25 bp, Canis familiaris
aaacatggttccacagcaagccctt

SEQ ID NO: 45417 - DNA, 25 bp, Canis familiaris
aaacttatctctgcctcagggcttt

SEQ ID NO: 45418 - DNA, 25 bp, Canis familiaris
aaactgattattgctaaatggtgtc

SEQ ID NO: 45419 - DNA, 25 bp, Canis familiaris
aaaaattcttgacaatatatgtgtg

SEQ ID NO: 45420 - DNA, 25 bp, Canis familiaris
aaacgaccttctctatgatattctc

SEQ ID NO: 45421 - DNA, 25 bp, Canis familiaris
aaactacctctcaagctatttctgc

SEQ ID NO: 45422 - DNA, 25 bp, Canis familiaris
aaacagacctttggctatggcgcac

SEQ ID NO: 45423 - DNA, 25 bp, Canis familiaris
aaactcacgtgttggcgtgggccgt

SEQ ID NO: 45424 - DNA, 25 bp, Canis familiaris
aacatctcgttgagggtggcctcct

SEQ ID NO: 45425 - DNA, 25 bp, Canis familiaris
aaaccaggtgaccagggtgtccctg

SEQ ID NO: 45426 - DNA, 25 bp, Canis familiaris
aaaacagtggcccgagtggtctagg

SEQ ID NO: 45427 - DNA, 25 bp, Canis familiaris
aaaaattcatcccaggggcacctgg

SEQ ID NO: 45428 - DNA, 25 bp, Canis familiaris
aaaccagcttcccatgctgggagcc

SEQ ID NO: 45429 - DNA, 25 bp, Canis familiaris
aaaccagttgcttcagtgctgaggc

SEQ ID NO: 45430 - DNA, 25 bp, Canis familiaris
aaacgccattgcttcagattgagag

SEQ ID NO: 45431 - DNA, 25 bp, Canis familiaris
aaacctctctcgtcagttcaatgac

SEQ ID NO: 45432 - DNA, 25 bp, Canis familiaris
aaacgctctccgtgactcaatatgg

SEQ ID NO: 45433 - DNA, 25 bp, Canis familiaris
aaacgtctccagtgcgaaattgtcg

SEQ ID NO: 45434 - DNA, 25 bp, Canis familiaris
aaaagctgcccctggaattggatcg

SEQ ID NO: 45435 - DNA, 25 bp, Canis familiaris
aaaccctttcagtgcacattcgaag

SEQ ID NO: 45436 - DNA, 25 bp, Canis familiaris
aaaccctttatgtgcaacttctgac

SEQ ID NO: 45437 - DNA, 25 bp, Canis familiaris
aacacccacggagaagacttctgtt

SEQ ID NO: 45438 - DNA, 25 bp, Canis familiaris
aaaccgacgagatagacctcttgta

SEQ ID NO: 45439 - DNA, 25 bp, Canis familiaris
aaacacccaggatggcaactcttct

SEQ ID NO: 45440 - DNA, 25 bp, Canis familiaris
aaacctgccaaatttgtcaacttgc

SEQ ID NO: 45441 - DNA, 25 bp, Canis familiaris
aaacctgccaaatatgatgacatca

SEQ ID NO: 45442 - DNA, 25 bp, Canis familiaris
aaacgggccaatgtcatgagctcac

SEQ ID NO: 45443 - DNA, 25 bp, Canis familiaris
aaacgtggcctagctaggtgcccac

SEQ ID NO: 45444 - DNA, 25 bp, Canis familiaris
aaacaggagcctgcaggggtctcca

SEQ ID NO: 45445 - DNA, 25 bp, Canis familiaris
aacaccaggcctgatttggttccca

SEQ ID NO: 45446 - DNA, 25 bp, Canis familiaris
aaaatctggaatgtgtccgtcccca

SEQ ID NO: 45447 - DNA, 25 bp, Canis familiaris
aaactggtatctgttcctgtctggt

SEQ ID NO: 45448 - DNA, 25 bp, Canis familiaris
aaaccgttgctggatctgctgtttg

SEQ ID NO: 45449 - DNA, 25 bp, Canis familiaris
aaacctgtgatgaaagtgtatttgg

SEQ ID NO: 45450 - DNA, 25 bp, Canis familiaris
aaacctctatgtgagtgttggtagt

SEQ ID NO: 45451 - DNA, 25 bp, Canis familiaris
aaacccttgctgtgtggcattcttg

SEQ ID NO: 45452 - DNA, 25 bp, Canis familiaris
aaacccttgcagttgtggacacttg

SEQ ID NO: 45453 - DNA, 25 bp, Canis familiaris
aaacctgttggttgggactctgtgc

SEQ ID NO: 45454 - DNA, 25 bp, Canis familiaris
aaacgtgtggtttgagtagctctta

SEQ ID NO: 45455 - DNA, 25 bp, Canis familiaris
aaacctggcagctatagaatacact

SEQ ID NO: 45456 - DNA, 25 bp, Canis familiaris
aaaccaggacagaatgtgaagcaat

SEQ ID NO: 45457 - DNA, 25 bp, Canis familiaris
aaaacaggactaagtgcatacaata

SEQ ID NO: 45458 - DNA, 25 bp, Canis familiaris
aaacactgaacctgtgtccatctac

SEQ ID NO: 45459 - DNA, 25 bp, Canis familiaris
aaacccagaactgtgctactctagt

SEQ ID NO: 45460 - DNA, 25 bp, Canis familiaris
aaaccacactacaaactgagcctaa

SEQ ID NO: 45461 - DNA, 25 bp, Canis familiaris
aaaccacccagcaagacgaggcagg

SEQ ID NO: 45462 - DNA, 25 bp, Canis familiaris
aaaccgcacatgcaagacgggagca

SEQ ID NO: 45463 - DNA, 25 bp, Canis familiaris
aacacaacattgcaaatcaagggca

SEQ ID NO: 45464 - DNA, 25 bp, Canis familiaris
aacatgcttcatcgtcggtccgggc

SEQ ID NO: 45465 - DNA, 25 bp, Canis familiaris
aaactccagcagacgagctgccgga

SEQ ID NO: 45466 - DNA, 25 bp, Canis familiaris
aaactccaagagaagctacagacaa

SEQ ID NO: 45467 - DNA, 25 bp, Canis familiaris
aaacccataggaactatcttgaaga

SEQ ID NO: 45468 - DNA, 25 bp, Canis familiaris
aaactttagtgaattgctttggcag

SEQ ID NO: 45469 - DNA, 25 bp, Canis familiaris
aaacttacagtgtgacattgtgtca

SEQ ID NO: 45470 - DNA, 25 bp, Canis familiaris
aaactacccagatgcagctagtgtt

SEQ ID NO: 45471 - DNA, 25 bp, Canis familiaris
aaactgagagcgaatgcggtggatt

SEQ ID NO: 45472 - DNA, 25 bp, Canis familiaris
aaactcataggcaagggtggatctg

SEQ ID NO: 45473 - DNA, 25 bp, Canis familiaris
aaacacatccacacgggaggctggg

SEQ ID NO: 45474 - DNA, 25 bp, Canis familiaris
aaaagattgtctctggagcaggggg

SEQ ID NO: 45475 - DNA, 25 bp, Canis familiaris
aaaagttgcttgtttggctgggatt

SEQ ID NO: 45476 - DNA, 25 bp, Canis familiaris
aaacatttcttgtctatggagtgta

SEQ ID NO: 45477 - DNA, 25 bp, Canis familiaris
aacacttccgctgctgcggcagcat

SEQ ID NO: 45478 - DNA, 25 bp, Canis familiaris
aaactgtggccagctgctatcacat

SEQ ID NO: 45479 - DNA, 25 bp, Canis familiaris
aaactgtggcaaacactgatgcctt

SEQ ID NO: 45480 - DNA, 25 bp, Canis familiaris
aaactgataaactacttgccttcta

SEQ ID NO: 45481 - DNA, 25 bp, Canis familiaris
aaactgaattaatcctactcctctg

SEQ ID NO: 45482 - DNA, 25 bp, Canis familiaris
aaactgaagaactgtaatgcccttt

SEQ ID NO: 45483 - DNA, 25 bp, Canis familiaris
aaactgaaagactggcatcctcctg

SEQ ID NO: 45484 - DNA, 25 bp, Canis familiaris
aaactaaaattcagacagccttgca

SEQ ID NO: 45485 - DNA, 25 bp, Canis familiaris
aaacgaataaacagacacccagaga

SEQ ID NO: 45486 - DNA, 25 bp, Canis familiaris
aaaccaagaaaagggctccaggctg

SEQ ID NO: 45487 - DNA, 25 bp, Canis familiaris
aaaaaggaaaaagcctctgtgtgtg

SEQ ID NO: 45488 - DNA, 25 bp, Canis familiaris
aaaaaggcagaagtccccaggatgg

SEQ ID NO: 45489 - DNA, 25 bp, Canis familiaris
aaacaacacggagctcctcaggttc

SEQ ID NO: 45490 - DNA, 25 bp, Canis familiaris
aacacaaagcgtttgccactgggtt

SEQ ID NO: 45491 - DNA, 25 bp, Canis familiaris
aaacaaatgccactagccctggtgt

SEQ ID NO: 45492 - DNA, 25 bp, Canis familiaris
aaacaacatcatcgattctccggtg

SEQ ID NO: 45493 - DNA, 25 bp, Canis familiaris
aaaccatcacatctgagtccgtgtc

SEQ ID NO: 45494 - DNA, 25 bp, Canis familiaris
aaaccatcacatatgagtctccaca

SEQ ID NO: 45495 - DNA, 25 bp, Canis familiaris
aaactccaatcatttgtcttgccca

SEQ ID NO: 45496 - DNA, 25 bp, Canis familiaris
aaaccacatgtgtcattctttctcc

SEQ ID NO: 45497 - DNA, 25 bp, Canis familiaris
aaacccagatgtgtgtgatattcct

SEQ ID NO: 45498 - DNA, 25 bp, Canis familiaris
aaactcttgagtgctgtgcctattt

SEQ ID NO: 45499 - DNA, 25 bp, Canis familiaris
aaactcttagtctgatgcccaatct

SEQ ID NO: 45500 - DNA, 25 bp, Canis familiaris
aaaaaatggtgctgatgactgatac

SEQ ID NO: 45501 - DNA, 25 bp, Canis familiaris
aaaaactggcatttgagtatgaatc

SEQ ID NO: 45502 - DNA, 25 bp, Canis familiaris
aaaattttgctgctagttaactatt

SEQ ID NO: 45503 - DNA, 25 bp, Canis familiaris
aaaccttcactgatagttacattta

SEQ ID NO: 45504 - DNA, 25 bp, Canis familiaris
aaaccttagtggtaccatagcattt

SEQ ID NO: 45505 - DNA, 25 bp, Canis familiaris
aaaccactctctggaacagctagcc

SEQ ID NO: 45506 - DNA, 25 bp, Canis familiaris
aaactgagtccagaccagcatcggc

SEQ ID NO: 45507 - DNA, 25 bp, Canis familiaris
aaactgactccggatgaagcaaaat

SEQ ID NO: 45508 - DNA, 25 bp, Canis familiaris
aaacaactgatccatattacaaaaa

SEQ ID NO: 45509 - DNA, 25 bp, Canis familiaris
aaactcagcatttatatttaagata

SEQ ID NO: 45510 - DNA, 25 bp, Canis familiaris
aaaccagttgaatttcttattgatg

SEQ ID NO: 45511 - DNA, 25 bp, Canis familiaris
aaaccatgttcttgattcttactta

SEQ ID NO: 45512 - DNA, 25 bp, Canis familiaris
aaacctatttcttgctgtattctta

SEQ ID NO: 45513 - DNA, 25 bp, Canis familiaris
aaaccatcatttctcagtgttttga

SEQ ID NO: 45514 - DNA, 25 bp, Canis familiaris
aaaccatataatttcggtatttctg

SEQ ID NO: 45515 - DNA, 25 bp, Canis familiaris
aaactaaagcatgtattttattcat

SEQ ID NO: 45516 - DNA, 25 bp, Canis familiaris
aaactaaagatatattccttgtcaa

SEQ ID NO: 45517 - DNA, 25 bp, Canis familiaris
aaactagtagtatgtatgcccttca

SEQ ID NO: 45518 - DNA, 25 bp, Canis familiaris
aaacataggagtgcatgtatccctt

SEQ ID NO: 45519 - DNA, 25 bp, Canis familiaris
aaacagagtcagcagagtaccgcca

SEQ ID NO: 45520 - DNA, 25 bp, Canis familiaris
aagcaagagacgagagttccccagg

SEQ ID NO: 45521 - DNA, 25 bp, Canis familiaris
aaaaaacgtagtgtctcagcctggc

SEQ ID NO: 45522 - DNA, 25 bp, Canis familiaris
caaaggaaaatccccttcacctgtg

SEQ ID NO: 45523 - DNA, 25 bp, Canis familiaris
aaaaagaagatccgcacgtcaccta

SEQ ID NO: 45524 - DNA, 25 bp, Canis familiaris
aaaagcatgaaggtcccttccccat

SEQ ID NO: 45525 - DNA, 25 bp, Canis familiaris
aacagagcaggagcgacactaccca

SEQ ID NO: 45526 - DNA, 25 bp, Canis familiaris
aaaaaggacaatccaccagggcata

SEQ ID NO: 45527 - DNA, 25 bp, Canis familiaris
aaacgtggacagaaagccggacaga

SEQ ID NO: 45528 - DNA, 25 bp, Canis familiaris
aaacctggacgacccggtgagagag

SEQ ID NO: 45529 - DNA, 25 bp, Canis familiaris
aaacacggaggaggcccttggagca

SEQ ID NO: 45530 - DNA, 25 bp, Canis familiaris
aaactggggacatgacttctggaca

SEQ ID NO: 45531 - DNA, 25 bp, Canis familiaris
aaactggatggaactatgcccggaa

SEQ ID NO: 45532 - DNA, 25 bp, Canis familiaris
aaactgagctggattctgcctcttg

SEQ ID NO: 45533 - DNA, 25 bp, Canis familiaris
aaaacacttgtatctcgtgcttcca

SEQ ID NO: 45534 - DNA, 25 bp, Canis familiaris
aaacatcgcttgctaaattttccaa

SEQ ID NO: 45535 - DNA, 25 bp, Canis familiaris
aaaccctctagtaaatattatctat

SEQ ID NO: 45536 - DNA, 25 bp, Canis familiaris
aaaccccatatttgacttgaacttg

SEQ ID NO: 45537 - DNA, 25 bp, Canis familiaris
aaaacggcatttgagtaagaatctg

SEQ ID NO: 45538 - DNA, 25 bp, Canis familiaris
aaaacagtgcaagcgagccaaagtc

SEQ ID NO: 45539 - DNA, 25 bp, Canis familiaris
aaaattgacaaatacacagaggtcc

SEQ ID NO: 45540 - DNA, 25 bp, Canis familiaris
aaacctaaacaaacactgactgcat

SEQ ID NO: 45541 - DNA, 25 bp, Canis familiaris
aaacctggatgacaacctcactttt

SEQ ID NO: 45542 - DNA, 25 bp, Canis familiaris
aaacgccgtgatgggacatccgtct

SEQ ID NO: 45543 - DNA, 25 bp, Canis familiaris
aaacccatggaggaggtggctatct

SEQ ID NO: 45544 - DNA, 25 bp, Canis familiaris
aaactttgccatgatcgtgtcttct

SEQ ID NO: 45545 - DNA, 25 bp, Canis familiaris
aaaccaggattatcgatgttgtcta

SEQ ID NO: 45546 - DNA, 25 bp, Canis familiaris
aaaccatccattttgccaatttgaa

SEQ ID NO: 45547 - DNA, 25 bp, Canis familiaris
aaaccatatttgctctcaatttgtt

SEQ ID NO: 45548 - DNA, 25 bp, Canis familiaris
aaaccttttgaggcatctcattttg

SEQ ID NO: 45549 - DNA, 25 bp, Canis familiaris
aaaccatgtgtttcagcccattagt

SEQ ID NO: 45550 - DNA, 25 bp, Canis familiaris
aaacaatggcattatccctttactt

SEQ ID NO: 45551 - DNA, 25 bp, Canis familiaris
aaaaattgcctatattcttgagtta

SEQ ID NO: 45552 - DNA, 25 bp, Canis familiaris
aaaagttccattgtgctcagtagtt

SEQ ID NO: 45553 - DNA, 25 bp, Canis familiaris
aaaacatgctccacaagtccaactt

SEQ ID NO: 45554 - DNA, 25 bp, Canis familiaris
aaacctgcaacaccatgaaccagtt

SEQ ID NO: 45555 - DNA, 25 bp, Canis familiaris
aaacctcatcaactatgtcaccagc

SEQ ID NO: 45556 - DNA, 25 bp, Canis familiaris
aaacctctatagtgacatctcggac

SEQ ID NO: 45557 - DNA, 25 bp, Canis familiaris
aaactcctacagtaacatcatacct

SEQ ID NO: 45558 - DNA, 25 bp, Canis familiaris
aaaccttgacagaaatgcttgacac

SEQ ID NO: 45559 - DNA, 25 bp, Canis familiaris
aaacagtatcatttatagcttatca

SEQ ID NO: 45560 - DNA, 25 bp, Canis familiaris
aaacctatctgcatttttcatcaat

SEQ ID NO: 45561 - DNA, 25 bp, Canis familiaris
aaacctgtctcttggatattctcga

SEQ ID NO: 45562 - DNA, 25 bp, Canis familiaris
aaaaagcctctatacatactaacca

SEQ ID NO: 45563 - DNA, 25 bp, Canis familiaris
aaaacaacctagcacaacagttcaa

SEQ ID NO: 45564 - DNA, 25 bp, Canis familiaris
aaaccatcacaccagaacaaaggtc

SEQ ID NO: 45565 - DNA, 25 bp, Canis familiaris
aaactaaactcagcagcacctggcc

SEQ ID NO: 45566 - DNA, 25 bp, Canis familiaris
aaaaggaaccagacatgcacactcg

SEQ ID NO: 45567 - DNA, 25 bp, Canis familiaris
aaacagccaattcacatacaccagt

SEQ ID NO: 45568 - DNA, 25 bp, Canis familiaris
aaacctcactttgcacaacactttc

SEQ ID NO: 45569 - DNA, 25 bp, Canis familiaris
aaactccactgatttcacaactatt

SEQ ID NO: 45570 - DNA, 25 bp, Canis familiaris
aaacccagctgatgtcagtgttata

SEQ ID NO: 45571 - DNA, 25 bp, Canis familiaris
aaacctgcactcctggcagttaata

SEQ ID NO: 45572 - DNA, 25 bp, Canis familiaris
aaacatctcacctgggataagtaat

SEQ ID NO: 45573 - DNA, 25 bp, Canis familiaris
aaaacatcactctggctaaagccct

SEQ ID NO: 45574 - DNA, 25 bp, Canis familiaris
aacaatcccaagggctatctaccct

SEQ ID NO: 45575 - DNA, 25 bp, Canis familiaris
aaaaccagcaaggcccattggcgcc

SEQ ID NO: 45576 - DNA, 25 bp, Canis familiaris
aaaacaatgcaaaccttgcttccct

SEQ ID NO: 45577 - DNA, 25 bp, Canis familiaris
aaaacaaaaaaatctctctctctct

SEQ ID NO: 45578 - DNA, 25 bp, Canis familiaris
aaacactgcaaataacacttcccca

SEQ ID NO: 45579 - DNA, 25 bp, Canis familiaris
aaacctggcaaatgacacttcccat

SEQ ID NO: 45580 - DNA, 25 bp, Canis familiaris
aaaccggcaatgagactgcccacac

SEQ ID NO: 45581 - DNA, 25 bp, Canis familiaris
aaacttgagacagacaatccccacc

SEQ ID NO: 45582 - DNA, 25 bp, Canis familiaris
aaacttcacaagctttctcccaagc

SEQ ID NO: 45583 - DNA, 25 bp, Canis familiaris
aaactcctctagatttattgcccac

SEQ ID NO: 45584 - DNA, 25 bp, Canis familiaris
aaacacctgctgagttggttctaac

SEQ ID NO: 45585 - DNA, 25 bp, Canis familiaris
aaaactccggacagagatcttggaa

SEQ ID NO: 45586 - DNA, 25 bp, Canis familiaris
aaaatccttcgaaagagtcttcaag

SEQ ID NO: 45587 - DNA, 25 bp, Canis familiaris
aaaacttccgtgaggccatttatgt

SEQ ID NO: 45588 - DNA, 25 bp, Canis familiaris
aaaacttcatcctggctgggttagt

SEQ ID NO: 45589 - DNA, 25 bp, Canis familiaris
aaaaccattgactgggtagcttttg

SEQ ID NO: 45590 - DNA, 25 bp, Canis familiaris
aaaaccatggactttgtgagagaat

SEQ ID NO: 45591 - DNA, 25 bp, Canis familiaris
aactcacacagaccagcgttaggaa

SEQ ID NO: 45592 - DNA, 25 bp, Canis familiaris
aacagaacagagtatggttacagca

SEQ ID NO: 45593 - DNA, 25 bp, Canis familiaris
aacagaacatggcgacttaggaaat

SEQ ID NO: 45594 - DNA, 25 bp, Canis familiaris
aaaacatcagggcacttgagctcta

SEQ ID NO: 45595 - DNA, 25 bp, Canis familiaris
aaacactgtgtgggaatagagcttc

SEQ ID NO: 45596 - DNA, 25 bp, Canis familiaris
aaacctgcttcattattgagacttt

SEQ ID NO: 45597 - DNA, 25 bp, Canis familiaris
aaactctgactttattagtctgctt

SEQ ID NO: 45598 - DNA, 25 bp, Canis familiaris
aaactcatcactttaatcgtctcat

SEQ ID NO: 45599 - DNA, 25 bp, Canis familiaris
aaactgatcccagtggactgtctaa

SEQ ID NO: 45600 - DNA, 25 bp, Canis familiaris
aaactgctgccttcgaagtgtgcga

SEQ ID NO: 45601 - DNA, 25 bp, Canis familiaris
aaactgctgccttcgaagtgtgcga

SEQ ID NO: 45602 - DNA, 25 bp, Canis familiaris
aaacgtgccttgtagagctgatgaa

SEQ ID NO: 45603 - DNA, 25 bp, Canis familiaris
aaacgctctgcctacacagtgataa

SEQ ID NO: 45604 - DNA, 25 bp, Canis familiaris
aaacctctgcacagggtgtgaccct

SEQ ID NO: 45605 - DNA, 25 bp, Canis familiaris
aaactccataatgcgtgcttaccct

SEQ ID NO: 45606 - DNA, 25 bp, Canis familiaris
aaactctctaatgattccttgacca

SEQ ID NO: 45607 - DNA, 25 bp, Canis familiaris
aaacctgtatttatctgcactgacc

SEQ ID NO: 45608 - DNA, 25 bp, Canis familiaris
aaacaggtttccctcagaggcacca

SEQ ID NO: 45609 - DNA, 25 bp, Canis familiaris
aaacaggatttctctaaggcaactt

SEQ ID NO: 45610 - DNA, 25 bp, Canis familiaris
aaacccattaattccacagagacct

SEQ ID NO: 45611 - DNA, 25 bp, Canis familiaris
aaaaccatccatttaaagaggcttg

SEQ ID NO: 45612 - DNA, 25 bp, Canis familiaris
aaaactttatgtttcccagtctctg

SEQ ID NO: 45613 - DNA, 25 bp, Canis familiaris
aaacgtttatgggcctgccagtctg

SEQ ID NO: 45614 - DNA, 25 bp, Canis familiaris
aaacttgattatggccctggcttgg

SEQ ID NO: 45615 - DNA, 25 bp, Canis familiaris
aaacatcgattgagtgcctggcatg

SEQ ID NO: 45616 - DNA, 25 bp, Canis familiaris
aaacacagttgaagtactctggcct

SEQ ID NO: 45617 - DNA, 25 bp, Canis familiaris
aaacacagggaagcaatgtctctct

SEQ ID NO: 45618 - DNA, 25 bp, Canis familiaris
aaaacagcggtaggtgccttgctct

SEQ ID NO: 45619 - DNA, 25 bp, Canis familiaris
aaacaactattgtcactgcctatcc

SEQ ID NO: 45620 - DNA, 25 bp, Canis familiaris
aacccagcctttctgccaataaaat

SEQ ID NO: 45621 - DNA, 25 bp, Canis familiaris
aaaccgctgtttgtgcgccatagaa

SEQ ID NO: 45622 - DNA, 25 bp, Canis familiaris
aaacttgtctttgtgtccaatgaga

SEQ ID NO: 45623 - DNA, 25 bp, Canis familiaris
aaacttatgtttgattcctaggaat

SEQ ID NO: 45624 - DNA, 25 bp, Canis familiaris
aaactgaatgtttggattcctcaaa

SEQ ID NO: 45625 - DNA, 25 bp, Canis familiaris
aaaccgatgttggtctttctccata

SEQ ID NO: 45626 - DNA, 25 bp, Canis familiaris
aaactccatttgctctgctattctt

SEQ ID NO: 45627 - DNA, 25 bp, Canis familiaris
aaaaacgttctgactgtatttatgg

SEQ ID NO: 45628 - DNA, 25 bp, Canis familiaris
aaaaagggcatcatcggaccttgga

SEQ ID NO: 45629 - DNA, 25 bp, Canis familiaris
aaaagggcagcaatctcggagaatc

SEQ ID NO: 45630 - DNA, 25 bp, Canis familiaris
aaaagcccatgcattcctgaaatag

SEQ ID NO: 45631 - DNA, 25 bp, Canis familiaris
aaaactacttcttccatgccaagtg

SEQ ID NO: 45632 - DNA, 25 bp, Canis familiaris
aaaacttctcacaatctaccgaaga

SEQ ID NO: 45633 - DNA, 25 bp, Canis familiaris
aaaacctcacactcagtcctgagta

SEQ ID NO: 45634 - DNA, 25 bp, Canis familiaris
aaactcctaaccgattctatgctga

SEQ ID NO: 45635 - DNA, 25 bp, Canis familiaris
aaactagcttgagccattctacgct

SEQ ID NO: 45636 - DNA, 25 bp, Canis familiaris
aaactagcttgagccattctacgct

SEQ ID NO: 45637 - DNA, 25 bp, Canis familiaris
aaactgactggaccacttcttctgt

SEQ ID NO: 45638 - DNA, 25 bp, Canis familiaris
aaactgactcaactcaaccagtctt

SEQ ID NO: 45639 - DNA, 25 bp, Canis familiaris
aaactggctctcagcaacttgtctt

SEQ ID NO: 45640 - DNA, 25 bp, Canis familiaris
aaacatggccacagagcctagctct

SEQ ID NO: 45641 - DNA, 25 bp, Canis familiaris
aaacagtgtgcaatgatgtcctggt

SEQ ID NO: 45642 - DNA, 25 bp, Canis familiaris
aacaagatggactttctcgtttagt

SEQ ID NO: 45643 - DNA, 25 bp, Canis familiaris
aaaagtgaacagtgcctagtgaagt

SEQ ID NO: 45644 - DNA, 25 bp, Canis familiaris
aaaactcaccacagcctttgaagaa

SEQ ID NO: 45645 - DNA, 25 bp, Canis familiaris
aaaactatcacaacccacttattca

SEQ ID NO: 45646 - DNA, 25 bp, Canis familiaris
aaactctaacaccacaactgaagta

SEQ ID NO: 45647 - DNA, 25 bp, Canis familiaris
aacagtaaacgccagtagtgaccaa

SEQ ID NO: 45648 - DNA, 25 bp, Canis familiaris
aaactaaatctgcagtgccaggccc

SEQ ID NO: 45649 - DNA, 25 bp, Canis familiaris
aaactcataacccagtctagtcctt

SEQ ID NO: 45650 - DNA, 25 bp, Canis familiaris
aaactcaaagccattcagattcctg

SEQ ID NO: 45651 - DNA, 25 bp, Canis familiaris
aaacatccaaccagctattccctgg

SEQ ID NO: 45652 - DNA, 25 bp, Canis familiaris
aaaacacataccatgtaccctctac

SEQ ID NO: 45653 - DNA, 25 bp, Canis familiaris
aaacaccacaaattctaccacttag

SEQ ID NO: 45654 - DNA, 25 bp, Canis familiaris
aaaactcaacaatttagacctgcaa

SEQ ID NO: 45655 - DNA, 25 bp, Canis familiaris
aaaaactaaaagtgagcctctcaga

SEQ ID NO: 45656 - DNA, 25 bp, Canis familiaris
aaacaacttaacacagagaactcaa

SEQ ID NO: 45657 - DNA, 25 bp, Canis familiaris
aaaaccctgacctgggattctcaga

SEQ ID NO: 45658 - DNA, 25 bp, Canis familiaris
aaaacactaacctaggcctacactg

SEQ ID NO: 45659 - DNA, 25 bp, Canis familiaris
aaacaacaacaacagaccggcacgg

SEQ ID NO: 45660 - DNA, 25 bp, Canis familiaris
aaacaacaacaatatgcctggcagt

SEQ ID NO: 45661 - DNA, 25 bp, Canis familiaris
aaacaaaccaaaatttagatgctca

SEQ ID NO: 45662 - DNA, 25 bp, Canis familiaris
aaaaatatgccttgtgctttagagc

SEQ ID NO: 45663 - DNA, 25 bp, Canis familiaris
aaaaatatactctatgtttatgctg

SEQ ID NO: 45664 - DNA, 25 bp, Canis familiaris
aaacccatacattctgtcctatgct

SEQ ID NO: 45665 - DNA, 25 bp, Canis familiaris
aaaacctactttgctcatgatgccc

SEQ ID NO: 45666 - DNA, 25 bp, Canis familiaris
aaaccctgactatgaatggctgctc

SEQ ID NO: 45667 - DNA, 25 bp, Canis familiaris
aaactgcctgactaattttcatggc

SEQ ID NO: 45668 - DNA, 25 bp, Canis familiaris
aaactgcacagagaattccatcatg

SEQ ID NO: 45669 - DNA, 25 bp, Canis familiaris
aaacccgaacaaaaatcatgcaagg

SEQ ID NO: 45670 - DNA, 25 bp, Canis familiaris
aaacttccacaactacagatagggt

SEQ ID NO: 45671 - DNA, 25 bp, Canis familiaris
aaactggcccacacacgaagagtga

SEQ ID NO: 45672 - DNA, 25 bp, Canis familiaris
aaactggtgtccatcactatagtgg

SEQ ID NO: 45673 - DNA, 25 bp, Canis familiaris
aaaatgtttcacaactccataatgt

SEQ ID NO: 45674 - DNA, 25 bp, Canis familiaris
aaacatttgtgaaccaacataagtt

SEQ ID NO: 45675 - DNA, 25 bp, Canis familiaris
aaaaacttgaagccaccataaatga

SEQ ID NO: 45676 - DNA, 25 bp, Canis familiaris
aaaaagttgcgagcttaaagcatca

SEQ ID NO: 45677 - DNA, 25 bp, Canis familiaris
aaactggtaccactgttgaacactg

SEQ ID NO: 45678 - DNA, 25 bp, Canis familiaris
aaactggtacgcctgcaggtaccgg

SEQ ID NO: 45679 - DNA, 25 bp, Canis familiaris
aaacgtgttcagcctggagctggcc

SEQ ID NO: 45680 - DNA, 25 bp, Canis familiaris
aaaaggccacaggcttggggcgcgt

SEQ ID NO: 45681 - DNA, 25 bp, Canis familiaris
aaaagggactgctgggtggctggga

SEQ ID NO: 45682 - DNA, 25 bp, Canis familiaris
aaaatggaaggatcgaggttggtag

SEQ ID NO: 45683 - DNA, 25 bp, Canis familiaris
aaaatgtgggtatccaagttgcgga

SEQ ID NO: 45684 - DNA, 25 bp, Canis familiaris
aaaatgtactttctccatgttctgg

SEQ ID NO: 45685 - DNA, 25 bp, Canis familiaris
aaacagacacttcttcctatggggc

SEQ ID NO: 45686 - DNA, 25 bp, Canis familiaris
aaacagtagtgtttacctctgccgg

SEQ ID NO: 45687 - DNA, 25 bp, Canis familiaris
aaactatttgatatgttccgtcggt

SEQ ID NO: 45688 - DNA, 25 bp, Canis familiaris
aaacttcctgacttgtttcagaatg

SEQ ID NO: 45689 - DNA, 25 bp, Canis familiaris
aaactggcccacttgattaggaagt

SEQ ID NO: 45690 - DNA, 25 bp, Canis familiaris
aaacaggcttcatttattaataaat

SEQ ID NO: 45691 - DNA, 25 bp, Canis familiaris
aaacaggtctattgcctgctaacac

SEQ ID NO: 45692 - DNA, 25 bp, Canis familiaris
aaacaggtctctccactaatatact

SEQ ID NO: 45693 - DNA, 25 bp, Canis familiaris
aaacagttcctgaaccaacaccagc

SEQ ID NO: 45694 - DNA, 25 bp, Canis familiaris
aaaagctcttccaacgatcaatcca

SEQ ID NO: 45695 - DNA, 25 bp, Canis familiaris
aaaagaataccaatcctatactagt

SEQ ID NO: 45696 - DNA, 25 bp, Canis familiaris
aaaaataagccactgcctgacatcc

SEQ ID NO: 45697 - DNA, 25 bp, Canis familiaris
aaaaagagaggccgtctgagcgccc

SEQ ID NO: 45698 - DNA, 25 bp, Canis familiaris
aaacaggagttgacgttctctgccc

SEQ ID NO: 45699 - DNA, 25 bp, Canis familiaris
aaacagaggatgttcctacatcatc

SEQ ID NO: 45700 - DNA, 25 bp, Canis familiaris
aaacaagcttgatcactatgccatc

SEQ ID NO: 45701 - DNA, 25 bp, Canis familiaris
aaaacagcttgaaatatcccatgca

SEQ ID NO: 45702 - DNA, 25 bp, Canis familiaris
aaaagacctaaattgctcctatcgc

SEQ ID NO: 45703 - DNA, 25 bp, Canis familiaris
aaaaacactcaaatagggacacctg

SEQ ID NO: 45704 - DNA, 25 bp, Canis familiaris
aaaataatgaaaggggggcaggctg

SEQ ID NO: 45705 - DNA, 25 bp, Canis familiaris
aagacagactggcggtggtgggtgg

SEQ ID NO: 45706 - DNA, 25 bp, Canis familiaris
aaaaatgtgggctctggggtgctgg

SEQ ID NO: 45707 - DNA, 25 bp, Canis familiaris
aaaaatgtcccatcttgactgctct

SEQ ID NO: 45708 - DNA, 25 bp, Canis familiaris
aaacaatgccagcctgattggactg

SEQ ID NO: 45709 - DNA, 25 bp, Canis familiaris
aaacacagccaaatgatttttcttt

SEQ ID NO: 45710 - DNA, 25 bp, Canis familiaris
aaacagccccaaattcctgtcaggt

SEQ ID NO: 45711 - DNA, 25 bp, Canis familiaris
aaaaggccctctaacctatgcaggt

SEQ ID NO: 45712 - DNA, 25 bp, Canis familiaris
aaaagcgccatggcttaagccgctg

SEQ ID NO: 45713 - DNA, 25 bp, Canis familiaris
aaaacagctatgaccattaggccta

SEQ ID NO: 45714 - DNA, 25 bp, Canis familiaris
aaaacacttctctacaaggcagatt

SEQ ID NO: 45715 - DNA, 25 bp, Canis familiaris
aaaaccgatttgtacaggcagtata

SEQ ID NO: 45716 - DNA, 25 bp, Canis familiaris
aaaacaatctgtaggccaccgtcat

SEQ ID NO: 45717 - DNA, 25 bp, Canis familiaris
aaaaaatggtgttgccgcgccatct

SEQ ID NO: 45718 - DNA, 25 bp, Canis familiaris
aaaagaagcatattccacggccacc

SEQ ID NO: 45719 - DNA, 25 bp, Canis familiaris
aaaaaataactcgatgctccaacct

SEQ ID NO: 45720 - DNA, 25 bp, Canis familiaris
aaacatacatgctgcttgtccaaac

SEQ ID NO: 45721 - DNA, 25 bp, Canis familiaris
aaacatgaagaccaggcagccaaac

SEQ ID NO: 45722 - DNA, 25 bp, Canis familiaris
aaacagacagcccgggagcaagacc

SEQ ID NO: 45723 - DNA, 25 bp, Canis familiaris
aaaacacagactcgcgttgcaaggc

SEQ ID NO: 45724 - DNA, 25 bp, Canis familiaris
aaaacaaattcacctgccaagtggt

SEQ ID NO: 45725 - DNA, 25 bp, Canis familiaris
aaaaacacgtctcaccactgtggtt

SEQ ID NO: 45726 - DNA, 25 bp, Canis familiaris
aaaaaaccttcctcatcagatgcgg

SEQ ID NO: 45727 - DNA, 25 bp, Canis familiaris
aaaattgcccggccacgatcattgg

SEQ ID NO: 45728 - DNA, 25 bp, Canis familiaris
aaaaagcttccgaataatgcattgg

SEQ ID NO: 45729 - DNA, 25 bp, Canis familiaris
aaaaccaccgtgtataagattggag

SEQ ID NO: 45730 - DNA, 25 bp, Canis familiaris
aaaagctcctcttattacagttaga

SEQ ID NO: 45731 - DNA, 25 bp, Canis familiaris
aaaagcagcattgtgttacttgaag

SEQ ID NO: 45732 - DNA, 25 bp, Canis familiaris
aaaatgcagactgggacgccggggt

SEQ ID NO: 45733 - DNA, 25 bp, Canis familiaris
aaacagatgactgaggccctgggcc

SEQ ID NO: 45734 - DNA, 25 bp, Canis familiaris
aaacagtgcttctggccggaagttt

SEQ ID NO: 45735 - DNA, 25 bp, Canis familiaris
aaaagtgtttggtcctggcacaatt

SEQ ID NO: 45736 - DNA, 25 bp, Canis familiaris
aaaagtgttcatttcacaagtaatt

SEQ ID NO: 45737 - DNA, 25 bp, Canis familiaris
aaaagggatattaccaactgagatt

SEQ ID NO: 45738 - DNA, 25 bp, Canis familiaris
aaaaccaaacacccagagctggact

SEQ ID NO: 45739 - DNA, 25 bp, Canis familiaris
aaaaccgttcagtcagcaatgttga

SEQ ID NO: 45740 - DNA, 25 bp, Canis familiaris
aaaatacgttagctgaatgtgtcct

SEQ ID NO: 45741 - DNA, 25 bp, Canis familiaris
aaaagaccttggcgtcattgtccct

SEQ ID NO: 45742 - DNA, 25 bp, Canis familiaris
aaaacatttttgatggacttccact

SEQ ID NO: 45743 - DNA, 25 bp, Canis familiaris
aaacacattttctccatgatttttt

SEQ ID NO: 45744 - DNA, 25 bp, Canis familiaris
aaactattttctttgcatggttgtt

SEQ ID NO: 45745 - DNA, 25 bp, Canis familiaris
aaactattgtagatgtcactggatt

SEQ ID NO: 45746 - DNA, 25 bp, Canis familiaris
aaactttgtgagcgtcagtgttgat

SEQ ID NO: 45747 - DNA, 25 bp, Canis familiaris
aaacatttgtggaaatcactttaat

SEQ ID NO: 45748 - DNA, 25 bp, Canis familiaris
aacacaggggggtctctttatcaag

SEQ ID NO: 45749 - DNA, 25 bp, Canis familiaris
aaacagggagtccagtctccgtcat

SEQ ID NO: 45750 - DNA, 25 bp, Canis familiaris
aaacagaggacttcagcctcctttc

SEQ ID NO: 45751 - DNA, 25 bp, Canis familiaris
aaacagaaactattggcctccttgg

SEQ ID NO: 45752 - DNA, 25 bp, Canis familiaris
aaacaataactatcctcccattaag

SEQ ID NO: 45753 - DNA, 25 bp, Canis familiaris
aaacatttttcaaactgccacagta

SEQ ID NO: 45754 - DNA, 25 bp, Canis familiaris
aaactgttctttatctgttgctgta

SEQ ID NO: 45755 - DNA, 25 bp, Canis familiaris
aaactttctgttaatgctgtctagc

SEQ ID NO: 45756 - DNA, 25 bp, Canis familiaris
aaactttggttcaagggcaactcat

SEQ ID NO: 45757 - DNA, 25 bp, Canis familiaris
aaactttctgtccagcagggcaatt

SEQ ID NO: 45758 - DNA, 25 bp, Canis familiaris
gaaacttgtcatcaacgggaagtcc

SEQ ID NO: 45759 - DNA, 25 bp, Canis familiaris
aaactctgtagcacactgaggaaga

SEQ ID NO: 45760 - DNA, 25 bp, Canis familiaris
aaacttgtagttaccatgagcaatg

SEQ ID NO: 45761 - DNA, 25 bp, Canis familiaris
aaacatttagatctccgcaacagag

SEQ ID NO: 45762 - DNA, 25 bp, Canis familiaris
aaacagtgaaatctccgcaacagag

SEQ ID NO: 45763 - DNA, 25 bp, Canis familiaris
aaactgtgagagcttctcccaaggc

SEQ ID NO: 45764 - DNA, 25 bp, Canis familiaris
aaacattccaggaacacccagactc

SEQ ID NO: 45765 - DNA, 25 bp, Canis familiaris
aaaactccagagaccacccgagtat

SEQ ID NO: 45766 - DNA, 25 bp, Canis familiaris
aacagacaaacatggcctccggaat

SEQ ID NO: 45767 - DNA, 25 bp, Canis familiaris
aaacacaaagcaaacacgcactggt

SEQ ID NO: 45768 - DNA, 25 bp, Canis familiaris
aaacaaaggcagcgcggctctgagt

SEQ ID NO: 45769 - DNA, 25 bp, Canis familiaris
aaacacattgggcttgtctctggtc

SEQ ID NO: 45770 - DNA, 25 bp, Canis familiaris
aaacatctcagcaacgatttcttga

SEQ ID NO: 45771 - DNA, 25 bp, Canis familiaris
aaacttcagcattcttttctgtttt

SEQ ID NO: 45772 - DNA, 25 bp, Canis familiaris
aaactgtccatgtttctgtgtgtcc

SEQ ID NO: 45773 - DNA, 25 bp, Canis familiaris
aacacagtccagtttatcgttagct

SEQ ID NO: 45774 - DNA, 25 bp, Canis familiaris
aaacactccgtgtattggttgattt

SEQ ID NO: 45775 - DNA, 25 bp, Canis familiaris
aaaaccactttattgcagtttgatt

SEQ ID NO: 45776 - DNA, 25 bp, Canis familiaris
aaacattcactttccatgcagattt

SEQ ID NO: 45777 - DNA, 25 bp, Canis familiaris
aaacattctccttcgtgtactttag

SEQ ID NO: 45778 - DNA, 25 bp, Canis familiaris
aaactatctcttttcttcatttcta

SEQ ID NO: 45779 - DNA, 25 bp, Canis familiaris
aaacatcctctttcacttattttgg

SEQ ID NO: 45780 - DNA, 25 bp, Canis familiaris
aaaaggcaatcttcctgtttgttgg

SEQ ID NO: 45781 - DNA, 25 bp, Canis familiaris
aaaaggcttcttattcaggtgtgag

SEQ ID NO: 45782 - DNA, 25 bp, Canis familiaris
aaaagtgttctgtggcttgttgtcc

SEQ ID NO: 45783 - DNA, 25 bp, Canis familiaris
aaaagagtcttgtggttattgcatg

SEQ ID NO: 45784 - DNA, 25 bp, Canis familiaris
aaaagagtctatgtcctgttccttc

SEQ ID NO: 45785 - DNA, 25 bp, Canis familiaris
aaaacctgttttctgagtgccatac

SEQ ID NO: 45786 - DNA, 25 bp, Canis familiaris
aaacaattgttttggccaggccata

SEQ ID NO: 45787 - DNA, 25 bp, Canis familiaris
aaacacattcttcataccaggacca

SEQ ID NO: 45788 - DNA, 25 bp, Canis familiaris
aaaagttcaaaatcgggcagccagg

SEQ ID NO: 45789 - DNA, 25 bp, Canis familiaris
aaaacctcaaaatggggatgcctgc

SEQ ID NO: 45790 - DNA, 25 bp, Canis familiaris
aagagaaccaagttcgtgggccact

SEQ ID NO: 45791 - DNA, 25 bp, Canis familiaris
aaaacaacaagctctggtgcccaac

SEQ ID NO: 45792 - DNA, 25 bp, Canis familiaris
aaaacagtcaagcccaaaccagcaa

SEQ ID NO: 45793 - DNA, 25 bp, Canis familiaris
aaaacagataacacagaaccattca

SEQ ID NO: 45794 - DNA, 25 bp, Canis familiaris
aaaaatgatagtggtctggacaatg

SEQ ID NO: 45795 - DNA, 25 bp, Canis familiaris
aaaaatgctcacttgcactaataat

SEQ ID NO: 45796 - DNA, 25 bp, Canis familiaris
aaaaagcatcagctgccgatacacc

SEQ ID NO: 45797 - DNA, 25 bp, Canis familiaris
aaaaacctgggcgatgctcagcccc

SEQ ID NO: 45798 - DNA, 25 bp, Canis familiaris
aaaatctttaggggcgcagctccaa

SEQ ID NO: 45799 - DNA, 25 bp, Canis familiaris
aaaattatgaaacaggcgtcctaca

SEQ ID NO: 45800 - DNA, 25 bp, Canis familiaris
aaaattgctgaaagcgggtgccctc

SEQ ID NO: 45801 - DNA, 25 bp, Canis familiaris
aaaaaggaaatggtggtgcagcggt

SEQ ID NO: 45802 - DNA, 25 bp, Canis familiaris
aaaacagtagaagtgggccgtgcct

SEQ ID NO: 45803 - DNA, 25 bp, Canis familiaris
aaaaatggacaactggggggctatg

SEQ ID NO: 45804 - DNA, 25 bp, Canis familiaris
aaaaaggtcccttgcagctgggctt

SEQ ID NO: 45805 - DNA, 25 bp, Canis familiaris
aaaaaagtacacaatacaggactct

SEQ ID NO: 45806 - DNA, 25 bp, Canis familiaris
aaacaccatgttaagctgcaagaaa

SEQ ID NO: 45807 - DNA, 25 bp, Canis familiaris
aaacactgctggttatctgacatgc

SEQ ID NO: 45808 - DNA, 25 bp, Canis familiaris
aaacagcctggagggctacagccgc

SEQ ID NO: 45809 - DNA, 25 bp, Canis familiaris
aaactgcacgaggcgggagcttctg

SEQ ID NO: 45810 - DNA, 25 bp, Canis familiaris
aaactccaaccactgagctgtcttt

SEQ ID NO: 45811 - DNA, 25 bp, Canis familiaris
aaactcaccagtatgcacttctatg

SEQ ID NO: 45812 - DNA, 25 bp, Canis familiaris
aaactcagctacttatgcactttct

SEQ ID NO: 45813 - DNA, 25 bp, Canis familiaris
aaacatctctcaccaacaaattcta

SEQ ID NO: 45814 - DNA, 25 bp, Canis familiaris
aaactcttccattaaaacctgcatc

SEQ ID NO: 45815 - DNA, 25 bp, Canis familiaris
aaacattttcaatacagccacatgc

SEQ ID NO: 45816 - DNA, 25 bp, Canis familiaris
aaaatttaccattgtacatcaactg

SEQ ID NO: 45817 - DNA, 25 bp, Canis familiaris
aaaattaacccatacaagcacaata

SEQ ID NO: 45818 - DNA, 25 bp, Canis familiaris
aaaactataccatgtaaataagcca

SEQ ID NO: 45819 - DNA, 25 bp, Canis familiaris
aaaatctgaccctgtagacattaca

SEQ ID NO: 45820 - DNA, 25 bp, Canis familiaris
aaacacttcccatgtcagactgtgg

SEQ ID NO: 45821 - DNA, 25 bp, Canis familiaris
aaacaccctcacaaataactgatgg

SEQ ID NO: 45822 - DNA, 25 bp, Canis familiaris
aaaattcctagatctccactcatgg

SEQ ID NO: 45823 - DNA, 25 bp, Canis familiaris
aaaacatccaaaacggcatttgagt

SEQ ID NO: 45824 - DNA, 25 bp, Canis familiaris
aaaatccaaaaactggcatttgagt

SEQ ID NO: 45825 - DNA, 25 bp, Canis familiaris
aaaatccaatgggcacggtgtagag

SEQ ID NO: 45826 - DNA, 25 bp, Canis familiaris
aaaacggagttcttggttcagatgc

SEQ ID NO: 45827 - DNA, 25 bp, Canis familiaris
aaaacgtgaacacttgtcattcaga

SEQ ID NO: 45828 - DNA, 25 bp, Canis familiaris
aaaactgtgagtcctaatgattgta

SEQ ID NO: 45829 - DNA, 25 bp, Canis familiaris
aaactcgggaccaacatgttctgaa

SEQ ID NO: 45830 - DNA, 25 bp, Canis familiaris
aaactgcgtgcttggctaattcgtg

SEQ ID NO: 45831 - DNA, 25 bp, Canis familiaris
aaactcgccattactgaattcagct

SEQ ID NO: 45832 - DNA, 25 bp, Canis familiaris
aaactcctgcacttgctgtttagtc

SEQ ID NO: 45833 - DNA, 25 bp, Canis familiaris
aaacatactgagcctctgtctgtga

SEQ ID NO: 45834 - DNA, 25 bp, Canis familiaris
aaaacatctgggcctgttggagaaa

SEQ ID NO: 45835 - DNA, 25 bp, Canis familiaris
aaaactcttgatctcttgggcaacc

SEQ ID NO: 45836 - DNA, 25 bp, Canis familiaris
aaaaactattcatcttggggcgcct

SEQ ID NO: 45837 - DNA, 25 bp, Canis familiaris
aaaatgactttcgactctgggacct

SEQ ID NO: 45838 - DNA, 25 bp, Canis familiaris
aaaaatgtttcttcttgggcagcct

SEQ ID NO: 45839 - DNA, 25 bp, Canis familiaris
aaaaatgtgttctgttcttgtgccg

SEQ ID NO: 45840 - DNA, 25 bp, Canis familiaris
aaaaatgattgcttctttctctacc

SEQ ID NO: 45841 - DNA, 25 bp, Canis familiaris
aaacaagactcttttcctgcatctt

SEQ ID NO: 45842 - DNA, 25 bp, Canis familiaris
aaacactggctcaaattcccactgt

SEQ ID NO: 45843 - DNA, 25 bp, Canis familiaris
aaaacgggccacaatcaccgatgtg

SEQ ID NO: 45844 - DNA, 25 bp, Canis familiaris
aaaacaaacaccatcatcccattgc

SEQ ID NO: 45845 - DNA, 25 bp, Canis familiaris
aaaacaagaacacactcccatgcta

SEQ ID NO: 45846 - DNA, 25 bp, Canis familiaris
aaaacacgatacagaccgtctccaa

SEQ ID NO: 45847 - DNA, 25 bp, Canis familiaris
aaaaggtgataccaaccgatctcca

SEQ ID NO: 45848 - DNA, 25 bp, Canis familiaris
aaaatggtgatcccaaagccttctt

SEQ ID NO: 45849 - DNA, 25 bp, Canis familiaris
aaacaggtgtgtccacctgccttcc

SEQ ID NO: 45850 - DNA, 25 bp, Canis familiaris
aaacatggtgctggtgacttccgtg

SEQ ID NO: 45851 - DNA, 25 bp, Canis familiaris
aaacatgcttcagatgacttccctt

SEQ ID NO: 45852 - DNA, 25 bp, Canis familiaris
aaacatctctcaaatactacctcac

SEQ ID NO: 45853 - DNA, 25 bp, Canis familiaris
aaacatttcatacaccacctgacaa

SEQ ID NO: 45854 - DNA, 25 bp, Canis familiaris
aaaatttctagctgtccttggagaa

SEQ ID NO: 45855 - DNA, 25 bp, Canis familiaris
aaaattaaagccctctccaggtgca

SEQ ID NO: 45856 - DNA, 25 bp, Canis familiaris
aaacttgtcaagcacagtccaggcg

SEQ ID NO: 45857 - DNA, 25 bp, Canis familiaris
aaacttatctatcacgttcgttctc

SEQ ID NO: 45858 - DNA, 25 bp, Canis familiaris
aaacttatcttcaaggcttcttcac

SEQ ID NO: 45859 - DNA, 25 bp, Canis familiaris
aaacttactgcctatgctttttatc

SEQ ID NO: 45860 - DNA, 25 bp, Canis familiaris
aaacaacactctgctgctattttaa

SEQ ID NO: 45861 - DNA, 25 bp, Canis familiaris
aaacaccagtagatgcttattccaa

SEQ ID NO: 45862 - DNA, 25 bp, Canis familiaris
aaacaccttagtgggacatcttcac

SEQ ID NO: 45863 - DNA, 25 bp, Canis familiaris
aaaacccaagaaccacagtgatcac

SEQ ID NO: 45864 - DNA, 25 bp, Canis familiaris
aaaacgtcggttgcagcagctgacc

SEQ ID NO: 45865 - DNA, 25 bp, Canis familiaris
aacaccgacgttcacacgtgtgcaa

SEQ ID NO: 45866 - DNA, 25 bp, Canis familiaris
aaacacgtagttcagatctcttgca

SEQ ID NO: 45867 - DNA, 25 bp, Canis familiaris
aaacatttagcctgtgattgctgga

SEQ ID NO: 45868 - DNA, 25 bp, Canis familiaris
aaaatttaagtgcgtgtgtagagtt

SEQ ID NO: 45869 - DNA, 25 bp, Canis familiaris
aaaaggccctgtgtgtgtttgagta

SEQ ID NO: 45870 - DNA, 25 bp, Canis familiaris
aaaatgccacactcttgctttttta

SEQ ID NO: 45871 - DNA, 25 bp, Canis familiaris
aaacagccagacacttgattatctt

SEQ ID NO: 45872 - DNA, 25 bp, Canis familiaris
aaaacagggcagatcatttatttga

SEQ ID NO: 45873 - DNA, 25 bp, Canis familiaris
aaaacagcggcaactattcctgctc

SEQ ID NO: 45874 - DNA, 25 bp, Canis familiaris
aaacaaagccagacaatccttcctg

SEQ ID NO: 45875 - DNA, 25 bp, Canis familiaris
aaaaaagcggataatgacattgcca

SEQ ID NO: 45876 - DNA, 25 bp, Canis familiaris
aaaaatcagggtcacacaatccagt

SEQ ID NO: 45877 - DNA, 25 bp, Canis familiaris
aacagactcagacctggaaccctag

SEQ ID NO: 45878 - DNA, 25 bp, Canis familiaris
aacatactatactggaacaagttga

SEQ ID NO: 45879 - DNA, 25 bp, Canis familiaris
aaaactatccagggaaatatgttgg

SEQ ID NO: 45880 - DNA, 25 bp, Canis familiaris
aaaacttccagttgctttgtctttg

SEQ ID NO: 45881 - DNA, 25 bp, Canis familiaris
aaaaatcatgcaagggtgtttttat

SEQ ID NO: 45882 - DNA, 25 bp, Canis familiaris
aaaagtgacagccggctgtggattt

SEQ ID NO: 45883 - DNA, 25 bp, Canis familiaris
aaaagtccgcagctgtgaacaaatt

SEQ ID NO: 45884 - DNA, 25 bp, Canis familiaris
aaaaaggccagtccatcgacgacat

SEQ ID NO: 45885 - DNA, 25 bp, Canis familiaris
aaaaaggcgcagacctcagccatac

SEQ ID NO: 45886 - DNA, 25 bp, Canis familiaris
aaaaatctccatactcacaggtccc

SEQ ID NO: 45887 - DNA, 25 bp, Canis familiaris
aaaaattgactcacacttgtcccca

SEQ ID NO: 45888 - DNA, 25 bp, Canis familiaris
aacaagcctaggagacttgtaccgc

SEQ ID NO: 45889 - DNA, 25 bp, Canis familiaris
aaaaccaaggagcaggcgtcccatc

SEQ ID NO: 45890 - DNA, 25 bp, Canis familiaris
aaaagccaagtctgaggggcgcccg

SEQ ID NO: 45891 - DNA, 25 bp, Canis familiaris
aacaacctctttcagggggactcag

SEQ ID NO: 45892 - DNA, 25 bp, Canis familiaris
aaaaggtgtcttcagtagcggtttg

SEQ ID NO: 45893 - DNA, 25 bp, Canis familiaris
aaaaggtggcccaccagaggtctat

SEQ ID NO: 45894 - DNA, 25 bp, Canis familiaris
aacaagtgggccatttgcgggtcct

SEQ ID NO: 45895 - DNA, 25 bp, Canis familiaris
aacacacggtaattattgggcttca

SEQ ID NO: 45896 - DNA, 25 bp, Canis familiaris
aaacactgaagacacatttggcgcc

SEQ ID NO: 45897 - DNA, 25 bp, Canis familiaris
aaaactgccggactattttccatgc

SEQ ID NO: 45898 - DNA, 25 bp, Canis familiaris
aaaagatccagcactttttccataa

SEQ ID NO: 45899 - DNA, 25 bp, Canis familiaris
aaaaatcattgcactttggtcagaa

SEQ ID NO: 45900 - DNA, 25 bp, Canis familiaris
aaaaatgtgctccactgggtccaaa

SEQ ID NO: 45901 - DNA, 25 bp, Canis familiaris
aaaagttgccagagatgcttcgaaa

SEQ ID NO: 45902 - DNA, 25 bp, Canis familiaris
aaaagcttaagcatacagtaacgaa

SEQ ID NO: 45903 - DNA, 25 bp, Canis familiaris
aaaagctcaagccactaagggacga

SEQ ID NO: 45904 - DNA, 25 bp, Canis familiaris
aaaaggcaacctactgagtggagga

SEQ ID NO: 45905 - DNA, 25 bp, Canis familiaris
aaaaggaaccccgagtgagctgcct

SEQ ID NO: 45906 - DNA, 25 bp, Canis familiaris
aaaattttcacctgagatcgctcca

SEQ ID NO: 45907 - DNA, 25 bp, Canis familiaris
aaaataagtccctgaatcctgatga

SEQ ID NO: 45908 - DNA, 25 bp, Canis familiaris
aaaaaattcacttagcttcttgtga

SEQ ID NO: 45909 - DNA, 25 bp, Canis familiaris
aaaaaaccctcatcttcacttgtat

SEQ ID NO: 45910 - DNA, 25 bp, Canis familiaris
aaaaaggcaccatggcttcagtctt

SEQ ID NO: 45911 - DNA, 25 bp, Canis familiaris
aaaaggagaagacagcctcatttta

SEQ ID NO: 45912 - DNA, 25 bp, Canis familiaris
aaaaccataagacacctatcctgct

SEQ ID NO: 45913 - DNA, 25 bp, Canis familiaris
aatattactacgggaccttcacagt

SEQ ID NO: 45914 - DNA, 25 bp, Canis familiaris
aaaaatcgatggggccgcttcacaa

SEQ ID NO: 45915 - DNA, 25 bp, Canis familiaris
aaaacttatggcagccttcccaatc

SEQ ID NO: 45916 - DNA, 25 bp, Canis familiaris
aaaactctatggagccttttgtgaa

SEQ ID NO: 45917 - DNA, 25 bp, Canis familiaris
aaaaatcttggaggcactaccagct

SEQ ID NO: 45918 - DNA, 25 bp, Canis familiaris
aaacattattggtcctcttcactct

SEQ ID NO: 45919 - DNA, 25 bp, Canis familiaris
aaaaatgcattgttcactttattca

SEQ ID NO: 45920 - DNA, 25 bp, Canis familiaris
aaaacgttgtgtccttgtcttatgt

SEQ ID NO: 45921 - DNA, 25 bp, Canis familiaris
aaaagtttgctctgcattttttgat

SEQ ID NO: 45922 - DNA, 25 bp, Canis familiaris
aaaacttcatctgcgactttaaaat

SEQ ID NO: 45923 - DNA, 25 bp, Canis familiaris
aaaaattcaatgttgatctttcaga

SEQ ID NO: 45924 - DNA, 25 bp, Canis familiaris
aaacacttgcacattatgctttcaa

SEQ ID NO: 45925 - DNA, 25 bp, Canis familiaris
aaacactatggactttcttctctac

SEQ ID NO: 45926 - DNA, 25 bp, Canis familiaris
aaacttctgttgcttttgcattccc

SEQ ID NO: 45927 - DNA, 25 bp, Canis familiaris
aaacatcctgattgtgcttgctttt

SEQ ID NO: 45928 - DNA, 25 bp, Canis familiaris
aaacatacatatttctcatggtctc

SEQ ID NO: 45929 - DNA, 25 bp, Canis familiaris
aaaaattttgtccatggttgcatta

SEQ ID NO: 45930 - DNA, 25 bp, Canis familiaris
aaaaatctttgtcattaccactgaa

SEQ ID NO: 45931 - DNA, 25 bp, Canis familiaris
aaaatctcgattctcaatgacacaa

SEQ ID NO: 45932 - DNA, 25 bp, Canis familiaris
aaaacccatctgtatcatgtaccca

SEQ ID NO: 45933 - DNA, 25 bp, Canis familiaris
aaaacacaccagaatcatttccacg

SEQ ID NO: 45934 - DNA, 25 bp, Canis familiaris
aaaacaacaaataatccatcccagg

SEQ ID NO: 45935 - DNA, 25 bp, Canis familiaris
aaaagcaaaagcagggcagcccggg

SEQ ID NO: 45936 - DNA, 25 bp, Canis familiaris
aaaatcgagtagagccatcggcctc

SEQ ID NO: 45937 - DNA, 25 bp, Canis familiaris
aaaactggatagatgcctcctcctg

SEQ ID NO: 45938 - DNA, 25 bp, Canis familiaris
aaaactggcttagcccacttctgtc

SEQ ID NO: 45939 - DNA, 25 bp, Canis familiaris
aaaatcttgtttgaccacatggttc

SEQ ID NO: 45940 - DNA, 25 bp, Canis familiaris
aaacactttgtcatatccaaggtcc

SEQ ID NO: 45941 - DNA, 25 bp, Canis familiaris
aaacatctttgtagtttatgaagaa

SEQ ID NO: 45942 - DNA, 25 bp, Canis familiaris
aaacagctttgcttgtattgtgaag

SEQ ID NO: 45943 - DNA, 25 bp, Canis familiaris
aaaagcttgatctgttattgctatt

SEQ ID NO: 45944 - DNA, 25 bp, Canis familiaris
aaaagccatgcttgcctatttgctg

SEQ ID NO: 45945 - DNA, 25 bp, Canis familiaris
aaaaatcatgctttctctgtgtgtg

SEQ ID NO: 45946 - DNA, 25 bp, Canis familiaris
aaacaagcctatacacagtttggag

SEQ ID NO: 45947 - DNA, 25 bp, Canis familiaris
aaaactgcctgactaattttcatgg

SEQ ID NO: 45948 - DNA, 25 bp, Canis familiaris
aaaagtcctccgtagtcaatctgta

SEQ ID NO: 45949 - DNA, 25 bp, Canis familiaris
aaaagatccccaatactcagctctt

SEQ ID NO: 45950 - DNA, 25 bp, Canis familiaris
aaaagtcaaccaaaggtgctgcttt

SEQ ID NO: 45951 - DNA, 25 bp, Canis familiaris
aaaacttcaacgtgagctgctcttt

SEQ ID NO: 45952 - DNA, 25 bp, Canis familiaris
aaaaatgtcacaaaggtgctgcttt

SEQ ID NO: 45953 - DNA, 25 bp, Canis familiaris
aaacattgtctcaggaggtgttctg

SEQ ID NO: 45954 - DNA, 25 bp, Canis familiaris
aaaatacacctgggagctgcgtttg

SEQ ID NO: 45955 - DNA, 25 bp, Canis familiaris
aaaatccgttgcaaactcctgtatg

SEQ ID NO: 45956 - DNA, 25 bp, Canis familiaris
aaaaactgtgctaagtctcttgtag

SEQ ID NO: 45957 - DNA, 25 bp, Canis familiaris
aaaacagtctgcacctttgatgtga

SEQ ID NO: 45958 - DNA, 25 bp, Canis familiaris
aaaaagcccagcccacattgattgt

SEQ ID NO: 45959 - DNA, 25 bp, Canis familiaris
aaacagagcatccagcgcaacatgt

SEQ ID NO: 45960 - DNA, 25 bp, Canis familiaris
aaacaaatctggccctcatgtcaga

SEQ ID NO: 45961 - DNA, 25 bp, Canis familiaris
aaacacattcatatcgtcgtcaaac

SEQ ID NO: 45962 - DNA, 25 bp, Canis familiaris
aaaaatgtcatgcctaatagtaaac

SEQ ID NO: 45963 - DNA, 25 bp, Canis familiaris
aaaagtgctgagactgttattaagt

SEQ ID NO: 45964 - DNA, 25 bp, Canis familiaris
aaaactgctgcaccttaatatgaag

SEQ ID NO: 45965 - DNA, 25 bp, Canis familiaris
aaaacatctgcacactgaaattcgt

SEQ ID NO: 45966 - DNA, 25 bp, Canis familiaris
aaacactatgcatagccaactgccc

SEQ ID NO: 45967 - DNA, 25 bp, Canis familiaris
aaaatctaatatcgcagcataaccc

SEQ ID NO: 45968 - DNA, 25 bp, Canis familiaris
aaaagcacaagaagcgtgagacgcc

SEQ ID NO: 45969 - DNA, 25 bp, Canis familiaris
aaaagccaagatagggaagcagccc

SEQ ID NO: 45970 - DNA, 25 bp, Canis familiaris
aacaagtcggtcaggaagccgcgcc

SEQ ID NO: 45971 - DNA, 25 bp, Canis familiaris
aaaagtagaggcagcggcagccgcc

SEQ ID NO: 45972 - DNA, 25 bp, Canis familiaris
aaaaggagttgcacggacaccactt

SEQ ID NO: 45973 - DNA, 25 bp, Canis familiaris
aaacagctgcgtaggaaggaaccca

SEQ ID NO: 45974 - DNA, 25 bp, Canis familiaris
aaacagctgctgtaggggtaccttt

SEQ ID NO: 45975 - DNA, 25 bp, Canis familiaris
aaacagcctatttttgtacctcctg

SEQ ID NO: 45976 - DNA, 25 bp, Canis familiaris
aaaagccagttactgtgtcaccgcc

SEQ ID NO: 45977 - DNA, 25 bp, Canis familiaris
aaaatgtttctaatggtaccagtca

SEQ ID NO: 45978 - DNA, 25 bp, Canis familiaris
aaacatgcttggtcttggggctctt

SEQ ID NO: 45979 - DNA, 25 bp, Canis familiaris
aaacatgtattcttcttgagcaatt

SEQ ID NO: 45980 - DNA, 25 bp, Canis familiaris
aaacagtaccctgctgacactgact

SEQ ID NO: 45981 - DNA, 25 bp, Canis familiaris
aaaaagacacctgaacctgagctcc

SEQ ID NO: 45982 - DNA, 25 bp, Canis familiaris
aaaaggaccgttgcacttgtgctgc

SEQ ID NO: 45983 - DNA, 25 bp, Canis familiaris
aaaagcttcctgtttcattttgcag

SEQ ID NO: 45984 - DNA, 25 bp, Canis familiaris
aaacagtttgcttttcttgcctgaa

SEQ ID NO: 45985 - DNA, 25 bp, Canis familiaris
aaacaggctaactactcttgttgaa

SEQ ID NO: 45986 - DNA, 25 bp, Canis familiaris
aaaactgcaaaacccatctgtatca

SEQ ID NO: 45987 - DNA, 25 bp, Canis familiaris
aaaaatgcaagcccccacatttgca

SEQ ID NO: 45988 - DNA, 25 bp, Canis familiaris
aacacaaaggtcgcagcacatttac

SEQ ID NO: 45989 - DNA, 25 bp, Canis familiaris
aaaaaagttcccttctgcttgatct

SEQ ID NO: 45990 - DNA, 25 bp, Canis familiaris
aaaaattgtttcttcctgctctagt

SEQ ID NO: 45991 - DNA, 25 bp, Canis familiaris
aaaagaattactctctctctctttt

SEQ ID NO: 45992 - DNA, 25 bp, Canis familiaris
aaacagcaatggacgactttcttct

SEQ ID NO: 45993 - DNA, 25 bp, Canis familiaris
aaacagactcagcgactatctcttc

SEQ ID NO: 45994 - DNA, 25 bp, Canis familiaris
aaacagttcattactcaattctgtt

SEQ ID NO: 45995 - DNA, 25 bp, Canis familiaris
aaacagaccatttctaggcttgtat

SEQ ID NO: 45996 - DNA, 25 bp, Canis familiaris
aaaaggccatacttggctctttatc

SEQ ID NO: 45997 - DNA, 25 bp, Canis familiaris
aaaaatgactaattggacttcatca

SEQ ID NO: 45998 - DNA, 25 bp, Canis familiaris
aaaatcacgttgttggactatataa

SEQ ID NO: 45999 - DNA, 25 bp, Canis familiaris
aagaatcagccgtgggttcaatttg

SEQ ID NO: 46000 - DNA, 25 bp, Canis familiaris
aaaaaggatgatttggggccatttg

SEQ ID NO: 46001 - DNA, 25 bp, Canis familiaris
aaaacagggatatggggccaattgt

SEQ ID NO: 46002 - DNA, 25 bp, Canis familiaris
aaaacatcggaatagcagtgccatt

SEQ ID NO: 46003 - DNA, 25 bp, Canis familiaris
aaacacttcgaaaacagcccatctt

SEQ ID NO: 46004 - DNA, 25 bp, Canis familiaris
aacacaatatcgtcacgaccacctc

SEQ ID NO: 46005 - DNA, 25 bp, Canis familiaris
aaaaatgaccatctgccaaccttat

SEQ ID NO: 46006 - DNA, 25 bp, Canis familiaris
aataaagacctgaatcggagcgatt

SEQ ID NO: 46007 - DNA, 25 bp, Canis familiaris
aaaaatgaatttactgctgcaggtt

SEQ ID NO: 46008 - DNA, 25 bp, Canis familiaris
aaacaagagaaaacgctgggtcagc

SEQ ID NO: 46009 - DNA, 25 bp, Canis familiaris
aaaaagtctaagtgctgggctgtgc

SEQ ID NO: 46010 - DNA, 25 bp, Canis familiaris
aaacaatcttaatatttggcaatgc

SEQ ID NO: 46011 - DNA, 25 bp, Canis familiaris
aaacagtctcttttattccaaatgc

SEQ ID NO: 46012 - DNA, 25 bp, Canis familiaris
aaacagattttttttcagcatgaat

SEQ ID NO: 46013 - DNA, 25 bp, Canis familiaris
aaacaattttatattcaagccatta

SEQ ID NO: 46014 - DNA, 25 bp, Canis familiaris
aaacaacttttatgtatggcttcta

SEQ ID NO: 46015 - DNA, 25 bp, Canis familiaris
aaaatactgttgaaaggtggcattc

SEQ ID NO: 46016 - DNA, 25 bp, Canis familiaris
aaaatcactggtccaacttccattt

SEQ ID NO: 46017 - DNA, 25 bp, Canis familiaris
aaaatctctggccaaatcccactta

SEQ ID NO: 46018 - DNA, 25 bp, Canis familiaris
aaacactctagctataaatcccatg

SEQ ID NO: 46019 - DNA, 25 bp, Canis familiaris
aaaactcttcaatgaatcccatgga

SEQ ID NO: 46020 - DNA, 25 bp, Canis familiaris
aaaacccagcaataagccagcagtg

SEQ ID NO: 46021 - DNA, 25 bp, Canis familiaris
aaacacagccgaagagaagagaaag

SEQ ID NO: 46022 - DNA, 25 bp, Canis familiaris
aacaccagaggtccagagcgaaaag

SEQ ID NO: 46023 - DNA, 25 bp, Canis familiaris
aacacctgggtggcagagaagacca

SEQ ID NO: 46024 - DNA, 25 bp, Canis familiaris
aaaatcttggaggcactaccagctc

SEQ ID NO: 46025 - DNA, 25 bp, Canis familiaris
aaaaccaggactgcagccctgtctt

SEQ ID NO: 46026 - DNA, 25 bp, Canis familiaris
aaaacctggactgacaccacttgct

SEQ ID NO: 46027 - DNA, 25 bp, Canis familiaris
aaaacttgggaccacgcagagttgt

SEQ ID NO: 46028 - DNA, 25 bp, Canis familiaris
aaaactcgggaccaacatgttctga

SEQ ID NO: 46029 - DNA, 25 bp, Canis familiaris
aacaactgccggtgatactggtagt

SEQ ID NO: 46030 - DNA, 25 bp, Canis familiaris
aaaactgttcagtcgtagctgtcta

SEQ ID NO: 46031 - DNA, 25 bp, Canis familiaris
aaacactgattctccaagctgggga

SEQ ID NO: 46032 - DNA, 25 bp, Canis familiaris
aaacacttacaagctgttgtgggac

SEQ ID NO: 46033 - DNA, 25 bp, Canis familiaris
aaaactaaatcagctgtggttgtag

SEQ ID NO: 46034 - DNA, 25 bp, Canis familiaris
aaacactcaatatctcctgactttc

SEQ ID NO: 46035 - DNA, 25 bp, Canis familiaris
aaaagcacattcagtgcccaccttg

SEQ ID NO: 46036 - DNA, 25 bp, Canis familiaris
aaacacacatttatggatactctgt

SEQ ID NO: 46037 - DNA, 25 bp, Canis familiaris
aaaataactctttaatacctgcatt

SEQ ID NO: 46038 - DNA, 25 bp, Canis familiaris
aaaaaatactgttgaaaggtggcat

SEQ ID NO: 46039 - DNA, 25 bp, Canis familiaris
aaaaatactgttgaaaggtggcatt

SEQ ID NO: 46040 - DNA, 25 bp, Canis familiaris
aaaaatgcctttgagacagtttctt

SEQ ID NO: 46041 - DNA, 25 bp, Canis familiaris
aaacaacactttgaatggcttatca

SEQ ID NO: 46042 - DNA, 25 bp, Canis familiaris
aaacacaccttttaatcactctgaa

SEQ ID NO: 46043 - DNA, 25 bp, Canis familiaris
aaacacaccagaatcatttccacga

SEQ ID NO: 46044 - DNA, 25 bp, Canis familiaris
aaaagcagccaaccatctttcaaaa

SEQ ID NO: 46045 - DNA, 25 bp, Canis familiaris
aaaagcccctgcttccattaaatca

SEQ ID NO: 46046 - DNA, 25 bp, Canis familiaris
aaaatgtagacttaccagtcaaaat

SEQ ID NO: 46047 - DNA, 25 bp, Canis familiaris
aaaactctgacttacacaaaactgt

SEQ ID NO: 46048 - DNA, 25 bp, Canis familiaris
aaaacttgcctttccatgcaacact

SEQ ID NO: 46049 - DNA, 25 bp, Canis familiaris
aaacacacagcaccttcaagaacac

SEQ ID NO: 46050 - DNA, 25 bp, Canis familiaris
aaaatgacagcccttgcagtaaccc

SEQ ID NO: 46051 - DNA, 25 bp, Canis familiaris
aaacaagacccatagtacctcacat

SEQ ID NO: 46052 - DNA, 25 bp, Canis familiaris
aaaaaatcctcatcaaatcctcacc

SEQ ID NO: 46053 - DNA, 25 bp, Canis familiaris
aacatacaatccgtaactacccagc

SEQ ID NO: 46054 - DNA, 25 bp, Canis familiaris
aaaacgttcacttgacagacaccaa

SEQ ID NO: 46055 - DNA, 25 bp, Canis familiaris
aaaatatttcctcatcagaccaaat

SEQ ID NO: 46056 - DNA, 25 bp, Canis familiaris
aaaaattcttctcagacatgaaaat

SEQ ID NO: 46057 - DNA, 25 bp, Canis familiaris
aaaaaatttcgtagtgcagtggcaa

SEQ ID NO: 46058 - DNA, 25 bp, Canis familiaris
aaaaacttatttagagtgttgcata

SEQ ID NO: 46059 - DNA, 25 bp, Canis familiaris
aaaaattttattgtgctgttctaat

SEQ ID NO: 46060 - DNA, 25 bp, Canis familiaris
aaaaaagtctctgttctgatcctac

SEQ ID NO: 46061 - DNA, 25 bp, Canis familiaris
aaaaacatgtgcaggctctctgtcc

SEQ ID NO: 46062 - DNA, 25 bp, Canis familiaris
aaaaggctgtgtgggacttggccct

SEQ ID NO: 46063 - DNA, 25 bp, Canis familiaris
aaaagaggatgtgtggtgttgcccc

SEQ ID NO: 46064 - DNA, 25 bp, Canis familiaris
aaaaggagcaccctggtggctccct

SEQ ID NO: 46065 - DNA, 25 bp, Canis familiaris
aaaatgagaatccagggtagccctg

SEQ ID NO: 46066 - DNA, 25 bp, Canis familiaris
aaaagagatacgccaggtctgccac

SEQ ID NO: 46067 - DNA, 25 bp, Canis familiaris
aaaagatatcctccgtcatatggcc

SEQ ID NO: 46068 - DNA, 25 bp, Canis familiaris
aaaagatttattatcaaggggcaat

SEQ ID NO: 46069 - DNA, 25 bp, Canis familiaris
aaaaagtctcttatgcattggggca

SEQ ID NO: 46070 - DNA, 25 bp, Canis familiaris
aaaagcgtcctgagccaaatgggca

SEQ ID NO: 46071 - DNA, 25 bp, Canis familiaris
aaaagcgtcctgagccaaatgggca

SEQ ID NO: 46072 - DNA, 25 bp, Canis familiaris
aaaagcgtcctgagcgaagatgggc

SEQ ID NO: 46073 - DNA, 25 bp, Canis familiaris
aacaagttctgtaaaggcaatggga

SEQ ID NO: 46074 - DNA, 25 bp, Canis familiaris
aaaaattgtgattgaagaccattta

SEQ ID NO: 46075 - DNA, 25 bp, Canis familiaris
aaaaactggattcatagctcattat

SEQ ID NO: 46076 - DNA, 25 bp, Canis familiaris
aaaacacaggagtagatcccataat

SEQ ID NO: 46077 - DNA, 25 bp, Canis familiaris
aaaacaatagtgaagtcgtcatatg

SEQ ID NO: 46078 - DNA, 25 bp, Canis familiaris
aaaacaaatggcaagctggtaagct

SEQ ID NO: 46079 - DNA, 25 bp, Canis familiaris
aaaacaaatgtcaagttcacaactt

SEQ ID NO: 46080 - DNA, 25 bp, Canis familiaris
aaaagaaatgttaatatcaccagta

SEQ ID NO: 46081 - DNA, 25 bp, Canis familiaris
aaaatgctgatgcttctaaacccca

SEQ ID NO: 46082 - DNA, 25 bp, Canis familiaris
aaaatctgtgccataagaccgtccc

SEQ ID NO: 46083 - DNA, 25 bp, Canis familiaris
aaaataatgccctggactggaccca

SEQ ID NO: 46084 - DNA, 25 bp, Canis familiaris
aaaattgagccttgggacgtgccca

SEQ ID NO: 46085 - DNA, 25 bp, Canis familiaris
aaaattgtcagctgttacttcttca

SEQ ID NO: 46086 - DNA, 25 bp, Canis familiaris
aaacacacttgatgttcacttttgt

SEQ ID NO: 46087 - DNA, 25 bp, Canis familiaris
aaaaccaataaagtgcatttgtata

SEQ ID NO: 46088 - DNA, 25 bp, Canis familiaris
aacaagcctatacacagtttggagg

SEQ ID NO: 46089 - DNA, 25 bp, Canis familiaris
aaaagaatgctaccacagccctgaa

SEQ ID NO: 46090 - DNA, 25 bp, Canis familiaris
aaacaagtctcgacagcgtcctatg

SEQ ID NO: 46091 - DNA, 25 bp, Canis familiaris
aaaatttgtgtggatggtatctatg

SEQ ID NO: 46092 - DNA, 25 bp, Canis familiaris
aaaagttgaggccacgtcatctgct

SEQ ID NO: 46093 - DNA, 25 bp, Canis familiaris
aaaattatggacacagttcactaaa

SEQ ID NO: 46094 - DNA, 25 bp, Canis familiaris
aaaacatagtccacaactactcgga

SEQ ID NO: 46095 - DNA, 25 bp, Canis familiaris
aaaacaggttcccaatcatcacatc

SEQ ID NO: 46096 - DNA, 25 bp, Canis familiaris
aaaactggtccaaatgtatagatcc

SEQ ID NO: 46097 - DNA, 25 bp, Canis familiaris
aaaacggtcgctatgctgaacccaa

SEQ ID NO: 46098 - DNA, 25 bp, Canis familiaris
aaaacggtcatgtattgcccacata

SEQ ID NO: 46099 - DNA, 25 bp, Canis familiaris
aaaaagtcatctctgaccctcatgg

SEQ ID NO: 46100 - DNA, 25 bp, Canis familiaris
aaaacaacattgctacacatgctaa

SEQ ID NO: 46101 - DNA, 25 bp, Canis familiaris
aactcaaactggcaacacagctgac

SEQ ID NO: 46102 - DNA, 25 bp, Canis familiaris
aacattcccggctgatacagtgacc

SEQ ID NO: 46103 - DNA, 25 bp, Canis familiaris
aacttccctgcaaatgtaatggatg

SEQ ID NO: 46104 - DNA, 25 bp, Canis familiaris
aacatcccttcacagttgacagagc

SEQ ID NO: 46105 - DNA, 25 bp, Canis familiaris
aacacacacttctccttgaaggaaa

SEQ ID NO: 46106 - DNA, 25 bp, Canis familiaris
aacaagacttagaacctggagggat

SEQ ID NO: 46107 - DNA, 25 bp, Canis familiaris
aaaattgtatgagccctggtgggtt

SEQ ID NO: 46108 - DNA, 25 bp, Canis familiaris
aaaatcattaaggccagtagtgttt

SEQ ID NO: 46109 - DNA, 25 bp, Canis familiaris
aaaacggcacagggcgttgtgtcct

SEQ ID NO: 46110 - DNA, 25 bp, Canis familiaris
aacagactcggggtggtggttggct

SEQ ID NO: 46111 - DNA, 25 bp, Canis familiaris
aaaactgctcctggtggggcaatgt

SEQ ID NO: 46112 - DNA, 25 bp, Canis familiaris
aaaacttcattcttgtgagtcattt

SEQ ID NO: 46113 - DNA, 25 bp, Canis familiaris
aaaacttctattacgagtgacattg

SEQ ID NO: 46114 - DNA, 25 bp, Canis familiaris
aaaacattctggtcacggagagcca

SEQ ID NO: 46115 - DNA, 25 bp, Canis familiaris
aaacaacttgggtctgagaacccag

SEQ ID NO: 46116 - DNA, 25 bp, Canis familiaris
aaacaaggtggactgggaccccatg

SEQ ID NO: 46117 - DNA, 25 bp, Canis familiaris
aaacaaggagatctgtgctgacccc

SEQ ID NO: 46118 - DNA, 25 bp, Canis familiaris
aaaaacaggatcacagtcctccctc

SEQ ID NO: 46119 - DNA, 25 bp, Canis familiaris
aaaaatcattgtattctcctcctct

SEQ ID NO: 46120 - DNA, 25 bp, Canis familiaris
aaaaacatctcactgttacctcctt

SEQ ID NO: 46121 - DNA, 25 bp, Canis familiaris
aaaagaagctcgtggaccagcacct

SEQ ID NO: 46122 - DNA, 25 bp, Canis familiaris
aaaaaagcctgattggagcccctgg

SEQ ID NO: 46123 - DNA, 25 bp, Canis familiaris
aaaagaagtctggttgaccccatga

SEQ ID NO: 46124 - DNA, 25 bp, Canis familiaris
aaaagcagaaccattgacgcccaca

SEQ ID NO: 46125 - DNA, 25 bp, Canis familiaris
aaaatgaaagacacagacagttgaa

SEQ ID NO: 46126 - DNA, 25 bp, Canis familiaris
aaaacaacaaatttggcagctataa

SEQ ID NO: 46127 - DNA, 25 bp, Canis familiaris
aaaacaacatacattctggcaagaa

SEQ ID NO: 46128 - DNA, 25 bp, Canis familiaris
aacaccaacttcaaggctgggggca

SEQ ID NO: 46129 - DNA, 25 bp, Canis familiaris
aaaatctacttcatggctgggtcta

SEQ ID NO: 46130 - DNA, 25 bp, Canis familiaris
aaaaccctgccattttggtgtctat

SEQ ID NO: 46131 - DNA, 25 bp, Canis familiaris
aacaacccatcccaatagattttat

SEQ ID NO: 46132 - DNA, 25 bp, Canis familiaris
aacaacaccatcggtatacttcttg

SEQ ID NO: 46133 - DNA, 25 bp, Canis familiaris
aaaactgcctgcagtaccgactggc

SEQ ID NO: 46134 - DNA, 25 bp, Canis familiaris
aaaactcttgattgtatcgtcctac

SEQ ID NO: 46135 - DNA, 25 bp, Canis familiaris
aaaaccactgatttgctttccatcc

SEQ ID NO: 46136 - DNA, 25 bp, Canis familiaris
aaaagcgcaatgtgtggttcccagc

SEQ ID NO: 46137 - DNA, 25 bp, Canis familiaris
aaaagcttcagtcggagctctcacc

SEQ ID NO: 46138 - DNA, 25 bp, Canis familiaris
aaaacagacagtcctgctgcttacc

SEQ ID NO: 46139 - DNA, 25 bp, Canis familiaris
aaaagcagccaattagtctaaccca

SEQ ID NO: 46140 - DNA, 25 bp, Canis familiaris
aaaatgaccaccattctaaaccatt

SEQ ID NO: 46141 - DNA, 25 bp, Canis familiaris
aacaaaccctgagtcctagaattct

SEQ ID NO: 46142 - DNA, 25 bp, Canis familiaris
aacaccgaacaggacctaagttctg

SEQ ID NO: 46143 - DNA, 25 bp, Canis familiaris
aacaccaggtgagccacttagtcct

SEQ ID NO: 46144 - DNA, 25 bp, Canis familiaris
aacagcggggcacaccgagagcccc

SEQ ID NO: 46145 - DNA, 25 bp, Canis familiaris
aacagcggacgacacaaaactctta

SEQ ID NO: 46146 - DNA, 25 bp, Canis familiaris
aatcaggatttgcaactaaagttat

SEQ ID NO: 46147 - DNA, 25 bp, Canis familiaris
aacagaatcttatacccaactatta

SEQ ID NO: 46148 - DNA, 25 bp, Canis familiaris
aacaggacttaaatacctacagatt

SEQ ID NO: 46149 - DNA, 25 bp, Canis familiaris
aaaaatggtcacaaacttagcagtt

SEQ ID NO: 46150 - DNA, 25 bp, Canis familiaris
aaaatcaggtcccgtcttagcagtt

SEQ ID NO: 46151 - DNA, 25 bp, Canis familiaris
aaaacggtcgatcgctcttgacttg

SEQ ID NO: 46152 - DNA, 25 bp, Canis familiaris
aaaacgtgtataaccgatgatctat

SEQ ID NO: 46153 - DNA, 25 bp, Canis familiaris
aaaacagttcattactcaattctgt

SEQ ID NO: 46154 - DNA, 25 bp, Canis familiaris
aaaactggtcatcactttctaggct

SEQ ID NO: 46155 - DNA, 25 bp, Canis familiaris
aaaactgtgttgcttttgcatcgtc

SEQ ID NO: 46156 - DNA, 25 bp, Canis familiaris
aaaaatgtgtctctttctgcgttgt

SEQ ID NO: 46157 - DNA, 25 bp, Canis familiaris
aaaaatgtgttgttttctcccatgc

SEQ ID NO: 46158 - DNA, 25 bp, Canis familiaris
aaaaatatcttatctttcccgagca

SEQ ID NO: 46159 - DNA, 25 bp, Canis familiaris
aaaacatacttatattctcaccaaa

SEQ ID NO: 46160 - DNA, 25 bp, Canis familiaris
aaaactacatttgcattctaccatg

SEQ ID NO: 46161 - DNA, 25 bp, Canis familiaris
aaaaagaattgtggtctctgcccat

SEQ ID NO: 46162 - DNA, 25 bp, Canis familiaris
aaaaggaatttcccacaccacacat

SEQ ID NO: 46163 - DNA, 25 bp, Canis familiaris
aaaaagagaccgcaaacacacacac

SEQ ID NO: 46164 - DNA, 25 bp, Canis familiaris
aaaaagaacagataacacacacaca

SEQ ID NO: 46165 - DNA, 25 bp, Canis familiaris
aaaaatgtgcataaacacacacaca

SEQ ID NO: 46166 - DNA, 25 bp, Canis familiaris
aaaactgtgagcaaaaagccataga

SEQ ID NO: 46167 - DNA, 25 bp, Canis familiaris
aaaatctgggccagactgtcttgca

SEQ ID NO: 46168 - DNA, 25 bp, Canis familiaris
aacaactgggccaaggccactacac

SEQ ID NO: 46169 - DNA, 25 bp, Canis familiaris
aaaaaggatgtcgatgccgcctaca

SEQ ID NO: 46170 - DNA, 25 bp, Canis familiaris
aaaataggtatcctctgccatctac

SEQ ID NO: 46171 - DNA, 25 bp, Canis familiaris
aacaaactgtaccactaattcattc

SEQ ID NO: 46172 - DNA, 25 bp, Canis familiaris
aaaaagcccagctctaattgttcct

SEQ ID NO: 46173 - DNA, 25 bp, Canis familiaris
aacaccctacactctaagtttatct

SEQ ID NO: 46174 - DNA, 25 bp, Canis familiaris
aaaatcctacattagatactggctt

SEQ ID NO: 46175 - DNA, 25 bp, Canis familiaris
aaaacttcatcatatgaacaggttt

SEQ ID NO: 46176 - DNA, 25 bp, Canis familiaris
aaaatctggcacactggaaagctgt

SEQ ID NO: 46177 - DNA, 25 bp, Canis familiaris
aaaactccacctagaaatagtgcct

SEQ ID NO: 46178 - DNA, 25 bp, Canis familiaris
aaaactcctcctagaagctatctgt

SEQ ID NO: 46179 - DNA, 25 bp, Canis familiaris
aaaactgttcccaagcctacatgtt

SEQ ID NO: 46180 - DNA, 25 bp, Canis familiaris
aacaacgcgtacggagcgctcgatg

SEQ ID NO: 46181 - DNA, 25 bp, Canis familiaris
aacaatccggagtgcggctccaatc

SEQ ID NO: 46182 - DNA, 25 bp, Canis familiaris
aaaatacccatgtgtggctctcctt

SEQ ID NO: 46183 - DNA, 25 bp, Canis familiaris
aaaaacctctgatctggttgactat

SEQ ID NO: 46184 - DNA, 25 bp, Canis familiaris
aaaagtctccaatccagttgattta

SEQ ID NO: 46185 - DNA, 25 bp, Canis familiaris
aaaagtcgtcctgtcactgtgttta

SEQ ID NO: 46186 - DNA, 25 bp, Canis familiaris
aacatgagtggtgcccaccgtgttt

SEQ ID NO: 46187 - DNA, 25 bp, Canis familiaris
aaaagctggtacgcctgcaggtacc

SEQ ID NO: 46188 - DNA, 25 bp, Canis familiaris
aaaagctggtgagacctactgccac

SEQ ID NO: 46189 - DNA, 25 bp, Canis familiaris
aaaaagctgtgaagccctttgcctc

SEQ ID NO: 46190 - DNA, 25 bp, Canis familiaris
aaaaagcttttgccctaatgtgttg

SEQ ID NO: 46191 - DNA, 25 bp, Canis familiaris
aaaaagtggttctgctaatgtctag

SEQ ID NO: 46192 - DNA, 25 bp, Canis familiaris
aaaattggtttcaagccaatgtcat

SEQ ID NO: 46193 - DNA, 25 bp, Canis familiaris
aaaactggtggtttgcatccatggt

SEQ ID NO: 46194 - DNA, 25 bp, Canis familiaris
aaaactgggcagggttcctggctgg

SEQ ID NO: 46195 - DNA, 25 bp, Canis familiaris
aaaatcgctggaggagctctcactg

SEQ ID NO: 46196 - DNA, 25 bp, Canis familiaris
aaaacactgaagcagctctcaccac

SEQ ID NO: 46197 - DNA, 25 bp, Canis familiaris
aaaagattgatacatgcctctccca

SEQ ID NO: 46198 - DNA, 25 bp, Canis familiaris
aaaacatttatttgcattctcctat

SEQ ID NO: 46199 - DNA, 25 bp, Canis familiaris
aaaacatgcctctagacaattcctt

SEQ ID NO: 46200 - DNA, 25 bp, Canis familiaris
aaaagatgccttaatccattcctcg

SEQ ID NO: 46201 - DNA, 25 bp, Canis familiaris
aaaaaggctctattccaccagtgcc

SEQ ID NO: 46202 - DNA, 25 bp, Canis familiaris
aaaaaccacaacttcactagtgctt

SEQ ID NO: 46203 - DNA, 25 bp, Canis familiaris
aaaataccagagaccgagtagctta

SEQ ID NO: 46204 - DNA, 25 bp, Canis familiaris
aaaacaacaacaaagcatgctcagt

SEQ ID NO: 46205 - DNA, 25 bp, Canis familiaris
aaaacaagacctaatgcatcctgat

SEQ ID NO: 46206 - DNA, 25 bp, Canis familiaris
aaaactcagcattttctgatctaga

SEQ ID NO: 46207 - DNA, 25 bp, Canis familiaris
aaaatctcagtatgtctactacaga

SEQ ID NO: 46208 - DNA, 25 bp, Canis familiaris
aacaatgcatcgtaaaaccttcaga

SEQ ID NO: 46209 - DNA, 25 bp, Canis familiaris
aacaagctaatattacacctaaagg

SEQ ID NO: 46210 - DNA, 25 bp, Canis familiaris
aaaatctaattgaacagctatgagc

SEQ ID NO: 46211 - DNA, 25 bp, Canis familiaris
aaaactgaattgtcacaaatagcaa

SEQ ID NO: 46212 - DNA, 25 bp, Canis familiaris
aaaactgcttctgcacttcttgcaa

SEQ ID NO: 46213 - DNA, 25 bp, Canis familiaris
aaaactcttcgccaaatcttcgtca

SEQ ID NO: 46214 - DNA, 25 bp, Canis familiaris
aaaatccttcctgagacttcagcct

SEQ ID NO: 46215 - DNA, 25 bp, Canis familiaris
aaaatgccctaatgaccttgcacct

SEQ ID NO: 46216 - DNA, 25 bp, Canis familiaris
aaaatgccctaatgaccttgcacct

SEQ ID NO: 46217 - DNA, 25 bp, Canis familiaris
aaaatccctgagcaaacttggcctc

SEQ ID NO: 46218 - DNA, 25 bp, Canis familiaris
aaaagcccttgtgcaactcaaacct

SEQ ID NO: 46219 - DNA, 25 bp, Canis familiaris
aaaaggtcattctcagaccacccct

SEQ ID NO: 46220 - DNA, 25 bp, Canis familiaris
aaaaagccatttgatactccccaat

SEQ ID NO: 46221 - DNA, 25 bp, Canis familiaris
aaaagttgctttgtgtcttcccaca

SEQ ID NO: 46222 - DNA, 25 bp, Canis familiaris
aaaacattgcttgtttgtatcacaa

SEQ ID NO: 46223 - DNA, 25 bp, Canis familiaris
aaaaccatttactgtgtgatcatga

SEQ ID NO: 46224 - DNA, 25 bp, Canis familiaris
aaaacctttaatcctgaatcagact

SEQ ID NO: 46225 - DNA, 25 bp, Canis familiaris
aaaacattcttattaccactaacat

SEQ ID NO: 46226 - DNA, 25 bp, Canis familiaris
aaaacattcttatcactacaaacat

SEQ ID NO: 46227 - DNA, 25 bp, Canis familiaris
aaaactctgtaaccacgagccaact

SEQ ID NO: 46228 - DNA, 25 bp, Canis familiaris
aaaacatctggatcccaagtctttt

SEQ ID NO: 46229 - DNA, 25 bp, Canis familiaris
aaaaactggatccccacatttggct

SEQ ID NO: 46230 - DNA, 25 bp, Canis familiaris
aaaaactgaatcccgacagcatcgg

SEQ ID NO: 46231 - DNA, 25 bp, Canis familiaris
aaaaactggatgctcaaccgactga

SEQ ID NO: 46232 - DNA, 25 bp, Canis familiaris
aacaaagctggtcatctaagctgag

SEQ ID NO: 46233 - DNA, 25 bp, Canis familiaris
aacagaaagtgccagaccagattag

SEQ ID NO: 46234 - DNA, 25 bp, Canis familiaris
aacaaaatgttatccagattcatga

SEQ ID NO: 46235 - DNA, 25 bp, Canis familiaris
aaaaaatctcactccatttctataa

SEQ ID NO: 46236 - DNA, 25 bp, Canis familiaris
aaaatatcaccagtatcctttgctt

SEQ ID NO: 46237 - DNA, 25 bp, Canis familiaris
aattaatcccacttcccatggaatg

SEQ ID NO: 46238 - DNA, 25 bp, Canis familiaris
aaaaacatccagcttcacatcagaa

SEQ ID NO: 46239 - DNA, 25 bp, Canis familiaris
aaaactggacagctacatgcaaaag

SEQ ID NO: 46240 - DNA, 25 bp, Canis familiaris
aaaactgtccagactgcagctgcaa

SEQ ID NO: 46241 - DNA, 25 bp, Canis familiaris
aaaagcatgccttacagcttgcaaa

SEQ ID NO: 46242 - DNA, 25 bp, Canis familiaris
aaaactggcatttgagtatgaatct

SEQ ID NO: 46243 - DNA, 25 bp, Canis familiaris
aaaagccagctttgcagtcttcagt

SEQ ID NO: 46244 - DNA, 25 bp, Canis familiaris
aaaagcgatttccagctgttctgta

SEQ ID NO: 46245 - DNA, 25 bp, Canis familiaris
aaaactgattactctccttatgacc

SEQ ID NO: 46246 - DNA, 25 bp, Canis familiaris
aaaagctgatgtatagccctgtata

SEQ ID NO: 46247 - DNA, 25 bp, Canis familiaris
aaaatgtatttcaacccagctcaaa

SEQ ID NO: 46248 - DNA, 25 bp, Canis familiaris
aaaagcttttctaactcaaccacat

SEQ ID NO: 46249 - DNA, 25 bp, Canis familiaris
aaaagcctctatacatactaaccaa

SEQ ID NO: 46250 - DNA, 25 bp, Canis familiaris
aaaacatttaacactgacacatata

SEQ ID NO: 46251 - DNA, 25 bp, Canis familiaris
aaaacttgaagccaccataaatgaa

SEQ ID NO: 46252 - DNA, 25 bp, Canis familiaris
aaaagcttgtcaggtcttaatgtta

SEQ ID NO: 46253 - DNA, 25 bp, Canis familiaris
aacaagccagtcgggcgtggttata

SEQ ID NO: 46254 - DNA, 25 bp, Canis familiaris
aaaagccactccgtgctttggctgt

SEQ ID NO: 46255 - DNA, 25 bp, Canis familiaris
aaaatgccagctaacctgtttgcct

SEQ ID NO: 46256 - DNA, 25 bp, Canis familiaris
aaaaccagcattagcgcctttctgc

SEQ ID NO: 46257 - DNA, 25 bp, Canis familiaris
aaaataatttcaagcctcttgctgc

SEQ ID NO: 46258 - DNA, 25 bp, Canis familiaris
aaaacacattttacccatcatgtta

SEQ ID NO: 46259 - DNA, 25 bp, Canis familiaris
aaaacactttgctgctttattatca

SEQ ID NO: 46260 - DNA, 25 bp, Canis familiaris
aaaacacgcaggttgctcttctgga

SEQ ID NO: 46261 - DNA, 25 bp, Canis familiaris
aaaatacctggagtgctctgctctc

SEQ ID NO: 46262 - DNA, 25 bp, Canis familiaris
aaaagaattgtggtctctgcccata

SEQ ID NO: 46263 - DNA, 25 bp, Canis familiaris
aaaactattgtcatctatccttata

SEQ ID NO: 46264 - DNA, 25 bp, Canis familiaris
aaaacacacttcactttctcttgac

SEQ ID NO: 46265 - DNA, 25 bp, Canis familiaris
aaaacgcacttctaattctccttgt

SEQ ID NO: 46266 - DNA, 25 bp, Canis familiaris
aaaaccctcttattaaccatctgct

SEQ ID NO: 46267 - DNA, 25 bp, Canis familiaris
aaaaccctcttattaaccatctgct

SEQ ID NO: 46268 - DNA, 25 bp, Canis familiaris
aaaaccctcttattaaccatctgct

SEQ ID NO: 46269 - DNA, 25 bp, Canis familiaris
aaaaccctcttattaaccatctgct

SEQ ID NO: 46270 - DNA, 25 bp, Canis familiaris
aaaaccctcttattaaccatctgct

SEQ ID NO: 46271 - DNA, 25 bp, Canis familiaris
aaaacatcttcctcaaactctgtct

SEQ ID NO: 46272 - DNA, 25 bp, Canis familiaris
aacaacacttcctcaagactgcagt

SEQ ID NO: 46273 - DNA, 25 bp, Canis familiaris
aacaacactctgtactaggcctgtg

SEQ ID NO: 46274 - DNA, 25 bp, Canis familiaris
aaaacatcttgtgctttccttgtct

SEQ ID NO: 46275 - DNA, 25 bp, Canis familiaris
aaaagcattcttgcttgctctctct

SEQ ID NO: 46276 - DNA, 25 bp, Canis familiaris
aaaacacactgtgctggccattctt

SEQ ID NO: 46277 - DNA, 25 bp, Canis familiaris
aaaaccatctgttctcgatctttca

SEQ ID NO: 46278 - DNA, 25 bp, Canis familiaris
aaaatgcctccttgcacaatttgat

SEQ ID NO: 46279 - DNA, 25 bp, Canis familiaris
aaaatgttcactggcactatgtata

SEQ ID NO: 46280 - DNA, 25 bp, Canis familiaris
aaaactgaacattgcatgcctgtaa

SEQ ID NO: 46281 - DNA, 25 bp, Canis familiaris
aaaactgagccattccctgagttgt

SEQ ID NO: 46282 - DNA, 25 bp, Canis familiaris
aacacactgcaggagttcctgaaat

SEQ ID NO: 46283 - DNA, 25 bp, Canis familiaris
aaaagctaagagtatcctatgtatt

SEQ ID NO: 46284 - DNA, 25 bp, Canis familiaris
aaaactaacacgttctcagatatta

SEQ ID NO: 46285 - DNA, 25 bp, Canis familiaris
aaaatttacctgatctctacttgag

SEQ ID NO: 46286 - DNA, 25 bp, Canis familiaris
aaaatctgatgccctggtctggagt

SEQ ID NO: 46287 - DNA, 25 bp, Canis familiaris
aacaacttccgcatgattgagaggc

SEQ ID NO: 46288 - DNA, 25 bp, Canis familiaris
aacaactcctcctatgatcaagatg

SEQ ID NO: 46289 - DNA, 25 bp, Canis familiaris
aaaactgcacattctgatcaacgtc

SEQ ID NO: 46290 - DNA, 25 bp, Canis familiaris
aaaactcatcatattcatacccctg

SEQ ID NO: 46291 - DNA, 25 bp, Canis familiaris
aaaaccacaatattataccactata

SEQ ID NO: 46292 - DNA, 25 bp, Canis familiaris
aaaaccccaaaatcacacatacact

SEQ ID NO: 46293 - DNA, 25 bp, Canis familiaris
aaaacccacagaaactcatcacaaa

SEQ ID NO: 46294 - DNA, 25 bp, Canis familiaris
aaaacctctagcaaacacacacact

SEQ ID NO: 46295 - DNA, 25 bp, Canis familiaris
aaaaccactacgatggcaccactgg

SEQ ID NO: 46296 - DNA, 25 bp, Canis familiaris
aacaacagggagcttggcacccggc

SEQ ID NO: 46297 - DNA, 25 bp, Canis familiaris
aacaagggtgagagtggcccccagc

SEQ ID NO: 46298 - DNA, 25 bp, Canis familiaris
aaaaggcgaagcacgacttgcccag

SEQ ID NO: 46299 - DNA, 25 bp, Canis familiaris
aacaagggataaaccttcgatccag

SEQ ID NO: 46300 - DNA, 25 bp, Canis familiaris
aacaacatgtgaaaaccttcttagc

SEQ ID NO: 46301 - DNA, 25 bp, Canis familiaris
aaaacagtgcatcagtcgatttgaa

SEQ ID NO: 46302 - DNA, 25 bp, Canis familiaris
aacaagcaagcccagtcgcatttaa

SEQ ID NO: 46303 - DNA, 25 bp, Canis familiaris
aaaacacagatctgctccatccata

SEQ ID NO: 46304 - DNA, 25 bp, Canis familiaris
aaaacagctgtctgtgacatcccac

SEQ ID NO: 46305 - DNA, 25 bp, Canis familiaris
aaaacactgagctcttcagctccgc

SEQ ID NO: 46306 - DNA, 25 bp, Canis familiaris
aaaagcctgcagtcactgcagcccc

SEQ ID NO: 46307 - DNA, 25 bp, Canis familiaris
aaaacacgaatcatggcgccagcta

SEQ ID NO: 46308 - DNA, 25 bp, Canis familiaris
aaaacatatgaaactcagcaggagt

SEQ ID NO: 46309 - DNA, 25 bp, Canis familiaris
aaaatcagctacatcttcatgggat

SEQ ID NO: 46310 - DNA, 25 bp, Canis familiaris
aaaatgcgctgtgcgctctcaacgt

SEQ ID NO: 46311 - DNA, 25 bp, Canis familiaris
aaaactgatctgtagcctcaaaaaa

SEQ ID NO: 46312 - DNA, 25 bp, Canis familiaris
aaaagctgtctgtcacatcacaaaa

SEQ ID NO: 46313 - DNA, 25 bp, Canis familiaris
aaaatccttgtaatgcagccaaagc

SEQ ID NO: 46314 - DNA, 25 bp, Canis familiaris
aaaacagttgtactgcttccaagca

SEQ ID NO: 46315 - DNA, 25 bp, Canis familiaris
aaaacagtgaaatctccgcaacaga

SEQ ID NO: 46316 - DNA, 25 bp, Canis familiaris
taaaatagtacccacgaccagtcag

SEQ ID NO: 46317 - DNA, 25 bp, Canis familiaris
aaaatggtacagagcgagccagcca

SEQ ID NO: 46318 - DNA, 25 bp, Canis familiaris
aaaaggcaacagtgggcctgcgcag

SEQ ID NO: 46319 - DNA, 25 bp, Canis familiaris
aaaatgtcaacctggggctcacagc

SEQ ID NO: 46320 - DNA, 25 bp, Canis familiaris
aaaagcccccaaatgcagagctcac

SEQ ID NO: 46321 - DNA, 25 bp, Canis familiaris
aaaaggtcccaaacagcagtgcatg

SEQ ID NO: 46322 - DNA, 25 bp, Canis familiaris
aaaagcttctaatacaggtgctggg

SEQ ID NO: 46323 - DNA, 25 bp, Canis familiaris
aaaagcacccttctcggtgcaggga

SEQ ID NO: 46324 - DNA, 25 bp, Canis familiaris
aaccagaccgttgacgattggggag

SEQ ID NO: 46325 - DNA, 25 bp, Canis familiaris
aacgtgaattttgcaaacaggggag

SEQ ID NO: 46326 - DNA, 25 bp, Canis familiaris
aacagtcccgtagcaaacaggcaga

SEQ ID NO: 46327 - DNA, 25 bp, Canis familiaris
aacaatccccaagagacacgaactg

SEQ ID NO: 46328 - DNA, 25 bp, Canis familiaris
aaaatacgccaatgagactgaaact

SEQ ID NO: 46329 - DNA, 25 bp, Canis familiaris
aacaacccgcagacgtgacgtcaac

SEQ ID NO: 46330 - DNA, 25 bp, Canis familiaris
aacaagcccgatggactgaagtcaa

SEQ ID NO: 46331 - DNA, 25 bp, Canis familiaris
aaaactcacattgactagagataga

SEQ ID NO: 46332 - DNA, 25 bp, Canis familiaris
aaaagtcagctttactacagatgaa

SEQ ID NO: 46333 - DNA, 25 bp, Canis familiaris
aaaacttgcatcatcctatagagga

SEQ ID NO: 46334 - DNA, 25 bp, Canis familiaris
aaaacgagagcacctcttactggag

SEQ ID NO: 46335 - DNA, 25 bp, Canis familiaris
aaaacagacccagcttcagcatgcg

SEQ ID NO: 46336 - DNA, 25 bp, Canis familiaris
aacaactaataatcttgcagctcgg

SEQ ID NO: 46337 - DNA, 25 bp, Canis familiaris
aaaatctactcatactcatgctccg

SEQ ID NO: 46338 - DNA, 25 bp, Canis familiaris
aaaagagactctacgctagctccag

SEQ ID NO: 46339 - DNA, 25 bp, Canis familiaris
aaaagcaagcctacatctgtgccca

SEQ ID NO: 46340 - DNA, 25 bp, Canis familiaris
aaaatgaaccctaattgcctgacag

SEQ ID NO: 46341 - DNA, 25 bp, Canis familiaris
aaaagaacacacgcgtgcgcgcaca

SEQ ID NO: 46342 - DNA, 25 bp, Canis familiaris
aaaataatcagccgcggggcccatt

SEQ ID NO: 46343 - DNA, 25 bp, Canis familiaris
aaaagacttgggctgggccactgct

SEQ ID NO: 46344 - DNA, 25 bp, Canis familiaris
aaaagatggatggagcctgggcccc

SEQ ID NO: 46345 - DNA, 25 bp, Canis familiaris
aacagaaggtggcctcaggcctcct

SEQ ID NO: 46346 - DNA, 25 bp, Canis familiaris
aacaaagcaatgagctcgccctggt

SEQ ID NO: 46347 - DNA, 25 bp, Canis familiaris
aaaatagcgcagatgctccacacta

SEQ ID NO: 46348 - DNA, 25 bp, Canis familiaris
aacaaagcctgagccacacatatcc

SEQ ID NO: 46349 - DNA, 25 bp, Canis familiaris
aaaatgaccagaaataccagatact

SEQ ID NO: 46350 - DNA, 25 bp, Canis familiaris
aaaagtcctgtctataccatgcatt

SEQ ID NO: 46351 - DNA, 25 bp, Canis familiaris
aaaactcagtgttctgaccacccat

SEQ ID NO: 46352 - DNA, 25 bp, Canis familiaris
aaaaccatcttttgacctccagata

SEQ ID NO: 46353 - DNA, 25 bp, Canis familiaris
aaaaccatgtttgaattgaagctat

SEQ ID NO: 46354 - DNA, 25 bp, Canis familiaris
aaaacatatgtgatacaatttgatc

SEQ ID NO: 46355 - DNA, 25 bp, Canis familiaris
aaaacattggaatcatgctcgtctc

SEQ ID NO: 46356 - DNA, 25 bp, Canis familiaris
aaaagagtgagcaaccctcgtcatc

SEQ ID NO: 46357 - DNA, 25 bp, Canis familiaris
aaaagaaatgcatacatcccctcca

SEQ ID NO: 46358 - DNA, 25 bp, Canis familiaris
aaaagaaggcaggcttcctactcca

SEQ ID NO: 46359 - DNA, 25 bp, Canis familiaris
aaaaggagcagcagctctcctggct

SEQ ID NO: 46360 - DNA, 25 bp, Canis familiaris
aaaatggccagcagagctgcgctca

SEQ ID NO: 46361 - DNA, 25 bp, Canis familiaris
aaaactgacagattggtgtgctagg

SEQ ID NO: 46362 - DNA, 25 bp, Canis familiaris
aacaacgtcagatgttctccagggc

SEQ ID NO: 46363 - DNA, 25 bp, Canis familiaris
aacacaccattatgattctcccagg

SEQ ID NO: 46364 - DNA, 25 bp, Canis familiaris
aaaatagatctctgttcccaagctc

SEQ ID NO: 46365 - DNA, 25 bp, Canis familiaris
aacaatttgccacgttcctaatgat

SEQ ID NO: 46366 - DNA, 25 bp, Canis familiaris
aaaatgttgctctctttctcagcag

SEQ ID NO: 46367 - DNA, 25 bp, Canis familiaris
aaaagtgcatgtgatgtttccagtg

SEQ ID NO: 46368 - DNA, 25 bp, Canis familiaris
aaaagtgcatgccatcttttccttc

SEQ ID NO: 46369 - DNA, 25 bp, Canis familiaris
aacaaagcaggttttatcaattcaa

SEQ ID NO: 46370 - DNA, 25 bp, Canis familiaris
aaaacccagctagctgccaactaag

SEQ ID NO: 46371 - DNA, 25 bp, Canis familiaris
aaaactgacctagcagacaagctga

SEQ ID NO: 46372 - DNA, 25 bp, Canis familiaris
aaaatctccacgggcaacaagtgca

SEQ ID NO: 46373 - DNA, 25 bp, Canis familiaris
aagattcccttgtagccaaatgctg

SEQ ID NO: 46374 - DNA, 25 bp, Canis familiaris
aaaaggcctgtgtgccataccggat

SEQ ID NO: 46375 - DNA, 25 bp, Canis familiaris
aaaagtcaatgttctacaacttgga

SEQ ID NO: 46376 - DNA, 25 bp, Canis familiaris
aaaagtcaaaatcagaatctctaat

SEQ ID NO: 46377 - DNA, 25 bp, Canis familiaris
aaaagtgttgacccaaactctgact

SEQ ID NO: 46378 - DNA, 25 bp, Canis familiaris
aaaagtgtttctcttaattgagtag

SEQ ID NO: 46379 - DNA, 25 bp, Canis familiaris
aaaagtgtttttctcaattctccat

SEQ ID NO: 46380 - DNA, 25 bp, Canis familiaris
aaaattgtttctatcactttcccat

SEQ ID NO: 46381 - DNA, 25 bp, Canis familiaris
aaaactgcttttctatgcattttta

SEQ ID NO: 46382 - DNA, 25 bp, Canis familiaris
aaaactgtttctcatgtttctccta

SEQ ID NO: 46383 - DNA, 25 bp, Canis familiaris
aaaactttggtggtcttgtcttctg

SEQ ID NO: 46384 - DNA, 25 bp, Canis familiaris
aaaactttgagaggtaattacatag

SEQ ID NO: 46385 - DNA, 25 bp, Canis familiaris
aactgctttctggacgtactaaaca

SEQ ID NO: 46386 - DNA, 25 bp, Canis familiaris
aactatgttgggcgccctaagcaca

SEQ ID NO: 46387 - DNA, 25 bp, Canis familiaris
aaaatttgcgtgtgctccgattcaa

SEQ ID NO: 46388 - DNA, 25 bp, Canis familiaris
aaaatgaagcctaagccctggtcca

SEQ ID NO: 46389 - DNA, 25 bp, Canis familiaris
aaaataagatctcggccctggtgca

SEQ ID NO: 46390 - DNA, 25 bp, Canis familiaris
aacaaacaactgaaacctactgctt

SEQ ID NO: 46391 - DNA, 25 bp, Canis familiaris
aacaaaggagcattaagcccaatct

SEQ ID NO: 46392 - DNA, 25 bp, Canis familiaris
aaaagagtgtgttagtccctacatt

SEQ ID NO: 46393 - DNA, 25 bp, Canis familiaris
aacacaattgtttagttttgatttg

SEQ ID NO: 46394 - DNA, 25 bp, Canis familiaris
aagcctttggtgtgatggtagttgc

SEQ ID NO: 46395 - DNA, 25 bp, Canis familiaris
aacactggcttgggagggctagggc

SEQ ID NO: 46396 - DNA, 25 bp, Canis familiaris
aacagctgcgttgaggggtgtggct

SEQ ID NO: 46397 - DNA, 25 bp, Canis familiaris
aacaccggggcacttggaggagctt

SEQ ID NO: 46398 - DNA, 25 bp, Canis familiaris
aacacgggcagtgcctgcagaggga

SEQ ID NO: 46399 - DNA, 25 bp, Canis familiaris
aacaactagcaggagcccagcaagg

SEQ ID NO: 46400 - DNA, 25 bp, Canis familiaris
aacaacaagagtggcccagcagatt

SEQ ID NO: 46401 - DNA, 25 bp, Canis familiaris
aaaagcagaagtttgtcacacatgt

SEQ ID NO: 46402 - DNA, 25 bp, Canis familiaris
aaaagagaaggctgatcctcggccc

SEQ ID NO: 46403 - DNA, 25 bp, Canis familiaris
aactaataaggtcatcccggtgcgc

SEQ ID NO: 46404 - DNA, 25 bp, Canis familiaris
aacaaaagagagaagcccccgagcg

SEQ ID NO: 46405 - DNA, 25 bp, Canis familiaris
aacaagaagaagaaccagccgggca

SEQ ID NO: 46406 - DNA, 25 bp, Canis familiaris
aacacagaaggtccctgatccgagg

SEQ ID NO: 46407 - DNA, 25 bp, Canis familiaris
aacacatggggtgtcgttcgggcac

SEQ ID NO: 46408 - DNA, 25 bp, Canis familiaris
aaaagggcacatgtttattgggcac

SEQ ID NO: 46409 - DNA, 25 bp, Canis familiaris
aaaaggcgcaattccttcatttgga

SEQ ID NO: 46410 - DNA, 25 bp, Canis familiaris
aaaagcctcagaatccttctctgtc

SEQ ID NO: 46411 - DNA, 25 bp, Canis familiaris
aaaagcctcagaatccttctctgtc

SEQ ID NO: 46412 - DNA, 25 bp, Canis familiaris
aaaacctcattttcttctcatgact

SEQ ID NO: 46413 - DNA, 25 bp, Canis familiaris
aaaaccatgttttcaagctcttcat

SEQ ID NO: 46414 - DNA, 25 bp, Canis familiaris
aaaactgcattataaattctgtgct

SEQ ID NO: 46415 - DNA, 25 bp, Canis familiaris
aaaactcctatgaatgaatattact

SEQ ID NO: 46416 - DNA, 25 bp, Canis familiaris
aaaagcccatatacatcgtttcctt

SEQ ID NO: 46417 - DNA, 25 bp, Canis familiaris
aaaaccactttccgatattgccttg

SEQ ID NO: 46418 - DNA, 25 bp, Canis familiaris
aaaaccaacctttgagatcatctct

SEQ ID NO: 46419 - DNA, 25 bp, Canis familiaris
aaaactgcaatcttcttatacactg

SEQ ID NO: 46420 - DNA, 25 bp, Canis familiaris
aaaagctgcttcttattaatcgtgc

SEQ ID NO: 46421 - DNA, 25 bp, Canis familiaris
aaaagcgttttattcctcttgctca

SEQ ID NO: 46422 - DNA, 25 bp, Canis familiaris
aaaagagtctctttctccatctttt

SEQ ID NO: 46423 - DNA, 25 bp, Canis familiaris
aaaagactgtcttttcctcattgta

SEQ ID NO: 46424 - DNA, 25 bp, Canis familiaris
aaaagtctacttatgcctgtttgca

SEQ ID NO: 46425 - DNA, 25 bp, Canis familiaris
aaaagtttcttactgctgatttcca

SEQ ID NO: 46426 - DNA, 25 bp, Canis familiaris
aaaagctctctcaatcaagtatgtg

SEQ ID NO: 46427 - DNA, 25 bp, Canis familiaris
aacacacctctttagggctgagacc

SEQ ID NO: 46428 - DNA, 25 bp, Canis familiaris
aacaccctgttataggtggctcctt

SEQ ID NO: 46429 - DNA, 25 bp, Canis familiaris
aaaatcctgtaatctgggcagccct

SEQ ID NO: 46430 - DNA, 25 bp, Canis familiaris
aaaatcatttgcccttgggacgcct

SEQ ID NO: 46431 - DNA, 25 bp, Canis familiaris
aacagataaataccttggtgccacc

SEQ ID NO: 46432 - DNA, 25 bp, Canis familiaris
aacacatctaattggtatggcctat

SEQ ID NO: 46433 - DNA, 25 bp, Canis familiaris
aacaatgctggcatgtgtcatggat

SEQ ID NO: 46434 - DNA, 25 bp, Canis familiaris
aacaatcagctacgctgctatcctc

SEQ ID NO: 46435 - DNA, 25 bp, Canis familiaris
aacacaactagactgcagacatgcg

SEQ ID NO: 46436 - DNA, 25 bp, Canis familiaris
aacagccactaagtgatgcctggac

SEQ ID NO: 46437 - DNA, 25 bp, Canis familiaris
aacagcctctgaaggtaatgccagc

SEQ ID NO: 46438 - DNA, 25 bp, Canis familiaris
aacaaatgctgatgcagtaagctgc

SEQ ID NO: 46439 - DNA, 25 bp, Canis familiaris
aacagaagctgtgcagccagggcag

SEQ ID NO: 46440 - DNA, 25 bp, Canis familiaris
aacaccatgatggacaggcttgcca

SEQ ID NO: 46441 - DNA, 25 bp, Canis familiaris
aacaatctggagcagcgctgccaca

SEQ ID NO: 46442 - DNA, 25 bp, Canis familiaris
aaaactggcatgcctgtgtgcactg

SEQ ID NO: 46443 - DNA, 25 bp, Canis familiaris
aaaactggcataccgatgatgtgca

SEQ ID NO: 46444 - DNA, 25 bp, Canis familiaris
aaaacgatcaatacagagagggaaa

SEQ ID NO: 46445 - DNA, 25 bp, Canis familiaris
aaaatctgaagcttcactgcacagt

SEQ ID NO: 46446 - DNA, 25 bp, Canis familiaris
aaaatccagacactactgtcactcc

SEQ ID NO: 46447 - DNA, 25 bp, Canis familiaris
aaaatcaaagcacgccagactccat

SEQ ID NO: 46448 - DNA, 25 bp, Canis familiaris
aaaagcaaacagccagacacttgat

SEQ ID NO: 46449 - DNA, 25 bp, Canis familiaris
aacaggcagccatggagaagtctga

SEQ ID NO: 46450 - DNA, 25 bp, Canis familiaris
aacagtgcccaagagacgggtgggc

SEQ ID NO: 46451 - DNA, 25 bp, Canis familiaris
aacagtcccaccacacaggtgtggg

SEQ ID NO: 46452 - DNA, 25 bp, Canis familiaris
aacaccacccaacagcagagtatgc

SEQ ID NO: 46453 - DNA, 25 bp, Canis familiaris
aacactcacccaggaagaaccagcc

SEQ ID NO: 46454 - DNA, 25 bp, Canis familiaris
aatatttcccacagaaagccctcgt

SEQ ID NO: 46455 - DNA, 25 bp, Canis familiaris
aagtggtcacccggaaagtccaatg

SEQ ID NO: 46456 - DNA, 25 bp, Canis familiaris
taacgcgttccgtgaaagtcaaaag

SEQ ID NO: 46457 - DNA, 25 bp, Canis familiaris
aacactttccagggcaaactctaag

SEQ ID NO: 46458 - DNA, 25 bp, Canis familiaris
aactcttcagccaggaacacctagt

SEQ ID NO: 46459 - DNA, 25 bp, Canis familiaris
aaccccactcaagggaccctgattg

SEQ ID NO: 46460 - DNA, 25 bp, Canis familiaris
aacacccactcaaaaatccctgtgc

SEQ ID NO: 46461 - DNA, 25 bp, Canis familiaris
aacacaccacacttaactggctttc

SEQ ID NO: 46462 - DNA, 25 bp, Canis familiaris
aacaactcatcctgatcaactgctc

SEQ ID NO: 46463 - DNA, 25 bp, Canis familiaris
aacagccctcgaggatcgacatgtc

SEQ ID NO: 46464 - DNA, 25 bp, Canis familiaris
aacaacaccatatcatcggctgtaa

SEQ ID NO: 46465 - DNA, 25 bp, Canis familiaris
aaaatggcctgatctgtgacttcaa

SEQ ID NO: 46466 - DNA, 25 bp, Canis familiaris
aaaatggtgttgccgtgacttcaga

SEQ ID NO: 46467 - DNA, 25 bp, Canis familiaris
aaaatggtggagccttcgcactcaa

SEQ ID NO: 46468 - DNA, 25 bp, Canis familiaris
aaaatggtgctgccatggtcgcaaa

SEQ ID NO: 46469 - DNA, 25 bp, Canis familiaris
aagactagctctgactggcgcatat

SEQ ID NO: 46470 - DNA, 25 bp, Canis familiaris
aaaagagctcatctctggtgattgc

SEQ ID NO: 46471 - DNA, 25 bp, Canis familiaris
aaaaggctcattctgctagtgtggc

SEQ ID NO: 46472 - DNA, 25 bp, Canis familiaris
aaaagcttcttctgctcagtgaaag

SEQ ID NO: 46473 - DNA, 25 bp, Canis familiaris
aaaagctgtttttcaggctgacacg

SEQ ID NO: 46474 - DNA, 25 bp, Canis familiaris
aaaagcctttctccagtgtttgctg

SEQ ID NO: 46475 - DNA, 25 bp, Canis familiaris
aaaagccttttgcagaggcactctg

SEQ ID NO: 46476 - DNA, 25 bp, Canis familiaris
aaaagtttgttccagagcccataga

SEQ ID NO: 46477 - DNA, 25 bp, Canis familiaris
aaaatatttgtgctcaactgcctaa

SEQ ID NO: 46478 - DNA, 25 bp, Canis familiaris
aaaatatgtatgaattccacccccg

SEQ ID NO: 46479 - DNA, 25 bp, Canis familiaris
aaaatattttatgcaacacctggga

SEQ ID NO: 46480 - DNA, 25 bp, Canis familiaris
aaaatgtggtgtagggatccctggg

SEQ ID NO: 46481 - DNA, 25 bp, Canis familiaris
aataaggatctgtgggatccctggg

SEQ ID NO: 46482 - DNA, 25 bp, Canis familiaris
aacaaagatatctgggatccctggg

SEQ ID NO: 46483 - DNA, 25 bp, Canis familiaris
aaaagagagatacgggcagccctgg

SEQ ID NO: 46484 - DNA, 25 bp, Canis familiaris
aaaagatggaaacgcagcagcagcc

SEQ ID NO: 46485 - DNA, 25 bp, Canis familiaris
aaaagcatagtaattcagccatcag

SEQ ID NO: 46486 - DNA, 25 bp, Canis familiaris
aaaagtatcatcatccacacatcag

SEQ ID NO: 46487 - DNA, 25 bp, Canis familiaris
aaaagtacttccgcacacagttctt

SEQ ID NO: 46488 - DNA, 25 bp, Canis familiaris
aacactgtacttaccccaagattct

SEQ ID NO: 46489 - DNA, 25 bp, Canis familiaris
aacacagtaattaacccctgcactc

SEQ ID NO: 46490 - DNA, 25 bp, Canis familiaris
aacacaattgataccagacccggcc

SEQ ID NO: 46491 - DNA, 25 bp, Canis familiaris
aacacttgtaggagcacctcgagac

SEQ ID NO: 46492 - DNA, 25 bp, Canis familiaris
aacctagtaagcatgacctggggaa

SEQ ID NO: 46493 - DNA, 25 bp, Canis familiaris
aacttggtaagccggtagcgtggtg

SEQ ID NO: 46494 - DNA, 25 bp, Canis familiaris
aacttggtaagccggtagcgtggtg

SEQ ID NO: 46495 - DNA, 25 bp, Canis familiaris
aacttggaagagaggtcttttgctt

SEQ ID NO: 46496 - DNA, 25 bp, Canis familiaris
aacgggcacgtgaagtcgtcttagc

SEQ ID NO: 46497 - DNA, 25 bp, Canis familiaris
aacgggcaagctctacgttctacta

SEQ ID NO: 46498 - DNA, 25 bp, Canis familiaris
aacagaagcaagctaacctttagta

SEQ ID NO: 46499 - DNA, 25 bp, Canis familiaris
aacacatagacgattccttttagga

SEQ ID NO: 46500 - DNA, 25 bp, Canis familiaris
aacacagggtaattccacttctagg

SEQ ID NO: 46501 - DNA, 25 bp, Canis familiaris
aacacagccggagagccacgggagg

SEQ ID NO: 46502 - DNA, 25 bp, Canis familiaris
aacacgcgtggtgtccacggacgac

SEQ ID NO: 46503 - DNA, 25 bp, Canis familiaris
aacacggtggttgaccgtgcctatg

SEQ ID NO: 46504 - DNA, 25 bp, Canis familiaris
aaaaggctggttgccttgccacaag

SEQ ID NO: 46505 - DNA, 25 bp, Canis familiaris
aaaagagtagtaagtgttggcacaa

SEQ ID NO: 46506 - DNA, 25 bp, Canis familiaris
caaaataaagtgtgtgtggtagaaa

SEQ ID NO: 46507 - DNA, 25 bp, Canis familiaris
aaaataatagtgctgtgtggtggaa

SEQ ID NO: 46508 - DNA, 25 bp, Canis familiaris
aaaatgattacatatgtgtgggtac

SEQ ID NO: 46509 - DNA, 25 bp, Canis familiaris
aacaagtctacatctttttgcccgt

SEQ ID NO: 46510 - DNA, 25 bp, Canis familiaris
aaaagactagcacctctttttcctg

SEQ ID NO: 46511 - DNA, 25 bp, Canis familiaris
aaaagaaagctgcctttcctctctt

SEQ ID NO: 46512 - DNA, 25 bp, Canis familiaris
aacaataaagcccatcatcttccct

SEQ ID NO: 46513 - DNA, 25 bp, Canis familiaris
aaaatagaaacacctagtctccatt

SEQ ID NO: 46514 - DNA, 25 bp, Canis familiaris
aacaacgaaacgcccaattacagat

SEQ ID NO: 46515 - DNA, 25 bp, Canis familiaris
aacaacaaaccatgaagattccagt

SEQ ID NO: 46516 - DNA, 25 bp, Canis familiaris
aacaggaacccatcataagtgcact

SEQ ID NO: 46517 - DNA, 25 bp, Canis familiaris
aacggcacacccatggggagcattg

SEQ ID NO: 46518 - DNA, 25 bp, Canis familiaris
aaaagcaacttcaatgagggttttg

SEQ ID NO: 46519 - DNA, 25 bp, Canis familiaris
aaaagccaatggcatatggttttta

SEQ ID NO: 46520 - DNA, 25 bp, Canis familiaris
aaaagtgccgggaagatgtctattt

SEQ ID NO: 46521 - DNA, 25 bp, Canis familiaris
aaaagctccggggatggctcaagtc

SEQ ID NO: 46522 - DNA, 25 bp, Canis familiaris
aaaagcccacgagatcccatagagc

SEQ ID NO: 46523 - DNA, 25 bp, Canis familiaris
aaaaggcctcagtgacccatagaaa

SEQ ID NO: 46524 - DNA, 25 bp, Canis familiaris
aaaaggactcgatcacggcatagtg

SEQ ID NO: 46525 - DNA, 25 bp, Canis familiaris
aaaaggagccgctatcctggttgcg

SEQ ID NO: 46526 - DNA, 25 bp, Canis familiaris
aacaaccagccctagtctgtgttgc

SEQ ID NO: 46527 - DNA, 25 bp, Canis familiaris
aacacaccacaagtgagtctgttag

SEQ ID NO: 46528 - DNA, 25 bp, Canis familiaris
aacacttcgcagttggtggtgctga

SEQ ID NO: 46529 - DNA, 25 bp, Canis familiaris
aagcccttgctctgggaggtaactt

SEQ ID NO: 46530 - DNA, 25 bp, Canis familiaris
aacactttctgctgggatcctaatt

SEQ ID NO: 46531 - DNA, 25 bp, Canis familiaris
aacacttttcattggaatcctaact

SEQ ID NO: 46532 - DNA, 25 bp, Canis familiaris
aacacttgtgacatcgttcgtctgg

SEQ ID NO: 46533 - DNA, 25 bp, Canis familiaris
aacacctttaacatctagttgaagt

SEQ ID NO: 46534 - DNA, 25 bp, Canis familiaris
aacactctttgacattctggtggcc

SEQ ID NO: 46535 - DNA, 25 bp, Canis familiaris
aacacctgcttgagtttaagccatt

SEQ ID NO: 46536 - DNA, 25 bp, Canis familiaris
aacacgcactggtgatttccatcct

SEQ ID NO: 46537 - DNA, 25 bp, Canis familiaris
aaaagactcgaactttgctcctcat

SEQ ID NO: 46538 - DNA, 25 bp, Canis familiaris
aaaagatgctggtgcctatgtctgc

SEQ ID NO: 46539 - DNA, 25 bp, Canis familiaris
aaaagatcgcgccggattattgctg

SEQ ID NO: 46540 - DNA, 25 bp, Canis familiaris
aaaatgtcccctctgaacatgatgt

SEQ ID NO: 46541 - DNA, 25 bp, Canis familiaris
aaaatgtcctgcctccaaagaagta

SEQ ID NO: 46542 - DNA, 25 bp, Canis familiaris
aaaatccactgcctcactgagagaa

SEQ ID NO: 46543 - DNA, 25 bp, Canis familiaris
aacaaccaactgcctgctgagatga

SEQ ID NO: 46544 - DNA, 25 bp, Canis familiaris
aacaatcagcaatgcctgtggaaca

SEQ ID NO: 46545 - DNA, 25 bp, Canis familiaris
aaaatgcgcacttgcgcgtggtccg

SEQ ID NO: 46546 - DNA, 25 bp, Canis familiaris
aaaatagcctagcccaagtctctgt

SEQ ID NO: 46547 - DNA, 25 bp, Canis familiaris
aaaagaacatggcctcatttcatct

SEQ ID NO: 46548 - DNA, 25 bp, Canis familiaris
aacacagaaatcccaagttcatctt

SEQ ID NO: 46549 - DNA, 25 bp, Canis familiaris
aacaagatgcagaaccatgggtttt

SEQ ID NO: 46550 - DNA, 25 bp, Canis familiaris
aagaagtggaccattggctttctcc

SEQ ID NO: 46551 - DNA, 25 bp, Canis familiaris
aacaatgggaccattcctttctgac

SEQ ID NO: 46552 - DNA, 25 bp, Canis familiaris
aacaatactaccaattctctttcaa

SEQ ID NO: 46553 - DNA, 25 bp, Canis familiaris
aaaatccttgcataccttgttcgat

SEQ ID NO: 46554 - DNA, 25 bp, Canis familiaris
aaaatcctaaatcacttactgcagt

SEQ ID NO: 46555 - DNA, 25 bp, Canis familiaris
aaaagcaataaaccacttcctgtgg

SEQ ID NO: 46556 - DNA, 25 bp, Canis familiaris
aaaatgtataatccgacttcctgta

SEQ ID NO: 46557 - DNA, 25 bp, Canis familiaris
aaaatatatatatccctgttcccac

SEQ ID NO: 46558 - DNA, 25 bp, Canis familiaris
aaaataactgtgtagcactgttact

SEQ ID NO: 46559 - DNA, 25 bp, Canis familiaris
aaaattggtctatgccatatttctt

SEQ ID NO: 46560 - DNA, 25 bp, Canis familiaris
aaaatgtggtctgccacatctgtac

SEQ ID NO: 46561 - DNA, 25 bp, Canis familiaris
aaaagtggcaatgcccagcaccatc

SEQ ID NO: 46562 - DNA, 25 bp, Canis familiaris
aaaatgtggcacagcataccactcc

SEQ ID NO: 46563 - DNA, 25 bp, Canis familiaris
aaaatgtgtctgatctactttcccc

SEQ ID NO: 46564 - DNA, 25 bp, Canis familiaris
aacatcgtcattctttgtttctccc

SEQ ID NO: 46565 - DNA, 25 bp, Canis familiaris
aacacccagtagatggttttccata

SEQ ID NO: 46566 - DNA, 25 bp, Canis familiaris
aacaccctgaacatggtgtccccag

SEQ ID NO: 46567 - DNA, 25 bp, Canis familiaris
aacacctggactcagaggtccctaa

SEQ ID NO: 46568 - DNA, 25 bp, Canis familiaris
aaaatagtcctatagttccctgata

SEQ ID NO: 46569 - DNA, 25 bp, Canis familiaris
aaaatcagtctccaaagtatcacct

SEQ ID NO: 46570 - DNA, 25 bp, Canis familiaris
aaaatccaccaaaagtatactctgt

SEQ ID NO: 46571 - DNA, 25 bp, Canis familiaris
aacaacacacaaacaggtaaccatg

SEQ ID NO: 46572 - DNA, 25 bp, Canis familiaris
aagcatacaaataacggaaaccatg

SEQ ID NO: 46573 - DNA, 25 bp, Canis familiaris
aacacctaataatggggcacctggg

SEQ ID NO: 46574 - DNA, 25 bp, Canis familiaris
aacacctgaaactagtataacactg

SEQ ID NO: 46575 - DNA, 25 bp, Canis familiaris
aacacccagttcttggatacctgct

SEQ ID NO: 46576 - DNA, 25 bp, Canis familiaris
aacactcaacttcattagactttaa

SEQ ID NO: 46577 - DNA, 25 bp, Canis familiaris
aacaccaccatttgcataaggtttg

SEQ ID NO: 46578 - DNA, 25 bp, Canis familiaris
aacacgcggctttttcaggatttgg

SEQ ID NO: 46579 - DNA, 25 bp, Canis familiaris
aacaaggcaccttgttcaggaggga

SEQ ID NO: 46580 - DNA, 25 bp, Canis familiaris
aaaaggattctactgggcgacgagg

SEQ ID NO: 46581 - DNA, 25 bp, Canis familiaris
aaaaggagactttgatggtgacata

SEQ ID NO: 46582 - DNA, 25 bp, Canis familiaris
aaaaggcagctcttcaatggaatta

SEQ ID NO: 46583 - DNA, 25 bp, Canis familiaris
aaaaggcatgctttctgactgacat

SEQ ID NO: 46584 - DNA, 25 bp, Canis familiaris
aaaaggcgcatctcagcatctgctt

SEQ ID NO: 46585 - DNA, 25 bp, Canis familiaris
aaaatggcgccagagattttactgg

SEQ ID NO: 46586 - DNA, 25 bp, Canis familiaris
aacaagaggcctgagtctcctactt

SEQ ID NO: 46587 - DNA, 25 bp, Canis familiaris
aacaagatccctgagaatcccacta

SEQ ID NO: 46588 - DNA, 25 bp, Canis familiaris
aaaagtgccctgtgagttcacctct

SEQ ID NO: 46589 - DNA, 25 bp, Canis familiaris
aaaagtctctagacctttactctct

SEQ ID NO: 46590 - DNA, 25 bp, Canis familiaris
aacacgtttcagcagttcaacttta

SEQ ID NO: 46591 - DNA, 25 bp, Canis familiaris
aacactttggtgcggtgcttgtctt

SEQ ID NO: 46592 - DNA, 25 bp, Canis familiaris
aacacccaagtgtggtctctgactt

SEQ ID NO: 46593 - DNA, 25 bp, Canis familiaris
aacaccgaagtgttattttgcttct

SEQ ID NO: 46594 - DNA, 25 bp, Canis familiaris
aactaaaatctgtgagcttggtatc

SEQ ID NO: 46595 - DNA, 25 bp, Canis familiaris
aacaagacatcttaccgcttggttc

SEQ ID NO: 46596 - DNA, 25 bp, Canis familiaris
aacaagagctagtgcccttgggtcc

SEQ ID NO: 46597 - DNA, 25 bp, Canis familiaris
aacacaatggagtcgctcctgtaaa

SEQ ID NO: 46598 - DNA, 25 bp, Canis familiaris
aaaagatgcctgtcccgttgaacag

SEQ ID NO: 46599 - DNA, 25 bp, Canis familiaris
aacaagatgcttttcaggtatcaaa

SEQ ID NO: 46600 - DNA, 25 bp, Canis familiaris
aaaagagcatatataagcttcacaa

SEQ ID NO: 46601 - DNA, 25 bp, Canis familiaris
aacaacagtagcattactcccaacc

SEQ ID NO: 46602 - DNA, 25 bp, Canis familiaris
aaaatgcaggcagtgttttcacaaa

SEQ ID NO: 46603 - DNA, 25 bp, Canis familiaris
aaaatgcatcagcctgtgctataca

SEQ ID NO: 46604 - DNA, 25 bp, Canis familiaris
aacaacatagacctgctgaatcact

SEQ ID NO: 46605 - DNA, 25 bp, Canis familiaris
aaaagacacaccctgataactcaag

SEQ ID NO: 46606 - DNA, 25 bp, Canis familiaris
aacaacaagcaccgtgtcaaccaca

SEQ ID NO: 46607 - DNA, 25 bp, Canis familiaris
aacagaaggccaggttgagaaccct

SEQ ID NO: 46608 - DNA, 25 bp, Canis familiaris
aacagaaggcggcttacggcgactg

SEQ ID NO: 46609 - DNA, 25 bp, Canis familiaris
aagcgaaagcggcaggatcgacgcg

SEQ ID NO: 46610 - DNA, 25 bp, Canis familiaris
aacacaaggggaatggtcagacctt

SEQ ID NO: 46611 - DNA, 25 bp, Canis familiaris
aactcatgggggagggctacgcctt

SEQ ID NO: 46612 - DNA, 25 bp, Canis familiaris
aacacagggggtgggtctgaggcct

SEQ ID NO: 46613 - DNA, 25 bp, Canis familiaris
aacacagattgtatcggggaacctc

SEQ ID NO: 46614 - DNA, 25 bp, Canis familiaris
aacaggttgctttagtcggcacagc

SEQ ID NO: 46615 - DNA, 25 bp, Canis familiaris
aacaggattttatgtggacctgagc

SEQ ID NO: 46616 - DNA, 25 bp, Canis familiaris
aacaggctaaactagaggcatccta

SEQ ID NO: 46617 - DNA, 25 bp, Canis familiaris
aagaagtaaaattatgtgcttgtaa

SEQ ID NO: 46618 - DNA, 25 bp, Canis familiaris
aaaagttcaacttcatgtactctaa

SEQ ID NO: 46619 - DNA, 25 bp, Canis familiaris
aagaagagtaacatagtcctgctat

SEQ ID NO: 46620 - DNA, 25 bp, Canis familiaris
aaaaggccaactacaggctctcctc

SEQ ID NO: 46621 - DNA, 25 bp, Canis familiaris
aaaaggcacacaaaagagttccatg

SEQ ID NO: 46622 - DNA, 25 bp, Canis familiaris
aacacagtgaaccaagtagttctaa

SEQ ID NO: 46623 - DNA, 25 bp, Canis familiaris
aacacaggcatcacgactcggttaa

SEQ ID NO: 46624 - DNA, 25 bp, Canis familiaris
aacacaggtctaagcctagtatatc

SEQ ID NO: 46625 - DNA, 25 bp, Canis familiaris
aacaaaacaaacccactgatgtcta

SEQ ID NO: 46626 - DNA, 25 bp, Canis familiaris
aacagaaataaaccaccttatcaga

SEQ ID NO: 46627 - DNA, 25 bp, Canis familiaris
aaaagtcattcaaccacctgattaa

SEQ ID NO: 46628 - DNA, 25 bp, Canis familiaris
aaaattcagtcatcccactactaat

SEQ ID NO: 46629 - DNA, 25 bp, Canis familiaris
aaaatggcatttgcccgtcctgttt

SEQ ID NO: 46630 - DNA, 25 bp, Canis familiaris
aacactggacgtgttcgtcgtcttc

SEQ ID NO: 46631 - DNA, 25 bp, Canis familiaris
aacacgaaagtggatctcccgtctt

SEQ ID NO: 46632 - DNA, 25 bp, Canis familiaris
aacacggacagttattaccctcttg

SEQ ID NO: 46633 - DNA, 25 bp, Canis familiaris
aagcgggaaatctacgaccgttatg

SEQ ID NO: 46634 - DNA, 25 bp, Canis familiaris
aagcgggtcaacacgaagcgtagca

SEQ ID NO: 46635 - DNA, 25 bp, Canis familiaris
aagcggagttacaggacatgattaa

SEQ ID NO: 46636 - DNA, 25 bp, Canis familiaris
aagctgctcgggggtggaatttaca

SEQ ID NO: 46637 - DNA, 25 bp, Canis familiaris
aacatgctcgggggggactaataat

SEQ ID NO: 46638 - DNA, 25 bp, Canis familiaris
aacagaagcagccgtgggcaaaata

SEQ ID NO: 46639 - DNA, 25 bp, Canis familiaris
aacagtcggcatcgatgtggcaggg

SEQ ID NO: 46640 - DNA, 25 bp, Canis familiaris
aacagacagccatatgctgtcagtg

SEQ ID NO: 46641 - DNA, 25 bp, Canis familiaris
aacacactgcaccaatgctgagctt

SEQ ID NO: 46642 - DNA, 25 bp, Canis familiaris
aacagcaatggccaaggagtccgtg

SEQ ID NO: 46643 - DNA, 25 bp, Canis familiaris
aacacttgaccaactgtgtcacggt

SEQ ID NO: 46644 - DNA, 25 bp, Canis familiaris
aacactgtgacctttggaaacctgc

SEQ ID NO: 46645 - DNA, 25 bp, Canis familiaris
aacacctgaagttgggcaatatttc

SEQ ID NO: 46646 - DNA, 25 bp, Canis familiaris
aacaccaaacgtcggcgtattgctt

SEQ ID NO: 46647 - DNA, 25 bp, Canis familiaris
aacccagtgcactgaggttttcgtc

SEQ ID NO: 46648 - DNA, 25 bp, Canis familiaris
aacaccatgggctaacagtctttcc

SEQ ID NO: 46649 - DNA, 25 bp, Canis familiaris
aaaatccctgctaacagctctttct

SEQ ID NO: 46650 - DNA, 25 bp, Canis familiaris
aaaatccttcattactcttttctgc

SEQ ID NO: 46651 - DNA, 25 bp, Canis familiaris
aacaacgtattatctttattcatga

SEQ ID NO: 46652 - DNA, 25 bp, Canis familiaris
aacacctgtaattactgttgtggga

SEQ ID NO: 46653 - DNA, 25 bp, Canis familiaris
aacaccttggttctggttagacagc

SEQ ID NO: 46654 - DNA, 25 bp, Canis familiaris
aaaatttcagtttagaccatcaaag

SEQ ID NO: 46655 - DNA, 25 bp, Canis familiaris
aaaattgtgattgaagaccatttag

SEQ ID NO: 46656 - DNA, 25 bp, Canis familiaris
aacaatcctactgacgactagtttt

SEQ ID NO: 46657 - DNA, 25 bp, Canis familiaris
aacaactccatcacaggactcgtca

SEQ ID NO: 46658 - DNA, 25 bp, Canis familiaris
aacaggctccacacaaagagcccga

SEQ ID NO: 46659 - DNA, 25 bp, Canis familiaris
aacaggtcccagccagagaacctag

SEQ ID NO: 46660 - DNA, 25 bp, Canis familiaris
aacaggagcttctcggaaattaggc

SEQ ID NO: 46661 - DNA, 25 bp, Canis familiaris
aacagcgtgttctacgagaaatctg

SEQ ID NO: 46662 - DNA, 25 bp, Canis familiaris
aacatttggtagacacagaatacgg

SEQ ID NO: 46663 - DNA, 25 bp, Canis familiaris
aacaagttgtactataaaagcaggc

SEQ ID NO: 46664 - DNA, 25 bp, Canis familiaris
aacaagttgtacacaaaacagctgg

SEQ ID NO: 46665 - DNA, 25 bp, Canis familiaris
aaaatgatttacacacccatcctgc

SEQ ID NO: 46666 - DNA, 25 bp, Canis familiaris
aacagttgttacagcaccagtcacc

SEQ ID NO: 46667 - DNA, 25 bp, Canis familiaris
aacagtgtgtggatggagccatgga

SEQ ID NO: 46668 - DNA, 25 bp, Canis familiaris
aacatgcctgtggacctgaagcttg

SEQ ID NO: 46669 - DNA, 25 bp, Canis familiaris
aacagggacaacttcacagcgttga

SEQ ID NO: 46670 - DNA, 25 bp, Canis familiaris
aacacaggaacaactgccggtgata

SEQ ID NO: 46671 - DNA, 25 bp, Canis familiaris
aacagcaggaatagctctcgggttt

SEQ ID NO: 46672 - DNA, 25 bp, Canis familiaris
aacacagtaaatacacatctggttt

SEQ ID NO: 46673 - DNA, 25 bp, Canis familiaris
aacaagtgcaggctcacacggtaat

SEQ ID NO: 46674 - DNA, 25 bp, Canis familiaris
aacactgtcagttttcagaagttat

SEQ ID NO: 46675 - DNA, 25 bp, Canis familiaris
aaaattcactcatttggagaataat

SEQ ID NO: 46676 - DNA, 25 bp, Canis familiaris
aaaattgtatgctttcagaataaat

SEQ ID NO: 46677 - DNA, 25 bp, Canis familiaris
aaaattgtgcctttagcacttggaa

SEQ ID NO: 46678 - DNA, 25 bp, Canis familiaris
aaaatgtgcccttggcgcttgtgga

SEQ ID NO: 46679 - DNA, 25 bp, Canis familiaris
aaaattgcctttggactgtgctgcc

SEQ ID NO: 46680 - DNA, 25 bp, Canis familiaris
aacaattccttttgaacagcgcttc

SEQ ID NO: 46681 - DNA, 25 bp, Canis familiaris
aacaaactgctttacaacagcttta

SEQ ID NO: 46682 - DNA, 25 bp, Canis familiaris
aacaatatgccaaaactgagccttg

SEQ ID NO: 46683 - DNA, 25 bp, Canis familiaris
aaaatgtcccataaactgcctgtaa

SEQ ID NO: 46684 - DNA, 25 bp, Canis familiaris
aaaatgtacctgaagactcgctctc

SEQ ID NO: 46685 - DNA, 25 bp, Canis familiaris
aaaatgtatcctaacacctgtgcct

SEQ ID NO: 46686 - DNA, 25 bp, Canis familiaris
aaaattgagccataccttgcaccat

SEQ ID NO: 46687 - DNA, 25 bp, Canis familiaris
aaaatgtgaccatttcctcattcca

SEQ ID NO: 46688 - DNA, 25 bp, Canis familiaris
aaaatgtacgcgttgccatcaatcc

SEQ ID NO: 46689 - DNA, 25 bp, Canis familiaris
gaaaaaaccagtcaatctaccgagt

SEQ ID NO: 46690 - DNA, 25 bp, Canis familiaris
aatcaaaaccagaaaattggccctg

SEQ ID NO: 46691 - DNA, 25 bp, Canis familiaris
aagctacaactaagaatttccaact

SEQ ID NO: 46692 - DNA, 25 bp, Canis familiaris
aactcacaaacacttaaaccgacat

SEQ ID NO: 46693 - DNA, 25 bp, Canis familiaris
aacacaaaacagaaacagacccata

SEQ ID NO: 46694 - DNA, 25 bp, Canis familiaris
aacacaaacagacacaacaaacaat

SEQ ID NO: 46695 - DNA, 25 bp, Canis familiaris
aacacaaataacacacacaacacaa

SEQ ID NO: 46696 - DNA, 25 bp, Canis familiaris
aacacattcaaaaccctcgatagct

SEQ ID NO: 46697 - DNA, 25 bp, Canis familiaris
aacacatgtctattaactttgtagc

SEQ ID NO: 46698 - DNA, 25 bp, Canis familiaris
aacaatctttaactctatttcacta

SEQ ID NO: 46699 - DNA, 25 bp, Canis familiaris
aacaacttcttacgtctttgatcta

SEQ ID NO: 46700 - DNA, 25 bp, Canis familiaris
aaaattcatttactgtatgtgtgtt

SEQ ID NO: 46701 - DNA, 25 bp, Canis familiaris
aaaatactgtgctgtgtgtgtgtgt

SEQ ID NO: 46702 - DNA, 25 bp, Canis familiaris
aacaaatgctgggctgggtggtcct

SEQ ID NO: 46703 - DNA, 25 bp, Canis familiaris
aacaaaaggcaccgtgtgcgcctct

SEQ ID NO: 46704 - DNA, 25 bp, Canis familiaris
aacaagaaccacgtggatgcacctt

SEQ ID NO: 46705 - DNA, 25 bp, Canis familiaris
aaaatgaatccttcgtgatgccctc

SEQ ID NO: 46706 - DNA, 25 bp, Canis familiaris
aacaataatatttgcgctctgccca

SEQ ID NO: 46707 - DNA, 25 bp, Canis familiaris
aacaaagctattaacctggcccaat

SEQ ID NO: 46708 - DNA, 25 bp, Canis familiaris
aacacagatggaactacaggggctc

SEQ ID NO: 46709 - DNA, 25 bp, Canis familiaris
aacacatgtgccttccacagaggag

SEQ ID NO: 46710 - DNA, 25 bp, Canis familiaris
aacagaggcctcggcatcgaagggg

SEQ ID NO: 46711 - DNA, 25 bp, Canis familiaris
aactgagggtcgcctggagggcagg

SEQ ID NO: 46712 - DNA, 25 bp, Canis familiaris
aagcaggtggagtggcagggacagg

SEQ ID NO: 46713 - DNA, 25 bp, Canis familiaris
aacagggcggaaagcagatgtcatt

SEQ ID NO: 46714 - DNA, 25 bp, Canis familiaris
aacagtcagcagaaacatcaagtat

SEQ ID NO: 46715 - DNA, 25 bp, Canis familiaris
aacagactcgattcatattggatat

SEQ ID NO: 46716 - DNA, 25 bp, Canis familiaris
aaaatcatctgcttcatgtgttttc

SEQ ID NO: 46717 - DNA, 25 bp, Canis familiaris
aacagtcatatgctcaggtttttgt

SEQ ID NO: 46718 - DNA, 25 bp, Canis familiaris
aacaaaatggtcttttccttgtctg

SEQ ID NO: 46719 - DNA, 25 bp, Canis familiaris
aacatttcaagtttactccttctgt

SEQ ID NO: 46720 - DNA, 25 bp, Canis familiaris
aacatttctcgtttcttcaggtgta

SEQ ID NO: 46721 - DNA, 25 bp, Canis familiaris
aacattatttacttctggctggggg

SEQ ID NO: 46722 - DNA, 25 bp, Canis familiaris
aacattaacttggttggctgccggc

SEQ ID NO: 46723 - DNA, 25 bp, Canis familiaris
aacactatctccggttcgagtttgc

SEQ ID NO: 46724 - DNA, 25 bp, Canis familiaris
aacagtcacttgagttccttattca

SEQ ID NO: 46725 - DNA, 25 bp, Canis familiaris
aacagtgccctgagaacattttaaa

SEQ ID NO: 46726 - DNA, 25 bp, Canis familiaris
aacaatggtctacgacgcttttata

SEQ ID NO: 46727 - DNA, 25 bp, Canis familiaris
aacatctgacataaggacccctgta

SEQ ID NO: 46728 - DNA, 25 bp, Canis familiaris
aacatcatattcagcccatcacgct

SEQ ID NO: 46729 - DNA, 25 bp, Canis familiaris
aacacatttagagtaacctgctttt

SEQ ID NO: 46730 - DNA, 25 bp, Canis familiaris
aacacatggtagctacacttgtggt

SEQ ID NO: 46731 - DNA, 25 bp, Canis familiaris
aacaatgctattcttcactgtcaag

SEQ ID NO: 46732 - DNA, 25 bp, Canis familiaris
aaaataattcatactccttcagccc

SEQ ID NO: 46733 - DNA, 25 bp, Canis familiaris
aacaaaggtgctatcctgcagaccc

SEQ ID NO: 46734 - DNA, 25 bp, Canis familiaris
aacaaaggtgctatcctgcagaccc

SEQ ID NO: 46735 - DNA, 25 bp, Canis familiaris
aacaaaggtgctatcctgcagaccc

SEQ ID NO: 46736 - DNA, 25 bp, Canis familiaris
aacatacttgtggagacgccaacat

SEQ ID NO: 46737 - DNA, 25 bp, Canis familiaris
aacaacaatttaagcaacgcagcat

SEQ ID NO: 46738 - DNA, 25 bp, Canis familiaris
aacagcgaagttctcacaggcagca

SEQ ID NO: 46739 - DNA, 25 bp, Canis familiaris
aacacgattgctgagccacaacgca

SEQ ID NO: 46740 - DNA, 25 bp, Canis familiaris
aacgtgttcccagcagaaccacgac

SEQ ID NO: 46741 - DNA, 25 bp, Canis familiaris
aacagtgggcagaggcaaaccaggt

SEQ ID NO: 46742 - DNA, 25 bp, Canis familiaris
aacacttgaagtaataaaacaggct

SEQ ID NO: 46743 - DNA, 25 bp, Canis familiaris
aacacctcaagtttcgaaagaagat

SEQ ID NO: 46744 - DNA, 25 bp, Canis familiaris
aacacccataggttagccacgggag

SEQ ID NO: 46745 - DNA, 25 bp, Canis familiaris
aacacccatagctcttcaacttggc

SEQ ID NO: 46746 - DNA, 25 bp, Canis familiaris
aacagctccaacacgattactttcc

SEQ ID NO: 46747 - DNA, 25 bp, Canis familiaris
aacactcctcctacgtgttgtgttc

SEQ ID NO: 46748 - DNA, 25 bp, Canis familiaris
aacagcccccagagttaggtgtcat

SEQ ID NO: 46749 - DNA, 25 bp, Canis familiaris
aacactcccctcagattgaggagat

SEQ ID NO: 46750 - DNA, 25 bp, Canis familiaris
aacagccttcatgcagttttacaag

SEQ ID NO: 46751 - DNA, 25 bp, Canis familiaris
aacaggcttcatttattaataaatg

SEQ ID NO: 46752 - DNA, 25 bp, Canis familiaris
aacaacactctttttgaaacagatg

SEQ ID NO: 46753 - DNA, 25 bp, Canis familiaris
aacagtacttttttagaaagcatgt

SEQ ID NO: 46754 - DNA, 25 bp, Canis familiaris
aacactacttcaaagggatacaagc

SEQ ID NO: 46755 - DNA, 25 bp, Canis familiaris
aactctaagtataagtggacccaca

SEQ ID NO: 46756 - DNA, 25 bp, Canis familiaris
aacttcaagttgtaattgaccccag

SEQ ID NO: 46757 - DNA, 25 bp, Canis familiaris
aaaatcaactggttttttctctcag

SEQ ID NO: 46758 - DNA, 25 bp, Canis familiaris
aacactcaaagctttttccttctat

SEQ ID NO: 46759 - DNA, 25 bp, Canis familiaris
aacacttacgcgactgaaccgtcat

SEQ ID NO: 46760 - DNA, 25 bp, Canis familiaris
aacacgtagcaggcactgtatcccc

SEQ ID NO: 46761 - DNA, 25 bp, Canis familiaris
aacattgggcaggatcttgacgact

SEQ ID NO: 46762 - DNA, 25 bp, Canis familiaris
caaactggggcacattaccactaat

SEQ ID NO: 46763 - DNA, 25 bp, Canis familiaris
aactcgaggtctcatcaaccgtaat

SEQ ID NO: 46764 - DNA, 25 bp, Canis familiaris
aacaccaagttcaaaagctcgctaa

SEQ ID NO: 46765 - DNA, 25 bp, Canis familiaris
aacaccacagctgttacagcctcaa

SEQ ID NO: 46766 - DNA, 25 bp, Canis familiaris
aacattcatcctattagctccttac

SEQ ID NO: 46767 - DNA, 25 bp, Canis familiaris
aacacatcatcctgcttgactttaa

SEQ ID NO: 46768 - DNA, 25 bp, Canis familiaris
aacacatcgctcctgcagggtgtta

SEQ ID NO: 46769 - DNA, 25 bp, Canis familiaris
aacacattcagctgctgggtgtcca

SEQ ID NO: 46770 - DNA, 25 bp, Canis familiaris
aacacattccagacgggagcctctt

SEQ ID NO: 46771 - DNA, 25 bp, Canis familiaris
aacactgatgcctttagagaccctg

SEQ ID NO: 46772 - DNA, 25 bp, Canis familiaris
aacagaacctgtgaggagtgcctga

SEQ ID NO: 46773 - DNA, 25 bp, Canis familiaris
aactaaactgccgagaagtgcctgg

SEQ ID NO: 46774 - DNA, 25 bp, Canis familiaris
aagctggacttggggatttcctctg

SEQ ID NO: 46775 - DNA, 25 bp, Canis familiaris
aacaggagttggtgatttcccgcgc

SEQ ID NO: 46776 - DNA, 25 bp, Canis familiaris
aacaggggggagcatctctaccccg

SEQ ID NO: 46777 - DNA, 25 bp, Canis familiaris
gaacgggcttggagccctaagcccg

SEQ ID NO: 46778 - DNA, 25 bp, Canis familiaris
aagcactgagctaagggcctataac

SEQ ID NO: 46779 - DNA, 25 bp, Canis familiaris
aacactgacttatgttgctgtaagt

SEQ ID NO: 46780 - DNA, 25 bp, Canis familiaris
aacttcagttccttatcttaattct

SEQ ID NO: 46781 - DNA, 25 bp, Canis familiaris
aagacctgggccttacagtaaatat

SEQ ID NO: 46782 - DNA, 25 bp, Canis familiaris
aacacctgggtggatccgtcaatta

SEQ ID NO: 46783 - DNA, 25 bp, Canis familiaris
aacacccagttgcactagacatttt

SEQ ID NO: 46784 - DNA, 25 bp, Canis familiaris
aacatccgcttgcaggtacacattt

SEQ ID NO: 46785 - DNA, 25 bp, Canis familiaris
aacacggtagagcagaaccattcat

SEQ ID NO: 46786 - DNA, 25 bp, Canis familiaris
aacagaggttgagggcagactaaat

SEQ ID NO: 46787 - DNA, 25 bp, Canis familiaris
aacaggattggagccagacaaacct

SEQ ID NO: 46788 - DNA, 25 bp, Canis familiaris
aacatggtggtgttgccttcaaacc

SEQ ID NO: 46789 - DNA, 25 bp, Canis familiaris
aacatgtgtcagagcatccttagtt

SEQ ID NO: 46790 - DNA, 25 bp, Canis familiaris
aacaagtgcagtgccctcagactat

SEQ ID NO: 46791 - DNA, 25 bp, Canis familiaris
aacactgagcatctccctcacaatt

SEQ ID NO: 46792 - DNA, 25 bp, Canis familiaris
aacatttgctttctccaaatatggg

SEQ ID NO: 46793 - DNA, 25 bp, Canis familiaris
aaaatcatttgtgtcctaatattgg

SEQ ID NO: 46794 - DNA, 25 bp, Canis familiaris
aaaatcattttctcactcattatta

SEQ ID NO: 46795 - DNA, 25 bp, Canis familiaris
aaaatcattttttcgcctattactg

SEQ ID NO: 46796 - DNA, 25 bp, Canis familiaris
aacagttttgtttctggttccacat

SEQ ID NO: 46797 - DNA, 25 bp, Canis familiaris
aaaatctatcatttcctggcttacc

SEQ ID NO: 46798 - DNA, 25 bp, Canis familiaris
aaaattacatttctgctgccataca

SEQ ID NO: 46799 - DNA, 25 bp, Canis familiaris
aaaattgacttgactcttccttaat

SEQ ID NO: 46800 - DNA, 25 bp, Canis familiaris
aaaattgacttattcatccacaaaa

SEQ ID NO: 46801 - DNA, 25 bp, Canis familiaris
aacaatataacttaatcccaaccat

SEQ ID NO: 46802 - DNA, 25 bp, Canis familiaris
aaaattaagactatacacacacaca

SEQ ID NO: 46803 - DNA, 25 bp, Canis familiaris
aaaatattcaagcaaaacaccacaa

SEQ ID NO: 46804 - DNA, 25 bp, Canis familiaris
aaaatattcaagcacacaccacgat

SEQ ID NO: 46805 - DNA, 25 bp, Canis familiaris
aaaatttcaatcttatgcccacctg

SEQ ID NO: 46806 - DNA, 25 bp, Canis familiaris
aacacttgttacttggcaccaattt

SEQ ID NO: 46807 - DNA, 25 bp, Canis familiaris
aacacttgctgtttataaccaaatt

SEQ ID NO: 46808 - DNA, 25 bp, Canis familiaris
aacacttgagtattacaccctgaca

SEQ ID NO: 46809 - DNA, 25 bp, Canis familiaris
aacacttactgaagaccaacagcta

SEQ ID NO: 46810 - DNA, 25 bp, Canis familiaris
aacagctgacccaagactaatctct

SEQ ID NO: 46811 - DNA, 25 bp, Canis familiaris
aacactaccaccagtgaactgtaca

SEQ ID NO: 46812 - DNA, 25 bp, Canis familiaris
aacactatccaagttttcacgcata

SEQ ID NO: 46813 - DNA, 25 bp, Canis familiaris
aacacagtcctatcttgagctggct

SEQ ID NO: 46814 - DNA, 25 bp, Canis familiaris
aacaagatgtttactgtgacaacta

SEQ ID NO: 46815 - DNA, 25 bp, Canis familiaris
aacaccttgtgtttgaacattctca

SEQ ID NO: 46816 - DNA, 25 bp, Canis familiaris
aacacagttgtccaggatgacccca

SEQ ID NO: 46817 - DNA, 25 bp, Canis familiaris
aacacagtgctgtctggcggcacca

SEQ ID NO: 46818 - DNA, 25 bp, Canis familiaris
aacacagtgctgtctggcggcacca

SEQ ID NO: 46819 - DNA, 25 bp, Canis familiaris
aacagcatgtgccgagatggccacc

SEQ ID NO: 46820 - DNA, 25 bp, Canis familiaris
aacagcagcacgaatgagaacatta

SEQ ID NO: 46821 - DNA, 25 bp, Canis familiaris
aacaaactaatgcatctgattcaga

SEQ ID NO: 46822 - DNA, 25 bp, Canis familiaris
aacaaacaaatccctcatctatgca

SEQ ID NO: 46823 - DNA, 25 bp, Canis familiaris
aacaactaagcaaacctctcatctg

SEQ ID NO: 46824 - DNA, 25 bp, Canis familiaris
aacaagtgcaagcacaccctcatcg

SEQ ID NO: 46825 - DNA, 25 bp, Canis familiaris
aacacagatgggaagctccgcaccg

SEQ ID NO: 46826 - DNA, 25 bp, Canis familiaris
aacacaggaggaatgcccatacatg

SEQ ID NO: 46827 - DNA, 25 bp, Canis familiaris
aacaagagggatacgcgctccatcg

SEQ ID NO: 46828 - DNA, 25 bp, Canis familiaris
aacaagtgttgtctgcagtcctaag

SEQ ID NO: 46829 - DNA, 25 bp, Canis familiaris
aactcagtgggtggaagatttaatg

SEQ ID NO: 46830 - DNA, 25 bp, Canis familiaris
aaccttgggtctccgaattccagat

SEQ ID NO: 46831 - DNA, 25 bp, Canis familiaris
aacacttgggaaaagatgagggcat

SEQ ID NO: 46832 - DNA, 25 bp, Canis familiaris
aacacttgtaccttaggggtgctag

SEQ ID NO: 46833 - DNA, 25 bp, Canis familiaris
aacactgtgtgagatacgtcccgta

SEQ ID NO: 46834 - DNA, 25 bp, Canis familiaris
aacacatcagtgtgacacctccact

SEQ ID NO: 46835 - DNA, 25 bp, Canis familiaris
aaaatcacatcatgtcatgcctccc

SEQ ID NO: 46836 - DNA, 25 bp, Canis familiaris
aacaatgacatttgattcctctcct

SEQ ID NO: 46837 - DNA, 25 bp, Canis familiaris
aaaatatcctcatttgcatctgctc

SEQ ID NO: 46838 - DNA, 25 bp, Canis familiaris
aaaatatactcattgtcatttcagt

SEQ ID NO: 46839 - DNA, 25 bp, Canis familiaris
aaaatatacatcttttctcgcagat

SEQ ID NO: 46840 - DNA, 25 bp, Canis familiaris
gaataaatacttgttaaggtcatta

SEQ ID NO: 46841 - DNA, 25 bp, Canis familiaris
aacaaaatctgttctctgaagagtc

SEQ ID NO: 46842 - DNA, 25 bp, Canis familiaris
aacaacacactcgcattggatagga

SEQ ID NO: 46843 - DNA, 25 bp, Canis familiaris
aacaagcacgcgctcttggacgtga

SEQ ID NO: 46844 - DNA, 25 bp, Canis familiaris
aacaaggactgccctgtggacaaga

SEQ ID NO: 46845 - DNA, 25 bp, Canis familiaris
aacacacagactccaactgtacaag

SEQ ID NO: 46846 - DNA, 25 bp, Canis familiaris
aacacagaccatcaacagtcaaatc

SEQ ID NO: 46847 - DNA, 25 bp, Canis familiaris
aacaatgaacaatacctacaaggcc

SEQ ID NO: 46848 - DNA, 25 bp, Canis familiaris
aacaaagacacatcacctcgagagt

SEQ ID NO: 46849 - DNA, 25 bp, Canis familiaris
aacagggaagctgcccgggagtgtc

SEQ ID NO: 46850 - DNA, 25 bp, Canis familiaris
aacaggtcaatcagcccttggacct

SEQ ID NO: 46851 - DNA, 25 bp, Canis familiaris
aacaggttatgaccactttaggcct

SEQ ID NO: 46852 - DNA, 25 bp, Canis familiaris
aacagttcttctcattttggatcct

SEQ ID NO: 46853 - DNA, 25 bp, Canis familiaris
aacactattcttgtggaatggtact

SEQ ID NO: 46854 - DNA, 25 bp, Canis familiaris
aacactattttgggaattcgccaat

SEQ ID NO: 46855 - DNA, 25 bp, Canis familiaris
aacacgtctttggaaaagtgccctg

SEQ ID NO: 46856 - DNA, 25 bp, Canis familiaris
aacacgactctttgcataaaaccct

SEQ ID NO: 46857 - DNA, 25 bp, Canis familiaris
aacaacagcttttcatcaaaccctt

SEQ ID NO: 46858 - DNA, 25 bp, Canis familiaris
aacaacatgttttccagcattccca

SEQ ID NO: 46859 - DNA, 25 bp, Canis familiaris
aacaagcttctttcttgcttgccca

SEQ ID NO: 46860 - DNA, 25 bp, Canis familiaris
aaaattgtcctcatgtgtatcccac

SEQ ID NO: 46861 - DNA, 25 bp, Canis familiaris
aaaattgttcttgatgttctcctcg

SEQ ID NO: 46862 - DNA, 25 bp, Canis familiaris
aaaatatgttttacttgttgccctg

SEQ ID NO: 46863 - DNA, 25 bp, Canis familiaris
aacaatttttctacaccttgctctt

SEQ ID NO: 46864 - DNA, 25 bp, Canis familiaris
aacagatttgttgacacctacccaa

SEQ ID NO: 46865 - DNA, 25 bp, Canis familiaris
aacaattgttgtgggccccacccat

SEQ ID NO: 46866 - DNA, 25 bp, Canis familiaris
aaaattttgagacatccgctgcctt

SEQ ID NO: 46867 - DNA, 25 bp, Canis familiaris
aaaatttgtgatgccttcaggaatc

SEQ ID NO: 46868 - DNA, 25 bp, Canis familiaris
aagaatttgaatgccgaagttactg

SEQ ID NO: 46869 - DNA, 25 bp, Canis familiaris
aaaattgctaatgctgccactgtat

SEQ ID NO: 46870 - DNA, 25 bp, Canis familiaris
aaaattctaatgttctgcagactat

SEQ ID NO: 46871 - DNA, 25 bp, Canis familiaris
aacaattgctaaagacatcacacta

SEQ ID NO: 46872 - DNA, 25 bp, Canis familiaris
aacaattctggtaactctgcgctct

SEQ ID NO: 46873 - DNA, 25 bp, Canis familiaris
aaaattgtcaccaactctgcttctt

SEQ ID NO: 46874 - DNA, 25 bp, Canis familiaris
aaaattgcatcctgacccatttgtt

SEQ ID NO: 46875 - DNA, 25 bp, Canis familiaris
aacaatgtcgccaaagcccatggtg

SEQ ID NO: 46876 - DNA, 25 bp, Canis familiaris
aacagatgaccggagtggcctgaga

SEQ ID NO: 46877 - DNA, 25 bp, Canis familiaris
aacagatatcagggatatgggtcta

SEQ ID NO: 46878 - DNA, 25 bp, Canis familiaris
aacagaatcatggttgccagcaact

SEQ ID NO: 46879 - DNA, 25 bp, Canis familiaris
aacacagatttcatgcaagacagct

SEQ ID NO: 46880 - DNA, 25 bp, Canis familiaris
aacacatctgtacttgaagacactt

SEQ ID NO: 46881 - DNA, 25 bp, Canis familiaris
aacacactgtatctgcagatggaca

SEQ ID NO: 46882 - DNA, 25 bp, Canis familiaris
aacagcaggtactgcagcaggagca

SEQ ID NO: 46883 - DNA, 25 bp, Canis familiaris
aacagggtgacactcctgtccatca

SEQ ID NO: 46884 - DNA, 25 bp, Canis familiaris
aacacggataatttggctccatctt

SEQ ID NO: 46885 - DNA, 25 bp, Canis familiaris
aaaatttatatctagcctctctctc

SEQ ID NO: 46886 - DNA, 25 bp, Canis familiaris
aaaattcatatttacctcttccata

SEQ ID NO: 46887 - DNA, 25 bp, Canis familiaris
aaaattcatatttacctcttccata

SEQ ID NO: 46888 - DNA, 25 bp, Canis familiaris
aacaattatttctcctagtcttgac

SEQ ID NO: 46889 - DNA, 25 bp, Canis familiaris
aacaggttattgtccctaagctaat

SEQ ID NO: 46890 - DNA, 25 bp, Canis familiaris
aagcaagttttatcagtaagccaat

SEQ ID NO: 46891 - DNA, 25 bp, Canis familiaris
aacaattttgtagtagtgcagagta

SEQ ID NO: 46892 - DNA, 25 bp, Canis familiaris
aacaaatctggccctcatgtcagac

SEQ ID NO: 46893 - DNA, 25 bp, Canis familiaris
aacaagatcagactctccgtcatcc

SEQ ID NO: 46894 - DNA, 25 bp, Canis familiaris
aacacagctctacctttatatccgc

SEQ ID NO: 46895 - DNA, 25 bp, Canis familiaris
aacacagcattatctctggtttctg

SEQ ID NO: 46896 - DNA, 25 bp, Canis familiaris
aacagagcaatctcttctgccttat

SEQ ID NO: 46897 - DNA, 25 bp, Canis familiaris
aacaaagtactcatctgtcatattt

SEQ ID NO: 46898 - DNA, 25 bp, Canis familiaris
aacacaattaacatctctcattatt

SEQ ID NO: 46899 - DNA, 25 bp, Canis familiaris
aacacaattaacatctctcattatt

SEQ ID NO: 46900 - DNA, 25 bp, Canis familiaris
aacacaagtagaattctcatcccat

SEQ ID NO: 46901 - DNA, 25 bp, Canis familiaris
aacacaaatcatacgatccagcctc

SEQ ID NO: 46902 - DNA, 25 bp, Canis familiaris
aacaatggactattattcagccata

SEQ ID NO: 46903 - DNA, 25 bp, Canis familiaris
aacagcaggcctaaacacacacatg

SEQ ID NO: 46904 - DNA, 25 bp, Canis familiaris
aacacagtgctcaggagatctccat

SEQ ID NO: 46905 - DNA, 25 bp, Canis familiaris
aacaagatctgcctcgagttctgtg

SEQ ID NO: 46906 - DNA, 25 bp, Canis familiaris
aacacccagctcagagctttctgga

SEQ ID NO: 46907 - DNA, 25 bp, Canis familiaris
aacaccacactcagagttccgatgc

SEQ ID NO: 46908 - DNA, 25 bp, Canis familiaris
aacaccaccttgtcagattaattca

SEQ ID NO: 46909 - DNA, 25 bp, Canis familiaris
aacaaactcttgactatattcatta

SEQ ID NO: 46910 - DNA, 25 bp, Canis familiaris
aacaaacatctcaaccagcattctt

SEQ ID NO: 46911 - DNA, 25 bp, Canis familiaris
aacaagccatccactggcagtctgc

SEQ ID NO: 46912 - DNA, 25 bp, Canis familiaris
aacacccacgcaaattcagttcgtt

SEQ ID NO: 46913 - DNA, 25 bp, Canis familiaris
aacacttaacacattcagctatatg

SEQ ID NO: 46914 - DNA, 25 bp, Canis familiaris
aacacacaagccttttgctctgatt

SEQ ID NO: 46915 - DNA, 25 bp, Canis familiaris
aacacacaacctccttatattgctt

SEQ ID NO: 46916 - DNA, 25 bp, Canis familiaris
aacaccattaatcatcaatttgcat

SEQ ID NO: 46917 - DNA, 25 bp, Canis familiaris
aacagcctaaccatctttgtgcagt

SEQ ID NO: 46918 - DNA, 25 bp, Canis familiaris
aacacaccaagcatcactttgagag

SEQ ID NO: 46919 - DNA, 25 bp, Canis familiaris
aacacccagcacacacaggaagggg

SEQ ID NO: 46920 - DNA, 25 bp, Canis familiaris
aacacacacagcttcccagtaagtg

SEQ ID NO: 46921 - DNA, 25 bp, Canis familiaris
aacaaaagcataatatactctagta

SEQ ID NO: 46922 - DNA, 25 bp, Canis familiaris
aacatcaaacaaaaatctccaaatt

SEQ ID NO: 46923 - DNA, 25 bp, Canis familiaris
aaccataataacactctccactttt

SEQ ID NO: 46924 - DNA, 25 bp, Canis familiaris
aactcatccatctcagatttccact

SEQ ID NO: 46925 - DNA, 25 bp, Canis familiaris
aacaaacatccagtgagtgtctact

SEQ ID NO: 46926 - DNA, 25 bp, Canis familiaris
aacaatgacttaatgaggcctgata

SEQ ID NO: 46927 - DNA, 25 bp, Canis familiaris
aacaaagctattcgacgcctgctac

SEQ ID NO: 46928 - DNA, 25 bp, Canis familiaris
aacaaagctttcttcctgttagcaa

SEQ ID NO: 46929 - DNA, 25 bp, Canis familiaris
aacaaatctggttatccatgtagaa

SEQ ID NO: 46930 - DNA, 25 bp, Canis familiaris
aacaattctggcaatttcttacaga

SEQ ID NO: 46931 - DNA, 25 bp, Canis familiaris
aacaaaggctgcattttcaaagata

SEQ ID NO: 46932 - DNA, 25 bp, Canis familiaris
aacacacagccgtttgtgctcaaaa

SEQ ID NO: 46933 - DNA, 25 bp, Canis familiaris
aacacctgccagctgttggcgaaga

SEQ ID NO: 46934 - DNA, 25 bp, Canis familiaris
aacactgctggcagtctgggcggtg

SEQ ID NO: 46935 - DNA, 25 bp, Canis familiaris
aacaagctgtgcagacgtggcctct

SEQ ID NO: 46936 - DNA, 25 bp, Canis familiaris
aacaatctgctgaagacactggcca

SEQ ID NO: 46937 - DNA, 25 bp, Canis familiaris
aacacttcagaagtcacattctcaa

SEQ ID NO: 46938 - DNA, 25 bp, Canis familiaris
aacacttgacaagcagactgcgcat

SEQ ID NO: 46939 - DNA, 25 bp, Canis familiaris
aacactatgtaggcctgagtgcgca

SEQ ID NO: 46940 - DNA, 25 bp, Canis familiaris
aacaaggatcacgctggctcagaac

SEQ ID NO: 46941 - DNA, 25 bp, Canis familiaris
aacacagcggtcgacatttcagaaa

SEQ ID NO: 46942 - DNA, 25 bp, Canis familiaris
aacacaagcagtaacatttcaaaag

SEQ ID NO: 46943 - DNA, 25 bp, Canis familiaris
aacacaccagaatcatttccacgaa

SEQ ID NO: 46944 - DNA, 25 bp, Canis familiaris
aacacacacaaaaagtgctcctcta

SEQ ID NO: 46945 - DNA, 25 bp, Canis familiaris
aacaatccagagtccggttcttacg

SEQ ID NO: 46946 - DNA, 25 bp, Canis familiaris
aacagatatcagtaccccatggctt

SEQ ID NO: 46947 - DNA, 25 bp, Canis familiaris
aacaatatggagcctcctcgtgcct

SEQ ID NO: 46948 - DNA, 25 bp, Canis familiaris
aacagatggtggccatcgtccatgc

SEQ ID NO: 46949 - DNA, 25 bp, Canis familiaris
aagcagagagtcccaaaccacggtt

SEQ ID NO: 46950 - DNA, 25 bp, Canis familiaris
aacacagggccctatgaacacaggt

SEQ ID NO: 46951 - DNA, 25 bp, Canis familiaris
aactggggcccattgagacacaagg

SEQ ID NO: 46952 - DNA, 25 bp, Canis familiaris
aacacgagtactttatggccaagag

SEQ ID NO: 46953 - DNA, 25 bp, Canis familiaris
aacagtagatacacagtcccaagag

SEQ ID NO: 46954 - DNA, 25 bp, Canis familiaris
aacctggttcaagggccatcaagga

SEQ ID NO: 46955 - DNA, 25 bp, Canis familiaris
aacctgttccttgggtctcagaaat

SEQ ID NO: 46956 - DNA, 25 bp, Canis familiaris
aacctctcccacagggcgatgggat

SEQ ID NO: 46957 - DNA, 25 bp, Canis familiaris
aagtcttcccacaagggggacatgg

SEQ ID NO: 46958 - DNA, 25 bp, Canis familiaris
aactattctcccacgacgtcgtggg

SEQ ID NO: 46959 - DNA, 25 bp, Canis familiaris
aacataacggccatacctgtcgtgg

SEQ ID NO: 46960 - DNA, 25 bp, Canis familiaris
aactaccggtacaccagattgtgga

SEQ ID NO: 46961 - DNA, 25 bp, Canis familiaris
aacttgcccgataacctagatctta

SEQ ID NO: 46962 - DNA, 25 bp, Canis familiaris
aacttccctacatactcgacagtag

SEQ ID NO: 46963 - DNA, 25 bp, Canis familiaris
aacttccttacacaggacaggtgaa

SEQ ID NO: 46964 - DNA, 25 bp, Canis familiaris
aacttacgtacatcgaatcggcaga

SEQ ID NO: 46965 - DNA, 25 bp, Canis familiaris
aacatgaacagaaatccgagggtaa

SEQ ID NO: 46966 - DNA, 25 bp, Canis familiaris
aacagagaggccaattgctagggaa

SEQ ID NO: 46967 - DNA, 25 bp, Canis familiaris
aacagcagctactttgtcgagtgga

SEQ ID NO: 46968 - DNA, 25 bp, Canis familiaris
aagctcgtagttggatcttgggagc

SEQ ID NO: 46969 - DNA, 25 bp, Canis familiaris
aagctcgtagttggatcttgggagc

SEQ ID NO: 46970 - DNA, 25 bp, Canis familiaris
aacatggtcagtttacgttgcgaga

SEQ ID NO: 46971 - DNA, 25 bp, Canis familiaris
aacaggtctgtgatgcccttagatg

SEQ ID NO: 46972 - DNA, 25 bp, Canis familiaris
aacagcgagcgaattctcctcagga

SEQ ID NO: 46973 - DNA, 25 bp, Canis familiaris
aacactgagaaggcaccagctatga

SEQ ID NO: 46974 - DNA, 25 bp, Canis familiaris
aacacgcagaaggaactcttggagc

SEQ ID NO: 46975 - DNA, 25 bp, Canis familiaris
aacactaaagcagactgtatgggag

SEQ ID NO: 46976 - DNA, 25 bp, Canis familiaris
aacagacaaccaaagcattcaaggg

SEQ ID NO: 46977 - DNA, 25 bp, Canis familiaris
aacacacacccaatatgctatcact

SEQ ID NO: 46978 - DNA, 25 bp, Canis familiaris
aacacaaaccaattgcttagtttct

SEQ ID NO: 46979 - DNA, 25 bp, Canis familiaris
aacaaacacccaccttagtatatat

SEQ ID NO: 46980 - DNA, 25 bp, Canis familiaris
aactcaaccccaccatgggtacagt

SEQ ID NO: 46981 - DNA, 25 bp, Canis familiaris
aacacagaccactggatgtgagtaa

SEQ ID NO: 46982 - DNA, 25 bp, Canis familiaris
aacatgagtccctgacatatgatga

SEQ ID NO: 46983 - DNA, 25 bp, Canis familiaris
aacagagatccccgaatcgatccgc

SEQ ID NO: 46984 - DNA, 25 bp, Canis familiaris
aacaggatcctggtgatcgccatcg

SEQ ID NO: 46985 - DNA, 25 bp, Canis familiaris
aacagaagcacttatgatccctcca

SEQ ID NO: 46986 - DNA, 25 bp, Canis familiaris
aacagtacacatatgcctgcctgac

SEQ ID NO: 46987 - DNA, 25 bp, Canis familiaris
aacagtgccaaatgcctatgcagaa

SEQ ID NO: 46988 - DNA, 25 bp, Canis familiaris
aacagtgccacagaatgacagagat

SEQ ID NO: 46989 - DNA, 25 bp, Canis familiaris
aacacgcacatcgtggtgagctgga

SEQ ID NO: 46990 - DNA, 25 bp, Canis familiaris
aacacagcctcattgcttagcgtac

SEQ ID NO: 46991 - DNA, 25 bp, Canis familiaris
aacaccctgcagttctacaatgaga

SEQ ID NO: 46992 - DNA, 25 bp, Canis familiaris
aacactcactggttaaccagatgtt

SEQ ID NO: 46993 - DNA, 25 bp, Canis familiaris
aacaccactggaaagcctcatttct

SEQ ID NO: 46994 - DNA, 25 bp, Canis familiaris
aacaccagtgggttccatctttctg

SEQ ID NO: 46995 - DNA, 25 bp, Canis familiaris
aacagcacacgagggttcctttgcg

SEQ ID NO: 46996 - DNA, 25 bp, Canis familiaris
aacagagaaagcctgcttcctgtcc

SEQ ID NO: 46997 - DNA, 25 bp, Canis familiaris
aacacataatactcgtgcctgcacc

SEQ ID NO: 46998 - DNA, 25 bp, Canis familiaris
aacaccaagcactgaggcagctcac

SEQ ID NO: 46999 - DNA, 25 bp, Canis familiaris
aacaccgtgacattggtagacacct

SEQ ID NO: 47000 - DNA, 25 bp, Canis familiaris
aacacctgtgtagtttgcaagcaac

SEQ ID NO: 47001 - DNA, 25 bp, Canis familiaris
aacacctgattaaattgcatcatca

SEQ ID NO: 47002 - DNA, 25 bp, Canis familiaris
aacaccatgtcgagtctgcacaaga

SEQ ID NO: 47003 - DNA, 25 bp, Canis familiaris
aacactgatttgaaggtactcatgt

SEQ ID NO: 47004 - DNA, 25 bp, Canis familiaris
aacaggatatctcgaatgttctgat

SEQ ID NO: 47005 - DNA, 25 bp, Canis familiaris
aacaggctgactgggtgttagtgga

SEQ ID NO: 47006 - DNA, 25 bp, Canis familiaris
aacaactgatctgccttttctatga

SEQ ID NO: 47007 - DNA, 25 bp, Canis familiaris
aacagaatcaggaccttgtctttag

SEQ ID NO: 47008 - DNA, 25 bp, Canis familiaris
aacagaactggcacacacacattaa

SEQ ID NO: 47009 - DNA, 25 bp, Canis familiaris
aacagacacaacaaacaatcaaaaa

SEQ ID NO: 47010 - DNA, 25 bp, Canis familiaris
aacagaaacaaccagacgcaaacaa

SEQ ID NO: 47011 - DNA, 25 bp, Canis familiaris
aacagtaccagagtcaggccaagca

SEQ ID NO: 47012 - DNA, 25 bp, Canis familiaris
aacatgtaccaggatggacatcacg

SEQ ID NO: 47013 - DNA, 25 bp, Canis familiaris
aacacatatcctggagagcagcaga

SEQ ID NO: 47014 - DNA, 25 bp, Canis familiaris
aacacattcagctatatgacagaaa

SEQ ID NO: 47015 - DNA, 25 bp, Canis familiaris
aacagcattcaatcaccaagaacac

SEQ ID NO: 47016 - DNA, 25 bp, Canis familiaris
aacacattattgccctttagaactt

SEQ ID NO: 47017 - DNA, 25 bp, Canis familiaris
aacacatctattaccttacagagtt

SEQ ID NO: 47018 - DNA, 25 bp, Canis familiaris
aacaactttaccatctcttgttcct

SEQ ID NO: 47019 - DNA, 25 bp, Canis familiaris
aacaggtttacagcaatttttcttg

SEQ ID NO: 47020 - DNA, 25 bp, Canis familiaris
aagacttttacagataatttagtgt

SEQ ID NO: 47021 - DNA, 25 bp, Canis familiaris
aacactttttctcaggattttcatg

SEQ ID NO: 47022 - DNA, 25 bp, Canis familiaris
aacacttttcgacacagtgtggtgg

SEQ ID NO: 47023 - DNA, 25 bp, Canis familiaris
aacttttttgcgcaactgtggacac

SEQ ID NO: 47024 - DNA, 25 bp, Canis familiaris
aactctattttctcccaaagacact

SEQ ID NO: 47025 - DNA, 25 bp, Canis familiaris
aagcctcttcaatttcgcctaaaag

SEQ ID NO: 47026 - DNA, 25 bp, Canis familiaris
aacactgcttaatatactctgacaa

SEQ ID NO: 47027 - DNA, 25 bp, Canis familiaris
aacatctaagactcagccttgacaa

SEQ ID NO: 47028 - DNA, 25 bp, Canis familiaris
aacactgtaacttctgaaatggcat

SEQ ID NO: 47029 - DNA, 25 bp, Canis familiaris
aacactttgcactagtataatacat

SEQ ID NO: 47030 - DNA, 25 bp, Canis familiaris
aacacttggactgcttctataactt

SEQ ID NO: 47031 - DNA, 25 bp, Canis familiaris
aacactttatctgcttgaactattt

SEQ ID NO: 47032 - DNA, 25 bp, Canis familiaris
aacactgctatgctattctggtctt

SEQ ID NO: 47033 - DNA, 25 bp, Canis familiaris
aacacagctgcatttatttgagtat

SEQ ID NO: 47034 - DNA, 25 bp, Canis familiaris
aacagcaagctaaagattggtgatt

SEQ ID NO: 47035 - DNA, 25 bp, Canis familiaris
aacactcagctcacttgtggtgcag

SEQ ID NO: 47036 - DNA, 25 bp, Canis familiaris
aacactcagctacatcttcagtggg

SEQ ID NO: 47037 - DNA, 25 bp, Canis familiaris
aacactccctggccttattgcaggg

SEQ ID NO: 47038 - DNA, 25 bp, Canis familiaris
aacaacacacaaccattccagaggg

SEQ ID NO: 47039 - DNA, 25 bp, Canis familiaris
aacagagcaacccgatagcagaagg

SEQ ID NO: 47040 - DNA, 25 bp, Canis familiaris
aacacagcatcagggaaaaacagcc

SEQ ID NO: 47041 - DNA, 25 bp, Canis familiaris
aacacagatacacatgtacacacat

SEQ ID NO: 47042 - DNA, 25 bp, Canis familiaris
aacacagtacatctattcctctaaa

SEQ ID NO: 47043 - DNA, 25 bp, Canis familiaris
aacacatacacaagttgcccctaaa

SEQ ID NO: 47044 - DNA, 25 bp, Canis familiaris
aacagcacaacaaactcttcctaaa

SEQ ID NO: 47045 - DNA, 25 bp, Canis familiaris
aacacccacaaagtgcttcttattc

SEQ ID NO: 47046 - DNA, 25 bp, Canis familiaris
aacactccacaacttattttttatg

SEQ ID NO: 47047 - DNA, 25 bp, Canis familiaris
aacactacagcctattttatattta

SEQ ID NO: 47048 - DNA, 25 bp, Canis familiaris
aacattacagtctatgcaatctaca

SEQ ID NO: 47049 - DNA, 25 bp, Canis familiaris
aacatcataccatttgacattgaca

SEQ ID NO: 47050 - DNA, 25 bp, Canis familiaris
aacaaactgaatccacattactttt

SEQ ID NO: 47051 - DNA, 25 bp, Canis familiaris
aacaaacagcttcactctacttttc

SEQ ID NO: 47052 - DNA, 25 bp, Canis familiaris
aacaaatcagttctagcttccgtat

SEQ ID NO: 47053 - DNA, 25 bp, Canis familiaris
aacaaacctcagatgacatttcgtt

SEQ ID NO: 47054 - DNA, 25 bp, Canis familiaris
aactatgacctaggggtttctgttg

SEQ ID NO: 47055 - DNA, 25 bp, Canis familiaris
aacttccagttgtggtttcagtgct

SEQ ID NO: 47056 - DNA, 25 bp, Canis familiaris
aacgtccaggattcttggttactgt

SEQ ID NO: 47057 - DNA, 25 bp, Canis familiaris
aacagttcacgatttttgcccacga

SEQ ID NO: 47058 - DNA, 25 bp, Canis familiaris
aacagttactagtttctgacttgaa

SEQ ID NO: 47059 - DNA, 25 bp, Canis familiaris
aacaaattttgtgttccttgcaaat

SEQ ID NO: 47060 - DNA, 25 bp, Canis familiaris
aacacaattctaatctcttctcttg

SEQ ID NO: 47061 - DNA, 25 bp, Canis familiaris
aatccatttcttattggcctttcac

SEQ ID NO: 47062 - DNA, 25 bp, Canis familiaris
aacctgccttttgtggcacgtcaga

SEQ ID NO: 47063 - DNA, 25 bp, Canis familiaris
aagccaggttttcttacttcagagt

SEQ ID NO: 47064 - DNA, 25 bp, Canis familiaris
aacacagtttctactaagatttagg

SEQ ID NO: 47065 - DNA, 25 bp, Canis familiaris
aacacacttttaaatgacaaatagg

SEQ ID NO: 47066 - DNA, 25 bp, Canis familiaris
aacactatttttccagagctaaagg

SEQ ID NO: 47067 - DNA, 25 bp, Canis familiaris
aacacttctcttttccaggaataat

SEQ ID NO: 47068 - DNA, 25 bp, Canis familiaris
aacacatatgttattccaggaattc

SEQ ID NO: 47069 - DNA, 25 bp, Canis familiaris
aacacagttattttcaaggacactc

SEQ ID NO: 47070 - DNA, 25 bp, Canis familiaris
aacatcctttttgagactggcactc

SEQ ID NO: 47071 - DNA, 25 bp, Canis familiaris
aaccgagttggtgatgtgtggaaaa

SEQ ID NO: 47072 - DNA, 25 bp, Canis familiaris
aacaggtgtcggtcttgctgtggaa

SEQ ID NO: 47073 - DNA, 25 bp, Canis familiaris
aacagttggcaggcacagatgtggg

SEQ ID NO: 47074 - DNA, 25 bp, Canis familiaris
aacactcatggagctctacatggtg

SEQ ID NO: 47075 - DNA, 25 bp, Canis familiaris
aactcaagtgtccttcaatggatga

SEQ ID NO: 47076 - DNA, 25 bp, Canis familiaris
aacttgatattcttgtatggtgcat

SEQ ID NO: 47077 - DNA, 25 bp, Canis familiaris
aacacagcatttcggtggggctatc

SEQ ID NO: 47078 - DNA, 25 bp, Canis familiaris
aacagcatgcaacaggtgtcggtct

SEQ ID NO: 47079 - DNA, 25 bp, Canis familiaris
aacagctcatgactggagttgcccc

SEQ ID NO: 47080 - DNA, 25 bp, Canis familiaris
aacagaatgacgtcagcttgtccac

SEQ ID NO: 47081 - DNA, 25 bp, Canis familiaris
aacagatgcagagtgtccgtgaccc

SEQ ID NO: 47082 - DNA, 25 bp, Canis familiaris
aacagacagatgaattcggtgggaa

SEQ ID NO: 47083 - DNA, 25 bp, Canis familiaris
aacagaaggaaattggctcagatga

SEQ ID NO: 47084 - DNA, 25 bp, Canis familiaris
aacacagggaattacgctcatatca

SEQ ID NO: 47085 - DNA, 25 bp, Canis familiaris
aacagccggataaacctgatcatgt

SEQ ID NO: 47086 - DNA, 25 bp, Canis familiaris
aacacaaggtcaactcgctattgtt

SEQ ID NO: 47087 - DNA, 25 bp, Canis familiaris
aacacaagtgtctgagccttccatt

SEQ ID NO: 47088 - DNA, 25 bp, Canis familiaris
aacagaagttcattgcccatgtccc

SEQ ID NO: 47089 - DNA, 25 bp, Canis familiaris
caacagacgaattctccctgtcgag

SEQ ID NO: 47090 - DNA, 25 bp, Canis familiaris
aacagatcgcgttctagatcgtcga

SEQ ID NO: 47091 - DNA, 25 bp, Canis familiaris
aacagcagcctgcagctggattacg

SEQ ID NO: 47092 - DNA, 25 bp, Canis familiaris
aacatggcttgttgctggtgtaccg

SEQ ID NO: 47093 - DNA, 25 bp, Canis familiaris
aacatggctcttacttaggacctct

SEQ ID NO: 47094 - DNA, 25 bp, Canis familiaris
aactggttttcacatggacccaaag

SEQ ID NO: 47095 - DNA, 25 bp, Canis familiaris
aactggtttctagagttctcacaac

SEQ ID NO: 47096 - DNA, 25 bp, Canis familiaris
aacatggctttttcaacttttatag

SEQ ID NO: 47097 - DNA, 25 bp, Canis familiaris
aagtttcttaactgcattttgatga

SEQ ID NO: 47098 - DNA, 25 bp, Canis familiaris
aacatcttaataaaccatttctcag

SEQ ID NO: 47099 - DNA, 25 bp, Canis familiaris
aacatcctaaaatggctttgtcaca

SEQ ID NO: 47100 - DNA, 25 bp, Canis familiaris
aacagctctaataattgcccatggt

SEQ ID NO: 47101 - DNA, 25 bp, Canis familiaris
aacagcaccaacaaatctcagcatg

SEQ ID NO: 47102 - DNA, 25 bp, Canis familiaris
aacacatccattccacatacactgg

SEQ ID NO: 47103 - DNA, 25 bp, Canis familiaris
aacacatggcttttgagacactgaa

SEQ ID NO: 47104 - DNA, 25 bp, Canis familiaris
aacatcggattcctggacccaaagg

SEQ ID NO: 47105 - DNA, 25 bp, Canis familiaris
aacatatggttggttgactcaaaag

SEQ ID NO: 47106 - DNA, 25 bp, Canis familiaris
aacttgtgtgctggatgggtgcgta

SEQ ID NO: 47107 - DNA, 25 bp, Canis familiaris
aacgttttcgaggtggagcatatcc

SEQ ID NO: 47108 - DNA, 25 bp, Canis familiaris
aacggtttggtgatgatgatgctgc

SEQ ID NO: 47109 - DNA, 25 bp, Canis familiaris
aacacttttggttcaagatggcaga

SEQ ID NO: 47110 - DNA, 25 bp, Canis familiaris
aacaccttgctactccagggtgaga

SEQ ID NO: 47111 - DNA, 25 bp, Canis familiaris
aacagcacgtttacacaggtgtcag

SEQ ID NO: 47112 - DNA, 25 bp, Canis familiaris
aacatgggtgttcagatgagttatg

SEQ ID NO: 47113 - DNA, 25 bp, Canis familiaris
aacatctgtctgggggagagttgag

SEQ ID NO: 47114 - DNA, 25 bp, Canis familiaris
aacactgttgtcagagaagttgaac

SEQ ID NO: 47115 - DNA, 25 bp, Canis familiaris
aacactgtttgccaatcaagactac

SEQ ID NO: 47116 - DNA, 25 bp, Canis familiaris
aacattgtatttctaagcccaccat

SEQ ID NO: 47117 - DNA, 25 bp, Canis familiaris
aactttcttttctgagcttgaggct

SEQ ID NO: 47118 - DNA, 25 bp, Canis familiaris
aacactttttcattagacactgggt

SEQ ID NO: 47119 - DNA, 25 bp, Canis familiaris
aacttctttctctttgccagatagg

SEQ ID NO: 47120 - DNA, 25 bp, Canis familiaris
aacattttttcattggccaaggcaa

SEQ ID NO: 47121 - DNA, 25 bp, Canis familiaris
aacatctagtttgagtagcaagcga

SEQ ID NO: 47122 - DNA, 25 bp, Canis familiaris
aacacttggctcgaggaagcaagca

SEQ ID NO: 47123 - DNA, 25 bp, Canis familiaris
aacacagtccctaagcaagcaagca

SEQ ID NO: 47124 - DNA, 25 bp, Canis familiaris
aacactgttcctataataagatcgc

SEQ ID NO: 47125 - DNA, 25 bp, Canis familiaris
aacacttgcttcactagattttgcc

SEQ ID NO: 47126 - DNA, 25 bp, Canis familiaris
aacacttctgtatgtcagcatttac

SEQ ID NO: 47127 - DNA, 25 bp, Canis familiaris
aacagcctgcctgattcaacttact

SEQ ID NO: 47128 - DNA, 25 bp, Canis familiaris
aacacatctgacttcaaaactttta

SEQ ID NO: 47129 - DNA, 25 bp, Canis familiaris
aacactgtgctctttaaacttcttc

SEQ ID NO: 47130 - DNA, 25 bp, Canis familiaris
aacacagattctttatacactttgt

SEQ ID NO: 47131 - DNA, 25 bp, Canis familiaris
aacatcgttatattattcactcgga

SEQ ID NO: 47132 - DNA, 25 bp, Canis familiaris
aactcggtaaatcccatttggaatg

SEQ ID NO: 47133 - DNA, 25 bp, Canis familiaris
aactgggccaatgcccttttttgtg

SEQ ID NO: 47134 - DNA, 25 bp, Canis familiaris
aatcgggacagagtccgtttatact

SEQ ID NO: 47135 - DNA, 25 bp, Canis familiaris
aacaggtgatagtcccatattatta

SEQ ID NO: 47136 - DNA, 25 bp, Canis familiaris
aacagagctacatttctgaagtact

SEQ ID NO: 47137 - DNA, 25 bp, Canis familiaris
aacacagctgaagttcccacatact

SEQ ID NO: 47138 - DNA, 25 bp, Canis familiaris
aacagcatgctgtcaaacccatata

SEQ ID NO: 47139 - DNA, 25 bp, Canis familiaris
aacacatgctgttggacaccatcta

SEQ ID NO: 47140 - DNA, 25 bp, Canis familiaris
aacactgcttgggatatccatgcca

SEQ ID NO: 47141 - DNA, 25 bp, Canis familiaris
aacacttctgggtcagcagcacata

SEQ ID NO: 47142 - DNA, 25 bp, Canis familiaris
aacagtgtctggaacagcatcagga

SEQ ID NO: 47143 - DNA, 25 bp, Canis familiaris
aacaggcctggaacagtgcccaatg

SEQ ID NO: 47144 - DNA, 25 bp, Canis familiaris
aacatgcaccagcatgcactgtccc

SEQ ID NO: 47145 - DNA, 25 bp, Canis familiaris
aacatcacccttgctgatgtggccc

SEQ ID NO: 47146 - DNA, 25 bp, Canis familiaris
aacattgctgtgctgccatggatgg

SEQ ID NO: 47147 - DNA, 25 bp, Canis familiaris
aacatctctgtgctggctactgagt

SEQ ID NO: 47148 - DNA, 25 bp, Canis familiaris
aacactgtcattagagctgctgctg

SEQ ID NO: 47149 - DNA, 25 bp, Canis familiaris
aacactgacttcgaggcttgggatc

SEQ ID NO: 47150 - DNA, 25 bp, Canis familiaris
aacagcttctgtgaggctttttcca

SEQ ID NO: 47151 - DNA, 25 bp, Canis familiaris
aacagccagtatcaggctttctccc

SEQ ID NO: 47152 - DNA, 25 bp, Canis familiaris
aacatccagttgggagtttctcagc

SEQ ID NO: 47153 - DNA, 25 bp, Canis familiaris
aacatccagtacggagactctgccc

SEQ ID NO: 47154 - DNA, 25 bp, Canis familiaris
aacaggcagtcctggcagtgtgccc

SEQ ID NO: 47155 - DNA, 25 bp, Canis familiaris
aacaggagtctcatggagggcccgg

SEQ ID NO: 47156 - DNA, 25 bp, Canis familiaris
aacagagaggtttggagggtcttga

SEQ ID NO: 47157 - DNA, 25 bp, Canis familiaris
aacaggcctctttggagggtctcaa

SEQ ID NO: 47158 - DNA, 25 bp, Canis familiaris
aactgtgctgcattgttggatgaca

SEQ ID NO: 47159 - DNA, 25 bp, Canis familiaris
aacatggctggctgtcagtgacact

SEQ ID NO: 47160 - DNA, 25 bp, Canis familiaris
aacaggtggttgacagtgcctatga

SEQ ID NO: 47161 - DNA, 25 bp, Canis familiaris
aacttgaggttgaccagctctggga

SEQ ID NO: 47162 - DNA, 25 bp, Canis familiaris
aacatggagtattcccatcctgtgg

SEQ ID NO: 47163 - DNA, 25 bp, Canis familiaris
aacactagtaagaccacatgctttg

SEQ ID NO: 47164 - DNA, 25 bp, Canis familiaris
aacactcctaaccaatctgctttgg

SEQ ID NO: 47165 - DNA, 25 bp, Canis familiaris
aacactctaagactcaatcatcact

SEQ ID NO: 47166 - DNA, 25 bp, Canis familiaris
aacacctacgatccacagaatcttt

SEQ ID NO: 47167 - DNA, 25 bp, Canis familiaris
aacactttgcattcaccgataattt

SEQ ID NO: 47168 - DNA, 25 bp, Canis familiaris
aacacttgtcattcagaagttcttt

SEQ ID NO: 47169 - DNA, 25 bp, Canis familiaris
aacactttccataggaatgtcttta

SEQ ID NO: 47170 - DNA, 25 bp, Canis familiaris
aacacttttgttcacattgcattta

SEQ ID NO: 47171 - DNA, 25 bp, Canis familiaris
aacacttttaatcatcatcactggt

SEQ ID NO: 47172 - DNA, 25 bp, Canis familiaris
aacacttttacaacattctttgatt

SEQ ID NO: 47173 - DNA, 25 bp, Canis familiaris
aacacttgttatttcttgcctttct

SEQ ID NO: 47174 - DNA, 25 bp, Canis familiaris
aacacgctgttataattgcccatgg

SEQ ID NO: 47175 - DNA, 25 bp, Canis familiaris
aacacggttataaattggcgcatca

SEQ ID NO: 47176 - DNA, 25 bp, Canis familiaris
aacacgagtggcaccatttgtctca

SEQ ID NO: 47177 - DNA, 25 bp, Canis familiaris
aacagcaactggtttattttcatgg

SEQ ID NO: 47178 - DNA, 25 bp, Canis familiaris
aacagcatagtagttttgtatccaa

SEQ ID NO: 47179 - DNA, 25 bp, Canis familiaris
aacacatcattgtctttttactcaa

SEQ ID NO: 47180 - DNA, 25 bp, Canis familiaris
aacacattgatgtcttcttggtata

SEQ ID NO: 47181 - DNA, 25 bp, Canis familiaris
aacacatctcagtctgtttctttga

SEQ ID NO: 47182 - DNA, 25 bp, Canis familiaris
aacatgctctaggctgaggtctggg

SEQ ID NO: 47183 - DNA, 25 bp, Canis familiaris
aacagttgcatattgagagtttcac

SEQ ID NO: 47184 - DNA, 25 bp, Canis familiaris
aacagcttgctattgcggaatttgc

SEQ ID NO: 47185 - DNA, 25 bp, Canis familiaris
aacagctttcaagtgcctttctgca

SEQ ID NO: 47186 - DNA, 25 bp, Canis familiaris
aacactagactgtatcacattttga

SEQ ID NO: 47187 - DNA, 25 bp, Canis familiaris
aacatttgcatgtgacaagtttgaa

SEQ ID NO: 47188 - DNA, 25 bp, Canis familiaris
aacattctgacatccacagagtgtc

SEQ ID NO: 47189 - DNA, 25 bp, Canis familiaris
aacagttgaactccactatggtggt

SEQ ID NO: 47190 - DNA, 25 bp, Canis familiaris
aacagtcttacacgcatttggtctc

SEQ ID NO: 47191 - DNA, 25 bp, Canis familiaris
aacagtcttacacgcatttggtctc

SEQ ID NO: 47192 - DNA, 25 bp, Canis familiaris
aacagtcttacacgcatttggtctc

SEQ ID NO: 47193 - DNA, 25 bp, Canis familiaris
aacaccattagatcattctttccta

SEQ ID NO: 47194 - DNA, 25 bp, Canis familiaris
aacacctacacatcagactttagta

SEQ ID NO: 47195 - DNA, 25 bp, Canis familiaris
aacacccaacaactactgttaacat

SEQ ID NO: 47196 - DNA, 25 bp, Canis familiaris
aacaccaaacaactgaattcaacca

SEQ ID NO: 47197 - DNA, 25 bp, Canis familiaris
aacattaacacctggttccatgcct

SEQ ID NO: 47198 - DNA, 25 bp, Canis familiaris
aatcttggtccatagtatttacctc

SEQ ID NO: 47199 - DNA, 25 bp, Canis familiaris
aacagggtcaagtgtgcctctacct

SEQ ID NO: 47200 - DNA, 25 bp, Canis familiaris
aacaggggcaatggtgcgcctgctg

SEQ ID NO: 47201 - DNA, 25 bp, Canis familiaris
aacactgctgtgtattgtcgcgtct

SEQ ID NO: 47202 - DNA, 25 bp, Canis familiaris
aacactgattgcttttcctgttctt

SEQ ID NO: 47203 - DNA, 25 bp, Canis familiaris
aacacggagctaatgtcctatctct

SEQ ID NO: 47204 - DNA, 25 bp, Canis familiaris
aacactggagtcattccatgtgtct

SEQ ID NO: 47205 - DNA, 25 bp, Canis familiaris
aacacgcggaccatcaagatccttt

SEQ ID NO: 47206 - DNA, 25 bp, Canis familiaris
aacaggtggtccatccacacgatgc

SEQ ID NO: 47207 - DNA, 25 bp, Canis familiaris
aacagaaggtcatgacccacgtcag

SEQ ID NO: 47208 - DNA, 25 bp, Canis familiaris
aacagaaagccacacccaagtacat

SEQ ID NO: 47209 - DNA, 25 bp, Canis familiaris
aactaaaccatgtcacccaaggtga

SEQ ID NO: 47210 - DNA, 25 bp, Canis familiaris
aagtataacacttacgcctacctgg

SEQ ID NO: 47211 - DNA, 25 bp, Canis familiaris
aagtttgaaggcttcgcctacctgt

SEQ ID NO: 47212 - DNA, 25 bp, Canis familiaris
aactctggaaccttagcaaactctt

SEQ ID NO: 47213 - DNA, 25 bp, Canis familiaris
aacatcgtagaaacttaaacattag

SEQ ID NO: 47214 - DNA, 25 bp, Canis familiaris
aacatttgaacagattaggatttac

SEQ ID NO: 47215 - DNA, 25 bp, Canis familiaris
aacatttcaccattattgtgggtta

SEQ ID NO: 47216 - DNA, 25 bp, Canis familiaris
aacatccaccttttgtggaggctct

SEQ ID NO: 47217 - DNA, 25 bp, Canis familiaris
aacacgcacctgaagctttggcgag

SEQ ID NO: 47218 - DNA, 25 bp, Canis familiaris
aacacgcagcctgcagtgagtcggg

SEQ ID NO: 47219 - DNA, 25 bp, Canis familiaris
aacacgtgcctcaagagcactgggg

SEQ ID NO: 47220 - DNA, 25 bp, Canis familiaris
aacacgctgcaaaagcacactcggt

SEQ ID NO: 47221 - DNA, 25 bp, Canis familiaris
aacacgcatgccaaagtgaccagtc

SEQ ID NO: 47222 - DNA, 25 bp, Canis familiaris
aacactgtgcctaagtatcttgact

SEQ ID NO: 47223 - DNA, 25 bp, Canis familiaris
aacatctggctcatctttattacgg

SEQ ID NO: 47224 - DNA, 25 bp, Canis familiaris
aacagtggcctattactattgtcag

SEQ ID NO: 47225 - DNA, 25 bp, Canis familiaris
aacagtacctctaagcaactatagt

SEQ ID NO: 47226 - DNA, 25 bp, Canis familiaris
aacagacctactgagaattctagtg

SEQ ID NO: 47227 - DNA, 25 bp, Canis familiaris
gaaaagcctactgaatttacgttgt

SEQ ID NO: 47228 - DNA, 25 bp, Canis familiaris
aactagtctctcggatttagacgtt

SEQ ID NO: 47229 - DNA, 25 bp, Canis familiaris
aactaggtgctcagaaattcagtct

SEQ ID NO: 47230 - DNA, 25 bp, Canis familiaris
aacttggtgtgttaaagtcagattt

SEQ ID NO: 47231 - DNA, 25 bp, Canis familiaris
aacttctacagtgaaagctacttct

SEQ ID NO: 47232 - DNA, 25 bp, Canis familiaris
aacattacaaatcagaccgccttct

SEQ ID NO: 47233 - DNA, 25 bp, Canis familiaris
aacatggaccttcagcactgggttc

SEQ ID NO: 47234 - DNA, 25 bp, Canis familiaris
aacatgtactttgccacgggcttca

SEQ ID NO: 47235 - DNA, 25 bp, Canis familiaris
aacatgttgtaccccgaggaattca

SEQ ID NO: 47236 - DNA, 25 bp, Canis familiaris
aacattttcagctcttataacaaca

SEQ ID NO: 47237 - DNA, 25 bp, Canis familiaris
aagcttgcagacgtggtttcaacca

SEQ ID NO: 47238 - DNA, 25 bp, Canis familiaris
aacaggcgacttgggtgctagactc

SEQ ID NO: 47239 - DNA, 25 bp, Canis familiaris
aacagccgacagtgttctctgtctt

SEQ ID NO: 47240 - DNA, 25 bp, Canis familiaris
aacagccagacacttgattatcttt

SEQ ID NO: 47241 - DNA, 25 bp, Canis familiaris
aacagcgcagattccatgttcttgt

SEQ ID NO: 47242 - DNA, 25 bp, Canis familiaris
aacactatcatattgcattcttact

SEQ ID NO: 47243 - DNA, 25 bp, Canis familiaris
aacagtgcaccatgttctatagccc

SEQ ID NO: 47244 - DNA, 25 bp, Canis familiaris
aacaggcactcagtggcctttcaca

SEQ ID NO: 47245 - DNA, 25 bp, Canis familiaris
aacagggtcgtgcatctcaggcact

SEQ ID NO: 47246 - DNA, 25 bp, Canis familiaris
aacaggacggggttgcaaacttgca

SEQ ID NO: 47247 - DNA, 25 bp, Canis familiaris
aacggccgagggtgcttgagccgaa

SEQ ID NO: 47248 - DNA, 25 bp, Canis familiaris
aacggccgagggtgcttgagccgaa

SEQ ID NO: 47249 - DNA, 25 bp, Canis familiaris
aactgtcaggggcggttgaggcagc

SEQ ID NO: 47250 - DNA, 25 bp, Canis familiaris
aactaatgggccccctgtgggcata

SEQ ID NO: 47251 - DNA, 25 bp, Canis familiaris
aactacatttactccagtggacatc

SEQ ID NO: 47252 - DNA, 25 bp, Canis familiaris
aacttattcttgggccgtggagctg

SEQ ID NO: 47253 - DNA, 25 bp, Canis familiaris
aacattttgtggaccatcgccgagt

SEQ ID NO: 47254 - DNA, 25 bp, Canis familiaris
aacttctgaaggacaccaccagaga

SEQ ID NO: 47255 - DNA, 25 bp, Canis familiaris
aactagtgaaggtcaccccctgata

SEQ ID NO: 47256 - DNA, 25 bp, Canis familiaris
aactaggctaggtacaatcccgagt

SEQ ID NO: 47257 - DNA, 25 bp, Canis familiaris
aactaggtttgtaagtaccatattg

SEQ ID NO: 47258 - DNA, 25 bp, Canis familiaris
aactagttcttgaaagatccctatg

SEQ ID NO: 47259 - DNA, 25 bp, Canis familiaris
aactaggattagaaggcatttacat

SEQ ID NO: 47260 - DNA, 25 bp, Canis familiaris
aactcggattacatgtgcttggcga

SEQ ID NO: 47261 - DNA, 25 bp, Canis familiaris
aacttggttattgtcgtggcagatt

SEQ ID NO: 47262 - DNA, 25 bp, Canis familiaris
aactcaggtgtctcctaatattgtt

SEQ ID NO: 47263 - DNA, 25 bp, Canis familiaris
aacatctatttctcacttaaacttg

SEQ ID NO: 47264 - DNA, 25 bp, Canis familiaris
aacttgaaaacgccttgcaaacttg

SEQ ID NO: 47265 - DNA, 25 bp, Canis familiaris
aactggaataagcgctttgaaaaga

SEQ ID NO: 47266 - DNA, 25 bp, Canis familiaris
aactggaagataccccactaccaag

SEQ ID NO: 47267 - DNA, 25 bp, Canis familiaris
aactgcatgaatgagacccgcttcc

SEQ ID NO: 47268 - DNA, 25 bp, Canis familiaris
aacatgatgtaggggcagctggctc

SEQ ID NO: 47269 - DNA, 25 bp, Canis familiaris
aacatcgtgggcagcaggtgctcag

SEQ ID NO: 47270 - DNA, 25 bp, Canis familiaris
aacagctgaggcggtcaggctgctc

SEQ ID NO: 47271 - DNA, 25 bp, Canis familiaris
aacagctgagggactcaggcctgca

SEQ ID NO: 47272 - DNA, 25 bp, Canis familiaris
aacagctatgaccattaggcctatt

SEQ ID NO: 47273 - DNA, 25 bp, Canis familiaris
aacagctatgaccattaggcctatt

SEQ ID NO: 47274 - DNA, 25 bp, Canis familiaris
aacagctatgaccattaggcctatt

SEQ ID NO: 47275 - DNA, 25 bp, Canis familiaris
aacagctatgaccattaggcctatt

SEQ ID NO: 47276 - DNA, 25 bp, Canis familiaris
aacagctatgaccattaggcctatt

SEQ ID NO: 47277 - DNA, 25 bp, Canis familiaris
aacagctatgaccattaggcctatt

SEQ ID NO: 47278 - DNA, 25 bp, Canis familiaris
aacagctatgaccattaggcctatt

SEQ ID NO: 47279 - DNA, 25 bp, Canis familiaris
aacagctatgaccattaggcctatt

SEQ ID NO: 47280 - DNA, 25 bp, Canis familiaris
aacagctatgaccattaggcctatt

SEQ ID NO: 47281 - DNA, 25 bp, Canis familiaris
aacagctatgaccattaggcctatt

SEQ ID NO: 47282 - DNA, 25 bp, Canis familiaris
aacagctatgaccattaggcctatt

SEQ ID NO: 47283 - DNA, 25 bp, Canis familiaris
aacagctatgaccattaggcctatt

SEQ ID NO: 47284 - DNA, 25 bp, Canis familiaris
aacagctatgaccattaggcctatt

SEQ ID NO: 47285 - DNA, 25 bp, Canis familiaris
aacagctatgaccattaggcctatt

SEQ ID NO: 47286 - DNA, 25 bp, Canis familiaris
aacagctatgaccattaggcctatt

SEQ ID NO: 47287 - DNA, 25 bp, Canis familiaris
aacagctatgaccattaggcctatt

SEQ ID NO: 47288 - DNA, 25 bp, Canis familiaris
aacacgctcccaaagagctgtactc

SEQ ID NO: 47289 - DNA, 25 bp, Canis familiaris
aacaccccacaaacattgtgtccag

SEQ ID NO: 47290 - DNA, 25 bp, Canis familiaris
aacaccacaacaaacatcgtactat

SEQ ID NO: 47291 - DNA, 25 bp, Canis familiaris
aacaccctgtaatctcgtaattcgg

SEQ ID NO: 47292 - DNA, 25 bp, Canis familiaris
aacaccctgctgcataacctaatgt

SEQ ID NO: 47293 - DNA, 25 bp, Canis familiaris
aacaccgtgattttacccattgatg

SEQ ID NO: 47294 - DNA, 25 bp, Canis familiaris
aacacccatatatttaacatctttt

SEQ ID NO: 47295 - DNA, 25 bp, Canis familiaris
aacacccatatctcaaggtctctca

SEQ ID NO: 47296 - DNA, 25 bp, Canis familiaris
aacagcgcacattcgtcagaggttc

SEQ ID NO: 47297 - DNA, 25 bp, Canis familiaris
aacagtgacctcccagagagtggct

SEQ ID NO: 47298 - DNA, 25 bp, Canis familiaris
aacagctagttaccaagaggcagac

SEQ ID NO: 47299 - DNA, 25 bp, Canis familiaris
aacatgtttgtccgcaggggcatga

SEQ ID NO: 47300 - DNA, 25 bp, Canis familiaris
aacagctctctgtgtgcatagggga

SEQ ID NO: 47301 - DNA, 25 bp, Canis familiaris
aacagactctacatgtaggatggta

SEQ ID NO: 47302 - DNA, 25 bp, Canis familiaris
aacagactctaaggccaggagtttg

SEQ ID NO: 47303 - DNA, 25 bp, Canis familiaris
aacatgcagatctacagcgccagag

SEQ ID NO: 47304 - DNA, 25 bp, Canis familiaris
aacatagcatgtacacttcagtcac

SEQ ID NO: 47305 - DNA, 25 bp, Canis familiaris
aacatgcatgcgttgatcttgcagt

SEQ ID NO: 47306 - DNA, 25 bp, Canis familiaris
aacagcatcatgggagctctgggcc

SEQ ID NO: 47307 - DNA, 25 bp, Canis familiaris
aacagctatgacccttaggcctatt

SEQ ID NO: 47308 - DNA, 25 bp, Canis familiaris
aacacgtgatgccatcctaggacct

SEQ ID NO: 47309 - DNA, 25 bp, Canis familiaris
aacatctgtgatctcttaaggtcat

SEQ ID NO: 47310 - DNA, 25 bp, Canis familiaris
aacagagtacatattactggtcatg

SEQ ID NO: 47311 - DNA, 25 bp, Canis familiaris
aacagattgcctttagactatgtat

SEQ ID NO: 47312 - DNA, 25 bp, Canis familiaris
aacagtgtgctgttgtaaacatatt

SEQ ID NO: 47313 - DNA, 25 bp, Canis familiaris
aacagctctcaattgctttacagaa

SEQ ID NO: 47314 - DNA, 25 bp, Canis familiaris
aacatagtaaacttgctgactgcaa

SEQ ID NO: 47315 - DNA, 25 bp, Canis familiaris
aacatcaatataccctctactacat

SEQ ID NO: 47316 - DNA, 25 bp, Canis familiaris
aacatccagccacactgcgataagt

SEQ ID NO: 47317 - DNA, 25 bp, Canis familiaris
aacttagctcagttctcaggtcgtt

SEQ ID NO: 47318 - DNA, 25 bp, Canis familiaris
aacttcccagaatgagaactgttca

SEQ ID NO: 47319 - DNA, 25 bp, Canis familiaris
aacattttgcatgtaaatacttgta

SEQ ID NO: 47320 - DNA, 25 bp, Canis familiaris
aacatttgcgcagaaagcagcactt

SEQ ID NO: 47321 - DNA, 25 bp, Canis familiaris
aacacctgctcagtatgacgcttct

SEQ ID NO: 47322 - DNA, 25 bp, Canis familiaris
aacagccagctagagaggatcctga

SEQ ID NO: 47323 - DNA, 25 bp, Canis familiaris
aacagggctggatgagggcagtgat

SEQ ID NO: 47324 - DNA, 25 bp, Canis familiaris
aacaggcgctcgatagaggactatt

SEQ ID NO: 47325 - DNA, 25 bp, Canis familiaris
aacatggcccagcagtggaaccagc

SEQ ID NO: 47326 - DNA, 25 bp, Canis familiaris
aacagtggtcagcgtgtaacatcac

SEQ ID NO: 47327 - DNA, 25 bp, Canis familiaris
aactgctcagcctggatgtaaaccc

SEQ ID NO: 47328 - DNA, 25 bp, Canis familiaris
aactccaccaaaattactatcccag

SEQ ID NO: 47329 - DNA, 25 bp, Canis familiaris
aacttgcaggaatacaactcccctt

SEQ ID NO: 47330 - DNA, 25 bp, Canis familiaris
aactattggaaatcacctacccagt

SEQ ID NO: 47331 - DNA, 25 bp, Canis familiaris
aactaccaaatatacaccagtcctg

SEQ ID NO: 47332 - DNA, 25 bp, Canis familiaris
gtacttccgtaataaaaatcttgca

SEQ ID NO: 47333 - DNA, 25 bp, Canis familiaris
gtacttactaacacaacaaacctca

SEQ ID NO: 47334 - DNA, 25 bp, Canis familiaris
aacttactattcacctcaaatctct

SEQ ID NO: 47335 - DNA, 25 bp, Canis familiaris
aactttttgagcaacctccatactg

SEQ ID NO: 47336 - DNA, 25 bp, Canis familiaris
aacagcactttcaaacccactattg

SEQ ID NO: 47337 - DNA, 25 bp, Canis familiaris
aacagatcatttgggatgacccgac

SEQ ID NO: 47338 - DNA, 25 bp, Canis familiaris
aacatgagcatcagggtgagcccta

SEQ ID NO: 47339 - DNA, 25 bp, Canis familiaris
aacaggcactggaggatccggaagg

SEQ ID NO: 47340 - DNA, 25 bp, Canis familiaris
aacagctgcctggttggttgtgaat

SEQ ID NO: 47341 - DNA, 25 bp, Canis familiaris
aacagctgcctggttggttgtgaat

SEQ ID NO: 47342 - DNA, 25 bp, Canis familiaris
aacaggctcttaatgcagttggcat

SEQ ID NO: 47343 - DNA, 25 bp, Canis familiaris
aacagccttgcattactcttggcct

SEQ ID NO: 47344 - DNA, 25 bp, Canis familiaris
aacacctcatattgactgtctaccc

SEQ ID NO: 47345 - DNA, 25 bp, Canis familiaris
aacatccatctattttgctctagcc

SEQ ID NO: 47346 - DNA, 25 bp, Canis familiaris
aacaccatcttttgtccagagacac

SEQ ID NO: 47347 - DNA, 25 bp, Canis familiaris
aacatcctgttttattaagaccaag

SEQ ID NO: 47348 - DNA, 25 bp, Canis familiaris
aacacctgttctcctgtgaagaaac

SEQ ID NO: 47349 - DNA, 25 bp, Canis familiaris
aaccgcgtggccctgaagggcaaca

SEQ ID NO: 47350 - DNA, 25 bp, Canis familiaris
aacagggagggccagagggacacca

SEQ ID NO: 47351 - DNA, 25 bp, Canis familiaris
aacagggtgtggcagaagcagcagg

SEQ ID NO: 47352 - DNA, 25 bp, Canis familiaris
aacaggagtgggacaatcagaggat

SEQ ID NO: 47353 - DNA, 25 bp, Canis familiaris
aacagtgttgggattgcagagataa

SEQ ID NO: 47354 - DNA, 25 bp, Canis familiaris
aacagcttgtggttcttgaagtttc

SEQ ID NO: 47355 - DNA, 25 bp, Canis familiaris
aacatgttggtattgtccagttttt

SEQ ID NO: 47356 - DNA, 25 bp, Canis familiaris
aacattagtgttaggctcccttctt

SEQ ID NO: 47357 - DNA, 25 bp, Canis familiaris
aacttactttgagcttcttcttgtc

SEQ ID NO: 47358 - DNA, 25 bp, Canis familiaris
aatcttaccttatctttactgtttg

SEQ ID NO: 47359 - DNA, 25 bp, Canis familiaris
aacttttcattctcattggacttag

SEQ ID NO: 47360 - DNA, 25 bp, Canis familiaris
aacttttcattcacatgggccttgc

SEQ ID NO: 47361 - DNA, 25 bp, Canis familiaris
aacttcattattcttcggttctctg

SEQ ID NO: 47362 - DNA, 25 bp, Canis familiaris
aacgatttcttttataaggtgcctg

SEQ ID NO: 47363 - DNA, 25 bp, Canis familiaris
aacgtttcctaatgtaagtgctctg

SEQ ID NO: 47364 - DNA, 25 bp, Canis familiaris
aagttttccgagtgtgatggttgcg

SEQ ID NO: 47365 - DNA, 25 bp, Canis familiaris
aacttttccagaacctattgtatgg

SEQ ID NO: 47366 - DNA, 25 bp, Canis familiaris
aacttcttgggcttccacatgtata

SEQ ID NO: 47367 - DNA, 25 bp, Canis familiaris
aacttctgtggacccttgagctaat

SEQ ID NO: 47368 - DNA, 25 bp, Canis familiaris
aacttcgtcgattccattgtgatga

SEQ ID NO: 47369 - DNA, 25 bp, Canis familiaris
aacagtcttctgttccaggtgatga

SEQ ID NO: 47370 - DNA, 25 bp, Canis familiaris
aacaggcctgttttcagagtatgat

SEQ ID NO: 47371 - DNA, 25 bp, Canis familiaris
aacagacaagtgtatctaggttgat

SEQ ID NO: 47372 - DNA, 25 bp, Canis familiaris
aacagaacactgctctttttgattt

SEQ ID NO: 47373 - DNA, 25 bp, Canis familiaris
aactaagcagcctttgtttggttct

SEQ ID NO: 47374 - DNA, 25 bp, Canis familiaris
aacatacctggcttcaggcttaatt

SEQ ID NO: 47375 - DNA, 25 bp, Canis familiaris
aactcaagtagcgacccttcagatt

SEQ ID NO: 47376 - DNA, 25 bp, Canis familiaris
aactcgagtcaatcccacaacatat

SEQ ID NO: 47377 - DNA, 25 bp, Canis familiaris
aacatctgactctaactagaaaaaa

SEQ ID NO: 47378 - DNA, 25 bp, Canis familiaris
aactgaagtctttccagaaaatcca

SEQ ID NO: 47379 - DNA, 25 bp, Canis familiaris
aacttaatctttgcaatacgacact

SEQ ID NO: 47380 - DNA, 25 bp, Canis familiaris
aactaaacattttcaatacagccac

SEQ ID NO: 47381 - DNA, 25 bp, Canis familiaris
aacatgcaatacctttaccacagcc

SEQ ID NO: 47382 - DNA, 25 bp, Canis familiaris
aacagccaattcacatacaccagtc

SEQ ID NO: 47383 - DNA, 25 bp, Canis familiaris
aacaccagtatctaataccacagtg

SEQ ID NO: 47384 - DNA, 25 bp, Canis familiaris
aacatccagaagcagttcgccagct

SEQ ID NO: 47385 - DNA, 25 bp, Canis familiaris
aacatctcgtcaggagtgtcggcat

SEQ ID NO: 47386 - DNA, 25 bp, Canis familiaris
aactctcccaccgagtcggatggga

SEQ ID NO: 47387 - DNA, 25 bp, Canis familiaris
aacattccccccaacgatgggatgc

SEQ ID NO: 47388 - DNA, 25 bp, Canis familiaris
aacttccatccaccaaaagaaatct

SEQ ID NO: 47389 - DNA, 25 bp, Canis familiaris
aacttcctgcaagcttccagtaact

SEQ ID NO: 47390 - DNA, 25 bp, Canis familiaris
aacataccgctagttttctctacat

SEQ ID NO: 47391 - DNA, 25 bp, Canis familiaris
aacatttggcttatttttcactgta

SEQ ID NO: 47392 - DNA, 25 bp, Canis familiaris
aacatcttccatatcttttaacttt

SEQ ID NO: 47393 - DNA, 25 bp, Canis familiaris
aactctatcctatccttaaaacatt

SEQ ID NO: 47394 - DNA, 25 bp, Canis familiaris
aacttatcctttgtcaagacccatt

SEQ ID NO: 47395 - DNA, 25 bp, Canis familiaris
aattaacctggtctttgccaccatt

SEQ ID NO: 47396 - DNA, 25 bp, Canis familiaris
aactaacccagtcttttctcaaatg

SEQ ID NO: 47397 - DNA, 25 bp, Canis familiaris
aacataccggcgagtgtgttgtcac

SEQ ID NO: 47398 - DNA, 25 bp, Canis familiaris
aacagcccagggcctttgctgttac

SEQ ID NO: 47399 - DNA, 25 bp, Canis familiaris
aacagctaaggaactctggtgccta

SEQ ID NO: 47400 - DNA, 25 bp, Canis familiaris
aacagctaggaatctcagtctttgg

SEQ ID NO: 47401 - DNA, 25 bp, Canis familiaris
aacagctacgcacagtaattgttta

SEQ ID NO: 47402 - DNA, 25 bp, Canis familiaris
aacagccacagcccagtaatacttt

SEQ ID NO: 47403 - DNA, 25 bp, Canis familiaris
aacatgccaacccctgaatgatttt

SEQ ID NO: 47404 - DNA, 25 bp, Canis familiaris
aacatctacacctttgacaatttta

SEQ ID NO: 47405 - DNA, 25 bp, Canis familiaris
aacattagccatttgatgaactttc

SEQ ID NO: 47406 - DNA, 25 bp, Canis familiaris
aacatgtctgccatgggagcgcttc

SEQ ID NO: 47407 - DNA, 25 bp, Canis familiaris
aacagctgtccagtgttggtgattc

SEQ ID NO: 47408 - DNA, 25 bp, Canis familiaris
aacagtgttcctctgtgcatgtcac

SEQ ID NO: 47409 - DNA, 25 bp, Canis familiaris
aacagtgtaaactgctcagtcagtg

SEQ ID NO: 47410 - DNA, 25 bp, Canis familiaris
aactttcaatccccatcagtatgtg

SEQ ID NO: 47411 - DNA, 25 bp, Canis familiaris
aacttccaagtcccatgggatggtc

SEQ ID NO: 47412 - DNA, 25 bp, Canis familiaris
aacttggaagtacattgcaagaacc

SEQ ID NO: 47413 - DNA, 25 bp, Canis familiaris
aactcaggaaggtgccaatataacc

SEQ ID NO: 47414 - DNA, 25 bp, Canis familiaris
aacagaggacatgtcgccagttcaa

SEQ ID NO: 47415 - DNA, 25 bp, Canis familiaris
aacattggacatgctcaccgtgaag

SEQ ID NO: 47416 - DNA, 25 bp, Canis familiaris
aacttggtctggtcactggaaattt

SEQ ID NO: 47417 - DNA, 25 bp, Canis familiaris
aatctgggcttacattggtagactt

SEQ ID NO: 47418 - DNA, 25 bp, Canis familiaris
aacagtgggtaaaatcgtagatctt

SEQ ID NO: 47419 - DNA, 25 bp, Canis familiaris
aacggggggactatgtcaacatctg

SEQ ID NO: 47420 - DNA, 25 bp, Canis familiaris
caccgtggtgggtaccccaacaatg

SEQ ID NO: 47421 - DNA, 25 bp, Canis familiaris
caccgaaggttgtaagtccattaat

SEQ ID NO: 47422 - DNA, 25 bp, Canis familiaris
aactactggttgttactccatttat

SEQ ID NO: 47423 - DNA, 25 bp, Canis familiaris
aactcctagggataaccatttgtat

SEQ ID NO: 47424 - DNA, 25 bp, Canis familiaris
aactcttatcggacgaactatttgt

SEQ ID NO: 47425 - DNA, 25 bp, Canis familiaris
aagcctaatgggataactaactgta

SEQ ID NO: 47426 - DNA, 25 bp, Canis familiaris
aacttaatgggttgattcaagacca

SEQ ID NO: 47427 - DNA, 25 bp, Canis familiaris
aacagctacattacttgattaaaac

SEQ ID NO: 47428 - DNA, 25 bp, Canis familiaris
aacagtgatctgttcttcattaaga

SEQ ID NO: 47429 - DNA, 25 bp, Canis familiaris
aacaggtcatgctcccaataaaagt

SEQ ID NO: 47430 - DNA, 25 bp, Canis familiaris
aacaggtgcagtttctccacataaa

SEQ ID NO: 47431 - DNA, 25 bp, Canis familiaris
aacagtgctgatacattctctctct

SEQ ID NO: 47432 - DNA, 25 bp, Canis familiaris
aacaggagctacttccttcatttcc

SEQ ID NO: 47433 - DNA, 25 bp, Canis familiaris
aacagacttatcttccttttctagc

SEQ ID NO: 47434 - DNA, 25 bp, Canis familiaris
aacagtctggcagtttttttataca

SEQ ID NO: 47435 - DNA, 25 bp, Canis familiaris
aacttcctagaaattattttcacat

SEQ ID NO: 47436 - DNA, 25 bp, Canis familiaris
aactttcaactatttgtctttcctg

SEQ ID NO: 47437 - DNA, 25 bp, Canis familiaris
aacttctgaattaatctgtcccctt

SEQ ID NO: 47438 - DNA, 25 bp, Canis familiaris
aactttgatgctgtatgtccgcggc

SEQ ID NO: 47439 - DNA, 25 bp, Canis familiaris
aactcaggttcaagattcccaggcc

SEQ ID NO: 47440 - DNA, 25 bp, Canis familiaris
aacatagtctgatagattctccaag

SEQ ID NO: 47441 - DNA, 25 bp, Canis familiaris
aacatcactcttaagtttgccacgt

SEQ ID NO: 47442 - DNA, 25 bp, Canis familiaris
aacagctctaataacttgcccactg

SEQ ID NO: 47443 - DNA, 25 bp, Canis familiaris
aacagtctatattcactgcacccac

SEQ ID NO: 47444 - DNA, 25 bp, Canis familiaris
aacagtccattactcgatcttcagc

SEQ ID NO: 47445 - DNA, 25 bp, Canis familiaris
aacagcttcatgtaaccagctttgc

SEQ ID NO: 47446 - DNA, 25 bp, Canis familiaris
aacagctttgtaatacagttgcttt

SEQ ID NO: 47447 - DNA, 25 bp, Canis familiaris
aacagctttgcttttcacgtgatta

SEQ ID NO: 47448 - DNA, 25 bp, Canis familiaris
aacagcttcgtgctgtccagcttaa

SEQ ID NO: 47449 - DNA, 25 bp, Canis familiaris
aacagcttatgaccttctagtttaa

SEQ ID NO: 47450 - DNA, 25 bp, Canis familiaris
aacatctctactactttacttctaa

SEQ ID NO: 47451 - DNA, 25 bp, Canis familiaris
aacataccattaacttgcactacta

SEQ ID NO: 47452 - DNA, 25 bp, Canis familiaris
aacatagcctatttcttgcttgatt

SEQ ID NO: 47453 - DNA, 25 bp, Canis familiaris
aacagaccatgttagctttcatttt

SEQ ID NO: 47454 - DNA, 25 bp, Canis familiaris
aacagcaggttctgctttcagcttt

SEQ ID NO: 47455 - DNA, 25 bp, Canis familiaris
aacagcaagttctgatactatattg

SEQ ID NO: 47456 - DNA, 25 bp, Canis familiaris
aactcaaggtgctagatccctgatt

SEQ ID NO: 47457 - DNA, 25 bp, Canis familiaris
aacagcaggggcgatatcctctgac

SEQ ID NO: 47458 - DNA, 25 bp, Canis familiaris
aacagcaagcaccaacaacatcgcc

SEQ ID NO: 47459 - DNA, 25 bp, Canis familiaris
aacagtgtgctcagatcagactccc

SEQ ID NO: 47460 - DNA, 25 bp, Canis familiaris
aacagatatctcagaggactctaca

SEQ ID NO: 47461 - DNA, 25 bp, Canis familiaris
aacatttgccacgaggactgtcaag

SEQ ID NO: 47462 - DNA, 25 bp, Canis familiaris
aacattccacaggaggccgtcattc

SEQ ID NO: 47463 - DNA, 25 bp, Canis familiaris
aacttcaaggcatttgccagcctcc

SEQ ID NO: 47464 - DNA, 25 bp, Canis familiaris
aacttcaaggcatttgccagcctcc

SEQ ID NO: 47465 - DNA, 25 bp, Canis familiaris
aacttcaaggcatttgccagcctcc

SEQ ID NO: 47466 - DNA, 25 bp, Canis familiaris
aacttgacagtggttgcctgcctaa

SEQ ID NO: 47467 - DNA, 25 bp, Canis familiaris
aacttggggttggtctactagcatt

SEQ ID NO: 47468 - DNA, 25 bp, Canis familiaris
acccaattagactccagacatgccg

SEQ ID NO: 47469 - DNA, 25 bp, Canis familiaris
aacttgggccctgccaattaatgtt

SEQ ID NO: 47470 - DNA, 25 bp, Canis familiaris
aacttctgggccatccagttgactt

SEQ ID NO: 47471 - DNA, 25 bp, Canis familiaris
aacttgggtctcattagatcccatt

SEQ ID NO: 47472 - DNA, 25 bp, Canis familiaris
aacttggtttctaatatcattctct

SEQ ID NO: 47473 - DNA, 25 bp, Canis familiaris
aacttggatttgtatcattcgtcaa

SEQ ID NO: 47474 - DNA, 25 bp, Canis familiaris
aacatgtacataagatacttcccaa

SEQ ID NO: 47475 - DNA, 25 bp, Canis familiaris
aacagatgtagaaatattcccagaa

SEQ ID NO: 47476 - DNA, 25 bp, Canis familiaris
aacagttagtcaacttgcaccagag

SEQ ID NO: 47477 - DNA, 25 bp, Canis familiaris
aacagttaccaagtgtaccagactc

SEQ ID NO: 47478 - DNA, 25 bp, Canis familiaris
aacagtgatacctctttatcgccta

SEQ ID NO: 47479 - DNA, 25 bp, Canis familiaris
aacagaggacgtccttttgagctcc

SEQ ID NO: 47480 - DNA, 25 bp, Canis familiaris
aacgcggacgtagtgattagggcca

SEQ ID NO: 47481 - DNA, 25 bp, Canis familiaris
aacatggtcaagtactggaagggcc

SEQ ID NO: 47482 - DNA, 25 bp, Canis familiaris
aacagagatccagagcgaaaagggc

SEQ ID NO: 47483 - DNA, 25 bp, Canis familiaris
aacagagccacagaaggaccgtgag

SEQ ID NO: 47484 - DNA, 25 bp, Canis familiaris
aacagatacacacaaggacatttgc

SEQ ID NO: 47485 - DNA, 25 bp, Canis familiaris
aacagataacacagaaccattcaga

SEQ ID NO: 47486 - DNA, 25 bp, Canis familiaris
aacatataactgaggagcccatctg

SEQ ID NO: 47487 - DNA, 25 bp, Canis familiaris
aacttagtgatgtggagggactggg

SEQ ID NO: 47488 - DNA, 25 bp, Canis familiaris
aactgtggtgtgtgggagtggggag

SEQ ID NO: 47489 - DNA, 25 bp, Canis familiaris
aacatggtattatagcggggtggca

SEQ ID NO: 47490 - DNA, 25 bp, Canis familiaris
aacgttctgtaatctggggatgctg

SEQ ID NO: 47491 - DNA, 25 bp, Canis familiaris
aacagtgtgggatacatggacgatc

SEQ ID NO: 47492 - DNA, 25 bp, Canis familiaris
aacatgtaagagtgaattcctgcca

SEQ ID NO: 47493 - DNA, 25 bp, Canis familiaris
aacaggaacagacggacttcgccta

SEQ ID NO: 47494 - DNA, 25 bp, Canis familiaris
aacaggaaccagcagactttggaga

SEQ ID NO: 47495 - DNA, 25 bp, Canis familiaris
aacagggaccagacaggctgcttct

SEQ ID NO: 47496 - DNA, 25 bp, Canis familiaris
aacagggactccaaggtcctctacg

SEQ ID NO: 47497 - DNA, 25 bp, Canis familiaris
aacagggagtctggttttccttctg

SEQ ID NO: 47498 - DNA, 25 bp, Canis familiaris
aacagggatttgagtatctccttta

SEQ ID NO: 47499 - DNA, 25 bp, Canis familiaris
aacatggggttgagtgcttgccttt

SEQ ID NO: 47500 - DNA, 25 bp, Canis familiaris
aacagggggatttgcttgtcccagt

SEQ ID NO: 47501 - DNA, 25 bp, Canis familiaris
aacagggaagtatctcctcatcctt

SEQ ID NO: 47502 - DNA, 25 bp, Canis familiaris
aacaggagtagccaactcctccact

SEQ ID NO: 47503 - DNA, 25 bp, Canis familiaris
aacagaggcttgcaagccacaccca

SEQ ID NO: 47504 - DNA, 25 bp, Canis familiaris
aacagattctgttgggtagccctca

SEQ ID NO: 47505 - DNA, 25 bp, Canis familiaris
aacgttgtaagagctacctccacct

SEQ ID NO: 47506 - DNA, 25 bp, Canis familiaris
aactttggaatatctaccccacatc

SEQ ID NO: 47507 - DNA, 25 bp, Canis familiaris
aagtttaaaattctgctcccaatct

SEQ ID NO: 47508 - DNA, 25 bp, Canis familiaris
aagttcttgaaatcttggggattct

SEQ ID NO: 47509 - DNA, 25 bp, Canis familiaris
aagcttttacaagagggcaggacct

SEQ ID NO: 47510 - DNA, 25 bp, Canis familiaris
aacctttactgtcacggctggatgc

SEQ ID NO: 47511 - DNA, 25 bp, Canis familiaris
aagccttataccaaacaggtgttga

SEQ ID NO: 47512 - DNA, 25 bp, Canis familiaris
aacatgctttatgcagaacctttta

SEQ ID NO: 47513 - DNA, 25 bp, Canis familiaris
aacagatgctacctcagataccttc

SEQ ID NO: 47514 - DNA, 25 bp, Canis familiaris
aacaggcaaccttatgaccttgtcc

SEQ ID NO: 47515 - DNA, 25 bp, Canis familiaris
aacagtggcaccaaatggtctctgg

SEQ ID NO: 47516 - DNA, 25 bp, Canis familiaris
aacagaaccacaactgtgtgtgtgt

SEQ ID NO: 47517 - DNA, 25 bp, Canis familiaris
aacgaacagactcaggcgatgtgct

SEQ ID NO: 47518 - DNA, 25 bp, Canis familiaris
aacagaaagagtctccgactccgat

SEQ ID NO: 47519 - DNA, 25 bp, Canis familiaris
aacagagaagaggtctccgactccg

SEQ ID NO: 47520 - DNA, 25 bp, Canis familiaris
aacatgaggatgccgatatccgagg

SEQ ID NO: 47521 - DNA, 25 bp, Canis familiaris
aacataggatgggcccgatgcagga

SEQ ID NO: 47522 - DNA, 25 bp, Canis familiaris
aacatgctggagaaactggatgaag

SEQ ID NO: 47523 - DNA, 25 bp, Canis familiaris
aacatatgggaaactctctgatact

SEQ ID NO: 47524 - DNA, 25 bp, Canis familiaris
aacagtgggaaacctgctacctcat

SEQ ID NO: 47525 - DNA, 25 bp, Canis familiaris
aacttgtatgtcaaccttacttcaa

SEQ ID NO: 47526 - DNA, 25 bp, Canis familiaris
aacatttattctatccttctacttt

SEQ ID NO: 47527 - DNA, 25 bp, Canis familiaris
aacggtttatttcattatagctatt

SEQ ID NO: 47528 - DNA, 25 bp, Canis familiaris
aactgatgtttttttcttaggccat

SEQ ID NO: 47529 - DNA, 25 bp, Canis familiaris
aacagactttgtatttgtcagccta

SEQ ID NO: 47530 - DNA, 25 bp, Canis familiaris
aacatactttgcatatctcttcacc

SEQ ID NO: 47531 - DNA, 25 bp, Canis familiaris
aacataactggcagccgaatccctt

SEQ ID NO: 47532 - DNA, 25 bp, Canis familiaris
aacaggcttagcacctgactccttt

SEQ ID NO: 47533 - DNA, 25 bp, Canis familiaris
aacaggctttgagtcctgcctttgt

SEQ ID NO: 47534 - DNA, 25 bp, Canis familiaris
aactggcttctaatggtccgtgtgg

SEQ ID NO: 47535 - DNA, 25 bp, Canis familiaris
aactgaaatctctgggcttgtgggg

SEQ ID NO: 47536 - DNA, 25 bp, Canis familiaris
aactcaaatcatatgatcttttggg

SEQ ID NO: 47537 - DNA, 25 bp, Canis familiaris
aacatcgtactattacttccattgg

SEQ ID NO: 47538 - DNA, 25 bp, Canis familiaris
aacatcggactattgatcttcactc

SEQ ID NO: 47539 - DNA, 25 bp, Canis familiaris
aacatctcaaacttgatctccatct

SEQ ID NO: 47540 - DNA, 25 bp, Canis familiaris
aacattcagaatccaagtgccactt

SEQ ID NO: 47541 - DNA, 25 bp, Canis familiaris
aacttcatgcacctgaagcccattt

SEQ ID NO: 47542 - DNA, 25 bp, Canis familiaris
aacttagcatcatgagtgctccttt

SEQ ID NO: 47543 - DNA, 25 bp, Canis familiaris
aagcttagctaccgcagctactggt

SEQ ID NO: 47544 - DNA, 25 bp, Canis familiaris
aactatagtgcctgcagcggtgtcg

SEQ ID NO: 47545 - DNA, 25 bp, Canis familiaris
aactacagtgtctgcctgttacagc

SEQ ID NO: 47546 - DNA, 25 bp, Canis familiaris
aacttcctgtcatggcataataaca

SEQ ID NO: 47547 - DNA, 25 bp, Canis familiaris
aactcccttctgagacaacaatgca

SEQ ID NO: 47548 - DNA, 25 bp, Canis familiaris
aacatcccatttcctgagggaatgg

SEQ ID NO: 47549 - DNA, 25 bp, Canis familiaris
aacagtccatccacttgggaggagt

SEQ ID NO: 47550 - DNA, 25 bp, Canis familiaris
aagcgtctaccaatttcgtcacgtt

SEQ ID NO: 47551 - DNA, 25 bp, Canis familiaris
aactatctgaacatttactacggtt

SEQ ID NO: 47552 - DNA, 25 bp, Canis familiaris
aacttcacatccatttactattgtt

SEQ ID NO: 47553 - DNA, 25 bp, Canis familiaris
aacatgcctatctttcttagttttt

SEQ ID NO: 47554 - DNA, 25 bp, Canis familiaris
aacatcacatctttgtctctagtac

SEQ ID NO: 47555 - DNA, 25 bp, Canis familiaris
aacatctctccatgtgtctgttagc

SEQ ID NO: 47556 - DNA, 25 bp, Canis familiaris
aacattcctgatgtcctggatggcc

SEQ ID NO: 47557 - DNA, 25 bp, Canis familiaris
aacttcgtgaagacctggagagact

SEQ ID NO: 47558 - DNA, 25 bp, Canis familiaris
aacttcccaactgcggcaagagctt

SEQ ID NO: 47559 - DNA, 25 bp, Canis familiaris
aacagtccctacttcatggaacttt

SEQ ID NO: 47560 - DNA, 25 bp, Canis familiaris
aactagcccatacaagtacactttt

SEQ ID NO: 47561 - DNA, 25 bp, Canis familiaris
aactcacttcaaccaactaactgct

SEQ ID NO: 47562 - DNA, 25 bp, Canis familiaris
aactcattttaccaaatctgccgtt

SEQ ID NO: 47563 - DNA, 25 bp, Canis familiaris
aacagttcattactcaattctgttt

SEQ ID NO: 47564 - DNA, 25 bp, Canis familiaris
aacagatatctttccattaattttt

SEQ ID NO: 47565 - DNA, 25 bp, Canis familiaris
aacatgaatccttcactcttcttga

SEQ ID NO: 47566 - DNA, 25 bp, Canis familiaris
aacagatatccatcttcttctcttg

SEQ ID NO: 47567 - DNA, 25 bp, Canis familiaris
aacatgatagtctcttctatgtcca

SEQ ID NO: 47568 - DNA, 25 bp, Canis familiaris
aacatgttgtgttatacttggcaaa

SEQ ID NO: 47569 - DNA, 25 bp, Canis familiaris
aacagattggttttgctggaataat

SEQ ID NO: 47570 - DNA, 25 bp, Canis familiaris
aactttgtattctgctggaacatga

SEQ ID NO: 47571 - DNA, 25 bp, Canis familiaris
aaccatccttaaactggaacagaat

SEQ ID NO: 47572 - DNA, 25 bp, Canis familiaris
aacctggcccaatcggaaatggaga

SEQ ID NO: 47573 - DNA, 25 bp, Canis familiaris
aactctgggccacaaggtgcttggg

SEQ ID NO: 47574 - DNA, 25 bp, Canis familiaris
aacttcgttcagtgaggccttgctg

SEQ ID NO: 47575 - DNA, 25 bp, Canis familiaris
aactcctttcaacgatggatccatt

SEQ ID NO: 47576 - DNA, 25 bp, Canis familiaris
aactacattaaactgagttcctctt

SEQ ID NO: 47577 - DNA, 25 bp, Canis familiaris
aacatcacttgacactgagtcctcc

SEQ ID NO: 47578 - DNA, 25 bp, Canis familiaris
aacatccgtgcataatggccaaacg

SEQ ID NO: 47579 - DNA, 25 bp, Canis familiaris
aacatcctaatgtgtgtgcctaaac

SEQ ID NO: 47580 - DNA, 25 bp, Canis familiaris
aacatcaacaattttctccaacaac

SEQ ID NO: 47581 - DNA, 25 bp, Canis familiaris
aacataacatttactctatctacaa

SEQ ID NO: 47582 - DNA, 25 bp, Canis familiaris
aactaactatatatcctttcgacaa

SEQ ID NO: 47583 - DNA, 25 bp, Canis familiaris
aagataaagagatgctggtttaaaa

SEQ ID NO: 47584 - DNA, 25 bp, Canis familiaris
aagcattcacagaagtgggttttta

SEQ ID NO: 47585 - DNA, 25 bp, Canis familiaris
aacattacagtaaccgtgtgtctgt

SEQ ID NO: 47586 - DNA, 25 bp, Canis familiaris
aacatgtgggtaagctcgtgctgct

SEQ ID NO: 47587 - DNA, 25 bp, Canis familiaris
aacaggattctatgctaggcacttt

SEQ ID NO: 47588 - DNA, 25 bp, Canis familiaris
aacaggtcctgtttgaggctctatc

SEQ ID NO: 47589 - DNA, 25 bp, Canis familiaris
aacagtggccattcattggcctcaa

SEQ ID NO: 47590 - DNA, 25 bp, Canis familiaris
aactctgaacatttcttcccaaagg

SEQ ID NO: 47591 - DNA, 25 bp, Canis familiaris
aacttaactatacacctgaaagtgc

SEQ ID NO: 47592 - DNA, 25 bp, Canis familiaris
aacttacccagttcacctgaaggtg

SEQ ID NO: 47593 - DNA, 25 bp, Canis familiaris
aacttttccagttacttgacacaat

SEQ ID NO: 47594 - DNA, 25 bp, Canis familiaris
aactttctaactggactgtatacat

SEQ ID NO: 47595 - DNA, 25 bp, Canis familiaris
aactcgatgctacctgaggggctac

SEQ ID NO: 47596 - DNA, 25 bp, Canis familiaris
aaccatttagtttggagagcaagcc

SEQ ID NO: 47597 - DNA, 25 bp, Canis familiaris
aactcttggagtctaggccacagcc

SEQ ID NO: 47598 - DNA, 25 bp, Canis familiaris
aactcttggggctgagccaccagcc

SEQ ID NO: 47599 - DNA, 25 bp, Canis familiaris
aactttgagaggtaattacatagtg

SEQ ID NO: 47600 - DNA, 25 bp, Canis familiaris
aactctacaagaataaatactagtc

SEQ ID NO: 47601 - DNA, 25 bp, Canis familiaris
aactctgattagcaaaaatagtgtc

SEQ ID NO: 47602 - DNA, 25 bp, Canis familiaris
aacttcatttgatgctaaataggag

SEQ ID NO: 47603 - DNA, 25 bp, Canis familiaris
aacatggcattgttaccaactggga

SEQ ID NO: 47604 - DNA, 25 bp, Canis familiaris
aactgagtggcttaaaccgcggaga

SEQ ID NO: 47605 - DNA, 25 bp, Canis familiaris
aacggggcatattggagggggcatt

SEQ ID NO: 47606 - DNA, 25 bp, Canis familiaris
aactggattttcttgagggggatca

SEQ ID NO: 47607 - DNA, 25 bp, Canis familiaris
aacttgagtcaacagcagggtggta

SEQ ID NO: 47608 - DNA, 25 bp, Canis familiaris
aactctgggcaacacaaggggacac

SEQ ID NO: 47609 - DNA, 25 bp, Canis familiaris
aacatctggggagtacctgggtgga

SEQ ID NO: 47610 - DNA, 25 bp, Canis familiaris
aactcagcagggtttcctaggtagt

SEQ ID NO: 47611 - DNA, 25 bp, Canis familiaris
aactcgcgaaaagcctaggtataat

SEQ ID NO: 47612 - DNA, 25 bp, Canis familiaris
aactcgctgaagtccacttcggcat

SEQ ID NO: 47613 - DNA, 25 bp, Canis familiaris
aactgtttaatcgcttctgtgagag

SEQ ID NO: 47614 - DNA, 25 bp, Canis familiaris
aactgtatctaagtcctatgtgggg

SEQ ID NO: 47615 - DNA, 25 bp, Canis familiaris
aactttcatacattctctggcatcg

SEQ ID NO: 47616 - DNA, 25 bp, Canis familiaris
aacattgtcttatttgctgcctgct

SEQ ID NO: 47617 - DNA, 25 bp, Canis familiaris
aacatatgctctgtctgtgtgtcgc

SEQ ID NO: 47618 - DNA, 25 bp, Canis familiaris
aactatgtccaaaagtctggcccag

SEQ ID NO: 47619 - DNA, 25 bp, Canis familiaris
aactcagtccaaacattcttttcaa

SEQ ID NO: 47620 - DNA, 25 bp, Canis familiaris
aactttcaaaggccattttccacag

SEQ ID NO: 47621 - DNA, 25 bp, Canis familiaris
aacatttctacaacacatccattcc

SEQ ID NO: 47622 - DNA, 25 bp, Canis familiaris
aactgtattagaaaaccatcatggt

SEQ ID NO: 47623 - DNA, 25 bp, Canis familiaris
aacttcatttaaaaccagctgagca

SEQ ID NO: 47624 - DNA, 25 bp, Canis familiaris
aacattatttttgactgctgcagac

SEQ ID NO: 47625 - DNA, 25 bp, Canis familiaris
aacagtgtatcctgacattccaatc

SEQ ID NO: 47626 - DNA, 25 bp, Canis familiaris
aacatcgttcgctgataacatcatt

SEQ ID NO: 47627 - DNA, 25 bp, Canis familiaris
aaccatgattcctctaattgaccac

SEQ ID NO: 47628 - DNA, 25 bp, Canis familiaris
aacctgcttggataacttggccagc

SEQ ID NO: 47629 - DNA, 25 bp, Canis familiaris
aactctttggtagatttggccagga

SEQ ID NO: 47630 - DNA, 25 bp, Canis familiaris
aacttgttgcgaatcagtgttggca

SEQ ID NO: 47631 - DNA, 25 bp, Canis familiaris
aacattgtgaggacaactgtagcct

SEQ ID NO: 47632 - DNA, 25 bp, Canis familiaris
aacatgaggggacacctatgcctgc

SEQ ID NO: 47633 - DNA, 25 bp, Canis familiaris
aacatagggaggctcactcagttgg

SEQ ID NO: 47634 - DNA, 25 bp, Canis familiaris
aatctactgagaggggagccatttt

SEQ ID NO: 47635 - DNA, 25 bp, Canis familiaris
aatctgtcggaaggaggccaatgtc

SEQ ID NO: 47636 - DNA, 25 bp, Canis familiaris
aactctatggaagtgcaggccctcc

SEQ ID NO: 47637 - DNA, 25 bp, Canis familiaris
aacatcctggcatcttgggtctgcc

SEQ ID NO: 47638 - DNA, 25 bp, Canis familiaris
aacatcactggtgttggggctatgt

SEQ ID NO: 47639 - DNA, 25 bp, Canis familiaris
aacatccgtctttatacgtgcaagt

SEQ ID NO: 47640 - DNA, 25 bp, Canis familiaris
aacatccagtgctttgttctgggca

SEQ ID NO: 47641 - DNA, 25 bp, Canis familiaris
aacatctcctgttcatttcaagtga

SEQ ID NO: 47642 - DNA, 25 bp, Canis familiaris
aacatctactattccattctattga

SEQ ID NO: 47643 - DNA, 25 bp, Canis familiaris
aacatctatgaatccttttgtgagc

SEQ ID NO: 47644 - DNA, 25 bp, Canis familiaris
aacatcctgatgtgcttttggtatc

SEQ ID NO: 47645 - DNA, 25 bp, Canis familiaris
aacatgcctaggccatcttttcttc

SEQ ID NO: 47646 - DNA, 25 bp, Canis familiaris
aacaggctatggcatcaggttctaa

SEQ ID NO: 47647 - DNA, 25 bp, Canis familiaris
aacaggcatcaatatcagactccaa

SEQ ID NO: 47648 - DNA, 25 bp, Canis familiaris
aagcgagatacagacaacccagcca

SEQ ID NO: 47649 - DNA, 25 bp, Canis familiaris
aactagaagacctacacacacacca

SEQ ID NO: 47650 - DNA, 25 bp, Canis familiaris
aacatgaaatcatatacacacacac

SEQ ID NO: 47651 - DNA, 25 bp, Canis familiaris
aacataccacggtcaacatgcaccc

SEQ ID NO: 47652 - DNA, 25 bp, Canis familiaris
aacatcacccagaatcaggcatccc

SEQ ID NO: 47653 - DNA, 25 bp, Canis familiaris
aactgcacctacaagcaaaccagct

SEQ ID NO: 47654 - DNA, 25 bp, Canis familiaris
aacatagcttcattcactaacacag

SEQ ID NO: 47655 - DNA, 25 bp, Canis familiaris
aacattgcttgctccgaaatatggg

SEQ ID NO: 47656 - DNA, 25 bp, Canis familiaris
aacatctgcttctctaggtagttat

SEQ ID NO: 47657 - DNA, 25 bp, Canis familiaris
aacttccttcacaaagtgcatgttt

SEQ ID NO: 47658 - DNA, 25 bp, Canis familiaris
aacttcctacctcagacatactatg

SEQ ID NO: 47659 - DNA, 25 bp, Canis familiaris
aacattcctattggaagccatactt

SEQ ID NO: 47660 - DNA, 25 bp, Canis familiaris
aacattttttatgcagacagtctgt

SEQ ID NO: 47661 - DNA, 25 bp, Canis familiaris
aagctttttccatcgaagtagtttg

SEQ ID NO: 47662 - DNA, 25 bp, Canis familiaris
aactctttgaaatcccagaagcttt

SEQ ID NO: 47663 - DNA, 25 bp, Canis familiaris
aacttctcgaaactcacaaacatgt

SEQ ID NO: 47664 - DNA, 25 bp, Canis familiaris
aactttctaacacttatggcacaca

SEQ ID NO: 47665 - DNA, 25 bp, Canis familiaris
aactttcatatagcactcattacct

SEQ ID NO: 47666 - DNA, 25 bp, Canis familiaris
aacatttactcattcactcattcac

SEQ ID NO: 47667 - DNA, 25 bp, Canis familiaris
aactttagccctatgcatatgacat

SEQ ID NO: 47668 - DNA, 25 bp, Canis familiaris
aagctttacacctgtttacaatttg

SEQ ID NO: 47669 - DNA, 25 bp, Canis familiaris
aacttattcactctgtaaatacatt

SEQ ID NO: 47670 - DNA, 25 bp, Canis familiaris
aacttttgactgtctctgagtaaca

SEQ ID NO: 47671 - DNA, 25 bp, Canis familiaris
aactctatgccagtgatcctgagtt

SEQ ID NO: 47672 - DNA, 25 bp, Canis familiaris
aactcaaggcatgatctctggtgtt

SEQ ID NO: 47673 - DNA, 25 bp, Canis familiaris
aaccaaggtggcttgccgttgttgc

SEQ ID NO: 47674 - DNA, 25 bp, Canis familiaris
aactccgtgagtgtccgtgagaggc

SEQ ID NO: 47675 - DNA, 25 bp, Canis familiaris
aactctggtggaggtccgtagcggt

SEQ ID NO: 47676 - DNA, 25 bp, Canis familiaris
aacatccctcgaggaccctgagggg

SEQ ID NO: 47677 - DNA, 25 bp, Canis familiaris
aacggccatcaagaccaaaggtgtg

SEQ ID NO: 47678 - DNA, 25 bp, Canis familiaris
aacggtcacaagtatgccaaagaca

SEQ ID NO: 47679 - DNA, 25 bp, Canis familiaris
aacatgcccgcattgaagcaagaaa

SEQ ID NO: 47680 - DNA, 25 bp, Canis familiaris
aagcagcattgacctaagccaacca

SEQ ID NO: 47681 - DNA, 25 bp, Canis familiaris
aacatattgcacatcaaacaaccaa

SEQ ID NO: 47682 - DNA, 25 bp, Canis familiaris
aactcattcaatccataacatccct

SEQ ID NO: 47683 - DNA, 25 bp, Canis familiaris
aacttcacactcaacaagctcatcc

SEQ ID NO: 47684 - DNA, 25 bp, Canis familiaris
aactctactctattaacttcactat

SEQ ID NO: 47685 - DNA, 25 bp, Canis familiaris
aactctactctattaacttcactat

SEQ ID NO: 47686 - DNA, 25 bp, Canis familiaris
aactctactctattaacttcactat

SEQ ID NO: 47687 - DNA, 25 bp, Canis familiaris
aactctactctattaacttcactat

SEQ ID NO: 47688 - DNA, 25 bp, Canis familiaris
aactctactctattaacttcactat

SEQ ID NO: 47689 - DNA, 25 bp, Canis familiaris
aactctactctattaacttcactat

SEQ ID NO: 47690 - DNA, 25 bp, Canis familiaris
aacatcttcttttgtagtctcacat

SEQ ID NO: 47691 - DNA, 25 bp, Canis familiaris
aacatttctttaatattgccctcct

SEQ ID NO: 47692 - DNA, 25 bp, Canis familiaris
aactgagatttcaactttccctcct

SEQ ID NO: 47693 - DNA, 25 bp, Canis familiaris
aactggcatttatctttaactcctg

SEQ ID NO: 47694 - DNA, 25 bp, Canis familiaris
aactgtttggattctcgtatacctt

SEQ ID NO: 47695 - DNA, 25 bp, Canis familiaris
aactgttctagagttttctcaactt

SEQ ID NO: 47696 - DNA, 25 bp, Canis familiaris
aacgttgtcaagggttccgtgcatt

SEQ ID NO: 47697 - DNA, 25 bp, Canis familiaris
aactcatttgggggttcccgcatgt

SEQ ID NO: 47698 - DNA, 25 bp, Canis familiaris
aacttatgtgttcgtgttcctgggc

SEQ ID NO: 47699 - DNA, 25 bp, Canis familiaris
aacttggtcctttcatgaccttgcc

SEQ ID NO: 47700 - DNA, 25 bp, Canis familiaris
aactcatggtcctgcgtgactattc

SEQ ID NO: 47701 - DNA, 25 bp, Canis familiaris
aactcacgttcttggtatcttttgg

SEQ ID NO: 47702 - DNA, 25 bp, Canis familiaris
aactcagggcctgggggttgtgtgg

SEQ ID NO: 47703 - DNA, 25 bp, Canis familiaris
aactcagctggcttgggacagtcgg

SEQ ID NO: 47704 - DNA, 25 bp, Canis familiaris
aactcatcaggtatgcccagtcatg

SEQ ID NO: 47705 - DNA, 25 bp, Canis familiaris
aacatagatgcgtgctctccagttg

SEQ ID NO: 47706 - DNA, 25 bp, Canis familiaris
aacatggatcagttcacgcctgtga

SEQ ID NO: 47707 - DNA, 25 bp, Canis familiaris
aacatggatgcaaatcccaccttct

SEQ ID NO: 47708 - DNA, 25 bp, Canis familiaris
aactggtgatttcctcatacttctg

SEQ ID NO: 47709 - DNA, 25 bp, Canis familiaris
aacttggagttttctagattcatga

SEQ ID NO: 47710 - DNA, 25 bp, Canis familiaris
aactatgtgggttgaccgttctaat

SEQ ID NO: 47711 - DNA, 25 bp, Canis familiaris
aactttggccttcatgcttcttaat

SEQ ID NO: 47712 - DNA, 25 bp, Canis familiaris
aaccctgcccgttcagttatggatt

SEQ ID NO: 47713 - DNA, 25 bp, Canis familiaris
aactcgagagccgttcagtgtagcg

SEQ ID NO: 47714 - DNA, 25 bp, Canis familiaris
aactggtacgcctgcaggtaccggt

SEQ ID NO: 47715 - DNA, 25 bp, Canis familiaris
aactggttgacgggcgagtgctccg

SEQ ID NO: 47716 - DNA, 25 bp, Canis familiaris
aacttattgttgtgccagtgctcat

SEQ ID NO: 47717 - DNA, 25 bp, Canis familiaris
aactacatatgttgcaactaactct

SEQ ID NO: 47718 - DNA, 25 bp, Canis familiaris
aactgaaagctgaacgtgaacgtgg

SEQ ID NO: 47719 - DNA, 25 bp, Canis familiaris
aagcacaagacattcacgtaccgtc

SEQ ID NO: 47720 - DNA, 25 bp, Canis familiaris
aactctcaggcttctgcatagtcct

SEQ ID NO: 47721 - DNA, 25 bp, Canis familiaris
aacatccgcctgtatgcgggctatg

SEQ ID NO: 47722 - DNA, 25 bp, Canis familiaris
aacatcgccgtaagcagcgcactgt

SEQ ID NO: 47723 - DNA, 25 bp, Canis familiaris
aacatccggtcaagattctcagtgc

SEQ ID NO: 47724 - DNA, 25 bp, Canis familiaris
aacatcgaggacgtgatcgctcagg

SEQ ID NO: 47725 - DNA, 25 bp, Canis familiaris
aactcagcagtgacaggatcctcag

SEQ ID NO: 47726 - DNA, 25 bp, Canis familiaris
aactaccttcaactccatcatgaag

SEQ ID NO: 47727 - DNA, 25 bp, Canis familiaris
aactaccgaacctaatgatgcagat

SEQ ID NO: 47728 - DNA, 25 bp, Canis familiaris
aactagccatgatccgaggtgtcac

SEQ ID NO: 47729 - DNA, 25 bp, Canis familiaris
aactactctgtagatgacgttagca

SEQ ID NO: 47730 - DNA, 25 bp, Canis familiaris
aactaattgtcatcaacgtcacagc

SEQ ID NO: 47731 - DNA, 25 bp, Canis familiaris
aactgcaaattctcagacaccacct

SEQ ID NO: 47732 - DNA, 25 bp, Canis familiaris
aactcaataatttcaagaactccta

SEQ ID NO: 47733 - DNA, 25 bp, Canis familiaris
aactcaccacactcaagatttccaa

SEQ ID NO: 47734 - DNA, 25 bp, Canis familiaris
aactcccacagcttaacttttcagc

SEQ ID NO: 47735 - DNA, 25 bp, Canis familiaris
aactcctcccaatactatttctgat

SEQ ID NO: 47736 - DNA, 25 bp, Canis familiaris
aacatcctctcttaggattttggct

SEQ ID NO: 47737 - DNA, 25 bp, Canis familiaris
aacatcttagctgaagtgtcttggc

SEQ ID NO: 47738 - DNA, 25 bp, Canis familiaris
aacattctcagtggcattagtcatt

SEQ ID NO: 47739 - DNA, 25 bp, Canis familiaris
aacatcttgcagacagagtggccat

SEQ ID NO: 47740 - DNA, 25 bp, Canis familiaris
aacttctcaataggtagcactggtc

SEQ ID NO: 47741 - DNA, 25 bp, Canis familiaris
aactttattgccctcacactgagat

SEQ ID NO: 47742 - DNA, 25 bp, Canis familiaris
aactatcaatcttgtccacactgga

SEQ ID NO: 47743 - DNA, 25 bp, Canis familiaris
aacatatattttgccctcagagtag

SEQ ID NO: 47744 - DNA, 25 bp, Canis familiaris
aactagatctgtaatccctcaatgt

SEQ ID NO: 47745 - DNA, 25 bp, Canis familiaris
aacttactttgtgcctagagctccc

SEQ ID NO: 47746 - DNA, 25 bp, Canis familiaris
aacttaatttgtttctcagagctta

SEQ ID NO: 47747 - DNA, 25 bp, Canis familiaris
aactacagtctgattttcatgtcga

SEQ ID NO: 47748 - DNA, 25 bp, Canis familiaris
aactacgattgttttggcagctaga

SEQ ID NO: 47749 - DNA, 25 bp, Canis familiaris
aactgactttgtttaccagcttgcc

SEQ ID NO: 47750 - DNA, 25 bp, Canis familiaris
aactacgttctttatcaagtatcgc

SEQ ID NO: 47751 - DNA, 25 bp, Canis familiaris
aactcggttgacgtatcagacttcg

SEQ ID NO: 47752 - DNA, 25 bp, Canis familiaris
aagctgcggttgtggaagagctgaa

SEQ ID NO: 47753 - DNA, 25 bp, Canis familiaris
aactgcaggtttgtatagcctacca

SEQ ID NO: 47754 - DNA, 25 bp, Canis familiaris
aacttggcttctgtaatcctcaatc

SEQ ID NO: 47755 - DNA, 25 bp, Canis familiaris
aacttccttcatttaacttgctata

SEQ ID NO: 47756 - DNA, 25 bp, Canis familiaris
aactattttgcctaacactgtgcct

SEQ ID NO: 47757 - DNA, 25 bp, Canis familiaris
aactgacctttctaatacgtgcacc

SEQ ID NO: 47758 - DNA, 25 bp, Canis familiaris
aacgtccaattccgtgactatgctc

SEQ ID NO: 47759 - DNA, 25 bp, Canis familiaris
aactgacgctattccaggacgacta

SEQ ID NO: 47760 - DNA, 25 bp, Canis familiaris
aactatctttctaaggacgattctc

SEQ ID NO: 47761 - DNA, 25 bp, Canis familiaris
aacatcacccctaagagccaagttc

SEQ ID NO: 47762 - DNA, 25 bp, Canis familiaris
aacatcatgttcttttatgtaagtt

SEQ ID NO: 47763 - DNA, 25 bp, Canis familiaris
aacatcatgttctttatcaatatta

SEQ ID NO: 47764 - DNA, 25 bp, Canis familiaris
aacatcacttccaaacaatttaggg

SEQ ID NO: 47765 - DNA, 25 bp, Canis familiaris
aacatctctcaccaacaaattctat

SEQ ID NO: 47766 - DNA, 25 bp, Canis familiaris
aactcccatctgcagataatctgga

SEQ ID NO: 47767 - DNA, 25 bp, Canis familiaris
aacttcctcctggtgatgatggtga

SEQ ID NO: 47768 - DNA, 25 bp, Canis familiaris
aatctgatgcagaccctagaaggga

SEQ ID NO: 47769 - DNA, 25 bp, Canis familiaris
aacatcatgtgaacttaaaggcaga

SEQ ID NO: 47770 - DNA, 25 bp, Canis familiaris
aacatctagtacctcacagttcatg

SEQ ID NO: 47771 - DNA, 25 bp, Canis familiaris
aactgcagagtgacactcactgctt

SEQ ID NO: 47772 - DNA, 25 bp, Canis familiaris
aactcgggaccaacatgttctgaac

SEQ ID NO: 47773 - DNA, 25 bp, Canis familiaris
aactggggccagcacattctaaaag

SEQ ID NO: 47774 - DNA, 25 bp, Canis familiaris
aactgggccagactgccaaaaataa

SEQ ID NO: 47775 - DNA, 25 bp, Canis familiaris
aactgcatctcccattggtaaaaaa

SEQ ID NO: 47776 - DNA, 25 bp, Canis familiaris
aactctccccaggttaagcaaagtg

SEQ ID NO: 47777 - DNA, 25 bp, Canis familiaris
aacttctccctttttgaaacatgcg

SEQ ID NO: 47778 - DNA, 25 bp, Canis familiaris
aacattcctgttattgtgaaccaga

SEQ ID NO: 47779 - DNA, 25 bp, Canis familiaris
aacattcacattatagggatcccag

SEQ ID NO: 47780 - DNA, 25 bp, Canis familiaris
aacatcccatgacaaagaagcccgt

SEQ ID NO: 47781 - DNA, 25 bp, Canis familiaris
aacatccctgaggaactgactccac

SEQ ID NO: 47782 - DNA, 25 bp, Canis familiaris
aacatccctgtgtcagattggctcc

SEQ ID NO: 47783 - DNA, 25 bp, Canis familiaris
aacatctccaggagcttgtgcaccc

SEQ ID NO: 47784 - DNA, 25 bp, Canis familiaris
aacatcttgggaggcttggcacctt

SEQ ID NO: 47785 - DNA, 25 bp, Canis familiaris
aacttcttggctggatttgaagctt

SEQ ID NO: 47786 - DNA, 25 bp, Canis familiaris
aacttctcctggggctcggagtgtt

SEQ ID NO: 47787 - DNA, 25 bp, Canis familiaris
aacttctcctggggctcggagtgtt

SEQ ID NO: 47788 - DNA, 25 bp, Canis familiaris
aacttctcctggggctcggagtgtt

SEQ ID NO: 47789 - DNA, 25 bp, Canis familiaris
aactttccattcgccatgagggttt

SEQ ID NO: 47790 - DNA, 25 bp, Canis familiaris
aactttccatattcccagcggatgg

SEQ ID NO: 47791 - DNA, 25 bp, Canis familiaris
aacttccacttccacgacgtggagg

SEQ ID NO: 47792 - DNA, 25 bp, Canis familiaris
aacctgccacttgcgggagggaaat

SEQ ID NO: 47793 - DNA, 25 bp, Canis familiaris
aacttggacttggcatagggctgga

SEQ ID NO: 47794 - DNA, 25 bp, Canis familiaris
aacggtggtctggaaggacaagaca

SEQ ID NO: 47795 - DNA, 25 bp, Canis familiaris
aacggcccctgggaagtacatcacg

SEQ ID NO: 47796 - DNA, 25 bp, Canis familiaris
aacggctacggggaggaagcacctg

SEQ ID NO: 47797 - DNA, 25 bp, Canis familiaris
aactggtgacagggccagcttggcc

SEQ ID NO: 47798 - DNA, 25 bp, Canis familiaris
aactgggagatgggcacctttgcct

SEQ ID NO: 47799 - DNA, 25 bp, Canis familiaris
aacggagtgagaggggctgcttggt

SEQ ID NO: 47800 - DNA, 25 bp, Canis familiaris
aatctaggtaaccgatgccttaatg

SEQ ID NO: 47801 - DNA, 25 bp, Canis familiaris
aacgagcggttccgatgccctgagg

SEQ ID NO: 47802 - DNA, 25 bp, Canis familiaris
caatcggccgtagagtccttggcag

SEQ ID NO: 47803 - DNA, 25 bp, Canis familiaris
aacttccagaagtatatccttgcca

SEQ ID NO: 47804 - DNA, 25 bp, Canis familiaris
aacattccactgttatacctctgct

SEQ ID NO: 47805 - DNA, 25 bp, Canis familiaris
aacatttactgagtatctacttggt

SEQ ID NO: 47806 - DNA, 25 bp, Canis familiaris
aacttctattacgagtgacattggt

SEQ ID NO: 47807 - DNA, 25 bp, Canis familiaris
aactgttattacactgatattcgtt

SEQ ID NO: 47808 - DNA, 25 bp, Canis familiaris
aacttttctgttctcatgtgtcgtt

SEQ ID NO: 47809 - DNA, 25 bp, Canis familiaris
aacattttatttatcatctgtctgt

SEQ ID NO: 47810 - DNA, 25 bp, Canis familiaris
aacttcttgttaagactgttatgtt

SEQ ID NO: 47811 - DNA, 25 bp, Canis familiaris
aacattctttatctggtattattta

SEQ ID NO: 47812 - DNA, 25 bp, Canis familiaris
aagccaatttttgcgtattgttaca

SEQ ID NO: 47813 - DNA, 25 bp, Canis familiaris
aacttgtttgttgtcttcgttcact

SEQ ID NO: 47814 - DNA, 25 bp, Canis familiaris
aactatgagttgttactttgttact

SEQ ID NO: 47815 - DNA, 25 bp, Canis familiaris
aacataatggaacttcttctttagt

SEQ ID NO: 47816 - DNA, 25 bp, Canis familiaris
aactaatggaagttcttcacaatca

SEQ ID NO: 47817 - DNA, 25 bp, Canis familiaris
aactcaatgggatttggtgcagaaa

SEQ ID NO: 47818 - DNA, 25 bp, Canis familiaris
aactcaacaggattttatgtggacc

SEQ ID NO: 47819 - DNA, 25 bp, Canis familiaris
aacttccagcaactttctgtggaac

SEQ ID NO: 47820 - DNA, 25 bp, Canis familiaris
aacttcaagctttttctgtggctat

SEQ ID NO: 47821 - DNA, 25 bp, Canis familiaris
aacattcaactcttggttgtggctc

SEQ ID NO: 47822 - DNA, 25 bp, Canis familiaris
aacttaatcatatggactttgctgc

SEQ ID NO: 47823 - DNA, 25 bp, Canis familiaris
aacttaatatatttgcttttgtctc

SEQ ID NO: 47824 - DNA, 25 bp, Canis familiaris
aacttgacctcatctttatctaatc

SEQ ID NO: 47825 - DNA, 25 bp, Canis familiaris
aacttgtctcagaactatttgtagt

SEQ ID NO: 47826 - DNA, 25 bp, Canis familiaris
aactttcacagaatcaaaatgtgaa

SEQ ID NO: 47827 - DNA, 25 bp, Canis familiaris
aactcttgctgacaacaagtgtgat

SEQ ID NO: 47828 - DNA, 25 bp, Canis familiaris
aactatgatgccctcaaaaggttga

SEQ ID NO: 47829 - DNA, 25 bp, Canis familiaris
aactatgatgtcctcaaagggtgag

SEQ ID NO: 47830 - DNA, 25 bp, Canis familiaris
aactttgtgcccgcagtggatgagc

SEQ ID NO: 47831 - DNA, 25 bp, Canis familiaris
aagttttcgccagagctcaaacctc

SEQ ID NO: 47832 - DNA, 25 bp, Canis familiaris
aagctttaaccagagctcctatctc

SEQ ID NO: 47833 - DNA, 25 bp, Canis familiaris
aacttaacacaacagtcttacacgc

SEQ ID NO: 47834 - DNA, 25 bp, Canis familiaris
aacttaacacaacagtcttacacgc

SEQ ID NO: 47835 - DNA, 25 bp, Canis familiaris
aacttaacaccacagtcttacacgc

SEQ ID NO: 47836 - DNA, 25 bp, Canis familiaris
aacttggaaccatgtgtcttagcca

SEQ ID NO: 47837 - DNA, 25 bp, Canis familiaris
aacgggcaaacttgtgtcactgagt

SEQ ID NO: 47838 - DNA, 25 bp, Canis familiaris
aactggatggaactatgcccggaat

SEQ ID NO: 47839 - DNA, 25 bp, Canis familiaris
aactggattgaagtgtcgttaatat

SEQ ID NO: 47840 - DNA, 25 bp, Canis familiaris
aactatgtaatatgtccttctttac

SEQ ID NO: 47841 - DNA, 25 bp, Canis familiaris
aacatactactcttgatctttttta

SEQ ID NO: 47842 - DNA, 25 bp, Canis familiaris
aactagccagtctgttagcttttca

SEQ ID NO: 47843 - DNA, 25 bp, Canis familiaris
aactcacctatatgttagattctgt

SEQ ID NO: 47844 - DNA, 25 bp, Canis familiaris
aactcatccgtttttaacatctgta

SEQ ID NO: 47845 - DNA, 25 bp, Canis familiaris
aacttgctctgatacttcacagctt

SEQ ID NO: 47846 - DNA, 25 bp, Canis familiaris
aactagtgcgaatcaccagagtgtg

SEQ ID NO: 47847 - DNA, 25 bp, Canis familiaris
aactgagctggggtcccaacagtcc

SEQ ID NO: 47848 - DNA, 25 bp, Canis familiaris
aactatggaagcagcccaactgtcc

SEQ ID NO: 47849 - DNA, 25 bp, Canis familiaris
aactatggaagaccagcgcgacctc

SEQ ID NO: 47850 - DNA, 25 bp, Canis familiaris
aactgggagtagcctggaacctcac

SEQ ID NO: 47851 - DNA, 25 bp, Canis familiaris
aactggagaggacattaaagcttca

SEQ ID NO: 47852 - DNA, 25 bp, Canis familiaris
aacttgaagccaccataaatgaatt

SEQ ID NO: 47853 - DNA, 25 bp, Canis familiaris
aactgtaagcctagtctcgagtttt

SEQ ID NO: 47854 - DNA, 25 bp, Canis familiaris
aacttaactgcaatggtgggatctt

SEQ ID NO: 47855 - DNA, 25 bp, Canis familiaris
aacttaactgcaatgctggatcgtt

SEQ ID NO: 47856 - DNA, 25 bp, Canis familiaris
aacattttcatgtatctgagatttt

SEQ ID NO: 47857 - DNA, 25 bp, Canis familiaris
aacatttattgtactgatttatttt

SEQ ID NO: 47858 - DNA, 25 bp, Canis familiaris
aacttctgaaatactattcattgtt

SEQ ID NO: 47859 - DNA, 25 bp, Canis familiaris
aactctgcaaagacgttcgcatcgc

SEQ ID NO: 47860 - DNA, 25 bp, Canis familiaris
aacttgacttgtgcttcatatccat

SEQ ID NO: 47861 - DNA, 25 bp, Canis familiaris
aactgttcacttggctttaatctaa

SEQ ID NO: 47862 - DNA, 25 bp, Canis familiaris
aacttggcactgatgattttacttt

SEQ ID NO: 47863 - DNA, 25 bp, Canis familiaris
aacatatggcactgaattcttaacc

SEQ ID NO: 47864 - DNA, 25 bp, Canis familiaris
aactcagcaccatgaagcttttccc

SEQ ID NO: 47865 - DNA, 25 bp, Canis familiaris
aacataccaactgctgtttgtccct

SEQ ID NO: 47866 - DNA, 25 bp, Canis familiaris
aactcccatccagctttaatagcct

SEQ ID NO: 47867 - DNA, 25 bp, Canis familiaris
aacttgcccactggtttaacatcct

SEQ ID NO: 47868 - DNA, 25 bp, Canis familiaris
aacttgtccctgatttacacttttg

SEQ ID NO: 47869 - DNA, 25 bp, Canis familiaris
aactattccgtgcagtgtgaccttt

SEQ ID NO: 47870 - DNA, 25 bp, Canis familiaris
aactatcttctgaggttcatccttt

SEQ ID NO: 47871 - DNA, 25 bp, Canis familiaris
aacttctttgatatctttgccttga

SEQ ID NO: 47872 - DNA, 25 bp, Canis familiaris
aacatatctttgtcttctcgaggat

SEQ ID NO: 47873 - DNA, 25 bp, Canis familiaris
aacattattatgctctctggggtcc

SEQ ID NO: 47874 - DNA, 25 bp, Canis familiaris
aacatttttgcaccactaaagccct

SEQ ID NO: 47875 - DNA, 25 bp, Canis familiaris
aactttgatttgccctgaggagccc

SEQ ID NO: 47876 - DNA, 25 bp, Canis familiaris
aacttcagtgtttcctgcaaagccc

SEQ ID NO: 47877 - DNA, 25 bp, Canis familiaris
aacattacattttctctcaaaggca

SEQ ID NO: 47878 - DNA, 25 bp, Canis familiaris
aacgtcaccttgttctagtaggccg

SEQ ID NO: 47879 - DNA, 25 bp, Canis familiaris
aacggcagccatcagtctgggaggt

SEQ ID NO: 47880 - DNA, 25 bp, Canis familiaris
aactcgctcaagctgtcatgtacgg

SEQ ID NO: 47881 - DNA, 25 bp, Canis familiaris
aactcgctcaagctgtcatgtacgg

SEQ ID NO: 47882 - DNA, 25 bp, Canis familiaris
aactcacatgccaggacgatgacaa

SEQ ID NO: 47883 - DNA, 25 bp, Canis familiaris
aactgcaattcttgcgtgctcaggc

SEQ ID NO: 47884 - DNA, 25 bp, Canis familiaris
aactggcataccgatgatgtgcacc

SEQ ID NO: 47885 - DNA, 25 bp, Canis familiaris
aactgagatgaggccatgtgcacct

SEQ ID NO: 47886 - DNA, 25 bp, Canis familiaris
aactggtgcgagctggcactcacat

SEQ ID NO: 47887 - DNA, 25 bp, Canis familiaris
aactggctgtcctggaatacttacc

SEQ ID NO: 47888 - DNA, 25 bp, Canis familiaris
aactgaggctcagagaggtgaagta

SEQ ID NO: 47889 - DNA, 25 bp, Canis familiaris
aactcgactgcataatttgtggtag

SEQ ID NO: 47890 - DNA, 25 bp, Canis familiaris
aactcgatgccctgatgtttagaat

SEQ ID NO: 47891 - DNA, 25 bp, Canis familiaris
aactcagtcccaacttagccaaatt

SEQ ID NO: 47892 - DNA, 25 bp, Canis familiaris
aactattccacaagtctgagctcca

SEQ ID NO: 47893 - DNA, 25 bp, Canis familiaris
aactgattgccagtaatctgcctcc

SEQ ID NO: 47894 - DNA, 25 bp, Canis familiaris
aactgtcccactaactgaaccaaat

SEQ ID NO: 47895 - DNA, 25 bp, Canis familiaris
aactataccatgtaaataagccaaa

SEQ ID NO: 47896 - DNA, 25 bp, Canis familiaris
aacttattctgatatagctgggcaa

SEQ ID NO: 47897 - DNA, 25 bp, Canis familiaris
aacttttgtgaattaggctgtaact

SEQ ID NO: 47898 - DNA, 25 bp, Canis familiaris
aactctttgtaattctgttaaatct

SEQ ID NO: 47899 - DNA, 25 bp, Canis familiaris
aacttgcatgttttttgtttaatgt

SEQ ID NO: 47900 - DNA, 25 bp, Canis familiaris
aacttgtgtgtttgtctttgtgtat

SEQ ID NO: 47901 - DNA, 25 bp, Canis familiaris
aacttatgggaggcgctgtctttga

SEQ ID NO: 47902 - DNA, 25 bp, Canis familiaris
aactatggcgggagcttgcaggaga

SEQ ID NO: 47903 - DNA, 25 bp, Canis familiaris
aacttggaggtgccgctggaggaga

SEQ ID NO: 47904 - DNA, 25 bp, Canis familiaris
aactgtgcggagaccctgggagaag

SEQ ID NO: 47905 - DNA, 25 bp, Canis familiaris
aattcagaaagcacctgggaagctc

SEQ ID NO: 47906 - DNA, 25 bp, Canis familiaris
aattaaaagtctctgtggtcaccaa

SEQ ID NO: 47907 - DNA, 25 bp, Canis familiaris
aactaaatagtctctgctgctacac

SEQ ID NO: 47908 - DNA, 25 bp, Canis familiaris
aacttaaagtgctttgtgcctctcc

SEQ ID NO: 47909 - DNA, 25 bp, Canis familiaris
aacattcataaggcctctgaagcat

SEQ ID NO: 47910 - DNA, 25 bp, Canis familiaris
aactacataaacattaacatcttaa

SEQ ID NO: 47911 - DNA, 25 bp, Canis familiaris
aacttactaccaatctaacacttga

SEQ ID NO: 47912 - DNA, 25 bp, Canis familiaris
aactggccaaggactccaacactat

SEQ ID NO: 47913 - DNA, 25 bp, Canis familiaris
aactgcccaaggaacaattcacaag

SEQ ID NO: 47914 - DNA, 25 bp, Canis familiaris
aacttccagcaaccaaatccaactg

SEQ ID NO: 47915 - DNA, 25 bp, Canis familiaris
aactaatccaactataattccacat

SEQ ID NO: 47916 - DNA, 25 bp, Canis familiaris
aacttgtgaaactagaaatcaacta

SEQ ID NO: 47917 - DNA, 25 bp, Canis familiaris
aaccctgaagcgcaacgtcaacaag

SEQ ID NO: 47918 - DNA, 25 bp, Canis familiaris
aactctgtccagggaacccagacga

SEQ ID NO: 47919 - DNA, 25 bp, Canis familiaris
aacttgtgtgaggtgttcccagagg

SEQ ID NO: 47920 - DNA, 25 bp, Canis familiaris
aacttggtgctggatgttctgtctg

SEQ ID NO: 47921 - DNA, 25 bp, Canis familiaris
aacttggtcttactatttctgtggt

SEQ ID NO: 47922 - DNA, 25 bp, Canis familiaris
aacctggtttaatctgtatttgact

SEQ ID NO: 47923 - DNA, 25 bp, Canis familiaris
aacttggttgtttcctgtataggca

SEQ ID NO: 47924 - DNA, 25 bp, Canis familiaris
aacttagtcttttccatgctatttc

SEQ ID NO: 47925 - DNA, 25 bp, Canis familiaris
aactttggtatttggcctcatggcc

SEQ ID NO: 47926 - DNA, 25 bp, Canis familiaris
aacttgtcagtttggggctcaatca

SEQ ID NO: 47927 - DNA, 25 bp, Canis familiaris
aactactagttataggttgtcacca

SEQ ID NO: 47928 - DNA, 25 bp, Canis familiaris
aatctcctagtagacgacgttcacc

SEQ ID NO: 47929 - DNA, 25 bp, Canis familiaris
aactcactttgagaccacctgtgac

SEQ ID NO: 47930 - DNA, 25 bp, Canis familiaris
aacattgccttagaaagtctgtgtg

SEQ ID NO: 47931 - DNA, 25 bp, Canis familiaris
aacttcactatagaaaccctgctta

SEQ ID NO: 47932 - DNA, 25 bp, Canis familiaris
aactatcatcaaacaaaacccctct

SEQ ID NO: 47933 - DNA, 25 bp, Canis familiaris
aactgtcagccaagtaagagccccc

SEQ ID NO: 47934 - DNA, 25 bp, Canis familiaris
aactgccagtaccatatggagcccg

SEQ ID NO: 47935 - DNA, 25 bp, Canis familiaris
aactggatcgacaacaggagccgcg

SEQ ID NO: 47936 - DNA, 25 bp, Canis familiaris
aactgctgaccacgccgaatccgga

SEQ ID NO: 47937 - DNA, 25 bp, Canis familiaris
aactctgacccccggagcagagaac

SEQ ID NO: 47938 - DNA, 25 bp, Canis familiaris
aactctactccattgggcgtgtgat

SEQ ID NO: 47939 - DNA, 25 bp, Canis familiaris
aacttcctgagctggtgtgtgtgtg

SEQ ID NO: 47940 - DNA, 25 bp, Canis familiaris
aacgatgccgactggcgatgcggcg

SEQ ID NO: 47941 - DNA, 25 bp, Canis familiaris
aactgcatgcaagctcagggtgctc

SEQ ID NO: 47942 - DNA, 25 bp, Canis familiaris
aactctgcaactcagcatgcactgc

SEQ ID NO: 47943 - DNA, 25 bp, Canis familiaris
aactctgccctttgcatgaggaaat

SEQ ID NO: 47944 - DNA, 25 bp, Canis familiaris
aactatgctgccaacgtgagcgtga

SEQ ID NO: 47945 - DNA, 25 bp, Canis familiaris
aacttgtcatgcacagtcaggcgct

SEQ ID NO: 47946 - DNA, 25 bp, Canis familiaris
aacttgtcatgcacagtcaggcgct

SEQ ID NO: 47947 - DNA, 25 bp, Canis familiaris
aactctgtatgaacttacgcctctc

SEQ ID NO: 47948 - DNA, 25 bp, Canis familiaris
aaccgtagacgatttcagttctagg

SEQ ID NO: 47949 - DNA, 25 bp, Canis familiaris
aactcagtccatagtttcgtctata

SEQ ID NO: 47950 - DNA, 25 bp, Canis familiaris
aactcagctccttgtatagtctctt

SEQ ID NO: 47951 - DNA, 25 bp, Canis familiaris
aacttctgcacttgacataaccatt

SEQ ID NO: 47952 - DNA, 25 bp, Canis familiaris
aactacatggtgtacatgttccagt

SEQ ID NO: 47953 - DNA, 25 bp, Canis familiaris
aactatatagactctctctccagtg

SEQ ID NO: 47954 - DNA, 25 bp, Canis familiaris
cagagaacacgagaccaatggtgtg

SEQ ID NO: 47955 - DNA, 25 bp, Canis familiaris
aactaagtacaactctctgcaccag

SEQ ID NO: 47956 - DNA, 25 bp, Canis familiaris
aacttctgtaattggactgactcat

SEQ ID NO: 47957 - DNA, 25 bp, Canis familiaris
aacttaggcataacgagctactcat

SEQ ID NO: 47958 - DNA, 25 bp, Canis familiaris
aacttggtgcaaattcagatctctt

SEQ ID NO: 47959 - DNA, 25 bp, Canis familiaris
aactagactcgctaagcagattctt

SEQ ID NO: 47960 - DNA, 25 bp, Canis familiaris
aactgcagaccctgagagtcctttc

SEQ ID NO: 47961 - DNA, 25 bp, Canis familiaris
aactgaatgtccaaagtaccttctg

SEQ ID NO: 47962 - DNA, 25 bp, Canis familiaris
aaccaatgcatcgttaaaccttcag

SEQ ID NO: 47963 - DNA, 25 bp, Canis familiaris
aactcagtgcacgttcaagaacaca

SEQ ID NO: 47964 - DNA, 25 bp, Canis familiaris
aactgggatgccttcagcgatacca

SEQ ID NO: 47965 - DNA, 25 bp, Canis familiaris
aactgctggactatcatggtacatc

SEQ ID NO: 47966 - DNA, 25 bp, Canis familiaris
aactcccctattaggtcagcatcct

SEQ ID NO: 47967 - DNA, 25 bp, Canis familiaris
aactcatcggtagtagagcccctct

SEQ ID NO: 47968 - DNA, 25 bp, Canis familiaris
aactatttgtaatgaaatcctcaat

SEQ ID NO: 47969 - DNA, 25 bp, Canis familiaris
aactatgttccccaaaagcgtgcaa

SEQ ID NO: 47970 - DNA, 25 bp, Canis familiaris
aagtttcttcggtatgaaggtgaca

SEQ ID NO: 47971 - DNA, 25 bp, Canis familiaris
aacttgtcttagcacgagataatac

SEQ ID NO: 47972 - DNA, 25 bp, Canis familiaris
aactttctcatacactgactgttac

SEQ ID NO: 47973 - DNA, 25 bp, Canis familiaris
aacttatcctagtacctcagtattc

SEQ ID NO: 47974 - DNA, 25 bp, Canis familiaris
aactattgcatttatacctcatgta

SEQ ID NO: 47975 - DNA, 25 bp, Canis familiaris
aactactgctattttccatcacata

SEQ ID NO: 47976 - DNA, 25 bp, Canis familiaris
aactatcctagaatgtcttcaccaa

SEQ ID NO: 47977 - DNA, 25 bp, Canis familiaris
ctcactacttggtatttacccaaag

SEQ ID NO: 47978 - DNA, 25 bp, Canis familiaris
aactatcttgtttattttccaacag

SEQ ID NO: 47979 - DNA, 25 bp, Canis familiaris
aactatgaggttttattttcagaat

SEQ ID NO: 47980 - DNA, 25 bp, Canis familiaris
aactgtgggtttctctgttagaagg

SEQ ID NO: 47981 - DNA, 25 bp, Canis familiaris
aactgttggttaccttattatcgtg

SEQ ID NO: 47982 - DNA, 25 bp, Canis familiaris
aactttgacatttacattttccctg

SEQ ID NO: 47983 - DNA, 25 bp, Canis familiaris
aactttacatcttaattttctgtca

SEQ ID NO: 47984 - DNA, 25 bp, Canis familiaris
aactattaattatctctactgccta

SEQ ID NO: 47985 - DNA, 25 bp, Canis familiaris
aactatataactttgtaactggcca

SEQ ID NO: 47986 - DNA, 25 bp, Canis familiaris
aacttagtgtttctgaactgttcat

SEQ ID NO: 47987 - DNA, 25 bp, Canis familiaris
aacttcggtttgtatagcactttct

SEQ ID NO: 47988 - DNA, 25 bp, Canis familiaris
aactacggggtggaagagctctaca

SEQ ID NO: 47989 - DNA, 25 bp, Canis familiaris
aactacggggtgattgagagcttca

SEQ ID NO: 47990 - DNA, 25 bp, Canis familiaris
aactacggggtgattgagagcttca

SEQ ID NO: 47991 - DNA, 25 bp, Canis familiaris
aactgatgtgggtgcctataggctt

SEQ ID NO: 47992 - DNA, 25 bp, Canis familiaris
aactattgtgtgtgtttatgtctca

SEQ ID NO: 47993 - DNA, 25 bp, Canis familiaris
aacttcggatgctaggctcttgtta

SEQ ID NO: 47994 - DNA, 25 bp, Canis familiaris
aactgtcggtaattgccttatttga

SEQ ID NO: 47995 - DNA, 25 bp, Canis familiaris
aacggggctatatttctgtagttct

SEQ ID NO: 47996 - DNA, 25 bp, Canis familiaris
aactcaggagctttttcttcacttt

SEQ ID NO: 47997 - DNA, 25 bp, Canis familiaris
aactcttgtctaatttcttactcta

SEQ ID NO: 47998 - DNA, 25 bp, Canis familiaris
aactttgtcatgattataccctata

SEQ ID NO: 47999 - DNA, 25 bp, Canis familiaris
aactattgtcataaaatctcctttt

SEQ ID NO: 48000 - DNA, 25 bp, Canis familiaris
aactttcttacgtattgccatttat

SEQ ID NO: 48001 - DNA, 25 bp, Canis familiaris
aactgtcctatatgaatttatttat

SEQ ID NO: 48002 - DNA, 25 bp, Canis familiaris
aactgtgttgactgaacttggttta

SEQ ID NO: 48003 - DNA, 25 bp, Canis familiaris
aactttatctgcttgggcttggttt

SEQ ID NO: 48004 - DNA, 25 bp, Canis familiaris
aactgtttctgaaagtgttggcttt

SEQ ID NO: 48005 - DNA, 25 bp, Canis familiaris
aacggttctcagaactgtttgtgtc

SEQ ID NO: 48006 - DNA, 25 bp, Canis familiaris
aactggtgtccatcactatagtggc

SEQ ID NO: 48007 - DNA, 25 bp, Canis familiaris
aacggttgcagtgtctctgagtgac

SEQ ID NO: 48008 - DNA, 25 bp, Canis familiaris
aacggctccggcatgtgcaaggccg

SEQ ID NO: 48009 - DNA, 25 bp, Canis familiaris
aacggctccggtatgtgcaaggcgg

SEQ ID NO: 48010 - DNA, 25 bp, Canis familiaris
caaggactcactgtctttgggggtg

SEQ ID NO: 48011 - DNA, 25 bp, Canis familiaris
caaggaccgtccttttgttggtcat

SEQ ID NO: 48012 - DNA, 25 bp, Canis familiaris
aacgaccccactatggttgaactcg

SEQ ID NO: 48013 - DNA, 25 bp, Canis familiaris
aacgaacgagactctggcatgctaa

SEQ ID NO: 48014 - DNA, 25 bp, Canis familiaris
aacgtatgctgagcacactgtccca

SEQ ID NO: 48015 - DNA, 25 bp, Canis familiaris
aactgccactagtccatagtcatcc

SEQ ID NO: 48016 - DNA, 25 bp, Canis familiaris
aactgccaattccactagtaggcac

SEQ ID NO: 48017 - DNA, 25 bp, Canis familiaris
aactacgagtagactactgagccca

SEQ ID NO: 48018 - DNA, 25 bp, Canis familiaris
aactacgatgactactgaccaacca

SEQ ID NO: 48019 - DNA, 25 bp, Canis familiaris
aactacgatgactactgaccaacca

SEQ ID NO: 48020 - DNA, 25 bp, Canis familiaris
aactacgatgactactgaccaacca

SEQ ID NO: 48021 - DNA, 25 bp, Canis familiaris
aactacgatgactactgaccaacca

SEQ ID NO: 48022 - DNA, 25 bp, Canis familiaris
aactacgatgactactgaccaacca

SEQ ID NO: 48023 - DNA, 25 bp, Canis familiaris
aactacgatgactactgaccaacca

SEQ ID NO: 48024 - DNA, 25 bp, Canis familiaris
aactcagctgtgctccagactagag

SEQ ID NO: 48025 - DNA, 25 bp, Canis familiaris
aacgctcatcagcattctgactgaa

SEQ ID NO: 48026 - DNA, 25 bp, Canis familiaris
aactcttcattgagctatctccaaa

SEQ ID NO: 48027 - DNA, 25 bp, Canis familiaris
aacttttgtctgcctcattctaaaa

SEQ ID NO: 48028 - DNA, 25 bp, Canis familiaris
aacttttctcatccttattcagacc

SEQ ID NO: 48029 - DNA, 25 bp, Canis familiaris
aacttcattcttcttatcatcaact

SEQ ID NO: 48030 - DNA, 25 bp, Canis familiaris
aactttacttgcctaacatgcaatt

SEQ ID NO: 48031 - DNA, 25 bp, Canis familiaris
aactcaatccttcatcaaatcatct

SEQ ID NO: 48032 - DNA, 25 bp, Canis familiaris
aactcttccctggaataatcttgac

SEQ ID NO: 48033 - DNA, 25 bp, Canis familiaris
aactatttctctgatttctttgcaa

SEQ ID NO: 48034 - DNA, 25 bp, Canis familiaris
aactatagttctgcttgtgctttca

SEQ ID NO: 48035 - DNA, 25 bp, Canis familiaris
aactctgactacgcctatggcttca

SEQ ID NO: 48036 - DNA, 25 bp, Canis familiaris
aactcaggatccgctctatggttac

SEQ ID NO: 48037 - DNA, 25 bp, Canis familiaris
aactaggagtcacctttggccaact

SEQ ID NO: 48038 - DNA, 25 bp, Canis familiaris
aactcaggagtacctttgccttcag

SEQ ID NO: 48039 - DNA, 25 bp, Canis familiaris
aactaagaatgatcatcttccccag

SEQ ID NO: 48040 - DNA, 25 bp, Canis familiaris
aactagaacatttctcttgctcctt

SEQ ID NO: 48041 - DNA, 25 bp, Canis familiaris
aactaaagcatgtattttattcatt

SEQ ID NO: 48042 - DNA, 25 bp, Canis familiaris
aactaacaggtgtatatattactta

SEQ ID NO: 48043 - DNA, 25 bp, Canis familiaris
aacttatcccattgtattttcttat

SEQ ID NO: 48044 - DNA, 25 bp, Canis familiaris
aactgtaccaatatttgttcctgtc

SEQ ID NO: 48045 - DNA, 25 bp, Canis familiaris
aactgcattccacatattatttttg

SEQ ID NO: 48046 - DNA, 25 bp, Canis familiaris
aacgcttgccacgcgtaatgtcttg

SEQ ID NO: 48047 - DNA, 25 bp, Canis familiaris
aactcttgccacgatgtggggagtt

SEQ ID NO: 48048 - DNA, 25 bp, Canis familiaris
aactctctgcaccagctgttaggag

SEQ ID NO: 48049 - DNA, 25 bp, Canis familiaris
aactgtctcgtcgtgtctgagtagt

SEQ ID NO: 48050 - DNA, 25 bp, Canis familiaris
aactgcctgctgagatgaattgaag

SEQ ID NO: 48051 - DNA, 25 bp, Canis familiaris
aactggctgcagatgaagaagaaaa

SEQ ID NO: 48052 - DNA, 25 bp, Canis familiaris
aactgagatcaattaagcatacaaa

SEQ ID NO: 48053 - DNA, 25 bp, Canis familiaris
aactgactagcatcacagctttgaa

SEQ ID NO: 48054 - DNA, 25 bp, Canis familiaris
aactatctctatgcacagtgttgaa

SEQ ID NO: 48055 - DNA, 25 bp, Canis familiaris
aactgctgccttcgaagtgtgcgaa

SEQ ID NO: 48056 - DNA, 25 bp, Canis familiaris
aactgtgctgttcaaatggtaatca

SEQ ID NO: 48057 - DNA, 25 bp, Canis familiaris
aactgtctgggagagatggtctaat

SEQ ID NO: 48058 - DNA, 25 bp, Canis familiaris
aatcgtgcgaggtggtgttcaagtt

SEQ ID NO: 48059 - DNA, 25 bp, Canis familiaris
aacggccaggcacatagttagggtt

SEQ ID NO: 48060 - DNA, 25 bp, Canis familiaris
aactgtacaggacactttcaggaat

SEQ ID NO: 48061 - DNA, 25 bp, Canis familiaris
aacctacagggctcatggccggatt

SEQ ID NO: 48062 - DNA, 25 bp, Canis familiaris
aacctacagggctcatggccggatt

SEQ ID NO: 48063 - DNA, 25 bp, Canis familiaris
aacctacagggctcatggccggatt

SEQ ID NO: 48064 - DNA, 25 bp, Canis familiaris
aacctacagggctcatggccggatt

SEQ ID NO: 48065 - DNA, 25 bp, Canis familiaris
aacctacagggctcatggccggatt

SEQ ID NO: 48066 - DNA, 25 bp, Canis familiaris
aacctacagggctcatggccggatt

SEQ ID NO: 48067 - DNA, 25 bp, Canis familiaris
aacccacaggccacaggccaaaggc

SEQ ID NO: 48068 - DNA, 25 bp, Canis familiaris
gaaccccgggggtgactatgggcat

SEQ ID NO: 48069 - DNA, 25 bp, Canis familiaris
aacctcctttggcttatctgtggaa

SEQ ID NO: 48070 - DNA, 25 bp, Canis familiaris
aactttgtagctagcttttcttcca

SEQ ID NO: 48071 - DNA, 25 bp, Canis familiaris
aactactgatacttgcttttcttta

SEQ ID NO: 48072 - DNA, 25 bp, Canis familiaris
aactactgcttcttttatattatga

SEQ ID NO: 48073 - DNA, 25 bp, Canis familiaris
aactttttcagtttatatgtatatt

SEQ ID NO: 48074 - DNA, 25 bp, Canis familiaris
aactttatttggtaatgcttctttg

SEQ ID NO: 48075 - DNA, 25 bp, Canis familiaris
aactttgtttctttgtcatttctag

SEQ ID NO: 48076 - DNA, 25 bp, Canis familiaris
aactttgatttgtgtggcatttatt

SEQ ID NO: 48077 - DNA, 25 bp, Canis familiaris
aactttctttgtactgtgatttcct

SEQ ID NO: 48078 - DNA, 25 bp, Canis familiaris
aactcgttttgtaggagaatatggt

SEQ ID NO: 48079 - DNA, 25 bp, Canis familiaris
aatccgtttattctacaacttgttg

SEQ ID NO: 48080 - DNA, 25 bp, Canis familiaris
aactgcttttttccaacaagtatct

SEQ ID NO: 48081 - DNA, 25 bp, Canis familiaris
aactgatttatctcagcaaaaatat

SEQ ID NO: 48082 - DNA, 25 bp, Canis familiaris
aacgctccttatccgaacatgaaga

SEQ ID NO: 48083 - DNA, 25 bp, Canis familiaris
aaccggccagatacatgaactacca

SEQ ID NO: 48084 - DNA, 25 bp, Canis familiaris
aactctgtccaaataaactccccat

SEQ ID NO: 48085 - DNA, 25 bp, Canis familiaris
aactcagtccaagtctaagggcctg

SEQ ID NO: 48086 - DNA, 25 bp, Canis familiaris
aactcccaaatcgtcatcagggcca

SEQ ID NO: 48087 - DNA, 25 bp, Canis familiaris
aacgaacaactctgaagggccattt

SEQ ID NO: 48088 - DNA, 25 bp, Canis familiaris
aacggtgtgcctctacaaggcctac

SEQ ID NO: 48089 - DNA, 25 bp, Canis familiaris
aactggtgatttttaaaggcctgag

SEQ ID NO: 48090 - DNA, 25 bp, Canis familiaris
aactcatggtttttagatgggcctt

SEQ ID NO: 48091 - DNA, 25 bp, Canis familiaris
aactcatcgattgatttacggcgct

SEQ ID NO: 48092 - DNA, 25 bp, Canis familiaris
aactcagcggtggatttcatcgact

SEQ ID NO: 48093 - DNA, 25 bp, Canis familiaris
aactacaggttggcttcatcgactt

SEQ ID NO: 48094 - DNA, 25 bp, Canis familiaris
aactgacgtggaccctcacgattgt

SEQ ID NO: 48095 - DNA, 25 bp, Canis familiaris
aactgcatcgggccctcaagatgat

SEQ ID NO: 48096 - DNA, 25 bp, Canis familiaris
aactgccatgggacctaatctacct

SEQ ID NO: 48097 - DNA, 25 bp, Canis familiaris
aactgtcagtcgaacaagtcatgaa

SEQ ID NO: 48098 - DNA, 25 bp, Canis familiaris
aacgactgcatcgaagatactcgca

SEQ ID NO: 48099 - DNA, 25 bp, Canis familiaris
aactaatcccaaagatctctgcaga

SEQ ID NO: 48100 - DNA, 25 bp, Canis familiaris
aactttcccaaattgcttagatgtg

SEQ ID NO: 48101 - DNA, 25 bp, Canis familiaris
aagcttctaccgtgggtaatgtgga

SEQ ID NO: 48102 - DNA, 25 bp, Canis familiaris
aactgttcccacttgggagatgggg

SEQ ID NO: 48103 - DNA, 25 bp, Canis familiaris
aactgtgaaccacttgtctgtgctg

SEQ ID NO: 48104 - DNA, 25 bp, Canis familiaris
aagctggaacactattgggcctggc

SEQ ID NO: 48105 - DNA, 25 bp, Canis familiaris
aacggcgacctgatgcgccagtatc

SEQ ID NO: 48106 - DNA, 25 bp, Canis familiaris
aacgggtcctgaacattcaagccct

SEQ ID NO: 48107 - DNA, 25 bp, Canis familiaris
aacggaacctgatcgaaagcctctg

SEQ ID NO: 48108 - DNA, 25 bp, Canis familiaris
aactaatgacctccactacaaactt

SEQ ID NO: 48109 - DNA, 25 bp, Canis familiaris
aactaatgattctcactatacacca

SEQ ID NO: 48110 - DNA, 25 bp, Canis familiaris
aactaaatggccgtgcatgcataac

SEQ ID NO: 48111 - DNA, 25 bp, Canis familiaris
aactatgataatgctgtatgtcaac

SEQ ID NO: 48112 - DNA, 25 bp, Canis familiaris
aactgaatcactggtttgtcatagc

SEQ ID NO: 48113 - DNA, 25 bp, Canis familiaris
aacgagactctggcatgctaactag

SEQ ID NO: 48114 - DNA, 25 bp, Canis familiaris
aacggacagcggttgaacatggacg

SEQ ID NO: 48115 - DNA, 25 bp, Canis familiaris
aacggaagctgctaatgtccaccac

SEQ ID NO: 48116 - DNA, 25 bp, Canis familiaris
aacggaatgctcaaccactgatcca

SEQ ID NO: 48117 - DNA, 25 bp, Canis familiaris
aactggaattttgcagctatcccca

SEQ ID NO: 48118 - DNA, 25 bp, Canis familiaris
aacgcggattttcatggacacacca

SEQ ID NO: 48119 - DNA, 25 bp, Canis familiaris
aacgcgtctaacaaagtgagaacca

SEQ ID NO: 48120 - DNA, 25 bp, Canis familiaris
aacgtatcccaaagagaaaatccag

SEQ ID NO: 48121 - DNA, 25 bp, Canis familiaris
aacgtaccaccaaagaccatcttat

SEQ ID NO: 48122 - DNA, 25 bp, Canis familiaris
cacacgtaacggttaccgtctgttg

SEQ ID NO: 48123 - DNA, 25 bp, Canis familiaris
aactatgaaccataaccctcatgtt

SEQ ID NO: 48124 - DNA, 25 bp, Canis familiaris
aactcatgtacttaaggccccatta

SEQ ID NO: 48125 - DNA, 25 bp, Canis familiaris
aacgcatgtgtataaggtcttcagt

SEQ ID NO: 48126 - DNA, 25 bp, Canis familiaris
aactgtgtgttataggcacgacgta

SEQ ID NO: 48127 - DNA, 25 bp, Canis familiaris
aacgctggttagcaccgcaggtgta

SEQ ID NO: 48128 - DNA, 25 bp, Canis familiaris
aactattttatgcactggcagcggc

SEQ ID NO: 48129 - DNA, 25 bp, Canis familiaris
aaccgtatggatcgacagtgagagt

SEQ ID NO: 48130 - DNA, 25 bp, Canis familiaris
aactctaaggagcactggatgattc

SEQ ID NO: 48131 - DNA, 25 bp, Canis familiaris
aactgttaggagtacggctatcttc

SEQ ID NO: 48132 - DNA, 25 bp, Canis familiaris
aactgtttccagcaccttacatata

SEQ ID NO: 48133 - DNA, 25 bp, Canis familiaris
aactgagattccgagaggttgcaca

SEQ ID NO: 48134 - DNA, 25 bp, Canis familiaris
aactgcagtggctcagcagttcctc

SEQ ID NO: 48135 - DNA, 25 bp, Canis familiaris
aactgagctggtgcaagctggcttc

SEQ ID NO: 48136 - DNA, 25 bp, Canis familiaris
aactggctccagaatagtgtgtgtg

SEQ ID NO: 48137 - DNA, 25 bp, Canis familiaris
aactgcgggctgatgagctgcggag

SEQ ID NO: 48138 - DNA, 25 bp, Canis familiaris
aactgccaggtggtgcaccgggagg

SEQ ID NO: 48139 - DNA, 25 bp, Canis familiaris
aactggagcagggtacttgggtggc

SEQ ID NO: 48140 - DNA, 25 bp, Canis familiaris
aactgagacctggctagttgggcag

SEQ ID NO: 48141 - DNA, 25 bp, Canis familiaris
aactatgactaagacatcagagaag

SEQ ID NO: 48142 - DNA, 25 bp, Canis familiaris
aactgtgatctcgatgggctcagaa

SEQ ID NO: 48143 - DNA, 25 bp, Canis familiaris
aactgatgactgtctggctctaggc

SEQ ID NO: 48144 - DNA, 25 bp, Canis familiaris
aactgaggatcacttcttagtcccc

SEQ ID NO: 48145 - DNA, 25 bp, Canis familiaris
aagttggccgttacgagtcgccact

SEQ ID NO: 48146 - DNA, 25 bp, Canis familiaris
aagattgaccgtgtcctggggactt

SEQ ID NO: 48147 - DNA, 25 bp, Canis familiaris
aagtcttccctcacctaggataaat

SEQ ID NO: 48148 - DNA, 25 bp, Canis familiaris
aactcttccactatcctaatgttca

SEQ ID NO: 48149 - DNA, 25 bp, Canis familiaris
aactcttgcaaccaccacataattt

SEQ ID NO: 48150 - DNA, 25 bp, Canis familiaris
aactgctagcaatccaaattattct

SEQ ID NO: 48151 - DNA, 25 bp, Canis familiaris
aactgtagtttccacaaatctttgt

SEQ ID NO: 48152 - DNA, 25 bp, Canis familiaris
aactggagagtgccaaaactgcttc

SEQ ID NO: 48153 - DNA, 25 bp, Canis familiaris
gaactgggcagtataaacttggacc

SEQ ID NO: 48154 - DNA, 25 bp, Canis familiaris
aacgcagagcagaatggaccagtgg

SEQ ID NO: 48155 - DNA, 25 bp, Canis familiaris
aacgagaaggtggagctgcaggagc

SEQ ID NO: 48156 - DNA, 25 bp, Canis familiaris
aacgagcaaggggtggcatgccgcg

SEQ ID NO: 48157 - DNA, 25 bp, Canis familiaris
aagctgcagcacaggttggtcacac

SEQ ID NO: 48158 - DNA, 25 bp, Canis familiaris
aactgcgaatggctcattaaatcag

SEQ ID NO: 48159 - DNA, 25 bp, Canis familiaris
aactgcggatggcgcttgagcaccg

SEQ ID NO: 48160 - DNA, 25 bp, Canis familiaris
aactcttgagcacagcatggacatt

SEQ ID NO: 48161 - DNA, 25 bp, Canis familiaris
aactcatgggcaccagactgactca

SEQ ID NO: 48162 - DNA, 25 bp, Canis familiaris
aactcagggaactctgactccatca

SEQ ID NO: 48163 - DNA, 25 bp, Canis familiaris
aactagattgtatccatgactggta

SEQ ID NO: 48164 - DNA, 25 bp, Canis familiaris
aactcatttatattccaggctctgt

SEQ ID NO: 48165 - DNA, 25 bp, Canis familiaris
aactatgatttgtctgcttggtatt

SEQ ID NO: 48166 - DNA, 25 bp, Canis familiaris
aactatcatttgtctctatttttca

SEQ ID NO: 48167 - DNA, 25 bp, Canis familiaris
aactacatttgattttgtgtatcca

SEQ ID NO: 48168 - DNA, 25 bp, Canis familiaris
aactagcagttgtattctggtacat

SEQ ID NO: 48169 - DNA, 25 bp, Canis familiaris
aactatgcttagttccaagagccat

SEQ ID NO: 48170 - DNA, 25 bp, Canis familiaris
aactagttagtttcacattcagctg

SEQ ID NO: 48171 - DNA, 25 bp, Canis familiaris
aactatcttctgttagccttgttgc

SEQ ID NO: 48172 - DNA, 25 bp, Canis familiaris
aactctctacatacttccagtgtta

SEQ ID NO: 48173 - DNA, 25 bp, Canis familiaris
aactaatcatcctattcacagctgt

SEQ ID NO: 48174 - DNA, 25 bp, Canis familiaris
aactctacattctttgcacactatt

SEQ ID NO: 48175 - DNA, 25 bp, Canis familiaris
aactctacatcatctataacttact

SEQ ID NO: 48176 - DNA, 25 bp, Canis familiaris
aactcttcacccaatgatgacctga

SEQ ID NO: 48177 - DNA, 25 bp, Canis familiaris
aacccacacacattaatggccgact

SEQ ID NO: 48178 - DNA, 25 bp, Canis familiaris
aactccctgagatagttgccagcac

SEQ ID NO: 48179 - DNA, 25 bp, Canis familiaris
aactcatgcctgaatgaagcttgta

SEQ ID NO: 48180 - DNA, 25 bp, Canis familiaris
aactcatgactgatgaaccacagat

SEQ ID NO: 48181 - DNA, 25 bp, Canis familiaris
caatgccttcgacgacctcaagtcg

SEQ ID NO: 48182 - DNA, 25 bp, Canis familiaris
aacgatccggtacctctagatcaga

SEQ ID NO: 48183 - DNA, 25 bp, Canis familiaris
aacgtcctggaatgccctgtccagg

SEQ ID NO: 48184 - DNA, 25 bp, Canis familiaris
aactctcactgataatccttgtctg

SEQ ID NO: 48185 - DNA, 25 bp, Canis familiaris
aactctgcacgagacccttagagag

SEQ ID NO: 48186 - DNA, 25 bp, Canis familiaris
aactccctgaaatcctggaatgaga

SEQ ID NO: 48187 - DNA, 25 bp, Canis familiaris
aactccactggtgaagaggttgcca

SEQ ID NO: 48188 - DNA, 25 bp, Canis familiaris
aactcacacacgagtcgcgtttctc

SEQ ID NO: 48189 - DNA, 25 bp, Canis familiaris
aactcaccacgtagtagtttcctgc

SEQ ID NO: 48190 - DNA, 25 bp, Canis familiaris
aactcaccacttctattaatttctg

SEQ ID NO: 48191 - DNA, 25 bp, Canis familiaris
aatccctgggaactttagatttctg

SEQ ID NO: 48192 - DNA, 25 bp, Canis familiaris
aaccctggcaaataagaagttctgg

SEQ ID NO: 48193 - DNA, 25 bp, Canis familiaris
aactcctccaacataaacagattta

SEQ ID NO: 48194 - DNA, 25 bp, Canis familiaris
aactggcttcccctcaggaagactt

SEQ ID NO: 48195 - DNA, 25 bp, Canis familiaris
aactcagcttgcacccggagaattt

SEQ ID NO: 48196 - DNA, 25 bp, Canis familiaris
aactcaccgcagaactcgcagcgga

SEQ ID NO: 48197 - DNA, 25 bp, Canis familiaris
aactggcctgcaatacttgtataga

SEQ ID NO: 48198 - DNA, 25 bp, Canis familiaris
aactccctcaagattgtcagcaatg

SEQ ID NO: 48199 - DNA, 25 bp, Canis familiaris
aactccctctgaaagtggaatatgg

SEQ ID NO: 48200 - DNA, 25 bp, Canis familiaris
aatctccttagacaagacctagggg

SEQ ID NO: 48201 - DNA, 25 bp, Canis familiaris
aatcctttaaggtgatgctttgggc

SEQ ID NO: 48202 - DNA, 25 bp, Canis familiaris
aacgttctacgttggatctcttaag

SEQ ID NO: 48203 - DNA, 25 bp, Canis familiaris
aactgtatgttcatgtggacctcat

SEQ ID NO: 48204 - DNA, 25 bp, Canis familiaris
aactacagtgtcatgtgctgtccta

SEQ ID NO: 48205 - DNA, 25 bp, Canis familiaris
aactcagagtacattgattccttcc

SEQ ID NO: 48206 - DNA, 25 bp, Canis familiaris
aactcaatttcataattcactgatc

SEQ ID NO: 48207 - DNA, 25 bp, Canis familiaris
aactgattttcataatgctgagaaa

SEQ ID NO: 48208 - DNA, 25 bp, Canis familiaris
aactctcttacactgttgctgggaa

SEQ ID NO: 48209 - DNA, 25 bp, Canis familiaris
aactcactccaactcctgtgtaaat

SEQ ID NO: 48210 - DNA, 25 bp, Canis familiaris
aactccccagaccctgaggaagaag

SEQ ID NO: 48211 - DNA, 25 bp, Canis familiaris
aactcctccaaggcctgttgaagac

SEQ ID NO: 48212 - DNA, 25 bp, Canis familiaris
aactccttaagaggtctgtgttgca

SEQ ID NO: 48213 - DNA, 25 bp, Canis familiaris
aactcacttaatgggttgtcttgcc

SEQ ID NO: 48214 - DNA, 25 bp, Canis familiaris
aactctctctggtgggagactgctc

SEQ ID NO: 48215 - DNA, 25 bp, Canis familiaris
aactccatagagtttgctgacacca

SEQ ID NO: 48216 - DNA, 25 bp, Canis familiaris
aactccagcgagaacatgtacacta

SEQ ID NO: 48217 - DNA, 25 bp, Canis familiaris
aactctctccagaatagaccacata

SEQ ID NO: 48218 - DNA, 25 bp, Canis familiaris
aactcaaccatttagacctgcacaa

SEQ ID NO: 48219 - DNA, 25 bp, Canis familiaris
aactcgactctttgtgagtgcccaa

SEQ ID NO: 48220 - DNA, 25 bp, Canis familiaris
aactcagatcctattgttcctcaac

SEQ ID NO: 48221 - DNA, 25 bp, Canis familiaris
aactaactcttactttcaatgaaca

SEQ ID NO: 48222 - DNA, 25 bp, Canis familiaris
aactcatcacctctatttctaaaat

SEQ ID NO: 48223 - DNA, 25 bp, Canis familiaris
aactcaccatctttatttctaagca

SEQ ID NO: 48224 - DNA, 25 bp, Canis familiaris
aactcaggcggtggatttcatcaac

SEQ ID NO: 48225 - DNA, 25 bp, Canis familiaris
aactggatgggcagctttgcagcta

SEQ ID NO: 48226 - DNA, 25 bp, Canis familiaris
aacgagatgctcgtgttctggcagc

SEQ ID NO: 48227 - DNA, 25 bp, Canis familiaris
aacgagagctcgtcttgagcgcaca

SEQ ID NO: 48228 - DNA, 25 bp, Canis familiaris
aacgatggcatttctggggccacct

SEQ ID NO: 48229 - DNA, 25 bp, Canis familiaris
aacgaggatccattggagggcaagt

SEQ ID NO: 48230 - DNA, 25 bp, Canis familiaris
aacgaggatccattggagggcaagt

SEQ ID NO: 48231 - DNA, 25 bp, Canis familiaris
aacgggacataaacctggccagctt

SEQ ID NO: 48232 - DNA, 25 bp, Canis familiaris
aagaggttgcaaaccactggaagtt

SEQ ID NO: 48233 - DNA, 25 bp, Canis familiaris
aagacgatcagataccgtcgtagtt

SEQ ID NO: 48234 - DNA, 25 bp, Canis familiaris
aactctgaatgttccctgacgtagt

SEQ ID NO: 48235 - DNA, 25 bp, Canis familiaris
aactctcaagtgtcagctctgattt

SEQ ID NO: 48236 - DNA, 25 bp, Canis familiaris
aactgctacgtgtcagggttccatc

SEQ ID NO: 48237 - DNA, 25 bp, Canis familiaris
aactctaagatgttgggttcccatg

SEQ ID NO: 48238 - DNA, 25 bp, Canis familiaris
aacgctaagttttagtggatcagat

SEQ ID NO: 48239 - DNA, 25 bp, Canis familiaris
aacgtcatcggtatagtaaatatct

SEQ ID NO: 48240 - DNA, 25 bp, Canis familiaris
aactgtcctggaactaaattgaatt

SEQ ID NO: 48241 - DNA, 25 bp, Canis familiaris
aactgagcctaaacacaactagaat

SEQ ID NO: 48242 - DNA, 25 bp, Canis familiaris
aactgagctcgataccaaaggagac

SEQ ID NO: 48243 - DNA, 25 bp, Canis familiaris
aactgaggccatgattaagagggac

SEQ ID NO: 48244 - DNA, 25 bp, Canis familiaris
aactgccacctcattaaaggaatcg

SEQ ID NO: 48245 - DNA, 25 bp, Canis familiaris
caatccacccctactaacgtggacg

SEQ ID NO: 48246 - DNA, 25 bp, Canis familiaris
aactcagctgctgcttcagaagcgg

SEQ ID NO: 48247 - DNA, 25 bp, Canis familiaris
aaccgctcacctcaaagtggaggac

SEQ ID NO: 48248 - DNA, 25 bp, Canis familiaris
aacccaaaccctcaaggatggcctg

SEQ ID NO: 48249 - DNA, 25 bp, Canis familiaris
aactccagagaccacccgagtatga

SEQ ID NO: 48250 - DNA, 25 bp, Canis familiaris
aactccatagaacaccatcgtcaag

SEQ ID NO: 48251 - DNA, 25 bp, Canis familiaris
aactacatacatttgactatctgtc

SEQ ID NO: 48252 - DNA, 25 bp, Canis familiaris
aactcacattaattgcgttgcgctc

SEQ ID NO: 48253 - DNA, 25 bp, Canis familiaris
aactctcattactactgttgattct

SEQ ID NO: 48254 - DNA, 25 bp, Canis familiaris
aactcacatttctctcacttgtatt

SEQ ID NO: 48255 - DNA, 25 bp, Canis familiaris
aactcactgttattttgttgcttta

SEQ ID NO: 48256 - DNA, 25 bp, Canis familiaris
aactcagcttaatgttttgccactt

SEQ ID NO: 48257 - DNA, 25 bp, Canis familiaris
aacggctccacatgatttctgtact

SEQ ID NO: 48258 - DNA, 25 bp, Canis familiaris
aacgcttagcaaattattcgtccta

SEQ ID NO: 48259 - DNA, 25 bp, Canis familiaris
aactgtttggtactatggcgctcct

SEQ ID NO: 48260 - DNA, 25 bp, Canis familiaris
aactgtgtctggatgtggtccgtct

SEQ ID NO: 48261 - DNA, 25 bp, Canis familiaris
aacgtctccatggtggactacgctc

SEQ ID NO: 48262 - DNA, 25 bp, Canis familiaris
aactgttgtcatttgtactgaagtc

SEQ ID NO: 48263 - DNA, 25 bp, Canis familiaris
aagctgttacagttgtcattcaaaa

SEQ ID NO: 48264 - DNA, 25 bp, Canis familiaris
aactctgtacgtgtacatcatctat

SEQ ID NO: 48265 - DNA, 25 bp, Canis familiaris
aactctgtacgttatttgctcctgt

SEQ ID NO: 48266 - DNA, 25 bp, Canis familiaris
aactgtgatcatgttttttccatgt

SEQ ID NO: 48267 - DNA, 25 bp, Canis familiaris
aactctatttgtcatttctgccatt

SEQ ID NO: 48268 - DNA, 25 bp, Canis familiaris
aactccatttattaggctgtgccaa

SEQ ID NO: 48269 - DNA, 25 bp, Canis familiaris
aactccatgttggacatgaggctgc

SEQ ID NO: 48270 - DNA, 25 bp, Canis familiaris
aagtcgtgcatgagacacctgctgc

SEQ ID NO: 48271 - DNA, 25 bp, Canis familiaris
aactcagtgctaggcaacctgcgtt

SEQ ID NO: 48272 - DNA, 25 bp, Canis familiaris
aactcattgtacccaacctgttatt

SEQ ID NO: 48273 - DNA, 25 bp, Canis familiaris
aactcatattaaacaccttttccat

SEQ ID NO: 48274 - DNA, 25 bp, Canis familiaris
aactctttgaattcacttttgtgcc

SEQ ID NO: 48275 - DNA, 25 bp, Canis familiaris
aactgcctgtggatacttattactc

SEQ ID NO: 48276 - DNA, 25 bp, Canis familiaris
aactcgcatgggctagctgttggac

SEQ ID NO: 48277 - DNA, 25 bp, Canis familiaris
aacgccaggcctaagagcttgggca

SEQ ID NO: 48278 - DNA, 25 bp, Canis familiaris
aactccatggcctgtgagtcttgtg

SEQ ID NO: 48279 - DNA, 25 bp, Canis familiaris
aactccacagccctgttttggtata

SEQ ID NO: 48280 - DNA, 25 bp, Canis familiaris
aactgtaatgcccttttgtggaaga

SEQ ID NO: 48281 - DNA, 25 bp, Canis familiaris
aactcgaaacgaactcatgctggaa

SEQ ID NO: 48282 - DNA, 25 bp, Canis familiaris
aactctggaacaaggcattctgtct

SEQ ID NO: 48283 - DNA, 25 bp, Canis familiaris
aactcaggaaggggcttgcttgctt

SEQ ID NO: 48284 - DNA, 25 bp, Canis familiaris
aacgaggatagtgcccctctgtatt

SEQ ID NO: 48285 - DNA, 25 bp, Canis familiaris
aacgggtgagtgtgtgtccatttct

SEQ ID NO: 48286 - DNA, 25 bp, Canis familiaris
aacgacaggggatgtctacactctt

SEQ ID NO: 48287 - DNA, 25 bp, Canis familiaris
aacgaaaacgctggttagcaccgca

SEQ ID NO: 48288 - DNA, 25 bp, Canis familiaris
aacgaaagcagagcccatacagccc

SEQ ID NO: 48289 - DNA, 25 bp, Canis familiaris
aagctgaaagcagacactcaacccc

SEQ ID NO: 48290 - DNA, 25 bp, Canis familiaris
aactgcaatagagtgcccatcaccc

SEQ ID NO: 48291 - DNA, 25 bp, Canis familiaris
aactcacataactcaaagccgcttg

SEQ ID NO: 48292 - DNA, 25 bp, Canis familiaris
aactcacgagactccaaacactggt

SEQ ID NO: 48293 - DNA, 25 bp, Canis familiaris
aactcagctcaagcccttgacagtg

SEQ ID NO: 48294 - DNA, 25 bp, Canis familiaris
aactctgctcagttccagctagaga

SEQ ID NO: 48295 - DNA, 25 bp, Canis familiaris
aactcgctgcactactacgagcaga

SEQ ID NO: 48296 - DNA, 25 bp, Canis familiaris
aactcctctccagtcaagacagaca

SEQ ID NO: 48297 - DNA, 25 bp, Canis familiaris
aacgcccacaatgacagcacatgac

SEQ ID NO: 48298 - DNA, 25 bp, Canis familiaris
aactctgcaccgttatcatgaagtc

SEQ ID NO: 48299 - DNA, 25 bp, Canis familiaris
aactcatcacacaaaacgatagctt

SEQ ID NO: 48300 - DNA, 25 bp, Canis familiaris
aactcatatatcgacaacgctcaaa

SEQ ID NO: 48301 - DNA, 25 bp, Canis familiaris
aactctcttgagaaatctgccaata

SEQ ID NO: 48302 - DNA, 25 bp, Canis familiaris
aactcacttgagaaactaaccaatt

SEQ ID NO: 48303 - DNA, 25 bp, Canis familiaris
aactctttctgtaaataaccatgca

SEQ ID NO: 48304 - DNA, 25 bp, Canis familiaris
aactcatttcctatgtaactgcatt

SEQ ID NO: 48305 - DNA, 25 bp, Canis familiaris
aactctctatccctatgtcataaat

SEQ ID NO: 48306 - DNA, 25 bp, Canis familiaris
aactcttacccaagtccaatcaact

SEQ ID NO: 48307 - DNA, 25 bp, Canis familiaris
aactgtttcccaagacctgtacatt

SEQ ID NO: 48308 - DNA, 25 bp, Canis familiaris
aacgtttcctcgaagtggtacagct

SEQ ID NO: 48309 - DNA, 25 bp, Canis familiaris
gaacctcccccatatgggtacagga

SEQ ID NO: 48310 - DNA, 25 bp, Canis familiaris
gaacagccccggaactagttgacag

SEQ ID NO: 48311 - DNA, 25 bp, Canis familiaris
aaccgggggagactggatataagat

SEQ ID NO: 48312 - DNA, 25 bp, Canis familiaris
aagcatgcgggtgagcgggataaga

SEQ ID NO: 48313 - DNA, 25 bp, Canis familiaris
aagctcaggcccacgggaacagagt

SEQ ID NO: 48314 - DNA, 25 bp, Canis familiaris
aactcggactacgagaagatcacgc

SEQ ID NO: 48315 - DNA, 25 bp, Canis familiaris
aactggctgccttcgcagaagaacc

SEQ ID NO: 48316 - DNA, 25 bp, Canis familiaris
aactggctgccttcacaaagaacca

SEQ ID NO: 48317 - DNA, 25 bp, Canis familiaris
aactggctgccttcacaaagaacca

SEQ ID NO: 48318 - DNA, 25 bp, Canis familiaris
aactggctgccttcacaaagaacca

SEQ ID NO: 48319 - DNA, 25 bp, Canis familiaris
aactgattctcaaaaacagagccta

SEQ ID NO: 48320 - DNA, 25 bp, Canis familiaris
aactcctcatgataaaagtcctgaa

SEQ ID NO: 48321 - DNA, 25 bp, Canis familiaris
aactcctagtaaaagtccgcagctg

SEQ ID NO: 48322 - DNA, 25 bp, Canis familiaris
aaccctcgataatagccggcaagtg

SEQ ID NO: 48323 - DNA, 25 bp, Canis familiaris
aaccccggaggacacgcagaaggag

SEQ ID NO: 48324 - DNA, 25 bp, Canis familiaris
aacccggagggctggaggcaagaat

SEQ ID NO: 48325 - DNA, 25 bp, Canis familiaris
aaccacgggaacacggaccagatgt

SEQ ID NO: 48326 - DNA, 25 bp, Canis familiaris
aaccactttaccactagcagtcaac

SEQ ID NO: 48327 - DNA, 25 bp, Canis familiaris
aacgtctgtctagcatttaatgtac

SEQ ID NO: 48328 - DNA, 25 bp, Canis familiaris
aacgctgcaatttagtgttttgtca

SEQ ID NO: 48329 - DNA, 25 bp, Canis familiaris
aacggatcttaatgtttcccactct

SEQ ID NO: 48330 - DNA, 25 bp, Canis familiaris
aactgtatcagtaaagtttctccag

SEQ ID NO: 48331 - DNA, 25 bp, Canis familiaris
aactgtagatttgtgctttcccttg

SEQ ID NO: 48332 - DNA, 25 bp, Canis familiaris
aactggattttggacttctagcctc

SEQ ID NO: 48333 - DNA, 25 bp, Canis familiaris
aactcgtttggcgaacttacagcat

SEQ ID NO: 48334 - DNA, 25 bp, Canis familiaris
aacctttctgcccatttctacagaa

SEQ ID NO: 48335 - DNA, 25 bp, Canis familiaris
aactccttcggcatttctgcaagga

SEQ ID NO: 48336 - DNA, 25 bp, Canis familiaris
aactcatatatcaaggtttcctcgg

SEQ ID NO: 48337 - DNA, 25 bp, Canis familiaris
aacgatcatataactttctccttgg

SEQ ID NO: 48338 - DNA, 25 bp, Canis familiaris
aactgagttaacatttccatcatga

SEQ ID NO: 48339 - DNA, 25 bp, Canis familiaris
aactgcagttcatttctttctattt

SEQ ID NO: 48340 - DNA, 25 bp, Canis familiaris
ctaccgtgtactcattttaagctcc

SEQ ID NO: 48341 - DNA, 25 bp, Canis familiaris
aacctgtaagctctgaccttggctc

SEQ ID NO: 48342 - DNA, 25 bp, Canis familiaris
aactctgatcagctttacctatggt

SEQ ID NO: 48343 - DNA, 25 bp, Canis familiaris
aactctgtgcagaatcttcactttg

SEQ ID NO: 48344 - DNA, 25 bp, Canis familiaris
aactgctgtagattgtgccagtgat

SEQ ID NO: 48345 - DNA, 25 bp, Canis familiaris
aactgctgcaatttttcacgagtgt

SEQ ID NO: 48346 - DNA, 25 bp, Canis familiaris
aactccatatgtttaattcatcatc

SEQ ID NO: 48347 - DNA, 25 bp, Canis familiaris
aactcctatttttattctactgtgc

SEQ ID NO: 48348 - DNA, 25 bp, Canis familiaris
aactgttttttatcacttctgtagg

SEQ ID NO: 48349 - DNA, 25 bp, Canis familiaris
aactgcattgttttgacaactatta

SEQ ID NO: 48350 - DNA, 25 bp, Canis familiaris
aactgatgtcttctgagctttcttc

SEQ ID NO: 48351 - DNA, 25 bp, Canis familiaris
aactgcatggtgccggtggtgtttc

SEQ ID NO: 48352 - DNA, 25 bp, Canis familiaris
aactgtgcaaccagtgggttcctgc

SEQ ID NO: 48353 - DNA, 25 bp, Canis familiaris
aactgcttgaacagcggggtctcgc

SEQ ID NO: 48354 - DNA, 25 bp, Canis familiaris
aactcttggactttggaagcctgtc

SEQ ID NO: 48355 - DNA, 25 bp, Canis familiaris
aactctctgagatctttaactctta

SEQ ID NO: 48356 - DNA, 25 bp, Canis familiaris
aactctcggattacttctgagctgg

SEQ ID NO: 48357 - DNA, 25 bp, Canis familiaris
aactcatcaggcagccttctgggtc

SEQ ID NO: 48358 - DNA, 25 bp, Canis familiaris
aactccctgtatcttgtgctgatac

SEQ ID NO: 48359 - DNA, 25 bp, Canis familiaris
aactccctctgaaagaagctgtatg

SEQ ID NO: 48360 - DNA, 25 bp, Canis familiaris
aactcctttgttagccactatcatt

SEQ ID NO: 48361 - DNA, 25 bp, Canis familiaris
aaccccagtttcgacatctaattag

SEQ ID NO: 48362 - DNA, 25 bp, Canis familiaris
aaccagccagtttggccctggagat

SEQ ID NO: 48363 - DNA, 25 bp, Canis familiaris
caacccaggctacgagcccgaagtt

SEQ ID NO: 48364 - DNA, 25 bp, Canis familiaris
aacctcgtgccaggagccaggaaaa

SEQ ID NO: 48365 - DNA, 25 bp, Canis familiaris
aataatcactaacggccaggcacat

SEQ ID NO: 48366 - DNA, 25 bp, Canis familiaris
aacgtcctaaggcagcgtgacttcc

SEQ ID NO: 48367 - DNA, 25 bp, Canis familiaris
aactgtcgtcaacaaggatgtcttc

SEQ ID NO: 48368 - DNA, 25 bp, Canis familiaris
aactccagtccataatggtgtccct

SEQ ID NO: 48369 - DNA, 25 bp, Canis familiaris
aactccagattctacaatgttttcc

SEQ ID NO: 48370 - DNA, 25 bp, Canis familiaris
aactctcaagactacagatactttt

SEQ ID NO: 48371 - DNA, 25 bp, Canis familiaris
aactgtctcaactaaaaacatatgt

SEQ ID NO: 48372 - DNA, 25 bp, Canis familiaris
aactgttcacactccaataattgct

SEQ ID NO: 48373 - DNA, 25 bp, Canis familiaris
aactctctcatcaacccaataatat

SEQ ID NO: 48374 - DNA, 25 bp, Canis familiaris
aactgactactgccgctaataattg

SEQ ID NO: 48375 - DNA, 25 bp, Canis familiaris
aactgtatagctctgacaattatgt

SEQ ID NO: 48376 - DNA, 25 bp, Canis familiaris
aactgtcatatgttggtgcaacctg

SEQ ID NO: 48377 - DNA, 25 bp, Canis familiaris
aactccatatgctagagctctcctc

SEQ ID NO: 48378 - DNA, 25 bp, Canis familiaris
aactccatcatgaagtgtgacgtgg

SEQ ID NO: 48379 - DNA, 25 bp, Canis familiaris
aactccatcatgaagtgtgacgtgg

SEQ ID NO: 48380 - DNA, 25 bp, Canis familiaris
aacgacctcaagatgcacgtggcgc

SEQ ID NO: 48381 - DNA, 25 bp, Canis familiaris
aacgagctgcggagtgacctagtgc

SEQ ID NO: 48382 - DNA, 25 bp, Canis familiaris
aactgcaggggctctgaccaactgc

SEQ ID NO: 48383 - DNA, 25 bp, Canis familiaris
aacgacacgtgctttactcaaggct

SEQ ID NO: 48384 - DNA, 25 bp, Canis familiaris
aacggacgtcttattagagtctctg

SEQ ID NO: 48385 - DNA, 25 bp, Canis familiaris
aactggaagttcaaatctagcatgt

SEQ ID NO: 48386 - DNA, 25 bp, Canis familiaris
aactggaatcttcacctgccagatc

SEQ ID NO: 48387 - DNA, 25 bp, Canis familiaris
aactgagaatcttaaccaccatgcc

SEQ ID NO: 48388 - DNA, 25 bp, Canis familiaris
aatctagcaacaaaacaaactccaa

SEQ ID NO: 48389 - DNA, 25 bp, Canis familiaris
aacccaccataataaactgcaaagt

SEQ ID NO: 48390 - DNA, 25 bp, Canis familiaris
aactgccccacaagaaatgttcaaa

SEQ ID NO: 48391 - DNA, 25 bp, Canis familiaris
aactggtgcaactggtattctacaa

SEQ ID NO: 48392 - DNA, 25 bp, Canis familiaris
aacgagtacctagatcatttaataa

SEQ ID NO: 48393 - DNA, 25 bp, Canis familiaris
aacggactccaggtgttttccatag

SEQ ID NO: 48394 - DNA, 25 bp, Canis familiaris
aacgaaaacatgagttgcgtgccat

SEQ ID NO: 48395 - DNA, 25 bp, Canis familiaris
aactgaaacctactgcttctgtgaa

SEQ ID NO: 48396 - DNA, 25 bp, Canis familiaris
aactgcacaaactggccactgataa

SEQ ID NO: 48397 - DNA, 25 bp, Canis familiaris
aactgcacaaactggccactgataa

SEQ ID NO: 48398 - DNA, 25 bp, Canis familiaris
aactgcacaaactggccactgatat

SEQ ID NO: 48399 - DNA, 25 bp, Canis familiaris
aactgcacaaactggccactgatag

SEQ ID NO: 48400 - DNA, 25 bp, Canis familiaris
aactccaaagtcagatttcatgcag

SEQ ID NO: 48401 - DNA, 25 bp, Canis familiaris
aactcccaggtcatgtgctttggac

SEQ ID NO: 48402 - DNA, 25 bp, Canis familiaris
aactcctactgtatgtagttggaca

SEQ ID NO: 48403 - DNA, 25 bp, Canis familiaris
aactcctccttactatagcctagtt

SEQ ID NO: 48404 - DNA, 25 bp, Canis familiaris
aactcctacttctataactctacat

SEQ ID NO: 48405 - DNA, 25 bp, Canis familiaris
aactctccgtagatgaagtctcaca

SEQ ID NO: 48406 - DNA, 25 bp, Canis familiaris
aactgttttcctagaagtccatctt

SEQ ID NO: 48407 - DNA, 25 bp, Canis familiaris
aactcctgttctcaatagtcacctt

SEQ ID NO: 48408 - DNA, 25 bp, Canis familiaris
aactctctgcttctaatgagctctc

SEQ ID NO: 48409 - DNA, 25 bp, Canis familiaris
aactgcgcttttcatatgatgcatc

SEQ ID NO: 48410 - DNA, 25 bp, Canis familiaris
aactcgtgctggtgaatgccatcta

SEQ ID NO: 48411 - DNA, 25 bp, Canis familiaris
aactctgcccgaagaatctgtctat

SEQ ID NO: 48412 - DNA, 25 bp, Canis familiaris
aactgccccagaagaagctgcactt

SEQ ID NO: 48413 - DNA, 25 bp, Canis familiaris
aactgccccacttggcagtaacatc

SEQ ID NO: 48414 - DNA, 25 bp, Canis familiaris
aactccccatcctcaaaaatcatgg

SEQ ID NO: 48415 - DNA, 25 bp, Canis familiaris
aagcccccaccagaagagaacggag

SEQ ID NO: 48416 - DNA, 25 bp, Canis familiaris
aacccctccctgagtgagaactggt

SEQ ID NO: 48417 - DNA, 25 bp, Canis familiaris
aacctcctggcctgggtaacaggtg

SEQ ID NO: 48418 - DNA, 25 bp, Canis familiaris
aactctctctgacaggtggaaaact

SEQ ID NO: 48419 - DNA, 25 bp, Canis familiaris
aactgcctgtactatggggacaata

SEQ ID NO: 48420 - DNA, 25 bp, Canis familiaris
aactgactgtgtaatggctgaaatt

SEQ ID NO: 48421 - DNA, 25 bp, Canis familiaris
caacgaccgtcaagcacgaacttta

SEQ ID NO: 48422 - DNA, 25 bp, Canis familiaris
aacgattggagctgaagaaccttaa

SEQ ID NO: 48423 - DNA, 25 bp, Canis familiaris
aactgatctgggttgctaaactcat

SEQ ID NO: 48424 - DNA, 25 bp, Canis familiaris
aactctctgctgcgttacacagtgt

SEQ ID NO: 48425 - DNA, 25 bp, Canis familiaris
aactcggctgtattaatcacgcgat

SEQ ID NO: 48426 - DNA, 25 bp, Canis familiaris
aactcggctgtattaatcacgcgat

SEQ ID NO: 48427 - DNA, 25 bp, Canis familiaris
aactcgtgctcatggaaacagcggc

SEQ ID NO: 48428 - DNA, 25 bp, Canis familiaris
aactcgatgccgaccaataccagag

SEQ ID NO: 48429 - DNA, 25 bp, Canis familiaris
aactcggctctggcccagaaggagg

SEQ ID NO: 48430 - DNA, 25 bp, Canis familiaris
aacccgatctgtgcaatggaaataa

SEQ ID NO: 48431 - DNA, 25 bp, Canis familiaris
aacccagactgtgccggagaaggag

SEQ ID NO: 48432 - DNA, 25 bp, Canis familiaris
aacgccggaggcggcagggcaagga

SEQ ID NO: 48433 - DNA, 25 bp, Canis familiaris
aacgtgtggaggcccaaggaagcca

SEQ ID NO: 48434 - DNA, 25 bp, Canis familiaris
aacggtgcagcggttcaaggaatac

SEQ ID NO: 48435 - DNA, 25 bp, Canis familiaris
aacgggctgagctctcagaaagcaa

SEQ ID NO: 48436 - DNA, 25 bp, Canis familiaris
aacgggcagagggcttgaacagact

SEQ ID NO: 48437 - DNA, 25 bp, Canis familiaris
aacggtgcaggtgcttgcctagagt

SEQ ID NO: 48438 - DNA, 25 bp, Canis familiaris
aactgtggaggatcgtgccgtttgg

SEQ ID NO: 48439 - DNA, 25 bp, Canis familiaris
aacgtggagtattttggcctgggcg

SEQ ID NO: 48440 - DNA, 25 bp, Canis familiaris
aacggtggagtacttaccaggagca

SEQ ID NO: 48441 - DNA, 25 bp, Canis familiaris
aagcggggagatcaacccagtgaag

SEQ ID NO: 48442 - DNA, 25 bp, Canis familiaris
aactggagggtattacgctgagtaa

SEQ ID NO: 48443 - DNA, 25 bp, Canis familiaris
aactgccagcagttttgtcctttaa

SEQ ID NO: 48444 - DNA, 25 bp, Canis familiaris
aactcccaactgtcttactgttaat

SEQ ID NO: 48445 - DNA, 25 bp, Canis familiaris
aactgtctaacttttaagatttcat

SEQ ID NO: 48446 - DNA, 25 bp, Canis familiaris
aactgttttatctttccaatttcat

SEQ ID NO: 48447 - DNA, 25 bp, Canis familiaris
aactgctttagtgtctctttttaga

SEQ ID NO: 48448 - DNA, 25 bp, Canis familiaris
aactgtcctactctttttctggagt

SEQ ID NO: 48449 - DNA, 25 bp, Canis familiaris
aagctttctactctgttttttcaat

SEQ ID NO: 48450 - DNA, 25 bp, Canis familiaris
aagccttttgttatttttgtgtcat

SEQ ID NO: 48451 - DNA, 25 bp, Canis familiaris
aagccttttttgattacctgtaatg

SEQ ID NO: 48452 - DNA, 25 bp, Canis familiaris
aactcctgttttatctgaacttcca

SEQ ID NO: 48453 - DNA, 25 bp, Canis familiaris
aactcctgttttatctgaacttcca

SEQ ID NO: 48454 - DNA, 25 bp, Canis familiaris
aacccttttatctctgaacacttga

SEQ ID NO: 48455 - DNA, 25 bp, Canis familiaris
aaccttagttaagcatggactctgg

SEQ ID NO: 48456 - DNA, 25 bp, Canis familiaris
aacgcttggctcaaactcaaaacgg

SEQ ID NO: 48457 - DNA, 25 bp, Canis familiaris
aaccatttcagcacctccaaaggtc

SEQ ID NO: 48458 - DNA, 25 bp, Canis familiaris
aactgattgtccactgtctcaaggt

SEQ ID NO: 48459 - DNA, 25 bp, Canis familiaris
aactgtcaaggcactcttcaaatgt

SEQ ID NO: 48460 - DNA, 25 bp, Canis familiaris
aactccagaggacgctttgactatt

SEQ ID NO: 48461 - DNA, 25 bp, Canis familiaris
aactccaaacacgagttgtttgctg

SEQ ID NO: 48462 - DNA, 25 bp, Canis familiaris
aacctgaaacacaggctttctccct

SEQ ID NO: 48463 - DNA, 25 bp, Canis familiaris
aactgtgataaccctgtgtgtttac

SEQ ID NO: 48464 - DNA, 25 bp, Canis familiaris
aactgtgatcagagcctgtagagga

SEQ ID NO: 48465 - DNA, 25 bp, Canis familiaris
aagctcgacatcagccctgaaggac

SEQ ID NO: 48466 - DNA, 25 bp, Canis familiaris
aactgcacaactggccactgataaa

SEQ ID NO: 48467 - DNA, 25 bp, Canis familiaris
aactccaacttccacaagcagataa

SEQ ID NO: 48468 - DNA, 25 bp, Canis familiaris
aactggaggccccagctagagctta

SEQ ID NO: 48469 - DNA, 25 bp, Canis familiaris
aacggggccaagcctgcaagttaag

SEQ ID NO: 48470 - DNA, 25 bp, Canis familiaris
aacggctggagcaagggcaggccat

SEQ ID NO: 48471 - DNA, 25 bp, Canis familiaris
aactggcttgtggcggccaagcgtt

SEQ ID NO: 48472 - DNA, 25 bp, Canis familiaris
aactgagtggtgccggctacagggt

SEQ ID NO: 48473 - DNA, 25 bp, Canis familiaris
aaccctgggccaggaacttggcttg

SEQ ID NO: 48474 - DNA, 25 bp, Canis familiaris
aacccttcccaggtgtattggcagg

SEQ ID NO: 48475 - DNA, 25 bp, Canis familiaris
aacgttgaccctgatgctaaggtgg

SEQ ID NO: 48476 - DNA, 25 bp, Canis familiaris
aactggctaacctcagctcaaggtg

SEQ ID NO: 48477 - DNA, 25 bp, Canis familiaris
aactggctaacggtcactcaaaagg

SEQ ID NO: 48478 - DNA, 25 bp, Canis familiaris
aactggtcaaaggacattcaccaaa

SEQ ID NO: 48479 - DNA, 25 bp, Canis familiaris
aactgcctaaaaacatctatcccaa

SEQ ID NO: 48480 - DNA, 25 bp, Canis familiaris
aactgccgaaaccattttccaaatg

SEQ ID NO: 48481 - DNA, 25 bp, Canis familiaris
aactgccggactattttccatgcat

SEQ ID NO: 48482 - DNA, 25 bp, Canis familiaris
aactgcacaggtcacttcagtcctc

SEQ ID NO: 48483 - DNA, 25 bp, Canis familiaris
aactgcactacacactgacaatctc

SEQ ID NO: 48484 - DNA, 25 bp, Canis familiaris
aactgctctctagacaataatctgc

SEQ ID NO: 48485 - DNA, 25 bp, Canis familiaris
aactgctccataaataaaactccta

SEQ ID NO: 48486 - DNA, 25 bp, Canis familiaris
aagctgtataagattaaacccatat

SEQ ID NO: 48487 - DNA, 25 bp, Canis familiaris
aactgcttaaggctgggcccacaag

SEQ ID NO: 48488 - DNA, 25 bp, Canis familiaris
aacgggcaagtgttggacaccggag

SEQ ID NO: 48489 - DNA, 25 bp, Canis familiaris
aacggagaacgcttggatcacccgc

SEQ ID NO: 48490 - DNA, 25 bp, Canis familiaris
aacgtggaacacctgagtagataag

SEQ ID NO: 48491 - DNA, 25 bp, Canis familiaris
aagggtaactggtgctcttacagta

SEQ ID NO: 48492 - DNA, 25 bp, Canis familiaris
aagcagtgtaccatgaattttccgt

SEQ ID NO: 48493 - DNA, 25 bp, Canis familiaris
aagcagtatccgcgcaagcatgttc

SEQ ID NO: 48494 - DNA, 25 bp, Canis familiaris
aactgttgcacttgtcaactttcaa

SEQ ID NO: 48495 - DNA, 25 bp, Canis familiaris
aactgttgcacttttgaatgtccca

SEQ ID NO: 48496 - DNA, 25 bp, Canis familiaris
aactgtcgccagttgtgcactttta

SEQ ID NO: 48497 - DNA, 25 bp, Canis familiaris
aactgtcaccagtttagccactgtt

SEQ ID NO: 48498 - DNA, 25 bp, Canis familiaris
aactgttctctgttttcacatttgg

SEQ ID NO: 48499 - DNA, 25 bp, Canis familiaris
aactgttcactttgaaacatcttcc

SEQ ID NO: 48500 - DNA, 25 bp, Canis familiaris
aactggtcagttttcactcatttct

SEQ ID NO: 48501 - DNA, 25 bp, Canis familiaris
aactgaggagggtccacattcacct

SEQ ID NO: 48502 - DNA, 25 bp, Canis familiaris
aacggatgggagttgccattctctg

SEQ ID NO: 48503 - DNA, 25 bp, Canis familiaris
aacgtagaggtactgcctatgctcc

SEQ ID NO: 48504 - DNA, 25 bp, Canis familiaris
aacgtaaaatcactctttccagcca

SEQ ID NO: 48505 - DNA, 25 bp, Canis familiaris
aacctaaacacaacctggcaggcct

SEQ ID NO: 48506 - DNA, 25 bp, Canis familiaris
aacctggtacctattggcaagccgg

SEQ ID NO: 48507 - DNA, 25 bp, Canis familiaris
aagttattacttactattaagcctg

SEQ ID NO: 48508 - DNA, 25 bp, Canis familiaris
aactcctttgttactttatagcctg

SEQ ID NO: 48509 - DNA, 25 bp, Canis familiaris
aactgcctttgagtttctttcttct

SEQ ID NO: 48510 - DNA, 25 bp, Canis familiaris
aactgctttctgactgattgccttc

SEQ ID NO: 48511 - DNA, 25 bp, Canis familiaris
aactgcttcctgatgtatcgttgtg

SEQ ID NO: 48512 - DNA, 25 bp, Canis familiaris
caactcccctgaaaatcctgggaat

SEQ ID NO: 48513 - DNA, 25 bp, Canis familiaris
aactccaacgggaacttgatgaaat

SEQ ID NO: 48514 - DNA, 25 bp, Canis familiaris
aactccaacggaaccttgatgaatt

SEQ ID NO: 48515 - DNA, 25 bp, Canis familiaris
aactgtaacttgacacacttgaatt

SEQ ID NO: 48516 - DNA, 25 bp, Canis familiaris
aactgtaatcttgctcgggaggctg

SEQ ID NO: 48517 - DNA, 25 bp, Canis familiaris
aactggcagtttgtcggtggtgtgg

SEQ ID NO: 48518 - DNA, 25 bp, Canis familiaris
aactggcagttaaccgttgcgcttt

SEQ ID NO: 48519 - DNA, 25 bp, Canis familiaris
aactccaattaattcgtgtcgcgtc

SEQ ID NO: 48520 - DNA, 25 bp, Canis familiaris
aacccatcatcttaacttggcaagt

SEQ ID NO: 48521 - DNA, 25 bp, Canis familiaris
aactgacaacttaatctctgtgatg

SEQ ID NO: 48522 - DNA, 25 bp, Canis familiaris
aactgacagggtgggcagctggctg

SEQ ID NO: 48523 - DNA, 25 bp, Canis familiaris
aactgcatcaggcgtggcaggcggt

SEQ ID NO: 48524 - DNA, 25 bp, Canis familiaris
aactgcaccagcagtggcggagacc

SEQ ID NO: 48525 - DNA, 25 bp, Canis familiaris
aactgtccattcatggtggactcca

SEQ ID NO: 48526 - DNA, 25 bp, Canis familiaris
aactgggcttcattagtgggttgat

SEQ ID NO: 48527 - DNA, 25 bp, Canis familiaris
aactgggattattagctggggtgaa

SEQ ID NO: 48528 - DNA, 25 bp, Canis familiaris
aactgggatctgagcctttgtgtat

SEQ ID NO: 48529 - DNA, 25 bp, Canis familiaris
aaccgggtaggcgtgtctgtgtgat

SEQ ID NO: 48530 - DNA, 25 bp, Canis familiaris
aaccgggagaggcgactgaagcatc

SEQ ID NO: 48531 - DNA, 25 bp, Canis familiaris
aactgcgcggtgcaaggaccaagtc

SEQ ID NO: 48532 - DNA, 25 bp, Canis familiaris
aactgcacaagacaaccccaaatct

SEQ ID NO: 48533 - DNA, 25 bp, Canis familiaris
aactgacatagataaccatagcaaa

SEQ ID NO: 48534 - DNA, 25 bp, Canis familiaris
aactgccttttaatgccattgcata

SEQ ID NO: 48535 - DNA, 25 bp, Canis familiaris
aactgctctgtggcaaatgtactta

SEQ ID NO: 48536 - DNA, 25 bp, Canis familiaris
aacggtgtgtcaactatacttaaat

SEQ ID NO: 48537 - DNA, 25 bp, Canis familiaris
aactggcaggtatcttttgtaacta

SEQ ID NO: 48538 - DNA, 25 bp, Canis familiaris
aactgccaggttacttttgtgtttg

SEQ ID NO: 48539 - DNA, 25 bp, Canis familiaris
aactgcctggggacggtgtgtgtgt

SEQ ID NO: 48540 - DNA, 25 bp, Canis familiaris
aacgagttggtgaggatgtggagaa

SEQ ID NO: 48541 - DNA, 25 bp, Canis familiaris
aaccgttcagtcagcaatgttgaga

SEQ ID NO: 48542 - DNA, 25 bp, Canis familiaris
aacggtagagacaactagatggaac

SEQ ID NO: 48543 - DNA, 25 bp, Canis familiaris
aacgggaagctcactggcatggcct

SEQ ID NO: 48544 - DNA, 25 bp, Canis familiaris
aacgggaagctcactggcatggcct

SEQ ID NO: 48545 - DNA, 25 bp, Canis familiaris
aactgaagtacctgtgctcattcct

SEQ ID NO: 48546 - DNA, 25 bp, Canis familiaris
aactgatcaggagttttgtcttctc

SEQ ID NO: 48547 - DNA, 25 bp, Canis familiaris
aactgccaggagttcttgacagatt

SEQ ID NO: 48548 - DNA, 25 bp, Canis familiaris
aacgccatgtgtagctttaaaaaat

SEQ ID NO: 48549 - DNA, 25 bp, Canis familiaris
aacctagattccttctcaaagtaat

SEQ ID NO: 48550 - DNA, 25 bp, Canis familiaris
aaccgagaatcctgtctccagtatg

SEQ ID NO: 48551 - DNA, 25 bp, Canis familiaris
aaccccaagaccagcttcaatgagg

SEQ ID NO: 48552 - DNA, 25 bp, Canis familiaris
aaccccaaaacaggactaagtgcat

SEQ ID NO: 48553 - DNA, 25 bp, Canis familiaris
aaccctgcgaaagggacttcgatca

SEQ ID NO: 48554 - DNA, 25 bp, Canis familiaris
aaccctgtcaagaggacactcgtga

SEQ ID NO: 48555 - DNA, 25 bp, Canis familiaris
aaccttacacagaaccacttcagat

SEQ ID NO: 48556 - DNA, 25 bp, Canis familiaris
aacctgtatacagcttgcctatagc

SEQ ID NO: 48557 - DNA, 25 bp, Canis familiaris
aacccttcaatggttccacatggcc

SEQ ID NO: 48558 - DNA, 25 bp, Canis familiaris
caaagggtcctggtttcacaggatt

SEQ ID NO: 48559 - DNA, 25 bp, Canis familiaris
gaaccggaccgggattacaggagct

SEQ ID NO: 48560 - DNA, 25 bp, Canis familiaris
aacgaggccggtgaaaaggagattg

SEQ ID NO: 48561 - DNA, 25 bp, Canis familiaris
aacgggcctggtggaatttgccaga

SEQ ID NO: 48562 - DNA, 25 bp, Canis familiaris
aactgggtctttgtcatttgcttaa

SEQ ID NO: 48563 - DNA, 25 bp, Canis familiaris
aactgaaactttggccttcatgctt

SEQ ID NO: 48564 - DNA, 25 bp, Canis familiaris
aacgtgaacattgggagcctcatct

SEQ ID NO: 48565 - DNA, 25 bp, Canis familiaris
aactgcatgaaataaacctcttttt

SEQ ID NO: 48566 - DNA, 25 bp, Canis familiaris
aactgcatgagatttcacacaacct

SEQ ID NO: 48567 - DNA, 25 bp, Canis familiaris
aaccctgacataacacatacacgta

SEQ ID NO: 48568 - DNA, 25 bp, Canis familiaris
aacccgaaacctacagcactacagg

SEQ ID NO: 48569 - DNA, 25 bp, Canis familiaris
aacccaaaactgcaacattattctt

SEQ ID NO: 48570 - DNA, 25 bp, Canis familiaris
aaccacgcaactgaagacattttta

SEQ ID NO: 48571 - DNA, 25 bp, Canis familiaris
aagcacccgtgggaatatcaccttt

SEQ ID NO: 48572 - DNA, 25 bp, Canis familiaris
aaccccctgatgaaggaccttctga

SEQ ID NO: 48573 - DNA, 25 bp, Canis familiaris
aaccccgagtaacatctatgctcag

SEQ ID NO: 48574 - DNA, 25 bp, Canis familiaris
aatcaaccaggtgcaggactcggca

SEQ ID NO: 48575 - DNA, 25 bp, Canis familiaris
aatcacccggtgaggaatgcagaaa

SEQ ID NO: 48576 - DNA, 25 bp, Canis familiaris
aacccaaggggtaagatgcagtcaa

SEQ ID NO: 48577 - DNA, 25 bp, Canis familiaris
aagcctcccggacttattggatgaa

SEQ ID NO: 48578 - DNA, 25 bp, Canis familiaris
aaccagcccgtggacgattgggaag

SEQ ID NO: 48579 - DNA, 25 bp, Canis familiaris
aactgctgacgcctggacgataagg

SEQ ID NO: 48580 - DNA, 25 bp, Canis familiaris
aactgctgccggctgaatggaacag

SEQ ID NO: 48581 - DNA, 25 bp, Canis familiaris
aacgagccgctctaagtgaaatggt

SEQ ID NO: 48582 - DNA, 25 bp, Canis familiaris
aacgccacgctgtcaagtgaagact

SEQ ID NO: 48583 - DNA, 25 bp, Canis familiaris
aaccccagcttctgttagaaatgag

SEQ ID NO: 48584 - DNA, 25 bp, Canis familiaris
aaccccagcttagctgccaactaag

SEQ ID NO: 48585 - DNA, 25 bp, Canis familiaris
aagccgtcgtaaacggcactctaag

SEQ ID NO: 48586 - DNA, 25 bp, Canis familiaris
caaccgtagtccaccagactttatt

SEQ ID NO: 48587 - DNA, 25 bp, Canis familiaris
aaccgtcgaccaacctgacagataa

SEQ ID NO: 48588 - DNA, 25 bp, Canis familiaris
aactggatccatgtcatccgacaat

SEQ ID NO: 48589 - DNA, 25 bp, Canis familiaris
aactgcacattctgatcaacgtcct

SEQ ID NO: 48590 - DNA, 25 bp, Canis familiaris
aactgcacagtattaaacccttgaa

SEQ ID NO: 48591 - DNA, 25 bp, Canis familiaris
aacggaatatcatttacccagtgaa

SEQ ID NO: 48592 - DNA, 25 bp, Canis familiaris
aacgaagtattattcagcccagaga

SEQ ID NO: 48593 - DNA, 25 bp, Canis familiaris
aactgaggttaactagctcccagca

SEQ ID NO: 48594 - DNA, 25 bp, Canis familiaris
aacgtggatgtacctaccaagagca

SEQ ID NO: 48595 - DNA, 25 bp, Canis familiaris
aacgggagaagccggcgagcggcag

SEQ ID NO: 48596 - DNA, 25 bp, Canis familiaris
aacgggaggagccgatcacgctgta

SEQ ID NO: 48597 - DNA, 25 bp, Canis familiaris
aacgaggggcaggggcctgctgtgc

SEQ ID NO: 48598 - DNA, 25 bp, Canis familiaris
aacgaggcgagcagggtgctcctgg

SEQ ID NO: 48599 - DNA, 25 bp, Canis familiaris
aacgggcgatctatgtgttccatga

SEQ ID NO: 48600 - DNA, 25 bp, Canis familiaris
aacggtaatctttgcgtctggtgag

SEQ ID NO: 48601 - DNA, 25 bp, Canis familiaris
aacgcctacgtttgctgatcatggg

SEQ ID NO: 48602 - DNA, 25 bp, Canis familiaris
aacgcctacgtttgctgatcatggg

SEQ ID NO: 48603 - DNA, 25 bp, Canis familiaris
aacgcctacgtttgctgatcatggg

SEQ ID NO: 48604 - DNA, 25 bp, Canis familiaris
aacccttcagtttggctatgtctta

SEQ ID NO: 48605 - DNA, 25 bp, Canis familiaris
aacccttgcatgctaagccttacta

SEQ ID NO: 48606 - DNA, 25 bp, Canis familiaris
aactgttgtgtacaagtctttccag

SEQ ID NO: 48607 - DNA, 25 bp, Canis familiaris
aacgaggtggtcgaatcttccttca

SEQ ID NO: 48608 - DNA, 25 bp, Canis familiaris
caacggactttccaatgttcgtaca

SEQ ID NO: 48609 - DNA, 25 bp, Canis familiaris
aacgtttttctcaatgtttgtcaca

SEQ ID NO: 48610 - DNA, 25 bp, Canis familiaris
aacgcatttttgtcttgacgtgact

SEQ ID NO: 48611 - DNA, 25 bp, Canis familiaris
aaccttgtttactgacagtcaaccg

SEQ ID NO: 48612 - DNA, 25 bp, Canis familiaris
aagcctttctttgtgcaatcaaacc

SEQ ID NO: 48613 - DNA, 25 bp, Canis familiaris
aacgtattcatgttttgcacacaaa

SEQ ID NO: 48614 - DNA, 25 bp, Canis familiaris
aacctttctgttttacagcaaagtg

SEQ ID NO: 48615 - DNA, 25 bp, Canis familiaris
aaccgttcaatatttactccagaag

SEQ ID NO: 48616 - DNA, 25 bp, Canis familiaris
aactgtgcttcatatcatgtacctc

SEQ ID NO: 48617 - DNA, 25 bp, Canis familiaris
aactggctgtgctctcattcagcct

SEQ ID NO: 48618 - DNA, 25 bp, Canis familiaris
aactgatggtgcttgctttctgtgc

SEQ ID NO: 48619 - DNA, 25 bp, Canis familiaris
aactgagagtcatgcgttctgttaa

SEQ ID NO: 48620 - DNA, 25 bp, Canis familiaris
aactgacattatacttttgcattta

SEQ ID NO: 48621 - DNA, 25 bp, Canis familiaris
aactgtttcattttattatctatat

SEQ ID NO: 48622 - DNA, 25 bp, Canis familiaris
aactgttcactatttctgctttatt

SEQ ID NO: 48623 - DNA, 25 bp, Canis familiaris
aactgattaatctttccaattgagc

SEQ ID NO: 48624 - DNA, 25 bp, Canis familiaris
aacgatatatgatttttcaactact

SEQ ID NO: 48625 - DNA, 25 bp, Canis familiaris
aacgtctgacgttttcatatctcct

SEQ ID NO: 48626 - DNA, 25 bp, Canis familiaris
aacgacgtctgttggtagtcttctt

SEQ ID NO: 48627 - DNA, 25 bp, Canis familiaris
aacgagcggctgcaggaaggcttcc

SEQ ID NO: 48628 - DNA, 25 bp, Canis familiaris
aagcgaggccgcagtacggtttcgc

SEQ ID NO: 48629 - DNA, 25 bp, Canis familiaris
aactggctgaccagtgcacgggtct

SEQ ID NO: 48630 - DNA, 25 bp, Canis familiaris
aactgttgaccatggccaagacctt

SEQ ID NO: 48631 - DNA, 25 bp, Canis familiaris
aactgttgggcatgtggggactttt

SEQ ID NO: 48632 - DNA, 25 bp, Canis familiaris
aacgcttgtggctttgggatacttg

SEQ ID NO: 48633 - DNA, 25 bp, Canis familiaris
aacctttccatgtgggtcatgctct

SEQ ID NO: 48634 - DNA, 25 bp, Canis familiaris
aaccgtccattgtgtttctgagtcc

SEQ ID NO: 48635 - DNA, 25 bp, Canis familiaris
aacccccattatagctttgtcagac

SEQ ID NO: 48636 - DNA, 25 bp, Canis familiaris
aacccctgacttactattcatcaac

SEQ ID NO: 48637 - DNA, 25 bp, Canis familiaris
aactgacctccttgaacatttcatg

SEQ ID NO: 48638 - DNA, 25 bp, Canis familiaris
aactgtgactttttactgattcgat

SEQ ID NO: 48639 - DNA, 25 bp, Canis familiaris
aactgtggccaatttcatctaccgt

SEQ ID NO: 48640 - DNA, 25 bp, Canis familiaris
aactgtgtgtgatgactctctttcc

SEQ ID NO: 48641 - DNA, 25 bp, Canis familiaris
aactggagtcaggtttcttgtctct

SEQ ID NO: 48642 - DNA, 25 bp, Canis familiaris
aacggtgtctgagtctatttttctt

SEQ ID NO: 48643 - DNA, 25 bp, Canis familiaris
aacgtggcttgtgacactgtttcct

SEQ ID NO: 48644 - DNA, 25 bp, Canis familiaris
aacggtgctataaacctgggtcctg

SEQ ID NO: 48645 - DNA, 25 bp, Canis familiaris
aaccctgtattttcctggtggaatg

SEQ ID NO: 48646 - DNA, 25 bp, Canis familiaris
aacccagctattcttctcaggtact

SEQ ID NO: 48647 - DNA, 25 bp, Canis familiaris
aacccagccaatatgtccaaatatc

SEQ ID NO: 48648 - DNA, 25 bp, Canis familiaris
aacgctcactccaaattagcggtat

SEQ ID NO: 48649 - DNA, 25 bp, Canis familiaris
cacggtcaccctcttcaaatgacat

SEQ ID NO: 48650 - DNA, 25 bp, Canis familiaris
caccgacctcttcttaaatacacat

SEQ ID NO: 48651 - DNA, 25 bp, Canis familiaris
aacgaactcttccctggaataatct

SEQ ID NO: 48652 - DNA, 25 bp, Canis familiaris
aaccaacttccatcgtgaatcttta

SEQ ID NO: 48653 - DNA, 25 bp, Canis familiaris
caaccacctacggacaggcaacttg

SEQ ID NO: 48654 - DNA, 25 bp, Canis familiaris
aaccctcacagccatctaggaacat

SEQ ID NO: 48655 - DNA, 25 bp, Canis familiaris
aaccttcagggcgtacaggagcatc

SEQ ID NO: 48656 - DNA, 25 bp, Canis familiaris
aacgtgtcagtggtggacctgacct

SEQ ID NO: 48657 - DNA, 25 bp, Canis familiaris
aacgttcattgagacattcgagcct

SEQ ID NO: 48658 - DNA, 25 bp, Canis familiaris
aactgttcaaaattgcttcgaggtt

SEQ ID NO: 48659 - DNA, 25 bp, Canis familiaris
aactgtggaaagagcctcgacgtcc

SEQ ID NO: 48660 - DNA, 25 bp, Canis familiaris
aacgggaggcagagttctcacgccc

SEQ ID NO: 48661 - DNA, 25 bp, Canis familiaris
aacgggagaggcagaccaacccatc

SEQ ID NO: 48662 - DNA, 25 bp, Canis familiaris
aacgaggtggagggccgagacgcca

SEQ ID NO: 48663 - DNA, 25 bp, Canis familiaris
aacgagtgcgtgtgcgacgagggct

SEQ ID NO: 48664 - DNA, 25 bp, Canis familiaris
aacgagtgcaagcagctgtccgagt

SEQ ID NO: 48665 - DNA, 25 bp, Canis familiaris
aacgtggaaggcctgtatctgatcg

SEQ ID NO: 48666 - DNA, 25 bp, Canis familiaris
aacgtggaccagacttactactact

SEQ ID NO: 48667 - DNA, 25 bp, Canis familiaris
aagcctggaagtattattaattcta

SEQ ID NO: 48668 - DNA, 25 bp, Canis familiaris
aacccagacttcataaccagcttct

SEQ ID NO: 48669 - DNA, 25 bp, Canis familiaris
aacgctcaggttataacaactgacg

SEQ ID NO: 48670 - DNA, 25 bp, Canis familiaris
aacccagagtttccgaagcttgagc

SEQ ID NO: 48671 - DNA, 25 bp, Canis familiaris
aacccaagtgttccgaagcttgagc

SEQ ID NO: 48672 - DNA, 25 bp, Canis familiaris
aacccaatcgctacttcaagtgtga

SEQ ID NO: 48673 - DNA, 25 bp, Canis familiaris
aactggaatcacccttcagagctgt

SEQ ID NO: 48674 - DNA, 25 bp, Canis familiaris
aacgacagtcaccatgctgtacctt

SEQ ID NO: 48675 - DNA, 25 bp, Canis familiaris
aacgcacagagccggcagaggcttc

SEQ ID NO: 48676 - DNA, 25 bp, Canis familiaris
aacgcatggggctcaagatgttgat

SEQ ID NO: 48677 - DNA, 25 bp, Canis familiaris
aactgatgagaacccaggatgtcaa

SEQ ID NO: 48678 - DNA, 25 bp, Canis familiaris
aagcgaggatacacaggtgctaatc

SEQ ID NO: 48679 - DNA, 25 bp, Canis familiaris
aacggagatgattacaggtgtgttc

SEQ ID NO: 48680 - DNA, 25 bp, Canis familiaris
aacggccagtggtctgcagtgtgcc

SEQ ID NO: 48681 - DNA, 25 bp, Canis familiaris
aagacccgacgtgaatgctgccgtc

SEQ ID NO: 48682 - DNA, 25 bp, Canis familiaris
aaccccgaagctgaggggcagctcc

SEQ ID NO: 48683 - DNA, 25 bp, Canis familiaris
aacctgggaactgtgggtgccgttg

SEQ ID NO: 48684 - DNA, 25 bp, Canis familiaris
aacgctgggaacggtagtggcctgg

SEQ ID NO: 48685 - DNA, 25 bp, Canis familiaris
aaccagtccgagagtcttggcgtgg

SEQ ID NO: 48686 - DNA, 25 bp, Canis familiaris
aacgtctcgcgagagtccgagcagg

SEQ ID NO: 48687 - DNA, 25 bp, Canis familiaris
aacgtgcacgtgaaagctctgtagc

SEQ ID NO: 48688 - DNA, 25 bp, Canis familiaris
aatgggcaggtgtagagcaatgcat

SEQ ID NO: 48689 - DNA, 25 bp, Canis familiaris
aacggcgtgcattatcaacatcata

SEQ ID NO: 48690 - DNA, 25 bp, Canis familiaris
aacgagggcacaccaatcacaatct

SEQ ID NO: 48691 - DNA, 25 bp, Canis familiaris
aacgtgagtgattccctccagattg

SEQ ID NO: 48692 - DNA, 25 bp, Canis familiaris
aacgtggctaaacctcactcaaagt

SEQ ID NO: 48693 - DNA, 25 bp, Canis familiaris
aactgtcgctttttttctacaagat

SEQ ID NO: 48694 - DNA, 25 bp, Canis familiaris
aactgtctgttcatttcttagctta

SEQ ID NO: 48695 - DNA, 25 bp, Canis familiaris
aacgtatgttttattgatctgcttc

SEQ ID NO: 48696 - DNA, 25 bp, Canis familiaris
aacgctggtgtttgatttcctgtgt

SEQ ID NO: 48697 - DNA, 25 bp, Canis familiaris
aacgcggttgggatctattggccta

SEQ ID NO: 48698 - DNA, 25 bp, Canis familiaris
aacggtttggagaccacatctggtt

SEQ ID NO: 48699 - DNA, 25 bp, Canis familiaris
aacggtcgtggaggccgtgcaggtt

SEQ ID NO: 48700 - DNA, 25 bp, Canis familiaris
aatcgagcatcgtgtggcggttcgt

SEQ ID NO: 48701 - DNA, 25 bp, Canis familiaris
aaccagcacaggaggaggtccgcta

SEQ ID NO: 48702 - DNA, 25 bp, Canis familiaris
aacccatactggtgagaggccttat

SEQ ID NO: 48703 - DNA, 25 bp, Canis familiaris
aagcccaagggcttcagaaccttca

SEQ ID NO: 48704 - DNA, 25 bp, Canis familiaris
aaccgaaggtcacagatacttgttc

SEQ ID NO: 48705 - DNA, 25 bp, Canis familiaris
aaccctcgactctgagtacggttct

SEQ ID NO: 48706 - DNA, 25 bp, Canis familiaris
aaccaccggccagatttcaggaact

SEQ ID NO: 48707 - DNA, 25 bp, Canis familiaris
aacccctgtgttgctttcatgggac

SEQ ID NO: 48708 - DNA, 25 bp, Canis familiaris
aaccccagccttgtcttctggggct

SEQ ID NO: 48709 - DNA, 25 bp, Canis familiaris
aacccaagcaccccatttctatggg

SEQ ID NO: 48710 - DNA, 25 bp, Canis familiaris
aaccgggacaatccaattttcagtg

SEQ ID NO: 48711 - DNA, 25 bp, Canis familiaris
aagcttttacaggataattttagtg

SEQ ID NO: 48712 - DNA, 25 bp, Canis familiaris
aacccttaagagaaatgtttatcag

SEQ ID NO: 48713 - DNA, 25 bp, Canis familiaris
aaccctttccacagagttcattcaa

SEQ ID NO: 48714 - DNA, 25 bp, Canis familiaris
aacgctttctcaggctcgagttaat

SEQ ID NO: 48715 - DNA, 25 bp, Canis familiaris
aacgcgttcgcagttgcagcgattg

SEQ ID NO: 48716 - DNA, 25 bp, Canis familiaris
aactggctctccactgagcagagac

SEQ ID NO: 48717 - DNA, 25 bp, Canis familiaris
aactggttccacgtgccagagtctt

SEQ ID NO: 48718 - DNA, 25 bp, Canis familiaris
aactggattccataaagattttcta

SEQ ID NO: 48719 - DNA, 25 bp, Canis familiaris
aagatattaccatacaaaatccttg

SEQ ID NO: 48720 - DNA, 25 bp, Canis familiaris
aagacattagtatccaacatgcata

SEQ ID NO: 48721 - DNA, 25 bp, Canis familiaris
aacctgtcactatccaatcagtcat

SEQ ID NO: 48722 - DNA, 25 bp, Canis familiaris
aacctgtctcaaacaagaagttctt

SEQ ID NO: 48723 - DNA, 25 bp, Canis familiaris
aaccagtgctgaatcttggggtact

SEQ ID NO: 48724 - DNA, 25 bp, Canis familiaris
aacgactgcgatacttaaggatcca

SEQ ID NO: 48725 - DNA, 25 bp, Canis familiaris
aacgcaacgattataaggtgctcta

SEQ ID NO: 48726 - DNA, 25 bp, Canis familiaris
aagcggaggtgttctaaggctgccc

SEQ ID NO: 48727 - DNA, 25 bp, Canis familiaris
aacgagcagtttagctgggtgtccc

SEQ ID NO: 48728 - DNA, 25 bp, Canis familiaris
aacgggctagtaggggtggccagcg

SEQ ID NO: 48729 - DNA, 25 bp, Canis familiaris
aagcagactcaagaagggggcccgt

SEQ ID NO: 48730 - DNA, 25 bp, Canis familiaris
aagctgacccacaaaatggaggcca

SEQ ID NO: 48731 - DNA, 25 bp, Canis familiaris
aagcaaggacctcaaccagatgcca

SEQ ID NO: 48732 - DNA, 25 bp, Canis familiaris
aacgaggtcgtggcaaccgatgtcc

SEQ ID NO: 48733 - DNA, 25 bp, Canis familiaris
aacgcagggcttgaacttagaccct

SEQ ID NO: 48734 - DNA, 25 bp, Canis familiaris
aacgcacgtgttcataatttgcact

SEQ ID NO: 48735 - DNA, 25 bp, Canis familiaris
aacgaagtcttcctgagtcttccgt

SEQ ID NO: 48736 - DNA, 25 bp, Canis familiaris
aacgaagttcatatccattcccagc

SEQ ID NO: 48737 - DNA, 25 bp, Canis familiaris
aacggattggcatggtcattcacca

SEQ ID NO: 48738 - DNA, 25 bp, Canis familiaris
aactggatcatgtcagaactgctta

SEQ ID NO: 48739 - DNA, 25 bp, Canis familiaris
aagcttgaagcctagacgatgtaca

SEQ ID NO: 48740 - DNA, 25 bp, Canis familiaris
aagcttgacgcaccaagcggaactg

SEQ ID NO: 48741 - DNA, 25 bp, Canis familiaris
aagcgtcacaaaaagcgtggcatct

SEQ ID NO: 48742 - DNA, 25 bp, Canis familiaris
aagcctgaaagccaagcttgcgccc

SEQ ID NO: 48743 - DNA, 25 bp, Canis familiaris
aacctgaaactggagccctgatacc

SEQ ID NO: 48744 - DNA, 25 bp, Canis familiaris
aacgttgacgtgtagcacttaaaca

SEQ ID NO: 48745 - DNA, 25 bp, Canis familiaris
aacgttccctgatcaagattcacca

SEQ ID NO: 48746 - DNA, 25 bp, Canis familiaris
aacgtgtccacttaaatcattctct

SEQ ID NO: 48747 - DNA, 25 bp, Canis familiaris
aacgttcattctggacattctcttc

SEQ ID NO: 48748 - DNA, 25 bp, Canis familiaris
aacgattgaatcggcctctgactct

SEQ ID NO: 48749 - DNA, 25 bp, Canis familiaris
aacgattaaagtcctgcatgatctg

SEQ ID NO: 48750 - DNA, 25 bp, Canis familiaris
aacgactcaaactcgaatctcctca

SEQ ID NO: 48751 - DNA, 25 bp, Canis familiaris
aacgtcacagctacagtcaaatctc

SEQ ID NO: 48752 - DNA, 25 bp, Canis familiaris
aacggcacagatccggaagatgtca

SEQ ID NO: 48753 - DNA, 25 bp, Canis familiaris
aaccgccagctcctggacaagtatg

SEQ ID NO: 48754 - DNA, 25 bp, Canis familiaris
aacctgcagctcttctggaacatgt

SEQ ID NO: 48755 - DNA, 25 bp, Canis familiaris
aacctgacattgctacagtgcaata

SEQ ID NO: 48756 - DNA, 25 bp, Canis familiaris
aacctggttgtgatattgcaaccta

SEQ ID NO: 48757 - DNA, 25 bp, Canis familiaris
aacctggtgatgcttgaggaaaaaa

SEQ ID NO: 48758 - DNA, 25 bp, Canis familiaris
aacctgctgcctgttgtaaaaataa

SEQ ID NO: 48759 - DNA, 25 bp, Canis familiaris
aacctctcctgtttgtgaccaaaat

SEQ ID NO: 48760 - DNA, 25 bp, Canis familiaris
aacgtcggcgtattggccttggaag

SEQ ID NO: 48761 - DNA, 25 bp, Canis familiaris
aactgggctccttatgacccgaaag

SEQ ID NO: 48762 - DNA, 25 bp, Canis familiaris
aactgtggcctttggatacccagac

SEQ ID NO: 48763 - DNA, 25 bp, Canis familiaris
aacgtatggctcacgatgacatccg

SEQ ID NO: 48764 - DNA, 25 bp, Canis familiaris
aacggtgttgcatcgatacaggcag

SEQ ID NO: 48765 - DNA, 25 bp, Canis familiaris
aacgttgtacaaagaagcaggctgt

SEQ ID NO: 48766 - DNA, 25 bp, Canis familiaris
aacgttttcagaagatgcccgtgag

SEQ ID NO: 48767 - DNA, 25 bp, Canis familiaris
aacgttttgcagccaacgtcgtcga

SEQ ID NO: 48768 - DNA, 25 bp, Canis familiaris
aacggcgcttgcgcaagagccgtcg

SEQ ID NO: 48769 - DNA, 25 bp, Canis familiaris
aacgtgtcagtgggcaggaccttcc

SEQ ID NO: 48770 - DNA, 25 bp, Canis familiaris
aacgtgtctctgggggattaatctt

SEQ ID NO: 48771 - DNA, 25 bp, Canis familiaris
aacggtctcatcagtgtgaacagtg

SEQ ID NO: 48772 - DNA, 25 bp, Canis familiaris
aacggtgctgatctgtggaaatttt

SEQ ID NO: 48773 - DNA, 25 bp, Canis familiaris
aactggctcagtcctgggagtttgg

SEQ ID NO: 48774 - DNA, 25 bp, Canis familiaris
aactggatcagttatggggtgtctg

SEQ ID NO: 48775 - DNA, 25 bp, Canis familiaris
aactggagagcgcatggtgggcctg

SEQ ID NO: 48776 - DNA, 25 bp, Canis familiaris
aactggagagcggtgctgagcggcg

SEQ ID NO: 48777 - DNA, 25 bp, Canis familiaris
aactggatggagctctggggctgtc

SEQ ID NO: 48778 - DNA, 25 bp, Canis familiaris
aacggagcgcagcctggaggaggcc

SEQ ID NO: 48779 - DNA, 25 bp, Canis familiaris
aacgtgcacgaggtgaaggaccaca

SEQ ID NO: 48780 - DNA, 25 bp, Canis familiaris
aacggattatcagtaaagacccaga

SEQ ID NO: 48781 - DNA, 25 bp, Canis familiaris
aacggactcacaggaaaggcgagaa

SEQ ID NO: 48782 - DNA, 25 bp, Canis familiaris
aacgggctgccttataagtgatgag

SEQ ID NO: 48783 - DNA, 25 bp, Canis familiaris
aacgggcaggtgttcagcctgctga

SEQ ID NO: 48784 - DNA, 25 bp, Canis familiaris
aagcggtgctgggttcactttgagt

SEQ ID NO: 48785 - DNA, 25 bp, Canis familiaris
aacgtggcatcttttcacttggcat

SEQ ID NO: 48786 - DNA, 25 bp, Canis familiaris
aacgagcctcttaacacactgtgct

SEQ ID NO: 48787 - DNA, 25 bp, Canis familiaris
aacggccaaggcaaccattatgtgt

SEQ ID NO: 48788 - DNA, 25 bp, Canis familiaris
aacccgaagagttcacttttgctat

SEQ ID NO: 48789 - DNA, 25 bp, Canis familiaris
aacccgttttgagcattttcacata

SEQ ID NO: 48790 - DNA, 25 bp, Canis familiaris
aacgtcgtgatttaaatctttacag

SEQ ID NO: 48791 - DNA, 25 bp, Canis familiaris
aacgtgtgattttaaatccttacag

SEQ ID NO: 48792 - DNA, 25 bp, Canis familiaris
aacgtggttctctccacgtgtacgt

SEQ ID NO: 48793 - DNA, 25 bp, Canis familiaris
aaccatactttctaccagaggaacg

SEQ ID NO: 48794 - DNA, 25 bp, Canis familiaris
aacgcatcagcgtctactacaacga

SEQ ID NO: 48795 - DNA, 25 bp, Canis familiaris
aagcgacagtgagtacgaggccgac

SEQ ID NO: 48796 - DNA, 25 bp, Canis familiaris
aacgaagatgtgactcgtgccgcca

SEQ ID NO: 48797 - DNA, 25 bp, Canis familiaris
aagcgaaattggccttgacagattc

SEQ ID NO: 48798 - DNA, 25 bp, Canis familiaris
aacgtcaccagacctgtacaaggcc

SEQ ID NO: 48799 - DNA, 25 bp, Canis familiaris
aacgtcaccagacactgaacaggcc

SEQ ID NO: 48800 - DNA, 25 bp, Canis familiaris
aacgcgcaaggacggctgaggcggc

SEQ ID NO: 48801 - DNA, 25 bp, Canis familiaris
aaccgcaagtgctccgtgtgcggct

SEQ ID NO: 48802 - DNA, 25 bp, Canis familiaris
aaccctgagctgttccagcttcggc

SEQ ID NO: 48803 - DNA, 25 bp, Canis familiaris
aacccgcagtgaatgtcgctgttcc

SEQ ID NO: 48804 - DNA, 25 bp, Canis familiaris
aacccaagtatactgtgtgaaccca

SEQ ID NO: 48805 - DNA, 25 bp, Canis familiaris
caacgaaactttcatcggactccgc

SEQ ID NO: 48806 - DNA, 25 bp, Canis familiaris
aacgaggatttactatgcggacttc

SEQ ID NO: 48807 - DNA, 25 bp, Canis familiaris
aacggcttattggtcagggaattct

SEQ ID NO: 48808 - DNA, 25 bp, Canis familiaris
aaccgttattggacacatggtctta

SEQ ID NO: 48809 - DNA, 25 bp, Canis familiaris
aacccgttgtggacacatcttctgc

SEQ ID NO: 48810 - DNA, 25 bp, Canis familiaris
aacctcaattgtttcaagcgtcttg

SEQ ID NO: 48811 - DNA, 25 bp, Canis familiaris
aacctctcttggaaaacagtctggc

SEQ ID NO: 48812 - DNA, 25 bp, Canis familiaris
aaccctcgtgtttatcctgactggt

SEQ ID NO: 48813 - DNA, 25 bp, Canis familiaris
aaccctctgatttatagcctacgga

SEQ ID NO: 48814 - DNA, 25 bp, Canis familiaris
aaccctctgttaatgacccagttgc

SEQ ID NO: 48815 - DNA, 25 bp, Canis familiaris
aaccgcgagaagatgacccagatca

SEQ ID NO: 48816 - DNA, 25 bp, Canis familiaris
aacgccaggaacagattgccaagag

SEQ ID NO: 48817 - DNA, 25 bp, Canis familiaris
aacgccaggaacagattgccaagag

SEQ ID NO: 48818 - DNA, 25 bp, Canis familiaris
aacgctagtagtaagcacgccacgg

SEQ ID NO: 48819 - DNA, 25 bp, Canis familiaris
aatcgtagcatacttcaatcaggat

SEQ ID NO: 48820 - DNA, 25 bp, Canis familiaris
aacgtcactatgtatcctcagttcc

SEQ ID NO: 48821 - DNA, 25 bp, Canis familiaris
aacgtctccgaaacatccttttgag

SEQ ID NO: 48822 - DNA, 25 bp, Canis familiaris
aagcctacccaagcttcttcttggg

SEQ ID NO: 48823 - DNA, 25 bp, Canis familiaris
aagccccttcaagatccgagttggg

SEQ ID NO: 48824 - DNA, 25 bp, Canis familiaris
aagcccttttacaactggagaaatg

SEQ ID NO: 48825 - DNA, 25 bp, Canis familiaris
aagccctcttaccacaggggtctat

SEQ ID NO: 48826 - DNA, 25 bp, Canis familiaris
aaccgttctcctatggatggtcgat

SEQ ID NO: 48827 - DNA, 25 bp, Canis familiaris
aaccctccctctatgtatacttgag

SEQ ID NO: 48828 - DNA, 25 bp, Canis familiaris
aagccttacccttggatcatacttt

SEQ ID NO: 48829 - DNA, 25 bp, Canis familiaris
aaccccagcccttgaatcattaatc

SEQ ID NO: 48830 - DNA, 25 bp, Canis familiaris
aaccccctattatacattatgatct

SEQ ID NO: 48831 - DNA, 25 bp, Canis familiaris
aacccttctagtaaatattatctat

SEQ ID NO: 48832 - DNA, 25 bp, Canis familiaris
aacccctgcatagccagaattacca

SEQ ID NO: 48833 - DNA, 25 bp, Canis familiaris
aaccagccatgctttcggaataatc

SEQ ID NO: 48834 - DNA, 25 bp, Canis familiaris
aaccaccggttgtctgaagaactgc

SEQ ID NO: 48835 - DNA, 25 bp, Canis familiaris
aacccctagttgcctgggagacaag

SEQ ID NO: 48836 - DNA, 25 bp, Canis familiaris
aacccattcacccctggtgagaacg

SEQ ID NO: 48837 - DNA, 25 bp, Canis familiaris
aacccattctcctgctggaaaagcg

SEQ ID NO: 48838 - DNA, 25 bp, Canis familiaris
aacccaccaagctgcgtatttacga

SEQ ID NO: 48839 - DNA, 25 bp, Canis familiaris
aacccccaagctgtatctttattat

SEQ ID NO: 48840 - DNA, 25 bp, Canis familiaris
aatccacccaaggtgtttgataatt

SEQ ID NO: 48841 - DNA, 25 bp, Canis familiaris
aaccatcgaatcgcttgggcatcaa

SEQ ID NO: 48842 - DNA, 25 bp, Canis familiaris
aacctctaagttatgaggctcagag

SEQ ID NO: 48843 - DNA, 25 bp, Canis familiaris
aaccatttagttaattctctccagg

SEQ ID NO: 48844 - DNA, 25 bp, Canis familiaris
aaccatttttattcattcctacagg

SEQ ID NO: 48845 - DNA, 25 bp, Canis familiaris
aaccactttatgtagcagtctcagc

SEQ ID NO: 48846 - DNA, 25 bp, Canis familiaris
aaccctttagtctttgctcacgagg

SEQ ID NO: 48847 - DNA, 25 bp, Canis familiaris
aaccctttgggaatttgcactcagt

SEQ ID NO: 48848 - DNA, 25 bp, Canis familiaris
aacccgtcgcaggaagggcctgagt

SEQ ID NO: 48849 - DNA, 25 bp, Canis familiaris
aaccttcccagcggagaggctatgg

SEQ ID NO: 48850 - DNA, 25 bp, Canis familiaris
aacgatgtcccaggaggtgtgctca

SEQ ID NO: 48851 - DNA, 25 bp, Canis familiaris
aaccgtcatcacttggaatgttccc

SEQ ID NO: 48852 - DNA, 25 bp, Canis familiaris
aaccagcctcagcagggagggcctt

SEQ ID NO: 48853 - DNA, 25 bp, Canis familiaris
aaccagccataccagcttaggcctt

SEQ ID NO: 48854 - DNA, 25 bp, Canis familiaris
aacccacaaggccttcagagacttt

SEQ ID NO: 48855 - DNA, 25 bp, Canis familiaris
aacctgaccaggtaggcagagcagt

SEQ ID NO: 48856 - DNA, 25 bp, Canis familiaris
aacgcaaccatgatgaggctgtgat

SEQ ID NO: 48857 - DNA, 25 bp, Canis familiaris
aaccatacgtgtggcatgtgcatgc

SEQ ID NO: 48858 - DNA, 25 bp, Canis familiaris
aaccatgaacgcggcgtgtgcctgt

SEQ ID NO: 48859 - DNA, 25 bp, Canis familiaris
aaccatactggcggcctgtgagtgg

SEQ ID NO: 48860 - DNA, 25 bp, Canis familiaris
aaccaggggcgcaacctgatggcgc

SEQ ID NO: 48861 - DNA, 25 bp, Canis familiaris
aaccaggcaagcgtacctctagagc

SEQ ID NO: 48862 - DNA, 25 bp, Canis familiaris
aaccggcagaaggagctcttggagc

SEQ ID NO: 48863 - DNA, 25 bp, Canis familiaris
aacccagtggcaaggctctagtatc

SEQ ID NO: 48864 - DNA, 25 bp, Canis familiaris
aacccagtggctttctgctaagtct

SEQ ID NO: 48865 - DNA, 25 bp, Canis familiaris
aacccggagctgctgtgcgggacat

SEQ ID NO: 48866 - DNA, 25 bp, Canis familiaris
aaccttgactcacctgggggtcata

SEQ ID NO: 48867 - DNA, 25 bp, Canis familiaris
aaccgagaatcccattggagggcaa

SEQ ID NO: 48868 - DNA, 25 bp, Canis familiaris
aaccaggaacctaagtgacagccag

SEQ ID NO: 48869 - DNA, 25 bp, Canis familiaris
aacccaaccaggaagatggcaccat

SEQ ID NO: 48870 - DNA, 25 bp, Canis familiaris
aacgccacacaaggaagggccttca

SEQ ID NO: 48871 - DNA, 25 bp, Canis familiaris
aacgggccaaagacagagcgcttcc

SEQ ID NO: 48872 - DNA, 25 bp, Canis familiaris
aacggtgcgaacacagaccatcaac

SEQ ID NO: 48873 - DNA, 25 bp, Canis familiaris
aaccggagagacatcgagcgcacag

SEQ ID NO: 48874 - DNA, 25 bp, Canis familiaris
aaccttagagaagccctacagccag

SEQ ID NO: 48875 - DNA, 25 bp, Canis familiaris
aacctaagatgaatccggagacgga

SEQ ID NO: 48876 - DNA, 25 bp, Canis familiaris
aacctgaaatactcggtggcagaaa

SEQ ID NO: 48877 - DNA, 25 bp, Canis familiaris
aacctcaggacctctcctggaatac

SEQ ID NO: 48878 - DNA, 25 bp, Canis familiaris
aacctcgtaatctcccatggtaggg

SEQ ID NO: 48879 - DNA, 25 bp, Canis familiaris
aaccacgtgaactccctgggagaga

SEQ ID NO: 48880 - DNA, 25 bp, Canis familiaris
aaggccccacacaccactgtggggt

SEQ ID NO: 48881 - DNA, 25 bp, Canis familiaris
aacctggccaactgccagctggagg

SEQ ID NO: 48882 - DNA, 25 bp, Canis familiaris
aagcccccaagatgcgacgtagaac

SEQ ID NO: 48883 - DNA, 25 bp, Canis familiaris
aagcccccaagatgcgacgtagaac

SEQ ID NO: 48884 - DNA, 25 bp, Canis familiaris
aaccctcccgaccatgaggtggtag

SEQ ID NO: 48885 - DNA, 25 bp, Canis familiaris
aaccctgcgccttttgatggggtca

SEQ ID NO: 48886 - DNA, 25 bp, Canis familiaris
aaccctgccctcttggagagggagg

SEQ ID NO: 48887 - DNA, 25 bp, Canis familiaris
aaccgccccgcagagaggagggtgc

SEQ ID NO: 48888 - DNA, 25 bp, Canis familiaris
aacccaggccgagggagaacaggct

SEQ ID NO: 48889 - DNA, 25 bp, Canis familiaris
aacctatgacatcacctgaaacggc

SEQ ID NO: 48890 - DNA, 25 bp, Canis familiaris
aacccagacatcgacctggagtccc

SEQ ID NO: 48891 - DNA, 25 bp, Canis familiaris
aaccacagtcacagtctgtttccaa

SEQ ID NO: 48892 - DNA, 25 bp, Canis familiaris
aacccagtaactgcttgttatatca

SEQ ID NO: 48893 - DNA, 25 bp, Canis familiaris
aacgacatttactacttcttctctc

SEQ ID NO: 48894 - DNA, 25 bp, Canis familiaris
aagcttttgtacttcttgttcatta

SEQ ID NO: 48895 - DNA, 25 bp, Canis familiaris
aacccttggcacagctttgtgttcc

SEQ ID NO: 48896 - DNA, 25 bp, Canis familiaris
aaccgttgcctcaagtttgtgtctt

SEQ ID NO: 48897 - DNA, 25 bp, Canis familiaris
aacggggactcaaattgtcttctcg

SEQ ID NO: 48898 - DNA, 25 bp, Canis familiaris
aacgtttggtcaataatttctcttg

SEQ ID NO: 48899 - DNA, 25 bp, Canis familiaris
aacgtttgagccacaggttatcctg

SEQ ID NO: 48900 - DNA, 25 bp, Canis familiaris
aacgtttgagcgtccgggagtcaca

SEQ ID NO: 48901 - DNA, 25 bp, Canis familiaris
aagcgtttggttggcttcaggcgac

SEQ ID NO: 48902 - DNA, 25 bp, Canis familiaris
aacgtttgttgtgcctcgaggagtc

SEQ ID NO: 48903 - DNA, 25 bp, Canis familiaris
aacgtatatttgtcttcttgaggat

SEQ ID NO: 48904 - DNA, 25 bp, Canis familiaris
aacgcgattatatattcttcagatt

SEQ ID NO: 48905 - DNA, 25 bp, Canis familiaris
aatccagtctttgttttaatcttag

SEQ ID NO: 48906 - DNA, 25 bp, Canis familiaris
aatgcccttttgtggaagaatttag

SEQ ID NO: 48907 - DNA, 25 bp, Canis familiaris
aaccctattccctgcacagaaatgt

SEQ ID NO: 48908 - DNA, 25 bp, Canis familiaris
aaccctcccaaatatctaaattctg

SEQ ID NO: 48909 - DNA, 25 bp, Canis familiaris
aagccctggccagaacactttaact

SEQ ID NO: 48910 - DNA, 25 bp, Canis familiaris
aaccttgatggaaaacctgtcttca

SEQ ID NO: 48911 - DNA, 25 bp, Canis familiaris
aacctgctttgcaaagatctgcgtc

SEQ ID NO: 48912 - DNA, 25 bp, Canis familiaris
aacctgcgatgacagagtccgcctt

SEQ ID NO: 48913 - DNA, 25 bp, Canis familiaris
aaccttgtgcagaaagtgctacact

SEQ ID NO: 48914 - DNA, 25 bp, Canis familiaris
aacctatcaacttcagctgtaacat

SEQ ID NO: 48915 - DNA, 25 bp, Canis familiaris
aacgtacacactttgctgctactgt

SEQ ID NO: 48916 - DNA, 25 bp, Canis familiaris
aacctcagccgccatatggctattt

SEQ ID NO: 48917 - DNA, 25 bp, Canis familiaris
aaccaaccccacacatcagtgtttt

SEQ ID NO: 48918 - DNA, 25 bp, Canis familiaris
aaccaaaccgcattcgtgtggattt

SEQ ID NO: 48919 - DNA, 25 bp, Canis familiaris
aacgcagacatcggcattcctggta

SEQ ID NO: 48920 - DNA, 25 bp, Canis familiaris
aacgaacacagtatctctcttgacc

SEQ ID NO: 48921 - DNA, 25 bp, Canis familiaris
aacgctagcaattattctcctatca

SEQ ID NO: 48922 - DNA, 25 bp, Canis familiaris
aacgctagcaattattctcctatca

SEQ ID NO: 48923 - DNA, 25 bp, Canis familiaris
aacgcgacgatggactttctacagt

SEQ ID NO: 48924 - DNA, 25 bp, Canis familiaris
aacctgcaatgtggatctgttttcc

SEQ ID NO: 48925 - DNA, 25 bp, Canis familiaris
aacgcagaatgtggcgcgcttaccc

SEQ ID NO: 48926 - DNA, 25 bp, Canis familiaris
aacctgaatggtcccattccatccc

SEQ ID NO: 48927 - DNA, 25 bp, Canis familiaris
aaccgaaggtcatcatcatccaggc

SEQ ID NO: 48928 - DNA, 25 bp, Canis familiaris
aaccagatcaggcagccttccgaga

SEQ ID NO: 48929 - DNA, 25 bp, Canis familiaris
aaccaaagacccattcctcaagaag

SEQ ID NO: 48930 - DNA, 25 bp, Canis familiaris
aaccaaaacaccataacactacaat

SEQ ID NO: 48931 - DNA, 25 bp, Canis familiaris
aacccaaaagccgataacagctgct

SEQ ID NO: 48932 - DNA, 25 bp, Canis familiaris
aacccaaaccgttcatagcagatgt

SEQ ID NO: 48933 - DNA, 25 bp, Canis familiaris
aacccaagccttaaatcgatgtgta

SEQ ID NO: 48934 - DNA, 25 bp, Canis familiaris
aacccacaccttagacagctgatgg

SEQ ID NO: 48935 - DNA, 25 bp, Canis familiaris
aacccacaatttagatatcatgatc

SEQ ID NO: 48936 - DNA, 25 bp, Canis familiaris
aaccgcatcaagtttgtacagtgaa

SEQ ID NO: 48937 - DNA, 25 bp, Canis familiaris
aaccgccagccaggatttcagtgaa

SEQ ID NO: 48938 - DNA, 25 bp, Canis familiaris
aagccatgtagccatctgcttgtca

SEQ ID NO: 48939 - DNA, 25 bp, Canis familiaris
aaccagctagtcttcctgcagaaga

SEQ ID NO: 48940 - DNA, 25 bp, Canis familiaris
aaccagtgatgttacctaactcagc

SEQ ID NO: 48941 - DNA, 25 bp, Canis familiaris
aaccaatgtgtctcccagaactatt

SEQ ID NO: 48942 - DNA, 25 bp, Canis familiaris
aagccggtgcgctgctgaaaacgat

SEQ ID NO: 48943 - DNA, 25 bp, Canis familiaris
aagccctggcccggcataaaaggag

SEQ ID NO: 48944 - DNA, 25 bp, Canis familiaris
aagccgtccctgagcaaaaatgggc

SEQ ID NO: 48945 - DNA, 25 bp, Canis familiaris
aaccggcacctcttcaaagacaagg

SEQ ID NO: 48946 - DNA, 25 bp, Canis familiaris
aacctgcccacttttaggtgaagct

SEQ ID NO: 48947 - DNA, 25 bp, Canis familiaris
aaccatccgccttttggggaagcat

SEQ ID NO: 48948 - DNA, 25 bp, Canis familiaris
aaccactcctggttctgggtggagc

SEQ ID NO: 48949 - DNA, 25 bp, Canis familiaris
aacccgccattgggcggagctggga

SEQ ID NO: 48950 - DNA, 25 bp, Canis familiaris
aagcgcccagcgtggaagcagggga

SEQ ID NO: 48951 - DNA, 25 bp, Canis familiaris
aagcccggctgctgcgggagaaggt

SEQ ID NO: 48952 - DNA, 25 bp, Canis familiaris
aacccgggtactttgacagatggct

SEQ ID NO: 48953 - DNA, 25 bp, Canis familiaris
aacgccgggatcccaggaagcagtc

SEQ ID NO: 48954 - DNA, 25 bp, Canis familiaris
aacccagctggacccaaataaatct

SEQ ID NO: 48955 - DNA, 25 bp, Canis familiaris
aacctcgctgggaccaaagcacttt

SEQ ID NO: 48956 - DNA, 25 bp, Canis familiaris
aacgcctgttacacacaaactgttg

SEQ ID NO: 48957 - DNA, 25 bp, Canis familiaris
aaccgctgtcaagataaacactgtt

SEQ ID NO: 48958 - DNA, 25 bp, Canis familiaris
aaccaggctaatatcaaacatttga

SEQ ID NO: 48959 - DNA, 25 bp, Canis familiaris
aaccgcctaatataaagcatctcta

SEQ ID NO: 48960 - DNA, 25 bp, Canis familiaris
aagcccctataatcagaggccacct

SEQ ID NO: 48961 - DNA, 25 bp, Canis familiaris
aacccgcaaaagtgacgcagaccta

SEQ ID NO: 48962 - DNA, 25 bp, Canis familiaris
aaccccacaaagtgacacagtacaa

SEQ ID NO: 48963 - DNA, 25 bp, Canis familiaris
aaccctacggaatcatgcaagtcga

SEQ ID NO: 48964 - DNA, 25 bp, Canis familiaris
aacccttccacaagactgaagtatg

SEQ ID NO: 48965 - DNA, 25 bp, Canis familiaris
aacgattcttactcagtgtgatgta

SEQ ID NO: 48966 - DNA, 25 bp, Canis familiaris
aacgctatgtgtaccgctttgtgtg

SEQ ID NO: 48967 - DNA, 25 bp, Canis familiaris
aacgactggatgatagtttgctata

SEQ ID NO: 48968 - DNA, 25 bp, Canis familiaris
aacgacaagaggagcttctgccact

SEQ ID NO: 48969 - DNA, 25 bp, Canis familiaris
aacgaaagagagctccatctgccct

SEQ ID NO: 48970 - DNA, 25 bp, Canis familiaris
aacgacgaggagctccacaagctgc

SEQ ID NO: 48971 - DNA, 25 bp, Canis familiaris
aacccgggagcagacatctcagatg

SEQ ID NO: 48972 - DNA, 25 bp, Canis familiaris
aacgttgggacggccatcagcaaga

SEQ ID NO: 48973 - DNA, 25 bp, Canis familiaris
aacgatttcaggctccatacaagga

SEQ ID NO: 48974 - DNA, 25 bp, Canis familiaris
aacgcatgttcggcttttacagtta

SEQ ID NO: 48975 - DNA, 25 bp, Canis familiaris
aaccagtcacccttgattgacattt

SEQ ID NO: 48976 - DNA, 25 bp, Canis familiaris
aacgcgtgctttttattccatttat

SEQ ID NO: 48977 - DNA, 25 bp, Canis familiaris
aaccagtttctcattgtccatttag

SEQ ID NO: 48978 - DNA, 25 bp, Canis familiaris
aacgcagtgttccatatttaattct

SEQ ID NO: 48979 - DNA, 25 bp, Canis familiaris
aagacactgtcccgacttaaagtca

SEQ ID NO: 48980 - DNA, 25 bp, Canis familiaris
aagcacaatatcccaccttaaattt

SEQ ID NO: 48981 - DNA, 25 bp, Canis familiaris
aagcatcttgactccggaaggtgtt

SEQ ID NO: 48982 - DNA, 25 bp, Canis familiaris
aagctgctggaaagggcgaagggag

SEQ ID NO: 48983 - DNA, 25 bp, Canis familiaris
aacctgcgaatttccaagaggtggt

SEQ ID NO: 48984 - DNA, 25 bp, Canis familiaris
aacctgcggctttaacaactgtaat

SEQ ID NO: 48985 - DNA, 25 bp, Canis familiaris
aaccctggtgtctaaagccttggat

SEQ ID NO: 48986 - DNA, 25 bp, Canis familiaris
aaccttgttggtttcaggctctgga

SEQ ID NO: 48987 - DNA, 25 bp, Canis familiaris
aacctctgtcagatgcaaagatttg

SEQ ID NO: 48988 - DNA, 25 bp, Canis familiaris
aacctgcacttgttgccaagtcttc

SEQ ID NO: 48989 - DNA, 25 bp, Canis familiaris
aaccaatgtgtgttgagaatctttc

SEQ ID NO: 48990 - DNA, 25 bp, Canis familiaris
aacgcagatgttctggagatttctt

SEQ ID NO: 48991 - DNA, 25 bp, Canis familiaris
aacgcggaacgggatgtttctctcg

SEQ ID NO: 48992 - DNA, 25 bp, Canis familiaris
aaccgggaagcctgtgatgacttca

SEQ ID NO: 48993 - DNA, 25 bp, Canis familiaris
aatccgggaacttggatgtcctccg

SEQ ID NO: 48994 - DNA, 25 bp, Canis familiaris
aatagcaggtacttcttttcgacgc

SEQ ID NO: 48995 - DNA, 25 bp, Canis familiaris
aatgaacttgtcactttcggaccca

SEQ ID NO: 48996 - DNA, 25 bp, Canis familiaris
aacgcagccatgttcttgagtcaat

SEQ ID NO: 48997 - DNA, 25 bp, Canis familiaris
aacgccctgagttctgagtcattga

SEQ ID NO: 48998 - DNA, 25 bp, Canis familiaris
aacccgctgaccttagagatgtgat

SEQ ID NO: 48999 - DNA, 25 bp, Canis familiaris
aacccagtggcctgcagacagatgt

SEQ ID NO: 49000 - DNA, 25 bp, Canis familiaris
aacccagcgttatgtacatgatgtc

SEQ ID NO: 49001 - DNA, 25 bp, Canis familiaris
aacccgtgattttgtattgaatgct

SEQ ID NO: 49002 - DNA, 25 bp, Canis familiaris
aaccctgtgagagtccatattgaga

SEQ ID NO: 49003 - DNA, 25 bp, Canis familiaris
aacccatctggcttccaatggaatt

SEQ ID NO: 49004 - DNA, 25 bp, Canis familiaris
aaccgtctgcatttccgatgtggtt

SEQ ID NO: 49005 - DNA, 25 bp, Canis familiaris
aaccagctctgcagttgatggattt

SEQ ID NO: 49006 - DNA, 25 bp, Canis familiaris
aaccagtgggtgcctgagggtcttt

SEQ ID NO: 49007 - DNA, 25 bp, Canis familiaris
aaccaagtgggccttgcggtgtgtg

SEQ ID NO: 49008 - DNA, 25 bp, Canis familiaris
aacccaatgtgggtgctggggtggt

SEQ ID NO: 49009 - DNA, 25 bp, Canis familiaris
aacctctatctcggtgtggtgctgt

SEQ ID NO: 49010 - DNA, 25 bp, Canis familiaris
aacccatcgagcagctgctgggctt

SEQ ID NO: 49011 - DNA, 25 bp, Canis familiaris
aaccgccagatcaacctggagctct

SEQ ID NO: 49012 - DNA, 25 bp, Canis familiaris
aacccccaggaccatatgatgatta

SEQ ID NO: 49013 - DNA, 25 bp, Canis familiaris
aaccccagatgcagccagagtgaat

SEQ ID NO: 49014 - DNA, 25 bp, Canis familiaris
aacccagcagagtgcaagcagcagt

SEQ ID NO: 49015 - DNA, 25 bp, Canis familiaris
aacccacagaaactcatcacaaaaa

SEQ ID NO: 49016 - DNA, 25 bp, Canis familiaris
aaccatctaacattgctgatcaaga

SEQ ID NO: 49017 - DNA, 25 bp, Canis familiaris
catcaacatgctttctgtacatcct

SEQ ID NO: 49018 - DNA, 25 bp, Canis familiaris
aacgcacacttgattcatgttggct

SEQ ID NO: 49019 - DNA, 25 bp, Canis familiaris
aaccagcactgtaattatagctact

SEQ ID NO: 49020 - DNA, 25 bp, Canis familiaris
aaccaagtaaaaaggctgacatgta

SEQ ID NO: 49021 - DNA, 25 bp, Canis familiaris
aaccacagctgtcaaggggccagtc

SEQ ID NO: 49022 - DNA, 25 bp, Canis familiaris
aaccatcgcctacaggtgaggcctc

SEQ ID NO: 49023 - DNA, 25 bp, Canis familiaris
aaccaccgcttgcggtagttctcct

SEQ ID NO: 49024 - DNA, 25 bp, Canis familiaris
gaaagcccagttcaggtagttaact

SEQ ID NO: 49025 - DNA, 25 bp, Canis familiaris
aataccaagcttcacgatagttttt

SEQ ID NO: 49026 - DNA, 25 bp, Canis familiaris
aacccaagcttttctatacttatat

SEQ ID NO: 49027 - DNA, 25 bp, Canis familiaris
aacccttcttctaccagacataaga

SEQ ID NO: 49028 - DNA, 25 bp, Canis familiaris
aaccactacatactccaattaaaga

SEQ ID NO: 49029 - DNA, 25 bp, Canis familiaris
aacctccaaactcaattatctggac

SEQ ID NO: 49030 - DNA, 25 bp, Canis familiaris
aaccccacaccacagatttgagaaa

SEQ ID NO: 49031 - DNA, 25 bp, Canis familiaris
aagccccataaccagtgtctttaag

SEQ ID NO: 49032 - DNA, 25 bp, Canis familiaris
aatcccaaccagccagtttttaatg

SEQ ID NO: 49033 - DNA, 25 bp, Canis familiaris
aaccaagaccccgcttcaataatgt

SEQ ID NO: 49034 - DNA, 25 bp, Canis familiaris
aaccaatacacaaaccttaaagctg

SEQ ID NO: 49035 - DNA, 25 bp, Canis familiaris
aaccctgacacaaacctctgaagag

SEQ ID NO: 49036 - DNA, 25 bp, Canis familiaris
aaccaccaccaaagcttgctcaatt

SEQ ID NO: 49037 - DNA, 25 bp, Canis familiaris
aacccaaagcaaggtcattcatttc

SEQ ID NO: 49038 - DNA, 25 bp, Canis familiaris
aacccatgtagtatgtcatcttttt

SEQ ID NO: 49039 - DNA, 25 bp, Canis familiaris
aacccatgcatttgtgctctttttt

SEQ ID NO: 49040 - DNA, 25 bp, Canis familiaris
aaccctgatttatctatatgtttgt

SEQ ID NO: 49041 - DNA, 25 bp, Canis familiaris
aaccctgacttctatattactttgt

SEQ ID NO: 49042 - DNA, 25 bp, Canis familiaris
aaccactgaatttcttgttttatgt

SEQ ID NO: 49043 - DNA, 25 bp, Canis familiaris
aaccctcagaagtttgtgtgtctag

SEQ ID NO: 49044 - DNA, 25 bp, Canis familiaris
aagccttcgaagttggagcatacca

SEQ ID NO: 49045 - DNA, 25 bp, Canis familiaris
aagctcctggaggcctgaggaacgc

SEQ ID NO: 49046 - DNA, 25 bp, Canis familiaris
aaccctggggccgatgagaccagaa

SEQ ID NO: 49047 - DNA, 25 bp, Canis familiaris
aatccctttggagcattgacgtgaa

SEQ ID NO: 49048 - DNA, 25 bp, Canis familiaris
aaccgattaggaggtaacatgtgta

SEQ ID NO: 49049 - DNA, 25 bp, Canis familiaris
aaccaagctagatcttctactagtt

SEQ ID NO: 49050 - DNA, 25 bp, Canis familiaris
aaccatactacatcaactcctaatt

SEQ ID NO: 49051 - DNA, 25 bp, Canis familiaris
aaccagagccacacaagtagctaag

SEQ ID NO: 49052 - DNA, 25 bp, Canis familiaris
aacctagccctggacttacatacat

SEQ ID NO: 49053 - DNA, 25 bp, Canis familiaris
aaccaattccagaacattacatact

SEQ ID NO: 49054 - DNA, 25 bp, Canis familiaris
aaccgaatcgccatttatgaactcc

SEQ ID NO: 49055 - DNA, 25 bp, Canis familiaris
aaccgcctggtctgttatgaaccga

SEQ ID NO: 49056 - DNA, 25 bp, Canis familiaris
aacccgcttctctggtatgaacatc

SEQ ID NO: 49057 - DNA, 25 bp, Canis familiaris
aacccgcttctctggtatgaacatc

SEQ ID NO: 49058 - DNA, 25 bp, Canis familiaris
aacccgcttctctggtatgaacatc

SEQ ID NO: 49059 - DNA, 25 bp, Canis familiaris
aacccgcttctctggtatgaacatc

SEQ ID NO: 49060 - DNA, 25 bp, Canis familiaris
aaccaaggtccaaggctcaagaatt

SEQ ID NO: 49061 - DNA, 25 bp, Canis familiaris
aaccactggtgccaggaacacgaga

SEQ ID NO: 49062 - DNA, 25 bp, Canis familiaris
aacctttggcatggtgaacaggaaa

SEQ ID NO: 49063 - DNA, 25 bp, Canis familiaris
aacctggctccagataactggcata

SEQ ID NO: 49064 - DNA, 25 bp, Canis familiaris
aaccgtgctcctaatactgcagaat

SEQ ID NO: 49065 - DNA, 25 bp, Canis familiaris
aaccgctgctgcctgaatcaagagg

SEQ ID NO: 49066 - DNA, 25 bp, Canis familiaris
aaccttgctgccccaaggtaggctc

SEQ ID NO: 49067 - DNA, 25 bp, Canis familiaris
aaccattgacgcccacagaggaggc

SEQ ID NO: 49068 - DNA, 25 bp, Canis familiaris
aaccttgacttaacagaatggacac

SEQ ID NO: 49069 - DNA, 25 bp, Canis familiaris
aacctctatcgttccaagtacacac

SEQ ID NO: 49070 - DNA, 25 bp, Canis familiaris
gaaccctacgaacagaaaagctcct

SEQ ID NO: 49071 - DNA, 25 bp, Canis familiaris
aaccgttctgaacagttaacactgt

SEQ ID NO: 49072 - DNA, 25 bp, Canis familiaris
aaccgtgcacggtgatttaagccgt

SEQ ID NO: 49073 - DNA, 25 bp, Canis familiaris
aaccagtacgtacgcttcgacagcg

SEQ ID NO: 49074 - DNA, 25 bp, Canis familiaris
aaccggagtagctgcttcgacagcg

SEQ ID NO: 49075 - DNA, 25 bp, Canis familiaris
aaccggcggatgctgctgctcttcg

SEQ ID NO: 49076 - DNA, 25 bp, Canis familiaris
aacgctgtgggaagtctgcactctt

SEQ ID NO: 49077 - DNA, 25 bp, Canis familiaris
aacctgtggaggattggctcccaat

SEQ ID NO: 49078 - DNA, 25 bp, Canis familiaris
aaccaggtaggatttctgctcccgt

SEQ ID NO: 49079 - DNA, 25 bp, Canis familiaris
aaccggggagttatcatcaccatgt

SEQ ID NO: 49080 - DNA, 25 bp, Canis familiaris
aaccaggtggagatcaagcccgcag

SEQ ID NO: 49081 - DNA, 25 bp, Canis familiaris
aaccaggtggatgtgtggggcgcgc

SEQ ID NO: 49082 - DNA, 25 bp, Canis familiaris
aacgccagccagtcttgatgggggc

SEQ ID NO: 49083 - DNA, 25 bp, Canis familiaris
aacccaagcaacatcacctgtgtgc

SEQ ID NO: 49084 - DNA, 25 bp, Canis familiaris
aacgccaagtacatctgcctggcta

SEQ ID NO: 49085 - DNA, 25 bp, Canis familiaris
aaggccaggtccactgcttaaagcc

SEQ ID NO: 49086 - DNA, 25 bp, Canis familiaris
aagaccggtcatctcgactagaacc

SEQ ID NO: 49087 - DNA, 25 bp, Canis familiaris
aagcttcggtctcttcaaagcactc

SEQ ID NO: 49088 - DNA, 25 bp, Canis familiaris
aagcttgtacttcttcacgaggtca

SEQ ID NO: 49089 - DNA, 25 bp, Canis familiaris
caagctttcttacctgtaacaggcc

SEQ ID NO: 49090 - DNA, 25 bp, Canis familiaris
aacctgtataatcctgttacccagc

SEQ ID NO: 49091 - DNA, 25 bp, Canis familiaris
aacctgttaaccatgtaccagtgat

SEQ ID NO: 49092 - DNA, 25 bp, Canis familiaris
caacctccaaatatttaccgtgtct

SEQ ID NO: 49093 - DNA, 25 bp, Canis familiaris
aacccaatacatatagtgccctagt

SEQ ID NO: 49094 - DNA, 25 bp, Canis familiaris
aacccaattataattcatatcctca

SEQ ID NO: 49095 - DNA, 25 bp, Canis familiaris
aaccacatcctcagttgaacctggg

SEQ ID NO: 49096 - DNA, 25 bp, Canis familiaris
aaccacatccacctgctgttaaagg

SEQ ID NO: 49097 - DNA, 25 bp, Canis familiaris
aaccacataggtctgttcaagatgg

SEQ ID NO: 49098 - DNA, 25 bp, Canis familiaris
aaccaccagtgtcattcttctgttc

SEQ ID NO: 49099 - DNA, 25 bp, Canis familiaris
aacccatagtcacatactttcagtc

SEQ ID NO: 49100 - DNA, 25 bp, Canis familiaris
aagcccaaaatcatggtttcagttc

SEQ ID NO: 49101 - DNA, 25 bp, Canis familiaris
aagcccaaacacagatgagttaatt

SEQ ID NO: 49102 - DNA, 25 bp, Canis familiaris
aaccccagtcacagattgatgaact

SEQ ID NO: 49103 - DNA, 25 bp, Canis familiaris
aaccccagtattgtagaaagcttat

SEQ ID NO: 49104 - DNA, 25 bp, Canis familiaris
aaccatcacctaacccaaagagctt

SEQ ID NO: 49105 - DNA, 25 bp, Canis familiaris
aagccccctatacacagagaggtat

SEQ ID NO: 49106 - DNA, 25 bp, Canis familiaris
aacccggcattcagctcaagctgtt

SEQ ID NO: 49107 - DNA, 25 bp, Canis familiaris
aacccggcattcagctcaaggctgt

SEQ ID NO: 49108 - DNA, 25 bp, Canis familiaris
aacccggcattcagctcaaggctgt

SEQ ID NO: 49109 - DNA, 25 bp, Canis familiaris
aacccggcattcagctcaaggctgt

SEQ ID NO: 49110 - DNA, 25 bp, Canis familiaris
aacccggcattcagctcaaggctgt

SEQ ID NO: 49111 - DNA, 25 bp, Canis familiaris
aacccggcattcagctcaaggctgt

SEQ ID NO: 49112 - DNA, 25 bp, Canis familiaris
aagcccctgaccaggataggctggg

SEQ ID NO: 49113 - DNA, 25 bp, Canis familiaris
aaccccttcttgcagatgactgctt

SEQ ID NO: 49114 - DNA, 25 bp, Canis familiaris
aacctgttatgcttgggatacctct

SEQ ID NO: 49115 - DNA, 25 bp, Canis familiaris
aagcctgttgggactcgcaaattct

SEQ ID NO: 49116 - DNA, 25 bp, Canis familiaris
aagcttgatcatgggcatatgcaga

SEQ ID NO: 49117 - DNA, 25 bp, Canis familiaris
aaccccatgctgacatgtgcgacgc

SEQ ID NO: 49118 - DNA, 25 bp, Canis familiaris
aagcctcgacagacagctggacaca

SEQ ID NO: 49119 - DNA, 25 bp, Canis familiaris
aagccatctaacaactggtacccta

SEQ ID NO: 49120 - DNA, 25 bp, Canis familiaris
aaccatctagtagctggttccctcc

SEQ ID NO: 49121 - DNA, 25 bp, Canis familiaris
aaccatctactagcagacgacctac

SEQ ID NO: 49122 - DNA, 25 bp, Canis familiaris
aaccatttgcttgtgagcgtctcca

SEQ ID NO: 49123 - DNA, 25 bp, Canis familiaris
aacctgattgtaggggcaccccagc

SEQ ID NO: 49124 - DNA, 25 bp, Canis familiaris
aacctatccagaggaaaccctatct

SEQ ID NO: 49125 - DNA, 25 bp, Canis familiaris
aaccttacgtggtgtgcaacctctt

SEQ ID NO: 49126 - DNA, 25 bp, Canis familiaris
aaccggagggcataggctaccgctt

SEQ ID NO: 49127 - DNA, 25 bp, Canis familiaris
aagccgcaaaggcagcaggctaccg

SEQ ID NO: 49128 - DNA, 25 bp, Canis familiaris
aagccgagaaccggggctgtcgagc

SEQ ID NO: 49129 - DNA, 25 bp, Canis familiaris
aaccggaactggaggtctgtgcctt

SEQ ID NO: 49130 - DNA, 25 bp, Canis familiaris
aagccggaaatggtggttccacgct

SEQ ID NO: 49131 - DNA, 25 bp, Canis familiaris
aagctagggagggcggagtccccat

SEQ ID NO: 49132 - DNA, 25 bp, Canis familiaris
aatgctgggtccgtagggtaccaat

SEQ ID NO: 49133 - DNA, 25 bp, Canis familiaris
aagcatgggatccctgtaggtgccc

SEQ ID NO: 49134 - DNA, 25 bp, Canis familiaris
aagcttggagcccgtgcaaggcttg

SEQ ID NO: 49135 - DNA, 25 bp, Canis familiaris
aagctataacacaggcccacttttt

SEQ ID NO: 49136 - DNA, 25 bp, Canis familiaris
aagctgtccaaatgttccttttgtt

SEQ ID NO: 49137 - DNA, 25 bp, Canis familiaris
aagctgtaaatattgtacctcgtta

SEQ ID NO: 49138 - DNA, 25 bp, Canis familiaris
aagcttccagtaactgacccttgtc

SEQ ID NO: 49139 - DNA, 25 bp, Canis familiaris
aaccattcgtagacgacctgcttct

SEQ ID NO: 49140 - DNA, 25 bp, Canis familiaris
aaccatatcagtagtaccaagttcc

SEQ ID NO: 49141 - DNA, 25 bp, Canis familiaris
aaccaacagtcaggattcacattac

SEQ ID NO: 49142 - DNA, 25 bp, Canis familiaris
aacctacagcagcgatatcgtcccc

SEQ ID NO: 49143 - DNA, 25 bp, Canis familiaris
aaccgactgagccacagaggtgcct

SEQ ID NO: 49144 - DNA, 25 bp, Canis familiaris
aaccaactgagccatctaggtgctt

SEQ ID NO: 49145 - DNA, 25 bp, Canis familiaris
aagcccatctacaactaggtgcgtg

SEQ ID NO: 49146 - DNA, 25 bp, Canis familiaris
aacccacaagcgcctgggtggaggc

SEQ ID NO: 49147 - DNA, 25 bp, Canis familiaris
aagccaccaaccctggcttggtatt

SEQ ID NO: 49148 - DNA, 25 bp, Canis familiaris
aagccacctagtctgtggtattttg

SEQ ID NO: 49149 - DNA, 25 bp, Canis familiaris
aaccacccagtgtatcggttctgtc

SEQ ID NO: 49150 - DNA, 25 bp, Canis familiaris
aaccacccagttactgttttcagct

SEQ ID NO: 49151 - DNA, 25 bp, Canis familiaris
aaccccaagttggcaatttgtcatt

SEQ ID NO: 49152 - DNA, 25 bp, Canis familiaris
aacccaaagttggcatttgtcatca

SEQ ID NO: 49153 - DNA, 25 bp, Canis familiaris
aacccaggagattgacatttctatt

SEQ ID NO: 49154 - DNA, 25 bp, Canis familiaris
aacccactattaccatagtctttgg

SEQ ID NO: 49155 - DNA, 25 bp, Canis familiaris
aacccactccattgccatggtttat

SEQ ID NO: 49156 - DNA, 25 bp, Canis familiaris
aacccagctctcacctgagtggtga

SEQ ID NO: 49157 - DNA, 25 bp, Canis familiaris
aaccccttaatcttggtggtgtcag

SEQ ID NO: 49158 - DNA, 25 bp, Canis familiaris
aaccctattacagtcggtgacctcg

SEQ ID NO: 49159 - DNA, 25 bp, Canis familiaris
aaccccactatagttggtagatctc

SEQ ID NO: 49160 - DNA, 25 bp, Canis familiaris
aaccccagctcatgtgagggtgccc

SEQ ID NO: 49161 - DNA, 25 bp, Canis familiaris
aacccagaggcagttagcgggcccg

SEQ ID NO: 49162 - DNA, 25 bp, Canis familiaris
aacccacaggactatccagggtctc

SEQ ID NO: 49163 - DNA, 25 bp, Canis familiaris
aaccgcacaggttatctagaactca

SEQ ID NO: 49164 - DNA, 25 bp, Canis familiaris
aagccgagcggttgatggaagttga

SEQ ID NO: 49165 - DNA, 25 bp, Canis familiaris
aagccgagcggttgatggaagttga

SEQ ID NO: 49166 - DNA, 25 bp, Canis familiaris
aagcctgaccagaagtgcgtagttt

SEQ ID NO: 49167 - DNA, 25 bp, Canis familiaris
aacctgcgcaagatgggggttcccg

SEQ ID NO: 49168 - DNA, 25 bp, Canis familiaris
aagcctccaaaggtggcggcattgc

SEQ ID NO: 49169 - DNA, 25 bp, Canis familiaris
aacctggagatgtgggcgagagtgc

SEQ ID NO: 49170 - DNA, 25 bp, Canis familiaris
aaccacagaaggaagcccaagagct

SEQ ID NO: 49171 - DNA, 25 bp, Canis familiaris
aaccaaagagccagccagagcgagc

SEQ ID NO: 49172 - DNA, 25 bp, Canis familiaris
aaccctttgccattgacaagctgac

SEQ ID NO: 49173 - DNA, 25 bp, Canis familiaris
aaccctttgatcatgtaatctgtgt

SEQ ID NO: 49174 - DNA, 25 bp, Canis familiaris
aacctgtgatttgatgatatattga

SEQ ID NO: 49175 - DNA, 25 bp, Canis familiaris
aaccattgtttcttcaattgggact

SEQ ID NO: 49176 - DNA, 25 bp, Canis familiaris
aaccttgttgtatcacattcgttgc

SEQ ID NO: 49177 - DNA, 25 bp, Canis familiaris
aacctcagttttaccatctcaatgt

SEQ ID NO: 49178 - DNA, 25 bp, Canis familiaris
aaccttttattgaacaggcaatgca

SEQ ID NO: 49179 - DNA, 25 bp, Canis familiaris
aacctgtttttgccctgtatatgca

SEQ ID NO: 49180 - DNA, 25 bp, Canis familiaris
aacctgtttgcatttcaattacatt

SEQ ID NO: 49181 - DNA, 25 bp, Canis familiaris
aaccgttaatgcttcaggattcttc

SEQ ID NO: 49182 - DNA, 25 bp, Canis familiaris
aaccgtaattcccagtgattgcacg

SEQ ID NO: 49183 - DNA, 25 bp, Canis familiaris
aagccgcatagacccttgtattgct

SEQ ID NO: 49184 - DNA, 25 bp, Canis familiaris
aacctgcaacagccttggtaactac

SEQ ID NO: 49185 - DNA, 25 bp, Canis familiaris
aaccgagatgagattggcatggctt

SEQ ID NO: 49186 - DNA, 25 bp, Canis familiaris
aaccggtggtttagctgagctcagt

SEQ ID NO: 49187 - DNA, 25 bp, Canis familiaris
aaccaggtgtttgggcaagatgaga

SEQ ID NO: 49188 - DNA, 25 bp, Canis familiaris
aaccgagatgctcaggtccatgctg

SEQ ID NO: 49189 - DNA, 25 bp, Canis familiaris
aagcctagatgagagttcaattgag

SEQ ID NO: 49190 - DNA, 25 bp, Canis familiaris
aagccacaggagaacattgcacatt

SEQ ID NO: 49191 - DNA, 25 bp, Canis familiaris
aacccgtgcagttatcatgccattt

SEQ ID NO: 49192 - DNA, 25 bp, Canis familiaris
aaccatcgtggtcataacatctttg

SEQ ID NO: 49193 - DNA, 25 bp, Canis familiaris
aacctttggacgagagcatcatatt

SEQ ID NO: 49194 - DNA, 25 bp, Canis familiaris
aacccttttcagagccattatgtgg

SEQ ID NO: 49195 - DNA, 25 bp, Canis familiaris
aaccctatttcagaagactagtcca

SEQ ID NO: 49196 - DNA, 25 bp, Canis familiaris
aacccatattctcacaacacaatgt

SEQ ID NO: 49197 - DNA, 25 bp, Canis familiaris
aaccctattcatcagacaaagtgcc

SEQ ID NO: 49198 - DNA, 25 bp, Canis familiaris
aagctccttttggggaaatggagca

SEQ ID NO: 49199 - DNA, 25 bp, Canis familiaris
aaccgctttgagccaggaactggaa

SEQ ID NO: 49200 - DNA, 25 bp, Canis familiaris
aaccctttgcatccaaaccgagaag

SEQ ID NO: 49201 - DNA, 25 bp, Canis familiaris
aaccaaatctgctcaaattgcgggt

SEQ ID NO: 49202 - DNA, 25 bp, Canis familiaris
aaccgaactatggacatctctgcct

SEQ ID NO: 49203 - DNA, 25 bp, Canis familiaris
aaccatagactattatttgcttcta

SEQ ID NO: 49204 - DNA, 25 bp, Canis familiaris
aacctgaagttcaaaagcgatctag

SEQ ID NO: 49205 - DNA, 25 bp, Canis familiaris
aaccgatgccttaatgaaggtatgg

SEQ ID NO: 49206 - DNA, 25 bp, Canis familiaris
aacctgctgcagaatttatatcgta

SEQ ID NO: 49207 - DNA, 25 bp, Canis familiaris
aagcctgtcagtttttaggtcattt

SEQ ID NO: 49208 - DNA, 25 bp, Canis familiaris
aagccgacagtcctaaagtatttgt

SEQ ID NO: 49209 - DNA, 25 bp, Canis familiaris
aaccgccgtctctaatattttgtgt

SEQ ID NO: 49210 - DNA, 25 bp, Canis familiaris
aaccctcttgtgtaattgctttgtg

SEQ ID NO: 49211 - DNA, 25 bp, Canis familiaris
aaccttctcaattcatgttctagtg

SEQ ID NO: 49212 - DNA, 25 bp, Canis familiaris
aacctatagctttgcatctctcaca

SEQ ID NO: 49213 - DNA, 25 bp, Canis familiaris
aacctcatcactggaatgttccaac

SEQ ID NO: 49214 - DNA, 25 bp, Canis familiaris
aaccacaacgtgaattttgcaaaca

SEQ ID NO: 49215 - DNA, 25 bp, Canis familiaris
aaccctacgagggctgtgtgcaacc

SEQ ID NO: 49216 - DNA, 25 bp, Canis familiaris
aagccctacggtacatcggcaagct

SEQ ID NO: 49217 - DNA, 25 bp, Canis familiaris
aagcccaccggagtaggatcagagt

SEQ ID NO: 49218 - DNA, 25 bp, Canis familiaris
aagccccagggagaggacaagaggc

SEQ ID NO: 49219 - DNA, 25 bp, Canis familiaris
aaccccagggataagacaaagcctg

SEQ ID NO: 49220 - DNA, 25 bp, Canis familiaris
aaccccggagaaggacaatcagacg

SEQ ID NO: 49221 - DNA, 25 bp, Canis familiaris
aaccccagttggcagaagcacagac

SEQ ID NO: 49222 - DNA, 25 bp, Canis familiaris
aacccgcgttgggacccatgagaat

SEQ ID NO: 49223 - DNA, 25 bp, Canis familiaris
aaccctgggtaggcacccatcatga

SEQ ID NO: 49224 - DNA, 25 bp, Canis familiaris
aaccctatggttgccgacatgagtc

SEQ ID NO: 49225 - DNA, 25 bp, Canis familiaris
aaccctgtgttttccatgactgagg

SEQ ID NO: 49226 - DNA, 25 bp, Canis familiaris
aacctttgtctttgccagaagagtg

SEQ ID NO: 49227 - DNA, 25 bp, Canis familiaris
aacctttcctctggacagtccaggt

SEQ ID NO: 49228 - DNA, 25 bp, Canis familiaris
aacctgctcttctgaaaaccaagtt

SEQ ID NO: 49229 - DNA, 25 bp, Canis familiaris
aagcctgtcttctgtaaaactgacc

SEQ ID NO: 49230 - DNA, 25 bp, Canis familiaris
aaccgtgcttctttcatgtcaggcg

SEQ ID NO: 49231 - DNA, 25 bp, Canis familiaris
aacctgggtgactcatggatgctcg

SEQ ID NO: 49232 - DNA, 25 bp, Canis familiaris
aacctggatgtacttatgctccgcc

SEQ ID NO: 49233 - DNA, 25 bp, Canis familiaris
aacctggtggacatcatccagcaga

SEQ ID NO: 49234 - DNA, 25 bp, Canis familiaris
aagccacggggcatatgacagacag

SEQ ID NO: 49235 - DNA, 25 bp, Canis familiaris
aagcccgttgccaactgacagaagc

SEQ ID NO: 49236 - DNA, 25 bp, Canis familiaris
aagctccgtcatcttggactggata

SEQ ID NO: 49237 - DNA, 25 bp, Canis familiaris
aaccatctgcttcctatgaattcga

SEQ ID NO: 49238 - DNA, 25 bp, Canis familiaris
aaccatctgcttcctatgaattcga

SEQ ID NO: 49239 - DNA, 25 bp, Canis familiaris
aaccatctgcttcctatgaattcga

SEQ ID NO: 49240 - DNA, 25 bp, Canis familiaris
aaccatctgcttcctatgaattcga

SEQ ID NO: 49241 - DNA, 25 bp, Canis familiaris
aaccatctgcttcctatgaattcga

SEQ ID NO: 49242 - DNA, 25 bp, Canis familiaris
aaccatctgcttcctatgaattcga

SEQ ID NO: 49243 - DNA, 25 bp, Canis familiaris
aaccatctcacagggatacttctga

SEQ ID NO: 49244 - DNA, 25 bp, Canis familiaris
aacctctataatggaactctttcaa

SEQ ID NO: 49245 - DNA, 25 bp, Canis familiaris
aagcccttaattcacttacacatct

SEQ ID NO: 49246 - DNA, 25 bp, Canis familiaris
aagcccgtaattctgttggacatcg

SEQ ID NO: 49247 - DNA, 25 bp, Canis familiaris
aaccacttatctatttttacatcag

SEQ ID NO: 49248 - DNA, 25 bp, Canis familiaris
aacctctttgctgtttttgatacct

SEQ ID NO: 49249 - DNA, 25 bp, Canis familiaris
aacctctattgtacttgatttcttc

SEQ ID NO: 49250 - DNA, 25 bp, Canis familiaris
aacctgtctgtgtgttggtacctct

SEQ ID NO: 49251 - DNA, 25 bp, Canis familiaris
aaccttcatggctgaatgatccccc

SEQ ID NO: 49252 - DNA, 25 bp, Canis familiaris
aagccttctggctttgctaatggcc

SEQ ID NO: 49253 - DNA, 25 bp, Canis familiaris
aagccagttgggttctaattcaagg

SEQ ID NO: 49254 - DNA, 25 bp, Canis familiaris
aagccgttgccttctatgaattagc

SEQ ID NO: 49255 - DNA, 25 bp, Canis familiaris
aacctttgcccagagactgctgagg

SEQ ID NO: 49256 - DNA, 25 bp, Canis familiaris
aacctgtctctgcagtagatcttgc

SEQ ID NO: 49257 - DNA, 25 bp, Canis familiaris
aaccatgagccagcagttgtgtgtg

SEQ ID NO: 49258 - DNA, 25 bp, Canis familiaris
aagcctagctcatcttgctgttgat

SEQ ID NO: 49259 - DNA, 25 bp, Canis familiaris
aagccatatgctctcattcatcttt

SEQ ID NO: 49260 - DNA, 25 bp, Canis familiaris
aagcctctgcatttcaaagcacttg

SEQ ID NO: 49261 - DNA, 25 bp, Canis familiaris
aagcttcatttataccatatctgga

SEQ ID NO: 49262 - DNA, 25 bp, Canis familiaris
aacctttctaggttcatctctggcc

SEQ ID NO: 49263 - DNA, 25 bp, Canis familiaris
aacctgcctaagattctctttctct

SEQ ID NO: 49264 - DNA, 25 bp, Canis familiaris
aaccgcctagcaaattattctccta

SEQ ID NO: 49265 - DNA, 25 bp, Canis familiaris
aacctcactccaagattatggcccc

SEQ ID NO: 49266 - DNA, 25 bp, Canis familiaris
aaccaccttaggatcagtgcctatc

SEQ ID NO: 49267 - DNA, 25 bp, Canis familiaris
aaccaccccagttccagtgatttat

SEQ ID NO: 49268 - DNA, 25 bp, Canis familiaris
aaccaacctagatctgacagcatgt

SEQ ID NO: 49269 - DNA, 25 bp, Canis familiaris
aaccaacactcacagggagcttggc

SEQ ID NO: 49270 - DNA, 25 bp, Canis familiaris
aaccattcaccactactggaactgg

SEQ ID NO: 49271 - DNA, 25 bp, Canis familiaris
aatccttcccttcaggataattaag

SEQ ID NO: 49272 - DNA, 25 bp, Canis familiaris
aagccttccctgaggagtgaatata

SEQ ID NO: 49273 - DNA, 25 bp, Canis familiaris
aagcctgatgccctttggttaggat

SEQ ID NO: 49274 - DNA, 25 bp, Canis familiaris
aagccagcctccatgttgtaaggac

SEQ ID NO: 49275 - DNA, 25 bp, Canis familiaris
aagctacctcctaaactatagtggc

SEQ ID NO: 49276 - DNA, 25 bp, Canis familiaris
aagcttcctaatttactgattctgg

SEQ ID NO: 49277 - DNA, 25 bp, Canis familiaris
aagctctactagaattactatccta

SEQ ID NO: 49278 - DNA, 25 bp, Canis familiaris
aagcttgtcaagaagtaactccaca

SEQ ID NO: 49279 - DNA, 25 bp, Canis familiaris
aagcttgtcaggtcttaatgttatc

SEQ ID NO: 49280 - DNA, 25 bp, Canis familiaris
aagcattgtggacgctctacatagc

SEQ ID NO: 49281 - DNA, 25 bp, Canis familiaris
aagaaggtgagcctgcatttccagc

SEQ ID NO: 49282 - DNA, 25 bp, Canis familiaris
aaccagctggtgatgcacttgtagc

SEQ ID NO: 49283 - DNA, 25 bp, Canis familiaris
aacctgtgggattctgactgtatct

SEQ ID NO: 49284 - DNA, 25 bp, Canis familiaris
aaccttgtacaccgatcatgaactc

SEQ ID NO: 49285 - DNA, 25 bp, Canis familiaris
aagccttctcaagttgtcaggactc

SEQ ID NO: 49286 - DNA, 25 bp, Canis familiaris
aaccatttctcgactgtaggtctcc

SEQ ID NO: 49287 - DNA, 25 bp, Canis familiaris
aacctccatctcaacattgggattg

SEQ ID NO: 49288 - DNA, 25 bp, Canis familiaris
aagccccatgtagagtgtagatgtt

SEQ ID NO: 49289 - DNA, 25 bp, Canis familiaris
aagctggcctgtgctgacactaggc

SEQ ID NO: 49290 - DNA, 25 bp, Canis familiaris
aagcagttctgcagtaactacacct

SEQ ID NO: 49291 - DNA, 25 bp, Canis familiaris
aagcagccttaagcacagtacacct

SEQ ID NO: 49292 - DNA, 25 bp, Canis familiaris
aaccatcttcccgaaggacactctt

SEQ ID NO: 49293 - DNA, 25 bp, Canis familiaris
aaccatattgcaggacaagccaact

SEQ ID NO: 49294 - DNA, 25 bp, Canis familiaris
aaccatacactggcagaggccaccc

SEQ ID NO: 49295 - DNA, 25 bp, Canis familiaris
aaccaagattgcgaaggacacctcc

SEQ ID NO: 49296 - DNA, 25 bp, Canis familiaris
aaccatagaagcgaattgcccctga

SEQ ID NO: 49297 - DNA, 25 bp, Canis familiaris
aaccatagacagtaaccaccctgcc

SEQ ID NO: 49298 - DNA, 25 bp, Canis familiaris
aacctgcaggaaaatccacacccac

SEQ ID NO: 49299 - DNA, 25 bp, Canis familiaris
aacctggtgcatatcatcacccacc

SEQ ID NO: 49300 - DNA, 25 bp, Canis familiaris
aaccagattgagagcatccgcagcc

SEQ ID NO: 49301 - DNA, 25 bp, Canis familiaris
aacctgtgcttgacccaagaccaga

SEQ ID NO: 49302 - DNA, 25 bp, Canis familiaris
aaccatgtgcattggcccagaggga

SEQ ID NO: 49303 - DNA, 25 bp, Canis familiaris
aacctctgtagggccatggctgtat

SEQ ID NO: 49304 - DNA, 25 bp, Canis familiaris
aacctggaacagtctcgtgtgtgct

SEQ ID NO: 49305 - DNA, 25 bp, Canis familiaris
aacctggcaacatcttttgagtttt

SEQ ID NO: 49306 - DNA, 25 bp, Canis familiaris
aaccgcctctcatgtttcatggttt

SEQ ID NO: 49307 - DNA, 25 bp, Canis familiaris
aacctgaccttattttattgcttat

SEQ ID NO: 49308 - DNA, 25 bp, Canis familiaris
aacctgtatctttatctctttttat

SEQ ID NO: 49309 - DNA, 25 bp, Canis familiaris
aagcccaatctatgtcgtgttttca

SEQ ID NO: 49310 - DNA, 25 bp, Canis familiaris
aaccaaatctgatgctactacgttc

SEQ ID NO: 49311 - DNA, 25 bp, Canis familiaris
aaccaaatctgatgctactacgttc

SEQ ID NO: 49312 - DNA, 25 bp, Canis familiaris
aaccgcttcatgccactgaatacgt

SEQ ID NO: 49313 - DNA, 25 bp, Canis familiaris
aaccactgcagatgacagaaactgt

SEQ ID NO: 49314 - DNA, 25 bp, Canis familiaris
aaccagtatgcatagccatacttgt

SEQ ID NO: 49315 - DNA, 25 bp, Canis familiaris
aaccatgcattcaaacctggctggg

SEQ ID NO: 49316 - DNA, 25 bp, Canis familiaris
aatccgcagcaaactgccgtgctgg

SEQ ID NO: 49317 - DNA, 25 bp, Canis familiaris
aaccaggtgcagacacgcagtgctg

SEQ ID NO: 49318 - DNA, 25 bp, Canis familiaris
aaccatggtcttgccaggtgtgcac

SEQ ID NO: 49319 - DNA, 25 bp, Canis familiaris
aagccaagttcttgccaaagtcccg

SEQ ID NO: 49320 - DNA, 25 bp, Canis familiaris
aaccatggggctgccaaagccccct

SEQ ID NO: 49321 - DNA, 25 bp, Canis familiaris
aatcctggggctgtggaacacttcc

SEQ ID NO: 49322 - DNA, 25 bp, Canis familiaris
aacctggggcacagtacattctctc

SEQ ID NO: 49323 - DNA, 25 bp, Canis familiaris
aaccttgaggaacgttttgcagcca

SEQ ID NO: 49324 - DNA, 25 bp, Canis familiaris
aagccttgggactttttgatgtcga

SEQ ID NO: 49325 - DNA, 25 bp, Canis familiaris
aagctccggagctaggtgtgtttcg

SEQ ID NO: 49326 - DNA, 25 bp, Canis familiaris
aagccatgggactaggtatgctcag

SEQ ID NO: 49327 - DNA, 25 bp, Canis familiaris
aaccttgatgagttgctccagccag

SEQ ID NO: 49328 - DNA, 25 bp, Canis familiaris
aagccattggcacttgcttcggctt

SEQ ID NO: 49329 - DNA, 25 bp, Canis familiaris
aacctggagaatcctatccgactgg

SEQ ID NO: 49330 - DNA, 25 bp, Canis familiaris
aaccggcaacatcgttggccaggga

SEQ ID NO: 49331 - DNA, 25 bp, Canis familiaris
aaccgacaagtgacatttccaggag

SEQ ID NO: 49332 - DNA, 25 bp, Canis familiaris
aagcaggcgtttatttctgcagggc

SEQ ID NO: 49333 - DNA, 25 bp, Canis familiaris
aagccaagtattttttcagcaggat

SEQ ID NO: 49334 - DNA, 25 bp, Canis familiaris
aagcgcaagtattacctggccagga

SEQ ID NO: 49335 - DNA, 25 bp, Canis familiaris
aatccaagtaaggcctaccggtgca

SEQ ID NO: 49336 - DNA, 25 bp, Canis familiaris
aagccttggagaaactaccgatgtc

SEQ ID NO: 49337 - DNA, 25 bp, Canis familiaris
aaccttgcctgaaacaaaccactct

SEQ ID NO: 49338 - DNA, 25 bp, Canis familiaris
aaccttggcatgatggccaactccc

SEQ ID NO: 49339 - DNA, 25 bp, Canis familiaris
aaccgtggagggcctggactccaca

SEQ ID NO: 49340 - DNA, 25 bp, Canis familiaris
aaccgttgagctacgatggactccc

SEQ ID NO: 49341 - DNA, 25 bp, Canis familiaris
aagcctttagccagattgcacacct

SEQ ID NO: 49342 - DNA, 25 bp, Canis familiaris
aagccattattgccatggatacagc

SEQ ID NO: 49343 - DNA, 25 bp, Canis familiaris
aagccatggttccttgatgacaaac

SEQ ID NO: 49344 - DNA, 25 bp, Canis familiaris
aagccagaaatccagtatgcaccac

SEQ ID NO: 49345 - DNA, 25 bp, Canis familiaris
aaccagagaacactttcaccctgta

SEQ ID NO: 49346 - DNA, 25 bp, Canis familiaris
aaccaaaccataattttctatgaag

SEQ ID NO: 49347 - DNA, 25 bp, Canis familiaris
aaccagaacctgagctgtctcttgc

SEQ ID NO: 49348 - DNA, 25 bp, Canis familiaris
aaccagaaagcaaggtgttctactt

SEQ ID NO: 49349 - DNA, 25 bp, Canis familiaris
aaccagtactgctgtttcctatctt

SEQ ID NO: 49350 - DNA, 25 bp, Canis familiaris
aaccagtgatccagcttattctttt

SEQ ID NO: 49351 - DNA, 25 bp, Canis familiaris
aaccaggattcaagcccatatttta

SEQ ID NO: 49352 - DNA, 25 bp, Canis familiaris
aaccaagtattagtccattatttca

SEQ ID NO: 49353 - DNA, 25 bp, Canis familiaris
aaccaatgtattctgacttatgatc

SEQ ID NO: 49354 - DNA, 25 bp, Canis familiaris
aaccagttatctatgaattgttcaa

SEQ ID NO: 49355 - DNA, 25 bp, Canis familiaris
aaccagtttccttcaagttgataat

SEQ ID NO: 49356 - DNA, 25 bp, Canis familiaris
aaccatattcccttaagttgatggc

SEQ ID NO: 49357 - DNA, 25 bp, Canis familiaris
aacctgttccaggtcttgttggcgt

SEQ ID NO: 49358 - DNA, 25 bp, Canis familiaris
aagccgttctacatctgtgctaggg

SEQ ID NO: 49359 - DNA, 25 bp, Canis familiaris
aaccagttgtacacagtggcatcct

SEQ ID NO: 49360 - DNA, 25 bp, Canis familiaris
aaccagtctatgaactcagggcttt

SEQ ID NO: 49361 - DNA, 25 bp, Canis familiaris
aagcgtaccattgctcaggactatg

SEQ ID NO: 49362 - DNA, 25 bp, Canis familiaris
aagctcttccatacctaaggctgat

SEQ ID NO: 49363 - DNA, 25 bp, Canis familiaris
aaccttaatatgcccaaccagcatg

SEQ ID NO: 49364 - DNA, 25 bp, Canis familiaris
aacctctgaaattccaaccgaaatg

SEQ ID NO: 49365 - DNA, 25 bp, Canis familiaris
aaccacgcaaattccggacaaaatg

SEQ ID NO: 49366 - DNA, 25 bp, Canis familiaris
aagacacccatttcagttgtaaagg

SEQ ID NO: 49367 - DNA, 25 bp, Canis familiaris
aagagtacacttaagttgaagacac

SEQ ID NO: 49368 - DNA, 25 bp, Canis familiaris
aagctttcacattaaggtaggtctg

SEQ ID NO: 49369 - DNA, 25 bp, Canis familiaris
aagattccacttctttcggatctga

SEQ ID NO: 49370 - DNA, 25 bp, Canis familiaris
aagaacccttcctgatttgactttg

SEQ ID NO: 49371 - DNA, 25 bp, Canis familiaris
aagtcaaccactctagtttaatttg

SEQ ID NO: 49372 - DNA, 25 bp, Canis familiaris
aagtagaacctgttaatcttatttg

SEQ ID NO: 49373 - DNA, 25 bp, Canis familiaris
aagacaaatccttgggtttcattca

SEQ ID NO: 49374 - DNA, 25 bp, Canis familiaris
aagacacaacctttgctttgcctat

SEQ ID NO: 49375 - DNA, 25 bp, Canis familiaris
aagaatgcattcctcagttttcaaa

SEQ ID NO: 49376 - DNA, 25 bp, Canis familiaris
aagccagagatcatggtctcctcaa

SEQ ID NO: 49377 - DNA, 25 bp, Canis familiaris
aatctggggcacagtctcactagac

SEQ ID NO: 49378 - DNA, 25 bp, Canis familiaris
aagctggaggccagatcctcaacct

SEQ ID NO: 49379 - DNA, 25 bp, Canis familiaris
aagctggcggtgagagccgtgacca

SEQ ID NO: 49380 - DNA, 25 bp, Canis familiaris
aagcttggagctccagagactgaga

SEQ ID NO: 49381 - DNA, 25 bp, Canis familiaris
aagcctatcactccagagactgctg

SEQ ID NO: 49382 - DNA, 25 bp, Canis familiaris
aacctcatcaaggccagcacatagg

SEQ ID NO: 49383 - DNA, 25 bp, Canis familiaris
aacctcacacagtctcaaataccag

SEQ ID NO: 49384 - DNA, 25 bp, Canis familiaris
aagccataccagtgccaatactgcg

SEQ ID NO: 49385 - DNA, 25 bp, Canis familiaris
aacctacagagtcgcacgtgaggca

SEQ ID NO: 49386 - DNA, 25 bp, Canis familiaris
aagcctgacacatttgacagtgagg

SEQ ID NO: 49387 - DNA, 25 bp, Canis familiaris
aagccagtacaagtgagccaacgtc

SEQ ID NO: 49388 - DNA, 25 bp, Canis familiaris
aaccaataaagctgacgcacctcct

SEQ ID NO: 49389 - DNA, 25 bp, Canis familiaris
aaccatcataagtcaggcaccacct

SEQ ID NO: 49390 - DNA, 25 bp, Canis familiaris
aagccatcaacttgcaggtccagat

SEQ ID NO: 49391 - DNA, 25 bp, Canis familiaris
aagctctgaacttgacttcaaatgt

SEQ ID NO: 49392 - DNA, 25 bp, Canis familiaris
aagctgtggcacactctgtacattt

SEQ ID NO: 49393 - DNA, 25 bp, Canis familiaris
aacctactctgtacatgctacattt

SEQ ID NO: 49394 - DNA, 25 bp, Canis familiaris
aacctatctattcatgtactctgcc

SEQ ID NO: 49395 - DNA, 25 bp, Canis familiaris
aaccatagctttgtgtgtcttgtca

SEQ ID NO: 49396 - DNA, 25 bp, Canis familiaris
aaccagaggcttgtgtgtcttcttt

SEQ ID NO: 49397 - DNA, 25 bp, Canis familiaris
aacctggcctgtattgtctattttc

SEQ ID NO: 49398 - DNA, 25 bp, Canis familiaris
aaccattgccttatctgttcttgaa

SEQ ID NO: 49399 - DNA, 25 bp, Canis familiaris
aaccatacacttagtacttacgaag

SEQ ID NO: 49400 - DNA, 25 bp, Canis familiaris
aacctagcctaattcatgcctacag

SEQ ID NO: 49401 - DNA, 25 bp, Canis familiaris
aaccttgtgctagttctgaatccta

SEQ ID NO: 49402 - DNA, 25 bp, Canis familiaris
aacctttgaatgaagattgtccata

SEQ ID NO: 49403 - DNA, 25 bp, Canis familiaris
aaccttgctttatgaatgtctctac

SEQ ID NO: 49404 - DNA, 25 bp, Canis familiaris
aacctgtcttcaaacatgttttact

SEQ ID NO: 49405 - DNA, 25 bp, Canis familiaris
aacctgtgtccaaatattgttctcc

SEQ ID NO: 49406 - DNA, 25 bp, Canis familiaris
aacctgtgtccatctacagactctc

SEQ ID NO: 49407 - DNA, 25 bp, Canis familiaris
aacctgaatcctagtgaaatttcca

SEQ ID NO: 49408 - DNA, 25 bp, Canis familiaris
aacctgcaatcctgggataaaccca

SEQ ID NO: 49409 - DNA, 25 bp, Canis familiaris
aaccttcactctttggcgagaaccg

SEQ ID NO: 49410 - DNA, 25 bp, Canis familiaris
aacctactttttgctgcagacctct

SEQ ID NO: 49411 - DNA, 25 bp, Canis familiaris
aacctaagattcttttcaactctct

SEQ ID NO: 49412 - DNA, 25 bp, Canis familiaris
aagcctaggattttactaatttgca

SEQ ID NO: 49413 - DNA, 25 bp, Canis familiaris
aagctgaggaggtttactactatta

SEQ ID NO: 49414 - DNA, 25 bp, Canis familiaris
aagctgagtagtgtccagtcatctt

SEQ ID NO: 49415 - DNA, 25 bp, Canis familiaris
aagctgtgctggattccagcccctt

SEQ ID NO: 49416 - DNA, 25 bp, Canis familiaris
aagcgctgaggattccaactgacct

SEQ ID NO: 49417 - DNA, 25 bp, Canis familiaris
aagctgctgagggttcactctaccc

SEQ ID NO: 49418 - DNA, 25 bp, Canis familiaris
aagccataggccctaactgaccaat

SEQ ID NO: 49419 - DNA, 25 bp, Canis familiaris
aagccctgtcccgaaatgacaaatc

SEQ ID NO: 49420 - DNA, 25 bp, Canis familiaris
aagccctggccctaaaggtgacatg

SEQ ID NO: 49421 - DNA, 25 bp, Canis familiaris
aagtacggctaaaacgtgctacagt

SEQ ID NO: 49422 - DNA, 25 bp, Canis familiaris
aatgtaagtgaatatccagttaatt

SEQ ID NO: 49423 - DNA, 25 bp, Canis familiaris
aagctaaggatacttcgcactttaa

SEQ ID NO: 49424 - DNA, 25 bp, Canis familiaris
aaccacagagatttacatactttta

SEQ ID NO: 49425 - DNA, 25 bp, Canis familiaris
aaccacgcaatataccagctttcgc

SEQ ID NO: 49426 - DNA, 25 bp, Canis familiaris
aacctacaggaatccagctctttta

SEQ ID NO: 49427 - DNA, 25 bp, Canis familiaris
aacctccagaacaaccgtctgactt

SEQ ID NO: 49428 - DNA, 25 bp, Canis familiaris
aagcctatcaagcaggccttctaca

SEQ ID NO: 49429 - DNA, 25 bp, Canis familiaris
aagccttcggaaactctcattacta

SEQ ID NO: 49430 - DNA, 25 bp, Canis familiaris
aacctccggagaacacctgtatctc

SEQ ID NO: 49431 - DNA, 25 bp, Canis familiaris
aacctatctgggacacctggtacgc

SEQ ID NO: 49432 - DNA, 25 bp, Canis familiaris
aacctgcatgggcgatcctggtttc

SEQ ID NO: 49433 - DNA, 25 bp, Canis familiaris
aagcccatgtggtagcccaggggaa

SEQ ID NO: 49434 - DNA, 25 bp, Canis familiaris
aagccacagtagtctgcaggccggt

SEQ ID NO: 49435 - DNA, 25 bp, Canis familiaris
aagccaagctaggatgcagggagtc

SEQ ID NO: 49436 - DNA, 25 bp, Canis familiaris
aacctgagccagggcagcgcagtat

SEQ ID NO: 49437 - DNA, 25 bp, Canis familiaris
aagcctaccacagtcatcgaaatga

SEQ ID NO: 49438 - DNA, 25 bp, Canis familiaris
aagccttcagctattcaacagagag

SEQ ID NO: 49439 - DNA, 25 bp, Canis familiaris
aaccattccttcacaactcagattg

SEQ ID NO: 49440 - DNA, 25 bp, Canis familiaris
aagccaaatctctaaagactcaaat

SEQ ID NO: 49441 - DNA, 25 bp, Canis familiaris
aaccacaagctctattagttcccaa

SEQ ID NO: 49442 - DNA, 25 bp, Canis familiaris
aagcccaagccatttagtgagacct

SEQ ID NO: 49443 - DNA, 25 bp, Canis familiaris
aaccacagcggattctcactggaac

SEQ ID NO: 49444 - DNA, 25 bp, Canis familiaris
aacctgcgcgttcatcacggaatat

SEQ ID NO: 49445 - DNA, 25 bp, Canis familiaris
aacctgcaccttccttggaggattt

SEQ ID NO: 49446 - DNA, 25 bp, Canis familiaris
aagcctgcagcctggtttcagaatt

SEQ ID NO: 49447 - DNA, 25 bp, Canis familiaris
aagactctgctttgcagctattgca

SEQ ID NO: 49448 - DNA, 25 bp, Canis familiaris
aagccatgcatgtctaagtacgcac

SEQ ID NO: 49449 - DNA, 25 bp, Canis familiaris
aagccatgcatgtctaagtacgcac

SEQ ID NO: 49450 - DNA, 25 bp, Canis familiaris
aagctatgctgagaattcccctatt

SEQ ID NO: 49451 - DNA, 25 bp, Canis familiaris
aagccgctgcatgatattgaccctt

SEQ ID NO: 49452 - DNA, 25 bp, Canis familiaris
aagccgctgcatgatattgaccctt

SEQ ID NO: 49453 - DNA, 25 bp, Canis familiaris
aagccgctgcatgatattgaccctt

SEQ ID NO: 49454 - DNA, 25 bp, Canis familiaris
aagcctgataaaatgtgttccctaa

SEQ ID NO: 49455 - DNA, 25 bp, Canis familiaris
aagccttgtgttttttccagcaaat

SEQ ID NO: 49456 - DNA, 25 bp, Canis familiaris
aacctagtttccatcctctgaatat

SEQ ID NO: 49457 - DNA, 25 bp, Canis familiaris
caacggaaatgtccttccttgtatt

SEQ ID NO: 49458 - DNA, 25 bp, Canis familiaris
aagcagctaaagatcctcagttgta

SEQ ID NO: 49459 - DNA, 25 bp, Canis familiaris
aagcggaaagtcaaccatcctggat

SEQ ID NO: 49460 - DNA, 25 bp, Canis familiaris
aagcgcgaatgctcgttatcctgtt

SEQ ID NO: 49461 - DNA, 25 bp, Canis familiaris
aagctggcactgtagagtatcccta

SEQ ID NO: 49462 - DNA, 25 bp, Canis familiaris
aagctccacttgaagctcactcagt

SEQ ID NO: 49463 - DNA, 25 bp, Canis familiaris
aagcctcatttctagtacctgttat

SEQ ID NO: 49464 - DNA, 25 bp, Canis familiaris
aagcctctttacattcctgtttatt

SEQ ID NO: 49465 - DNA, 25 bp, Canis familiaris
aaccatcttttgtcattgccatttc

SEQ ID NO: 49466 - DNA, 25 bp, Canis familiaris
aaccttttgcagtctactcattttt

SEQ ID NO: 49467 - DNA, 25 bp, Canis familiaris
aacctttatgcatttgactcttatt

SEQ ID NO: 49468 - DNA, 25 bp, Canis familiaris
aaccttctgtataataccattattc

SEQ ID NO: 49469 - DNA, 25 bp, Canis familiaris
aaccttgtgtattatgcagtcattt

SEQ ID NO: 49470 - DNA, 25 bp, Canis familiaris
aaccttctgaagtctgcattttata

SEQ ID NO: 49471 - DNA, 25 bp, Canis familiaris
aaccattcagatggctccatttaaa

SEQ ID NO: 49472 - DNA, 25 bp, Canis familiaris
aaccattctcgtcccatatataaag

SEQ ID NO: 49473 - DNA, 25 bp, Canis familiaris
aaccatcctcagtcacctagaagag

SEQ ID NO: 49474 - DNA, 25 bp, Canis familiaris
aaccatccacatctccttagagagt

SEQ ID NO: 49475 - DNA, 25 bp, Canis familiaris
aagccacctatccccttggaggtgg

SEQ ID NO: 49476 - DNA, 25 bp, Canis familiaris
aagccaccaagaccctgggaatcat

SEQ ID NO: 49477 - DNA, 25 bp, Canis familiaris
aagccatcgaaaacttccgaactgt

SEQ ID NO: 49478 - DNA, 25 bp, Canis familiaris
aagaacccagagtttccgaagcttg

SEQ ID NO: 49479 - DNA, 25 bp, Canis familiaris
aagaactccaggatttagacttctg

SEQ ID NO: 49480 - DNA, 25 bp, Canis familiaris
aaccaccacataatttgctaacttg

SEQ ID NO: 49481 - DNA, 25 bp, Canis familiaris
aaccatccacatcctgttaaatccg

SEQ ID NO: 49482 - DNA, 25 bp, Canis familiaris
aaccataatctattctgtatcacca

SEQ ID NO: 49483 - DNA, 25 bp, Canis familiaris
aaccatatgctttatttgatgtcaa

SEQ ID NO: 49484 - DNA, 25 bp, Canis familiaris
aaccatgatgttcacgtttcacaag

SEQ ID NO: 49485 - DNA, 25 bp, Canis familiaris
aagccaatttgaagcctttctcaag

SEQ ID NO: 49486 - DNA, 25 bp, Canis familiaris
aaccagtattgatgaaatcctcgag

SEQ ID NO: 49487 - DNA, 25 bp, Canis familiaris
aaccaggaccagaagaatcttagag

SEQ ID NO: 49488 - DNA, 25 bp, Canis familiaris
aagccaccaccaatgcaggagtgct

SEQ ID NO: 49489 - DNA, 25 bp, Canis familiaris
aagcatcctgcatatctgcgtatgt

SEQ ID NO: 49490 - DNA, 25 bp, Canis familiaris
aagccactactgttggcactgtttg

SEQ ID NO: 49491 - DNA, 25 bp, Canis familiaris
aagccgctgacttcaggcagcaggt

SEQ ID NO: 49492 - DNA, 25 bp, Canis familiaris
aagctccagattgcgggcaggatcc

SEQ ID NO: 49493 - DNA, 25 bp, Canis familiaris
aagcccgttgtgagaaggattcaga

SEQ ID NO: 49494 - DNA, 25 bp, Canis familiaris
aacctacttgtggcgaatggataaa

SEQ ID NO: 49495 - DNA, 25 bp, Canis familiaris
aagcctcgctttggcgtgggtatga

SEQ ID NO: 49496 - DNA, 25 bp, Canis familiaris
aaccatcctttggctgtttgctttg

SEQ ID NO: 49497 - DNA, 25 bp, Canis familiaris
aaccatctctggtccatgtgttcat

SEQ ID NO: 49498 - DNA, 25 bp, Canis familiaris
aagccttcatgagccatcattgtct

SEQ ID NO: 49499 - DNA, 25 bp, Canis familiaris
aagcctgttaaccacttgtctaaag

SEQ ID NO: 49500 - DNA, 25 bp, Canis familiaris
aagctgggaatatccttcttggagg

SEQ ID NO: 49501 - DNA, 25 bp, Canis familiaris
aagcgtggcgtgaactgcctttgga

SEQ ID NO: 49502 - DNA, 25 bp, Canis familiaris
aagcggcaggatcgacgcgcttctg

SEQ ID NO: 49503 - DNA, 25 bp, Canis familiaris
aagagggaaggcttggctaatgaaa

SEQ ID NO: 49504 - DNA, 25 bp, Canis familiaris
aagcaagggtgggtggtggcaataa

SEQ ID NO: 49505 - DNA, 25 bp, Canis familiaris
aaccaggacttcgtggtgtggatgc

SEQ ID NO: 49506 - DNA, 25 bp, Canis familiaris
caaccagggcatgctttggggacac

SEQ ID NO: 49507 - DNA, 25 bp, Canis familiaris
aagccagggctttgcatggggccca

SEQ ID NO: 49508 - DNA, 25 bp, Canis familiaris
aagcgcacataaattcagggtccca

SEQ ID NO: 49509 - DNA, 25 bp, Canis familiaris
aagctgagaaaagattgtgtcctgc

SEQ ID NO: 49510 - DNA, 25 bp, Canis familiaris
aagctggacaacatactgctgaccg

SEQ ID NO: 49511 - DNA, 25 bp, Canis familiaris
aagctggccatggtcaactgggccc

SEQ ID NO: 49512 - DNA, 25 bp, Canis familiaris
aagctgctccatggaactcttttct

SEQ ID NO: 49513 - DNA, 25 bp, Canis familiaris
aaccatccggatacttatctcttca

SEQ ID NO: 49514 - DNA, 25 bp, Canis familiaris
aaccatgaaggctctcgatgttcta

SEQ ID NO: 49515 - DNA, 25 bp, Canis familiaris
aagcactaaggatcacgtagttgaa

SEQ ID NO: 49516 - DNA, 25 bp, Canis familiaris
aagcattaagtgaccctgccacagt

SEQ ID NO: 49517 - DNA, 25 bp, Canis familiaris
aagaagaaaggctctttcaggagta

SEQ ID NO: 49518 - DNA, 25 bp, Canis familiaris
aagaagacaaagagccaccatgggt

SEQ ID NO: 49519 - DNA, 25 bp, Canis familiaris
aagccaggaaaagggcagcccggtg

SEQ ID NO: 49520 - DNA, 25 bp, Canis familiaris
aaccaccatatatcgtgcagtcggg

SEQ ID NO: 49521 - DNA, 25 bp, Canis familiaris
aagccccaacaaggccagtcaggac

SEQ ID NO: 49522 - DNA, 25 bp, Canis familiaris
aagcagctactaaaagccgtcagaa

SEQ ID NO: 49523 - DNA, 25 bp, Canis familiaris
aagctgtggccacatttcgtcatgt

SEQ ID NO: 49524 - DNA, 25 bp, Canis familiaris
aagcgtgcagctgatcatttggaag

SEQ ID NO: 49525 - DNA, 25 bp, Canis familiaris
aagcggcgctctagcattggcgcca

SEQ ID NO: 49526 - DNA, 25 bp, Canis familiaris
aagcaggcatagcagcaggccagct

SEQ ID NO: 49527 - DNA, 25 bp, Canis familiaris
aagcgatgaggctgcagtgcacaat

SEQ ID NO: 49528 - DNA, 25 bp, Canis familiaris
aagcgcagcaggtgcatcgccagca

SEQ ID NO: 49529 - DNA, 25 bp, Canis familiaris
aagcgcaagctggagcgcatctcgc

SEQ ID NO: 49530 - DNA, 25 bp, Canis familiaris
aagctgcgcatggcgcagcacctcc

SEQ ID NO: 49531 - DNA, 25 bp, Canis familiaris
aagcatggcatcaggtcattccgtt

SEQ ID NO: 49532 - DNA, 25 bp, Canis familiaris
aagctgtcatactgcttcttggtct

SEQ ID NO: 49533 - DNA, 25 bp, Canis familiaris
aagcatcctactcctgattttggct

SEQ ID NO: 49534 - DNA, 25 bp, Canis familiaris
aagcagttaccactctgttcatggc

SEQ ID NO: 49535 - DNA, 25 bp, Canis familiaris
aagcagtgggaacccattctgcctc

SEQ ID NO: 49536 - DNA, 25 bp, Canis familiaris
aagcagtgctgctaacatccattcc

SEQ ID NO: 49537 - DNA, 25 bp, Canis familiaris
aagagttgctgaccaacctctgcat

SEQ ID NO: 49538 - DNA, 25 bp, Canis familiaris
aagattatggaccacaccgtcaacc

SEQ ID NO: 49539 - DNA, 25 bp, Canis familiaris
aagaagtggaaacacgtatgaacca

SEQ ID NO: 49540 - DNA, 25 bp, Canis familiaris
aagtaggctttatccgtaggcacca

SEQ ID NO: 49541 - DNA, 25 bp, Canis familiaris
aagccagttttatccgtaagcaata

SEQ ID NO: 49542 - DNA, 25 bp, Canis familiaris
aagctaatttcgtcccttaagacat

SEQ ID NO: 49543 - DNA, 25 bp, Canis familiaris
aagcgcaatttcccggctaaatata

SEQ ID NO: 49544 - DNA, 25 bp, Canis familiaris
aagccctttctggtggcataacttg

SEQ ID NO: 49545 - DNA, 25 bp, Canis familiaris
aagctccttatccctcatgaaaatt

SEQ ID NO: 49546 - DNA, 25 bp, Canis familiaris
aagcccccatatcccagataaatat

SEQ ID NO: 49547 - DNA, 25 bp, Canis familiaris
aagctgacccctcggagttatatat

SEQ ID NO: 49548 - DNA, 25 bp, Canis familiaris
aagctctctacctgggcattatttc

SEQ ID NO: 49549 - DNA, 25 bp, Canis familiaris
aagcctgctagtaagggcatccaat

SEQ ID NO: 49550 - DNA, 25 bp, Canis familiaris
aagcctcgatgaaaggtgctaacac

SEQ ID NO: 49551 - DNA, 25 bp, Canis familiaris
aaccataatggttgtgtgctgtacc

SEQ ID NO: 49552 - DNA, 25 bp, Canis familiaris
aagccatgcttgcctatttgctgta

SEQ ID NO: 49553 - DNA, 25 bp, Canis familiaris
aagcgacatatgacaaactctgtaa
